United States Patent Application Publication US 2004/0029129 A1 - sequence listing, part 15

SEQ ID NO: 38747 - DNA, 1386 bp, Salmonella typhimurium
atgttaaaaatttttaatacactgacacgccaaaaagaggaattcaaacccattcatgccggggaagtcggcatgtacgtgtgtggtatcaccgtttacgatctctgccacattggccacggacgcacgtttgtcgcttttgacgttgtcgcgcgctatttgcgttttctcggttataagctgaagtatgtgcgtaacattaccgatatcgacgataaaattattaaacgcgccaatgaaaacggcgaaagttttgtcgcgctggtcgacagaatgattgcggaaatgcatcaggacttcgatgcgctgaatattctgcgtccggacagcgagccgcgtgcgacgcaccatattcaggaaattatcgagctcacccgaaccttaatcgagaaagggcacgcctatgtggcggataacggcgatgtgatgttcgatgtaccgaccgatccgacttatgggcagctttcccgtcaggatcttgagcagcttcaggcgggcgcgcgcgtagatgtcgttgacgtgaagcgtaacccgatggacttcgtgctgtggaaaatgtcgaaagagggcgagccgagctggccgtcgccgtggggcgaagggcgtccgggctggcacattgaatgttcggcgatgaactgcaagcagttgggcaaccattttgatattcacggcggcggttccgatctgatgttcccgcaccatgaaaacgagattgcccagtctacctgcgcgcatgacggcgaatacgtcaactactggatgcactccggtatggtgatggtggatcgcgagaagatgtccaaatcgctgggcaacttctttaccgtgcgcgacgtgctgaaatactacgatgcggaaaccgtgcgctacttcctgatgtccgggcattaccgtagccaactgaactacagcgaagagaacctcaagcaggcgcgcgcctcgctggagcggctatacactgcattgcgtggaacggataaatcagcggccccggcgggcggcgaggcgtttgaagcgcgtttcgtggaggcgatgaatgacgatttcaataccccggaagcctactccgtcctgtttgatatggcgcgtgaagtcaaccgtctgaagggcgaagatatgaccgccgcgaatgcgatggcgtctcatctgcggaagatttccggcgtgctgggactgctggagcaggagccggatgttttcctgcaaagcggcgcgcaggcggatgacggtgaagttgcggaaattgaagccttgattcaacagcgtctggatgcccgtaaagcgaaagactgggcggcggcggacgcggcgcgcgatcgtctcgctgaaatgggtattattctggaagatggcccgcagggcaccacctggcgacgtaagtaa

SEQ ID NO: 38748 - DNA, 1473 bp, Salmonella typhimurium
atggaacagaatatcgccaccgcccaggtttccgtcgcccgcccaaactgggacaaatcacgtctggtatcccgtattgtgcatctgggctgcggggcgtttcaccgcgcgcaccaggcgctctttacccatcatctactggaaaagagcgacagcgactggggcatttgtgaagtgaacctgatgccgggtaacgacgcgcggctgatcgcgaacctgaaagcgcaaaatctgctgtacaccgttgcagaacgcggcgcagaaagcaccgaactgaaaattatcggttcaatgaaagaagcgctacaccctgaattcgacggtcatgcagggattctggcggcaatggcgcgcccggaaaccgccatcgtctccttaaccgtgaccgaaaaaggctactgcaccgaccccgccagcggcgagcttgatgtcaataacccgctgatccaaaacgatcttgcccatccacagcagcctaaatccgccattggctatattgtcgaagcgctaaacatgcgccgggagcaaggactgaaagcttttaccgtgctgtcgtgcgataacgtgcgcgagaatggtcacgtcgcgaaggctgccgtcctcggcctggcgaaagctcgcgatgccgccctcgccgcatggattgccgacaatgtgaccttcccctgcaccatggttgaccgcattgttccggcagcgaccgaagagacgctacaactggttgccgaccagttaggcgtttatgatccctgcgctatcgcctgcgaacccttccgccagtgggtcatcgaagataactttgtgaatggtcgcccggactgggataccgtcggcgcgcaattcgttgcagatgtcgtaccgtttgagatgatgaagctgcgtatgcttaacggcagtcactctttcctcgcctatctgggttatctcggcgggtatgacactatcgccgatactatgactaacccggcttaccgtcgcgcggcgctggcgctgatgcttgatgaacaagcgccgacgttgtcaatgccggaaggcaccgatctggaagggtatgcgaatttgttgattgcgcgtttcactaacccctcgttgaaacaccgcacctggcagatcgcgatggatggcagtcagaaactgccgcagcgtttgttggacccggtacgtctgcacttgcaacagggcgatgactatcgccgcctgacgctgggcgtcgccggatggatgcgttatgtcggcggtgtcgatgagcaaggtaaaaccattgatgtcgtcgatccgctgcttgcacagtatcaggcgattcatcagcaatatcagacgccggaagaacgcgttcgcgggctactggccatcgagtctatctttggcaacgacctgccgaagaaccacgaatttgtgcaagccgttaccgacgcttaccaacagctattgcagaatggcgcgaaagccacggtagaagcgctggctaagtaa

SEQ ID NO: 38749 - DNA, 1002 bp, Salmonella typhimurium
atggacaattttcagaaagatattgatgacagggccaatttaaccctgtccaaccgttttgaactgctgttattccgtcttggtacatcgctgcatgaacagaagtcagagctgttcggcatcaatgtatttaagctgcgcgaaatcgtaccaatgcccgcctttacgcgcccggcaggcatgaaagcgccgctattgggcatggtcaatattcgggatcaggtcattccggtgattgatttgccagcggtagcgggctgcaagccggaaaccgggctgaatattttgctgatcaccgaatatgcgcgcagcgtacaggcatttgccgtcgagtcggtggaaaatattatgcgtcttgactggcaacaggtgcataccgccgagaaagccgtcaacggtcgctacatcaccagtattgcctgcctggatgacaacaaagaaaccaacaacctggcgctggtgctcgacgttgagcagatcctttatgatattgtcccctccagccacgatctgcgcgccaccaatctgaagaccaataaattttatattaccccaggcgcggtagccattgtggcggaagactccaaagtcgcccgcgcgatgctggaaaaagggctgaacgcgatgggaattccgcatcagatgcatgtgaccggcaaggatgcctgggagagaatccagcaactggcgcaggaagcggaggccgaaggtaagccaattagcgagaaaatcgcgctggtcctgacagatcttgagatgccggagatggatggctttacgttaacgcgtaaaattaaaaccgatgaacggctgaaaaagatcccggtcgttatccactcctcgctttccggcagcgccaatgaagatcatatacgtaaggtgaaggccgacggctacgtggctaagtttgagattaacgaactctcttcggtcattcaggaagtgctggagcgcgcagcaacaaacagccagggaccactgatcagccgcaaaagcgcctga

SEQ ID NO: 38750 - DNA, 894 bp, Salmonella typhimurium
atgcagattctgattaccggcggtacaggcctgatagggcgtcatctcattccccggctgttaacactggggcatcaggtgacggtcgttacgcgcaatcccgataacgcgcgtcagattctcgattccagagtgacattatggaaagggctggcggaacgtgagcacctcaatgagattgatgccatcatcaatctggcgggcgaaccgattgccgacaagcgctggacgtcgcaacaaaaagaacggttgtgccaaagccgctgggctatcacgcaaaagttggtggatttaattcatgccagcgcaacgccgccctcggtgttgatatccggctccgccacgggctattacggcgatctgggtgacgttgtcgtcactgaagatgagccgccgcacaacgaatttacgcataaactttgcgcccgctgggaacagattgcctgtcgtgcgcagagcgaccagacccgcgtctgcctgctgcgtaccggcgttgtcctggcgccgcaaggcgggattctggggaaaatggttccgccgtttcgcctcgggctcggcggtccggtgggtaatggtcggcaatatctggcctggattcacatcgacgatatggtcaacggcattctgtggctgctggataacgatcttcgcggtcccttcaatatggtctcgccgtatcccgtccataatgagcattttgctcatgcgctgggtcgcgcgctgcgccgtccggcgattattcgcattccggcgacggcaattcgcttattgatgggagagtcgtcagtgctggtgttgggcggacagcgggcgctgccaaaacggcttgaagccgccggattcgcatttcgctggtatgatttagaagaggcgctggcggatgtgattcgctag

SEQ ID NO: 38751 - DNA, 2622 bp, Salmonella typhimurium
atgcgtaatcagcttttcatgacgcgatattactccagcgtaactaaacccgtattaaccccgctggcgttggctatcgcactggcgcctgcgccggggtgggcggaaaactatttcaacccggcatttctgtctgacgacccgtctgcggtggccgacctatcgaccttttcccgtaatgcccaggcggcggggatgtatcgcgttgacgtttacctgaacaatacgtttctcgcaaccagagacattgccttccaggcggtgaaaacgacgggaaaaagcgcgcccaccgatgacagcggattacgcgcctgcctgacgcctgaaatgcttaaaaatatgggggtaaacaccggggcgtttccactgttggcgaaggcggcggcgggaagttgcccggatctcgccagtgcgataccggccgcccggacccgctttgattttgcgcagcaacgtctcgacattagcatcccgcaggcggcgatggttgccagcgccagaggctatatcccaccgaaatactgggatgaaggtattaatgcgttgctattgaattacacctttaccggcgcgaatagtcaggatcggagcccaggcggcagtgcggagaacagctattttcttggattgaatagcggccttaatctgggggcctggcggttacgcgactactccacatggaacgcgaatagcggcgatcagaatagcgacagcgactggcagcacatcagtacttatctggaacgtgatgtggtctttttgcagggagaactgacggcaggcgatagttataccccctccgcattattcgacagccttccttttcgcgggctacaactggcgtctgacgacaatatgttgccagacagcatgaagggcttcgcaccgaccattcacggcattgccagaagcaacgcgcaagtgaccattcggcaaaacggctacatcattaatcagcgctatgtgccgcccggggcatttactattaatgatctctatcctaccgccgccagcggcgatttgactgtggaagtcaaagagtccgacggttctattaatcgttataacgtgccctattccgccgtgccgattctacaacgagaagggcggctgaagtatgcggcgacggtggcggagtatcgcagcgatagtagtcaaaaagagaaggtgaaattcagtcaggcgaccttgatatgggggttaccgcatggttttacgctgtatggcggaacacaactttccagtcattatcacgcgctggcgatcggcagcggcgcaaatctgggcgactggggcgcggtgtcgctggatgtcacccaggctaccagtacgctggcggataataacacctaccaggggcaatcgctgcgtttcctgtatgccaaatcgcttgcacagtcaggaaccaatttacagcttatgggctatcgctattcaacctcgggcttttacacgttggatgataccacgtggaaacggatgagcggctatgacgatgacagtcggactgacagcgataaaagcaggccggaatgggcggattattacaacctttattacaccaggagggggaaagtacaactcgatatcaatcaacagctaggcgggttgggatcgctttttattaccggcagccagcaaagttactggcacactgatgaaaaggattctttgttgcaggtgggatacagcgatacgctggcgggtattgcatggagcgtttcttacaacaataacaaatccgcaggcgatgcggagcgcgatcaaattttcgcgctgaatatctcggtgccgctaagtcaatggctgcaacacggtgatgaggtcacgcgccatcacaatgtttacgctacctttagcaccagtacggacaaacagcataacgttacgcagaatgcgggccttagcggcacactgctggacgaaaacaatcttagttacaacatacagcaaggttatcagaatcacggtattggcgaaagcggcgccgctagcctggaatacgatggcgcgaaaggcaacgccaatattggctataacgttagcgataacggcgattaccagcaggtgaattatggcctgagtggcggcctggtggcgcacgcgcatggagtgacgctaagccagccgttaggcaataccaatattttgattgccgcgccgggcgcagccaatgtcggcgttgtcgaccagccgggtattcatacggacgcgcgtggctatgcggtggtgccgtatgcgacaacatatcgccaaaaccgtatggcgctggacgttaacgccatggcggatgatgtcgatattgatgacgcggtgactcgcgttgtgccgaccgaaggcgcgctggttctggcccgctttaaagcgcgggtcggcgcgcgtgccctggtaacgctgaatcataacggtaagcctgtaccctttggcgcaacggtgacggtgaatgatcgccatgcggaggcgattgttgacgaggccggggaggtctatctttccgggttgtcagcgcaaggcgttctgcacgttcgctgggggaacctaccggatcaacagtgcgtcgcgtcctatcatctctcttcctcccgtcagattctgagtcgacaacatgcggagtgtcattaa

SEQ ID NO: 38752 - DNA, 1494 bp, Salmonella typhimurium
atgaaaagaacagtcgttgccagtatgatagggttggcgctatgcgctggatgcgtattatcaaccgcgcaagcggcaaccgcaaagcgtcctaacttagtcattattctggcggatgatttagggtatggcgatctcgccacctacgggcaccgcatcgttaaaacacctaacatagacaaattggcgcaggagggggtgaagtttaccgactattatgcgccagcgcctctgtgttctccttcccgcgcgggcctgttaaccggtcgtatgccgttccgtaccggaatccgttcctggataccggaaggcaaagatgttgcgctggggcgtaatgaactgactatcgccaatctgctaaaacagcagggctacgatacggcgatgatggggaaattacacctgaatgcgggcggcgatcgcaccgatcagccgcaggcgaaagacatgggctttgactatacgttggttaatccggcgggatttgtcaccgatgctacgctggataacgccaaggagcgcccgcgctatggcgtggtgcatcctacggggtggattcgtaatggccaacatattggccgcgcagataagatgagcggcgagtttgtgagctctgaagtggtgaactggctggataataagaaagacgataatccgttcttcttatatgtcgcctttaccgaagtccatagcccgctggcgtcgccgaaaaaataccttgatatgtattcgcagtacatgaccgactaccagaagcagcatccggatctgttctacggcgactgggcagacaaaccgtggcgcggcaccggcgaatattacgccaatatcagctacatggatgagcaggtcggtaaagtgctggataaaattaaggcgatgggcgaggaagataacaccatcgtcatctttaccagcgacaacggccctgtcacgcgcgaagcgcgtaaggtatacgagctgaacctggccggggaaaccgacggtctgcgcgggcgtaaagacaacctgtgggaaggtggcattcgcgtaccggcaatcatcaaatacggcaagcacattccacaggggatggtaacggacacgccggtatatggtcttgactggttgccgacgctggccaacatgatggactttaaacttccgaccgatcgtacctacgacggtcagtctttagttccgctcctgaaggacaagactttaaaacgccagaaaccgctgatcttcggtatcgatatgccgttccaggacgatccgacggatgagtgggcgatccgcgacggcgactggaagatgatcatcgatcgccagaataaacctaaatatctctataacctgaaaaccgatcgtttcgagacgctcaatcaaattggtaaacagccgcagattgagaaacagctttacggtaagttcctgaagtataaaaaggatattgataacgattcgctgatgaaagcccgtggcgataagccgacgcctgtcacctggggctaa

SEQ ID NO: 38753 - DNA, 939 bp, Salmonella typhimurium
atgaagctgatacgcggcatacataatctcagtcaggccccgcatgggtgtgtgctgaccattggtaatttcgacggcgtacatcgggggcatcgcgctctactgcagggtttgcaggaagaaggacgcagacgcggtctgccggtggtggtcatgattttcgaaccgcagccgctggagctgttcgcgacggataaagcgcccgctcgcctgacgcgcctgcgtgaaaaactgcattaccttgcgcagtgcggcgtggactatgtgctgtgcgtgaaattcgatcgccgctttgccgctttgacggcgcaaacgtttatcagcgaactgctggtggagcgacttggcgtgcaatttcttgccgtcggcgatgatttccgctttggtgctagccgcgcgggcgatttcttgttattacagaaggcgggggcggagtatggttttgcggtttccagcacccaaaccttttgtgaaggcggcgtgcgtatcagtagtaccgcagtgagacaggcgctggcggaagataacctggcgcttgccgaaagtctgctgggacatccctttactatttccgggcgtgtcgttcatggcgacgagctgggacgtaccattggcttcccgacggcgaacttaccgctgcgccgtcaggtctccccggtcaaaggggtctatgcggtggaagtcaccgggcttggcgataagccgttacccggcgtagcgaacattggcactcgtccaacggtggctggcgtgcgtcaacaactggaagtgcatctgctggacgttgtaatggacctctacggtcgccatatagatgtaatactgcgtaaaaagatacgtaatgagcagcgatttgcgtcgcttgatgagctaaaagcgcaaatcgcacgcgatgagttaacggcccgcaagttttttgggctagccgggcaggtgtaa

SEQ ID NO: 38754 - DNA, 2835 bp, Salmonella typhimurium
atgagtgactataaatcgaccctgaatttgccggaaacagggttcccgatgcgcggcgacctcgccaagcgtgaaccgggaatgctggcgcgttggaccgatgatgatctgtacggcatcattcgtgcggccaaaaaaggcaaaaaaaccttcattctgcatgatggccctccatatgcgaatggcagcattcatattggtcactcagttaacaagattctgaaagacattatcgtgaagtccaaaggactgtcgggatttgactcgccttacgtgccgggctgggactgtcacggtctgcctatcgagttgaaagtcgagcaggagttcggtaagccgggcgagaaattcactgccgctgaattccgcgccaagtgccgcgaatatgccgctacgcaggttgacggccagcgtaaagacttcattcgtctgggcgtgttgggcgactggtcgcatccgtacctgaccatggacttcaaaaccgaagccaacatcatccgcgcgctgggcagaattatcaaaaacggtcatctgcacaaaggcgctaagccggtgcactggtgcgttgactgccgttccgcgctggcggaagcggaagttgaatattacgacaaaacgtcaccgtctatcgacgtggcgttccgcgccgtcgatcaggatgcggtgaaagcgaagttcggtctgccgggcgtgagcggccctgtgtcgctggttatctggaccaccacgccgtggacactaccggctaaccgcgccatctccctggcgccggactttgattatgcgctggtgcagattgacggccaggcggtgattctggcgaaagatctggttgaaagcgtcatgcagcgtattggcgcggctgaatacaccattctcggcaccgttaaaggcgcggagctggaactgctgcgctttacccatccgtttatgggctttgacgtgccggcgatcctcggcgatcacgtcaccctggacgccggtaccggcgcggtacataccgcccctggccacggcccggatgactatgtgattggtcagaaatacggtctggaaaccgctaacccggttggcccggacggcacttacctgccaggcacatatccaacgcttgacggtgttaacgtcttcaaggcgaacgatatcgttattgaactgctgaaagaaaaaggcgcgctactgcatgtcgaaaaaatgcagcacagctatccgtgctgttggcgtcacaaaacgccgatcattttccgcgcgaccccgcagtggttcgtcagcatggataaagaagggcttcgtcaacagtccctgaaagagatcaaaggcgttcagtggatcccggactggggtcaggcgcgtattgaatcaatggtcgctaaccgtcctgactggtgtatctcacgtcagcgtacctggggcgtaccgatgtcgctgttcgtgcataaagaaacgcaggagctgctgccgattgagcgtactctggcggcgatggaagaggtggcgaaacgcgttgaagttgacggtatccaggcgtggtgggatctcgacccgaaagagatcctcggcgaagatgccgatcaatacgagaaagttccggatacgttggacgtttggtttgattccggttccaccagttactccgtggttgatgcacgtccggaattcgccggtcatgctgccgatatgtatctggaagggtctgaccagcatcgcggctggtttatgtcctccctgatgattagcgtggcgatgaaaggcaaagcgccataccgccaggtactgactcacggcttcaccgtcgatggtcaggggcgcaagatgtccaagtccatcggtaacaccgtgtcgccacaggatgtgatgaataaactgggcgcggatatcctgcgtctgtgggtggcgtctactgactataccggcgaaatggcggtctctgacgaaatcctgaaacgtgctgccgacagctatcgtcgtatccgtaataccgcgcgcttcctgctggcgaacctcaatggcttcaatccggccaccgatatggtcaaaccggaagagatggtggtgctggacaggtgggcggtgggctgcgcgaaaacggcgcagcaagagattctgaaggcatacgaagcttacgacttccatgaagtggtacagcgcctgatgcgcttctgctccgttgaaatgggttcgttctacctcgacatcatcaaagaccgccagtacaccgcgaaggccgatagcgtcgcgcgtcgtagctgccagactgcgctgtatcatatcgcagaagcgctggttcgctggatggcgccgatcatgtccttcacggctgatgaaatctggggctacctgccgggcgagcgtgaaaaatatgtcttcaccggcgaatggtacgacgggttgtttggcctggaagagaatgaagaatttaatgacgcattctgggacgatgtccgctatatcaaggaccaggtcaacaaagagctggaaaatcagaaagccaatggcatcaaatcgaacctggaagcaaaagtgacgctgaaatatgctgacgatgctaacggtacgatcaagaagctgaaactgttgggcgaagaggtcagatttatcttcattacttcccagttcgtgatttctgagcaagcggggggtattgatgatgaaaatattcagtacaatgctggtaatacgacagttcaggcagtggtaacgcgtgccgagggtgataagtgtccgcgctgctggcactacactactgatgtcggcaaggtggcggaacatgcagatatctgcggacgctgtgtcagcaacatcgccggtaatggcgaacaacgtaaatttgcctga

SEQ ID NO: 38755 - DNA, 921 bp, Salmonella typhimurium
atgacagcatccctacacattattcttgataccgatccgggcattgatgacgcggctgcgattgccgctgcgctgttcgccccccagcttgatctgcaactaataaccaccgtcgcaggtaatgtttccgttgaaaaaacgacccgtaatgcgttgcagcttctgcatttctggaacagcgatatcccacttgcccagggggccgcgacaccgctgctgcgtccgttacgcgatgcggcatacgtccacggcgaatccggtatggaaggctatgattttgtcgaccatcagcgccaaccgttggcgaagcctgcgtttatcgctatccgggatgtgctgatgaacgccccggagcccatgacattagtggcgattgggccattgaccaatattgcgttgctactgatgcactatccggagtgtgcgtgtaacattcgccgtctggtgttgatgggcggttccgcagggcgcggcaattttacgcctaatgctgaatttaacattgctgtcgatccggaggccgcggcgctggtgttccgcagcggtctggagattgtgatgtgtgggctggacgttacaaatcaggcaatgctctcgccagattttctgaataaactgcccgcgctgaatcgcaccggtaagatgttgcacagcctgttcaaccattatcgcagcggtagtatgcgcactggcgtccggatgcacgatctctgcgctatcgcctggctggtgcgtccggagctttttaccctgcaatcctgttttgtggccgtagaaacgcaggggcaatataccgccggtaccacggtggtggatattgaagggcgtctggggcagcccgccaacgcgcaggtggcgctggcgctggatgtggacggttttcgtcagtgggtggctgaggtgtttgcctatgcgccgtaa

SEQ ID NO: 38756 - DNA, 924 bp, Salmonella typhimurium
atggaaaaaaatggtctgtttagtcagcgcattcggttgcgccaccttcatacatttgtcgccgttgcgcaacagggaactctggggcgcgcggctgaaactcttaacctgagccagccagcgctttctaaaacgctgaacgaactggaacaactcaccggaacccgtctgtttgaacgcgggcgactgggcgcgcaattaacggttcctggcgaacaatttttgactcatgcggtaaaagtattagatgcattgaataccgccgggcaggcgctgaatcgcaaagaggacgctagcgccgatgtggtgcgtgttggcgcgctccccaccgctgcgctgggtatactcccggcggctattgggcggttccatcaacagcaaaaatcgacctcgttacaggtcgcgaccatgaacaatacgatgttgcttgcgggtcttaaatcaggcgagatcgatctgggtattggccgcatgtcagacccggaattaatgggcggtttaaattacgaactgctgtttttagaatcgcttaaattagtggtacgccccggtcatcccctgttacaggagacgatcacgctcagccgggttatggaatggccggtagtcgtctcgccaaaaggcacggtaccgcgccagaatgcggaagccctgttgcaaagccaggggtgtaaaatgcctgccggatgtatcgaaacgctatccgcatcgttatcacgacaactgaccgtagattacgattacgtctggttcgtcccctctggcgcggttaaagaagatcttcgccaggcgacgctggtctcattacccgtgccgacccagagcgcgggcgagccgataggtattcttacgcgagttgatatcccgctctcaaccggggcgcaaatgctgattgcggcgatccgtaaatcgatgccgctgtga

SEQ ID NO: 38757 - DNA, 1314 bp, Salmonella typhimurium
atggtcatgagccagaaaaccctgtttacaaagtctgctctcgcagtcgcagtggcaatcatctccacccaggcctggtctgcaggctttcagttaaacgaattttcttcctctggccttggccgggcctattcgggtgaaggcgcaatcgcagatgatgcgggtaacgttagccgcaacccggcgttaattaccatgtttgaccgcccgacgttttcagcgggcgcggtttatattgatcctgatgttaatattagcgggacatcgccatctcgtcggacgttagatgcggataacatcgcgccgacggcctgggtgccgaacgtccattttgtcgccccgattaacgaccagtttggctggggggcttctattacctctaactatggtctggcgacagagtttaacgacacatacgccggcggctcggttggcggtacgaccgatcttgaaaccatgaacctgaatttaagcggcgcttatcgcttaaatgaggcctggagcttcggcctcggctttgatgcggtatacgcgcgtgcaaaaatcgaacgttttgcgggcgatttaggccagttggtcgcggcacagaatccggcgctggcgccggtcgcgggtcagattcccagcgacaccaagattgcccacctgaacggtaatcagtggggctttggctggaatgccggtatcctttatgaactggataaaaataaccgctacgcgctgacctaccgctcggaagtcaaaattgactttaaaggcaactacagtagcgatcttcccatcgctataaaccgatttaacctgcctatcccaacggcaaccggcggcgcaacgcagtcaggctacctgacgctgaatctgccggaaatgtgggaagtgtccggttataaccgtgtggcgccacagtgggccatccactatagcctggcctataccagctggagccagttccaggaattgaaggcaaaatcgaccgccggcgatacgctctttgagaagcatgaaggctttaaagacgcttatcgcattgcgttgggtaccacctattactacgatgacaactggacgttccgtaccggtatcgccttcgatgacagcccggtaccagcgcaaaaccgttctatctctattccggaccaggaccgtttctggctgagcgccggtacgacttacgcctttaacaaagatgcgtctgtcgacgttggcgtctcttatatgcatggtcagagcgtgaaaattaatgaaggcccttatcagtttgaatctgaagggaaagcctggctgttcggtactaactttaactacgcgttctaa

SEQ ID NO: 38758 - DNA, 1521 bp, Salmonella typhimurium
atgaaagagactgtaaccatgctcaaccagcaatatgtcgtaccggaaggattacagccctaccagggggtaacagcgaacagcccgtggcttgccagtgaaacggaaaagcgtcggcgtaaaatttgtgactcgcttgaagaggctatccgtcgttccgggcttaaaaatggcatgacgatatccttccaccatgcgtttcgtggtggcgacaaagtcgtcaatatggtgatggcgaagctggcggaaatgggattccgcgatctgacgcttgcctccagctcattaattgatgcccactggccgcttatcgaacacattaaaaatggcgtggtgcggcagatttacacctccgggctgcgcggcaagttaggggaagagatctccgctggcctgatggaaaacccggtacagatccactctcacggcggccgcgtaaagctgattcagagcggtgagctgaatattgatgtcgctttcctcggcgtgccgtgctgcgatgaatttggtaatgctaacggctttagcggcaagtcacgctgcggctctttggggtatgcgcaggttgatgcgcagtacgctaaatgtgtggtgctcctgactgaagagtgggtcgaattccccaattatccggccagtatcgcgcaggatcaggttgatttgatcgtacaggtggacgaagtaggggatccggaaaaaatcaccgcgggtgcgattcgtctgtccagcaacccgcgtgaactgttgatcgcccggcaggcggccaatgtgatcgaacactcaggttatttttgtgatggtttctcgctgcaaaccggcaccggtggcgcttctctggcggtcacccgtttcctggaagacaaaatgcgtcgccacaacattacggcgagttttggcctgggtgggatcaccggcaccatggtggatctgcatgagaaagggttgatcaaagcgctgctggatacgcaatcattcgatggcgatgcagcccgttcgctggcgcagaacccgcatcatattgaaatttcgaccaatcaatacgctaaccccgcctctaaaggcgcggcatgcgaacgcctgaacgtggtgatgctgagcgcgctggaaattgacgtgaattttaacgttaacgtgatgaccggttcaaacggcgtactgcgtggcgcatcgggcggccatagcgatacggcagcaggggccgatctcaccattattaccgcaccgctggtccgtggccgaatcccatgcgtggtggaaaaagtgctgactaccgtcacgcctggggcaagtgttgatgtgctggttaccgaccatggtattgcggtgaaccccgcgcgtcaggatctgcttgataacctgcgtgctgcgggcgtggcgctgatgaccatcgaacaactgcaacagcgcgctgagcaactgaccggtaaaccgcagccgattgagtttaccgatcgggtggtggctgtggtgcgttatcgcgacggttcagtgattgacgtgattcgccaggttaaaggctga

SEQ ID NO: 38759 - DNA, 822 bp, Salmonella typhimurium
atgcatgaagcacaaatccgcgtcgccattgccggcgccggtggccgcatgggacggcagttaatccaggccgccatggcgatggaaggtgttcagctgggtgccgcgctggagcgcgaaggctcttccttgctgggcagcgatgctggcgaactggcaggggcgggaaagtccggcgtgatcgttcaaagcagccttgaggcggtaaaagatgattttgacgttttcatcgattttacccgtccggaaggcacgttgacgcatctggcgttttgccgccagcatggtaaagggatggtgattggtactaccggctttgacgacgccggtaaacaagccattcgcgaggcgtcacaagagattgcgatcgttttcgccgcaaactttagcgtcggcgttaacgtcatgctcaagctgctggagaaagccgcgaaggtaatgggcgactatagcgatattgaaattattgaagcgcaccaccgccataaagtggatgcaccgtcgggtacggcgctggcaatgggcgaggcaatcgccggggcgctggataaaaatctgaaggactgcgcggtctactcgcgtgaaggttataccggcgagcgcgtagcgggcacgattggctttgcgaccgttcgggcgggcgacatcgtcggcgaacataccgcgatgtttgccgatattggcgagcgcgtagagattacgcataaagcttccagccgcatgacgtttgcaaatggcgcgttgcgatcggcgttatggctaaaaacgaagaaaaatgggctatttgacatgcgggatgtgctggggctggatgtattatag

SEQ ID NO: 38760 - DNA, 1149 bp, Salmonella typhimurium
ttgattaagtcagcgctattggttctggaagacggaacccagtttcacggtcgggccattggggcaacgggttcggcggttggggaagtcgttttcaatacttcaatgaccggttatcaagaaatcctcactgatccttcctattcccgccaaatcgtcactcttacttatccccatattggtaatgtcggcaccaataaagccgatgaagaatcctctcaggttcatgcgcaaggtttagtgattcgcgatctgccgttgattgccagcaacttccgtaacaccgaagacctctcttcttacctcaaacggcataacattgtggcgattgctgatatcgatacccgcaagctgacccgactgctgcgtgagaaaggcgcacagaacggctgcatcattgcaggcgatagcccggatgcgaagctggcgctggaaaaagcgaaagcatttcctggacttaacggtatggatctggcgaaagaagtgaccacggcggaaacttaccgctggacgcagggtagctggacgctgaaagacggtttaccggaagcgaaatctgaggatgacctgccgttccatgtggtggcctatgatttcggcgcgaagcgcaacatcctgcgtatgctggtggatcgcggctgccgcctgacggtggtgccagcgcaaacctctgctgaagaggtgctgaaaatgaatccggacggcatcttcctgtcaaacggccctggcgacccggctccgtgcgactacgcgattactgctatccagaaattcctcgaaaccgacattccgctatttggcatctgcctcggtcatcagctactggcgctggcgagcggtgcgaagaccgttaagatgaagttcggccatcacggcggcaaccatccggtaaaagatatggacagaaacgtggtaatgatcaccgcgcagaaccacggctttgcggtggatgaagactcgctgcccgccaacctgcgcgtgacccacaagtcgctgttcgacggcaccctgcaagggattcaccgtaccgacaaaccggcgttcagcttccagggccacccggaggcgagccccggcccgcacgatgcggcgccgctgttcgaccactttatcgagcttattgagcaataccgtcagtccgcgaaataa

SEQ ID NO: 38761 - DNA, 3228 bp, Salmonella typhimurium
atgccaaaacgtacagatataaaaagcatcctgattctgggcgcgggcccgattgttatcggtcaggcgtgtgagtttgactactccggcgctcaggcgtgtaaagccctgcgcgaagagggctatcgcgtcattctggtgaactccaacccggccaccatcatgaccgacccggaaatggccgatgccacctacatcgagccgattcactgggaagtggtgcgcaaaatcattgaaaaagagcgtccggatgcggtgctgccgaccatgggcggccagaccgcgctgaactgcgcgctggagctggagcggcagggcgtgctggaagagttcggcgtcaccatgattggtgcgaccgccgacgccattgataaagccgaagaccgtcgtcgcttcgatatcgcgatgaagaaaattggtctcgacaccgcgcgttccggtatcgcgcacactatggaagaagcgctggcggttgccgctgacgtgggcttcccgtgcatcatccggcctagctttaccatgggcggcaccggcggcggtatcgcttacaaccgtgaagagttcgaagaaatctgcgaacgcggtctggacctctcgccaaccaacgagctgctgattgatgaatcgctgatcggctggaaagagtacgagatggaagtggtgcgtgataaaaacgacaactgcatcatcgtctgctctatcgaaaacttcgatgcgatgggtatccacaccggtgactccatcaccgtggccccggcacagacgctgaccgacaaagaataccaaatcatgcgtaacgcctcgatggcggtactgcgtgaaatcggcgtcgaaaccggcggttctaacgtccagttcgcagtgaacccgaaaaacggccgtctgatcgttatcgaaatgaacccgcgcgtatcccgctcctcggcgctggcgtcgaaagccaccggtttcccgattgccaaagtggccgccaaactggcggtaggttacacccttgacgaactgatgaacgacatcaccggcgggcgcactccggcctccttcgagccgtccatcgactatgtggttactaaaattccgcgctttaactttgagaaattcgccggtgccaacgaccgtctgaccacccagatgaaatcggtcggagaagtgatggcgattggccgcacgcagcaggaatccctgcaaaaagcgctgcgcggcctggaagtcggcgccaccggttttgacccgaaagtgagcctcgacgacccggaagcgctgaccaaaatccgccgcgagctgaaagacgcgggcgcagatcgtatctggtacatcgccgatgctttccgcgcaggcctctccgtcgatggcgtctttaacctgaccaacatcgaccgctggttcctggtgcaaattgaagagctggtgcgtctggaagagaaagtggctgaagtcgggattactggcctcaacgccgacttcctgcgtcagctcaagcgtaaaggttttgccgatgcgcgtctggcaaaattggcgggcgtgcgcgaggcggaaatccgcaaactgcgcgaccagtatgacctgcacccggtctacaagcgtgtggatacctgcgcggcggaattcgccaccgacaccgcctatatgtactccacttatgaagatgagtgcgaagcgaacccgtccattgaccgcgataaaatcatggtcctcggcggcggcccgaaccgtatcggccagggtatcgaatttgactactgctgcgtacacgcctcgctggcgctgcgcgaagacggttacgagaccattatggtcaactgtaacccggaaaccgtctccaccgactacgacacttccgaccgtctgtacttcgagccggtcacgctggaagacgtgctggaaatcgtgcgcatcgagaagccgaaaggcgttatcgtgcagtacggcggccagacgccgctgaagctggcgcgcgcgctggaagcggcaggtgtgccggtaatcggcaccagcccggacgccatcgaccgcgcggaagaccgcgagcgcttccagcacgcggttgaccgtctgaagctgaagcaaccggccaacgccaccgtcaccgccattgaacaggctgtcgaaaaagcgaaagagatcggctacccgctggtggtacgtccttcttacgtgctgggcggtcgggcgatggaaattgtctatgacgaagccgacctgcgtcgctacttccagacggcggtcagcgtctctaacgatgcgccggtgctgctggaccgcttccttgatgacgcggttgaagtggacgtggacgctatctgcgacggcgaaatggtgctgattggcggcattatggagcacattgagcaggcgggcgtacactccggcgactccgcctgttccctgccggcctacacgctgagccaggaaattcaggacgtgatgcgccagcaggtgcagaagctggccttcgagttgcaggtgcgcggcctgatgaacgtgcagtttgcggtcaaggacaacgaagtctacctgattgaagtcaacccgcgtgcggcgcgtaccgtaccgttcgtctccaaagccaccggcgttccgctggcgaaagtggcggcgcgcgtgatggccggcaaatcgctgaccgagcagggcgtgacccaagaaattatcccgccgtactactcggtgaaagaagtggtgctgccgttcaacaaattccccggcgttgacccgctgttagggccagaaatgcgctccaccggggaagtgatgggcgtgggccgtaccttcgcggaagcgttcgctaaggcgcagctgggcagtaactccaccatgaagaaacagggccgtgcgctgctctccgtccgcgaaggcgacaaagagcgcgtggtggatctcgccgccaagctgctgaaacagggctttgagctggatgccacccacggtacggcgattgtgctgggcgaagccggtatcaacccgcgtctggtgaacaaggtgcacgaaggtcgtccgcacattcaggaccgtatcaagaatggcgaatatacctatattatcaacaccaccgcaggtcgccgcgcgattgaagactccagggtgattcgccgcagcgcgctgcagtataaagtgcattatgacaccacgctgaacggcggttttgccacgacgatggcgctcaatgccgatgccaccgagaaggtaacctcggtgcaggaaatgcacgcgcagatcaaaaagtcgtaa

SEQ ID NO: 38762 - DNA, 921 bp, Salmonella typhimurium
atgtttcctcaaagcaaattttcacgcgcgtttttgcacccgcgctactggctgacgtggtttggcgttggcatcctctggttactggtgcagcttccctacccggttttgcgttttctgggcacccgcaccggtaaactggcgcgccccttcctgaagcgacgtgagtcaatcgcccagaaaaatattgaactctgttttccgaccctctcccgggaagaaagggaaaaactgatcgccgagaatttccactctcttggcatggcgctgcttgaaacgggcatggcctggttctggcctgatagccgggttcgcaaatggtttgatgtggacgggctggacaaccttacccgtgcgcaggcgcaaaatcgcggcgtaatggtcgttggcgtgcattttatgtcgctggaattgggaggccgggtaatgggtctctgccagccgatgatggcgacctatcgtccgcataacaatccgctcatggagtgggtgcagacgcgcggtcgtatgcgctcaaataaagcgatgatcggcagaaacaatctgcgcggcattgtgggcgcgctaaaaaaaggggaagccgtttggtttgctcccgaccaggactacggccctaaaggcagctcctttgcgccatttttcgcggttgaaaacgtcgccaccaccaacggcacctatgtactgtccaggctgtctggcgccgccatgttgaccgttacaatggtaaggaaatccgataactcgggttatcgtctgtatattacccctgaaatggaaggttacccggcagatgaaaatcaagccgctgcctatatgaataaaattattgagaaagagatcatgcgcgccccggagcaatatctctggatccatcgccgtttcaagactcgcccgttgggggaagcgtcactctacatctga

SEQ ID NO: 38763 - DNA, 1236 bp, Salmonella typhimurium
atgttccacccgcgtgcccgaacgatgctgctgctgtcgctccccgcgctgattattggcgtagcgtcaagcctggttttaatcgctgcgatgaaagtcgcgtcggtttttcagcaatttctttggcaacgactgcccaccagcatcggcatcgcttatgattcgccgttctggatagtgggtatgctcacgctaaccgggatcgtggtgggtttgattatccgttacagtcccggacacgctggccccgatccggccatcgaaccgttaatcagtatgccggtctcgccatctgcgctacccgggctgcttctcgccttaatcatcggccttgctggtggggtaagtttggggccagagcatccgataatgacaataaatatcgcgctggcggcggctttcggctcccgcctgtttccgcgtatcacggcgttagactggacgattctggcctcagcgggcaccatcggcgcgctgttcggcacgcccgtcgccgcagcgctgattttttcgcaaacacttagcggctctaacgatattcccatgtgggatcgcctgtttgcgccgttaatggcggcagcggcggggtcactcaccaccagtctgttctttcatccgcatttttcgttacccatcgcccattacacgcagatgcggctggtggacattgccagcggagcgatcgtcgcggcgatcgccattgccgccgggatggtcgccgtctggtgccttccgcgtctgcatgagttgctgcaccgcctgaaaaatccggtcctgattctcggcattggcggttttatactgggtattctgggcgtcattggcgggccgcttaccctgtttaaaggcctggacgaaatgcaacaaatggcgtttagccagacgctgggcgcgggagattattttaccttagccgtcgtcaaactcgccgcgctggtcatcgcggcggcgagcggctttcgcggcgggcgcatttttccggctgtgtttatcggcgcggcgctggggctcatgctccatgcccatgttgaggccgtacccgcggcgattaccgtctcctgcgcgattcttggcttagtgctggtagtgacgcgcgacggctggctcagtctgtttatggcggcagtcgtcgtaccggataccaatctgctgccgctgctctgcattgtgatgctccccgcctggctattgctggcgggaaaaccgttgctggccgccaaccgtcacgaaccctaa

SEQ ID NO: 38764 - DNA, 999 bp, Salmonella typhimurium
atgatttatcagcccgatgagaatcgttatcacacaatggagtatcgtcgctgcggacgcagcggcgtcaaacttcccgctatttcgctggggttatggcacaacttcggcgatacgacacgggtagaaaatagccgggcgctgctgcaacgcgcgttcgatctgggcattacccactttgatctcgccaataattatgggccgccgccgggctccgcagaatgcaattttggccgcattctgcaggaagattttttaccgtggcgtgatgaattgatcatctccaccaaagcgggctacaccatgtgggatggcccttatggcgactgggggtcacggaaataccttatcgccagcctcgatcaaagcctgaaacgtatggggctggagtatgtcgatatcttttatcaccatcgtcccgatcccgaaacgccgcttaaagagacgatgaaagcgttagatcaccttgtgcgccatggcaaagcgttgtacgtggggatctctaactatcctgccgatctggccagacaagctatcgatattctggaggatctcggcacgccttgcctgattcatcagcctaaatattcgctttttgagcgttgggtagaggacgggctgctggcgctgttgcaggaaaaaggcgtcggtagtattgccttctcgccgctggcgggcgggcagctcactgaccgttatttgaatggtattccggaagattcccgcgcggcgagcggaagccgtttccttaaaccagaacagattaccgccgacaaactggaaaaagttcgccggttgaatgaactggctgcgcgacggggtcaaaaattgtctcagatggcgctcgcctgggtgctgcgtaacgataacgttacctcggtactgattggcgccagcaaaccgtcgcaaatcgaagacgccgtgggaatgctggccaatcgccgtttttcagcggcggaatgtgcagaaattgacgctattctggagggccggttttag

SEQ ID NO: 38765 - DNA, 435 bp, Salmonella typhimurium
atgaacagaacgattcttgtacccatcgatatttcagattcagaattaactcaacgcgtgatttcgcatgttgaagctgaagcaaagattgacgacgctaaagtgcactttttgactgtaatcccgtctttgccctattacgcttcactgggactggcttattcagcagagcttcccgcaatggacgatttgaaagccgaagccaaatctcaactggaagcgattatcaagaaattcaaccttcccgcggaccgcgtgcaggcgcacgttgcagaaggctctcctaaagataagattctggaaatggcaaaaaaattaccggccgatatggtgattatcgcctcgcatcgcccggatattactacctatctgttgggttccaacgccgcagccgttgtgcgtcatgcggaatgctccgtactggtggtacgctaa

SEQ ID NO: 38766 - DNA, 480 bp, Salmonella typhimurium
atgatcagtctgattgcggcgttagcggtggatcgcgtcatcggtatggaaaacgccatgccgtggaacctgcctgccgatctcgcctggtttaaacgtaacacgttaaataaacctgtcgtcatgggacgtcacacctgggagtccatcggacgccccttaccgggacgtaaaaatattgttatcagcagccagccaggcaccgacgatcgcgtgcagtgggtgaagtctgtcgatgaggcgattgccgcttgcggcgatgcgccggaaattatggtcattggcggcgggcgcgtgtacgagcagttcctgccaaaggcgcagaagctttatctgacgcatattgatgcggaagtcgaaggcgatacccattttccggattatgaaccggatgactgggaatcggtattcagtgagtttcacgatgccgacgcgcagaattctcacagctattgtttcgagattctggagcgtcgttaa

SEQ ID NO: 38767 - DNA, 516 bp, Salmonella typhimurium
atgctgagattacttgaagagaagatagccacgccattaggaccgttatgggtggtttgcgatgagcagtttcgactgcgggccattgagtgggaacagtaccgcgatcgtatggagcaactgctaaatatccactaccgtcacgaaggctatgaacgcgtttctgcgactaaccccggtggactcagcgataagcttgcagattattttgcaggcaatctcgccgtaattgataccctggaaaccgccacggggggcacaccttttcaacgggaagtatggcaggcattgcgcgctatcccctgcgggcaggtgatgcactatggtcaactggcggcgcaactgggacgaccgggcgccgcacgcgcagtcggtgctgcgaatggtgctaaccccatcagtattgttgttccctgccatcgcgtcatcgggcgtaacggcactctgaccggatacgcaggcggcgtgcagcgaaaagagtggctattacgccatgaaggctatcttttattatga

SEQ ID NO: 38768 - DNA, 1032 bp, Salmonella typhimurium
atgttcactgaattttttctcaaaaacgcatttaatctggcgatacttttcagttgcggtatggcgttgctggtcgtgagattttggctcagccgtaacgtacagtggaagaaaggattcacgttccatgcggcacagttttttatttatgcaattattattgggaccatcgggagcatcctgaataatgctattgaagattataatttgcgttttatctcttccggggtcattgattttatctgcacctcgctcattgcgcttattctgacgataaaacttttcctgattattaaccaatttgaaaaagcacaggtcaataaaggtagagatgtcaccagtacccgtattctggcacgggtcataaaaataaccattattgtcgcgattgtcttactgtatggcgaacattttggcatgagtctgtccggtctgctgacctttggcggtatcggcggtatcgctgttggtatggcgggcaaagatgtcctgagcaattttttctccggtattatgctctatttcgatcgccccttcagtatcggagactggattcgttctcctgacagaaatatcgaaggtacggtcgccgaaatcggctggcgaattacgcgaattaacacattcgaccaccgcccgttgtacgtgcctaattccgtcttttcatccattagcgttgagaatccgggacggatgaccaaccgtcgaataaaaacggttattgggttacgttacgaagatgccgacaaaattggcctcattgttgacgctatcagaaacatgttgcaggcgcacagagatatcgatcagaaacagacgctgttggtctattttaatgaattcgccgactcttcgctgaatattatggtgtattgctttaccaaaacaacagtatggcaggaatggcttgccgtacagcaggatgtttacctgaaaattattgcgattgtccaggaaaacggcgctgacttcgccttcccaagccagacgctctatatcgatgacccggaggccgcgcctgcgacaaaataa

SEQ ID NO: 38769 - DNA, 846 bp, Salmonella typhimurium
atggctgaaacgcaaaatgatccgctattgccgggatattcatttaatgcccatctggtcgccgggctgacgccaattgaagcgaatggatatctggatttttttatcgatcgtccgttgggcatgaagggatatattcttaacctgaccatccgcggagagggcgtcattaataataatggcgagcagtttgtctgtcggcctggcgatatattattgtttccgccgggcgagattcatcactatggacggcatccggacgccagcgagtggtatcaccagtgggtttatttccggcctcgcgcctactggcaggagtggctgacctggccgacaatctttgcccagacaggatttttccgcccggacgaggcgcgccagccgcatttcagcgaactgttcgggcagatcatcagcgccgggcaaggggaaggtcgctattctgagctactggcgatcaatctgctggagcagttgttgctcagacgtatggcggtaattaatgagtcgttgcacccgccgatggatagccgtgtgcgcgatgcctgccagtatatcagcgaccatctggcggacagccattttgatatcgccagcgtcgcccagcatgtctgcctgtcgccctcccggttatcacatctgttccgccagcagttaggcattagcgtattgagctggcgcgaagatcagcgtatcagccaggcgaaacttctgcttagcactacgcgaatgccgatagcgaccgttgggcgcaatgttggatttgacgatcagctctatttttcgcgggtatttaaaaaatgcaccggggcaagtcctagcgagttcagggccggatgtgaataa

SEQ ID NO: 38770 - DNA, 420 bp, Salmonella typhimurium
atgaagaaaggcaccgtactcaactctgaaatctcgtcggtcatttcccgtctggggcatactgatactctggtagtctgtgatgcgggtttacccatcccgaatagcaccgcgcgtatcgatatggcactaacccagggcgtaccttcttttatgcaggtggtggatgtcgtgacccgggaaatgcaggttgaggcggcgattcttgcaacggaaatcaaacaacagaatccgcagctccacgaaacgttgctcactcaccttgagcaactgcagcaacaccagggaaacaccataaaaattagttatacgacacacgaacaattcaaaaaattgactgcagacagtcaggcggtgattcgcagcggggagtgttccccgtatgcgaacgtcattctttgcgctggcgtcactttctga

SEQ ID NO: 38771 - DNA, 966 bp, Salmonella typhimurium
atgacaacccaggctgtttctggtcgccgttatttcactaaagcgtggcttcttgagcagaagtcgctcattgccctgctggtgttgatcgcgattgtttcgacgttgagccccaacttttttaccgttaataatctgttcaatattcttcaacagacctccgttaacgccattatggcggtggggatgacgttggtgattctgacatcggggatcgatctgtccgtcggttccctgctggcgctcaccggtgcggttgccgcttcaatcgtcggcgttgaagtgaatgcgctggtcgcggttgccgccgcgctggcgctgggcgctgcgattggcgccgtcactggcgttatcgtcgcgaagggccgcgtacaggcgtttatcgctacgctggtgatgatgctgctactgcgtggcgtgacgatggtttacaccgacggtagcccggtcaacaccggctttaccgataacgccgatctgtttggctggttcggtatcggtcgtccgctgggcgttcctacgccggtctggatcatggctatcgtctttatcgccgcctggtatatgctgcatcacactcgtctgggacgctatatctacgcgctgggcggtaacgaagcggcgacgcgtctgtctggcattagcgtgagcaaagtgaaaattatcgtctattcactttgcggcctgacagcatcgctggcgggcatcattgaagtggcgcgcctctcttccgcgcagccgacggcgggtaccggctatgagctggatgctattgccgccgtggtgctgggcggcaccagccttgcaggtggtaaagggcgcattgttgggacattgatcggcgcattgattctcggcttccttaataatggtttgaatttgttaggtgtttcctcctattaccagatgatcgtcaaagcggtggtgattttgctggcggtactggtagacaacaaaaagcagtaa

SEQ ID NO: 38772 - DNA, 891 bp, Salmonella typhimurium
atgaacatgaaaaaactggctaccctggtatctgctgttgcgctgagcgccaccgtgagcgcgaatgcaatggcgaaagacaccattgcgctggtgatctctaccctcaataatcccttcttcgtgtcgttaaaagacggggcgcaaaaagaggcggataaactgggttataacctggtggtgctggactcccagaacaaccctgccaaagagctggcgaacgtgcaggatttaaccgttcgcgggaccaaaattctgctgatcaacccgactgactccgatgcggtgggtaacgcggtgaagatggcgaaccaggcgaagattccggttatcacgcttgaccgccaggcaaccaaaggcgatgtcgtcagccatatcgcgtctgataacgtgctgggcggtaagatcgctggcgactatatcgcgaaaaaagctggcgaaggcgccaaagtgattgagttgcaaggcattgccggaacatctgcggcgcgtgagcgtggcgaaggtttccagcaggcggtagccgcccacaaatttaatgtcctggccagccagcctgctgatttcgaccgtactaagggtctgaacgtcatgcagaacctgctaaccgcgcatccggatgttcaggctgtcttcgcccagaacgatgaaatggcgctgggcgcactgcgcgcactgcaaactgccggtaaagcagatgtgatggtggttggatttgacggtacgccggatggcgaaaaggccgtaaaagatggcaaactggcagcgactatcgctcagttaccggatcaaatcggcgccaaaggcgttgaagtggcggataaggtgttgaaaggcgaaaaagttcaggccaaatatccggttgacctgaaactggtcatcaagcagtaa

SEQ ID NO: 38773 - DNA, 1647 bp, Salmonella typhimurium
atgaacggggcacagtgggtggtacatgctttgcgagcgcagggggtgaaaaccgtatttggttatcctggcggcgcaattatgccggtttacgacgcgttgtatgacggtggtgtggagcatttgttgtgccgacacgagcagggtgcggcaatggcggcaatcggttatgcccgttctaccggcaaaaccggtgtttgtatcgccacttccggccctggcgccactaacctgatcactggcctggcggatgcgttgttagattcggtccccgtcgtcgcgatcacgggtcaggtttccgccccgttcatcggcaccgatgcgttccaggaggtggatgtgttagggctgtcgctggcctgtaccaaacacagcttcctggtgcagtcgctggaagagttgccgcgcatcatggcggaggcttttgaagtcgccaacgctggccgtcctggcccggttctggtggatatcccgaaagatatccagttggccagcggtgagctggaaccctggtttactaccgttgctaacgaagcgactttcccgcaggctgatgtggaacaggcgcgccagatgctggaacaggcgaaaaaacccatgctgtacgtcggcggtggtgttggtatggcgcaggcagttccggcgctgcgtaaatttatcgcggtaacgcaaatgccagttacctgcacgctgaaagggctgggggctgttgaagctgattatccgtactatctgggcatgctgggaatgcacggtactaaagcggctaatttcgcggtgcaagagtgtgatttactgatcgcagtgggtgcacgttttgatgaccgggtgaccggtaagctgaatacgtttgcgccgaacgccagcgtaatccatatggatatcgacccggcggaaatgaacaaactgcgtcaggcacacgtcgcgttgcagggcgatttaaattcgctgttgccggcattacagcaaccgctgaagatcgacgcatggcgtcagtcctgtgcagagctgcgcgcagaacacgcctggcgctatgaccatcctggcgagactatctatgcgccgttgttgttgaagcaattgtcggaacgcaaacccgcagacagcgtggtgacgacggatgtggggcagcatcagatgtggtcagcccagcatatgacttacacccgcccggagaacttcatcacctccagcggtctggggacgatgggattcggcttaccggcggccgttggcgcgcaggtagcgcgaccgaatgataccgttatctgtatctccggtgacggctccttcatgatgaatgttcaggagttgggcaccgtaaaacgcaagcagttaccgttgaagatagtcttactcgacaaccagcggttagggatggttcgacaatggcagcaactgtttttccaggagcgatatagcgaaaccaccctgaccgataaccccgatttcctcatgctggccagcgccttcggcattccaggccagcacattactcgtaaagaccaggttgaagcggcactcgacacgatgttggcaagcgaagggccgtacctgcttcacgtctcaatcgacgaacttgaaaatgtctggccgttggtgccgcctggcgccagtaactctgaaatgctggagaaattatcatga

SEQ ID NO: 38774 - DNA, 930 bp, Salmonella typhimurium
atgacgacgaaaaaagctgattatatttggttcaatggcgagatggtgcgctgggaagacgcgaaggttcacgtaatgtctcacgcgctgcactacggtacgtcggtatttgaagggattcggtgctacgactctcacaaaggtccggtagtgtttcgtcatcgtgaacatatgcagcgcctgcgcgactcagcaaaaatttatcgttttccggtttcccagagcattgatgagctgatggaagcctgccgcgacgtaattcgtaaaaataatctgaccagcgcctatatccgtccgttggtatttgtcggcgatgtcggtatgggcgttaacccgcccccgggatacaccactgacgtcatcatcgccgcgttcccgtggggggcatacctgggcgccgaagcgctggatcaggggatcgatgcgatggtttcttcctggaaccgcgctgcgccgaacaccattccgaccgccgccaaagcgggcgggaactatctttcctcactgctggtgggtagcgaagcgcgccgccacggctatcaggaaggcatcgccctggatgtaaacggctatatctccgaaggcgcaggtgaaaacctgtttgaggtaaaagatggcgtgctgtttactccgccgtttacctcttccgcgctgccaggcattactcgcgacgcgattatcaaactggcgaaagagctgggtattgaagtgcgcgagcaggtgctgtcccgtgaatcgctgtatctggccgacgaagtgtttatgtccggaaccgcggcagaaattactccggtacgcagcgttgatggtatccaggtaggtgaaggccgttgcggccctgttaccaagcgtattcaacaagccttctttggtctcttcactggagaaaccgaggataaatggggctggttggatccggtaaattcataa

SEQ ID NO: 38775 - DNA, 1851 bp, Salmonella typhimurium
atgcctaagtaccgttccgccaccaccactcatggtcgtaatatggcgggtgcccgcgcgctgtggcgcgccaccggaatgaccgacagtgattttggcaaaccgattatcgccgtggtgaactcattcactcagtttgtgccgggtcacgttcatctgcgcgatctcggtaagctggtcgccgaacagattgaagcttccggcggggtggcgaaagagttcaacactattgccgtggatgacgggattgccatggggcacgggggtatgctctattcactgccgtcgcgcgagctgatcgccgactccgttgagtacatggtgaacgctcactgcgctgacgcgatggtgtgtatctccaactgcgacaaaatcaccccagggatgctcatggcctcgctgcgcctgaatattccggtgatctttgtctccggcggcccgatggaagccgggaaaaccaagctttcagacaaaattatcaagctggatctggttgatgccatgattcagggagcggacccgaaagtctctgacgatcaaagtaaccaggttgaacgctccgcctgtccaacctgcggctcctgctccggcatgtttaccgctaactccatgaactgcctgaccgaagcgctgggcctgtcgcagccgggcaacggctcgctgctggcaactcacgctgaccgtaagcagttgttcctcaatgccggtaagcggattgttgaactgactaaacgctattacgagcaaaacgacgaaagtgcactgccgcgtaacatcgccagcaaagccgcgtttgaaaacgcgatgacgctggatatcgcgatgggcggttcgaccaacaccgttcttcacctgctggcggcggcgcaggaagcggaaatcgacttcaccatgagtgatatcgacaagctgtcccgcaaggtgccgcagctgtgtaaagtggcgccaagtacccagaaataccatatggaagatgttcaccgtgccggcggtgtgctgggtattttaggcgagctggatcgcgccgggctgctgaaccgcaacgtgaaaaacgtattaggcctgacgttgccgcaaacgctggaacagtacgacatcacggttacgcaggacgaagcggttaaaaaaatgttccgtgctggccctgccggtatccgtactacccaggcgttctcgcaggattgtcgctgggattcgctggatgacgaccgcgcagcgggttgcatccgctcgctggaatatgcctatagcaaagacggcggtctggcggtgctgtatggcaacttcgccgaaaacggctgcattgtgaaaaccgcaggcgtggatgacagcatccttaaatttaccggcccggctaaagtgtatgaaagccaggacgacgcggtagaggcgattctcggcggcaaagtagtggaaggcgatgtagtcgtgatccgctacgaagggccgaaaggcgggccgggaatgcaggaaatgctctatccgaccagtttcctgaagtcgatggggctgggcaaagcctgcgcgctcatcaccgatgggcgtttctccggcggtacttcgggtctttccatcggccacgtctcgccggaagcggccagcggcggcactattgcgttgattgaagatggcgacactattgcgattgatatcccgaaccgcagcattcagttgcagttgagtgaggctgaaatcgccgcacgccgcgaggcgcaggaagctcgtggcgacaaagcctggacgccgaaaaatcgtcagcgtcaggtttcgtttgccctgcgtgcctacgccagcctggcgaccagcgccgataaaggcgcggtgcgcgataaatcgaaattgggaggttga

SEQ ID NO: 38776 - DNA, 558 bp, Salmonella typhimurium
atgaaacataaattaatgacctctactattgcgagtctgatgtttgtcgctggcgcagcggttgcggctgatcctactccggtgagcgtgagtggcggtactattcatttcgaaggtaaactggttaatgcagcctgtgccgtcagcactaaatccgccgatcaaacggtgacgctgggtcaataccgtaccgccagctttacggcgattggtaatacgactgcgcaggtgcctttctccatcgtcctgaatgactgcgatccgaaagtggcggccaacgctgccgtggctttctctggtcaggcagataacaccaaccctaatttgctggctgtctcctctgcggacaatagcactaccgcaaccggcgtcgggattgagattcttgataatacctcttcaccgttgaagccggacggcgcgaccttctcggcgaagcagtcgctggttgaaggcaccaatacgctgcgttttaccgcacgctataaggcaaccgccgccgccacgacgccaggccaggctaatgccgacgccacctttatcatgaaatacgaataa

SEQ ID NO: 38777 - DNA, 693 bp, Salmonella typhimurium
atgctgaatagtataaaagtaggctttattgttcttctcacgttatttacttcgctgaacgtacaggcggcgggggggattgcattaggcgccacgcgcgttatttatccctcggcggcgaagcagacttctctggcaatcagtaatagcgatactcaagaacgttacctcgtcaattcatggatcgaaaataacgctgggcagaaagaaaaaacgtttatcgttacgccgcctttattcgtcagcgagcccaaaagtgaaaacacgctgcgtattatctacgccgggcaaccgctacccggggatcgggagtcgttattctggatgaacgtgaaagccatcccgtcggtcgataaaagtcatattgaaggaaaaaacgttctgcaactggcgattctgtcgcgcatcaaactgttcgtgcgtccggcgaatttgccgcagacgccggaagacgcgccgaccttgctgaaattttcccgtgtcggcaaccatctcaagataaccaacccatctgcttattacctcacgctggtcaatatcagcgtgggcgcgaaaaagattgataacgtgatgatcgcgccaaaaagcgacatgcaaattcccttaccgactggcgcgcagggcaacgtgacatttcagtccgtcaatgattacggcgcattgacgtcggcgacaacggccagtctcggttaa

SEQ ID NO: 38778 - DNA, 2613 bp, Salmonella typhimurium
atgaagaagacaacctggtttgcagggcgatttcccggctatgtatcaccgttaagcagcgtggcgctgtcggtgctggcggcgctgtgtccgctgacgagccgcggcgaaagttatttcaaccctgcgtttttgtcggcggataccgcgtccgtggcggatttatctcgctttgaaaaaggtaatcatcagcctcccggtatttaccgggtggatatctggcgtaacgacgaattcgtagcgacgcaggatattcgttttgaggcgggcgccgtgggcaccggcgataaatccggcggcctgatgccttgttttacaccggagtggattaaacggctgggcgtgaataccgcggcgttccctgtctcagataaaggcgtcgataccacgtgtattcaccttcctgagaaaatcccgggcgcggaggtcgcgttcgatttcgcgtcgatgcgcttaaacattagcttgccgcaggcgtcattgctcaacagcgcgcgtggctatatcccgccggaagagtgggatgaagggatacccgccgcactcattaattacagttttaccggtagccgcggaacagacagcgatagctattttttgagtctgctgagtggcttgaactatggcccctggcggttgcgtaataacggagcctggaactattcgaaaggggacggctatcattcgcaacgctggaacaacattggcacctgggtacagcgcgccatcattccgctaaaaagcgaactggtcatgggggacagcaataccgggaacgatgttttcgacagcgtcggctttcgcggagcgcggctgtactcttctgacaatatgtatcccgatagcctgcagggctacgcccccacggttagaggaatcgcccggacggcggcaaagctgacgatacgacagaacgggtatgttatctaccaaagctatgtgtcgccgggcgcgtttgcgattaccgatcttaatcctacctcttccagcggcgaccttgaggtgacggtagatgaaaaagacggtagccaacaacgttacacggtgccttactctaccgttccgctattgcagcgtgagggcagggtgaagtatgacctggtggccggggattttcgcagcggcaatagtcagcagtcttcgccattctttttccagggaacggtgattgccggcctgcctgcggggctgacggcttacggcggtacgcaacttgccgatcgttaccgtgccgtggtggtcggggcggggcgaaatttgggcgactggggagccgtgtcggttgatgtcacacatgcgcgtagccaactggcagatgacagcacccatcaggggcaatcgttgcgttttctgtacgccaaatcgctgaataattacgggactaattttcaattgctgggttaccgctattccacgcgcggattttacaccctggatgatgtggcatatcgcagtatggaagggtacgactacgaatacgatagcgacggacgccgccataaagtgccggtggcgcagagctaccacaatctccgctacagcaaaaaaggccgctttcaggtcaatatttcgcaaaatctgggggattacgggtcactgtatctttccggcagtcaacaaaattactggaatacggcggataccaatacctggtatcaactgggatacgccagtggatggcaaggcataagttattcgctgtcatggtcgtggagcgagtcggtggggagctcaggcgccgaccgcattctggcattcaatatgtccgttccgtttagcgttctgaccggacggcgttatgcgcgcgacactattcttgatcgtacttatgccacgtttaacgccaaccgcaaccgcgacggcgacaatagctggcagaccggcgtgggcggcacacttctggaaggacgtaatctgagctacagcgtgacgcaagggcgtagcagtagcaatggttatagcggcagcgccagcgctagctggcaggcgacgtatggcacgctgggcgtgggatataactacgatcgcgatcagcatgactataactggcaactttccggcggcgtggtcggtcatgcggatggtattacgtttagccaaccgttgggcgataccaatgtcttgattaaagcgccgggagcgaaaggcgtgcgcatcgaaaaccagaccggcgtgaaaacggactggcggggctatgcggtaatgccctacgccacggtatatcgctataaccgcgtcgcgttagataccaacacgatggacaaccataccgatgtcgaaaataacgtcagcagcgtagtgccgacagagggcgcgctggtgcgggccgcttttgatacgcggataggcgtaagggcaatcattaccgcgaggcttggcggacgtccgttaccgtttggcgcgatagtacgagaaaccgccagcggcattaccagtatggtcggcgatgatgggcaaatttatctgagcggcttgccgctaaaaggtgaactgttcatccagtggggagaggggaaaaacgcgcgttgtatcgccccttacgccctggcggaggatagcctgaagcaggcgattacgatagccagcgcaacctgtatccgtccggcgtcataa

SEQ ID NO: 38779 - DNA, 1476 bp, Salmonella typhimurium
atggctaactactttaatacactgaatctgcgccagcagctggcgcagttgggtaaatgccgctttatgggccgcgacgaattcgccgacggcgcgagctaccttcagggtaaaaaagtggtcatcgtcggctgtggcgctcagggtctgaaccagggcctgaacatgcgtgactccggtctggatatttcctacgccctgcgtaaagaagccattgctgagaagcgtgcttcctggcgtaaagcgaccgagaacggcttcaaagtaggcacctacgaagagctgatcccgcaggctgacctggtagttaacctgacgccggacaaacagcactccgacgtggtgcgttccgtacagccgctgatgaaagacggcgcggcgctgggctactcccacggcttcaacatcgtggaagtgggcgagcagatccgtaaagacatcaccgtggtgatggtggcgccgaagtgtccgggcaccgaagtacgtgaagaatacaagcgtggcttcggtgtgccgacgctgatcgccgttcacccggaaaacgatccgcaaggcgaaggcatggcgattgctaaagcctgggcggcggcgaccggcggtcaccgtgcgggcgtactggagtcttctttcgtggcggaagtgaaatccgacctgatgggcgagcagaccatcctgtgcggtatgctgcaggccggttctctgctgtgtttcgacaagctggtggcagaaggcaccgacccggcttatgcggaaaaactgattcagttcggctgggaaaccatcaccgaagcgctgaagcagggcggcatcaccctgatgatggaccgtctgtctaacccggcgaaactgcgtgcttacgcgctgtccgaacagctgaaagagatcatggcgccgctgttccagaaacacatggatgacatcatctccggcgaattctcttccggcatgatggctgactgggctaacgacgataagaaactgctgacctggcgtgaagagaccggcaaaaccgcgttcgaaaccgcgccgcagtatgaaggcaaaatcggcgagcaggagtactttgataaaggcgtgctgatgatcgcgatggtgaaagcgggcgttgagttggcgttcgaaactatggtggattccggcatcatcgaagaatccgcttactacgaatcactgcacgagctgccgctgatcgccaacaccatcgcccgtaagcgtctgtacgaaatgaacgtggttatctctgataccgcagaatacggtaactacctgttctcttacgcttgcgtaccgctgctgaaaccgtttatggcggaattgcaaccgggcgatctgggtagtgctatcccggaaggcgcggtagacaacgcacagcttcgcgacgtgaacgacgcgattcgtagtcatgcgattgagcaggtaggtaagaaactgcgcggctatatgacggatatgaagcgtattgcggtagcgggttga

SEQ ID NO: 38780 - DNA, 2025 bp, Salmonella typhimurium
atgcgtttaaatcccggccaacaacacgctgtcgaattcgtcaccggaccctgcctggtgctggcaggagcgggttctggtaaaactcgcgtaattaccaataaaatcgcccacctgatccgcggatgcggctatcaggcccggcatattgcggcggtgacgtttaccaacaaggcagcgcgtgagatgaaagaacgggttgggcagacgctcggccgtaaggaagcgcgcggtttgatgatctccacctttcatacgctagggctggatattattaagcgcgagtacgctgcgctggggatgaaatcgaacttttcattgtttgacgataccgaccaggtcgccttgctcaaagagctgaccgaaggcctgatcgaagacgacaaggttctgttgcaacagctgatctccacgatctccaactggaaaaacgatctcaaaacgcctgcgcaggcggcggccggggcgaaaggcgaacgcgatcgtatttttgcccactgctacgggctttacgacgcccatatgaaggcatgtaacgttctcgattttgatgatttgattttgctgccgacgctgctgctgcaacgcaatgacgaggtgcgcgagcgctggcagaataaaattcgttatctgctggtggatgaatatcaggatactaacaccagccagtatgagttggttaagctgctggtcgggcaacgcgcgcgctttacggtcgtaggcgatgacgatcagtctatctactcctggcgcggggcgcgtccgcaaaacctggtgttactgagccaggattttccggcgctgcaggtgattaagctggagcaaaactatcgttcttcgggccgcatcctgaaagcggcgaatattctcatcgccaacaatccgcacgtctttgaaaagcgcctcttttccgagctcggttacggcgcggaactcaaagtgttaagcgcaaacaatgaagagcatgaagctgagcgcgttaccggcgaactgattgcccatcactttgtgaacaagacccagtacaaggattacgccattctgtatcgcgggaatcatcagtcgcgggtatttgaaaaattcctcatgcagaaccgcattccgtacaaaatttccggcggcacctcatttttctcccgtccggagattaaagacctgctggcctacctgcgggtgttgaccaacccggatgatgacagcgctttcctgcgcatcgtgaatacgccaaaacgcgaaatcggtccggccacgctgcaaaagctgggtgaatgggcaatgacgcgtaataaaagcctgtttaccgccagctttgatatgggacttagccaaaagctgaccggacgtggttacgattcattgacgcgttttacccactggctgggggaaatccagcgtctggccgaacgcgagcctgtcgccgccgtgcgcgatctcatccacggtattgactatgaatcctggttgtacgaaacctcgccgagccccaaagcggcggaaatgcgtatgaaaaacgttaaccagctctttagctggatgactgagatgctggaaggcaacgaactcgatgagccgatgacgctgacccaggtggttacacgctttacactgcgcgatatgatggagcgtggcgagagcgaagaagagctggatcaggtacagttgatgacgcttcatgcatcgaaaggactggaattcccgtatgtctatatggtgggaatggaagaaggatttttgccgcatcaaagcagcattgacgaagataatattgaggaagagcgtcggctggcctatgttgggatcactcgcgcgcagaaagagctcacctttacattatgtaaagagcgccgtcagtatggggaactggtgcgcccggaacccagccgcttcctgttagaactcccgcaggatgatttaatctgggagcaggagcgcaaagtggtaagcgctgaggagcgaatgcaaaaagggcaaagtcacctggctaatctgaaagccatgatggcggcaaagcgagcgaaatcgtag

SEQ ID NO: 38781 - DNA, 1260 bp, Salmonella typhimurium
atgaatcttaccgaattaaagaatacgccggtttctgagctgatcactctcggcgaaagtatggggctggaaaacctggcccgtatgcgcaagcaggacattatttttgccatcctgaagcagcacgcaaagagtggcgaagatatctttggcgacggtgtgctggagatattgcaggatggatttggtttcctccgttctgcagacagctcctacctcgccggtcctgatgatatctacgtttcccccagccaaatccgccgtttcaacctccgcactggtgataccatttctggtaagattcgcccgccgaaagaaggtgaacgctattttgcgctgttgaaagttaacgaagttaactacgacaaaccggaaaacgcccgtaacaaaatcctctttgagaacttaaccccgctgcacgcaaactctcgtctgcgtatggagcgtggtaacggttctaccgaagacttaacggcgcgcgttctggatctggcttcgccgatcggtcgcggccagcgcggtctgattgtcgcgccgccgaaagcgggtaaaaccatgctgctgcagaacatcgcgcagagcatcgcgtataaccacccggactgcgtgctgatggtgctgctgattgacgaacgtccggaagaagtgaccgagatgcagcgtctggtgaaaggcgaagtggttgcttctacctttgacgaaccggcatcccgccacgttcaggttgccgaaatggttatcgagaaggcgaagcgtctggttgaacacaagaaagacgttatcatcctgctcgactccatcacccgtctggcgcgcgcctacaacaccgtggtgccggcttccggtaaagtattgaccggtggtgtggacgctaacgccctgcatcgtccgaagcgtttcttcggcgcggcgcgtaacgtggaagagggcggtagcctgactatcatcgcgacggcgctaatcgataccggttccaagatggacgaagttatctacgaagagtttaaaggcaccggtaacatggagctgcatctctcgcgtaagatcgctgaaaaacgtgtcttcccggctatcgactacaaccgttccggtacccgtaaagaagagctgctcaccactcaggaagagctgcagaaaatgtggatcctgcgtaaaatcatccatccgatgggtgaaattgacgcgatggaattcctcattaacaaactggcgatgaccaaaactaatgacgactttttcgagatgatgaagcgctcataa

SEQ ID NO: 38782 - DNA, 1104 bp, Salmonella typhimurium
gtgaagttactcaccgctttatctgagctaatcagtatttttttattcacgaccatttttatttttcttgcgcgaaaagtagccataaaaattggtttagtggataaaccaaactttcgtaaacgacatcagggcgttatcccattagtcggcgggatttctgtgtttgcaggaatctgctttatgtttggcctctcggattactacataccgcacttatcgctatatcttatttgcgctggtgtattggtttttgttggtgcgatggatgaccgttttgatatcagtgtaaaaattcgtgctgtggttcaggctgttattgcggttgtaatgatggttatcgcaaaacttcacttaggtagccttggttacatctttgggccttgggagttagtgcttggcccctttggctatttccttactctgtttgcggtatgggcggcgatcaacgctttcaatatggtggacggtattgacggcctgctgggtgggttatccagcgtctcatttgcggcgatggggctgattttatggtttgatggtcagactagtctggcaatgtggtgctttgccatgatcgccgcgattctgccttacattatgcttaatctcggtattttggggcggcgttacaaagtctttatgggcgatgccggtagtacactgattggctttaccgtcatctggctcttactggaaacgacgcaggggaaaactcactctatcagcccggttaccgcgctatggattatcgctattccattgatggatatggtggcgattatgtatcgccgtctgcgtaaagggatgagccccttttcccctgatcgccaacatattcatcatttggttatgcgagcagggtttacttcccgccaggcatttgttcttattacgctcgcagcggcgattctggcgggagtaggcgtaacggcagaatactctcattttgttcctgaatgggttatgttggtgctctttttgctagcattcttcctctatggctactgcattaagcgggcctggaaggtggcgagatttattaagcgtgtgaagcgtcgcctgcgcaggcaacgtgagaaccggccaaacttaaccaagtaa

SEQ ID NO: 38783 - DNA, 1047 bp, Salmonella typhimurium
atgacacaaccattaccgggggcacgcgcggtgagcgctgaaaatgaactggatattcgcgggttgtttcgtactttatgggctggcaaattctggattatcggcattggcctgctatttgcccttatcgcgttagcctataccttttttgctcgtcaggagtggagtgcgacggcgatcaccgatcgcccaaccgtaaatatgttgggcggttattactcccagcagcagtttctgcgcaacctggatattaagaccgatcctgcttcttctgataagccctcggtgatggatgaagcgtataaagagttcatcatgcaacttgcctcctgggatacgcgtcgcgatttctggttacagacggactattacaagcagcgaatggtcgggaatagcaaagctgatgcggcgatgcttgatgaactgatcaataacatacagtttacgcccggcgattttacacgcgccatcaacgacaatgtgaagctgattgctgaaactgcgccggacgccaataatctgctgcgtcagtatgtcgcattcgccagccagcgggcggcgagccatctgaatgatgaattaaaaggtgcctgggctgcgcgtaccgtgcagatgaaagcccaggtcaaacggcaggaggaggttgcgaaagcgatctattcgcgtcgtgtaaacagtattgagcaggcgctcaaaattgcggaacaacataatatttctcgtagcgcgacggatgtcccggcggatgaattaccggactcagagctttttttactcggtcgccctatgttgcaggcgcgtcttgaaaatctgcaagcggttggccctgcgttcgatttggactactttcaaaatcgggcaatgttgaatacgcttaatgtggggccgaccctggaccctcgttttcagacctatcgttatttgcgtacgccggaagaaccggtaaaacgtgatagcccacgccgagccttcctgatgatcatgtggggtatcgttggggcgctaatcggtgcgggcgttgccttaacccgtcgccgcacgatttag

SEQ ID NO: 38784 - DNA, 741 bp, Salmonella typhimurium
atgaccaataatgccgctgcgcccctttactcgctgcgtggattacctctgattggctggcgcgacatgtcacacgcgctgaattatctgtttgccgatggtcaactgaagcaaggcacgttggtggcgatcaacgccgaaaagctgctgacggcggaagataatccggaagtccgcgcgttgatagcggcggcggaatttaaatatgccgatggcatcagcgtggtgcgttcaatacgtaaaaaatttccgcaggcgcaggtttctcgtgtggctggcgccgacctttgggaagcgttaatggcgcgcgcgggaaaagaaggcacaccggtatttcttgtcggcggcaagcctgaggtgctggcgcagacggaagcaaaactgcggacgcagtggaacgtcaatattgtgggtagccaggacggttactttacgccggagcagcgtcaggcgctatttgcgcgtatccatgccagcggcgcgaaaattgtcaccgtcgcgatgggatcgccaaaacaggaattgctaatgcgcgattgtcgggaagtgcatccccatgcgttatatatgggggtgggcgggacctatgatgtgtttactggtcacgtcaaacgcgctccaaaaatatggcagaacctgggactggagtggttgtatcgtctgctttctcaaccgaggcgtattacccgccagatgcgcctgctgcgctatcttcgctggcactatactggcgatctctaa

SEQ ID NO: 38785 - DNA, 903 bp, Salmonella typhimurium
atgacggatgtcgcgctttctcaggatgtctcgcggttcctgcgctatttaggcgtggagcgccagcttagccccattaccctgctgaactaccagcgtcagcttgatgccattatcgctttagccggagaaaccgggctgaaaagctggcaacaatgtgacgctgcgattgtgcgcagttttgcggtgcgcagtcggcgcaaagggcttggccctgccagtctggcgctacgtctctcggcattgcgaagcttttttgactggttagtcagtcagggcgaattgaaagctaacccggcaaagggtgtctccgcaccgaaagcgccgcgtcatctgccgaaaaatattgatgtcgacgacgttaaccgcctgctggacatcgatcttaacgatccgctcgccgtacgtgatcgggcgatgctggaggtcatgtacggcgcggggctgcgtttatccgaactggttggcctggatataaagcacctcgatctcgataccggagaagtgtgggtaatgggtaaaggcagcaaagagcgacgcctgccgattggccgtaacgcggtgacgtggattgagcactggttggatctgcgcggcctgttcgccagcgatgaagaggcgttattcctgtcgaagctcggcaagcgtatctccgcgcgcaatgtccaaaaacggttcgccgaatggggcataaagcaggggctaaacagccacgtgcatccacataagctgcgccattcgttcgcgacccatatgctggaatcgagcggcgatctgcgcggcgtgcaagagctgctgggtcatgccaacctttccaccacccaaatttatactcatcttgattttcaacatcttgcttcagtgtacgacgcggcgcatccgcgcgctaaacgggggaaataa

SEQ ID NO: 38786 - DNA, 717 bp, Salmonella typhimurium
atgcgtttttaccggcctttggggcgtattgccgcgctcacctttgacctggatgataccctttatgataaccgtccggtgattttgcgtactgagcaggaagcgctcgcttttatgcagaattatcacccgtcgctacgttcgtttcaaaacgtcgatttacagcggatacggcaggcggtgcgtgaagcggagccggaaatctatcatgacgttacccgctggcgccatcgcgcgatagagcaggccatgcgggatgcgggattatcggcgcaggaggccattgccggcgcgaatgcggcgatgatgcattttgccaaatggcgcagccagattgaggttccgcaggctacccatgagacgttacagcagcttgcgaaaaaatggccgctggtggcgatcactaacggcaatgcccagccggaactgtttggcctcggcgattactttaagtttgtactgcgcgccggcccggatggacgttccaagccctttagcgacatgtatttcctggcggcggaaaaactgcatgtgccgatcggcgagatcctgcatgtcggcgatgatctgactaccgatgtggctggcgctattcgctgtgggatgcaggcctgctggattaaacctgaaaatgccgacctgatgcggacgcaggacagccgtttactgccgcatatcgaaatttcgcggttggcatctctcacctcgctgatataa

SEQ ID NO: 38787 - DNA, 3885 bp, Salmonella typhimurium
atgacgcagcgtttaccgttagtcgccgcccagccggggatctggatggcggaaaaactctctgatttaccctccgcctggagcgtggcgcactatgtggaactgaacggcgagctggatgccgccttgctggcaaaagcggtagcggtagggatgcaacaggcggatacgctacggatgcgttttaccgaagagaacggcgaggtctggcaatggatagatcctgagcacaccttcggcgagcccccgattgccgatttacgcgaccagcccgatccgcatcacgcggcgctggcgttaatgcaggcggatttacggcaaaacctgcgcgcagatagcggtaagccgctggcgtttcaccagttaatccgcattgatgatacccgctggtattggtatcagcgctatcaccatttgctggtggatggctttagcttcccggcgataactcgccagattgcggcgatttatcgcgcctggcagagcgacgctcctacgccggagtcgccttttaccccctttgcggatgtggtcgaggaatatcagcgctatcgccagagcgaggcctggcagcgtgacggcgccttctgggcgcagcagcgccgcgagctgccgccgccggcgtcaatgtctgccgcgccgttgccggggcggtcggcgagcgcggatattctgcgtatgaaattgagcgcgccggcgggggcgtttcgccaactggcggcgcacatgcctgagataccgcgagcggatcttgccctggcgctggtgacgttgtggctggggcgattatgcgggcgaatggattatgccgccggatttatctttatgcggcggatgggctcggcggcgttaacggcgaccgggcctgtccttaacgtgttgccgctggcggttaaccttcatgcaacggaagatctgccaacgctggcgaagcgtcttgcggcgcagttaaagaagatgcgccgccaccagcgttacgacgccgaacagattgtacgcgatagcgggcgagccgcaggggagacgccgctatttggcccggtgctcaacataaaagtgtttgattatcatctggatcttcctggcatacaggcgcaaacccataccctggcgacggggccggttaacgatcttgaactggcgctttttccggatgaaaacggcggtctggatattgaattgctggcgaatgcacagcgttacgatgatgccacgctctcccgccatgccttacgattgatggcgcttatcacgcagtttgcggataacccggcgctgcgctgcggcgatgcgcaaatgctgctggcggaagaacaaacgcaattagcacaccttaataatacggcggtaacgattcccgccgccacgcttagcgatttggtggcgcagcaggcgcaaaaaacgccagaggcttccgcgttggcagatgcgcattatcactttacctaccgtgaaatgcgcgaacaggttgtggcgctggcgtacgcgctgcgggaacgcggcgttcagcctggcgatagcgtggcggtggcgttgccgcggtcggttttcctgaccttagcgctgcatggcattgtcgaggcgggcgccgcctggctgccgctggataccggttatcctgacgatcggctgcgaatgatgctggaagatgcgcagccgaaactgttaattacgactcaggcgcagctggcgcgctttcacgatattccggggatggaatatttgtgttatagccaaccgctaccggtcagtgacgccactccgctgaggctgtcgttaccgcatcataccgcttacatcattttcacctctggctcgacgggcaggccgaaaggggtgatggtgggacaaacggcgatagtcaaccggctgctgtggatgcaggatcactatccgttgacggcggatgatgtagtagcgcaaaaaacgccgtgcagttttgacgtctcagtatgggagtttttctggccgtttatcgccggggcgaaactggtgatggctgaaccggaagcgcaccgcgacccgctcgcgatgcagcggttctttgcgcaatacggcgtcacgaccactcattttgtgccgtcgatgctggcggcctttattgcctcgctcacgccagcgtcggctgggaaaagctgcgcttccttaaagcgcgttttctgtagcggcgaggccctgccgacggcgctgtgccgcgaatgggagacgttaaccaacgcgccgctacacaatctgtacgggccaacggaggccgcggtggatgtgagctggtatccggcctgtggcgatgagctggcggctgttgacggcaacagcatcccgattggttatcccgtctggaataccggtttacgtattctcgatgcgcatatgcagccggtgccgccgggcgtggctggcgatctctatcttaccggtatccaactggcgcagggctatctggggcgtccggatcttaccgccagccgttttatcgccgatccttttgcgccaggcgaacggatgtaccgtaccggagatgtggcgcgctggctggattccggcgcggtggaatacctggggcgcagcgacgatcagctcaaaattcggggtcaacgtattgaactgggcgagattgaccgcgtcatgcaaacgctgccggatgttgaacaggcggtagcacatgcctgcgtctttaatcaggcggcggcgacgggtggggatgcccggcaactggtcggctatctggtgtcgcactccggtttgccgctggatttaccggcgctgcaggaaaaattacgccaaaaacttcccgcgcatatggtgccggttgtgctgttgcaacttgccagcttgccgcttagcgctaatggcaagctggatcgcaaagccctgccgctgccggacctggcgccgcgcgtgaaagggcgcgcgccgcagtccgcaacggagattgctgtcgccgcggcgttttcccgcctgctgggctgtgagattaacgacgttgaaagtgatttctttgcgctgggcggacactcgctgctggcgatgaaactggccgcgcagctaagccagacgtttaaccgccaggtgacgccggggcaggtgatggtggcgtctgacgtggcgcagttgagtaagctgctcgatactgacgatgacgaacgctcgcgcaatctggggttcgggccgctgttgccgctgcgtgaaagcgatggtccaacgttattttgtttccatccggcgtcggggttcgcctggcaatttagcgtattatcacgctatctcagcccgtcgtggtcgattatggggattcagtcgccgcgccccgctggccctatgcaaaccgcaaccacccttgatgaggtatgtgaacatcatctggcgactttgctcgcccggcagccgcatggcccttattatttattaggctattcgctgggcgggacgctggcgcaagggatcgccgcccggttgcgcgcgcgcggcgaaaccgtggcgtttttggggttactggacacctggccgccggaaacgcaaaactggcgggaaaaagaggcgaatggcctcaatccggacgtattggcggaaattgaacgtgaacgcgctgcgtttgtcgccgcgcagcagggaaatgcctccgacgccttatttaccgccattgaaggcaattatgcggatgccgtccgtttgctgacgacggcgcatagcgtaccgtttgatggacatgctacgctctttgtggcggataaaacggtgccggaaggcgtatcgcctgaacagagctggtcgccgtggatagcgtctttggctatttatcgccagccgtgcgcgcatgtagatattatttctccctccgcttttgaaactatcgggcccatcatcagcgaacttattaataaataa

SEQ ID NO: 38788 - DNA, 2163 bp, Salmonella typhimurium
atggacgtttcttacctgctcgacagccttaatgataaacagcgcgaagcggtggccgcgccacgtagcaacatgctggtgctggcgggcgcgggaagcgggaaaacccgcgtgctggtgcaccgtatcgcctggttactgagcgtagaaaacaactcgccatattccatcatggcggtgacctttaccaataaagcggcggcggaaatgcgccatcgtattggccagttgatggggaccagccagggcggaatgtgggtagggacgttccacggtctggcgcaccgcctgctgcgcgcgcatcatatggacgctaatttgccgcaggatttccagattctcgacagcgaagatcagatgcgtttgcttaaacgcctgattaaggcgatgaatcttgatgagaagcagtggccgccgcgtcaggcgatgtggtacatcaatagccagaaagacgaagggctacgcccgcaccatatccaaagctatggcaacccggtggagcagacctggcagaaggtgtatcaggcctatcaggaagcgtgcgatcgcgctggtctggtggattttgccgagctactgctgcgcgctcatgaactatggctgaacaagccgcacatcctgcaacactatcgcgagcggtttactaacatcctggtggacgaattccaggataccaacaacattcagtacgcctgggttcgtctgctggcgggcgataccggtaaggtgatgattgtcggcgacgatgaccagtcgatctacggctggcgcggggcccaggtagagaacatccagcgcttcctcaatgatttccccggcgcgcagaccattcgtctggagcagaattaccgctcgaccagcaacatccttagcgcggcgaacgctctgattgagaataacaatgggcgtttgggtaaaaagctgtggactgacggcgttgacggcgaaccgatatcgctgtactgcgctttcaacgaactggatgaagcgcgctttgtggttaaccgtatcaaaacctggcaggacaacggcggcgcgcttgcgcaatgcgccattctttatcgcagcaacgcccagtcgcgcgtgctggaagaagcgttattacaggccagtatgccgtaccgcatttacggcggtatgcgcttcttcgaacgccaggagatcaaagatgcgctctcttatctgcgtttgattgccaatcgcaacgatgatgccgcctttgaacgcgtggtgaataccccaacgcgcggtatcggcgaccgcacgctggacgtggtgcgccagacctcgcgcgatcgccagctaacattgtggcaggtgtgccgtgaattgttacaggaaaaagccctggccgggcgtgcggccagcgcgctgcaacgctttatggaactgatcgacgccctggcgcaggaaaccgccgacatgccgctgcatgtgcagactgaccgggtgatcaaagattccggcctgcgcaccatgtatgagcaagaaaaaggcgagaaaggccagacgcgcatcgaaaacttagaggaactggtgacggcaacgcggcagttcagctacaacgacgaagatgaagatttgatgccgttgcaggccttcctctctcacgcggcgctggaagcgggcgaggggcaggcggatacctggcaggatgcggtacagctgatgacgctgcactcggccaaaggcctggagtttccgcaggtgtttatcgtcgggatggaagaggggatgttccccagccagatgtcgctggatgagggcgggcgtttggaagaggagcgtcgtctggcctacgtcggcgttacccgtgccatgcagaaactgacgctaacctatgccgaaactcgccgtctgtatggtaaagaggtttatcatcgcccgtcgcgtttcatcggcgagttgccggaggagtgcgtggaagaggtccgtctgcgcgccaccgtcagtcgtccggtgagccatcaacgaatgggaacgccgctggcggaaaacgacacaggctacaaactcggccaacgcgtgcgccatgcgaagttcggcgagggaactattgtcaacctggagggcagcggcgagcatagccggttgcaggtggcttttcaggggcaagggatcaaatggctggttgccgcgtatgcgaagctggaaacggtttga

SEQ ID NO: 38789 - DNA, 1848 bp, Salmonella typhimurium
atggtgaacggggttaatgtggcgcaggcggaagtgttgaatctggaatcaggggccaaacaggttttgcaggaaacctttggctaccaacagtttcgcccgggtcaggaagcgattattgatactgcgctctccggtcgcgactgtctggtcgtcatgcccaccggcggcggcaaatctctgtgctatcaaatccccgcgttgttgctggacgggttgactgtcgtcgtttcgccattaatctcgttgatgaaagaccaggtcgatcagctactggcgaacggtgtggcggcggcgtgcctgaactccactcaaagccgcgagcagcagcttgaggtgatggcggggtgccgtaccggacagattcgtctgctgtatattgcgccggaacgcctgatgctggacaactttcttgatcatctggcgcactggaatccggtattgctggcggtggatgaagcgcactgtatctcgcaatggggacatgatttccgtccggaatatgcggcgctcggtcagcttcgccagcgttttcccgctttgccgtttatggcattgaccgccaccgccgacgacaccacgcgccaggatattattcgtctgcttgggcttaacgatccgttaatccagattagtagctttgaccgaccgaatatccgctacatgctgatggagaagtttaagccgctcgaccagttaatgcgctatgttcaggagcaacgcggcaaatcgggtatcatctactgtaacagccgggcgaaagtggaagataccgctgcgcgcttgcaaagtcgcggcattagcgcggcggcctatcatgcggggctggaaaacgctattcgcgtcgatgtgcaggaaaaatttcagcgcgacgatctgcaaatcgtggtggcgaccgtcgcttttggaatgggcataaacaaacctaacgtacgtttcgtcgtgcatttcgatatcccgcgcaatattgaatcctactatcaggaaacgggccgcgccgggcgcgacggactgcctgcggaagccatgctattttacgatccggctgatatggcctggctacgtcgttgtctggaagagaaaccagccggacagcttcaggatattgaacggcataaactgaatgcgatgggcgcttttgctgaagcgcaaacctgccgccgcctggtattgcttaattactttggcgaaggccgacaagaaccgtgcggcaactgcgatatctgtctcgatccgcccaaacaatatgatggcttaaacgatgcccagattgcgctttctaccattggtcgggttaaccagcgttttggcatgggctacgttgtcgaggtgatccgcggcgcgaataaccaacgcatccgcgatttcggtcatgacaaactcaaggtttatggcatgggacgcgaaaagagccatgagcactgggtgagcgtgattcgccagctcattcatctggggctggtaatgcaaaatattgcgcagcactccgcattacagttgacggatgccgcgcgtccggtactccgtggagacgttccgctaaagcttgcggtgccgcgcatcgtcgccctcaaaccccgcgtgatgcagaaatcgttcggcggtaattacgatcgcaaattgttcgctaagttgcgcaagctgcgtaaagctatcgctgatgaagagaatatcccgccgtatgtggtctttaacgacgccacgttgatagaaatggcggaacagatgccggtttccgccagcgagatgttaagcgttaacggggttgggatgcgcaaactggagcgcttcgggaaagaatttatggcgctcatccgcgcgcatgtcgatggtgatgacgaagagtag

SEQ ID NO: 38790 - DNA, 1611 bp, Salmonella typhimurium
atgcgtatacctttcacccgttggccggatgaatttgcccgccgttatcgtgaaaaaggctactggcaagacgtgccgttgaccgatattctgacccgccacgctgacagcgacaagacggcggtcattgaaggcgagcgcgcattcagctatcgccagctcaaccaggccgcagataatctggcctgcagtttacgccgtcagggcatcaaacctggcgaaaccgctctggtacaactggggaatgtaccggaactgtatatcacctttttcgccctgttgaagcttggcgtagcgcccgttctggcgctgtttagccatcaacgtaccgaacttaacgcctatgcgatgcagatcgcgccgacgctggtgattgccgatcgccaacatacgctgttcgccggggaggactttctcaacacgtttgtggctgaacaccgctctgtgcgggtggtgttattgcgcaacgacgacggcgatcacagcctggacgcggcgatgcggcaggcggcggaagatttcactgccacgccatcacctgctgacgaagtggcctactttcagctttccggcggtactaccggcacgccaaagcttattccccgtacccataacgactattactacagcgtgcgccgcagcaatgagatttgcggtttcaacgaggatacgcgttttctgtgcgcgattcccgccgcgcataactacgccatgagttcgccgggcgcgctgggcgtctttcttgccaaaggaacggtagtgctggcgaccgatcccagcgccacgctctgtttcccgctgatcgaaaaacaccagattaatgccacagcgctggtgccgcccgcggtcagtctatggctacaggctatccaggagtggggcggcaatgcgccgctggcgtcattaaggttattgcaggtcggcggcgcgcggctttctgcgacgctggccgcccgtattccggctgaaattggctgtcagttgcagcaggtcttcggtatggcggaagggttagtgaactatacccggctggacgatagtccggaacggattatcaatacccagggaagacccatgtgtccggacgacgaagtgtgggtggcggatgccgacgggaatccactgccgccgggcgagattggtcgtctgatgacgcgcggcccctatacttttcgcggctatttcaacagtccgctacacaatgccagcgcctttgacgccaacggtttttactgttccggcgatctgatctccattgatcaagacggttacatcaccgttcacgggcgtgaaaaagatcagatcaatcggggcggcgagaagatagccgccgaagagatagaaaacctgttactgcgccacccggtggtgatccatgcggcgctggtcagcatggaagatgaactgctgggagaaaaaagttgcgcatatctggtggtaaaagagccgctgcgagcggtacaggtacgccgtttcctgcgagagcagggcgtggcggaatttaaattaccggatcgcgtggagtgcgttgcgtcactgccgctgacgccggttggtaaagtcgataaaaaacaattacgccagcggttggcgtcacgttcaccgctctga

SEQ ID NO: 38791 - DNA, 198 bp, Salmonella typhimurium
atgttcgatacgctttcgaaagccggaaaatatctgggacaggccgcaaaaatgatgattggcgtgccagactacgacaactatgttgagcatatgcgcataacgcatccggatcagacgccgatgacctatgaagaatttttccgcgagcggcaggatgcgcgctatggtggaaaaggcggcgcgcgttgctgctga

SEQ ID NO: 38792 - DNA, 756 bp, Salmonella typhimurium
atggtggaagattcacaagaaacgacgcactttggctttcagaccgtcgctaaagagcagaaagctgacatggtggcccacgtttttcattctgtggcgtcaaagtacgatgtgatgaatgacttaatgtcatttggcattcatcgtttgtggaagcgcttcaccattgattgcagtggcgtgcgtcgtggacaaaccgttctcgatttagcgggtggtacgggcgatcttaccgcgaaattttcacgtatggtcggggaaactggcaaagttatcctggcggatattaatgattccatgctcaaaatggggcgtgagaagctgcgtaatatcggcgtgatcggcaacgtagagtatgtgcaggcgaatgccgaagctctgcctttccctgataatacgtttgattgcattaccatttcgtttggtttgcgcaatgtaacggaaaaagaaaaagcgctgcggtcaatgttccgtgtgttgaaacccggcggacgtttactggtgcttgaattttccaagcctatcattgagccgctgagtaaagcgtatgacgcctattctttccatattttaccgcgtattggctcgatggtcgcaaacgatgcggatagctatcggtatctcgcggaatccatccgtatgcatcccgatcaggataccttaaaagccatgatgcaggacgccggatttgagagcgtggattattacaatctgacggcgggcgttgtggcattgcaccgtggttataaattctag

SEQ ID NO: 38793 - DNA, 564 bp, Salmonella typhimurium
atgtccttaattaacaccaaaatcaaacctttcaaaaaccaggcgttcaaaaacggtgaattcattgaagtcaccgagaaagataccgaaggccgctggagcgtcttcttcttctacccggccgattttacctttgtttgcccgactgaactgggtgacgttgccgaccattacgaagaactgcagaagctgggcgtagacgtttattccgtctcaaccgatactcacttcacgcacaaagcatggcacagcagctctgaaactatcgcaaaaatcaaatatgcgatgatcggcgacccgactggcgccctgacccgtaacttcgacaacatgcgtgaagatgaaggtctggcagaccgtgcgacctttgttgttgacccgcagggtatcatccaggcgatcgaagttaccgctgaaggtatcggccgtgacgcgtctgacctgctgcgtaaaattaaagcagcacagtacgttgccgctcacccaggcgaagtatgcccggcgaaatggaaagaaggcgaagcgactctggctccatccttagacctggtcggtaaaatctaa

SEQ ID NO: 38794 - DNA, 2280 bp, Salmonella typhimurium
atgagtaatgagacgggacatctgaacagacgttcttttttaaaggggatagtggcactgggcgccgttgcggctttacccggaggattactgacctcccgatgcgcgcttgcgcagccgcctgttccctttaaccctaaaacgtacaaaatttatcgtaacgcgtgtccgcgtaactgctatgacacctgtagcctcaagacatgggtaaaggacggggtcattactttcgtggaaggtgcgccggaatcaacatttactcacggtaccccttgcgtcaaagggttaagctatccgcgccgggtttatagccccgatcgtattaaatatcccatgacgcaggacgttcgcggtagcggcaactggcgtcgcatctcatgggaagaggcgatgcagcgcattgccgccaaaatgctggagattaagaaaaaagacggttctatgctcggtctggcgctgaccaaatattccggtaagtttggcgtgctgaactatgccgttgaagggatgatgtcctcgcttggctataccacccgttttgccggtacgccgtgctggcctgccggtatcgacgcgcaaaactacgacatgggcgacatgtggtgtaacgacccggaagatatggtgaaagcgaaatacatcattatctggggcgccaacccggcctggtgctcaatgcacagcatgaagtacatctatcaggcgcgcgagaaaggggcgaaggtcgtggttatcgacccgctgctgtcgcagactgctgccaaagccgatctctacctgcgcgtacggcctggctcagacggtgcgctggcgctgggaatggcgcgtcatctggtggataaaggcctggtggatcaggattttgttaacaacgatgctcacggctatccggaatttgaagcctatctgcgtaaccatgtaaccgtggagtgggcggcagaaatctgcggcctgtctgcggatgtcattcgccagctggcggaagagtttacggcggttaagccggccacggtctggattggttacgggatgcagcgtcatgtcaacggcggcgccaacgttcgcgctatcgatgcctttgtcgctatgtccggcaacatcggtgtcgaaggcggcggcgcgcgttatggccatctgcatacctggggctttaactataacgccatgctgcagaagccgccggtgggcgctattggcataccgggagcggcgggcaccaccagtgaattcggggctgccgctggcagcgacgccgtgcagtactccgatcgctctctgaatatcaaccagacggcgcaggggattctggaggccaacgatccgccggttcgtatgctgtgggtcgcctgtaaaaacccgtttgcccaggatttcgatcgcagcaagatgaaaaaagcgtttgaaaaactggaaatggtggtctgcgccgatcagttcttcaacgaaacggtgcaacacgctgatatcgtgctgcccgttaccaccgcgtttgaagagtggaacgtggatgcttcttactggcactactggctttccattaatcagccggcgattaagccgatgtatgaagcaaaatgcgaccttgaaatcgctaccatgctgtcgcgcaccattaataagatggcgccgggttcctgtaccttcccgcaagagttcgatcacaagcgttggctggatcaggagttcaacgacggtatggcgaaaatgttcggcatctcttcctgggacgatctgctggacgggccgaaaaaagcgattctgccaagttcagccgcctggtacgatcgcaagttcaaaacgccgtcaggcaagtatgaatttaaatctgaactggcggagaaaaacggccacaccgcgctgccggaatacaaaccggaagccgagagcaaactgccgttccatctgtttacgccgcacgtgcagtttggcctgcactcgcagtttatcaacctggactggatgcaggtgttctacccggaaccgttcgtttatatccatccttcttccgcgaagaaaaagggcatcagcgagaacgatctggtcaaagttttcaatggcaccggtgaagttgagctgcgggcaaaagtcaccaccaacgtgccggaagattttctggtgatgtatgaagcgtggttcccgaaacggcagtacaacgtgcaaaacgtcgtggccgatacgcctgctgatatggggctgatgaaaactggcgcgccgggcgccgctatccacagtcagtttgctgacgttgtattgatcggtaaaggggaatccgtagcatga

SEQ ID NO: 38795 - DNA, 702 bp, Salmonella typhimurium
atgacaaccttaagctgtaaagtgacctcggtagaagctatcaccgataccgtatatcgggttcgtttagtgccggacgcggcgttttcattccgcgctggtcagtatttgatggtcgtaatggacgagcgtgacaaacgcccgttttcgatggcttcaacgccggacgagaaagggtttattgaattacacattggcgcctccgagctcaatctgtatgcgatggcggtcatggatcggattctgaaagaccgggaaatcgtcgtcgatattccgcatggcgacgcctggctacgtgacgatgaagagcgtccgttgattctgatcgcgggcggtacgggcttttcttatgtgcgctccatcctgttgacggcgttagcgcgcaacccggcccgcgatgttaccatttactggggcggccgcgaagaaaagcacctctatgatctctctgagctggaagcactctctgttaaccatccgaatttgcgtattgaacctgttgtcgagcagccggaagaaggctggcgtggacgtacaggaacggtacttacggcggtattgcaggattatggtacgctggcggggcacgatatttatattgccggacgttttgagatggcgaaaatcgcccgcgatctgttctgtcatgagcgtaacgcgcgggaagatcgtctgtttggcgatgcgttcgcatttatttaa

SEQ ID NO: 38796 - DNA, 885 bp, Salmonella typhimurium
atgtctcatctatacgaccctaccacgcagtattacaccggcgagtatcctaagcaaaaacagccggcgcccggcgtccaggcgaaaatgacgcctgttcctgactgtggtgaaaaaagttatgtcggcagtggtcgccttaaagatcgtaaggcgctggtgacagggggcgactccgggattgggcgcgctgccgctatcgcttacgcgcgtgaaggcgcagatgtcgcgatcaactatctgccagcggaagaagaggacgcccagcaggttaaagcgctgattgaggagtgcggccgtaaagcggtgttattgccaggcgatcttagcgacgaatctttcgcccgttcgctggtccataaggcgcgtgaagcgctgggcgggctggacattctggcgctggtggccggtaaacagacggcaatcccggagataaaagatctgaccagcgagcaatttcagcaaaccttcgccgttaacgtttttgctctgttctggataacccaggaagcgattccgctgctgccaaaaggcgccagtattatcacaacgtcgtctatccaggcgtatcagcccagtccgcacctgctggattatgcggcaaccaaggcggcaatcctcaattacagccgtggcctggcgaaacaggtggcggaaaaaggaattcgtgtgaatattgtcgcgcctggccctatctggacagcgctgcaaatttccggcggtcaaacccaggataaaattccgcagtttggtcagcagacgccaatgaagcgggccggccaaccggcagagctggcgccggtgtatgtctatctggcaagccaggaatccagttacgttaccgcagaagtgcacggcgtgtgcggcggggagcatttaggctaa

SEQ ID NO: 38797 - DNA, 984 bp, Salmonella typhimurium
atgaaaaacacacgttcattcacaacatcagcggtattactggccggctgtttgctactggcatttccagcgctcgccaaaaccacgctgaaactgagccacaatcaggataaaagccacgccgttcacaaagcgatgagctatctggccgacaaagcgaaagcctattcggacggcgaattaaatattcgtatttaccccaacgccacgctgggcaacgaacgtgaatcgctggaattgatgaactccggcgctctgcaaatggtgaaagtcaatgcggcatcgctggagtcttttgcgccggaatatagcgtgtttagcctgccgtttttattccgcgaccgcgatcactactacaacgtactgaaaagcgacttagggaaacgcattctcgcgtcctccgaaagcaaaggcttcgtcggcttaacctggtacgacggcggcgcccgcagtttttacgctggtaagcccatcactcaacccgacgatttagccggtatgaaaatcagagtgcagcaaagccccagcgctatcgcgatggtgaaagctctcggcggcgtgccgacgccgatggcgcaaggcgaactctataccgcgctccagcaaggcgtggtcgatggcggcgaaaacaaccccgtggtttatgccgatatgcgtcatgcggaggtggcgaaattctattcccgcgacgagcacacgatggtgccggatgtcctggtcatcagtaccaaagtacttaacaaattgagcgataaagagcggaaggcgttatataaagccgcagatgaatccatgcagcaaatgaaagatgtcatctggcccgccgcggaaaaagaggcttatgagagcatgaaggccatgaacgcgactgttgttgatattgataaatccgcgttcaaacagcgtgttaagcccttgtttgatgagttccgcgcaaaagacgctcagtcagcgaaggatctggaatacatcgagaatatgtaa

SEQ ID NO: 38798 - DNA, 972 bp, Salmonella typhimurium
atgagtaagatttatgaagataactcgctgactatcggtcatacgccgctggttcgactgaaccgtatcggtaatggacgcattctggcaaaggtggagtcgcgcaacccgagcttcagcgtcaagtgccgtatcggcgccaacatgatttgggatgccgaaaagcgtggcgtactgaaacctggcgtggaactggtggagccgaccagcggcaacaccggtattgcgctggcgtatgtcgccgccgcgcgcggttacaaactcaccctgaccatgccggaaaccatgagcattgaacgccgcaagctactcaaagcattaggcgcgaatctggtgctgaccgaaggggcgaaagggatgaaaggcgctattcagaaagccgaagaaattgtcgccagcgatccgcaaaaatatctcctgctccagcagttcagcaaccctgccaacccggaaatccatgaaaaaaccaccggcccggaaatctgggaagacaccgatggtcaggtggatgtgtttatctccggcgtcggcactggcggtacgttaaccggcgtcacgcgttatatcaaagggacgaagggtaaaaccgatcttatcaccgttgcggtagaacccactgactccccggttattgcccaggcgctggctggtgaagagatcaaaccaggcccgcataaaattcagggtatcggcgcaggcttcatcccgggcaacctggatctgaaactgattgataaagtggttggcatcaccaatgaagaagctatttctaccgcgcgccgtctgatggaagaggaaggtattctggcaggaatttcttccggcgccgcggttgctgcagcgcttaagctgcaggaagatgaaagctttaccaataagaatattgtggttatcctaccttcatcaggtgagcgttatctgagcaccgcgttgttcgccgatctctttactgagaaagaactgcaacagtga

SEQ ID NO: 38799 - DNA, 258 bp, Salmonella typhimurium
atgttccagcaagaagttaccattaccgctccgaacggtctgcacacccgccctgctgctcagtttgttaaagaagcaaaaggcttcacttctgagattactgtgacttccaacggcaaaagcgccagcgcgaaaagcctgtttaaactgcagactctgggcctgactcaaggcaccgtcgtcaccatctccgcagaaggtgaagatgagcagaaagcggttgaacatctggtcaaactgatggcggaactcgagtaa

SEQ ID NO: 38800 - DNA, 1728 bp, Salmonella typhimurium
atgatttcaggcattttagcatccccgggtatcgctttcggcaaagcactgctgctgaaagaagacgaaatcgtcattgaccggaaaaaaatttctgccgacaaggttgatcaggaagttgaacgttttctgagcggtcgtgccaaggcatctgcgcaactggaagcgatcaagacaaaagctggtgaaacgttcggtgaagaaaaagaagccatctttgaagggcatattatgctgctcgaagatgaggagctggagcaggaaatcatagccctgattaaagataagcacatgacggctgacgcagccgcacatgaagttatcgaaggtcaggccactgccctggaagaactggatgacgaatacctgaaagagcgtgcggctgacgtacgtgatattggtaagcgcctgctgcgcaacatcctgggtctggccattatcgatctgagcgcgattcaggaagaagttatcctggttgccgctgacctgacgccgtcagaaaccgcgcagctgaacctgcagaaagtgctgggcttcatcaccgacgcgggcggacgcacgtctcatacctccatcatggcgcgttctctggaactgccggcgatcgtaggtaccggtagcgtcaccgctcaggtgaaaaacggcgattatctgattctggatgccgtaaacaaccaggtttacgtcaacccgaccaacgatgttattgagcaactgcgcgccgtccaggagcaggttgcgaccgagaaagcggaactggctaaactgaaagatctgccggcaatcacgctggatggacatcaggttgaagtttgcgccaacatcggtaccgttcgtgacgttgaaggcgctgagcgcaacggcgcggaaggcgttggtctgtatcgtactgaattcctgttcatggatcgcgacgcgctgccgacggaagaagagcagtttgccgcctataaagcggtcgctgaagcgtgcggctcgcaggcggttatcgtccgtaccatggacattggcggcgacaaagagctgccgtacatgaacttcccgaaagaagagaacccgttcctgggctggcgcgccgtgcgtatcgccatggatcgcaaagagatcctgcgtgaccaggttcgcgcgattctgcgtgcctccgctttcggtaaattgcgcattatgttcccgatgatcatctctgttgaagaagttcgcgcgctgcgcaaagagattgaaatctacaaacaggaactgcgtgacgaaggtaaagcatttgacgaaagcattgagattggcgtgatggtggaaacaccggctgcggcgacaattgcgcgtcatttagccaaagaagttgatttctttagtatcggcaccaatgatttaacgcagtacaccctggcagttgaccgtggtaatgatatgatttcacacctttaccagccaatgtcaccgtccgtactgaacttgatcaagcaagttattgatgcttctcatgcagaaggtaaatggactggcatgtgtggtgagcttgcaggcgacgaacgtgctacacttctgttgctggggatgggtctggacgaattctctatgagcgccatttctatcccgcgcattaagaagattatccgtaacacgaacttcgaagatgcgaaggtgttagcagagcaggctcttgctcaaccgacaacggacgagttaatgacgctggttaacaagttcattgaagaaaaaacaatctgctaa

SEQ ID NO: 38801 - DNA, 1242 bp, Salmonella typhimurium
gtgaagatttatctggtcggtggtgcggttcgggatgcgttgttagggctaccggttaaagataaagattgggtcgttgtcggcgccacgccgcaggagatgcttgatgcgggctaccagcaggtaggccgtgattttcctgtgtttctccatccgcaaactcacgaagaatacgcgctggcgcgtactgagcgtaaatccggttccggctacacgggcttcacctgttatgccgcgccggacgttaccctggaagccgatctccagcgtcgcgatctgaccattaatgctctggcgcgcgacgatgccggccagattatcgacccttaccacgggcgccgggatctggaggcacgtctactgcgccatgtctctcccgcgtttggcgaagatcccttgcgcgtattgcgcgtggcgcgttttgctgcccgttacgctcatcttagtttccgtatcgccgatgaaacactggcgctaatgcgcgaaatgaccgcggcaggcgagctggaacatctgacgccggaacgggtatggaaagagacggaaaatgcgcttaccacccgcaatccgcaggtttacttccaggtattgcgcgactgcggcgccctgcgcgtcctgtttccggaaatcgacgccctgtttggcgtacccgcgccggcaaagtggcatccggaaattgataccggagttcatacgttgatgacgctgtcgatggccgccatgctcagtccgcagcttgatgtccgtttcgccacgctttgtcatgatctgggcaaaggcttaacgccgaaaaacctctggccgcgccatcatggccacggcccggcgggcgtgaaactggtcgaacagttatgccagcgtttgcgcgtccccaatgacctgcgtgatttagctaaactggtcgccgaataccatgatctgatccacacctttccgatactccagccgaaaacgatcgttaagctgtttgacgccattgatgcatggcgtaaaccgcagcgcgtcgagcagattgcgctgaccagcgaagccgatgtccgtggacgtaccggatttgaagcgtcggattacccgcaggggcgctggctgcgcgaagcctggcaggtggcccaagcggtaccgacgaaagaggtggtggaggccggatttaagggcattgagattcgcgaggagctgacgaagcgacgaattgcagcggtcgccaactggaaagagaagcgctgcccgaaccccgccagctaa

SEQ ID NO: 38802 - DNA, 612 bp, Salmonella typhimurium
atgagtgcaatcgcgcctggaatgatcctcttcgcgtacctctgcggctcaatttccagtgccattctggtttgccgcatcgccgggctgcccgatccgcgagaaagcggctccggcaacccgggcgcgacgaacgtattacgaatcggtggcaagggagcggctgtcgcggtacttatttttgacatccttaaaggtatgttgcccgtctggggcgcgtatgcgttaggcgttacccctttctggctggggcttatcgctatcgccgcctgtctggggcatatctggccggtcttttttggctttaaaggtgggaaaggcgtagcaaccgcgtttggcgccatcgcgcccatcggctgggatttaaccggcgtcatggcaggcacctggctgctgacggtcctgttaagcggttattcatcgttaggggcgattgtcagcgccttgattgcgccgttttacgtctggtggtttaaaccgcagttcaccttcccggtatcgatgctgtcatgtctcattttgctgcgccatcatgacaacatccagcgtctgtggcgtcgccaggagacgaaaatctggacgaagctgaaaaagaaacgccagaaagattga

SEQ ID NO: 38803 - DNA, 216 bp, Salmonella typhimurium
atgccggtaattaaagtacgtgaaaacgagccgttcgacgtagctctgcgtcgcttcaagcgttcctgcgaaaaagcaggtgttctggcggaagttcgtcgtcgtgagttctatgaaaaaccgacgaccgaacgtaagcgcgctaaagcttctgcagtgaaacgtcacgcgaagaaactggctcgcgaaaacgcacgccgtactcgtctgtactaa

SEQ ID NO: 38804 - DNA, 1746 bp, Salmonella typhimurium
atggctggacgaatcccacgcgtattcattaatgacctgctggcgagaaccgatatcgtcgatctgatcgacgtgcgcgtaaaactcaagaaacagggcaagaactatcacgcgtgttgtccattccataatgagaaaaccccttctttcaccgtaaacggtgaaaaacagttttatcactgctttggatgcggcgcgcatggcaatgcgatcgactttttgatgaattacgacaagctcgaatttgtcgaaaccgtcgaagaattagcggccatgcataacctggaaattccctatgaagcaggcaccgggcttagccagatagagcgccatcaacggcaaaacctctatcagttgatgaatggtctgaatgacttttatcagcagtcgcttacccatcctgcggcaaaacctgcgcgtgactatctgcaaaagcgcggtctgagcgctgaaattattcagcgtttcgccattggcttcgcgccgccagggtgggataacgcgttaaagcgcttcggtaataacagcgataacaaggcattgttgctggatgccgggatgctggtcaataacgagcagggcagcacttacgatcgtttccgtaatcgggtcatgttccctattcgggacaaacgcggcagggtgattggttttggcggtcgagtactggggaacgacacgccgaaataccttaactctccggaaacggacattttccataaaggccgccagctatatggtctttatgaggctcagcaatatagtgctgaaccgcaacgcttgcttgtggtcgaaggttatatggatgtcgtcgcactagcgcaatacgacattaactatgcggtcgcttcgctgggtacctcaaccacggcagaccatatgcatatgttattccgggcgacgaacaacgtaatttgctgttacgacggcgaccgggctggccgtgatgccgcctggagagcgctggaaacagcaatgccttatatgaccgacggtcggcaggtacgctttatgtttttacctgacggcgaagacccggatacgctggtgcgtaaagaaggcaaggcggcttttgaagcgcggatggagcaggcgcagccgctctctacgtttctgtttaatagcctcctgccgcaggtggatttaagctcgccggatggcagcacgcagttagccgcactggcgctgccgctcattaatcaggtgcctggcgacgcacaccgtattcagttgcgccagacgttggggctgaagttaggcattttcgatgatagtcagcttgatcgtttagtgccaaaacaggcggaaagcggcgtttcccgcccggctccgcagctaaaacgcacgaccatgcgtatactgataggattactggtgcaaaacccggatctcgcgccgttagtgccgcccttagacgcgctggatcagaataagctgcctggacttggcttatttaaagaattggtcaaaacttgtttggctcagccaggtcttactaccggacaacttctggaactctaccgtggcacaaatgatgctgcgacccttgaaaaattatcgatgtgggacgatatagcagataaggcgattgccgaaaagacctttaccgactcactcaaccatatgtttgattcgctgctgcaactgcgacaagaagagctgatcgctcgcgatcgcactcacggtttaagcagcgaagaacgccgagagctctggacgttaaaccaggagctggccagaaaatga

SEQ ID NO: 38805 - DNA, 1983 bp, Salmonella typhimurium
atgccgcatatcgatcgggaagcccccgacagccgcagtgagaggcagcggccaaaatataagtatgccctcgctttaaatgtcgacagctataccgtcgacaccaatcaaacgaataagtgtggataccgtcttatggagcaaaacccgcagtcacagctgaaacttcttgtcacccgtggtaaggagcaaggctatctgacctatgctgaggtcaatgaccatctgccggaagatatcgtcgattcagatcaaattgaagatatcatccaaatgatcaacgacatgggtattcaggtaatggaagaagcgcctgatgccgatgatctgctgctggctgaaaataccaccagcaccgatgaagatgcggaagaagctgctgcacaagttctgtccagtgttgagtctgaaatcggtcgtacgactgacccggtacgcatgtatatgcgtgaaatgggcactgttgaactgttgacccgggaaggcgaaatcgacatcgctaaacgtatcgaagacgggatcaaccaggttcaatgctccgttgccgaatacccggaagccattacctatctgctggaacagtacgatcgcgttgaggctgaagaggctcgtttgtccgatcttatcaccggctttgtcgatccgaacgcggaagaagagatggcgccgaccgcaactcacgtcggttctgaactctcccaggaagacctggatgatgacgaagacgaagatgaagaagacggcgacgatgacgccgccgatgacgacaacagcattgaccctgaactggcacgcgaaaaattcgctgagctgcgcgcgcaatacgtcgttacgcgcgacaccatcaaagcgaaaggccgcagccatgctgccgcgcaggaagagattctgaagctgtctgaagtgttcaaacagttccgtctggtaccgaagcaattcgactatctggtcaacagtatgcgcgtgatgatggatcgcgtgcgtacccaggaacgtctgatcatgaagctctgcgtcgagcagtgcaaaatgccgaagaagaactttatcacgctgtttaccggtaatgaaaccagcgaaacctggttcaatgccgctatcgcgatgaacaaaccgtggtcggaaaaactgcacgatgtcgcggaagaagtgcaacgctgcctgcaaaaactgcggcagattgaagaagagaccggtctgaccatcgaacaggtgaaagacatcaaccgtcgcatgtccatcggggaagcgaaagcccgccgtgcgaagaaagagatggttgaagcgaacttgcgtctggttatttctatcgctaagaaatacaccaaccgtggcttgcaattccttgatctgattcaggaaggcaacatcggtctgatgaaagcggtagataagttcgaataccgtcgcggctacaaattctccacctatgcaacctggtggatccgtcaggcgatcacccgttctatcgccgatcaggcgcgcaccatccgtattccggtgcatatgattgagaccatcaacaagctcaaccgtatttctcgccagatgctgcaagagatgggccgcgagccaacgccggaagagctggctgaacggatgctgatgccggaagataaaattcgtaaggtgctaaagattgccaaagagccaatctccatggaaacgccgatcggcgacgatgaagattcgcatctgggtgatttcatcgaggataccaccctcgagctgccgctggactctgccactaccgagagcctgcgtgccgccactcacgacgttttggctggcctgaccgctcgtgaagcgaaagtgctgcgtatgcgtttcggtatcgatatgaacaccgaccacacgctggaagaagtgggtaaacagttcgatgttacccgcgaacgtatccgtcagatcgaagcgaaggcgctgcgtaaactgcgccacccgagccgttctgaagtgctgcgcagcttcctcgacgattaa

SEQ ID NO: 38806 - DNA, 870 bp, Salmonella typhimurium
atgagcacttttaaactcctaaaaactctcacatcgcgccgccaggtactcaaaacaggtctggcggccctgacgctgtcaggtatgtcgcacgcagtagccaaagaagaaacgctaaaaaccagtaatggtcacagcaaacccaaaaccaaaaaaaccggcagtaaacggttggtgatgctcgaccccggacacggcggcatcgataccggcgcgattggccgcaacggttctcaggaaaaacacgtcgtactggcaattgccaaaaacgtgcgcgctattttgcgaaatcacggaatcgatgcgcgtttaacccggacaggggatacttttattccgctgtacgatcgggtggaaatcgcccataagcacggcgcggatctgtttatgtccattcatgccgatggttttaccaatccgaaagcagcgggcgcttccgtttttgcgctttccaaccgcggggccagtagcgccatggcgaagtatctctccgagcgtgaaaaccgcgcggacgaagtggcgggtaaaaaagccactgaccgggatcatctattacaacaagttttgtttgatctggtgcaaaccgatacgattaaaaacagtctgacgctgggttcgcatattctcaagaaaatcaaacctatacataaattacacagccgcactaccgaacaagcggctttcgtggtgctaaaatcaccgtcaattccgtcggtgctggtcgaaacctcgtttattaccaatccggaagaagaacgcctgctgggcacgacggcgtttcgccagaaaatcgctacggcgatcgccaacggcatcatcagttattttcactggtttgataatcagaaagcacacacgaagaaacggtaa

SEQ ID NO: 38807 - DNA, 807 bp, Salmonella typhimurium
atggtggaaactctgcttgaagtgcgcaacctgagtaaaacctttcgctaccggacaggatggtttcgtcgccagaccgtcgacgccgtgaaaccattaagctttacgcttcgtgagcgtcagaccctggccattatcggcgaaaacggttccggcaaatccacgctggcgaagatgctggccggcatgattgaacccaccagcggcgagcttcttattgacgatcatcccctgcattacggcgactattcgtttcgaagccaacgtattcgaatgatttttcaggacccctcaacgtcactgaatccacgtcaacgtatttcgcagatccttgacttccccctgcgccttaataccgatctggagccggaacagcggcgcaaacagattgtcgagacgatgcgtatggtggggctattgcccgatcacgtaagctactacccgcatatgctggcgccggggcagaaacagcgtctgggcctggcccgcgcgctgattttacgccctaaagtcattatcgcggacgaagcgctggcttcgcttgatatgtccatgcgctcgcagctcatcaatctgatgcttgaattgcaggaaaagcaaggcatctcctatatctatgtcacgcagcatatcggcatgatgaagcatattagcgatcaggtattagtgatgcatcagggggaagtggttgaacgcggcagcaccgccgatgtgctcgcctctccgctacatgagcttacccgccgtttaatcgcaggccattttggcgaggcgctgaccgctgacgcatggcgaaaggatcgctaa

SEQ ID NO: 38808 - DNA, 1290 bp, Salmonella typhimurium
atgaaagcactaaaccgagaggtcattgactactttaaagagcatgtaaatccaggatttctggaataccggaaatctgttaccgccggcggggattacggagccgtagagtggcaagcgggcagtttgaatacgcttgtcgacacccaggggcaggagtttatcgactgtcttggggggtttggcatctttaacgtggggcaccgtaatcctgttgtggtatccgccgtccagaatcaactcgcaaaacaacctctccacagccaggagttacttgatcccttgcgggcgatgctggcaaaaacgctggcggcgctgacaccggggaaactcaagtacagctttttctgtaacagcggcaccgaatccgtcgaagcggcgctaaaactggcaaaagcgtatcagtcgccgcgcggcaagtttacctttatcgccaccagcggcgcatttcatggcaaatcattgggcgcgctctccgccacggccaaatccaccttccgcagaccctttatgcctttactgccgggcttccgccatgtgccgtttggcaatatcgacgcgatgagcatggcatttagcgaaggcaaaaaaacgggcgacgagatagcagccgtgattctggagcctattcagggtgaaggcggcgtgatcctgccgccgcagggatacctgacagaggtacgtaagctctgtgatgaattcggcgctctgatgattctggatgaagtacaaaccggcatggggcgtaccggcaagatgtttgcctgcgagcacgaaaatgtgcagcctgatattctgtgtctggcgaaagccctgggcggcggcgtgatgccgattggcgccaccatcgcgactgaggaggtgttttcggttctgttcgacaatcccttcctgcataccaccacttttggcggtaatccgctggcttgtgctgccgcgctggcgaccattaacgtcctgctggagcaaaatctcccggcccaggcggaacaaaaaggcgatacgctcctggatggttttcgacaacttgcgcgtgaatatcccaatctggtacacgatgcgcgcggcaaaggtatgttgatggccattgaatttgtcgacaacgaaacgggctaccgttttgccagtgagatgttccgtcaacgcgtgctggtcgctggtacgctgaataatgcgaaaacaattcgtatcgagccaccgctcacgctaaccattgaactgtgcgaacaggtattgaaatcagcgcgtaatgcgctggcggcaatgcaggtgagcgttgaagaggtttaa

SEQ ID NO: 38809 - DNA, 789 bp, Salmonella typhimurium
atgggttttctttccggtaagcgcattctggtcactggcgtggccagtaaactgtccatcgcctacggtatcgcacaggcgatgcaccgcgaaggagctgaactggcgttcacctaccagaacgacaaactgaaaggccgcgtagaagaatttgctgcccagctgggttccagcatcgttttaccgtgtgatgtcgctgaagatgccagcattgacgctatgtttgcggagctgggtaacgtttggccgaaatttgacggttttgtacactcgatcggtttcgcgcctggcgatcagctggacggcgattatgttaatgcggttacccgcgaaggctttaaagtcgctcacgatattagctcttacagctttgttgccatggcgaaagcctgccgcaccatgctgaatccgggttctgcgctgttgaccttgtcttatctgggagcggagcgcgccatcccgaactacaatgtcatgggtctggcgaaagcctctctggaagccaacgtgcgttatatggcaaacgctatgggaccggaaggggttcgcgtcaacgccatctctgcgggtccaatccgcacgctggcggcgtccggtattaaagacttccgtaaaatgctggcgcattgtgaagccgttacgccaattcgtcgcaccgtgaccattgaagatgtgggtaactcagcggcgtttctgtgttccgatctctcggcaggcatttctggcgaagtcgtccatgttgacggcgggttcagcattgcggcaatgaatgaactggaactgaagtaa

SEQ ID NO: 38810 - DNA, 981 bp, Salmonella typhimurium
atggaacaatgccgaaaagcgggtaaaagccactggtatcatgaaacacaatccactatgtcgtcacaaaccccgctttcgctaatgccggaagccgcgtatgttaacgatcgttttttactggatttaacggtagcagaaaccgcgttgacgccttttgagtcatggttaaagcccgctcgccagttggcggatgtcttatttccccgcacggttctcaacgaccggcttcatacgtttagcgcctatgaacgtatgagcaccgcgctgaccgccgctcaggtatttggggttcagcgtttgtgtcgctattatgccgcgcgtctggcgccgctacctggccctgacgcctcaagagagagcaatcaacggctggcgcaaattacgcaatacgctcgtcagcttgccggctccccctccgttatcaatacgcgggcccgcgaacagcttgcagaggtgggattaaccgcccgggataccgtactcatcaatcagatcattgggtttatcggttttcaggcgcgggtagcggcgatatttcaggcgttttgccgtctgcccgtgcgcgaactgcccggccaggagatgcagcgctttgccagggccgcgcggtttcaaaacccccagacgatatggcggcccgccgccagtctggtagaatatcctccagcccataccaaagttcggcggcaatattcgtcttcacaatgccaaatgatggcgccggtactcatgcgcgatccgtcttcattcgcgttactcgaacgcatactgaccagcacattacacactgcatcgcccccttctttacttccacttatcacgctcctcacatcacgtatcaacggcagcgccgcctgctttaacgaacaggcaacccaacctggcgcgtggcgtcgcgctgtcatcacgttacgccaggaagacgacgacatcgctcgttgggaacttgagcctgcgctgacacaggcgatacaatga

SEQ ID NO: 38811 - DNA, 1935 bp, Salmonella typhimurium
atgtttcaggacaacccgctgctagcgcagcttaaacagcaactgcattcccagacgccgcgcgctgaaggggtcgtaaaagccacggaaaaaggctttggcttccttgaggttgacgcgcaaaaaagctatttcattcctccgccgcagatgaaaaaagtgatgcatggcgatcgtatcgtcgcggtcatccacacggaaaaagaacgtgagtctgccgagccggaagaactgatcgaaccgttcctgacgcgttttgtgggaaaagttcagggtaaaaatgaccgcctgtccatcgtgccggatcatccgttgctgaaagacgcgattccctgccgcgccgcgcgcggcgttcagcatgagttcaaagaaggtgactgggcggttgccgaaatgcgccgccatccgcttaaaggcgaccgttcgttttacgccgatttaacgcagtacatcacctttgccgacgatcactttgttccctggtgggttacgcttgcccgccacaacctggaaaaagaagcgccgaacggcgtagcgacggagatgcttgacgaagggctagagcgtcaggatctgaccgcgctgaatttcgtcactatcgatagcgccagcactgaagatatggatgacgcgctatatgctgaggaattagcggacggcagactccagcttacggtggctatcgccgatcctaccgcctggattgccgaaggcagtaagctggataacacagcgaaaattcgcgccttcaccaactacctgccgggcttcaatattcctatgctgccgcgtgagctgtctgacgatctgtgttcgctgcgcgccaacgaagtgcgtccggcgctcgcctgtcgcatgataatcgccgcggacggcaccattgacgatgatatcgccttttttgcggccaccatcgaatcgaaggccaagctggcgtacgacaatgtctccgactggctggaaaataacggcacctggcagccggataacgaaggcattgcccagcagattcgtctgttgcaccgtatttgtctaagccgcagtgagtggcgtcatcatcatgcgttagtctttaaagaccgcccggattaccgctttgtgcttggcgaaaaaggcgaagtactggatattgtggcggaaccgcgccgtatcgctaaccgtatcgtagaagagtcgatgatcgccgctaacctttgcgccgcgcgcgtactgcgcgataagctcggtttcggtatttacaacgtacatacgggcttcgatcccgcgaatgccgacgcgctggccgcgctgctgaaaacgcatggtctgcatgtcgatgccgaagaggtgctgacgctggaaggcttctgtaaactgcgtcgcgaactggatgcgcagccctccggtttccttgacagccgcattcgtcgcttccagtcttttgcggaaatcagcaccgagccggggccgcatttcggtcttggtcttgaggcttacgccacctggacctctcctatccgtaagtatggcgatatgattaaccatcgcctgctgaaagcggtcatcaagggggaagctattgcgcgtccgcaggaagatatcacccaacaaatggcggaacgccgtcgcctgaaccgcatggcggagcgcgatgtcggcgactggttatatgcacgcttccttaacgataaggcggggacaaatacccgtttcgcggcagaaattattgacgtcagccgcggtggtatgcgcgtgcgactggtcgataacggcgctatcgcctttatccctgccccgttcctgcacgccgttcgcgatgaactggtatgcagccaggaaaacggtacggtacagattaaaggtgagacggtttataaagtgacggatgtcattgatgtcactattgcggaagttcgcatggaaacccgcagcattattgcccgaccggcagcgtaa

SEQ ID NO: 38812 - DNA, 1983 bp, Salmonella typhimurium
atgatgaaacagattcaggaacaaacggcgctaaatccccttcactctcactggcgtctggctgatgaccgcaacgtgctgtatctctccccgacaggtgaaacggatgcagaaaaaacggttgagctatcgccggaacaagccgggcgtatccgggaaataacggcgattacgtccagtctgctgataacgttgttgatagaaaaacaggttaccgctgtgcacctggtaggccgtaagattaataaccgtgaatgggctggcagcctggcaacctggcctgatacgcctgccgtctcgccaacgcaggcgcaggagctctcttttgccgagcaaatcgtatcagaagccaactcagtcattgcgatactggatagtcggggaaaaatctgtcgatttaatcggttatgcgaagagtacacaggcttaaaagagcgagatgtaattggtcaaagcgtctttaaattatttatgagccgccgggaggcggttgcctcccgacactacattgagaatttttttcgcaatggcaatgcctatgaaatcgaacgctggataaagacccgtaaaggccaacgcctgttcttatttcgtaataaattcgtccataacggtagcggaaaaaacgaaattttcctgatctgcgcaggcacggatatcaccgaagaaaggcgggctcaggagcgtttacgcatactggcgaatacagacaccgtcaccggcctgcccaatcgcaatgctattcatgaatttattaatcatgctattgcctcggctggcgagtcgcaggtgggtatcgtttatctcgatctggataacttcaagaaaattaatgacgcctatgggcatatgtttggcgatcagctcttacaggccgtttcgctggcgctgttgagttgtctggaggaagatcaattgctggccagactggggggagatgaattcattgtcctcgctgcccatacgtctcaggccgcgctggaagcagtagcctcacgaatccttacccgtctgcggcaaccgtttcgtattggactcattgaagtttacacgggatgcgccattggcatttcgttggccccccggcacggacaggacagcgaaagtctcattcgcactgccgacaccgcaatgtataacgccaaagaaggcggccgcggtcagttctgcgttttttcgccggaaatgaatcagcgcgtatttgactatcactggctggatacaaacctgcgaaaagcgctggaaaacgaccagttacttattcactatcagcccaaaattacctggcgcggcgaagtacgtagcctggaagcgctggtacgctggcaatcgccggaacgcggattaattccgccgctggagttcatctcatacgccgaagagtcaggactcatcgtcccgctgggccgctgggtgattctggatgtagttcgccagattgcgaaatggcgcgataaggggattaacttgcgcgtagccgttaacttttcggcgcgacaactggccgaccagacgctttttactgcgcttaaacaggctttgtacgatctgaattttgagtattgcccgatcgatgtcgagctaacggaaagctgcctgatcgaaaacgacacgctggcgctatcggttatccagcaatttagtcagctcggcgcccagattcatctggatgattttggcacagggtattcttcgctttctcaactcgcccggttccctattgatgccgttaaactggatcaggctttcgtcagagatatccataagcaaccgctgtcgcaatctctggttagggcgattgtcgcggtggctcaggcgctaaatttacaagtgattgccgaaggtgtagaaaatgctaaagaagatgccttcctgacaaaaaacggcgtcaatgaacgacagggctttttattcgccaaacctatgcccgccgtttcttttgaacgctggtacaaacgttatcagacgaaaaaaatgcgttaa

SEQ ID NO: 38813 - DNA, 999 bp, Salmonella typhimurium
atgatacgtttcgctgtaattgggactaactggatcacgcgccagtttgtcgacgccgcccatgaaaccggcaaattcaggctcgccgccgtttactcccgtagtcttgaacaggcgcagtctttcgcaaatgattatcccgtcgagcatctgtttacctcgctggaagcgatggcgcaaagcgacgcgattgaggcggtttatatcgccagcccgaattccctgcatttctcccagacgcagcgctttttgcagcataaaaaacatgtcatgtgcgaaaagccgctggcttctaacctggcggaggttgatgccgctatcgcctgcgcgcgcgataatcagcgggtactgtttgaagcctttaaaaccgcctgcctgcccaatttcctgctgctgcgggaatcgttgccgaaaatcggcagaatgcataaagcattactaaattactgccagtactcttcacgttatcagcgctatctgaacggtgaaaatccgaatacgtttaatccggccttctccaatggttcgattatggatatcgggtattactgtctggcgtcggcgatcgcgctatggggcgagccgcgcagcgttcaggcgtcggcgaatttattggaaagcggagtagatgcgcacggcgtcgtggttatggattacggcgattttagcgtcacgctacagcattccaaagtcagcgactcggtactggccagtgaaattcagggcgagaggggatcgctggtcattgaaaagctgtcggaatgccagaaagtgtgttttgcgccgcgcggcgcgctgatgcaggatctgacccagcctcagcatattaataccatgctgtatgaagccggggcgtttgcccagcttattgaaaaccacgccgtggaacatccggggttgtcgctaagtcgcgccacggcaaaatggctgacagaaatacgccgtcaaaccggggtcatcttcccggcggacgatctgacccatccccttactgcgtaa

SEQ ID NO: 38814 - DNA, 969 bp, Salmonella typhimurium
atgaatactgttggtacgccattattatggggtggattcgcggttgttgtggtgataatgctatccatcgacctgttgttgcagggacgccgtggcgcacatgcgatgtcgatgaaacaagcggcaggatggtcaatcctgtgggtaacgctctcgctactgtttaacgccgctttctggtggtatctggctgaaacgcaagggcgcgaagttgctgacccgcaggcattggcgttccttaccggctatctgattgagaagtcgctggccgtagataacgtctttgtctggctgatgctgtttagctatttctccgtccctccggctctgcaacgccgggtgctggtgtatggggttcttggcgcgatcgtgttgcgtactatcatgattttcgccggtacctggcttatcactcagttcgaatggctgctgtatgtgttcggcgccttcctgctgtttaccggcgtaaaaatggcgctggcgaaggaagatgaatccggcattggcgaaaaaccgatggtgcgttggctgcgcgggcatctgcgcatgaccgatacgatcgagaacgagcactttttcgtacgtaaaaacggcctgctgtatgccacgccgctgctgctggtgctgattatggttgagttcagcgatgtgatcttcgccgttgacagtattccggcgatctttgcggtcaccaccgacccgttcatcgtactgacctctaacctgtttgccatcttaggactgcgcgcgatgtacttcctgctgtccggcgtggcggaacgcttctcgatgctgaaatatggtctggcggtcattctggtctttatcggcattaagatgctgatcgtcgacttctaccatattcctatcgcgatttcgctgggcgtagtgtttggtattctgaccattacgctggtgattaacgcctgggttaaccatcagcgcgataagaaactacgagcgcaataa

SEQ ID NO: 38815 - DNA, 384 bp, Salmonella typhimurium
atgcttaaaccacgcataactgcccgacaactcatttggatcagcgcttttctactgatgctgaccatactcatgatgacgtggtcaacgctgcgtcagcaagagtcgacgctggccattcgcgcggttaaccagggcgccagtatgccagacggcttctcagttctgcatcatctggatgcgaacggcattcattttaaaagcattacgcctaaaaatgacatgttgctcattaccttcgattcccctgcgcaaagcgccgcagcaaaaacagtgcttgatcaaacgttaccacacggttatgtcgtcgctcagcaggacgatgacaacgaaacggtacagtggctgtcccgcttacgggaaagctcacaccgctttggctaa

SEQ ID NO: 38816 - DNA, 369 bp, Salmonella typhimurium
atgaaataccgcatcgctttggctatcacgctttttacacttagcgccggtagctacgctaattcgctttgtcaggaaaaagagcaggatatacaaaaggaaattagctacgctgaaaagcacaacaatcagcgccgtattgagggtctgaacaaggcgctcagcgaagtacgcgccaattgtactgacagcaagctgcgcgccgagcatcagaaaaagatcgctgagcaaaaagaagaggtagccgaacgccaacgtgatttagccgaggcaaaagcaaaaggcgatgcggataaaatagacaaacgtgaacgtaagctggccgaggctcaggatgagctaaaaaaacttgaggccagagactactaa

SEQ ID NO: 38817 - DNA, 306 bp, Salmonella typhimurium
atgtcgaaagataacactacggaacatctgcgcgctgagttgaaatccctgaccgatacgcttgaagaagtgctgagctcttcgggcgaaaagtcgaaagaagagttgagtaagattcgtagcaaagccgagcgcgcgctgaaagagagccgttaccgcctgggcgaaacgggtgatgtgattgccaaacagactcgcgtcgccgccgcccgcgccgatgattatgtgcgcgaaaatccctggacaggcgtaggcattggcgccgctgtcggtctggtgttgggcgtactgctgacgcgtcgttaa

SEQ ID NO: 38818 - DNA, 591 bp, Salmonella typhimurium
atgcagcttaaacgtgtggcagaagccaaactgccaaccccattgggtgactttctgatggtgggatttgaagaactggcaaccggacacgaccatgccgcgctggtttttggcgatatttcaggtaaaacgccggtactggctcgcgttcattccgaatgtcttaccggggacgcgctttttagtctgcgctgtgattgtggttttcaactggaagccgcgctgacgcatattgcggaagaaggacgcggtattctgatttaccaccgtcaggaaggccgcaatatcggcctgcttaataaaattcgcgcttatgcgttacaggatcaaggctatgacacggtggaggccaatcatcagctcggctttgccgccgatgagcgtgatttcaccctttgcgcggatatgttcaaattactcggcgtggatgaagttcgcctgctgaccaataatccgaagaaagtcgaaatactgaccgaggcgggaattaatatcgtggaacgcgttccgctcattgtgggtcgtaatccaaataatgagcattatctcgatactaaagcggccaaaatgggccacctactaagtaagtaa

SEQ ID NO: 38819 - DNA, 399 bp, Salmonella typhimurium
atggcggactctcgacaggcacaaggaccaggcaaaagcgtactgggtatcgggcagcggattgtcaccattatcgttgagatggtggaaacccggctgcgactggcggtagtagaactggaagaagagaaagcgaacctctttcagcttttgctgatggtaggtcttaccatgctcttcgcggcgtttggcttaatgagcctgatggttctggtcatctgggctatcgatcctcagtaccgtttgaacgcgatgatcgctaccacagttgtgctgttagtgcttgcgctaatcggcggcatctggactttgcgcaaagcgcgtcagtccacgctattgcgccatacgcggcacgaactggctaacgatcggcaaattctggaggacgatcagtcgtga

SEQ ID NO: 38820 - DNA, 987 bp, Salmonella typhimurium
atgggacaactgatcgatggcgtctggcacgatacctggtatgacaccaaatcttccggggggaaatttcagcgttcagcgtcggctttccgcaactggcttaccgctgacggcgcgcccggaccttccggcgaaggcggattcgccgcagaaaaagatcgttaccatctgtacgtttcccttgcctgcccctgggcgcatcgcacgctcattttccgtaaactgaaaggtctggagccgtttattccggtttccgtcgtgaatccattgatgctggaaaacggctggacgtttgatgatacttttccggcggccaccggcgataccctctatcagcatgaatttctctaccagttgtatctgcacgccgatccacactacagcggccgcgtcaccgtaccggtcttatgggataaaaaaaatcatactatcgtcagcaacgagtccgccgaaatcattcgtatgtttaactccgccttcgatgggctgggcgctaaagccggggattactatccccccgcgctgcaaagcaaaattgacgagttaaacggctggatttatgacaacgttaataacggcgtttataaagcaggcttcgccaccagccagcaagcgtatgatgaagcggtagacaaggtatttactgcgctggcgcgcctggaacagattctcggacagcaccgctatctgacgggcgaccagttgaccgaggcggatatccgcttatggacgaccctggtacgctttgatccggtttacgtgactcatttcaaatgcgacaaataccgaatcagcgactacctgaatctgtacggtttcctgcgcgatatctatcaaatatcgggcattgctgaaactgttaatatggaccatattcgtcaccactatttccgtagccataaaacgattaaccccacgggtatcatttctgtcggaccgtggcaggatctgctcgaacctcacgggcgcgacgtgcgctttggctaa

SEQ ID NO: 38821 - DNA, 951 bp, Salmonella typhimurium
atgaaccagctagacggcatcaaacaattcactaccgtcgtcgccgatagcggcgacatcgagtccatccgccactaccagccgcaggatgccacgacaaatccctctttactgttaaaagccgccgggcttgagcagtatggtcatttgattgaggatgcgattgcctgggggaaaaaacacggcggtacgcaggaacagcaggttgcggcagccagcgataaactggcggttaattttggcgcggaaatactgaaaagtattcccggtcgcgtctccactgaagtcgacgcgcggttatcgttcgataaagaaaaaagtatcgagaaagcgcgccatctggtggatctctaccagcagcagggtgttgataaatcacgcattctgatcaagctcgccgcgacctgggaaggtatccgcgccgccgggcagctcgaaaaagagggtattaattgcaacctgacgttgttgttctcttttgcccaggcgcgcgcctgcgccgaagcgggcgtctatttgatctctccgttcgtgggccgaatttacgactggtatcaggcgcgtagtccgctggagccgtatgtcgtggaggaagatcccggcgtgaaatcggtacgcaatatctacgattactttaaacagcatcgctatgaaaccatcgtgatgggggcaagtttccgccgtactgagcaaatcctcgcgctaaccggctgcgatcgactgactatctcccctaacctgcttaaagagctgaaagaaaaagaagaaccggtgatccgtaaactggtgccttcctcgcagatgttccaccgtcctacgccaatgacggaagcggagttccgctgggaacataatcaggacgcgatggccgtagagaagctgtcggaaggtatccgtctttttgccgttgaccagcgcaaactggaagacctgcttgccgccaaactataa

SEQ ID NO: 38822 - DNA, 2001 bp, Salmonella typhimurium
atgtcccgtaaagaccttgccaatgcgattcgtgcgctgagcatggatgccgttcaaaaagccaattccgggcaccccggcgcgccgatggggatggcggatatcgctgaagtgctatggaacgattttcttaaacataaccccaccgatccgacctggtatgaccgtgatcgttttatcctttccaacggtcacgcctccatgctgctctatagtctgctgcatttaaccgggtatgacctgccgctggaggagttaaaaaacttccgtcaactgcactctaaaacgccaggtcacccggagattggctatacgcccggcgttgaaaccaccaccggaccgctgggccaggggctggcgaatgccgtcgggctggcgattgccgagcgtacgttaggcgcacagttcaaccggccggaccatgagattgtcgaccactacacctatgtctttatgggcgacggctgtctgatggaggggatctcgcatgaggtgtgttcgctggctggtacgctgggactgggcaaactgatcggcttttacgatcacaacggcatctccattgatggcgaaaccgaaggctggtttaccgacgataccgccaaacgttttgaagcctaccactggcatgtcgtacatgacattgacgggcacgatccggaggcggtgaaaaaagccattctcgaagcccagagcgtaaaagataaaccttcgctaattatctgtcggacggtgataggttttggctcgccgaataaagccgggaaggaggagtcgcacggcgcggcgctgggcgaagaagaggtggcgctgacccgccagaagctgggatggcatcatccggcgtttgagatcccaaaagaaatttaccgcgcgtgggatggccgtgaaaaaggcgagaaagcgcagcagcagtggcaggaaaagtttgctgcttatgagaaggcttatcctgagctggccgcggagtttacccgccggatgagcggcggactgccggaggcatgggaatccgccacgcaaaaatttattaacgacttgcaggctaatccggccaaaatcgccacccgtaaagcatcgcaaaatacgctcaatgcctacggtcccctgttgccggaactgttgggcggatcggcagatctggcgccgagcaacctgactatctggaaaggttcgacctcgttgaaagaggatccggcaggtaattatatccactatggcgtgcgcgaattcggcatgaccgccattgctaacggcatcgcccaccacggcggctttgtaccgtataccgccacgtttctgatgtttgtcgaatatgcgcgtaacgcggcgcgtatggcggccttaatgaaagcccggcagattatggtctatacccacgactccatcggtttgggcgaagatggcccgacgcaccaggccgtggaacaactggcgagcctgcgcttaacgcctaacttcagcacctggcgtccctgcgatcaggttgaggcggcagtcggctggaagctggccattgaacgtcagcacgggccgacggcgctgattctctcgcggcagaatctggcgcaggtggaacgcacgccggaacaggtgaaagcgattgcccgcggcggttatattctgaaagatagcggcggcaagccggatatcattctgatcgctaccggatcggaaatggaaattaccctacaggcggcggaaaaattgactggcgaggggcataacgttcgcgtggtgtcgttgccttcaacggatattttcgatgcgcaggacgaggcatatcgcgaatcagtgctaccggcacacgtaaccgcccgcgtcgcggtggaggccggtatagccgactactggtataaatatgttggcctaaaaggcgcaattatcggcatgacgggatacggtgaatccgctccggctgacaaactgttcccgtattttggctttaccgtggaaaatattgtagaaaaagcccgccgggtgctaaacatcaaaggctaa

SEQ ID NO: 38823 - DNA, 1332 bp, Salmonella typhimurium
atggaatcggcaagtaataccagcgtaatcctcgacgcatcagccccggcgcgtcgggcagggatgactgaaagcgaatggcgtgaagccatcaaatttgatagtaccgacaccggttgggtcattatgagtatcgggatggcgattggcgcagggatcgtttttcttcctgtccaggttggcctgatgggactttgggtctttttactctcttctattattggctatccggccatgtacctgttccagcggctgtttattaatacgctggcggaatccccggaatgtaaagactaccccagcgtgatcagcggctatctgggcaaaaactggggtattttattaggcgcgctgtactttgtgatgctcgtcatctggatgttcgtctattctacggcgattactaacgacagcgcctcttatctgcatactttcggcgtaacggaaggattgctttccgatagtccattttatggtctggtgctgatctgcatcctggtggcgatttcctcacgcggtgaaaaattactgttcaaaatctccactggcatggtgctgaccaagctactggtagtggcggcgctgggcgtctctatggtgggtatgtggcatctgtataacattggcgcgctgccgccgatggccctgctgattaaaaacgccattattaccctgccatttacgctgacctcgattttatttatccagacgttaagcccaatggtgatctcttaccgttcacgcgaaaaatctattgaggtcgcacgccataaagcgctgcgtgccatgaatattgcgtttggcatcctgttcgttaccgtatttttctatgcggtttccttcaccctggcgatggggcatgacgaagcggtgaaagcctacgagcagaatatttccgccctggcgatcgccgcgcaatttattagcggcgatggcgctggctgggtcaaagtggttagcgtaattctgaacatctttgccgtcatgaccgccttctttggcgtttatttaggattccgcgaagcgacgcaaggcattgtgatgaatatcctgcgccgtaaaatgcccgccgagaagattaaggaaaatctggtacagcgcggcattatgattttcgctattttgctggcctggagcgccattgtgctcaacgcgccggtactgagcttcacctctatttgtagccctatcttcggtatggtgggctgtttaattccggcatggttggtctacaaggttcccgcattgcacaaatataaaggcgcttcgttgtacctgattattattaccggtctgctgctatgcgtttctccgttcctggcattctcttga

SEQ ID NO: 38824 - DNA, 762 bp, Salmonella typhimurium
atgcattaccaaccgaaacaagatctattgcaaaaccgcattattctggtcactggcgccagcgatggcattgggcgggaagccgcgctcacgtatgcgcgttacggcgcaacggtgattctgctgggacgcaacgaagagaaactgcgtcgggtcgcgcagcacattgctgacgagcaacatgttcaaccacagtggtttacgctcgatctgctgacctgcaccgctgaagagtgccggcaagtggccgaccgcatcgccgcgcactatccccgcctggatggcgtcctgcacaatgccgggttactgggggaaatcggcccaatgagcgaacaagatccgcagatctggcaggatgtcatgcaggtaaacgttaacgccacctttatgctcacccaggcgctgttaccgttattattgaagtccgatgccggctcgctggtctttacgtcatcaagcgttggccgtcagggacgcgccaactggggcgcctatgccacctcgaagtttgctactgaaggaatgatgcaggtgctggcggacgaataccagaaccgttctctgcgtgttaactgcattaacccgggcggcacgcgcaccagtatgcgcgccagcgcctttccgacggaagatccacagaaattaaaaacgcctgccgatattatgccgctttacctgtggcttatgggcgacgacagtcgccgtaaaaccggtatgacctttgacgcccaaccgggccgtaaaccaggaatcgcccaatga

SEQ ID NO: 38825 - DNA, 1701 bp, Salmonella typhimurium
gtgacggttaaacgcccggtctcggccagtctggctaaggcttttttctatattgtgctgttgtctattctgtccaccggcagcgcattactgacgctgaccagcagtttacgggatgccgaagcgatcaatatcgccggttcgctacgaatgcagagctatcggctgggttacgatctgcaaagccgtagcccgcagattaatgcgcatcgtcaacttttccagcacgcgctcaactcgccggtactgcaaaatctcaacgcctggtatgtgccgcaggcggtaaaaactcgctacgagcgcctgcacgccaactggctggagatgaatagccgcctacaggacggcgacattgcctggtatcagaccaatatcaacaattacgtcaatcaaattgatctcttcgttctggcgttacagcattacgccgagcgtaaagtcatgctggtcgtcgccatatcgctggcgggcggtatcggcatatttacgctggtcttttttaccctacgacgtattcgccagcaggtcgttcgcccgctgaatcaactggtcaccgccagtcagcgaattgaacatggtcagttcgccccgctgccgctggataccagcttacccaatgagctgggattgttggcgaaaacgtttagccagatgtcgagcgagctgcataaactttatcgttcgctggaagcctcggtggaagaaaaaacgcacgatctgcacgaagcgcaccgccgcctggaggtgttataccagtgctctcaggcgctgaataccagccaaatcgacgtccactgttttcgccatattttgcaaattgtccgtgaacatgacgccgcttggtatctggagttaaccgtgggcgataactggcggattagcgaaggcacgcaaagccccgacctgccgatgcaaatgctgccagtgacgatgcaggacacggtctatggcgaactccactggcaaagccccaacgttaatgcctctacgccgctgctgaacagcgtctccacgatgctggggcgtggtttgtactttaatcaggcgcaaaaacacttccagcaacttttgttaatggaagagcgcgcgacgattgcccgtgagctacacgattcgctggcgcaggtactttcttatttacgtattcagttaacgcttttgaagcgcgctattcctgaggataacgccggcgcgcaaagcatcatggcggatttttccagagcgctgaacgacgcctaccgtcagcttcgcgagctactcaccacgttccgtctgacgttacagcaggccgatttaccctccgcattgcatgagatgctggaagatttacagagtcagaccccggccaaactcacgttggattgccgtttacccacgctggcgctggatgcgcaaatgcaggtgcatttgttgcaaattgtgcgtgaagcggtcctgaacgccattaaacacgccaacgcgagcgaaatcgccgtgagctgcgtcaccgcgcctgacggcgatcataccgtttatattcgcgataatggcattggtatcggcgaaccgcatgagcctgccggacactatggtctgaatataatgcgtgagcgcgcggagcgccttggcggcacgctgaatttttcgcaaccctccggcggcggcacactggtcagtatcagttttcgctcctccaacaaggaagagagtcagttaacgtaa

SEQ ID NO: 38826 - DNA, 1596 bp, Salmonella typhimurium
atggctgatattctgctgctcgataacatcgactcgtttacctggaacctggcagatcagctacggaccaacggtcataacgtggtgatttaccgtaaccatattccggcgcagacgcttatcgatcgcctggcgacaatgaaaaatccggtgctaatgctctcccccggtccgggcgttcccagcgaggcaggctgtatgccggagctgctgacccgactacgcggcaagttaccgatcatcggcatttgtctggggcatcaggcgattgtcgaagcttacggcggttatgtcggtcaggcgggagaaatcctgcatggcaaagcctccagcattgagcatgacggtcaggcgatgttcgccgggctggcgaatccgctaccggtcgcgcgttatcattcgctggtcggcagtaatgttcctgccgggctgaccattaacgcccatttcaacggcatggtgatggcggtacgtcatgatgcggatcgcgtttgcggttttcaatttcatcctgagtccatcctgacgacacagggcgcgcgtctactggagcaaacattagcctgggcgcagcaaaagctggaaccgaccaacaccctacagccgattctggagaaactctatcaggcgcaaacactgacgcaacaagagagccatcagttgttttcggcggtcgtccgcggcgaacttaagcctgaacagctcgccgccgcgctggtgagcatgaaaattcgcggcgagcatcccaatgaaattgccggcgccgccactgcgttactggaaaatgccgccccgttcccgcgcccggagtatctgtttgcggatatcgttggtaccggcggcgatggcagtaacagtatcaatatctctaccgccagcgcctttgtcgcggcggcctgtggactgaaagtggcgaaacacggcaaccgtagcgtgtccagcaaatcggggtcatccgatctgctggcggcgttcggtattaatctggatatgaacgccgataaatcacgtcaggcgttagatgaactgggcgtctgtttcctgtttgcgccgaaatatcacaccggactccgtcacgcgatgccggttcgccaacagttaaaaacgcgaaccctgttcaacgtactcggcccgctgatcaacccggcgcatccgccgctggcgttgattggcgtctatagcccggaactggtgctgccgattgcggaaaccttacgggtactgggctatcagcgcgcggcggtggtacatagcggcggcatggatgaggtttcgctccatgcgccgacgattgtcgcggagctgcatgatggcgaaattaaaagctatcaacttacggcggaggattttggcctgacgccttaccatcaggatcagttggctggcggcacgccggaagaaaaccgtgacattctgacgcggttattacaaggtaaaggcgatgccgcgcatgaggccgccgtcgccgccaacgtggcgatgctgatgcgtctgcatggtcaggaagatctcaaggccaacgcgcaaaccgtgcttgatgttctgcgcaacggcaccgcatatgacagagtcaccgcactggcggcaagagggtaa

SEQ ID NO: 38827 - DNA, 1359 bp, Salmonella typhimurium
atgcaaaccgttttagcgaaaatcgtcgcagacaaggcgatttgggtagaagcccgcaaacagcaacagccgctggccagttttcaaaatgagatccagccaagtacacgccatttttatgatgcgctccagggcgcgcgtaccgcctttattctggagtgtaagaaagcatcgccatcaaaaggcgtgattcgcgacgatttcgatccggcgcgtattgccagtatttatcaacattacgcctcggcgatctcggtgctcaccgacgaaaaatattttcaggggagcttcgattttctgccggtcgttagccaaagcgcgccgcagccgattctgtgtaaggattttattatcgatccctatcagatctaccttgcccgttactatcaggccgatgcctgtttactgatgctctcggttctggatgacgaacagtatcgccaactctccgccgtcgcgcacagtctgaaaatgggcgtgctcacggaggtcagtaatgacgaagaacgggagcgcgcgatagcgttaggcgcaaaagtggtaggtatcaacaatcgcgatctgcgcgatctgtcgattgatttgaatcgcacccgccagctggcgccaaaactgggccacggcgtgactgtcatcagcgagtccgggattaacacctatggtcaggtacgcgaactgagccacttcgccaacggttttttaattggctccgcgttaatggcgcatgacgatcttaacgccgccgtccgtcgcgtgctgcttggcgaaaataaagtctgcggcctgacccgcgcccaggacgctaaagcggcctgtgacgctggcgcaatatatggcgggttgatttttgtgccctcatctccgcgcgcggttagcgttgagcaggcgcgagaagtgataagcggcgcgccattgcagtatgtcggcgttttcaagaacgctgatatcgccgatgtttgccagaaagccgccgtcctgtcgctttctgccgtacagctacatggcagcgaagaccaggcgtatgtcaacgcgctgcgcgaggcgttgccgaaacaggtgcaaatctggaaggcgctgagcgttagcgatgcccttcccgcacgcgattatcaccatgtcgataaatacattttcgacaatgggcaaggcggcagcgggcagcgcttcgactggtcactgctacaggggcaaccgctggataatgtgttactggcgggcgggctggcggccgataactgcgtccaggcggcgcaagtcggctgtgccggtctcgattttaattcaggtgtggagtcacagccgggcatcaaagatgctcgtcttctggcctcagtttttcagacactgcgcgcatattaa

SEQ ID NO: 38828 - DNA, 1194 bp, Salmonella typhimurium
atgacaacacttctcaacccctactttggtgaattcggcggcatgtatgtgccgcagatcctgatgcctgcgctgaaccagcttgaagaggccttcgtcagcgcgcaaaaagatcctgaatttcaggcgcaattcgccgatctgctaaaaaactacgcgggacgccccaccgcgctgacgaaatgccagaacattaccgccggtacgcgtaccacgttgtatttaaagcgcgaagatttactgcacggcggcgcgcacaaaaccaatcaggtactgggtcaggcgctgctggccaaacggatgggtaaaagcgagattatcgctgaaaccggcgccggtcagcacggcgtcgcctctgcgctcgccagcgccctgctgggtctgaaatgccgtatctatatgggcgccaaagacgttgagcgccagtcgccgaacgtcttccgtatgcgtctgatgggcgctgaggtcatcccggttcatagcggctccgctacgctaaaagatgcctgtaacgaggcgctgcgcgactggtccggtagttacgaaaccgcgcactatatgctcggcacggcggcaggaccgcatccctatcccaccatcgttcgcgagttccagcgcatgattggcgaagagacgaaagcgcaaatcctcgacaaagagggccgtctgccagatgccgttatcgcttgcgtcggtggcggctcaaacgctatcgggatgtttgccgattttattaatgataccagcgtcgggctaataggcgttgaacctggtggtcatggtattgaaaccggcgagcatggcgcgccgcttaaacatggtcgcgttggcatctatttcgggatgaaagcgccgatgatgcaaacagcagacgggcaaattgaagagtcctattccatttccgccgggctcgatttcccgtccgttgggccgcaacatgcgtacctgaacagcatcggacgcgcggattatgtctccattaccgatgatgaggcgctggaagccttcaaaacgttgtgccgccatgagggaattatcccggcgctggagtcctcccacgcgttggcgcacgctctgaaaatgatgcgcgagcagccggaaaaagagcaactgctggtggtcaatctctctggccgcggagataaagacatctttaccgtacacgatatcctgaaagcgcgaggggaaatctga

SEQ ID NO: 38829 - DNA, 855 bp, Salmonella typhimurium
atgttcattatttccagtaaaaatatgctccagaaggcccagcatgcaggctatgccgtgccagcctttaacatccataacctggaaaccttgcaggtggtggtagaaaccgccgcagaaatgcgctcaccgctgatcgttgccggaacaccaggcacgtttagctatgccggaatgggtaacattgtggcgatcgcgggcgatctggctcgtgaatacaatctgccactggccattcatctggatcatcatgaatcgttagccgatattgaaagcaaagttatggcagggatccgttcagtcatgatcgatggttcccactttccctttgaagagaatgtggcgctggtgaaaagcgtggtcgatttttgccatcgctacgacaccagcgtggaggcagaactgggccgccttggtgggatcgaagatgatttagtggtagacagcaaagatgccctttacaccaatccacagcaagcacgtgagtttgtggcgcgcaccggcattgattcgctggcggttgctatcggcacggcacacggcatgtatgccgctgaacctaaacttgattttgagcgactggcagaaatacgcgctctggtggatatccctctggtattgcatggggcatctggtttgccggaaagcgatattcgccaggccatcagccttggggtatgcaaagtcaatgttgccaccgaactgaaaatcgccttctccgacgccttaaaagagtatttcctacaaaacccgaaagccaatgatccccgccactatatgcaaccagcaaaacaggcgatgaaagaggtggtacgcaaagtaattcatgtttgcggctgtgaagggcaactgtga

SEQ ID NO: 38830 - DNA, 915 bp, Salmonella typhimurium
gtgatctacacgctaacacttaatagcgcgattgatatgaatatatttagcgatcctttacagccaaatattgtcaatcgcactcaccacaccgagttttgcccaaatggtaaaggggtaaatgttgcgctggttctggatcactttcaaatacctgcgcatatattaggcatttttggtggtttcaccgggcattatattgtagaaagcctgcgtacccgaaaaatgccagtcacaccagcatgggtagaagaacccacgcggattaatattttcattcatgacggtaagcaggaatataaactggtcaaccctggctcatatattccagatgaatgtaaacaacaaattatcacgattatttcgcaactgcccgatgcagactatctggtgataagcggcagcctgccacaaggtattgaaagccgcttttacgcagaaatcatgcatatttgtcagcaaaaaaatatcggcgtaattttagatattagtcatccgtcattacgtcagttactggagttcaaaccgttattaattaaaccaaatgatgaagaggttaaagcaatattcggtttaactgtctctgacgacaatgatgcgaaaaatactctaaccactttacatgcacttggtgcacaaaatgttctgctaacccttggcgctaaaggaatgtatttctccaatgggattgattactggttttgtagcgcgccaacggttgatttggtgagctccgcctgtgcaggcgatgctgcactggccgcctttctcagccagtggttatctacaggagaagtggaatatgccttatctcttgccagtgcaacaggagctgatgtcgcaagttctgccggactaggccaacttgcggcaatagaaaccttactttcgcaaatccacgtcagaaagctgtag

SEQ ID NO: 38831 - DNA, 1428 bp, Salmonella typhimurium
atgaaaaagatcattgcagtgaccggctgccctaccggtattgcgcatacatttatggctgaagaagccttaaaaaatgccgcgaaaaaattatctgttgaaataaaagttgaaaccaatggtgccagtggcgttgaaaatgctattcaacctgctgatctggtagatattgccggagtcattattgcggcggataaagatgtcttacctgatcgctttaatggtttaccggttattgaagtaccggtaaaagaagcaatccatcatcctgcggagctgattaacaaagttattaatggtgaagccccaatacgtaaaggcgaatcaaccaccagcacggaaattatcgaaaaagaatcactggggcgacaaatttataagcacctgatgagtggtgtttcaaatatgctaccttttgtagttgccggaggcatattaattgcggtgtcgtttttatgggggatttattccgctgatcctaattcagctgaatacaatgcaaccgccgcaatgctaatgaaaatcggtcagcaagccttttcgattatggttccggtctttaccgcttatattgcattctctatttctggcagaccagggatggtggctggatttgtcggcggcttactggcaaatgctaccggcgcaggatttcttggtgggataattgccggattcgccgccggttacctgatgttatgggtaaagaatcgactcgaaggcttaccgcgtcagtatgaaggcctgaaatcgatttttattatgccgctcattggcgtactggttattggcgtgttgatgtcgctgcttgggcaacctgtcgcagctatcaataatagcatgatgaactggctggcatcgctacaggaagcgaatccaatattgctgggtattgtggtgggtgcaatgtgctcctttgactttggcggcccggtaaacaaagccgcttatgtcaccggcacgcttttactgggccaaggcaacttctactttatggctggtgtgtctgccgcatgtattactccaccactggtaattgctctggcgaccaccttctttccaaaaggttttagcgaggaagaacgtgccgcaggcatggttaactatatcctcggttgtacacacatcactgaaggcgcgattcctttcgcagcgaaagatcctttgcgtgtcatcccgatgatgatgattgcttccagcatttccgcagtacttagctacagcttgcgtattcaggttccggctcctcacggcggcttcttaattttacctttggtgagtcagccgctggcctgggtgttatgtatccttgcgggctctgcatgtggtgcggtgatgcttggcctatggagattgtgggctgtgcgcaaaaattcagtcaacacaactcctgtagcaaaggctggaggtcagaatgcagctctgtga

SEQ ID NO: 38832 - DNA, 540 bp, Salmonella typhimurium
atgaagcagtttctggattttttaccgctggttgtcttttttgcgttttataaactttatgacatctatgcggcgacctccgcactgattgtcgcgacggcaatcgtgctgatttatagctgggtgcgctatcggaaaatagagaagatggcgctgattacctttgttctggttgccgtcttcggcggtctgacgctcttcttccataacgatgaatttattaaatggaaggtgacggttatttatgcgctgttcgccggcgcgctgttaataagccagtgggtgatgaaaaaaccgttaattcaacgtatgttaggtaaagaactggcgttgccgcagcaggtctggtcaaagctgaacctggcgtgggcgctgttttttattgcgtgcggtctggctaacatttatatcgccttctggttgccgcaaaatatctgggtcaactttaaggtctttggactcacggcgctgacgctcatttttaccctgctgagcggcgtctatatctaccggcatctgccacaggaagataaatcataa

SEQ ID NO: 38833 - DNA, 402 bp, Salmonella typhimurium
atgacaacaatggataatactcctcagggcgagctggttttacgtacattggccatgcctgccgataccaatgcgaacggcgatatttttggcggctggctgatgtcgcaaatggatattggcggcgcgatactggccaaagagatcgcgcacggtcgggttgtaaccgtacgcgtggaaggaatgacatttctgcgccccgtcgcggttggcgatgtcgtatgctgctacgcgcgctgcgttaaacgcggtacgacgtctattagcataaatattgaagtctgggtgaaaaaagtcgcgtcagaaccgattgggcagcgctacaaggccaccgaggcgctgtttatttatgttgccgtcgatccggacggtaaacctcgcccgctcccggttcagggttaa

SEQ ID NO: 38834 - DNA, 909 bp, Salmonella typhimurium
atgatgttaagtaagaaaaacagcgagacgctggaaaatttcagtgaaaagctggaggtggaaggtcgcagcctttggcaagatgcccgtcggcgctttatgcataaccgtgcggcggtggccagtcttattgtcctgtttctgatagccctgttcgtgacagtggcgcctatgctgtcgcaatttacctatttcgataccgactggggcatgatgtccagtgcgccggatatggcgtccggtcactatttcggcactgactcttccgggcgcgatctgttggtgcgcgttgccatcggcgggcgtatctcattaatggtcgggattgccgccgcgctggtggcggtcattgtcggaacgctgtatggctcgctgtccggctatctgggcggcaaaattgattctgtgatgatgcgtttgttggagatcctcaactcgttcccgtttatgttctttgtgattttgctggtgacgttttttgggcagaacattctgttgattttcgtcgccatcggcatggtctcctggcttgatatggcgcgtatcgtgcgtggccaaaccctaagtcttaaacgtaaagaattcatcgaagccgcgcaggtgggtggtgtgtcgactgccagcattgtgatccgccatattgtgcctaacgtcctgggcgtagtggtagtgtatgcatcgttgctggtgcccagcatgattctgtttgagtctttcctcagtttcctggggcttgggacgcaggaaccgttaagcagttggggagcgttattgagcgatggcgcaaattcaatggaagtctcaccgtggctgctgctgtttccggctggctttctcgtggtgacgttattctgttttaactttattggcgatggcctgcgtgatgccctcgacccgaaagatcgttaa

SEQ ID NO: 38835 - DNA, 1350 bp, Salmonella typhimurium
atgttatcctctcaaacttcctcaatttttaccgtaagccgccttaaccagacggttcgtctgctgttagaacaggagatgggacaggtatggatcagcggcgagatttctaatttcacgcagcctgcgtcgggccactggtactttacgctcaaagacgataccgctcaggtgcgctgtgcgatgttccgtaacagcaatcgccgggtgacgttccgcccgcagcacgggcagcaggtgctggtacgcgccaacattacgctgtacgagccgcgcggcgattatcaaatcatcgccgaaagtatgcagcccgcgggcgaaggcttgttgcagcagaaatatgagcagctaaaagccaaactgcaggccgaaggcttgttcgatcagcagcataaacagccgttgccctccccggcccactgcgttggggtgatcacttcgaaaaccggcgcggcgctgcacgatattctccacgtgctaaagcgtcgtgacccatccctgcccgttattatctatccaaccgcagtccagggcgacgacgcgccggggcagatcgttcgtgctatcgaactggcgaacgcgcgcggcgaatgtgatgtactgatcgtcgggcgcggcggcggttcgctggaagatttgtggagttttaacgacgaacgcgtggcgcgggcgatttttgccagccgcattccggtggtcagcgccgtcggtcacgaaacggacgtcacgatagctgattttgtcgccgacctgcgcgcgcctacgccatcagcagcggcagaaattgtcagccgtaaccagcaggagttgttgcgtcagatccagtccgcccagcagcgtctgggcatggcgatggactactacctcgccaatcgcagccgccgtttcacgcagatttttcaccgtctgcaacagcaacatccgcaactgcgtctggcccgtcagcaaaccgcgctggaacgtctacgccaacggatgggatttgcgcttgaggccaggattaagcaggccaatcaacgccaacagtgcgtaagtcaacgcctgagccagcaaaatccgcagccgcgcattcaccgcgcgcagtcgcgcatccaacagcttgaatatcgtctgacggagaatatccgctcacggttaagcgaacagcgcgagcgttttggcaacgcggtcacgcatctggaagcggtcagcccgttagccacgctggcgcgcggctatacggtttcgacgacaacggacggcaaggtgctgaaaaagatcaaacaggtcaaagcaggcgatatcatgaccacgagactggaggacggctggcttgaaagtgaagtcaaatccgtcacgccgggcacgtaa

SEQ ID NO: 38836 - DNA, 2679 bp, Salmonella typhimurium
atggctgttactaatgtcgctgaacttaacgcactcgtagagcgtgtaaaaaaagcccagcgtgaatatgccagtttcactcaagaacaggtcgacaaaatcttccgcgccgccgctctggctgccgctgatgcccgcattccgctggccaaaatggccgtcgccgaatccggtatgggtatcgtggaagacaaagtgattaaaaaccacttcgcttctgaatatatttacaacgcctataaagatgaaaaaacctgcggcgtgctgtctgaagacgacaccttcgggaccatcaccattgctgaacctatcggcattatttgcggtatcgttccaaccactaacccaacctctaccgcgatcttcaaatcgctgattagcctgaagacccgtaacgccatcatcttttctccgcatccgcgcgctaaagaagcaaccaacaaagcggcagacatcgttctgcaagcggctatcgctgccggcgcgccgaaagatctgattggctggatcgatcaaccttccgtagaactgtctaacgcgttgatgcaccacccggatattaacctgatcctcgccactggcggtccaggcatggttaaagctgcatacagctccggtaaaccggctatcggcgtaggcgcaggcaacactccggttgtcattgatgaaaccgctgatatcaaacgcgctgtggcgtctgttctgatgtctaaaaccttcgataacggcgtaatctgtgcttctgaacagtctgttgtcgttgttgattccgtctatgatgccgttcgcgaacgtttcgccagccatggcggctacatgctgcagggccaggagctgaaagcggttcaaaacgttatcctgaaaaatggcgctctgaacgccgctatcgtcggccagccagcctacaaaatcgctgaactggcaggcttctccgtaccagaaaccaccaagattctgatcggtgaagttacggtcgttgacgaaagcgaaccgttcgcacacgaaaaactgtctccgactctggcgatgtatcgtgcgaaagatttcgaagaagcggtagaaaaagcagaaaaactggtcgctatgggcggtatcggtcacacctcctgcctgtacactgaccaggataaccagccagaacgcgttgcttacttcggtcagatgatgaaaaccgcgcgtatcctgatcaacaccccggcctctcagggtggtatcggtgacctgtacaacttcaaactcgcaccttccctgacgttgggttgtggttcctggggtggtaactccatctctgaaaacgttggtccgaaacacctgatcaacaagaaaaccgttgctaagcgagctgaaaacatgttgtggcacaaacttccgaaatctatctacttccgccgtggctctctgcccatcgcgctggatgaagtgattactgatggccacaaacgtgcgctcatcgtgactgaccgcttcctgttcaacaacggctatgcagaccagatcacctctgtgctgaaagcggctggcgttgaaaccgaagtcttcttcgaagttgaagcagacccgacgctttccgttgttcgcaaaggcgctgagctggctaactccttcaaaccggacgtgatcatcgcgctgggcggcggttccccgatggacgccgcgaaaatcatgtgggtcatgtacgaacatccggaaactcacttcgaagaactggcgctgcgctttatggacatccgtaaacgtatctacaagttcccgaaaatgggcgtgaaagcgaaaatgatcgccgtcaccaccacttccggtaccggttctgaagtcacaccgtttgcggttgtgaccgacgatgcaaccggtcagaaatatccgctggctgactacgccctgaccccggatatggcgattgtcgacgccaacctggtgatggatatgccgaagtccctgtgtgcgttcggtggtctggatgcggtaactcacgctctggaagcttatgtttccgtactggcttctgagttctctgacggtcaggctctgcaggctctgaaactgctgaaagaaaacctgccggcgtcttaccacgaaggttccaagaacccggttgcgcgtgaacgtgttcacagcgccgcgactatcgccggtatcgcgtttgccaacgccttcctcggtgtatgtcactccatggcgcacaaactgggctctcagttccacattccgcacggtctggcgaacgccctgctgatttgtaacgttatccgctacaacgcgaatgacaacccgaccaagcagaccgctttcagccagtacgatcgtccgcaggcacgccgtcgttacgctgaaattgctgaccacctgggcctgagcgcgccgggcgaccgtaccgctgctaagattgaaaaactgctggcatggctggaaagcattaaagctgagctgggtattcctaagtctatccgtgaagcaggcgtacaggaagctgacttcctggcacacgttgacaaactgtctgaagatgccttcgatgaccagtgcaccggcgctaacccgcgttatccactgatctccgaactgaaacagattctgctggatacctactacggtcgtgatttcaccgaaggtgaagttgcagcgaagaaagacgtcgttgccgcaccgaaagcagagaaaaaagcgaaaaaatccgcttaa

SEQ ID NO: 38837 - DNA, 459 bp, Salmonella typhimurium
gtgtctcagccttgtccctgtggtagcgctgacgagtatagcctatgttgtggtcgtattgtgtccggagaacgagtagcacccgatccgtcacatctcatgcgctctcgttactgcgcttttgtgatgaaagacgcagattacttaattaagagctggcatccaacctgcaatgcggccgcgtttcgtgatgatatcatcgccggatttgccaataccaggtggctcggcctgactatttttgaacatacctggtcagaagcagaaaatacagggtatgttagttttatcgcgcgtttttccgaacaagggaaaaacggggcgattatcgaacgttctcgttttatcaaagaaaacggtcagtggtattatattgacggtacccgcccgcagttgggtcgaaatgatccctgcccgtgcggttcaggcaaaaaatttaaaaagtgctgcggccagtga

SEQ ID NO: 38838 - DNA, 843 bp, Salmonella typhimurium
atgcaatcactacaacgtaaagttctgcgtactatttgtcccgatcaaaaaggccttatcgcgcggattaccaacatttgctataagcatgagcttaatattgtgcaaaacaatgaatttgttgaccatcgcaccggacgcttttttatgcggaccgagctggaaggcatcttcaatgattccactcttctggccgatctggacagcgccttaccggaaggctctgttcgtgaactcaatcccgccggacgccgtcgggtagtgattctggttaccaaagaggcgcattgtctgggcgacctgctgatgaaagccaactatggcgggctggatgttgaaatcgccgcggtcattggcaaccatgaaacgttacgctcgctggttgaacgttttgagatccctttcgaactggtcagccatgagggattaacgcgtgaagagcatgacacgaagatggcggacgccattgatgcccatcaaccggactatgtggtgctggccaagtatatgcgtgttttgacgccaggttttgtggcgcgcttcccgaacaaaattatcaatatccaccactcattcctgccggcgtttatcggcgcgcgtccttatcatcaggcctatgagcgcggcgtgaaaatcatcggcgctaccgcgcactatgtgaatgataatctggatgaaggcccaatcattatgcaggacgtgattcatgtcgatcacacttacaccgcagaagatatgatgcgtgccgggcgcgacgttgagaaaaacgtattaagccgcgcgctgtatcaggttctggcacagcgagtctttgtttacggcaatcggacgattattctttaa

SEQ ID NO: 38839 - DNA, 948 bp, Salmonella typhimurium
gtgcctgatatgaagctttttgctggtaacgctaccccggaactagcacaacgtattgccaaccgcctgtacacttctctcggcgacgccgccgtaggtcgctttagcgacggcgaagtcagcgtacaaatcaacgaaaatgtacgcggtggtgatattttcatcatccagtccacttgtgccccaaccaacgacaacctgatggaattggtcgttatggttgatgccctgcgtcgtgcttccgcaggtcgtatcaccgccgttatcccctactttggctatgcacgtcaggaccgtcgcgtacgttccgcccgtgtgccgattaccgcaaaagttgtcgctgacttcctgtccagcgtcggcgttgaccgcgttctcaccgtagatctgcatgctgaacagatccagggcttctttgacgttccggttgataacgtgttcggtagcccaatcctgctcgaagatatgctgcaactgaatctggataacccgatcgtggtttccccggatattggcggcgtggttcgtgcccgcgctatcgctaagctgctgaacgataccgatatggctatcattgataaacgtcgtccgcgcgcgaacgtttctcaggtgatgcacatcatcggcgacgtcgctggccgtgactgcgtgctggttgatgatatgatcgataccggcggtactctgtgcaaagcagcagaagcattgaaagaacgtggcgctaaacgcgtgtttgcctacgcgacgcacccgatcttctcaggcaatgcggcaaacaacctgcgcaactccgtcattgatgaagtcgttgtctgcgacaccattccgctgaccgacgaaatcaaagcgctgccgaacgtgcgtaccttgaccctgtcaggtatgctggccgaagcgattcgccgtatcagcaacgaagaatcgatttccgccatgttcgagcattga

SEQ ID NO: 38840 - DNA, 1662 bp, Salmonella typhimurium
gtgatgcctttccgcgctctcatcgatgcttgctggaaagaaaaatataccgcctcccggttcacccgtgatgtgatagccgggatcaccgtcgggattattgctatcccgctggcgatggcgctggcaattggcagtggcgttgcgccgcagtatggcctctatacctccgctgtcgccgggatcgtgatcgcgctaaccggcggctcgcgctttagcgtttccggccctaccgccgcgtttgtggtgattttgtatccggtatcgcaacagtttggtctggcgggcctactggtcgccacgctgatgtcgggcttcttcctgatccttttcggcctggcgagactggggcgattgattgaatatatcccggtgtcggtcacgttgggttttacctcagggattggtattaccatcggtaccatgcagattaaagattttcttggtctgcagatggcccatgtgccagagcactatttgcagaaagtcggcgcgctgtttatggcgttgcccaccgtcaatattggcgatgccgccattggcgtggtaacgctgggaacgttgattttctggccgcgtctcggtattcgtctgccaggacatcttcccgcgctgctggctggttgcgccgtgatggggatcgttaatctgctgggcggcaatgtggcgactatcggctcacagttccattatgttctggctgacggcactcagggcaacggcatcccgcagctcctgccgcaactgatgctgccgtggagtcttcctggctccgatttcacgctaagctgggattcactgcgcgcgctgctgccagcggccttctcgatggcaatgctgggggcaatcgaatcattgctctgcgccgtcgtgctggacggcatgaccggcaccaaacataaagctaacagcgaacttatcggccaggggctggggaatatggtcgcgccgttctttggcggcatcaccgccaccgccgcgattgcccgctctgccgccaacgtccgcgctggcgcgacctctcccatctcggcggtaattcacgctatcctggtcattctggcgctactggtcttggccccgctactctcctggctgccgctttccgcgatggcggcgctactgctgatggtggcatggaatatgagtgaagcccataaagtggtggatctgttacgccatgcgccgaaagacgacattatcgttatgctgctgtgcatgtcattaacggttctgtttgatatggtcatcgccatcagcgtggggattgtccttgcttccctgctgtttatgcgccgtattgcgcgtatgactagacttgcgccggtcaatgtcgatgtgcctgatgatgtgctggtgctgcgtgttatcggtccgctctttttcgccgcggcggaagggctgtttaccgaccttgagtcacgtattaagggcaaacgtatcgtcgttctgaaatgggacgcagtaccagtgctggatgcaggcgggcttgatgcttttcagcgttttgtgaagcgtctgccggaaggttgcgaattgcgtatcagtaacctggagttccaaccgctgcgcacaatggcgcgtgccggtatcaaacctattcctgggcgtctgaccttcttcccgaacaggacggaggcgttagcggatttactcagttaa

SEQ ID NO: 38841 - DNA, 1092 bp, Salmonella typhimurium
atgggattcaaatgcggtatcgtcggtctgcccaacgtcgggaaatccaccctgttcaacgcgctgacaaaagccggtattgaagcggcaaactttccgttctgcactatcgaaccgaataccggtgtcgtgccgatgcccgatccgcgtctggaccagttggctgagattgttaaaccgcaacgcattctaccaaccacgatggagttcgtggatatcgccggtctggtaaaaggcgcgtccaaaggcgaagggttgggtaaccagttcctgaccaatatccgtgaaactgaagctatcggtcacgtggttcgctgctttgagaacgacaatatcatccatgtggcgggtaaagtaaacccggcagaagatattgatgttatcaataccgaactggcgctggctgacctcgatacctgcgagcgcgctatccatcgcgtacagaagaaagccaaaggcggcgataaagacgccaaagcggaactggccgcgctggaaaaatgcctgccgcacctggccgaagcggggatgctgcgttcgctggacctgacggacgaagataaagcggctatccgttatttaagcttcctgacgctgaagccgacaatgtatatcgctaacgtcaatgaagacggttttgaaaataacccgtatctggaccaggttcgcgaaatcgccgccaaagaaggttcggtcgtggttccggtgtgtgccgccgtcgaagctgatattgctgagctggatgatgacgagcgcgacgaatttatggctgaactgggtctggaagagccggggctgaaccgcgttattcgcgctggttatcgcctgctgaacctccagacctacttcaccgccggggtgaaagaggttcgcgcatggactattccggttggcgcaaccgcgccgcaggcagcaggtaaaatccataccgacttcgaaaaaggctttatccgcgcccaaactatcgcttttgacgactttattacctataaaggtgaacaaggcgcgaaagaagccggtaagatgcgagcggaaggcaaagattatatcgttaaagatggcgatataatgaacttcctgttcaacgtctaa

SEQ ID NO: 38842 - DNA, 987 bp, Salmonella typhimurium
atgaacgacaacgcttttactttccagacgctacacccggaaaccatcatggatgcgctgtttgaacaggggatcatggtggattccgggctaactccactaaacagttatgaaaaccgcgtctatcagtttcaggatgaagaccgtcgacgttttgtcgttaagttttatcgtcctgaacgctggtctgttgatcaaattcgggaagaacatcaattcgcgcttgaactggtgaaggatgaggttccggttgctgctccgctcgcgtttaatggccagacgctgttagcgcatcagggctatcattatgccattttccccagcgtaggcggtcgtcagtttgaagcagacaatatcgatcagatggaggcggtagggcgttatcttggccgattgcatcagacggggcgaaaacgtcctttcactttccggcctgacattgggcttgcggagtatctttttgaacctcgccaggtattcgaagatgccgcactgattccctccgggcaaaaagcggctttcctgaaagccactgatactctactgtctgcagttaccgaatgctggcgcaccgatttcgccacgctgcgattgcacggcgattgtcatgccggcaacattctatggcgtgatggaccgctgtttgtcgatttagatgatgcccgtaacggtccggcgatacaggatttatggatgctgctgaacggcgacaaagccgaacagcgaatgcagcttgaaaccattattgaagcttatgaagaagttagtgagttcgatacggctgaaattggtctcattgaacctttacgcgccatgcgtttagtttattatcttgcctggttgattcgtcgttggggcgatcctgcgtttccaaaaaactttccctggttaacaggggaagattactggcagcgacagacaacgacttttattgagcagactaaaattttgcacgaaccccctttacaattaacgccaatgtattaa

SEQ ID NO: 38843 - DNA, 2787 bp, Salmonella typhimurium
atggttcagatcccagaaaacccacttattctcgtagatggctcatcctatctctatcgcgcctatcatgcgtttccgccgttaaccaacagcgcgggagaacctacgggcgcaatgtatggtgtcctcaacatgttgcgcagcctgatcatgcagtatcagccgacgcatgctgcggtggtgtttgacgccaaaggaaaaaccttccgtgatgagctctttgaacactacaaatcgcatcgtcctccaatgccggatgatcttcgtgcgcaaatagagccgttacatgccatggttaaagccatggggttacctctgctggcggtctctggcgtagaagcggatgacgttatcggtacactggcgcgagaagcggagaaggtggggcgtccggtattaatcagcaccggcgataaagatatggcacagttggtgacgccgaatattacgctgatcaacaccatgactaacaccatcctcggcccggatgaagtcgttaataagtacggcgtgccgcctgagctgattatcgactttctggcgctgatgggggactcctcggataatattccgggcgtaccaggcgtgggtgagaagacggcgcaagccttgcttcagggattgggcggcctggatacgctgtacgccgagccggaaaaaattgccggtctcactttccgcggcgccaaaacgatggccggtaaattagcgcagaataaagacgtagcgtacctgtcttataaactcgccaccattaaaacggatgttgagctggagctgacctgcgaacagcttgaagtgcagcagccgattgcggatgaactgctgggcctgtttaaaaaatatgagtttaagcgctggacggcggacgttgagtcaggcaagtggctacaggcaaagggcgcgaaaccggcggccaaaccgcaggaaacggtcgttattgatgaatcgcccagcgaaccggcagcggcgctctcttatgaaaattatgtcacgattctggacgacgttacgctggaaagctggattgaaaagctgaaaaaagcgccagtttttgctttcgacacggagaccgacagcctggataatatcgccgccaacctggtgggcctctcgtttgccatcgaacctggcgttgccgcgtatgtacctgtcgcgcatgattatctggacgctccggatcaaatctcccgccagcgtgctctggaactgctgaagccgctgctggaagatgaaaaagtgcgcaaagtggggcaaaacctcaagtacgatcgcggcgtcttgcaaaattacggtattgagctgcgcggtatcgccttcgataccatgcttgagtcttacattctgaacagcgtcgccggacgccatgatatggacagtttgtccgatcgttggctgaagcacaaaactatcacctttgaagacattgccggtaaaggtaaaaaccagctcacctttaaccagatcgcactggaggaagcggggcgctatgcggcagaagatgcggatgtcacgttacagttgcatctcaaaatgtggcctgagctccagcagcacaaaggcccgctgaatgttttcgaaaacatcgaaatgccgttggtgcctgtactgtcacgcgttgagcgcaatggcgtaaaaatcgatcctgccgtcctgcacaaacattcggaagaaatcacgctacgtctggcggaactggaaaagaaagcgcatgacattgcgggcgaggcgttcaacctgtcctcgacgaagcagttgcagaccatcctgtttgaaaagcagggtattaagccgctgaagaaaacgcctggcggcgcgccgtcaacgtcggaagaggtgctggaagagctggcgctggactatccgctgccgaaagtgattctggagtatcgtggtctggcgaagctaaaatccacctataccgataagctgccgctgatgattaacccgaaaaccgggcgcgtccatacgtcctatcatcaggcggtaacggcgacgggacgtttatcgtccaccgatccgaacctgcaaaatattccggtgcgcaatgaagaaggccgccgcattcgtcaggcatttattgcgcctgaggattatctcatcgtgtctgcggactattcacagattgagctgcgtattatggcgcatctttcccgtgataaaggactgctcacggcgttcgccgaagggaaggatattcaccgcgcaacggcggcggaagtctttggcttgccgctggatagcgtgaccggggaacagcgccgaagtgcgaaagccattaactttggcctgatttacgggatgagcgccttcggtctttctcgccagcttaatattccgcgtaaagaggcgcagaagtatatggatctctacttcgaacgctatcctggcgtgctggaatatatggagcgcacccgcgctcaggcaaaagaacaaggctatgtggaaactctggaggggcgccgcctttacctgccggatattaaatccagcaacgcggcgcggcgcgcgggggcggaacgcgcggcgatcaatgctcccatgcaaggaacggctgccgatatcatcaagcgcgccatgattgccgtcgatgcctggctacaggccgagcagccacgcgtgcggatgattatgcaggtacacgatgaattagtgttcgaggtgcataaagacgacttagatgcggtagcaaaacgtatccatcagttgatggaaaactgcacgcgtattgatgtgccgttgctggtggaagtcggtagcggggaaaattgggatcaagcgcactaa

SEQ ID NO: 38844 - DNA, 1824 bp, Salmonella typhimurium
gtgatcgaaaatttgcgtaacatcgccatcatcgcgcacgttgaccatggtaaaactaccctggttgataagctgctccagcaatccggtacgttcgacgcgcgtgccgaaactcaagagcgagtgatggactccaacgatttggagaaagagcgtggtattactatcctcgctaaaaacaccgctattaaatggaatgattaccgtatcaacatcgttgatactcccgggcacgctgacttcggtggtgaagtagagcgcgtcatgtccatggttgactctgtgctgctggtggttgacgcatttgacggcccgatgccgcaaacgcgcttcgtgaccaaaaaagcctttgctcatggcctgaaacccattgtggttatcaacaaagttgaccgtcctggcgcgcgccctgactgggttgttgaccaggtattcgacctgtttgttaacctcgacgcgaccgacgaacagctggacttcccgatcatctacgcttcggcgctgaacggtatcgcgggtctggaccacgaagatatggcggaagacatgaccccgctatatcaggcgattgttgatcatgttccggcgccggacgttgacctcgatggtccgttgcagatgcagatctcccagctggactacaacaactatgttggcgttatcggcattggccgtatcaaacgcggcaaagtgaagccgaaccagcaggtcactatcatcgatagtgaagggaaaacccgtaacgcgaaagtaggtaaagtgctgacgcatctgggtctggagcgtatcgacagcaatatcgccgaagcgggcgatatcattgcgatcaccggtctgggcgagctgaacatttccgacaccatctgcgacccgcagaacgttgaagcgctgccggcgctgtccgttgatgagccgaccgtgtctatgttcttctgcgttaacacctcgccgttctgcggtaaagaaggtaagtttgtgacttctcgtcagattcttgaccgtctgaacaaagagctggtgcataacgtggcgctgcgcgttgaagaaaccgaagatgcggatgcgttccgtgtatccggtcgtggcgaactgcacctgtccgtgctgattgaaaatatgcgtcgtgaaggtttcgaactggcggtttcccgtccgaaagttatcttccgtgaaatcgacggtcgtaaacaagagccgtacgaaaacgtgacgctggacgtcgaagagcagcaccaggggtctgtcatgcaggcgctgggcgagcgtaaaggcgacctgaaaaacatgaatccggacggtaaaggccgcgtacgtctcgactacgtgatcccaagccgtgggctgattggtttccgttcagaattcatgaccatgacttccggtacgggtctgctgtactccaccttcagccattacgacgatattcgtccgggtgaagtgggccagcgtcagaacggcgtactgatctccaacggtcagggtaaagcggtggcgtttgcgctgttcggtttgcaggatcgcggtaagctgttcctgggtcacggcgcggaagtttatgaaggccagattattggtattcacagtcgctccaacgacctgacggtaaactgcctgaccggtaagaaactgaccaacatgcgtgcgtccggtacggatgaagcggtgattctggttccgccaattaaaatgagccttgagcaagcgctggagttcattgatgacgacgaactggtagaagtcaccccaacctctatccgtatccgtaaacgtcacctgacggaaaacgatcgccgccgtgcgaaccgtggtcagaaagaagagtaa

SEQ ID NO: 38845 - DNA, 1176 bp, Salmonella typhimurium
atgacaaatcaaccaacggaaattgccattgtcggcgggggaatggtcggcggcgcgctggcgctgggtctggcgcagcaagggtttacggtgatggtaatagaacatgccgcgcctgcgccgtttgtggcggacagccagcctgacgtgcggatttcggccattagcgcggcatccgtggcgctgctcaagggactgggcgtttgggaggcggtgcaggggatgcgtagccatccttatcggcgactggagacctgggagtgggaaaacgcccatgtggtgttcgacgccgctgaactcaagctgccgctgttaggctatatggtagagaacaacgtcctgcaacaggcgctatggcaggcgctggaagcgcaccccggcgtgacgctgcgcgttccggcttcactggcggcattgcaacgccgccacgatggttatgcgctggaactggccgacggcgaatgtatcacgccgaagttagtgattggcgccgacggcgcgaattcgcaggttcggcaaatggcgggaattggcattcatgcctggcaatatgcgcagtcgtgtatgcttatcaccgtcaagtgtgaaaatgcgccaggcgacagcacctggcagcagtttacgccaacggggccgcgcgcctttttgccgctgttcgatgattgggcgtcgctggtgtggtatgacgctccggcacgtattcgccagttgcagggtttatcgatgacgcaattgcaggtggaaattaaccagcactttccggcgcgtctgggggcggtgatgcctgtcgcggcgggcgcgtttccgctaacccgtcgtcacgcgttgcagtatgcgcaaccggggctggcgctggtaggcgacgcggcgcataccattcatccgctggccgggcagggcgtcaacctggggtatcgggatgttgatgcgttgattgatgtgctggcgagtgcccgtagctatggcgagtcctgggccagccattcggtgttgaaacgctatcagacgcggcgcatggcagataattttatgatgcaaagtggaatggatctgttttatgccgggttcagcaatgaactgccgccgctgcgtattttacgcaatatggggctgatggcggcgcagcgcgcaggcgtgctaaaacgtcaggcgcttaagtatgcgttggggttgtaa

SEQ ID NO: 38846 - DNA, 1953 bp, Salmonella typhimurium
atgaatattttaggttttttccagcggctgggtagggcgttgcagctccctatcgccgtgttgccggtggcagcgttgttgctgcgattcggccaaccagatttgctgaatatgccgtttatcgcgcaagcgggcgggtctattttcgataacctggcgctggttttcgctatcggcgtggcctccagttggtctaaagatagcgcgggcgcggcagcgctggcgggagccgtgggttacttcgtcatgaccaaagcgatggtgacgattaacccggaaatcaacatgggcgtgctggcggggattattaccggtctggtcggcggcgcggtttataatcgctggtctggtatcaaactgcctgattttctcagtttcttcggtggaaaacgttttgtaccgatcgcaacgggctttttctgtctggtgctggccgctattttcggttacgtctggccgccggtacagcatggcatccatgcgggcggtgaatggatcgtttccgcaggcgcgctgggttccggtatctttggcttcatcaaccgtctgctgatccccaccggtctgcatcaggtactgaacaccatcgcctggttccagattggcgaattcaccaatgccgcaggcactgtattccacggcgacatcaaccgcttctatgctggcgacggcacggcggggatgtttatgtccggcttcttcccgatcatgatgtttggtctgccgggcgccgctctggcgatgtatttcgccgcgccgaaagaacgtcgtccgatggtgggcggtatgctgctgtctgtcgcgatcaccgcgtttctgaccggcgtaaccgagccgctggaattcctgtttatgttcctggcgccgctgctgtacctcctgcacgccattttgactggtatcagcctgttcgtcgcgacgttgctgggtatccatgcgggcttctctttctcggcaggcgcgatcgactatgttctgatgtataacctgccagcggccagcaataacgtctggatgttgctggtgatgggcgttgtattctttatcatctacttcctgctgttcagcgcggttattcgtatgtttaacctgaaaacgccgggccgcgaagataaagttgatgagatggtaacggaagaagccaacagcaacaccgaagaagggttaacgcaactggcgaccagctatattgctgcggttggcggtacggacaacctgaaagcgatcgatgcgtgtattacccgtctgcgcctgaccgtgaatgactctgctcgcgttaacgatgcggcctgcaaacgcctcggcgcttccggcgtggtgaaactgaacaaacagaccattcaggttattgtcggcgcgaaagcggaatcgattggcgatgaaatgaagaaagtggtggcgcggggaccggtcgcggcagcgtctgctgatgcggctcacgttgcaacacctgctccggcggccaaaccccaggcggtgccgaatgcggtaactatcgctgaactggtctctccgattaccggtgaggtagtggcgctggatcaggtaccggatgaagctttcgccagcaaagcggtcggcgacggcgtggcggtgaaacccaccgataaaaccgtggtttctccggcggcgggtactatcgtgaaaatcttcaacactaaccacgcgttctgtctggaaaccgaaaaaggcgcggagatcgttgtccatatgggtatcgataccgtcgcgctgaacggtcagggctttaagcgtctggtagaagagggtgcggaagtcacggcgggtcagccggtgctggaactggatctggacttcctgaatgccaatgcgcgttccatgataagcccggttgtttgcagcaacagcgatgacttcagcgctctggtcatcaaagcggatggtcacgtggtagcgggtaaaacgccactgtacgagatcaagagcaaataa

SEQ ID NO: 38847 - DNA, 1668 bp, Salmonella typhimurium
atgagtgaggctgaagcccgcccgactaactttattcgtcagattattgatgaagatctggcgagtggtaaacataccactgtccatacccgttttccgccggagccgaatggctatctgcatatcggccacgcgaaatctatctgcctgaactttggcatcgcgcaagattatcagggccagtgcaacctgcgtttcgatgacaccaacccggtaaaagaagatatcgagtacgttgattcgatcaaaaacgacgtcgagtggttaggctttcactggtctggcgatattcgctactcctccgattactttgaccaactgcacgcctatgcggtcgagctaatcaataaaggcctggcctatgttgatgagctgacgccggagcagatccgtgaataccgcggtacgctgaccgcgccgggtaaaaacagcccgttccgcgatcgcagcgtcgaagagaacctcgcgctatttgaaaaaatgcgtaccggcggttttgaagagggtaaagcctgtctgcgcgctaaaatcgacatggcgtcgccgtttatcgtgatgcgcgatccggtgctgtatcgcattaaattcgccgagcatcatcagactggcaacaagtggtgcatctatccgatgtacgactttactcactgcatcagcgatgcgctggaaggcattactcattctctgtgtacgctggagttccaggataaccgtcgtctgtacgactgggtgctggacaacatcaccattccggttcacccgcgccagtacgaattctcgcgcctgaatctggaatacaccgtgatgtccaagcgtaagctgaacctgctggtgaccgacaaacacgtcgaaggttgggacgatccgcgtatgccgactatttccggtctgcgccgtcgcggctataccgcggcttctattcgtgagttctgcaaacgcatcggcgtcaccaagcaggacaacactattgagatggcgtcgctggaatcctgcattcgcgaagatctgaacgaaaacgcgccgcgcgcgatggcggtaatcgatccggtaaaactggttatcgaaaattacccgcagggtgagagcgaaatggttaccatgcctaaccatccgaataaaccggagatgggcagccgtgaagtgccgtttagcggtgagatctggatcgatcgcgcagatttccgcgaagaagcgaacaaacagtacaaacgtctggtgatgggcaaagaagtgcgtctgcgtaatgcctacgtcattaaagcggagcgcgtagagaaggatgccgaagggaatatcaccaccatcttctgtacctatgatgctgatacgctgagtaaagatccggctgacgggcgtaaagtgaaaggcgtaatccactgggttagcgcagcacatgcgctgccgattgaaattcgtctctacgaccgtctgttcagcgtgccgaatccgggcgccgcggaggacttcctgtctgttatcaaccccgaatcattagtgattaagcaggggtatggcgagccgtcgctgaaagcggcggtagcaggaaaagctttccagtttgaacgtgaaggctacttctgcctcgacagccgctatgcaacggccgataagctggtctttaaccgcaccgtgggcctgcgtgatacctgggcgaaagcgggcgagtaa

SEQ ID NO: 38848 - DNA, 501 bp, Salmonella typhimurium
atgcgcaaagttaccgctgctgttatggcctcaacgctggcattcagttttttaagccacgcagctgaagttgttacaagcgataactggcaccccggtgacggggccacgcagcgtagcgcgcaaaatcatatgtttgacggcataagtttaaccgaacatcagcgtcagcagatgcgagatcttatgcaacaggcaaggcacgaacagcctcctgttaatgttagcgaaatggagacaatgcatcggcttgtcaccgcagaaaaatttgatgaaagcgctgtgcgcgctcaggcagaaaaaatggcgcaagagcaggttgcccgccaggtcgaaatggcccgcgtgcgtaaccagatgtatcgcctgttaacgccggagcagcaagcggttttgaatgaaaagcatcagcaacgaatggagcaactgcgcgacgtggcgcaatggcaaaaaagttcatcgttgaaattattgagtagtagcaactcacgttcccagtaa

SEQ ID NO: 38849 - DNA, 963 bp, Salmonella typhimurium
atgattaagaaaatcggtgtgttgacaagcggcggtgatgcgccgggcatgaacgcggcaatccgcggtgttgtgcgcgcagcgttgacggaagggctggaagtcatgggcatttatgacggctatctgggcctgtatgaagatcgtatggttcagcttgaccgttacagcgtatctgacatgatcaaccgtggcggtactttcctcggttctgcccgtttcccggaattccgtgacgaaaatattcgcgctgtcgcgatcgaaaacctgaaaaaacgcggtatcgatgcgctggtagttattggcggcgacggttcttatatgggtgcaaaacgtctgactgaaatgggcttcccgtgcatcggtctgccaggcactatcgataacgacatcaaaggcaccgactacactatcggctacttcactgctctcggcactgtagtggaagcgattgaccgtctgcgtgacacctcctcttctcaccagcgtatctctatcgttgaggtgatgggccgttattgcggcgacctgacgttggcggcggctattgctggcggctgtgagtttatcgtggtgccggaagttgaatttaatcgcgaggatctggtggcggaaatcaaagccgggatcgcgaaagggaaaaaacacgctatcgtcgctatcaccgaacatatgtgtgatgttgacgagctggcgcactttattgaaaaagaaacgggccgtgaaacgcgtgcgacggtgctcggccacattcagcgcggtggttccccggtaccttacgatcgcattctggcttcccgtatgggcgcgtatgctattgacctgctgctggaaggccatggcggtcgttgtgtcggtatccagaacgagcagcttgttcatcatgacatcatcgatgcgattgaaaacatgaagcgtccgttcaaaagcgactggatggagtgcgcgaaaaaactgtactga

SEQ ID NO: 38850 - DNA, 723 bp, Salmonella typhimurium
ttgcaggttgataaaacgagctttactccgctttataagcaactattttttatcatctgtcagcagatccagaacgggtctttgcctttgggtagccaactaccgacgcaaaaagagattgccagatcctacaacgtctcgctgattgtggttaaacaggcctggagcgaattaatcaatgcgggcattatttcctcccagcgcggaagtggttcggtggtgtgctcggtgccggaaggcgtgagctacgggcacacgtttcgcggtattacccgcgatctccaggacgccagcgtggcgattgagaaccgtattctggaaatcgcgccgcgccgcgcgcgcgacgctcaggcagacggcttgagcctgcccgcacagcatcactatctctatatttcgcgtattcgttgcctgaataaccgcccatttaaccatgagaaaatatatctcgatctcagcttctttcccggcctggaactcacaccgcaggcgctggagcatacgtcgctttattcgttattaaacgtcacaagcgactcggcgatagaaaaagttgaggcgattttaccttccgctgacctgtgcgaaaaattgcaaatcgccgccaataaaccgctgttatccgtcgccagacagacgtttcaggccgggaaggacagcccttttgagtattgccgctattacgtgctgtctgaatactttggtgaaattcattatcactga

SEQ ID NO: 38851 - DNA, 1641 bp, Salmonella typhimurium
atggcaatccacaaccgcgcaggacaacccgcgcaacagagtgatttgattaacgtcgcccaactgacggcgcagtattatgtactgaaaccggaggcagggaatgcagaacatgccgtgaaatttggcacttccggccatcgcggcagcgcaggtcgtcacagtttcaacgaaccgcatattctggcgatcgcccaggcgattgctgaagagcgggcgaaaaatggcattaccggcccctgctatgtggggaaagacacccatgcgctctcggaaccggccttcatttccgtgctggaagtgctggcggcaaacggcgtagacgttatcgtgcaggaaaataatggctttacgccaacgcctgccgtgtcaaatgctatcctggtccataacaaaaaaggcggcccgctggctgatggtattgtcattacgccgtcgcacaacccgccggaagatggcggtattaaatataatccgcccaatggcggcccggcggataccaacgtcactaaagtggtagaagatcgcgccaatgcgctgctggcgggcggcctgcaaggcgttaagcgcatctctctggatgcggcaatggcctcgggccacgttaaagcggtagatctggtacagccgtttgtcgaagggctggcggatatcgttgatatggcggcgattcagaaagccggtctgacgctgggtgtcgatccgctgggcggctccggtattgaatactggaaacgtatcgctgagcattacaaacttaacctgacgttagttaacgatcaggttgatcaaaccttccgctttatgcaccttgataaagacggcgcgatccgtatggattgctcctccgaatgtgcgatggcgggtttgctggcgctgcgtgacaagtttgacctggccttcgccaacgacccggactacgaccgtcatggcatcgtgacgcctgcagggctgatgaacccgaaccattatctggcggtcgccattaactatctgttccagcatcgtccgctatggggcaaagacgtggctgtcggtaaaacgctggtctcttccgcgatgattgaccgcgtggtgaatgatttgggacgcaagctggtagaagtgccggttggcttcaaatggtttgttgacggtttgttcgacggcagctttggtttcggcggggaagagagcgcgggcgcttcgttcctgcgtttcgacggtacgccgtggtctaccgataaagacggtatcatcatgtgcctgctggcggcggaaatcaccgccgttaccgggaaaaacccgcaagagcattacaatgaactggcagcgcgttttggcgccccgagctataaccgtctgcaggcgagcgcgacctccgcgcagaaagcggcattgtctaaactgtctccggaaatggtgagcgccagcacgctggcaggcgacccgatcaccgcgcgtcttaccgcagcgccgggtaatggcgcatcgattggcggcctgaaggtaatgaccgataacggctggttcgccgcgcgtccatccggtacggaagacgcttacaagatctattgcgaaagcttcctgggggaagaacatcgcaagcagattgagaaagaagccgttgaaatcgttagcgaagtattgaaaaacgcctga

SEQ ID NO: 38852 - DNA, 2199 bp, Salmonella typhimurium
atgtcagaattaaaaattgccgttagccgtcattgcccggattgtttttctacacaccgtaatattgtaaatgttgatgagagtcgtttcatcgacgtggctgccatcgtgttatccattgacgacattgaacacggaaaactcgatgaaatcgacgcaacgggttacggtattcccgtgtttgtcgcgacacatgacgaagggcgcgtaccgcctgagtatttgccgcgtatctctggtgtattcgaatataatgaatcccgtactgccttctatggtcgccagttggaaaccgcagcaagccactacgaaacgcagttacgtccgccgtttttccgcgcgctggtggattatgtcaaccagggcaacagcgcatttgactgcccggggcatcagggcggcgaattcttccgccgtcatcctgccggtaatcagttcgtggaatactttggcgaaacgctcttccgctccgacctatgcaacgcggacgtggcgatgggcgatctgctgattcacgaaggcgcgccttgcattgcgcagcaacatgcggcgaaagtctttaacgccgataagacctactttgtgctgaacgggacctcctcctctaacaaagtcgtactcaacgcgctgttaacgccgggcgatctggtactgtttgaccgtaacaaccacaaatctaaccaccacggcgcattattgcaggcgggcgcaacgccagtttatctggaaaccgcgcgtaacccgtatggttttatcggcgggatcgacgctcactgcttcgaagaagattacctgcgcgagctgattagcgaagtcgcgccgcagcgtgcccgcgaagcacgtccattccgtctggccgtcatccagttaggcacctacgacggtaccatttataacgcccgtcaggtcgtcgataaaattggtcatctgtgcgactacatcctgtttgactccgcctgggtcggctatgaacaatttattccgatgatggccgattgttcgccgctgctgctggaactgaacgaaaacgatccgggtattctggtgacgcagtccgttcacaaacaacaagccggtttctcccagacctcgcagatccataaaaaagatagccatatcaaagggcaatcgcgctacgttccgcataagcgcatgaacaacgcctttatgatgcacgcctccaccagcccgttctatccgctgttcgccgcgctggacgttaacgccaaaatgcacgaaggcgtcagcggtcgcaatatgtggatggattgcgtggttaacggcatcgatgcccgtaaattgatcctcgaaaactgtcatcacatccgtccgttcgtaccggaactgattgatggtaagccgtggcagtcatacccgacgtcagagatcgccagcgatctgcgcttcttccacttcgttccgggagaacactggcatgcgtttgaaggctatgccgaacatcagtactttgtcgacccttgcaaactgctgctcaccacaccgggcattaatgcagcgagcggcgaatatgaagactttggcgttcctgccacgatcctcgccaacttcctgcgcgagaacggcgttgtgccggaaaaatgcgacctcaactccattctgttcctgctgacgccggcagaagacatggcgaagttacaacagcttgtcgccctgctggctcgtttcgaaaaactgctggaagctgatgcgccgttagcggaagtattaccgtccatctacaaacagcatgaagcgcgttatgccggctataccctgcgtcagctttgccaggagatgcacgatctctatgcgcggcacaacgtgaaacagctgcaaaaagagatgttccgtaaatcgcatttcccgaaagtcagtatgaatccgcaagaggccaactatgcctatctgcgcggcgaggtcgaactggttcgcctgccggaagcggaaggtcgtatcgcggctgaaggcgctctgccttacccgccgggagtgctgtgtgtagttccgggtgaaatctggggcggttctgtcctgcgttacttcagcgccctggaagaagggatcaacctgctgccgggctttgcgcctgaactgcagggcgtttatatcgaagaacacgacggccgtaagcaggtctggtgctacgtcattaaacctcgtgacgcacagcgctccctgctgaaggaggaaaaattatga

SEQ ID NO: 38853 - DNA, 1044 bp, Salmonella typhimurium
atgttgaaattcatccaaaataaccgggaagcgacggcactgctggcaatagtctgtttattcgtgtttcctggcgcgctggatagtcagtatttgagcgtgcaaacgctgacaatggttttcagtagcgcgcaaattttgatgctgttggcgattggcgcgacgatggtaatgctcacccgcaatattgatgtatcggtgggctcgacgacaggaatgtgcgcggtattgctgggagtgatgttaaacgccggctatagcctgccggtcgcctgcctggccacactaatattaggaattgtcgccggattttttaatggcgtactggttgcctggttgaagatacccgccattgtcgccactctgggaacgctgggcttgtatcgtgggatcatgctgctatggacaggggggaaatggattgaaggattacccgcaggcttaaagcaactctctgctccggtgtttctgggaatttccgcaatcggctggtttaccctggtgttagcgctgcttatggcctggctcctggcgaaaaccgcctttggccgcaatttttacgccaccggcgataacctgcagggcgcccggcaattgggtgtccgtaccgagatggtacgcatcatggcattttcacttaatggcggtatggcggcattggctggaatcgtgtttgcctcgcagattggcttcattcccaatcaaaccggcacggggctggaaatgaaagccatcgcggcctgcgtattggggggaattagcctgttaggcgggtcaggcacggtcatcggcgctattctcggcgcttattttcttacgcaaatcgatagtgtgttagtgctgctgcgtatccccgcctggtggaacgattttattgctggcctggtattgttgggcgtactggtattcgatgggcggctgcgttgcgcattacaacgcaatctgcgccgccagaaatatgcccgttttatatcaccacccactccactacagacggaagcaaaaacgcacgcacaacagaataaaaacaaagaggtggcatga

SEQ ID NO: 38854 - DNA, 876 bp, Salmonella typhimurium
atggctgatttagatgatattaaagatggcaaagattttcacaccgataaaccacaaactaacactttgttcgcattaaaaggctgtggcgcgctggattggggaatgcagtccagactggcgaggatttttaatcccaagaccagaaaaacggtcatgctggcctttgaccatggatatttccaggggccgacaaccggacttgagcgtattgatatcaatattgcgccgctctttgaatatgctgatgtcttaatgtgtactcgcggcatattacgcagtgtggtacctccggcaatcaataaaccagtcgttttacgcgcgtccggggcgaattctattctcactgaattaagcaatgaggcggttgcggtggcgatggatgacgctgtgcggttgaatagctgtgctgctgccgcacaggtttatattggtagtgagcatgaacatcagtcgattaaaaatattattcaactgattgatgccgggttacgcgtcgggatgccaataatggcagtgaccggggtgggtaaagatatggctcgcgaccagcgttatttttcactggcaacgcgtatcgctgcggaaatgggggcgcaaattatcaaaacgtattatgtcgataaaggttttgagcgtattgcggcaggttgtccggtgccgattgtcatcgccggcggtaaaaaactgcctgaacgtgaagcattggaaatgtgctatcaggcgattgaccagggggcttctggcgtagatatggggcgtaatatattccagtcagaagatccggtagccatgattaaagcggtacatgctgtcgttcatcataacgaaacagcagagcgtgcttatgagctgtttttgagtgagaaaagttaa

SEQ ID NO: 38855 - DNA, 735 bp, Salmonella typhimurium
atgaacattgatttaaatgcggatttgggcgaaggttgcgccagcgacagcgaattattaacgctggtctcctccgccaatatcgcctgtggttttcacgccggtgatgcgcaaaccatgctgacctgcgtgcgcgaggcgctgaaaaacggcgtggcgatcggcgcgcatcccagctttccggatcgggataattttgggcggacggcgatggttttgccgccggaaacggtatacgcccagacgctgtaccaaatcggcgcgctgggggcgattgtccaggcgcaaggcggcgtgatgcgccatgtcaaaccgcacggtatgctctataaccaggcggcgaaagatcctcatctggcacaggcgattgcgaaagcggtacacgactatgatccgtcactgatactggttggactggcgggaagtgagctgatccgggccggtgagcgccatcgcctggtgacgcggcaggaggtgtttgccgatcgcggctatcaggccgacggtagcctggtgccgcgcatgcaacctggcgcgctgattcacgacgaagagcaggcgctggcgcaaacgctggatatggtacaagccgggagagtgaaaagcgttactggcgtgtggacgactgtcacggcgcaaacggtgtgcattcatggcgacggcgagtatgcgcttgcattcgctcgcaggttacgcgccgcgttcaatgcgcgtaatatacacgttattgcctga

SEQ ID NO: 38856 - DNA, 1152 bp, Salmonella typhimurium
atgcaacgtaaaaagatactaattgtaggtgcgggcctttcaggcgcagtaatagcacgccagttagccgagcagggacatgtagtcaatattattgatcaacgttcacatatcggtggtaacgcttatgatgcccgagatgagcacacgggtattatggtgcacgtttatggtcctcatatttttcatactgataatgaaactgtatggaattatgtaaataaatacgctgagatgatgccttatatcaataaggttaaggccacagtaaatggtcaggtattttctctacctatcaatcttcataccatcaatcaattttttggtgtcgcctgctcacctgatgacgccaggaaattactgcttcaaaaatgtgatagcaccattctggaaccacaaaattttgagcaacaggccttgcgtttcattggtaaagagttatatgaagccttttttaaaggttataccattaaacaatgggggcttcatccttccgcgttacccgcttctgtattgaaacgtatccctgttcgttttaattatgatgataactatttcaatcataagtttcagggaataccaaaatttggttatacacaaatggtcaagtccattgtcgaacacgaaaatatcgctgttgaactatgtcgctccttcactcaggaaatgcggacaaattatgatcatgtttttttcagtggcgcgctggatgccttttactcctgtcaatatggccgactggaatatcgtacattagactttaaaaaaataatttgccagagtgattatcaaggatgcgcagtaatgaattattgttcaatagatactccttatactcggattactgagcacaaatatttttctccgtgggagagacatgaagcttcaatatgttatcaagaatatagtcgggaatgtgaagctggtgatataccctactatcctgttcgcagggcagataaaatggatttactgaataaatatctgtcgcgggctaaaaaagaaaaaaatattactttcattggtcgtcttggcacttatcgttatctcgatatggacatcacgatagctgaagcattacagacggcggacgtatacttaacgtcgctatatgaacaaaaagaaatgccagcttttacagttaccgtttga

SEQ ID NO: 38857 - DNA, 1134 bp, Salmonella typhimurium
atgaaaaggttatgttattttgtaaattcagactggtactttgatttacattggacagaacgtgcgatagcggcaagggatgcgggttatgaaattcatatcataagtcattttattggtgaagagattataaaaaaattcaaaacgcttggttttatttgtcacaatgtgtctcttgttgctcagtcatttaatatgtttgttttttttagagcattccttaacgctcggaaaattattaaagagattaatcctgacttattgcattgtattacgctcaaaccttgcctgattggtggggttagcgccaggagaagtaatagtccagttgttatcagctttgtcggacttggtcgaatctttttatataataccgtgccaatgagaatattgcgtgcgttaaccgttttggtttacaaatatattgccggtaataagcgtggtgtttttatttttgaacatgataaagatcgacgaaaaatatcgcgtttagtaggtattgattatcataaaactatcgttatcgaaggtgctggaattaacccggatatttataaattctctatagagaaaaaacatgagataccgatagtcctttttgcaagccgaatgttatggagtaaaggtcttggcgatctcattgaagcaaaaaagatcctcagacaaaaaaatattcattttgttttaaatgttgcaggtatattggccgaggacgataaagatgctatccctttggagctcattcatcactggcataatgaaggactaattaactggctgggacgctcttcgaatgtatatgagcttattcagaaatcgaatatcgttgcattaccatctatttatccggaaggagtaccacggcttttattagaggcatcatctgtaggacgtgcatgtattgcttatgataccggcggatgtgatagcttaattattcataactataatgggttgatcgtgaaaagtaattcagctcaggagttagcggtagaattagagtatttgttaaaaaatccacagattcgcttagagatgggggcgaatggaagaaaacgtgtaaaggaattgttttccagcatattagtcattaataagacattgcaaatttataaagacactattggttgctaa

SEQ ID NO: 38858 - DNA, 711 bp, Salmonella typhimurium
atgaaaatctcttgcaaaaacgttggcgtaatactccctatatttaactccagccaccgttcatttaaaaaaacttttctacaggctgcttcaggtggacgaattggctcatcgaataccgggattattgaagtagaggcattaaaaaaaattgattttacgcttaccgaaggtaaccgtcttgcgcttatcggacacaatggttcgggcaaaacaactcttctgagagtacttgcaggggcctataaaccaacttcagggaagtatgaatgtattggtcgagtcaccagcctcattgatcccatgatgggaatggatggtgagcttaccggcctggaaaatataaaactgaggggactatttctcggtctgtcaaaaaatgaaataaaaaatattacagaagatgtcatcgagttcagcgagttaggtgattttattaaaatccccgttagaacgtattctagtggtatggttctgaggcttggtttttctatttctactgcaattaatcctgaaattttactgatggatgaatggatgagcgtgggtgatagtgattttaaaagaaaagcagagatgagattaaatagctttatctctaaagcgggcattatggtaatggccactcacgatgatgaactggctaaatctgtatgtaataagttcatcaggcttgagcacggtgagatagttagcaaaggcggattttaa

SEQ ID NO: 38859 - DNA, 1767 bp, Salmonella typhimurium
atgaaactgccagtcagagaatttgatgctgttgtgattggtgccggtggcgcaggtatgcgcgcggcgctgcaaatttcccagagcggccaaacctgtgcgctgctctcgaaagtcttcccgacccgttcccataccgtttccgcgcagggcggtatcaccgtggcgctcggcaatacccatgaagataactgggaatggcacatgtacgacaccgttaaggggtcggactacattggtgaccaggatgccatcgaatatatgtgtaagaccggaccggaagcgattctggaactggagcacatggggctaccgttctcccgtcttgatgatggacgtatctatcagcgcccgttcggcggccagtcgaaaaactttggcggcgagcaggcggcacgtaccgcggcggcggctgaccgtaccggtcacgccttgctacacacgctgtatcaacagaatttgaaaaaccacaccacgattttctccgaatggtatgcgctggatctggtgaaaaaccaggatggcgcggtggtggggtgtaccgcactgtgcatcgaaaccggtgaagtggtgtacttcaaagcccgcgcgacggtgctggcgaccggcggcgcaggccgtatctaccagtccaccaccaacgctcacatcaacaccggtgacggtgtcggtatggcgctgcgtgccggtgtcccggtgcaggacatggaaatgtggcagttccacccgaccggcatcgccggggcgggcgtgctggtgacagaaggctgccgcggcgaaggcggttacctgctgaacaaacacggcgagcgctttatggagcgttatgcgccgaacgccaaagacctggcgggtcgtgacgtggtggcgcgttccatcatgatcgaaatccgtgaaggccgcggctgtgatggtccgtgggggccgcacgctaaactgaaactggatcacctgggtaaagaggtgctggaatctcgcctgccgggtatcctggagctgtcccgtactttcgcccacgttgacccggtgaaagagccgattccggttatcccgacctgccactacatgatgggcggtattccgactaaagtgaccggtcaggcgctgaccgtgaacgagcagggcgaagacgtggtcattccggggctgtttgcggtaggcgaaatcgcctgtgtatcggttcacggcgccaaccgtctgggcggtaactcactgctggatctggtggtctttggccgcgcggcggggctgcatttacaggaatccatcgccgagcagggcgtgctgcgcgacgccagcgagtctgacgttgaaggttctctggagcgcctgaatcgctggaacaataaccgcaatggcgaagatccggtggctatccgcaaagcgttgcaggagtgtatgcagcataacttctccgtattccgtgaaggcgacgcgatggcgaaagggcttgagcagttgaaagtgatccgcgagcgtctgaaaaacgcccgtctggatgacacgtccagcgagtttaatacccagcgtgttgagtgtctggagctggataacctgatggaaaccgcctacgccactgccgtatcagccaacttccgaacggaaagccgcggcgcgcatagccgcttcgatttcccggagcgtgatgatgccaactggttgtgtcataccctgtatcagccgcaaacggaatccatgacgcgccgaagcgtcaatatggagccgaaactgcgtccggcgttcccgccgaagattcgtacttattaa

SEQ ID NO: 38860 - DNA, 2802 bp, Salmonella typhimurium
atgcagaacagcgctttgaaagcctggttggactcttcttacctctctggttcgaatcagagctggatagaacagctctatgaagacttcttaaccgatcctgactcggtagacgctaactggcgtttgacgttccagcagttacctggtaccggagtcaaaccggatcaactccattcaaaaacacgtgaatatttccggcggcaggcgttggctggctcacgtcactcttctacgatttccgaccctgacaccaatgtgaagcaggttaaagtcctgcagcttatcaacgcttatcgtttccgtggccatcaacatgcaaacctcgatccgctgggactgtggaagcaagaacgcgtggcggatctcgatccttctttccatgatttgaccgaggccgatttccaggaaaccttcaatgtcggctcctttgccagcggcaaagagacgatgaagctgggcgagctgctcgacgcgctcaaacagacctactgcggcccgattggcgctgagtatatgcacatcaccagcaccgaagagaaacgctggatccaacagcgcatcgaatccggtcgtgcggcctttagcgctgacgagaaaaaacgcttcctgaacgaactgaccgccgctgaagggctggaacgttatctgggcgccaaattcccgggtgcgaaacgtttctcgctcgaggggggagatgcgctgatacccatgctgaaagagatggttcgccatgcgggtaacagcggcactcgcgaagtggtgctggggatggcgcaccgcggtcgcctgaacgtgctgatcaacgtactgggtaaaaaaccgcaggatctgttcgacgaatttgccggtaagcataaagaacatctgggtaccggcgacgtgaagtatcacatgggcttctcgtcagatatcgaaaccgaaggcggtctggttcacctggcgctggcgtttaacccatcgcatctggaaattgtgagcccggtggtgatgggctccgtgcgcgcccgtctggacagactggacgaaccgagcagcaacaaagtgttgccgatcactattcacggcgacgccgcggtgaccggccagggcgtggttcaggaaaccctgaacatgtcgaaagcgcgcggttacgaagtgggcggtacggtacgtatcgttatcaacaaccaggtgggtttcaccacctctaacccactggatgcgcgttcaacgccttactgcaccgatatcggtaaaatggtccaggcgccgattttccacgtcaatgcggacgatccggaagccgtcgcttttgtgacccgtctggcgctggacttccgtaatacctttaaacgcgatgtctttatcgatctggtgtgctaccgccgtcacggccacaacgaagccgacgagccaagcgcaacccagccgctgatgtaccagaaaatcaaaaagcatccgacgccgcgtaaaatctacgccgacaaactggaagctgataaggtcgcaacgctggaagatgccactgaaatggtcaacctctatcgcgatgcgctggatgcaggcgaatgcgtggtgaaagagtggcgtccgatgaatatgcactcgttcacctggtcgccgtatctaaaccacgaatgggatgaagcatacccgaacaaggtagaaatgaagcgtctgcaggagctggcaaaacgtatcagcaccgtgccggaagccattgaaatgcagtctcgcgtggcgaaaatttatggcgaccgtcaggcaatggcggcaggcgagaaattgtttgactggggcggcgcggaaaatctggcttacgccacgctggtcgatgaaggcattccggtgcgcctgtccggggaagactctggtcgcggcaccttcttccatcgtcatgcggtgatccacaaccagacgaacggctcaacgtatacgccgttgcagcatattcacagcggtcagggacagtttaaagtctgggactccgtgctgtctgaagaagcggtactggcttttgaatacggttatgccacggcggaaccacgtaccctgactatctgggaagcgcagtttggcgattttgccaacggcgcgcaggtagtgattgaccagttcatctcctccggcgagcagaaatggggccggatgtgcggtctggtgatgctgttgccgcatggctatgaagggcagggcccggagcactcttccgcgcgtctggaacgttatctgcaactttgcgccgagcagaatatgcaggtttgcgtgccgtccaccccggcgcaggtctaccatatgctgcgccgtcaggcgctgcgcgggatgcgtcgtccgctggtggtgatgtcgccgaaatcgctgctgcgtcacccgctggcggtttccacgcttgatgaactggcgaacggttccttccagccggccattggcgaaattgacgagctggaccctaaagccgtaaaacgcgtggtaatgtgttctggtaaggtttattacgacctgctggaacaacgtcgcaaaaacgaccagaaagatgtcgctatcgtgcgcatcgaacagctctatccgttcccgcataaagcggtgcaggaagcgctgcaaccatacgctcacgtccatgattttgtctggtgccaggaagagccgctcaaccagggcgcatggtactgcagtcagcatcatttccgtgaagtgactccgtttggggccgctctgcgttatgcaggtcgcccggcctccgcctctccggcggtagggtatatgtccgttcaccagaaacagcaacaagatctggttaatgacgcgctgaacgtcgattaa

SEQ ID NO: 38861 - DNA, 870 bp, Salmonella typhimurium
atgtccgttttaattaataaagataccaaggttatctgccagggcttcaccggtagccaggggactttccactccgaacaggcgattgcttacggtacgcagatggtgggcggcgtaacgccgggcaaaggcggcaccacgcatctggggctgccggtgttcaacaccgtgcgcgaagcggtagaagctaccggtgcgaccgcatccgttatctacgtcccggcgccgttctgcaaagactccatcctggaagcgattgacgcaggcatcaaactgattatcaccatcaccgaaggtattccgacgctggatatgctgaccgtgaaagtgaagctggacgaagcaggcgtgcgcatgatcggcccgaactgcccaggtgtgatcaccccgggcgaatgcaaaatcggcatcatgccgggtcacattcataagccgggtaaagtgggtatcgtttcccgttccggcacgctgacctacgaagcggttaagcagaccaccgactacggtttcggccagtccacctgcgtgggtatcggcggcgacccgattccgggctctaactttatcgatatcctgaaactgttccaggaagatccgcagactgaagcgatcgtgatgatcggtgagatcggcggtagtgcagaagaagaagcggcggcttacattaaagaccacgtgaccaagccggttgttggctatatcgcgggtgttaccgcgccgaaaggcaagcgtatgggccacgcgggcgccatcattgccggtggtaaaggcactgcggatgaaaaattcgcagcgctggaagccgcgggcgtgaaaaccgttcgcagcctggccgatatcggcgaagcgctgaaagcaattataaaataa

SEQ ID NO: 38862 - DNA, 1569 bp, Salmonella typhimurium
atgttagatatagtcgaactgtcgcgcttacagtttgccttgaccgcgatgtaccacttcctgtttgtgccgctaacgctcggtatggcgttcctgctggccattatggaaacggtatacgtcctttccggcaaacagatttataaagatatgaccaagttctggggcaagttgtttggtatcaactttgctctgggtgtggctaccggtttgaccatggagttccagttcgggacaaactggtcgtactactcccactatgttggggacatcttcggtgcgccgctggccatcgaaggtttgatggccttcttcctcgaatccacctttgtaggtctgttcttcttcggctgggatcgtctgagtaaagttcagcatatgtgcgtcacctggctggtggctctggggtccaacctctccgcgttgtggattctggtagcgaacggctggatgcaaaacccaatcgctgcggatttcaatttcgaaaccatgcgtatggaaatggtgagcttctctgaactggtgctgaacccggtagcacaggtgaaatttgttcacactgtggcgtccggctatgtcaccggcgcgatgttcatcctcggtatcagcgcttactacatgctgaaaggtcgtgacttcgcctttgctaaacgctcctttgctattgccgccagcttcggtatggctgccgtactgtccgttatcgtactcggcgacgaatccggttacgaaatgggcgacgtgcagaaaaccaagctcgctgcgattgaagctgaatgggaaacgcaacctgctccggcctcctttaccttgttcggtattcctgaccaggacaaacaggaaaaccatctggcgattcagatcccttatgcgctcggtattatcgctacgcgttccgtggacacgccggttattggcctgaaagatctcatggttcagcatgaagagcgtatccgtaacgggatgaaagcctatgaactgctggagcagctgcgcgccggttctaccgaccaggccgttcgcgaccagttcaacagcatgaagaaagatctcggttacggcctgctgctgaaacgctatacgcctaatgtgactgacgcgaccgaagcgcagatccagcaagcgacgaaagattccattcctcgcgttgcgccgctgtacttcgctttccgtatcatggtggcgtgcggcttcctgctgctggcgatcatcgcactttccttctggagcgtgattcgtaaccgcatcggtgagaaaaaatggctgttgcgcgcggcgctatacggtattccactgccgtggattgcggttgaagcaggttggttcgtcgccgagtatggtcgtcagccgtgggcgatcggcgaagtgttgccgacagccgtagcgaactcatcgctgaccgtgggcgatctgctgttctccatgttcctgatttgcggcctgtataccctgttcctggtggcagaattgttcctgatgttcaaatttgcacgccttggcccaagcagcctgaaaaccggtcgctatcactttgagcagtccaccgtgacttctcagccggcacgctaa

SEQ ID NO: 38863 - DNA, 1224 bp, Salmonella typhimurium
gtgtcaaaggcaaccgaacaaaacgacaagctcaaacgggcgataattatttcagccgtgctgcatatcatcttatttgcagtgctgatctggagttcgtttgatgagcatatagaggcttctgccggcggcggcggtggttccgctatcgacgcggtgatggtcgatcctggcgccgttgtgcagcagtacaaccgtcagcaggatcaacaggccagcgccagacgcgcggaagaagagcgtaaaaagctgcaacagcagcaagcagaggagctgcagcagaagcaggctgctgaacaggagcggttgaaacaacttgagaaagaacgtttagcggctcaggagcagcaaaagcaggctgaagaagcggcaaaactggcgcaacagcagcagcaacaggccgaagaagcggcgaaagcggcggcggacgcgaagaaaaaagcggaggccgaggcggcgaaagcggcggcggacgcgaagaagaaagcggaagccgaagcggtaaaagcggcagcggacgcgaagaagaaagcggaagccgaagcggcgaaagcggcggcggacgcgaagaagaaagcagaggccgaagcggcgaaagcggcggcggaggcgaagaagaaagcggaagccgaagcggcgaaagcggcggcggaggcgaagaagaaagcggatgccgaggcggcgaaagcggcggcggaggcgaagaagaaagcggatgccgcggcggcgaaagcggcggcggaggcgaagaagaaagcggatgccgcggcggcgaaagcagcggcggacgctaagaagaaagcggctgccgaaaaagcggccgccgcagaaggcgtcgacgatctgcttggcgatctcagctcgggtaagaatgcgccgaaaaccggcggcggcgcgaaagggaatggtcagccatcgaaagatagcggtacatcgggcgctaacggtggggcgacaggcgctgatatcagcgcctacgcgaaacagattcaggtcgccattcagagccgtctgtacgatgcgagcctgtatcagggcaaacaatgtgtcttgcatattagcctggcgccggatggctcattaaaaagcattacgtctgagggcggcgatccggcgctttgtcaggcggcgttaatggcggcaaaaaccgcgaaaattcctaaaccgccaagccaggctgtttatgagaaaataaaggatgccaaactagactttaaactgtag

SEQ ID NO: 38864 - DNA, 789 bp, Salmonella typhimurium
atgagcagtaacttcagacatcacctgttgagtctgtcgttactggttggcatagcggccccctgggccgcttttgctcaggcgccaatcagtagtgtcggctcaggctcggtcgaagaccgcgtcactcaacttgagcgtatctctaacgctcacagccagcttttaacccaacttcagcagcagctctccgataatcagtccgatatcgattctttgcgcggccaaatccaggaaaatcagtatcaactgaatcaggtgatggagcgccagaagcaaattatgctgcagctggggagcttaaataatggcggcgcagcgcagccagcagctggtgaccagagcggggcggcaaccactgcgacccccgccccggatgccggtacggcaacctcaggggcgccggtacaaagtggcgatgcgaataccgattacaatgcggcaattgcgctggtgcaggataagtctcgccaggatgatgcgattgtggcgtttcagaacttcatcaagaaataccctgattctacttatcagccgaacgccaattattggctgggccagttgaattacaacaagggtaaaaaagatgacgccgcctattatttcgcctcggtagtaaaaaactatcctaagtcgccgaaggctgcggacgcgatgtacaaagttggcgttatcatgcaggacaaaggtgatacggcaaaagcgaaagcagtttatcagcaggtgattaacaaatatccaggcactgatggcgcgaaacaggcgcagaagcgtcttaacgcgatgtaa

SEQ ID NO: 38865 - DNA, 1374 bp, Salmonella typhimurium
atgtttagcgaaataatgcgttatatcctcgacttaggcccaacggtgatgctgcctctggtgatcatcgtgttctctaaactgctgggaatgaagcttggggattgttttaaatcgggtttgcatattggtatcggcttcgtgggtattggtctggtcatcggcctgatgctggattctatcggccccgcggcgaaagccatggcggaacatttccaaatcaatctccacgttattgacgtcggctggccgggttcatcgcccatgacctgggcgtcacaaatcgcgctggtcgcgatccctgtcgccatcggggttaacgtcctgatgctagtgacccgcatgacccgcgtggtgaatgtcgatatctggaatatctggcacatgaccttcacgggcgccatgctgcatctggcgaccggttcatactggctggggattctgggcgttgtggttcatgccgcctttgtctacaaactgggggactggtttgccaaagatacccgcgactattttggcctcgaggggattgctatcccacacggctcatccgcgtacctgggccccgtggcggtgctcgttgataccattatcgagaaaattccgggtctcaatcgtattcactttagcgcagacgatgtccagaaacgcttcggaccgtttggcgagccggtgactgtcggcttcgtgatggggctggtgattggtgtactggcaggctacgacgccaaagccgttctgcaactggcggtcaaaaccgcagcggtgatgctgcttatgccacgcgtcattaaacctattatggatggcctaacgcctatcgcgaaacatgcgcgtaaacgtctacaggctaaatttggcgggcaggagttcctgataggccttgatccagcgctactgctcggtcatacctctgttgtctccgcgagcctgatattcattccgctgaccatcctgattgccgtcttagtaccggggaaccaggtgctgccgttcggcgacctcgccaccatcggtttctttattgcgatggcggtcgcggtacaccagggcaacctgttccgcacgctgatttcaggtgtcattattatgggtatcaccctgtggatagccacccagacgattggcctgcatacccaactggctgccaatgccggagcgctaaaagctggcggacaagtcgcctcgctggatcagggcggttcccccatcacctggctgctgattcaactttttacctggcagaatatcgtcggcttcgccgtcattgccattatctatctggccggcgtactgctgacctggcgtcgcgcccgacagtttgtcgcggctgagaaagccacggcgctacagcaaagtcaaatcgcctcttaa

SEQ ID NO: 38866 - DNA, 1044 bp, Salmonella typhimurium
atgaaatcagtggttattcacgctgagggagacgtgcgcgttgaagaacgtcccttaccacaactgcaagccgaggacgatgtgttggtcaaggtcgttagctcagggctttgcgggtcggatatcccgcgtattttcgcgcagggcgcccattattatcctattacgttaggtcatgaattcagcggctacgttgaatcctacggcacaggcgtaacggatatgcagcccggcgatgccgtcgcttgtgtcccgcttcttccctgctttcactgtccgcaatgcgaacgcggttacttttctttatgcaaacagtatcagtttgtaggatcgcgcagcgaaggcggtaatgcggaatatgtggtggtcaaacgggccaatcttttccgcttgccttctgatatgccgattgaagatggcgcgtttatcgaaccgattaccgtgggcttacacgcctttcatctggcgcagggctgcgaggggaaaaacgtaattatcgtcggtgccgggacaattggcctgctggccttacagtgcgcgcgggaactgggcgcgcgaagcgtaacggcgattgatatcaatccgcagaaactggaactggcgaaagcgctcggcgcaacgcatacctgtaatagccgggaaatgaccgccgacgacatccagaccgcgttgtccgacattcagtttgatcaactggttctcgaaacggcaggaactccccagaccgtctcgctggctatcgatatcgccgggccgcgcgcgcaactggcgctggtggggacgttacatcacgatctcaccctgacaacgcgtacattcgggctaattttgcgtaaagagctcacgctcctcggcagttggatgaactactccgcgccatggccaggagaagaatgggaaaccgcagcgcgcctgttggctgaaaaacgtcttcaactgacccctctcattgcccatcgcggcgatgcggaaagctttgcagaagcagtcaaagcgcttaatggcgcgcccatgcagggcaaaattttacttcaactttcctga

SEQ ID NO: 38867 - DNA, 1434 bp, Salmonella typhimurium
atgcgattttccagatttatcatcggattgaccaccagtatagcgttcagcgttcaggccgcgaatattgacgaatacatcaaacagcttccggccggcgccaacctcgcgctgatggtgcaaaagattggcgcgcccgcgccggctattgattatcatagtcagcagatggcgcttcccgccagtacccaaaaggtgattaccgcgctggcggcgctgattcaactcggcccggatttccgttttacgaccacgctggagactaaaggcaacgtcgataacggcatcctgaaaggtgacgtaattgcgcgcttcggtggcgatccaacgctaaaacgtcaggatattcgcaatatggtcgcgacgctgaaaaagtccggcgtcacgcaaatcgacggcaatgtgcttatcgacacgtcgattttcgccagccacgataaagcgccaggctggccgtggaacgacctgacgcagtgtttcagcgcgcctcccgccgccgccattgttgaccgcaactgtttttctgtgtcgctttatagcgcgcaaaaaccaaacgatttagcctttattcgcgtggcctcttattatccggtaacgatgttcagccaggtacggactctaccgcgcggttcggcagacgcgcagtattgcgagctggatgttgtgcctggcgatttgaaccgttatacgcttaccggctgtttaccacagcgcgccgacccgctgccgctggcctttgctattcaggacggcgccagctacgcgggcgcgatcctcaagcaggaactgaaagaggccgggataacttaccgcggcacgctgctgcgccagacgcaggttaacgagcccggaacgatcgtcgccagtaaacagtcggcgccactgcacgatctgcttaagattatgctgaaaaagtcagacaacatgatcgccgatactgtttttcggatgattggtcatgtcaggtttaacgtgcctggcacctggcgggcgggatcggatgccgttcgccagatcctgcgccaacaggcgggaattgatatcggcaataccattattgccgacggttccggtctttctcgccataatctgatcgctcccgccacgatgatgcaggtgctgcaatatatcgcccaacacgataacgagctgaactttatctctatgctgccgctggcgggctatgatggttcattacaataccgcgccgggctgcatcaggcgggcgtagacggtaaggtttcagcgaaaaccggatcactgcagggcgtgtataatctggcgggctttattaccaccgcaagcgggcaacggatggcatttgtacaatatttgtccggctacgcggttccacctgccgatcagcgtaatcgccgaatcccgctggtacgcttcgagagtcggttgtataaggatatttatcagaataactga

SEQ ID NO: 38868 - DNA, 972 bp, Salmonella typhimurium
atgaatttagaaaaaatcaacgagttaaccgcgcaagatatggcgggtgtcaatgcgacaatccttgaacagcttaattccgacgttcaactgattaatcagctaggatattacattattagcggcggcggaaaacgcattcgtccgatgattgccgttcttgccgcgcgcgcggtgggttatcagggtaacgcgcacgtgactatcgccgctctgatcgagtttatccacacggcgacgctgctacatgatgatgtggtggatgaatccgatatgcgtcgcggcaaagcgacggcaaatgccgctttcggtaatgccgccagcgtgttggtcggcgactttatctatacccgcgccttccagatgatgaccagcctcggctcgttaaaagtgctggaagtgatgtcggaagcggtcaacgtgattgcagaaggcgaagtgctgcaattgatgaacgtgaatgacccggacattaccgaagaaaattacatgcgggtgatttacagtaaaacggcccgtctgttcgaagctgccgcccagtgctccggtattctcgctggttgtacgcctgagcaagagaaagggttgcaggactatggtcgctaccttggtacggctttccagctcattgacgatctgctggattacagtgccgacggcgagcatctcggtaaaaatgtgggtgatgacctcaatgagggcaaacctaccttaccgttgcttcacgccatgcgccacggtacgccagaacagtcagcgatgatccgtaccgctattgaacaaggtaatggccgtcatcttctggaaccggttctggaagcgatgaccacctgcggctcgctggaatggacgcgtcagcgagcggaagaagaagccgacaaagcgatatccgcgttgcagatattgccggataccccatggcgtgaggcgctaatcggtctcgcacacatcgcggtgcagcgcgatcgttaa

SEQ ID NO: 38869 - DNA, 819 bp, Salmonella typhimurium
atgtcacattgttcctgtcatgataaaccgcagcacagtttgctgcctgcggcgtaccgcatcctcagtattactcgccacacgccgctggagtggaatttccgcgtggccgtcgattttcccgcgcactgggggcaatttgttgaggtgtcgctgccgcgcgtcggcgaagcgcccatctccgtttccgactacggcgacggctggatagatctgctgattcgtaatgtcggaaaagtgaccagcgccctctttacgctgaaagaaggcgacaacgtgtggctacgcggctgctatggcaatggctatccggtcgatacgctgcgccataagcccttactggttgtcgcaggcggtacgggcgtcgcgccggtgaaaggcttaatgcgctatttcgttgagaatccccaggaaattggtcaactggatatgattctcggctataaaaatcgcgattgcgtgctgtacaaagaagaaatggcgacgtggcgcggcaaacataatctggtactcacgctggatgaaggcgaggctgatgaccgttaccagattggccgggtgaccgatcggcttgccgacatgacgcttagcgatatcgacactatgcaggccatcgtcgttgggccgccaataatgattacctttaccgtaaaaatgctgctgcaaaaagggctcaagccggagcaaatctgggtggactacgaacgccggatggcctgctccgtcgggaagtgcggccactgccgtatgggcgaagtgtatgtctgcaccgacggtccgatatttaactacgccgtcgcgcaacgttttgccgattaa

SEQ ID NO: 38870 - DNA, 855 bp, Salmonella typhimurium
atggtactgatgatcgtcagcgggcgttccggatcaggtaaatctgtcgctctgcgcgcgctggaagatatgggattttactgcgtggataacctccccgtcgtgctgttgcccgatctggcgcgaacgctggccgatcgccagatttccgccgccgtcagcattgatgtgcgcaatatgcctgaatcacctgagatttttgaacaggcgatgaataatctgcctggtgctttctcgccgcaattgctgtttcttgatgccgaccgcaataccttgattcgccgctacagcgacacgcgccgtttgcatccgctttccagcaaaaatctttctttagagagtgcgatcgataaagagagtgacttgctggagccgttacgctcacgtgcggatctgatcgtcgacacttcagaaatgtccgtccatgagctggcggagatgctgcgtacccggctgttgggcaaacgcgagcgtgaactgacgatggtatttgagtccttcggctttaaacatggtatcccgattgatgcggactatgtgttcgatgtccgctttctgcccaacccgcactgggacccaaaactgcgccccatgaccgggcttgataagccggtagccgcgtttcttgaccgacacacagaagttcacaattttatctatcagactcgcagctatcttgagctatggttaccgatgctggagaccaacaaccgcagctaccttaccgtcgctatcggttgtaccggcgggaaacaccgttcggtgtatattgcagaacagctggcagactacttccgctcgcgcggtaaaaatgtccagtctcgccatcgcacgctggaaaaacgcaaaacatga

SEQ ID NO: 38871 - DNA, 1326 bp, Salmonella typhimurium
atgtaccacggtcaattaaagaacatattacttttatcactaaggtttatcatggataagttatcttacgcttcagatagcagcacatctgcctggaatacctacctgcaacaaatcgagcgtgtggccccttatctgggcgagttatccccctgggtggatactctgcgccacccaaaacgcgctctgatcgtcgatattccggtacaaatggatgatggcactattcgtcatttcgaaggatatcgcgtgcagcacaacctctcccgaggtccgggtaaaggcggtgttcgctaccatcctgacgttgatctcaatgaagtgatggccctgtcagcatggatgaccatcaaatgtgccgcgctgaacctgccatacggcggcgctaaaggcggtatccgcgtcgatccgttctcgctgtcggaaggtgaactggagcgtttgacccgccgctataccagcgagatcggcattatcatcgggccgcagaaagatattcctgcgccggatgtcggcaccaacggtaaagtgatggcctggatgatggatacgtattccatgaatcatggcacgacggtcactggcgtcgtcaccggtaagcctatccatcttggcggttcgctgggccgtgaaaaagcgacggggcgcggcgttttcgtcagcgggctggaagccgcacgtcgggcgaatattgctgttgaaggcgctcgcgttgcggttcagggttttggtaacgtcggcagcgaagccgcgcgtctgtttgcaggcgctggcgcccgtgtcgtggcgattcaggatcataccgcgaccctgtttaacgccaccggtattgacatgaaggcgctcacggcatggcagacagaacacaaacagatagccggtttcccgggcgcggaaactatcgccagcgatgcgttctggcgtctggagatggatattctgatcccggcggcgcttgaaggtcagataactcgtcagcgcgcggaagccctgacgtgtaagctggtgctggaaggggctaacggcccaacctatccggatgctgatgatgttctggccagccgtggtatccttgtggtgcctgacgtggtctgtaacgcaggcggcgtaaccgtcagctacttcgaatgggtacaagatatggccagcttcttctggagcgaagaagagatcaatgcgcgcatggacaaaatcatgaccgacgcgattgtccatgtctgggagaaagcggctgagaaatcctgctctctgcgcaccgcagcctatattgtcgcctgtgagcgcattctgctggcccgtaaagatcgcggtatctatccaggttaa

SEQ ID NO: 38872 - DNA, 1332 bp, Salmonella typhimurium
atgagttctgtcaaaaagatcgggctatttgcctgtactggcgtcgttgccggtaatatgatggggagcgggattgcattattacccgccaaccttgccagtattggtggcattgccatctggggctgggtaatttctattattggggcaatgtcgctggcttatgtttatgcgaggctggcaaccaaaaaccctcaacagggtggccctatcgcttatgctggggaaatatctccggcgtttggtttccagaccggcgttctttattatcacgcaaactggattggtaacttagccatcggtattaccgcggtttcttatctttctacgttcttcccggcattaaataatccaataccggcaggtattgcctgtattgctatcgtctggctgttcacctttattaatatgctgggtggggcctgggtcagccgcttgacaacgattggcctattcctggtgctgatcccggtagtcttgaccgcagtcgccggctggcattggttcgatatcgcgacctatcacgcgaactggaacacgtccacgacgaccgactctcacgccattgttaaaagtattctgctctgcctgtgggcgttcgttggcgttgagtctgccgccgtcagcaccggcatggtgaaaaacccgaaacgcaccgtaccgctggcaaccatgctgggtaccgcgctggcaggcatcatctatatcgctgcgactcaggttatcgccgggatgttcccagcttccgttatggcctcttccggcgcgccgttcgctatcagtacctccacgattctgggtggctgggctgcgccgctggtttccgcctttaccgctttcgcctgcctgacgtctctgggctcctggatgatgctggtcggccaggctggggttcgcgccgccaacgacggcaacttcccgaaaatttacggtgaaatggataaaaacggtattccgaaaaaaggtctgctgttggctgcggtgaaaatgacggcgctgatgattctgatcaccatcatgaactccagcggcggtaaagcgtccgacctgttcggcgaactgaccgggattgccgtactgcttaccatgctgccgtacttctactcctgtgttgacctgattcgcttcgaagggttcaacatccgtaactcggtaagcctgatttgttctgtactgggctgcgcattttgcttcatcgcactgatgggcgccagctccttcgaactctccggcacctttatcgtcagtctgatcatcctgatgttctacggtcgcaaaatgcaccagcgccagaacaacgacagcgacaacaatacggctgaagcgctttaa

SEQ ID NO: 38873 - DNA, 4461 bp, Salmonella typhimurium
atgttgtacgataaatcccttgagaaggataactgtggtttcggcctgatcgcccacatagaaggcgaacctagccacaaggtagtgcgtaccgccatacacgcgctggcccggatgcagcaccgtggcgcgatccttgccgacggtaaaaccggcgacggttgcggcttgctgttacaaaaacctgaccgtttctttcgcatcgtggccgaagagcgcggctggcgcttagccaaaaactacgccgtcgggatgatatttttgaataaagatcctgaactggccgccgcgtcacgccatattgtcgaagaagaattacagcaggaaaccctgtcgattgtcggctggcgcgatgtgccaaccaatgaaggcgtgctcggtgaaatcgccctctcctccctgccgcgtattgagcagatttttgtcaacgctccggcgggctggcgtccgcgtgatatggagcgccgtctgtttatcgcccgccgacgcattgaaaaacgcctgcaggacgacaaagatttctacgtatgcagcctgtcgaacctggtcaacatttataaaggtctatgtatgccggcggatctgccgcgcttctacctggatcttgcggatctgcgtctggaatcggccatctgcctgttccaccagcgcttttccactaacaccgtgccgcgttggccgctggcgcagccgttccgctacctggcgcataacggcgagattaacactatcaccggcaaccgccagtgggcgcgcgcccgtacctataaattccagacgccgctgatcccggatttacagtccgctgcgccgtttgttaacgaaaccggttcggattccagctcgctggacaacatgctggaactgctgctggcaggcgggatggacatcatccgcgccatgcgcctgttggtaccgcccgcctggcagaacaaccccgatatggaccaggatctgcgcgccttctttgactttaactccatgcatatggagccgtgggacggtccggcaggcatcgtgatgtccgacgggcgcttcgccgcctgtaaccttgaccgtaacggcctgcgcccggcacgctatgtcattaccaaagataagctgatcacctgcgcctccgaagtcggtatctgggactatcagccggatgaagtggtcgagaaaggccgcgtcggcccaggcgagctgatggtgatcgacacccgcggcggacgtattctgcattccgcggaaaccgatgacgacctgaaaagccgccatccatataaagagtggatggagaaaaacgtccgccgcctggtgccgtttgaagagctgcctgatgaagaagtcggtagccgcgaactggacgatgacctgctcgccagctatcaaaaacagtttaactacagcgccgaagagctggactcggttatccgcgttttgggcgaaaacggccaggaagccgtcggttcaatgggcgacgataccccctttgccgtgctctccagccagccgcgtattatttacgactacttccgccagcagttcgcgcaggtcactaacccgcctatcgacccgctgcgtgaagcgcacgtcatgtcgctcgccaccagcatcggtcgcgaaatgaacgtcttctgcgaagcggaaggtcaggcccatcgcctgagttttaaatcgccaattctgctgtactccgatttcaaacagctcaccaccatgaaagaggagcattatcgcgctgaccgtctggatatcaccttcgacgtgaccgaaaccacactgaacgcgacggttaaggcgctgtgcgataaagcggaacagatggtgcgcaacggcaccgtgctgctggtcctctcggatcgcaatatcggtaagaatcgcctgccggtccccgcgccgatggcggtgggcgcggtgcaaacgcgtctggtagaacaaagcctgcgctgcgacgccaacatcatcgtagaaaccggaagcgcccgcgatccgcatcactttgcggtactgctcggctttggcgcaacggctatctatccgtacctggcctacgaaacgctggggcgtctgattgatacccaggccatcgccaaaaactaccgtaccgtgatgcagaactaccgtaacggcatcaacaaggggctgtacaagattatgtccaaaatgggcatttcgaccattgcctcttaccgctgctccaaactgtttgaagcggtcggactgcacgatgatgtggtaaacctgtgcttccagggcgtggtcagccgtatcggcggcgcgagctttgatgacttccagcaggatctgctgaatctctccaaacgcgcctggctggcgcgcaaacccattagcccgggcggcctgctgaagtacgtccacggcggcgaatatcacgcctataacccggatgtcgtgcgtaccctgcaacaggcggtacagagcggcgagtacagcgattatcaggaatacgccaaactggtcaatgagcgtccggcgtcaacgctgcgcgatctgctggcgatacatccagacggcgaggcggtgactatcgacgaggttgagcccgccagtgagctgtttaaacgctttgataccgcagccatgtctatcggcgcattaagtccggaagcgcacgaagcgctggcggaagcgatgaacagcctcggcggcaactccaactccggcgaaggcggcgaagacccggcgcgctatggcaccaataaagtgtcgcgcatcaagcaggtggcttccggccgctttggcgtgacgccagcctacctggtcaatgccgatgtgattcagattaaagtcgcgcagggcgcgaaaccgggcgaaggcggtcagttgccgggggataaagtcactccgtatatcgctaaactgcgctattcagtgccgggcgtgacgctgatctccccgccaccgcaccacgatatctactctatcgaggacttagcgcagctcattttcgatctcaagcaggtcaacccgaaggcgatgatctccgtgaagctggtatccgaaccgggcgtcggcaccatcgcgaccggcgtggcgaaagcctatgcggatctgatcactatcgccggctacgacggcggtaccggcgccagcccgctctcttcagtgaaatacgctggttgcccgtgggaactcggacttgttgaaacccagcaggcgctggtcgccaacggtctgcgtcacaagattcgtctgcaggtggacggcggtctgaaaaccggcgtcgacatcattaaagcggcgattctcggtgcggaaagtttcggcttcggcaccggcccgatggtggcgctgggctgtaaatacctgcgtatctgccacctgaataactgcgcaaccggcgtagcaactcaggatgacaagctgcgtaagaaccactatcacggcctgccgttcaaagtgactaactactttgaatttatcgcccgcgaagtgcgcgagctgatggcttcgcttggcgtgacccgcctggtggatttgattggccgcaccgacctgctgaaagagctggagggcttcaccgctaaacagcagaagctggcgctgtctcgtctactggaaaccgctgaacctcatccgggtaaagcgctgtactgcaccgagaataacccgccgtttgataacggcgtgctgaatgcgcaactgttgcagcaggcgaaaccgtttgtcgatgcgcgccagagcaaaaccttctggttcgacatccgcaacaccgatcgttccgtcggcgcgtcgctttccggctacatcgcacagacccacggcgatcaggggctggcttccgatccgattaaagcacacttcagcggtaccgcaggccagagctttggcgtgtggaacgcgggcggcgtagagttatatctgactggcgatgccaacgactatgtcggtaaaggtatggcaggcggtttgattgccatcagaccaccggtaggttccgccttcctcagtcataaagccagcattatcggcaacacctgcctgtatggagccaccggtggccgtctgtacgcggcgggccgcgcgggcgaacgtttcggcgtgcgtaactccggggcgattaccgtagtagagggcatcggcgacaacggctgtgaatacatgaccggcggcatcgtctgcgtgttgggtaaaaccggcgttaacttcggcgcggggatgaccggcggcttcgcctatgtgctggacgaagatggcgaattccgtaaacgcgtgaacccggaactggtagaagtactggacgttgattcgctggctatccacgaagagcatctgcgcggtctgatcaccgagcacgtgcagcatactggttcgcaacgcggcgaagagatcctgtccaggtggtcaagcttctcaacccaattcgcgttagttaagcccaagtccagcgatgtcaaagccctgttgggccaccgtagtcgtagtgcggcagaattgcgcgtgcaggcgcagtaa

SEQ ID NO: 38874 - DNA, 1419 bp, Salmonella typhimurium
atgagccagaatgtttatcaatttatcgacctgcagcgcgttgatccgccgaagaaaccgctgaagatccgtaagatcgaatttgttgaaatctacgaaccgttttctgaaggtcaggcgaaagctcaggcggatcgctgtttgtcctgcggtaacccctactgcgagtggaaatgtccggtacataactacatcccgaactggctgaaactggctaacgaagggcgtatttttgaggcggctgagctatcgcaccagaccaacaccctgccggaagtgtgtggccgcgtctgcccgcaggaccgcctgtgcgaaggctcctgtacgctgcacgatgagttcggcgcagtgaccatcggtaacattgagcgctatatcaacgataaagcgttcgaaatgggctggcgcccggatatcaccggcgtgcgccagacggacaaacgggtagcgattatcggcgcaggtccggcagggctggcgtgcgccgacgtgctgacccgcaacggcgtgaaggcggtggtctttgatcgccatccggaaatcggcggcctgctgaccttcggtattccagctttcaaactggaaaaagaggtgatgacccgccgtcgcgagatcttcaccggcatgggtattgagttcaaacttaataccgaagtgggtcgtgatgtacagcttgaagatctgctgaaagattacgatgcggtattccttggcgtcggcacctatcagtcgatgcgcggcgggctggaaaatgaagatgcggacggggttttcgacgctttgccgttcctgatcgccaatacgaagcagatcatggggtttggcgaaaccagcgacgaaccatatgtcagcatggaaggcaaacgcgtggtggtgctgggcggcggcgataccgcaatggactgcgtacgcacttccatacgccagggcgcaacgcacgtaacctgtgcttatcgtcgtgatgaagagaacatgccgggttccagacgcgaagtgaagaacgcgcgcgaggaaggtgtcgaatttcagtttaacgttcaaccgctgggcattgaagtcaatgccaacggcaaagtgagcggcgtaaaaatggtgcgcactgaaatgggcgaaccggatgccaaaggccgtcggcgggcagagatcgtcgccggttccgagcatgtggttccagctgatgcggtggtgatggcatttggttttcgtccacacagcatggaatggctggcgaaacacagcgtggaactggactcgcagggacgaattatcgcgccggaacgcagcgataatgctttccagaccagcaacccgaaaatcttcgccggtggcgacatcgtgcgcggttccgatctggtggtgacggcgattgccgaaggccgtaaggcggctgacgggattatgaactacctcgaagtgtaa

SEQ ID NO: 38875 - DNA, 1533 bp, Salmonella typhimurium
atggcaatgattgattccatgaacaaggacaccacacgtttgagcgatggacccgactggacatttgagctgctggatgtctatctggcagagatagaccgcgtggcgaagctctaccaactggatacttacccgcaccaaattgaagtcatcacttccgaacagatgatggacgcctactccagcgtcgggatgccgatcaactatccgcactggtcgtttggcaaaaagttcattgagacggaacgtctgtataagcatggtcaacaaggactggcttatgaaattgtgatcaactctaatccctgcattgcctacctgatggaagagaacaccatcaccatgcaagcgctggtcatggcgcacgcctgttacggccacaactccttttttaaaaataattatctcttccggagctggacggatgccagctctatcgtcgattacctgattttcgcccgaaattacattacccgctgtgaagaacgctacggagtggatgaagtagaaaaactgctcgactcctgccacgcgctgatgaattacggcgtcgatcgctataagcgcccgcagaaaatctcgttgcaggaagagaaagcgcgacaaaaaagccgggaagagtatctacaaagccaggtgaatatgctgtggcgcacgctgccaaaacgcgaagaagaaaaaacggtcgccgaagcacgccgctttcccgctgaaccgcaggaaaacctgctctattttatggagaaaaacgccccgttgctcgagccgtggcagcgcgaaattctgcgcatcgtgcgtaaagtcagccagtatttttatccgcagaaacagacgcaggtcatgaacgagggctgggcgaccttctggcactacaccatcctgaaccatctgtatgatgaaggcaaagtgacggaacgctttatgctggagtttttacacagccataccaatgtcgtatttcagccgccctataatagcccctggtatagcggaattaacccctatgcgctcggctttgccatgttccaggatatcaaacgtatttgtcagtcccccacggatgaagataaatactggtttccggatattgccggttccgactggctggaaacgctgcacttcgccatgcgcgattttaaagatgaaagctttatcagccagttcctgtcgccaaaagtgatgcgtgatttccgtttcttcacggtacttgatgatgacaggcataattatctggagatctccgccattcataacgaagaaggttatcgggagattcgatcaaaactgtcgtcacagtataacctgagcaatctggagccgaatattcaggtctggaatgtggatttacgcggcgacagatcgctgacgttgcgttatatcccgcataaccgcgcaccgctggataaaggccgcaaagaggtgctgaaacatgtgcatcggttatggggctttgatgtgatgctggagcaacaaaatgaggatggcagcgtagaactgctggagcgttgtccgccgcgcatgaacatgctgtaa

SEQ ID NO: 38876 - DNA, 1545 bp, Salmonella typhimurium
ttgaaaaaattaaagattaattatctgttcatcggcatattgacgctgctgctggcagcagccctttggccctcaatcccctggttcggtaaaaccgaaaaccatatcgccgcgattcaagcccggggggtactgcgcgtcagtacgatcgactcgccattaacctattccgttatcaacggtaaaaaatatggtctggactatgaactggcgcagcagttcgccaactatctcggcgtgaagctgaaagtgacggtgcgccagaatatcagccagttgtttgacgatctggataacggcaatgccgacctgctcgcggctgggctggtctacgacagcgcacgcgttaaaaactatcagcccggccccatgtattattcagtttcgcaacagctcgtctaccgggtcggacaatatcgcccacgttcgctggcgaccgttaacgagaatcagcttaccattgcgccagggcacgtcgtggtcaatgatttacagcgtttaaaagagacaaagtttcccgacctgagctggaaagtggatgataaaaaaggctcgacgacgctgctggaagaggtcatcagcggcaaactggattacaccattgccgattcagtggcgatcagtctgtttcagcgcgttcatcccgagctggccgtggcgctggatgtcacggatgaacagcccgtgacctggtttagccgactggacgacgataatacgctctccgccgcgctgctcgattttttcaattcgatcaatgaagacggttctctggcgcggatcgaagagaaatatctgggacatggcgatgatttcgactacgttgatacccgctctttcctgcgagcggtagataacgtcctgccggagctggaaccgttatttaaaaaatatgccaaagagatagactggcgcctgctggcggcgatttcttatcaggaatcacactgggacccgctggcgacctcgccaaccggcgtgcgcggcctgatgatgctgactaaaaataccgcccaaagtctggggctgaccgaccgtaccgatgcggagcaaagcatcagcggcggcgctcgctatcttgaagatatgatggctaaagttcccgaaaccgttccggaagacgagcgtatctggtttgctttagccgcctacaatatgggttatgcgcacatgctcgatgccagatcgttgacggtaaaaaccaaaggcaatccggatagctggaccgatgtgaagcagcgtttgcctctgttaagccaaaaaccgtattacagtaagctaacctacggttacgcgcgtggacatgaggcttatgcttatgtggaaaatatccgtaaataccagataagtttggtggggtatttgcaggaaaaagaaaagcaggaagcggaagctatgaaactggcgcaggattacccggcggtgtcgccggaggagctgaataaagcccccttccccttcctgtcgtttttatcgcagtcatcaggctacctgacgcattcgccgtctttactgtttacgccgcagaagaaagaagaaaaatag

SEQ ID NO: 38877 - DNA, 849 bp, Salmonella typhimurium
atgaactgtttgattcgtattcgccagcgttatccggatctcgcgcaaagcgacaggaaactggcggattatctgctcgcgcaaccggatacggcgcggcatctgagctcgcagcaactggcggctgaagcgggcgtcagccaatccagcgtagtcaagttcgcgcaaaaactggggtttaaagggtttccggcgttgaaactggctctcagcgaagcgttggccagcaatcctaatccgcattccgttcccgttcataaccagattcgcggcgacgatccgatgcgcctggtcggggaaaaattaattaaagagaatgtggcggcgatgcacgccacgctggacgttaacagtgaagaaaagctgttagaaagcgtcacgatgctgcgccacgcccgccgtattgtgatcaccgggattggcgcctctgggctggtggcgcaaaattttgcctggaagctactgaagattggcattaacgcggtggttgagcgcgatatgcacgccctgctggcgacggtgcaggcgctggcgccggaggatctgctgctggcgatctcttattccggggaacggcgcgagctgaacctggcggcggacgaaacattacgcgcaggcgcgaagatcctggccattaccggtttttctcccaacgccttgcagcagcgcgccacccgctgtctgtatacgattgctgaagagcaggcgacgcgcagcgccgctatctcctcgacacatgcgcaaatgatgttgaccgacttactgtttatggcgctggtacaacaggatttagagcgggcgccggagcgtattcgccatagcgaggcgctggtaaaaaaactggtttga

SEQ ID NO: 38878 - DNA, 927 bp, Salmonella typhimurium
atgaatatcaaacaactacattccttcctgatattgtgtgatgaattacattatggtcgggcagccagtcgcctgtttatcactcagccatcattaagtcagcaaatcaaacaacttgagtcatcacttaaaacaatattatttaagcgaaaaggtagaggaattaaattaacaaaagcaggcattattttgcaacgacacgctaacaaaataatgctggatttaaaaaatgccgaaaatgaacttcttccctatcaggatcaacagcgcgatactatttcaatcggggtgtcaggcagctacctggtcctgcccgcttttcgcaactttatggcgcaccatccggaaatatctttaaatgttaaagagttctcaactgagcaaaccattaaaaagctgacggatagcgccgttgatattggcattgtttatcgaacagcgctccctgcccagctaagctcgaccatgctgtttgaagatgaaattatcgctgcaatcccactttctcatcctctggcgacacgcgaacgtctgcatctaaaagatttaaacgaccagcccattatcgtgcttaatgactctctgctattaagagggatcatcaccacagaatttaataaccgcaaagtcgttcctaacgtcatctgcgaactggataaccactactcatgccttgagtatgccgaagcgcagattggcatcgcatttattacccgctcgctaacccatttatcgacacccaaaaatgttcgcctggtttcactgggcatccccgcattctttattcctgtcatgctggtgcacagtaatgacctttcactggataacgcaaccatctgcctgctcaagcagatcaaaaatttttacactgtagataacaaatcagcgccagaaaagagctggcccgagcagaaaataggcgtataa

SEQ ID NO: 38879 - DNA, 261 bp, Salmonella typhimurium
atggcgctgttaatcaccaaaaaatgtatcaactgcgatatgtgcgagccggagtgcccgaatgaggcgatttcaatgggcgacagcatttatgaaattaacagcgacaaatgcaccgagtgtgtaggccattacgaaacgccgacctgtcagaaagtctgcccaatccccaatacgattttgcaggatcccgcccatgtcgaaagcgaagaacagttgtgggataagtttgttctgatgcatcacgcagataaactgtaa

SEQ ID NO: 38880 - DNA, 405 bp, Salmonella typhimurium
atgttcatgacctgggaatatgcgctaattggattagtcgtcggtatcatcattggtgccgtggccatgcgttttggtaatcgtaagttacgtcaacagcaggcattgcagtacgaactggaaaaaaacaaagctgagctggaagagtaccgtgaagagctggttagccactttgcccgcagcgcggaactgctggataccatggcgcatgattaccgccagctgtatcagcatatggcgaaaagctccagcagcctgctgccggaaatgtctgcggagtcgaatccgttccgtaaccgtctggcggagtctgaggcgagcaacgatcaggcgccagtacaaatgccacgtgattattctgaaggcgcgtctggcctgttacgtagcggcgcaaagcgcgattaa

SEQ ID NO: 38881 - DNA, 1368 bp, Salmonella typhimurium
atgaaaaaacacacccagctgttaagtgcattagcgttaagtgtcgggttaactctttcggcgccgtttccagcccttgcatcgataccaggccaggtgccaggccaggcgacgctgccaagccttgcccctatgctggagaaagtgctgcctgctgtcgtcagcgtaaaagtcgagggaaccgccgcccagagccaaaaagtgccggaggagtttaaaaaattctttggcgaggatctgccagaccagccgtcccagccgtttgaaggactcggttcgggggtgattatcgatgccgcgaaaggctatgtattaaccaataatcatgtgattaatcaggcacagaagatcagcattcaactgaatgacggacgcgaattcgacgcgaagcagatcggcggcgacgaccagagcgatatcgctctgttacaaattcagaatcccagcaagttaacgcaaattgccatcgccgattccgacaaactccgcgtcggcgatttcgccgtggcggtcggtaatccgtttggtcttggacaaaccgccacctccgggattatttcagcgctgggacgcagcgggcttaatctggaagggcttgagaactttattcaaaccgatgcctctattaaccgcggcaactccggcggcgcgctgcttaacctgaacggcgagctgatcgggattaataccgcgatcctcgcgccagggggcgggagcatcggcattggctttgctattccttccaatatggcgcagacgctggcgcagcagttgattcagttcggcgaaatcaaacgcggattgctgggaattaaaggcactgaaatgaccgctgatatcgccaaggcattcaaactgaacgttcagcgtggcgcttttgtcagcgaggttttacccaattcaggttcggcgaaggccggggtgaaatccggagacgtgattatcagtcttaacggtaagcagctgaatagctttgccgaactgcgttcacgtatcgccaccaccgaaccgggcacgaaagtgaagctgggcctgctgcgcgatggtaagccgctggaggtggaagtcacgctggattccaatacctcttcttccgccagcgccgaaatgatcgccccggcgttgcaaggcgcaacgttgagcgacggccaactgaaagacgggacgaaaggcgttaaggttgatagcgtcgaaaaaagcagtcctgccgcgcaggccggtttgcaaaaagatgatgttatcatcggcgttaatcgcgatcgcatcagttctatcgccgaaatgcgcaaagtgatggcggcaaaaccgtccatcattgctcttcaggtagtacgcggcaacgagaacatttatctattgctgcgctaa

SEQ ID NO: 38882 - DNA, 1911 bp, Salmonella typhimurium
gtgacggacgattttgcagcagatggccaactggccaaagcgataaccggctttaaaccgcgcgaaccacagcgacaaatggcggttgccgtaacacaagcgattgaaaatgcgcagcctctggttgttgaagccggcaccggaaccgggaagacctatgcttacctcgctccggcgttgcgcgccgggaaaaaagtcattatttcgaccgggtcgaaagcgttgcaggatcaactctacagccgcgatctgccgacggtagcaaaagcgttggcgtttaccggtaagacggccctgttgaaaggacgttcaaactacctctgcctggagcggctggaacaacaagcgctggcgggcggcgatttaccggtacaaacgttaagcgacgtgatattgctgcgctcctggtcaaatcagacgcgggatggcgatatcagcacctgcgtcagcgtggcggaggattcccaggcctggccgttggtcaccagtaccaacgacaactgccttggcagcgattgcccgctctacaaagagtgctttgtggtgaaagcgcgtaaaaaggcgatggacgcggatgtggtgattgtaaaccaccacctatttcttgcggatatggtggttaaagagagcgggtttggcgaacttatccctcaggctgaagtaatgatcttcgatgaagcccaccaactgcctgacatcgccagccagtatttcggacaatcgctctccagccgtcagttgctggatttagcaaaagacatcaccatcgcctaccggacggaactgaaagacactcaacagttgcaaaaatgcgccgatcgccttgcccagagcgcccaggattttcgtctgcaactgggggagcccggctaccggggaaatttgcgtgaactgttagccgactcacgtatccaacgggcatttttactgctggatgatacgctggagctttgttacgacgtggcgaagctgtcgctgggccgttcggcgctgctggatgcggcttttgaacgcgccacgctataccgttcacggctgaaacgcttaaaagagatcaatcagccgggatacagctactggtatgagtgcacctcgcgccatttcaccctggcgctgacgccgctcaccgtggcggacaaattcaaagaggtgatggaacagaagcccggtagctggatttttacctcagccacgttgtcggtaaatgatgatcttcaccactttaccgcccgtcttggaattgaacaggcagaatccatgctactgcccagcccattcgactatacgcgccaggcgttactctgcgtaccgcgtaacctaccgcaaaccaaccagcccggcgcggcgcgacagttggcggctatgctcaggccgattatcgaagccaataacgggcgatgttttatgctgtgcacctcacacgccatgatgcgcgatttggcggagcagtttcgcgccaccatgacgctgccggtattgttgcaaggggaaaccagtaaaggccaactgttacagcaatttgttagcgccggcaacgcgctgctcgtcgccaccagcagcttctgggaaggggtggacgtgcgcggcgatacgttatcgttggtgattatcgacaaattgccgtttacctccccggacgacccgctgttaaaagcgcgaatggaagactgtcgtttgcgcggtggcgatccgtttgatgaggttcaactgcccgacgcggtgattacgctgaagcagggggtggggcggctgattcgcgatgcggacgatcgcggggtgttagtgatttgtgataaccggctggtgatgcggccctatggcgccacgtttctcgccagcctgcctcctgcgccgcgcacgcgtgatatcgcccgtgccgttcgctttcttgcgattccatccgccgagtaa

SEQ ID NO: 38883 - DNA, 1365 bp, Salmonella typhimurium
atgatgaagacgttatctcccactgttatcaccttaccctggcgtccggacgccgctgaacactattttgcgcccgtaaaccatttgccctgggcgatgctgctgcattcaggtgatgctattcatccctataaccgttttgatattctggtcgccgatcctgtcaccacactgaccacgcgcgcgcaggaaaccacggtatgtactgcgcgcacgactaccgtcactctcgacgatccgttacacgttttgcagactcaactggaggcgctgccttttcatcctcagcctgaccctgacttaccctttcagggcggcgcgctgggtctgtttggttatgatttagggcggcgtttcgaaattttgcccgatactgccgcgcgcgatatcgctttacccgatatggcgattggcctttacgactgggcgctgattgtcgatcaccaaaaacaggtggtgtcgctgataagctatcacgatgcagacgcccgatatcgctggctcaccagccagcgcgcgccgacccgcacgcccttcaggcttacctcagcctggcaatccaatatgacgcgttgcgagtatggcgagaagtttcgtcaggtgcaggcctggctgcacagcggggactgctatcaggtcaatctttcccagcgttttcaggcgagctacgagggtgatgaatggcaggctttcgaacgccttaaccgcgccaatcgcgccccgttcagcgcctttcttcgtttacatgacggcgccatattgagcctttctcccgagcgttttatccaactggagaatggtcatatccagacgcgcccgatcaaaggtacgcttccacggcttaacgatccgcaggcggatcgtcagcaggcgcagaaactggctaattcaatgaaagatcgcgctgaaaatttgatgattgtcgatttgatgcgtaacgatattggccgggtcgccgtaccaggttcggtgaaagtgccggaactgttcgtcgtcgaaccatttcctgccgttcaccatctggttagcaccattaccgcccgtttaccggactcgcttcatgctaccgacctgctgcgcgcggctttccccggcggctccattaccggcgcgcctaaagtgcgggcaatggaaattatcgacgaactggagccgcagcgacgcaacgcctggtgcggtagcatcggttatctgagtttctgcggcaagatggataccagtattactatccgcaccgtcacggcaacgcagggccaactctattgctcagccggcggcggtatcgtggccgatagcaacgaagaagcggaatatcaggaaacttttgataaagttaatcgtatcctgcacccactggagaactaa

SEQ ID NO: 38884 - DNA, 579 bp, Salmonella typhimurium
gtggataccagccgtctgacgctcgatcatttcttatcgcgctttcagcttttgcgcccgcagatgactcatgaaacgttaaatcaacgtcaggccgccgtactgatccctgtggttcgccgcccccagccggggctgctgttgacccagcgggctattcatttgcgcaaacacgccggacaggtcgcctttcccggcggggccgtggacagtaccgatgcttcgcttatcgccgcagcgcttcgcgaagcgcaggaggaagtcgccatcccgccgcaagccgtggaagtgattggcgttttaccgccggtagacagcgtgaccggttttcaggtcaccccggtggtcggcattattccgccaaatctcccctggcgcgccagtgaagacgaagtgtctgcggtgtttgaaatgccgctggcgcaagcgttgcaactggggcgatatcatccgcttgatgtttaccgtcgcggcaattcgcaccgcgtatggctctcctggtatgagcattatttcgtctggggcatgaccgcaaacattcttcgtgagctggcgctgcaaattggcgtaaagccctga

SEQ ID NO: 38885 - DNA, 1365 bp, Salmonella typhimurium
gtgattagcctattcgacatgtttaaggtagggattggtccctcctcttcccacactgttggcccgatgaaggccggtaaacagttcgtcgatgacctggtcgaaaaaggattactggataacgttacccgcgtcgctgtcgatgtctacggctcgctgtcgctgacggggaaaggtcaccataccgatatcgccattattatgggtctggcgggtaatgaacccgctaccgtggatattgatagtatccccggttttattcgcgacgtcgaaacgcgcgagcgtctgttactggcccagggacgtcacgaagtcgacttcccgaaagatgacggaatgcgttttcacaacggcaatttgccgctgcatgaaaacgggatgcagatccacgcctggcatgacgacacggtcatttatagcaagacgtactattccatcggcggcggctttatcgttgatgaagagcatttcggccaggaagcgacgaatgaggttactgtaccttatccgtttaaatcggcgaaagaaatgctggagtattgcaacagtaccggcctttcactctccggcatggtgatgcaaaacgaactggcgctgcatagcaagaaagagattgaagagtatttcggtcacgtctggcagaccatgcaggcctgtattgatcgtggtatgaataccgaaggcgtgctgccggggccgctgcgcgtaccgcgtcgcgcctctgcgctgcgtcgtatgctggtttccagcgataagctttccagcgatccgatgaacgtcattgactgggtgaacatgtttgctctggcggtgaacgaagagaacgccgcaggcggccgcgtcgtgacggcgccaaccaacggcgcgtgcggtatcgttcctgcggtactggcttactacgaccattttattgaatcagtcagcccggatatttacacccgctacttcctggcggcaggcgctattggcgcgctgtataagatgaacgcgtctatttccggcgcggaagtcggctgtcagggcgaagtcggggtcgcctgttcgatggcggcggcaggccttgctgaactgttgggcgccagcccggagcaggtttgcgttgccgctgaaatcggcatggagcataacctggggctgacctgcgacccggttgccggtcaggtgcaggtgccgtgtatcgagcgtaacgccattgcttcggttaaagcgatcaacgctgcgcgtatggccatgcgtcgaaccagcgcgccgcgcgtctcgttggataaagtcatcgaaacgatgtacgagaccggaaaagacatgaacgcaaaataccgcgaaacgtcgcgcggcgggttggctattaaagtccagtgtgattaa

SEQ ID NO: 38886 - DNA, 969 bp, Salmonella typhimurium
gtgaccattgctattgttataggcacacatggttgggctgcagagcagttacttaaaacagccgaaatgctgttaggcgagcaggaaaacgtcggctggatcgatttcgttccaggcgaaaatgccgaaacgctgatcgaaaagtacaacgctcagttggctaaactcgataccagtaaaggcgtgctatttctcgttgatacatggggaggcagtccgtttaatgctgccagccgcattgtcgtcgataaagagcgctatgaagttattgccggcgtcaacatcccgatgctggtcgaaacgtttatggctcgtgacgacgatccgagctttgacgagctggtcgcactggcggtagaaaccggtcgtgaaggcgtaaaagcgctgaaagcgaaaccggtagaaaaagccgcgccagcgccagtcgccgccgcgccaaaagcggccgcaccggcaaaaccgatgggcccgaatgattatatggttatcgggcttgcccgtattgatgaccgcctcattcacggtcaggtcgctacccgctggaccaaagagaccaatgtcagccgtattattgttgtgagcgatgaagtggcggcggataccgttcgtaaaacgctgctgacgcaagttgcgccgccgggcgttacggcgcatgtggttgacgtcgcgaagatgattcgcgtctacaataacccgaaatacgccggcgaacgcgtgatgcttctgtttaccaatcctaccgacgtcgagcgcatcgttgagggcggcgtgaaagtcacttccgtgaacattggcggtatggcctatcgtcaaggtaaaacgcaggtgaacaacgccgtttccgtcgatgaaaaggatatcgaagcctttaaaaagctcaacgagcgcggcatcgagcttgaggtgcgtaaagtttccaccgatccgaaactgaaaatgatggatttaattgccaaagtggcgaaataa

SEQ ID NO: 38887 - DNA, 1251 bp, Salmonella typhimurium
gtgtttgctcatcagaatgcctcctttcctccccggcctgaaggccggggaggaaaggaggcggttttccggctaactgtcttttgcataatcacattttcctctttaatatgtgaagccatgaaacgcgcatataaataccggttttaccccacgactgagcaggctgagcttttagctcagacgttcggttgtgtgcgtttcgtctacaactccatcctccgctggcgtaccgatgcgtactacgagcgaaaggaaaagatcggttacctacaggccaacgctcgccttacggcgctgaaaaaggagccagaatttgcctggcttaacgacgtttcctgcgttcccctccagcagtctttgcgccaccaacaaaccgcctttgctaacttcttcgccggacgggctgcatatccggctttcaaaagcaaacggcacaagcaggcggctgagttcactgcgagcgcgtttaaataccgcgacggcaagctgtacatggcaaagaacaaaatccccttagacgtgcgctggagtcgtccgctgccgtccgtgccgtctaccgtcaccatttccaaagatgccgcagggcggtactttgtttcgtgcctttgcgaatttgaacccgcatcactgccgatcacctcttcaatggtcggcattgatgttggtttaaaagatttgttcgtcaccgataccggattcaggtccggcaatccccgccataccgctaaatacgcggctcgcctggcactactccagcgccggttaagcaaaaaggccaaaggctcaaagaaccgcgccaaagcccacttaaaggtagcccgactccacgcgaaaattgctgattgccgactggatgccctgcacaaggccacccgcaaactgattaacgataaccaagttgtatgcgtcgaatccctgaaagtgaggaacatgatccgcaacccgtcgctatccaaagcaatagcagacgcgagctggggcgaacttgtgcgccagctccggtacaaaggcgaatgggcggggcggtcagtggtagccattgaccagtttttcccgtcctcaaaacgctgtagctgttgcggtttcatcatgaaaaaaatgcctcttgatgttcgtaaatggcagtgccctgagtgcggaactgaccacgaccgggacgttaacgcggcacgtaatatcaaagctgccgggctggcagtgttagcccacggagagcctgtaaatcctgaatcgctcaaagcggcttag

SEQ ID NO: 38888 - DNA, 396 bp, Salmonella typhimurium
atggaattacagcttatgcttaaccactttttcgagcgcgtcagaaaggatgcaaatttcaacgcatttctaatcgatctggaatataataatatcgcttattacatctattttgttgctaccggcaatgtgaaaattatcactcatgcaggccacttcatttctattaaaagcaatagaaagctgattaaagtcaattcaacaccgaatacgcaattaataaaattgatttcagctaaacacttttcgggggagcattcctatgaaaaatactgtactgatctggcaacggcaggcgtttttaaatggattgttgaattaaaccaaaaaactcgacaatactggtcgaaagacaaccaattattatatatagaaaatgtggtcatgccgctttaa

SEQ ID NO: 38889 - DNA, 915 bp, Salmonella typhimurium
atgcgcaaggtgtcgatatctatattattcatgctagtttcactgacttgggggactacatggttggccatgcgaattgccgttgaaactatccctccagtgtttgcaaccggaatgaggtttatgtttgcagcaccttttttaatcatcattgcatggttaagaaaaaaaacactgttgtttcctcccggacaacgattattccagtttgtgatatgcatcttttatttttgcattcctttctcactaatgatttatggtgaaacctatgtcaactctgggcttgccgccattatctttgcgaatatgcctgtggccgttttgatagcatcggttttgtttctaaatgaaaaagcgaaactaatgcagatcgcgggcttaactatcgcaatcactgcattgacggggatacttcttgaagaaacgaatacaagtacagagagtcactggcagggtatcactgcgcttatttctgctgtgttaatccatgccataatatatacacaatgtaagaaaagaagttgtactgtctctgttatcacatttaatgcgctcccgtgccttttagctgggttgatactttctgcgacaggatggttttttgaaagaccacaagtatcaaccttctcagtacactcaatattagctaccctgtatctcggggcttttgccggagtttttggtatcctgtgctactttgcgcttcagcaaaaggctaatgccttccaggcttcgcttgtatttcttatctttccgctgattgcggtaagtctggaagactatatttatggatatgctatttcaacacactcaatgctgcttattataccattagttatcgggatatttcttactcttgtcgccagaaatctccctgtaaccagcagatgccgggataactcatcacagaaataa

SEQ ID NO: 38890 - DNA, 699 bp, Salmonella typhimurium
atgttgcggattatagacacggaaacctgcgggctgcagggcgggatcgtagagatagcctctgttgatgtcattgatggcaacattgtcaatcccatgagtcacctgatacgccccgatcgccctattacgccgcaggcgatggcgatacaccgtattaccgaagccatggtcgccgataagccgtggattgaagatgtcataccgctttattacggtagtgagtggtatgtcgctcacaatgccagtttcgacagacgcgtattacctgaattgccgggtgagtggatctgtaccatgaagttgtcgcgacgcctgtggccgggaataaaatacagcaatatggcgctctataaatcgcgcaaactaagcgtacaaacgccgccggggctgcaccatcaccgggcgctttatgattgctatatcaccgccgccttgctgattgatattatgcgaaccaccggctggaccgcggaagagatggtcaatattacgggccgtcctgcgctgttaaccactttcccgttcggtaaataccgcggtaaggcggtatctgaagtcgcaaaacgcgatccgggctatttacgctggctttttaataaccttgataatatgagcccggagcttcgcctgacgcttaaacactacctggaagatgttcaggctggcgagcaacgcagcaatggaacaccacaataa

SEQ ID NO: 38891 - DNA, 1443 bp, Salmonella typhimurium
atgtccagaaggcttcgcagaaccaaaatcgttaccacgttaggcccggcaactgaccgcgataacaaccttgagaaggttatcgccgcgggcgcaaacgtagtacgtatgaacttctctcacggctcgccggaagatcataaaatgcgtgctgataaagtccgtgagattgccgccaaactggggcgtcatgtggctattttaggcgacctgcaagggccaaaaattcgcgtttccacttttaaagaaggcaaagtgttcctcaacatcggggacaaatttctgttagacgctaacctgggtaaaggcgaaggcgacaaagaaaaagtcggcattgattacaaagggttgccggcagacgtcgttcctggcgatatcctgctgcttgacgatggtcgagtgcagttgaaagtgcttgaagtccagggcatgaaagtctttaccgaggtcaccgtcggcggcccgctgtctaacaataaaggcattaacaagctcggcggcgggctttctgctgaagcgctgaccgaaaaagacaaagccgatattcaaaccgctgcgctgataggtgttgactatctggccgtctccttcccgcgctgcggcgaagatctgaactatgcacgccgcctggcgcgcgacgccggctgcgacgcgaaaattgtggctaaggtcgaacgcgccgaagcggtatgcgaccaaaacgccatggacgatatcattctggcctctgacgttgtgatggtcgcacgtggcgatctgggcgttgaaatcggcgatccggagctggttggtatccagaaagcgctgattcgccgtgcgcgtcagctaaaccgcgcagtcatcaccgcaacgcaaatgatggagtcgatgatcaccaacccgatgccgacccgtgcggaagtgatggacgtggcgaacgccgtcctggatggcacggatgcggttatgctgtctgccgaaaccgcagccggtcagtatccttctgaaaccgttgccgcaatggcgcgcgtctgcctgggcgcagaaaaaatccccagcatcaatgtgtctaaacaccgtctcgacgtgcagttcgacaacgttgaagaagccattgccatgtctgcgatgtatgcggcaaaccatctgaaaggcgttaccgcgatcatcaccatgacggaatccggtcgtaccgcgctaatgacttcccgtatcagctccggcctgccgattttcgccatgtcgcgccatgaacgcacgctgaacctgaccgcgctctatcgcggagtaacgccggtgcattttgatagcgcggctgatggcgttgtcgcggcacatgaagctgttaatctgctgcgcgataaagggtatctggtttccggcgacctggttatcgtgacccagggcgatgtcatgagcaccgtcggttcaaccaataccacgcgtattttgaccgttgagtaa

SEQ ID NO: 38892 - DNA, 1557 bp, Salmonella typhimurium
atgaaagtaaaactgcttgctgccggtattttgttcacgctgccgttctgggcctgcgccaaagatgtcaccattatttacaccaacgatctacacgcccatgtggagccttataaagtaccgtggattgctgacggtaaacgcgatattggcggttgggccaatatcaccacgctggtgaagcaggaaaaagccaaaaataaggcgacgtggttttttgatgccggagattactttaccggaccgtatatcagcagcctgacgaagggtaaagcgattatcgatattttgaataccatgcagtatgacgctgccactatcggtaatcatgagttcgatcatggctgggacaatacattgttgcaactgagccgggcgaaattccctatcgtacagggcaatattttttatgaggacagcagtaaatccttctgggataagccgtacaccattgttgaaaaagatggcgtcaagattggcgtaatcggcttacacggtgtctttgcttttaatgatacggtatccgccgcgacgcgcgtgggcattgaggcacgcgatgaaattaagtggctgcaacgttacattgatgaacttaaaggtaaagtcgatctgaccgtcgcgctgatccacgaaggcaccccggcccgccagtccagcatggggaataccgatgtgcgacgcgcgctggataaagatattcagaccgcaagtcaggtaaaagggctggatattttgattaccggccacgcgcatgtcggtacgccagaaccgattaaagtcggtaatacgctgatcctctcaacggacagcggcggtattgatgtgggtaaactggtgctggattacaaagagaaaccacaccactttacggtgaagaacttcgagctgaagaccatttttgctgatgagtggaagccagatccgcaaacgaaacaggtgatcgacggctggaacaaaaagctcgataaagtcgtgcagcaaacggtggctcagtcgccggttgagctgacccgcgcgtatggcgaatcgtcgtcgctggggaatctggcggcggatgcgctgctttttacggcggggaaagacacccagttagcgcttactaactctggcggtatccgcaacgaaatcccggctggcgcggtgacgatgggggcggtaatcagtaccttcccgttccctaatgaactggtcacgatggatttaaccggtaaacaattgcgcagcctgatggagcatggcgctggcttaagcaacggcgtattgcaggtgtctaaagggctggagatgaagtatgacagcagcaaacctatcggccagcgggttaccgtgctgacgctcaatggcaagccgattgacgatgctacggtttatcacatcgctaccaacagcttccttgccgacggcggcgatggttttgcggcattcacggaaggccaggcgcggaacacctccggcggctactatgtgtcgaatgcgatagttgattactttaaggcgggcaacaccatcacggatgagcagctcaaaggaatgcgcgttgcggatgtgaagaagtaa

SEQ ID NO: 38893 - DNA, 2181 bp, Salmonella typhimurium
atgagcacgaccgacgatacccataacacgttatccactggaaaatgtcctttccatcagggggggcatgaccgaagcgcaggcgcagggactgccagccgcgactggtggccgaaccagcttcgcgtggatcttttgaatcaacattccaaccgttctaacccgctgggtgaagactttgactaccgcaaagagtttagcaagttagactactccgccctgaaaggggatctcaaggcgctgctgaccgattcacaaccgtggtggcccgctgactggggcagctatgtcggtttgtttattcgcatggcctggcatggcgctggcacctaccgttctattgatggtcgtggcggcgcgggtcgtggtcaacagcgttttgcgccgcttaactcctggccggataacgtcagcctggataaggcgcgtcgtttgttgtggccgattaagcagaaatatggccagaaaatttcctgggccgacctgtttattctggcgggtaacgtggcgctggaaaactccggcttccgtaccttcggtttcggcgccgggcgtgaagatgtctgggaaccggatctggatgtgaactggggcgatgaaaaagcctggttgactcaccgacaccctgaagcgctggcaaaagcgccgctgggcgcgaccgagatgggccttatctacgttaacccggaagggccggatcacagcggcgaaccactttctgccgccgccgctattcgcgctacctttggcaatatggggatgaacgacgaagagaccgtggcgttgatcgctggcgggcataccctcggtaaaacccacggcgcggcagcggcatcccatgtaggggccgatccggaagccgcgccgattgaagcgcagggcttaggttgggccagcagctatggtagtggcgttggcgcggatgctatcacctccgggctggaagtggtctggacgcagacgccgacccagtggagcaactatttcttcgagaacctgttcaaatatgagtgggtacaaacccgtagtccggctggcgctatccagtttgaagcggtagacgcgccggacatcatcccggacccgttcgatccgtcgaaaaaacgtaagccaaccatgctggtcaccgacctgacgctgcgttttgatccggagttcgagaagatttcccgtcgtttccttaacgatccgcaggcctttaatgaagcctttgctcgtgcctggttcaaactgacgcacagagatatgggaccaaaagcgcgttacatcggaccggaagtgccgaaagaagatctgatctggcaggacccgttgccgcaaccgctctatcagccaacgcaggaagacattatcaacctgaaagcggcgatcgctgcatccgggctttctattagcgagatggtttcggttgcctgggcatccgcgtctactttccgcggcggcgataagcgtggcggcgctaacggcgcgcgtctggcattagcgcctcagcgcgactgggatgtcaacgccgttgcggctcgcgttctgccggtattagaagagatccagaaaacgacgaataaagcctcgctggccgatattattgtgctggcgggcgtggtcggtatcgagcaggcggccgctgctgcgggtgtcagcatcagcgtaccttttgcgccgggccgggtggatgcgcgtcaggatcagaccgacatcgagatgttctcgctgcttgaaccgattgctgatggattccgtaactatcgtgcgcgtctggatgtgtcgacgaccgaatcgctgttgattgataaagcgcagcagttaacgttgaccgcgccggaaatgacggtactggttggcgggatgcgtgtgctgggaaccaactttgacggcagccagaacggtgtctttaccgacagaccgggcgtgctcagcactgacttcttcgctaatctgctggatatgcgttacgagtggaagcccaccgacgacgctaatgagctgttcgaaggccgggatcgtctgactggcgaggtaaaatacacggcgacccgcgccgatctggtgtttggttccaactccgtactgcgcgcgctggcggaagtttacgcgtgtagcgatgcgcacgagaagtttgtgaaggacttcgtcgcggcatgggtgaaagtgatgaacctggaccgtttcgatctgcaataa

SEQ ID NO: 38894 - DNA, 1377 bp, Salmonella typhimurium
atggcactttggggtgggcgttttacacaggcggcagaccagcggtttaaacaattcaatgattcgttgcgcttcgattaccgtctggcggagcaggatattgtcggttctgtggcctggtccaaagcattggtcacggtaggcgtactgactgccgatgagcaacgacagttggaagaagcgctgaacgtgctgctggaagaggttcgcgcgaatccgcagcaaatcctgcaaagcgatgcggaagatatccatagctgggtggaaggtaagctcatcgacaaagtgggtcagttgggtaaaaagctgcacaccgggcgcagccgtaacgatcaagtggcgacggacctgaaactgtggtgcaaagagacggtgagggaactgcttaccgctaaccgccagttacagagcgcgctggtggaaaccgcgcaggcgaaccaggacgcggtaatgccgggatatacccatctgcaacgcgcgcaaccagtgactttcgcccactggtgtctcgcgtatgtcgaaatgctggcgcgcgatgaaagccgcctgcaggacacgcttaaacgtctggacgtgagtccgctaggctgcggcgcgttggcgggaacggcctatgaaattgaccgtgaacaattggcaggctggctgggctttacctctgcgacccgcaacagcctggacagcgtgtccgatcgtgaccacgtactggaactgctttctgatgcggctatcggcatggtgcatctgtcacgcttcgcggaagatctgattttctttaattctggtgaagcgggctttgtagagctttctgaccgcgtgacttccggttcatcgttaatgccgcagaagaaaaacccggacgcgctggagctgattcgcggtaagtgcggtcgcgtacaaggggcgctaaccggcatgatgatgactttaaaaggtctgccgctggcgtataacaaagatatgcaggaagacaaagaagggctgttcgatgcgctcgatacctggcttgactgcctgcatatggcggcgttggtgctggacggtattcaggtgaaacgcccacgttgtcaggacgcggcgcaacaggggtatgccaacgccacggagctggcggattacctggtcgcgaaaggcgtgccgttccgcgaagcgcaccatattgttggcgaagcggtggtagaagctattcgccagggtaagccgctggaagcgttgccgctggccgatttacagaaattcagccgcgtgattggcgacgatgtgtatccgatattgtctttgcagtcgtgtctggataaacgggcggcaaaaggcggcgtttctccgctgcaggtggcgcaggccatcaacgatgcgaaggcgcgcctcgcgttgtaa

SEQ ID NO: 38895 - DNA, 852 bp, Salmonella typhimurium
atggctaccaaactgcaggacgagaatacaccttgtctggcagctacaccttctgaaccacgtcccaccgtgctggtatttgattccggcgtcggtggattgtcggtctatgatgagattcggcggctcctgccggatctccactatatatatgctttcgataacgtggctttcccctacggggaaaagagtgaaacgtttatcgtcgagcgcgttgtcgagattgtgactgcggtacagcagcgctatcccctttcactggcggtgattgcctgtaataccgccagtacggtctcacttcccgcattacgtgaaaagtttgccttcccggtggtgggcgttgtgcctgcgattaaaccagcggcgcggctgaccgcaaatggcgtcgtcgggctactggcgacgagagccacggtcaaacgtccttatactcacgagctgattgcgcgcttcgccaatgaatgtcagatagcgatgttagggtcggcagaactggtggaactggcggaagctaaattacatggcgattcggtatcgctggaagaactgcgccgcatattacgcccatggctacgaatgccggagccgcctgacacggtcgttctggggtgtacgcatttccctctattacgggacgagcttttgcaagtcctgcccgaagggacgcggttagtggattccggcgcggcgatagcgcgtcgtacagcctggctgttggaacatgaagcgccggatgcgaaatcaaccgatgccaatattgcttattgcatggcaatgacgccaggagctgaacaattattacccgttttacagcgttatggctttgaaacgctcgaaaaactgccggtttaa

SEQ ID NO: 38896 - DNA, 1029 bp, Salmonella typhimurium
atgacccactccctaaaaccctggaataccttcggcattgatcattgtgcaaagcacatcgtatgcgctgaaaacgaacaacaactactgagcgcctggcagcaagcaactcgtgagggactgccggttatgatcctgggtgaaggaagcaatgtcctgtttctggaaaattacgccggcaccgtgatccttaaccgcctgaaaggcattgaggtcaatgaaaccgcggacgcctggcacctacacgtcggcgcaggcgaaaactggcatcagctggttcgctacgcgctggacaacaacatgcccggcctggagaatctggcgctcatccctggctgcgttggttcctcgcctatacagaatattggcgcgtatggcgtagaactacagcgcgtctgcgactacgttgactgcgttgaactggaaacgggaaaacgtctgcgtttgtccgcggcggaatgccgtttcggctatcgtgacagtatcttcaaaaatgaatatcaggatcgcgttgcgatcgtcgcggtgggtctgcgtttgtcaaagcaatggcagccggtgttgacctatggcgatcttacttgtttggacccgaaaacggtcaccgcgcaacaggtgtttgatgctgtatgccatatgcgcaccacaaaattgccggatcctaaagtgaatggcaatgcgggcagcttttttaaaaatcccgttgtcgcagccgatatcgctatggaactgttagaacgatttcccaacgcgccgcattaccctcaggcagacggctcagtgaagctggcggcaggctggctgatagatcaatgtcagttgaaaggcgtcaccattggcggcgctgcggtgcatcgccaacaggcgctggtattgattaatgcgaatgatgcgacaagtaaagatgtggtggcgctggcgcatcatgtccggcaaaaagtgggtgaaaaatttaatgtctggctggagcctgaggttcgctttattggtcggtccggagaggtgaacgctgtggagagcattgcatga

SEQ ID NO: 38897 - DNA, 1185 bp, Salmonella typhimurium
atgtctaaagaaaagtttgaacgtacaaaaccgcacgttaacgtcggtactatcggccacgttgaccatggtaaaacaacgctgaccgctgccattactaccgtactggctaaaacctacggcggtgccgctcgcgcattcgaccagatcgataacgcgccggaagaaaaagcgcgtggtatcaccatcaacacttctcacgttgaatacgataccccgacccgccactacgcacacgtagactgcccggggcacgccgactatgttaaaaacatgatcaccggtgctgctcagatggacggcgcgatcctggttgttgctgcgactgacggtccgatgccgcagacccgtgagcacatcctgctgggtcgtcaggtaggcgttccgtacatcatcgtgttcctgaacaaatgcgacatggttgatgacgaagagctgctggaactggttgaaatggaagttcgtgaacttctgtctcagtacgacttcccgggcgacgacacgccgatcgttcgtggttctgctctgaaagcgctggaaggcgacgcagagtgggaagcgaaaatcatcgaactggctggcttcctggattcttacatcccggaaccagagcgtgcgattgacaagccgttcctgctgccgatcgaagacgtattctccatctccggtcgtggtaccgttgttaccggtcgtgtagaacgcggtatcatcaaagtgggcgaagaagttgaaatcgttggtatcaaagagactcagaagtctacctgtactggcgttgaaatgttccgcaaactgctggacgaaggccgtgccggtgagaacgtaggtgttctgctgcgtggtatcaaacgtgaagaaatcgaacgtggtcaggtactggctaagccgggcaccatcaagccgcacaccaagttcgaatctgaagtgtacattctgtccaaagatgaaggcggccgtcatactccgttcttcaaaggctaccgtccgcagttctacttccgtactactgacgtgactggcaccatcgaactgccggaaggcgtagagatggtaatgccgggcgacaacatcaaaatggttgttaccctgatccacccgatcgcgatggacgacggtctgcgtttcgcaatccgtgaaggcggccgtaccgttggcgcgggcgttgttgctaaagttctcggctaa

SEQ ID NO: 38898 - DNA, 546 bp, Salmonella typhimurium
atgtctgaagcacctaaaaagcgctggtacgtcgttcaggcgttttccggttttgaaggccgcgtagccacatcgctgcgcgagcatatcaaattacacaatatggaagagctgtttggcgaagtcatggtgccgactgaagaagtcgttgagatccgtggcggccagcgtcgcaaaagcgaacgcaaattcttcccgggttacgttctggtccagatggtcatgaacgacgcaagctggcacctggtgcgcagcgtgccgcgtgtgatgggctttatcggcggtacctctgaccgtccggcgccgatcagcgacaaagaagtcgatgcgatcatgaaccgcctgcagcaggttggcgataagccgcggccgaaaactctgtttgaaccgggtgaaatggttcgtgttaacgacggtccgttcgcagactttaacggcgttgtcgaagaagtcgattatgagaagtctcgcctgaaagtgtctgtttctatcttcggtcgtgcgaccccggtagagctggacttcagtcaggttgagaaagcgtaa

SEQ ID NO: 38899 - DNA, 774 bp, Salmonella typhimurium
atggcgcattcctggttacgcctggtcgcaggggcaacattatctttcgtcatcgccggtcatgcgctggcggatgaaggcaagatcaccgtatttgccgccgcgtcgctaacgaacgcgatgcaagacattgcggcagaatataaaaaagagaaaaatgtggatgtggtctcctcattcgcctcctcttcaacgctggcgcgccagatagaagcgggcgcgccggcggatctcttcatctctgctgatcagaaatggatggattacgcagccgataaaaaagcggtggataccacgacgcgcgaaacattgcttggcaatagcctggtggtggtagcgccgaaagccagcgagcagaaaccgtttaccatcgacaacaaaacggactggattcgtctgctgaacggcggacgtctggcggtgggcgatccgcaacacgtaccggcgggaatttatgccaaagaagcgctgcaaaagttgggcgcatggcaaacgcttgaaccgaaactggcgccgggcgaggatgtgcgcggcgcgttggcgctggtcgaacgtaacgaagcgcctttgggcattgtatacggttctgatgcggtcgccagcaagggggtcaacgtggtggcgacgttcccggaagattcacataaaaaagtggaataccccatcgctatcgtggaggggcataaaaatgcgaccgtcagcgcgttctatgattacctgaaaggaccgcaggcctcggcaatctttaaacgttatggatttacgacgaagtaa

SEQ ID NO: 38900 - DNA, 1059 bp, Salmonella typhimurium
atgctggagcttaatttttcccagacgctgggaacgcactgtttaaccctcaacgaaacgctgccagccagtgggatcacggctatctttggcgtctccggcgcgggaaaaacctcgctgattaatgccatcagcggtttgactcgcccgcaaaaaggacgcatcgcgctgaatggccgggtgttgcatgacgcggaaaacggtatctgtttaacgccggaaaagcgccgcatcggttatgttttccaggatgcgcgcctgttcccccattacaaagtacgcggcaatttgcgctacggcatggcgaaaagcatgaccggtcagtttgataagctggtgtcgctgctgggaattgaagcgttgcttgatcgcctgccggggagcttgtccggcggagaaaaacagcgcgtagcgataggccgggcattgctcaccgccccggagttgctgctgttggacgaaccgttggcctcgctggatatcccgcgtaaacgcgaattactgccgtacctgcaacggctggcgcgggaaatcaatattcccatgctgtatgtcagccattctctcgatgaaattctccacctggcggataaagtcatggtgctggaggatggacaggttaaagcgtttggcccgctggaagaagtctggggaagcagcgttatgcacccgtggctgccgaaagagcaacagagcagtattctgaaagtcagcgtgctggagcatcacccgcattatgccatgaccgccctggcgcttggcgaccagcacctgtgggtaaataaactcaatcagccgctgcaatccacactgcgtattcgtatacaggcgtcggatgtctcgctggtactacagccgccgcagcagaccagtatccgcaacgtattgcgggcaaaagtggcgaattgttatgacgataacgggcaggtggaagtccagcttgagataggcggcagaacgctgtgggcgcgaataagcccgtgggccagggatgagctgaatatcaagcctggcctgtggctttacgcgcaggtgaaaagcgtttctatcaccgcctga

SEQ ID NO: 38901 - DNA, 429 bp, Salmonella typhimurium
atggctaagaaagtacaagcctacgtcaagctgcaggttgcagctggtatggcgaacccgagtccgccggttggtccagcactgggtcagcagggtgtgaacatcatggaattctgcaaagcgttcaacgcaaaaacggattccatcgaaaaaggtctgccgattccggttgttattaccgtttacgctgaccgttctttcaccttcgttaccaaaacgcctccggcagctgttctgctgaaaaaagcggctggtatcaagtctggttccggcaagccgaacaaagacaaagtaggtaaaatttcccgcgctcagctgcaggaaatcgcgcagaccaaagctgccgacatgaccggtgccgacattgaagcgatgactcgctccatcgaaggtactgcacgttccatgggcctggtagtggaggactaa

SEQ ID NO: 38902 - DNA, 705 bp, Salmonella typhimurium
atggctaaactgaccaagcgtatgcgcgtgatccgtgaaaaagttgatgcgaccaaacagtacgacatcaacgaagctattgccctgctgaaagagctggccactgctaaattcaacgaaagcgttgacgttgccgttaacctcggcatcgacgctcgtaaatctgaccagaacgttcgtggcgcgactgtactgccgcacggtactggccgttctgttcgcgttgccgtatttacccaaggcccgaacgctgaagcagctaaagctgctggcgctgagctggtaggtatggaagatctggctgaccagatcaagaaaggcgaaatgaacttcgacgttgttatcgcatccccggatgcaatgcgcgttgttggccagctgggccaggttctgggtccgcgcggcctgatgccaaacccgaaagtcggtaccgtaactccgaacgttgctgaagcggttaagaacgctaaagcaggtcaggttcgttaccgtaacgacaaaaacggcatcatccacaccaccatcggtaaagtggactttgacgctgacaaactgaaagaaaacctggaagctctgctggttgcgctgaaaaaagcaaaaccgagccaggcgaaaggcgtgtacatcaagaaagttagcatctccaccaccatgggtgctggcgttgccgttgatcaggctggtctgagcgcatctgcgaactaa

SEQ ID NO: 38903 - DNA, 498 bp, Salmonella typhimurium
atggctttaaatcttcaagacaaacaagcgattgttgctgaagtcagcgaagtagccaaaggcgcgctgtctgcagtagttgcggattcccgtggcgtaactgtagataaaatgactgaactgcgtaaagcaggtcgtgaagctggcgtatacatgcgtgttgttcgtaacaccctgctgcgccgcgtcgttgaaggtactcagttcgagtgcctgaaagacacgtttgttggtccgaccctgattgcatactctatggaacacccgggcgctgctgctcgtctgttcaaagagttcgcgaaagcgaatgcaaaatttgaggtcaaagctgcagcctttgaaggtgagctgatcccggcgtctcagatcgaccgcctggcaactctgccgacctacgaagaagcaattgcacgcctgatggcaaccatgaaagaagcttcggctggcaaactggttcgcacactggctgctgtacgcgatgcaaaagaagctgcgtaa

SEQ ID NO: 38904 - DNA, 4029 bp, Salmonella typhimurium
atggtttactcctataccgagaaaaaacgtattcgtaaggattttggtaaacgtccacaagttctggatgtaccttatctcctttctatccagcttgactcgtttcagaagtttatcgagcaagatcctgaagggcagtacggcctggaagcagccttccgttccgtgttcccgattcagagctacagcggtaattccgagctgcagtacgtcagctaccgccttggcgaaccggtgtttgacgttcaggaatgtcagatccgtggcgtgacctattccgcaccgctgcgcgtaaaactgcgtctggtgatctacgagcgcgaagcgccggaaggcaccgtaaaagacattaaagaacaagaagtctacatgggcgaaattccgctcatgaccgacaacggtacctttgttatcaacggtactgagcgtgttatcgtttctcagctgcaccgtagccctggcgtcttctttgactccgacaaaggtaaaacccactcttcgggtaaagtgctgtataacgcgcgcatcattccttaccgtggttcctggctggacttcgaattcgatccgaaggacaacctgttcgtacgtatcgaccgtcgccgtaaactacctgcgaccatcatcctgcgtgcgctgaactacaccactgagcagatccttgacctgttctttgagaaagtcgtcttcgaaattcgcgacaacaaactgcagatggagctgattccagaacgtctgcgtggcgaaaccgcgtcgttcgatatcgaagctaacggcaaagtgtacgttgaaaaaggccgtcgcattaccgcgcgtcacatccgtcagctggaaaaagacgatatcaagcatatcgaagttccggttgagtacatcgcaggtaaagtcgtctctaaagactacgttgacgaatctactggcgagctgatctgcgcggcgaacatggagctgagcctggatctgctggctaagctgagccagtccggccacaagcgtatcgaaacgctgtttaccaacgatctggaccacggcccgtacatttctgaaacggtacgcgtcgacccaactaacgatcgtctgagcgcgctggtagaaatctaccgcatgatgcgccctggtgagccgccgacacgcgaagcggctgaaagcctgtttgagaacctgttcttctccgaagaccgctatgacctgtctgcggtgggtcgtatgaagttcaaccgttctctgctgcgcgacgaaatcgaaggttccggtatcctgagcaaagacgacatcattgatgtcatgaagaagctcatcgatatccgtaacggtaaaggcgaagtggatgatatcgaccacctcggcaaccgtcgtatccgttccgtcggcgaaatggcggaaaaccagttccgcgttggcctggtgcgtgtagagcgtgcggtgaaagagcgtctgtctctgggcgatctggataccctgatgcctcaggatatgatcaacgccaagccgatttccgccgcagtgaaagagttctttggttccagccagctgtctcagtttatggaccagaacaacccgctgtctgagattacgcacaaacgtcgtatctccgcactcggcccaggcggtctgacccgcgaacgcgcaggcttcgaagttcgagacgtacacccgacgcactacggtcgcgtatgtcctatcgaaacgccggaaggtccgaacatcggtctgatcaactccctgtccgtgtacgcacagactaacgaatatggcttccttgagacgccgtaccgtcgtgtggttgatggcgtggttactgacgaaattcattacctgtctgctatcgaagaaggcaactacgttatcgctcaggcgaactccaacctggatgacgaaggccactttgtagaagatttggtgacctgccgtagcaaaggcgaatccagcttgttcagccgcgaccaggttgactacatggacgtttccacccagcaggtggtctccgtcggtgcgtccctgatcccgttcctggaacacgatgacgccaaccgtgcattgatgggtgcgaacatgcaacgtcaggcggttccgactctgcgcgctgacaagccgctggtgggtaccggtatggaacgtgctgtcgccgtcgactccggtgttactgcagtagctaaacgtggcggtactgttcagtacgtggatgcgtcccgtatcgttatcaaagttaacgaagacgagatgtacccgggcgaagcgggtatcgacatctataacctgaccaaatacacccgctctaaccagaacacctgtatcaaccagatgccatgtgtgtctctgggcgagccggttgaacgcggcgacgtgctggcagacggtccgtccaccgacctcggtgaactggcgctcggtcagaacatgcgcgtggcgttcatgccgtggaacggctacaacttcgaagactccattctcgtttccgagcgtgttgtccaggaagaccgtttcaccaccatccacattcaggaactggcgtgcgtgtcccgtgacaccaagctggggccggaagagatcaccgctgatatcccgaacgtgggtgaagctgcgctctccaaactggatgaatccggtatcgtttacatcggcgcggaagtgacaggcggtgacattctggtcggtaaggtgacgccgaaaggtgaaacccagctgacgccggaagagaaactgctgcgtgcgatcttcggtgagaaagcgtctgacgttaaagactcttctctgcgcgtacctaacggtgtctccggtacggttatcgacgttcaggtctttactcgcgatggcgtagaaaaagacaaacgtgctctggaaatcgaagagatgcagctcaagcaggcgaaaaaagacctgtctgaagaactgcagatcctcgaagcgggcctgtttagccgtatccgtgcggtgctggtttccagcggcgttgaagctgagaagctcgacaaactgccgcgcgaccgctggctggaactcggtctgaccgacgaagagaaacaaaatcagctggaacaactggctgagcagtatgacgaactgaaacacgagttcgagaaaaaacttgaagcgaagcgccgtaaaatcacccagggcgacgatctggcgccgggcgtgctgaagatcgtgaaggtctatctggccgttaaacgccgtatccagccgggtgataagatggcaggtcgtcacggtaacaagggtgttatctctaagatcaacccgatcgaagacatgccttacgatgaaaacggcacgccggtagacatcgtactgaacccgctgggcgtaccgtctcgtatgaacatcggccagattctggaaacccacctgggtatggctgcgaaaggtattggcgacaagattaacgccatgctgaaacagcagcaggaagtcgcgaaactgcgcgaattcatccagcgtgcctacgatctgggcgccgacgttcgtcagaaagtcgacctgagcaccttcagcgatgatgaagtgctgcgtctggcagaaaacctgcgcaaaggtatgccgattgccacaccagtgtttgacggtgcgaaagaagcggaaatcaaagagctgctgaaactgggcgacctgccgacctccggtcagatcaccctgttcgatggccgtacgggtgaacagttcgaacgtccggtaaccgtcggttacatgtacatgctgaaactgaaccacctggttgatgacaagatgcatgcgcgttctaccggttcttacagcctggttactcagcagccgctgggtggtaaggcgcagttcggtggtcagcgcttcggggagatggaagtgtgggcgctggaagcttacggcgccgcctacaccctgcaggaaatgctcaccgttaagtctgatgacgtgaatggtcgtaccaagatgtataagaacatcgtggacggcaaccatcagatggaaccgggtatgccggaatccttcaacgttctgttgaaagagatccgctcgctgggcatcaacatcgaactggaagacgagtaa

SEQ ID NO: 38905 - DNA, 4224 bp, Salmonella typhimurium
gtgaaagatttattaaagtttctgaaagcgcagactaaaaccgaagagtttgatgcgatcaaaattgctctggcttcgccagacatgatccgttcatggtctttcggtgaagttaaaaagccggaaaccatcaactaccgtacgttcaaacctgagcgtgacggccttttctgcgcccgtatctttgggccggtaaaagactacgagtgcctgtgcggtaagtacaagcgcctgaaacatcgtggtgttatttgtgagaagtgcggcgttgaagtgacccagaccaaagtacgccgtgagcgtatgggccacatcgagctagcgtccccgactgctcacatctggttcctgaaatcgctgccgtcccgtatcggtctgctgctcgatatgccgctgcgcgatatcgaacgcgtactgtacttcgaatcttatgtggttatcgaaggcggtatgaccaacctggaacgtcaacagatcctgactgaagagcagtatctggacgcgctggaagagttcggtgacgaattcgacgcgaagatgggggcggaagctatccaggccctgctgaagagcatggatctggagcaagagtgtgaaactctgcgcgaagagctgaacgaaaccaactccgaaaccaagcgtaaaaagctgaccaagcgtatcaaactgctggaagccttcgttcagtctggcaacaagccagagtggatgatcctgaccgttctgccggttctgccgccagatctgcgtccgctggttccgctggatggtggtcgtttcgccacgtcagatctgaacgatctgtatcgtcgcgtcattaaccgtaacaaccgtctgaagcgtctgctggatctggctgcgccggacatcatcgtacgcaacgaaaaacgtatgctgcaggaagcggttgacgccctgttggataacggtcgtcgcggtcgtgcgatcaccggttctaacaagcgtcctctgaaatctttggccgacatgatcaaaggtaagcagggtcgtttccgtcagaacctgctcggtaagcgtgttgactactccggtcgttctgtaatcaccgtaggtccatacctgcgtctgcaccagtgcggtctgccgaagaaaatggcgctggagctgttcaaaccgttcatctacggcaagctggaactgcgtggccttgccaccaccatcaaagccgcgaagaaaatggttgagcgtgaagaagctgtcgtttgggatatccttgacgaagttatccgcgaacacccggtactgctgaaccgtgcaccgactctgcaccgtctgggtatccaggcatttgaaccggtactgatcgaaggtaaagctatccagctgcacccgctggtttgtgcggcatataacgccgacttcgatggtgaccagatggctgttcacgtaccgctgacgctggaagcccagcttgaagcgcgtgcgctgatgatgtctaccaacaacatcctgtctccggcgaacggcgaacctatcatcgttccgtctcaggacgtggtattgggtctgtactacatgacccgtgactgtgttaacgccaaaggcgaaggcatggtgctgactggcccgaaagaagctgagcgtatctatcgcgcaggtctggcctctctgcatgcgcgcgttaaagtgcgtatcactgaatatgaaaaagatgaaaacggcgaattcgttgcgcacaccagcctgaaagacacgaccgttggtcgcgccattctgtggatgatcgtaccgaaaggtctgcctttctccatcgtcaaccaggcgctgggcaagaaagcgatctccaaaatgctgaacacttgctaccgtattctgggcctgaaaccgaccgttatttttgcggaccagacgatgtacaccggctttgcttatgcagcgcgttcaggtgcgtccgttggtattgatgacatggtcatcccggagaaaaaacacgagatcatctctgaggcggaagctgaagttgctgagatccaggagcagttccagtctggtctggtaaccgctggcgaacgctataacaaagttatcgatatctgggctgcggcgaacgatcgtgtatctaaagcgatgatggataacctgcaaaccgaaaccgtgattaaccgtgacggccaggaagagcagcaggtttccttcaacagcatctacatgatggccgactccggtgcgcgtggttctgcggcacagattcgtcagcttgctggtatgcgtggtctgatggcgaagccggatggctccatcatcgaaacgccaatcaccgcgaacttccgtgaaggtctgaacgtactccagtacttcatctccacccacggtgcgcgtaaaggtctggcggataccgcactgaaaaccgcgaactccggttacctgactcgtcgtctggttgacgtcgcgcaggatctggtagtgaccgaagatgactgtggtacgcacgaaggtatcctgatgaccccggttatcgagggtggcgacgtgaaagagccgctgcgtgaccgcgttctgggtcgtgtgacggcggaagatgtgctgaaaccgggtaccgcggacattctggttccacgcaacacgctgctgcacgaacagtggtgtgacctgctggaagcaaactccgttgacgccgttaaagtgcgttctgttgtatcctgcgacaccgactttggtgtatgtgcgcactgctatggccgtgacctggcgcgtggccacatcatcaacaaaggtgaagctatcggcgttatcgcggcacagtccatcggtgaaccgggtacacagctgacgatgcgtacgttccacatcggtggtgcggcatcgcgtgcggctgctgaatccagcatccaggttaagaacaaaggtagcatcaagctcagcaacgtgaagtcggttgtgaactccagcggtaaactggttatcacttctcgtaacaccgaactgaagctgatcgacgaattcggtcgtaccaaagagagctataaagtgccttatggcgctgtcatggcgaaaggtgatggcgagcaggttgccggcggcgaaaccgtggcaaactgggacccgcacaccatgccggttatcaccgaagtgagtggtttcatccgcttcactgacatgatcgacggtcagaccattacgcgtcagaccgacgaactgaccggtttgtcttcgctggtggttctggattcggctgaacgtactaccggtggtaaagatctgcgtccggcgctgaaaatcgttgatgctcagggtaatgacgttctgatcccgggtaccgatatgcctgcgcagtacttcctgccgggtaaagcgattgtacagctggaagatggcgtacagatcagttctggtgacaccctggcgcgtattcctcaggaatccggcggtaccaaggatatcaccggtggtctgccgcgcgttgcggacctgttcgaagcgcgtcgtccgaaagaaccggccattctggcggaaatcgcaggtatcgtttccttcggtaaagaaaccaaaggcaaacgtcgtctggtgattacgccggttgatggtagcgatccgtacgaagagatgattccgaaatggcgtcagctcaacgtgttcgaaggggaacgtgtagaacgtggtgatgtgatttccgacggtccggaagcgccgcacgatattctgcgtctgcgtggtgttcatgctgtgacgcgttacatcgttaacgaagtccaggatgtataccgtctgcagggcgttaagattaacgataaacacatcgaagttatcgttcgtcagatgctgcgtaaagcgaccatcgaaagcgccggtagttccgacttcctggaaggcgaacaggttgaatattcccgcgtcaagatcgctaaccgcgagctggaagcgaacggcaaagtgggggctaccttctcccgcgatctgctgggtatcaccaaagcgtctctggcaaccgaatcgttcatctctgccgcatcgttccaggagaccacgcgtgtcctgaccgaagcagccgttgcgggtaaacgcgacgaactgcgcggcctgaaagagaacgttatcgtggggcgtctgatcccggcgggtaccggttatgcgtaccaccaggatcgtatgcgccgtcgcgccgcgggcgagcagccagcaacaccgcaggtcactgcggaagatgcatctgcaagcctggcagaactgctgaacgcaggtctgggcggttctgataacgagtaa

SEQ ID NO: 38906 - DNA, 942 bp, Salmonella typhimurium
atgacgcaatggtatccggcttctccggcgctctggcaggggcgcgatgacagtatagaagcgccggatgcgcggcgtctgtttcagaccgtcacgcgcagcgagaccttttcccccgaaaactggcagcaaaagatcgcgttaatgggatttgcctgcgacgagggggtaaaacgcaatgcagggcgtcccggcgcggcaggcgccccggacgcgttgcgtaaagcgctggcgaatatggccagccaccagggacatgaacggctggtggatttaggcaattgggttgcgccgacgcccgatctggaaggcgcgcagcaggccttgcgcgatgcggtaagccgctgtctgcgggccgggatgcgcacgctggtactgggcggcgggcatgaaaccgcgtttggacacggcgcgggggtgctggacgcgtttgcgcaggaaagcgtagggatcattaatcttgatgcgcatctggatctccgtcagaccgaccgggcaacatccgggacgccgtttcgtcaactggcgcagctatgcgacgcgcagagccgcgcgtttcattatgcctgtttcggcgtgagccgtgcggcgaatacgcaggcgttgtggcgggaagcgcagtggcggaatgttaccgtggtggaggatctggactgccatgacgcgctggcgcagatggcgcagtttatcgacaaggtggataaaatttatctgactatcgatctcgacgtattgcctgtctgggaaatgccggccgtctccgctcccgcagcgctgggcgtgccgctgatacaggttctgcgtttaattgagccggtttgccgcagcggaaaattacaggcggcggatctggttgagtttaatccacgctttgatgaagatggcgcagcggcgcgcgtggcggcgcggcttggctggcaaatcgcgcactggtggcgttaa

SEQ ID NO: 38907 - DNA, 726 bp, Salmonella typhimurium
atgtattcatcccgctcccgttctgcacctgcgcctttttacgaaacggtgaaacaggacatctgtaaaaaaatagccggcggcgtctggcagccgcacgatcgcattccgtcggaagcagaactggtcgcccagtatggctttagccgaatgaccatcaatcgggcgctgcgtgagctgacggatgaagggtggctggtgcgtttacagggcgtggggacgtttgtcgccgaaccgaaaggccagtccgcgctgtttgaagtccgcagtatcgccgaggagattgccgcccgccgtcatcagcatcgttgtgaggtgctcacgctggagcgcgtgcgggcaaacgccatccaggccagcgctctcaacgtcaatgagagcgatgtcattttccattccatcatggtgcattatgaaaacgatctgccggtacaaattgaagatcgctgcgtgaatgcggatattgccgtggattacctgacgcaggattacagtcagaccacgccgcacgcttatttgtcgcggatcgcgccgctaacggaaggggaacatattgtggaggcggtgcgcgccacggcgcaagagtgcgcgtggttaactatcaaagagcatgagccttgtctgctcattcgtcgtacaacctggtccgcgtcgcggattgtttctcacgcccgcttacttttccccgggtcgcgctaccggctacagggacgatttatctcctga

SEQ ID NO: 38908 - DNA, 1521 bp, Salmonella typhimurium
atgaacaccatgacactcactccggggcagttaagtctctctcaactgtacgatatctggcgtcatccggtacagcttcggctggacgccagcgccattgacggcattaacgccagcgtcgcgtgcgtcaatgatatcgttgccgaagggcgtaccgcctacggcatcaacaccggtttcggcctgctggcgcagacgcgcatcgctgatgaagacttgcaaaatctacagcgatcgttggtgctgtctcacgccgcgggcgtaggcgacccactggatgacgcgatggtgcgtctgatcatggtattgaaaatcaatagcctggcgcgcgggttttccgggattcggttgagcgtgatagaggcgctcatcgctctggtgaatgccggcgtgtatccgctgattccggcaaaaggctcggttggcgcgtcgggcgacttagcgccgctggcgcatctgtcgctgacgctgcttggcgaaggaaaagcgcgctggcagggcgaatggcttccggcgcagacggcgctaaaaaaggccggactggagcctgtcgcgctggcggccaaagaggggctggcgctgcttaatggcacccaggcatcaacggccttcgcgctgcgcggtttgtttgaggcacaggagttatttgcctccgccgttgtctgcggcgcgctgactaccgaagccgtactgggatcgcgccgtccttttgatgcgcgcattcatgccgcgcgcggacaacaggggcaaattgacgtcgcgcggttgttccggcacctgctgaccgataccagcgccattgctgaatcacatcaccactgtcataaagttcaggacccgtattcccttcgctgccagccgcaggtaatgggcgcttgtctgacccagttacgtcagacgaaagaggtactgctggctgaggccaacgcggtatccgataatccgctggtctttgccgatgcgggggaggtgatctccggcggtaacttccatgctgaaccggttgccatggcggcggataatctggcgctggcgatagcggaaatcggcgcgctatcggagcggcgcatcgcgctgatgatggataaacatatgtcgcagttaccgccgttcttggtgaaaaatggcggcgttaattccggttttatgattgcccaggtcaccgccgcggcgctcgccagcgagaataaagcgctggcgcacccgcacagcgtggatagcctgccgacctcggcgaatcaggaagatcatgtctcaatggccccggcggcagggcggcgactctgggaaatggcggcgaatacccgcggcatcattgccgtggagtggctggctgcctgtcaggggatagatttacgggaagggttaacctccagcccgttactggaacaggcgcggcagacactgcgcgagcaggtggcgcactatacgcaggatcgttttttcgcgcccgatattgagtgtgcgacggcgctgctggcgcaaggcgcgttacagcgtctggtgccggactttatgtga

SEQ ID NO: 38909 - DNA, 1041 bp, Salmonella typhimurium
atggctcgccacccacgctggacactgtcgcaagtaaccgaattatttgaaaaaccactgctggaattgctgtttgaagcgcagcaaattcatcgccagcatttcgatccgcagcaggtacaggttagtacgctgttgtcgatcaaaaccggcgcctgcccggaggattgtaaatactgcccgcagagctcgcgctataaaaccgggctggaagccgagcgtttaatggaagtagagcaggtactggactccgcccgtaaagcgaaaaacgctggttcgacccgcttctgtatgggggcggcctggaggaatccgcatgaacgcgatatgccttatctggagaagattgtacagggcgtcaaagcgatggggctggaaacctgtatgacgctcggcatgttgaacgagagccaggcgcagcgtctggctaacgccgggctggattactacaaccacaacctcgatacctcgccggagttttacggcaatatcatcactacccgtacctatcaggagcgcctcgacacgctggaaaaagtccgtgaagcagggattaaagtgtgctccggcggcattgtgggtctgggcgaaacggttaccgatcgcgccggactgttgttgcagttggcgaacctgccgacaccgccggaaagcgtgccaatcaacatgctggtgaaggtaaaaggcacgccgcttgcggataacgatgacgtggatgcgtttgattttattcgtactatcgccgtggcgcgcatcatgatgccgacctcatacgtgcgtctttccgcagggcgtgaacagatgaacgagcagacccaggcgatgtgctttatggccggggcgaactcgattttctatggctgcaaattgttaactacgccaaatccggcagaggacaaggatctgcagttattccgtaagctggggctgaatccgcagcagaccagggtgctggcgggcgataacgagcagcagcaacgtctggagcagacgctgatgacgcctgacaccgatgattattacaacgcggcagccttatga

SEQ ID NO: 38910 - DNA, 1158 bp, Salmonella typhimurium
atgagttggcaacaacgcgtcgacgatgcgctgacggcgcgtcgggtgacggatacgttgcgccgccgctatgtggtatcgcagggtgccggacgctggctggtagcgaacgggcgacagtatcttaacttttccagcaatgattacctcggcttaagtcaacatccgcagattattcgcgcctggcaacaggcagcgacgcgttttggcgtcggcagcggcgggtcgggtcatatcagcggttattccgtggcgcaccaggcgttagaggaggaactggcgcaatggttaggatatccacgcgcgctgctgtttatctctggctttgcggcgaatcaggcggtcattaccgccttaatgaaaaaaaatgaccggattgtggccgacaggttgagtcatgcttccctgctggaggccgctaatctgagtccggcgcagcttcgccgctttatccataacgatacgcagcatctgtcgcgtttactgcaatcgccctgcgtgggtcagcaactggtggtgacagaaggtgtatacagcatggacggcgacagcgcgccgctggcggaaatccagcacattgcccgcaggcatcatgcctggctgttggttgatgatgcgcacggcatcggcgtgactggcgatgaggggcggggcacctgctggctgcggggggtgaagcctgagttgctggtggtgactttcggtaaggggtttggcgtcagcggcgcagcggtgctctgctcggaaagcgtcgcggattatctgctgcaatttgcccgtcatctggtttacagcaccagtatgccgcccgcccaggcgcaggcgttaagcgcctcgctggcggtgatccgtagcgatgaaggtggtgaacggcgcgaaaaactcgccgctctggttcagcgctttcgggccggcgttaacgcgtcccgatttacgctactgaatgcccatagcgccatccagccgttaatcgtgggcgataacagccgtgcattgcgcctggcggaggcgctgcgtcaacaaggatgctgggcgacggcgattcgcccgccgacggtgcctgtcggcacggcgcgcctgcgcttaacgttaacgcaggcgcatgaagcgtgtgatatcgaccgtctgctggaggtgctgcatggcgcaggtgaataa

SEQ ID NO: 38911 - DNA, 1305 bp, Salmonella typhimurium
atgaaaacccgtactcaacaaatcgaagaattacagaaagagtggacacaaccgcgctgggaaggcatcacccgcccgtacagcgcggaggaggtggtgaaattacgcggctcggttaacccggaatgcacgctggcgcagctcggcgccgcgaaaatgtggcggctgttgcacggtgaagcgaaaaaaggctatatcaacagccttggcgcgctgaccggcggtcaggcgttgcagcaggcgaaagccggtattgaggcgatttatctttcaggctggcaggtggcggcagatgccaacctggcatccagcatgtatccggatcaatcgttgtacccggcaaactctgttccggcggtagtggatcggatcaacaacacttttcgtcgtgcagatcagatccagtgggcatccggtattgaacccaacgatccgcgctatgtggattacttcctgccgatcgttgctgatgcggaagccggttttggcggcgttctgaatgccttcgaactgatgaaatcgatgattgaagccggtgcagcggccgttcacttcgaagatcagctggcgtcggtgaagaaatgcggccatatgggcggcaaggtgctggtccccacgcaggaggcgattcagaaactggttgctgcgcgtctggccgctgatgtgatgggcgtcccgacgctggtgattgcgcgtaccgatgcggatgcggcagatctgatcacctccgactgcgatccctatgacagcggttttattaccggcgaacgcaccagcgaaggtttctaccgcacccatgcgggcattgagcaggcgatcagccgcggtctggcgtatgccccgtatgccgatctggtatggtgcgaaacctctacgccggatctcgaactggcgcgtcgttttgccgatgctatccacgcgaagtatccgggcaaactgctggcctataactgttcaccatccttcaactggcagaagaatctggacgacaagaccattgccagcttccagcagcagttgtcggacatgggttacaaataccagtttattaccctggcgggcatccacagcatgtggttcaacatgttcgacctggcgcatgcatacgcgcagggcgagggcatgaagcactatgttgagaaggttcaacaacccgagttcgccgcggcgaaagatggctacacctttgtttcccaccagcaggaagtgggtactggttacttcgacaaagtcaccaccattattcagggcggcgcgtcatccgttaccgcgttaacgggttccaccgaagaagcgcagttttga

SEQ ID NO: 38912 - DNA, 3771 bp, Salmonella typhimurium
atgtctcatgttgcccgttgttctcttttccgccagcacgctttgtgccagtatggctcgttacgtggagcgttgtcgggagcgagtgtgagcagcaaagttgaacaactgcgtgcgcagttaaatgaacgtattctggtgctggacggcggtatgggcactatgatccagagctatcgtctacatgaagaagatttccgcggggagcgctttgccgactggccctgcgacctgaaaggcaacaatgacctgctggtcctcagcaagccggaggtgatcgccgctatccacaacgcctactttgaggctggcgcggatatcatcgaaaccaacacctttaactcgacaaccattgcgatggcggattaccggatggaatccctgtcggcggaaattaactatgcggcggccaaactggcgcgcgcctgcgccgatgaatggacggcgcgaacaccagaaaaaccacgctttgttgcgggcgtgcttggtccaactaaccgcacggcctccatttcgccggacgtcaacgacccggcgtttcgtaatatcaccttcgatcagctggtggcggcctaccgtgaatccaccaaagcgctggtggaaggtggcgcagatctgattctgattgagaccgtttttgacaccctgaatgcgaaagcggcggtgtttgcggtgaaagaagagtttgaagcgctgggcgttgacctgccgatcatgatttccggcaccatcaccgacgcctctggccgtacgctttccggccagactaccgaagccttttataactcgctgcgccacgccgaggcgctcacttttggccttaactgcgcactggggccagatgaactgcgccagtacgtccaggaactgtcgcggattgccgaatgctacgtcaccgcgcacccgaacgccggcctgccgaacgctttcggcgagtatgacctcgacgccgacaccatggcgaaacagattcgcgaatgggcggaagcgggcttcctgaatatcgttggcggctgctgcggcaccacgccggagcatattgcggcgatgagccgcgccgttgccggtttgctgccgcgccagctgccggatatcccggtcgcctgccgcctttccggcctggagccgctgaacattggcgacgatagcctgtttgtgaacgtcggcgaacgtactaacgtcaccggctcggccaaatttaaacggctgatcaaagaagagaaatacagcgaagcgctggatgtcgcccgtcagcaggtagaaagcggcgcgcagattattgatatcaatatggatgaggggatgctcgacgccgaagcggcgatggtgcgtttcctcagcctgattgccggtgagccggacattgcccgtgtaccaatcatgatcgactcctccaaatgggaggttatcgaaaaagggctgaagtgcattcagggtaaaggcatcgtcaactctatttcgatgaaagagggcgtggaagcctttattcatcatgcgaagcttctgcgtcgctacggcgcggcagtggtggtgatggcctttgatgagcaggggcaggccgatacccgcgcgcgtaaaatcgaaatttgccgccgagcctacaaaattctcaccgaagaggtgggtttcccgccggaagacatcatcttcgacccgaatatcttcgccgtggcgaccggtattgaagagcacaacaactacgcgcaggactttatcggcgcttgcgaagacatcaaacgcgagctgccgcacgcgctgatctccggcggcgtgtctaacgtgtccttctcgttccgcggcaacgacccggtacgtgaggctatccacgcggtattcctctactacgccatccgcaacggtatggacatgggcatcgtcaacgccggacagctggctatctacgacgacctgcccgccgagctgcgcgatgcggttgaagatgtcattcttaaccgtcgcgatgacggcactgagcgtttgctggatttggcggagaaataccgcggcagcaaaaccgacgaagctgccaacgcccagcaggcggaatggcgtagctgggacgtgaaaaagcgtctcgaatactcgctggtgaaaggcattaccgaatttatcgaacaggataccgaagaagcccgtcagcaggccgcccgcccgattgaggtgattgaagggccgttgatggacggcatgaacgtggtcggcgacctgttcggcgaagggaaaatgttcctgccgcaggtggtgaaatccgctcgcgtgatgaaacaagcggtggcctacctggagccgtttattgaagccagcaaagaaaaaggctccagcaacggcaagatggtgatcgccaccgtgaagggcgatgtgcacgatattggtaaaaatatcgttggcgtggtgctgcaatgtaacaactacgaaatcgtcgatcttggcgtgatggtgccagcggagaaaatcctcagaacggcgcgtgaagtgaatgccgatctgatcggtctttccgggctgattaccccgtcgctggacgaaatggtcaacgtggcgaaagagatggagcgtcagggctttactatcccgctactgatcggcggcgcaaccacttcgaaagcgcatacggcggtgaaaatcgagcagaactacagcggtccgacggtctacgtgcagaatgcttcgcgtaccgtgggcgtggtggcggcgctactctccgacacccagcgtgatgactttgtcgcccgtacccgcaaagagtacgaaaccgtgcgtattcagcacgcccgcaaaaaaccgcgcacgccgccggtcacgctggaggcggcgcgcgataacgatctggcattcgattgggaacgctacaccccgccggtagcccaccgtctgggcgtgcaggaggtggaagccagcatcgaaactctgcgcaactatatcgactggacgccgttctttatgacctggtcgctggccggcaaatacccgcgcattctggaagatgaggtggtgggcgttgaggcgcagcgtctgtttaaagacgccaatgatatgctggataaactgagcgccgagaaactgttgaatccgcgtggcgtggtgggcctgttcccggcgaaccgtgtgggtgacgacatcgaaatctatcgcgacgaaacccgtactcatgttctgacggtcagccaccacctgcgccagcagaccgagaaagtcggttttgccaactactgtctggcggattttgtcgcgccgaaactgagcggcaaagcggattacatcggtgctttcgcggtgaccggcggtctggaggaggatgcgctggcggacgccttcgaagcgcaacacgacgactataacaagatcatggtgaaagcgattgccgaccgtctggcggaagcgttcgcggaatatctgcatgagcgtgtacgtaaggtttactggggatatgcgccgaacgagagcctgagtaacgacgaattaatccgcgaaaactaccaggggattcgcccggcgccgggttatcctgcctgcccggaacataccgaaaaaggcactatctggcagctactggatgtcgaaaaacacaccgggatgaagctcaccgaatctttcgccatgtggccaggcgcgtcggtctccggctggtacttcagccatcctgagagcaaatacttcgcggtagcgcagatccaacgcgatcaggtgacagattatgctttccgtaaaggaatgagcgttgaggatgttgagcggtggctcgcgccgaacctgggttacgatgcggactga

SEQ ID NO: 38913 - DNA, 1365 bp, Salmonella typhimurium
atgtcttttgattccctgggattaaaccctgatatcctgcgcgccattgccgagcagggttaccgtgaacctacccctattcagcaacaggcgattcccgccgtgctggaaggccgcgatctgatggccagcgcccagaccggaaccggtaaaacggcgggttttaccctgccattgttgcagcatctgattacccatcagccgcatgctaaaggtcgtcgcccggtgcgtgcgttgatcctcacgccaacccgcgagctggcggcgcaaattggcgaaaacgtcagagattacagtaaatatctcaatattcgctcgctggtggtatttggcggcgtaagcatcaatccgcagatgatgaaactgcgcggcggcgtggatgtgctggtggcgacgccgggacgtctgctcgacctggaacatcaaaatgccgtgaagctggatcagattgagattctggtactggatgaagccgaccgtatgctggatatgggcttcattcacgacattcgtcgcgtgctggcgaaactgccggcgaagcgtcagaatctgctgttctccgccacgttctctgacgacatcaaagcgctcgccgaaaagctgttgcgcaacccgctggaaatcgaagtggcgcgccgcaacacggcctcagagcaggtaacgcagcacgtgcactttgtcgataaaaaacgcaaacgtgaactgttgtcgcagatgattggccagggcaactggcagcaggtgttggtcttcacccgcaccaagcatggcgcgaaccatctggcggaacagcttaataaagacggtattcgcagcgcggcgatccacggtaataaatcgcagggcgcacgtacccgcgcgctggccgattttaaatccggcgatattcgcgtgctggtggcgacggatattgcggcgcgtggtctggatattgaagagctgccgcacgtggtcaactatgaactgccgaacgtgccggaagattatgtacaccgtattggccgtaccggtcgcgcggcggcaactggcgaggcgctgtcgctggtctgtgttgacgagcataaactgttgcgtgatatcgaaaaattgctgaaaaaagagatcccacgcattacgacgccgggctatgagccggacccgtcgattaaagcggagccgattcagaacggtcgtcagcagcgcggcggcggcggcggtcgtggacgcggacaaaatcaggggggagcggggcgcagtcagcagccgcgacgtcaggatagtggggcggcgaaggcgaaaccaaaaccgcgcacaggcgaggggaaaaccgctggcgacaaagcacgtccgccgcgtcgcccgcgcagaatcacgcctgcccagtaa

SEQ ID NO: 38914 - DNA, 2223 bp, Salmonella typhimurium
atgcggtggaccctgttcatccttttttgtctactgggcgcacctgcccatgcggtcgccatacccggcgtgaccacggggacatcaaccagccagcaagcagcgccagagcccagtcctgaacaaaaaaaagcggcctatgcggccctggctgacgtactggagaacgaggcttcacgtaacgaattgatagcgcaactccgcgaagcctcaaccacgccgccgaccgagccagcgccagcgcttgcgccgcctgcggccaaagatgagaaaacggtactggagaacgtcaccaccgttacccgtcagtacggcgatgctttcgctacccgtttcgcccagctttatcgcaacatcaccgatgcgccgcacaagccgtttaactcgcaaaccttcaccaacgcgttaacccactttttatttctggccgtcgcggtatttggtttttatagcgtgatacggctttgcgccctgccgttatatcgaaaaatgggcctgtgggcacgcaagaaaaaccgtgaacgcagcaactggttacagctcccggcgatgatcgtcggcgcgtttattatcgacctcctgctactggcgctcaccttatttatcggtcagatgctcagtgataatttccatgcgggaagtcgaactatcgcttttcagcaaagcctgttcctgaatgccttcgcgctaatagagttctttaaagcgattctgcggcttattttttgccctaatgtaccggaattacgcccattcgcgattcaggatgcgacagcgcgttactggaatcgccgtatgagttcccttagcagtttgattggctacgggctaattgttgccgttccgattatttccaaccaggtgaatgttcaggttggcgcgatggctaatgtggcgatcatgctctgcatcaccatctgggcgctgtacctgatctttaaaaacaaagcggagattacgcaacatttattaagtctggcggaacgatcattagccttttttagcctgtttatccgcgcctttgcgctggtgtggcactggctggccagcgcttactttatcgtgctgtttttcttctcgttattcgacccaggcaatagcctgaagtttatgatgggcgcgaccgtgcgcagtctggcgattattggcatcgcggcgtttatctccggtatgtttacccgctggatagcgaaaaccatcaccctgtcgccccatacgcagcgcaattacccggaattacaaaagcggcttaacggctggctctcctcggcgctaaaagtcgcacgctttttgaccgtctgcgtcgccgttatgctgttgctcaacgcctgggggctattcgatttctggcactggctacattatggcgcgggggaaaagatggtcgatatccttatccgtatcgcgttaatcttattcttctccgccgtgggatggacgatcctcgccagtctgattgagaatcgtctggcctccgatattcatggccgcccgctacccagcgcccgcacgcgcacgctgctgacgctgttccgcaatgcgctggcagtgattatcagtaccataaccatcatgatcgtgttatcggaaatcggcgtcaatatcgcgccattgctggctggcgcgggcgcgttaggtctggctatctctttcggttcgcaaaccctggtgaaagatattatcaccggcgtctttattcagtttgaaaacgggatgaataccggcgacttagtcaccataggcccgctgacggggacggtcgaaagaatgtcgattcgttccgtcggcgtgcggcaggataccggggcataccatattatcccgtggtcctcgatcaccactttcgccaactttgtgcgcggtatcggctctgttgtcgccaactatgacgtggatcgccatgaggatgcggataaagcgaatcaggcgctgaaagacgcggtaacggcgctgatggagacggaggatattcgcgggctgattatcggcgaacccacgttcgccggtattgtcagtttaacgaacacggcgtttactttacgcgtgtcgttcaccacgctaccgctcaagcagtggacggtgcgttttgcccttgatagccaggtgaaaaagcattttgatctggctaatgtgcgcgcgccggtgcaaacgtatcaggttctgcccgcccccgtcggcggcccgtcgcctgattcgctgccgccgcgcgaaccgacgatttag

SEQ ID NO: 38915 - DNA, 1908 bp, Salmonella typhimurium
atgtcattaatcagtatgcatggcgcatggctgtcgttcagcgacgcgccgcttctcgataacgcagagttgcatatcgaagataacgaacgcgtctgtctggtggggcgtaacggcgccgggaaatccaccttgatgaagatcctcaaccgcgaacagggtctggacgatgggcgtattatttatgagcaggatctgatcgtcgcgcgtctgcaacaggacccgccccgtaatattgcgggcagcgtctatgactttgtcgccgaaggtatcgaagaacaagcggaatacctcaagcgctatcatgagatttcccgtctggtgatgaccgatcccagcgagaaaaacctcaatgaaatggcgcgcgtacaggaacagctcgatcatcataatctgtggcagctggaaaaccgtattaatgaagtgctggcgcagcttggactcgatcctaacgccgcgctgtcgtcgctctccggcggctggttgcgtaaagccgcgctgggtcgggcgctggtcagcaatccgcgcgtattgttactggatgaaccgactaaccatctggatatcgaaactatcgactggctggaagggtttctgaaaacctttaacggaacgattatttttatctctcacgatcgttcgtttattcgcaatatggcaacccgcattgtcgatctcgatcgtggcaaactggtcacctatccgggaaattacgatcaatacctgctggagaaagaagaagcgctgcgcgtagaagaattacaaaacgcggaatttgatcgcaaactggcgcaggaagaagtctggattcgccagggtatcaaggcgcgccgcacccgtaatgaagggcgcgtgcgggcgttaaaagcgatgcgtcgtgaacgcagcgagcgccgggaagtgatgggcacggcgaagatgcaggtcgaagaggcgacgcgctccggtaaaatcgtttttgagatggaaaacgtcgattaccaggtagaaggaaaacaactggtaaaagatttctccgctcaggtacagcgcggcgacaagattgcgttaattggcccgaacggctgcggtaaaaccacgctactgaaactgatgctgggacagcttcaggctgacagcgggcgcatccacgtaggaacgaagctggaagtcgcctacttcgatcagcatcgcgccgaactggatccggaaaaaaccgtgatggataaccttgcggaaggcaagcaagaggtgatggtaaacggtaagccgcgccatgtactgggctatttgcaggacttcctgtttcaccccaaacgggcgatgacacccgtccgtgcgctttccggcggcgaacgtaaccgtctgctgctggcacgactgttcctcaagccgagcaatcttttaattctcgatgaaccaacgaacgatcttgacgtcgaaacgctggaactattagaagaattaattgatggctatcagggcacggtactactggtcagccacgatcggcaatttgtcgataataccgtgacggaatgctggattttcgagggcggcggcaaaatcggacgttatatcggcggctaccatgatgcgcgtgcgcagcaagagcagcatctggcgacgaaacagccgatggcgaaaaaaaatgaggaagttattgcccctaaagcagaaattgtaaaacgtggcagtagcaaactaagctataaactgcagcgcgagctggagcagttacccggtcagcttgaagacctggaagcgaagctggaagcgctacaggcgcaggttgcggatgcggccttttttagccaaccccatgagcaaacgcaaaaagttctggccgatttaagtcaggcggagcaagaacttgagcaagccttcgaacgttgggagtatcttgaaggcctgaaaaacggggcataa

SEQ ID NO: 38916 - DNA, 1632 bp, Salmonella typhimurium
gtgttaactttgctccatctactttctgccgttgcgctgttggtatggggaacacatatcgttcgtactggcgtaatgcgcgtgtttggcgcgcgtctacgcactgtcctcagccgcagcgtggaaaagaaaccgctcgccttttgtgcgggtatcggtgttaccgcgctggtacaaagcagtaacgccaccactttattggtaacgtcgtttgtcgcccaggatcttgtcgccctgacgccagctctggtgattgtgctgggcgctgatgtgggtactgcgctaatggcgcgtattctcacctttgatttgtcgtggctgtcgccgctgctgatttttattggcgtgattttctttttgggacgtaagcagtcccgtgccgggcagcttggtcgcgtcggtatcgggcttggcctgattctactggcgctggagctgattgtgcaggcggtgacgccgatcactcaggctaatggcgtgcaggtcattttcgcgtcgctgacgggcgacattatgctggatgcgctgattggcgcgatgttcgctattatcagttattccagcctggcggcggtgttgctgacggcgaccctgacggcggcggggattatatcgttcccggtggcgttgtgcctggtcatcggcgccaatctgggatcggggctgctggcgatgctcaataacagcgccgccaatgctgccgcgcgtcgcgtagcgctcggcagcctattgttcaaattgatcggcagcctggtcatcctgccgtttgtccatccgctggcgaatctgatggatgagctatcgctaccgaaatcagagctggtgatctatttccacgttttctataacctggtgcgctgcctggcgatggtgccatttgccgagctgatggcgcgtttttgtaaacgaattattcgtgatgagcctgaactggatacccatctgaagccgaaacatctggatgtcagcgcgctggatacgccaacgctggcgctggccaatgctgcccgcgaggtgttgcgcattggcgatgcgatggaacagatgatggaagggctaaaaaaggtcatgcacggcgagccgcgtgaagagaaagcgctgcgcaagctggcggatgacgttaacgtgctctacaccgcgattaagctttatctggcgcgaatgccaaaagacgagctggcggcggaggagtcccgccggtgggcggagattattgagatggccctgaacctcgaacaggcgtcggatattatcgagcgaatgggcagtgagattgccgacaagtcgctggcggcgcgtcgggcattttcagaagaaggattgaaagagctggatgcgctttacgatcaactgctcagtaatctgcaactggcgatgtcggtctttttctccggcgatgtcaccagcgcccgtcggttgcgccgcagtaaacatcgcttccgtatacttaatcgccgatactcacatgcgcatgtcgaccgcctgcaccagcagaacgtgcaaagcattgaaaccagctcgctccatttagggctgctgggcgatatgaagcgtcttaactcactgttctgttcggtcgcctatagcgtactggaacagccggatcaggacgaggaacggggcgagtattaa

SEQ ID NO: 38917 - DNA, 870 bp, Salmonella typhimurium
atgctgaccgacacatctacccggcttaataaatatatcagtgaaagcggcatctgttcgcgtcgcgaggcggaccgttttatcgaacagggcaatgtctttatcaacggcaaacgcgccgccattggcgatcaggtagtcgcaggggatattgttaaagtaaatggtcggttgattgagccgcgagaagcggatgatttagtgctgattgcgctgaataaaccggttggcattgtcagtaccactgaagacggcgaacgcgacaatattgtcgattttgtgaaccacagcaaacgtatcttcccgattggtcgtctggataaagactcgcaggggctgatatttctgactaaccacggcgatctggtcaataagattctgcgtgccggtaacgatcacgaaaaagagtatctggtgacggtggataaaccgattaccgacgagtttattcgtggtatgggcgctggcgtgccgattctgggtaccgtcaccaaaaaatgtaaggtgaaaaaagaggcgccgtttgtctttcgcattaccctggtgcagggattaaaccgtcagatccgtcgtatgtgtgaatactttggttatgaagtgacgaaactggagcgtacgcgcattatgaacgtcagcctgagcgggattccgctgggcgagtggcgcgatctgacggacgatgagctgatcgatctgtttaaattgattgagcgttcctcttccgaagccaaaccaaaggccaaagcgaagccgaagaccacgggtattaagcgaccggtcgtggcgatcgaaaaaagcaatgagaaagcgcgcccgacatcaagcggtaagcgctttacctcgccgggacgaaagaagaaaggacgttaa

SEQ ID NO: 38918 - DNA, 1593 bp, Salmonella typhimurium
gtgttagtttccagcaacgttaccatgcagttcggcagtaagccgctgttcgaaaacatttccgtcaaatttggcggcggcaaccgttacggcctgatcggcgccaacggtagcggaaagtccacttttatgaaaatcctcggcggcgacctggagccgacgctgggcaatgtttccctcgatccgaatgagcgcatcggtaagctgcgtcaggaccagttcgcttttgaaacattcaccgtacttgatactgtcattatggggcatggcgaactgtgggaagtcaagcaggagcgcgaccgtatctacgccttgccggaaatgagcgaagaagacggctataaagtcgccgatctggaagtaaaatacggcgagatggacggttattccgctgaggcgcgcgcgggcgaactgctgttgggggtgggcatcccgctggagcagcattacggtctgatgagtgaagtcgcgccaggctggaaattacgtgtgctgctggcgcaggcgttattctctaatccggacatcctgttgctcgacgaaccgaccaacaacctggatattgatactatccgttggctggagcaggtgctgaacgagcgcgacagcacgatgatcatcatttcgcacgaccgtcacttcctgaacatggtttgtacgcatatggcggatctggattatggcgacttgcgcgtctatccgggtaactatgatgagtatatgacggcggcgacccaggcgcgtgaacgtctgttggccgataatgcgaagaaaaaagcgcaaattgccgagctgcaatcttttgttagccgttttagcgccaatgcctctaaatcgcgtcaggcaacgtcgcgcgcgcggcagattgataaaatcaagctggaagaggtgaaagcctccagccgtcagaacccgttcatccgttttgagcaggataaaaaactgttccgtaacgctctggaagtggaggcgctgacgaaaggttttgataacggtccgctgtttaaaaatgtcaatttgctgctcgaagtcggcgagaagctggcggtactcggcaccaatggcgtgggtaaatctacgctgctgaagacgctggttggcgatctggacgccgatcacggcaccgttaaatggtcggaaaacgcgcgtattggttactacgcgcaggaccacgaatatgaattcgaaaatgacctgacggtgtttgaatggatgagtcagtggaaacaggaaggcgacgacgagcaggcagtgcgcagtattctgggccgcctgctatttagccaggatgatatcaaaaagcctgccaaagtcctctccggtggcgagaagggccgtatgctgttcggcaaactgatgatgcaaaagccgaatatcctgatcatggacgaaccgactaaccacctggatatggagtcgatcgaatcgctgaatatggcgctggaactgtatcagggcacgctgatctttgtttcgcacgaccgtgagttcgtcagctcgctggcaacccgcgtcattgaaattacgccggagcgcgtggtggacttcagcggcaactacgacgattatttgcgtagtaaagggatcgagtaa

SEQ ID NO: 38919 - DNA, 810 bp, Salmonella typhimurium
atgaccgttaacgttgtcgttacagatatggacggcacttttctcgacgatgccaagcagtacgatcgtgtacgcttcatggcgcaataccaggaactgaaaaaacgtaatatcgaatttgtggtcgccagcggtaatcagtactatcagttgatctccttcttccccgagctgaaagacgaaatttcctttgtcgcagaaaatggcgcgctggtgtatgaacatggcaagcagttgtttcacggggagctaacccggcatgaatcgcggattgtgattggcgaactgctgaaggataagcagcttaacttcgtcgcctgcggtctgaaaagcgcttatgtcagcaaaaacgctcccgagactttcgtggcgctgatggccaaacattatcaccgcctgcagccggtaaacgattatcacgacattgacgatatcctgtttaagttctccctgaatttgcccgatgaacaaattccgctggttatcgacaaactgcacgtatctctggatggcatcatgaagcccgtcaccagcggcttcggttttatcgacctgattatcccgggactgcataaagcgaatggcatcagtcgtctgttaaagcgctggaacaggtcgccacagaatgtcgtcgccattggcgacagcggtaatgatgcggaaatgttgaaaatggcgcattactcttttgccatgggcaatgccgcagacaatatcaaagcgctttcacgttatcacactgatgataataaccatcaaggcgcgctcaacgtcattcaggccgtgcttgacggcaccgatcccttctga

SEQ ID NO: 38920 - DNA, 1872 bp, Salmonella typhimurium
gtgccgcacagcgatgaactggatagccgcgatgttctgtccgtcagtggcctgaatatcgcgtttcaccacgaagggcaacaggtagacgccgtgcgtaatgtgtcattacgcctgaagcgtggagagactctggcgattgtcggcgagtcgggatcgggaaaatcggtgacggcgctggcgttaatgcggctgattgagcagtcgggcgcgaacgtgcgctgcggcgaaatgctgttgcgtcggcgtaatcgtcaggtgattgagctgtctgagcagagtgacgcgcagatgcggcgtgtgcgcggcgcggatatcgccatgattttccaggagccaatgacctcgctcaacccggtatttaccgttggcgagcaaattgccgaatctattcgtttgcatcagggggccagccacgaagaggcgctggcggaagcgaaacgtatgctcgatcaggtacggatcccggagtcgcaggcgattttatcgcgttatccgcatcagctttccggcgggatgcgccagcgagtcatgatcgcgatggcgctatcctgccgtccggcggtattgattgccgatgaacccaccacggcgctggatgtcactatccaggcgcaaattctgcaacttatcaaagtgttgcagcaagagatgtcgatgggcgtgatttttatcacccacgacatgggcgtcgtggcggatatcgccgatcgcgtgctggtgatgtatcagggcgaggccgtggaaaccggcagcgtagagcagattttccatgcgccgacgcatccttatacccaaacgttactggccgccgtccctcagcttggcgcgatgcgaggccactcgctgccacgccgtttcccgttgatttccgctgacgaaccggccctttatgaatcgcagattgagcaagacacggtggtggaaggcgaacctattctccaggttcgggggctggtgacgcgattcccgctgcgtagcggtctctttaaccgcgttacgcgtgaagttcatgccgttgagaatatcagtttcgatctctggcccggcgaaacgttatcgctggtgggcgagtccggtagcggaaaatcgacgaccggacgcgcgctgctgcggttggttgaatcccggcagggggagattatctttaacggccagcgcattgacacgctgtctgcgggtaaactccagccgttgcgccgcgatattcagtgtattttccaggacccttacgcctcgctcgacccgcgccagaccgtggggtattccattatggaacctttacggattcatggcctggggcagggggacgctgcggcaaagcgcgtggcctggttgcttgagcgtgtcggattacgtcctgaacatgcctggcgttatccgcacgagttttccggcggtcaacgtcagcgcatctgcatagctcgcgcgctggcattgaatcctaaagtgattattgccgatgaggcggtctccgcgctggatgtttccgttcgcgggcagatcattaatttactgctcgatttacaacgggaaatggggatcgcctacctgtttatttcgcatgatatggcggtcgtggagcgaattagccatcgcgtggcggtgatgtatcttggtcaaattgttgagatggggccgcggcgcgccgtttttgaaaatccgcagcatccttatacgcgtaaattgatggcggcggtgccggttgccgatccctccagacaccggccgcggcgcgttctgctatcagatgatatacccagcaatattcataaacgtggcgaagagacgcccgccgtttcattacagttggtcgggccgggacattatgttgcgcggccgctgcaggataatgcgctctcgcgcttataa

SEQ ID NO: 38921 - DNA, 780 bp, Salmonella typhimurium
atgcatattcgacatcaggatcttacgacggcagaggtgcgttccagtcatctgcaccgtttgcatcgtgttacgcttttttccgccgctatctgccatattacgcagggcagtaaagtcatcattcaggatgatagccgccttgtcgccgggcctggcgagttgattattatcccggcgaacacgccgctggagattattaatcagcctgcgcagaacggttttcgctccgacctgttattactttcaccggagattattgctcgctttaaaacgatgtacgttcaggattatccaccggcaaacctgacatcgctgtgtaccccgatgagccgtagcctgacatttatgtgggagaacgtgttggatgctgtgcgccaggggttgcccgttgggctacaggaacatcaggcgatggggttactgttagcgcttttacatgatggcgcggcgggaccactgcttattgaacggcgttacaccctcacggagcaggtgcggcaactgattatgctctcgcctgctaagctatggacagcccaggagatagcccgccgtcttgctatgggaacatcgacgttgcgtcggcgtttgcagcgtgaatcgcagagttatcgacaaattgttgaagaggtgcgcatgtcctgcgcactttctcaactgcaatcgacgacgctgccaatcggcgaaatagcgctacggtgcggctacctgtcggggtcgcgatttacggccagattccgccagcattatgggtgtctgcccagtcaggtacgttaa

SEQ ID NO: 38922 - DNA, 912 bp, Salmonella typhimurium
atgcgattatttaactggcgccgtcaggcgattttacatgctatgccggtggtaaaacccgaccagatacgcacgccgtggcgggagttctggcgtcgttttcgccgccagcatgtcgcgttggtcgccgggggattcgtactggcgttaattctggtggcgatttttgcccgttggctgacgccctacgatgcggaaaactattttgactacgatagcctgaacaatggcccctctttgcagcactggtttggcgttgactcgctgggaagagacatctttagccgggttctcgttggggcgcagatctcactggcggcgggcgtgttcgcggtatttatcggcgcgataatcggtacggtgttgggattgctggcgggatattatgaaggctggtgggatcgttttattatgcgcatttgcgatgtgctgttcgccttccccggcattttgctggcgattgccgttgtggcggtgttaggcagcggtattgctaatgtgatcgttgcggtggcgattttctctattccggcgtttgctcgtctggtgcgcggaaataccctggtcttaaaacagcagacgtttattgagtctgcccgcagtatcggcgccagcgacacgacgattttgtttagccatatattgccgggaacggtctcgtcaattgtggttttctttacgatgcgtatcggtacgtcaattatttccgcggcaagcctgtcatttctcggattaggcgcgcagccgccaacgccggagtggggagcgatgctcaatgaagcgcgggcggatatggtcatcgcgccgcacgtagcgctcttcccggcggtggcgattttcctgactgtgctggcgtttaacctgttaggcgacgggttgcgcgatgcgctggacccgaagattaaggggtaa

SEQ ID NO: 38923 - DNA, 1290 bp, Salmonella typhimurium
atgaagggtactgttttcgccgttgcgttaaaccatcgcagccagcttgatgcctggcgagaggctttctctcagcctccctataatgcgccgcctaaaaccgcagtgtggttcatcaagccgcgtaatacggtgattcgtcacggcgaacccattccttatccgcagggagaaaaggtactgagcggcgcgacagtggcgctcattgtggggaaaaccgccagccggatacgccctgaagcggcggcggactatatcgccgggtatgcgctggctaacgaggtcagcctgccggaagagagcttttatcgcccggcgattaaagcgaaatgtcgcgatggcttttgcccgctgggtgaaatggcgccgctgagtgatgtggataacctcaccattatcacggaaatcaacggacgagaagcggaccactggaatactgccgatttacagcgtagcgccgcacaactgcttagcgcgttaagtgagttcgctacgcttaaccctggcgatgcgatcttactcggtacgccgcagaatcgcgttgcgctgcgtcccggcgatcgggtgcgtattctggcgaaaggtttacccgctctggaaaatccggttgtcgcagaagatgaattcgcccgccaccagacttttacgtggccgctgtcagcgacgggtacgttatttgcgttggggttgaactacgccgatcacgccagcgagctggcatttacgccgccgaaagagccgctggtatttatcaaagcgccaaacacctttaccgaacatcaccaaacgtcggtgcgcccgaacaacgtcgaatatatgcactacgaagccgagctggtcgtggtgattggcaaaacggcgcgtaaggtgagcgaagccgaagccatggagtatgtggccggttacaccgtctgtaacgactacgcgatccgcgactatctggaaaactactaccgtccgaatctgcgggtaaaaagccgcgacggcctgacgccgataggcccgtggattgtggataaagaggcggtttctgatccgcacaacctgacgttacgcacctttgtcaacggtgagctgcggcaggaagggacgaccgccgatctgatcttcagcatcccgttcctgatttcttatctgagcgaatttatgacgttgcaaccgggcgacatgattgccaccggtacgccgaaagggctgtccgatgtggtgccgggggatgaagttgtcgtggaagtagaaggcgtgggccgcctggttaaccgaatcgtcagtgaggagagcgcaaaatga

SEQ ID NO: 38924 - DNA, 1467 bp, Salmonella typhimurium
atgaagaaaataaatcattggattaacggcaaaaatgttgcaggtaacgactacttccagaccactaacccggcgaccggtgacgtgctggcggaagtggcctccggcggtgaagcagaggtgaaccaagctgtcgcggcggcaaaagaggcgttcccgaaatgggccaacctgccgatgaaagagcgcgcgcgcctgatgcgccgccttggcgacctgattgaccagcatgtgccggaaatcgcggcgatggaaaccgccgacaccggcctgcctattcaccagactaaaaacgtgctgatcccgcgcgcctcgcataacttcgaattcttcgccgaagtgtgccagcagatgaacggcaagacctatcctgttgacgataaaatgctcaattatacgctggtgcagcccgtcggcgtctgcgcgctggtgtcgccgtggaacgtgccgtttatgaccgcgacctggaaagtcgcgccgtgcctggcgctgggcaacaccgcggtgctcaaaatgtccgagctgtcgccgctgactgccgacaggctgggcgagctggcgctggaggcaggaattccggcaggcgtgctgaacgtggtgcagggctatggcgcgacggcgggcgatgcgctggtacgccaccatgacgtgcgtgcggtgtcgtttaccggcggtaccgccaccggtcgcaatatcatgaaaaatgccgggctgaaaaaatactcgatggagctgggcggcaaatcgccggtgctgatttttgaagatgccgacattgagcgcgcgctggacgccgcgctgttcaccatcttctcgatcaacggcgaacgctgcaccgccgggtcgcgcatctttatccagcagagcatttaccctgagttcgtgaagcgctttgccgaacgcgcgaatcgcctgcgtgtcggcgatccgaccgacccgaacacccaggtcggcgcgctgattagccaacagcactgggaaaaagtctccggttatattcgcctcggcattgaagagggcgcaacgctgctggcgggcggtgcggaaaaacccactgacctgcctgcgcatctgaaaggcggtaacttcctgcgcccaaccgtgctggccgatgtcgacaaccgtatgcgcgtcgcgcaggaagagatctttgggccagtcgcctgtctgctgccattcaaagacgaagcggaagggttacgtttggcgaacgacgtggaatacggtctggcctcttatatctggacccaggacgtgagcaaagtgttgcgcctggcgcgtgggattgaagccggcatggtcttcgtcaacacccagaacgtccgcgacctgcgccagccgttcggcggcgtgaaagcctccggtaccgggcgcgaaggcggcgaatatagcttcgaagtgtttgcggaaatgaaaaacgtctgcatctcaatgggcgaccatcctatcccaaaatggggagtttga

SEQ ID NO: 38925 - DNA, 852 bp, Salmonella typhimurium
atgggcaagttagcgttagcagcaaaaattacccacgtgccgtcgatgtatctttctgaactgccgggaaaaaatcacggttgtcgtcaggcagccattgatgggcatattgaaattggcaagcgttgccgcgaaatgggcgttgacaccattatcgtattcgacacccactggctggtgaatagcgcttaccacattaattgtgccgaccatttccagggcgtctataccagcaacgaattgccacactttattcgcgacatgacctatgactatgacggcaatccggagctcggccacctgattgccgacgaggcagtcaaactgggcgtgcgcgctaaagcgcataacatcccgagcctgaagctggagtatggcacgctggtaccgatgcgctacatgaacagcgacaagcacttcaaagtggtctccatctcggcgttctgcactgtgcatgattttgccgacagccgcagactgggcgaagccattctcaaggcgattgagaaatatgacggtaccgtagcggtattcgccagtggttctctgtcgcaccgttttattgacgaccaacgggcggaagaagggatgaacagctacacccgcgagttcgatcatcaaatggatgagcgcgtggtcaagctgtggcgcgaaggcaaattcaaggagttttgcaccatgttgccggagtacgccgactactgctacggcgaaggcaacatgcacgacacggtcatgctactgggaatgctggggtgggacaaatacgacggcaaggtggagttcatcaccgacctgttcgccagctccggtaccggccaggtaaacgctgttttcccgctgcctgcgtaa

SEQ ID NO: 38926 - DNA, 381 bp, Salmonella typhimurium
atgccgcactttattgctgaatgtactgaaaatattcgcgagcaggctgatttacccggcctgttcagcaaggtaaacgaggcgctggccgccagcgggattttccccatcggcggtatccgcagtcgcgcccactggctggatacctggcagatggctgacggtaagcatgattacgcgtttgtgcatatgacgctgaaaatcggcgccgggcgcagcctggagagccgtcaggaagttggcgaaatgctgtttgggctgattaaagcccacttcgccgacctgatggagaaccgctatctggcgctgtcgtttgagattgccgagctacatccgacgctcaattacaaacaaaacaacgtacacgcgttatttaaatag

SEQ ID NO: 38927 - DNA, 792 bp, Salmonella typhimurium
atgaaaaatgctttcaaagacgcgttaaaagcggggcgtccgcaaatcggtttgtggctggggcttgccaacagttacagcgctgaactgttagcgggcgccggcttcgactggctactgatcgacggtgaacacgcgccaaacaacgtgcagacggtgttgacccagttgcaggcgattgcgccttatcccagccagccggtggtgcgtccgtcatggaacgatccggtacagattaagcaactgctcgacgtcggcgcgcaaacgctgctgataccgatggtgcagaatgccgatgaagcgcgaaacgccgtggcggctacgcgttatccgcctgccggtattcgcggcgtgggcagcgcgctggcgcgggcatcgcgctggaaccgcattccggagtatctccacctggccaacgacgccatgtgcgtactggtgcagattgaaacgcgtgaggcgatgagcaatctggcgtcaattctcgacgtggatggcattgacggcgtgtttattggtccggcggacctcagcgccgatatgggctttgccggcaatccgcagcacccggaagtgcaggcggcgattgagaacgccatcgtgcagatacgcgcggcggggaaagcgccggggattctgatggccaatgaagcactggcgaaacgttatctggaactgggggcgctatttgtcgccgtcggcgttgacactacgctgctggcgcgcggagcggaggcgctggcggcgcgctttggcgtagaaaaaaaactgtccggtgcgtccggcgtctattaa

SEQ ID NO: 38928 - DNA, 624 bp, Salmonella typhimurium
atgaaatacatgattgttttactgctggcgctgttttcgacgctgagcatcgcgcaagaaaccgctccttttacgccggatcaggaaaagcagattgaaaatctgatccatgcggcgttgtttaacgatcctgccagcccgcggataggcgctaaacaccctaagctgacgctggtgaactttacggattacaactgcccgtactgcaaacagctcgatccgatgctggaaaagattgtgcagaaatatcctgacgttgcggtcattattaaaccgctgccatttaaaggagagagttccgttctggcggcgcgtattgcgctgaccacctggcgcgagcatccgcaacagttcctcgcgctacatgaaaaactcatgcaaaagcgcgtttaccatacggatgacagtattaaacaggcccagcagaaagcaggggctacgccagtgacgctggatgaaaaaagcatggaaacgatacgcactaatttgcagttggcaaggctggtcggcgtgcaaggaacgccagcgacgatcattggcgacgagctgattccgggcgcagtgccctgggatacgctggaagcggtggtgaaagaaaaactggcgtctgccaatggcgggtaa

SEQ ID NO: 38929 - DNA, 1281 bp, Salmonella typhimurium
gtgatagcaaaattcttcccgtggtatagcgagataactcgtccacaaaaaaatgctttattttcagcatggctgggttacgtttttgacggcttcgactttatgctgattttctacattatgtatctgatcaaggctgacttaggattgacagatatggagggcgcattccttgccacagcggcctttattgggcgaccatttggcggggcgctatttggtctgctggcagacaaatttggccgtaagccgttgatgatgtggtcgatagttgcctattctgtaggtacagggttaagtggcctggcttccggtgtaattatgctgacgcttagtcgcttcattgtcggtatggggatggcgggggagtatgcttgcgcttctacttatgccgtggaaagttggccaaagcatttaaaatctaaagcgagcgcatttctggtttcaggtttcggtattggtaacatcatagcagcctattttatgccgtcatttgccgaagcgtatggttggcgtgctgctttttttgtcggtttgctacccgttcttttagtaatctacatccgggccagggctcctgaatctaaagagtgggaagaagctaaactcagtggtcccggaaagcattcacaaagtgcctggtcagttttctctttgtcaatgaaagggctatttaatcgagctcaatttccactgacattatgtgtatttattgttctgttctctattttcggcgcaaactggccgatctttggtctactgcctacatatttgacgggagagggctttgatacgggcgtggtctctaatttaatgacggcggcggcattcggcactgtattgggaaatatcgtttggggtctgtgcgcagatagaattggtttgaagaaaacgttcagcattggtcttctcatgtcctttttattcattttcccgttattcagaattccgcaagataattatttactgctgggcgcatgtttattcggtttaatggcgactaacgtaggtgttggcgggttggttcccaaatttctctacgactactttcctcttgaggttcgtggtttgggtaccgggctgatttataatcttgctgcgacatcaggcacattcaattcaatggcggcgacctggcttggaataacaatggggctaggcgctgcgctaacgttcattgttgctttctggaccgcaacaattctactcattattggcctatccattccggatagactaaaagcacgtcgtgaaagttttcaatcaacaaaagaattttaa

SEQ ID NO: 38930 - DNA, 738 bp, Salmonella typhimurium
atgtatcccgttgacctgcatatgcataccgtcgccagcactcatgcctacagtactctgagcgattatatcgcggaagccaaacgcaaaggcattaaactttttgcgattaccgatcatggtccggacatggaagatgcgccgcatcactggcattttattaacatgcgcatctggccgcgtctggttgacggcgtggggatactgcgtggcattgaggcgaatatcaagaatattaacggtgaaattgattgttccggaaagatgttcgactcgctggatctgattatcgcaggctttcatgagcccgtttttgcgccgcatgataaagaaaccaatactcaggcgatgatcgcgaccatcgccagcggcaaggtgcatataattagtcaccccggaaatccaaagtatccagtggaggttaaagccatcgcgcaggcggcggcgaaacaccatgtagcgctggaaatcaacaactcttcttttctgcattcgcgtaaaggaagcgaagataattgccgcgcggtcgctgccgccgtacgcgatgcgggaggctgggtagcgttaggctctgattcccatacggcctttacgcttggcgatttcaccgaatgccggaaaattctggatgcggtgaattttccggaagatcgaatcctgaacgtctcgccgcagcgcttactggcctttctcgaatcacgcggtatggcgcctgtaccggaatttgccgaactttaa

SEQ ID NO: 38931 - DNA, 540 bp, Salmonella typhimurium
atgacatcacgtcttcaggtcatacagggtgatatcactcaacttagcgtcgatgcgattgtgaatgccgctaacgcatcattaatgggcggcggtggcgtagacggcgcgattcatcgcgcggcggggccggcattgctggacgcctgtaaactcatccgtcagcaacagggcgaatgtcagacgggacatgcggttatcacgcctgctggcaagctttcggcaaaggcggttattcacacagtggggcccgtctggcgaggcggcgaacaccaggaagctgagctactcgaagaggcataccggaattgtttgctgcttgccgaggcgaatcactttcgttccatcgcttttccggcaatcagtaccggcgtttatggctatccacgcgcccaggccgctgaagtcgccgtcaggacggtttcagattttattacccgttacgctctgcctgaacaggtatactttgtctgttatgatgaagaaactgcccggctttacgcaagattacttactcagcaaggcgacgaccctgcctga

SEQ ID NO: 38932 - DNA, 2544 bp, Salmonella typhimurium
atgaataaaacaactgagtatattgacgcattgctgctttctgaacgtgagaaagcggcattgccgaaaactgacatccgcgccgtgcatcaggcgctggatgccgagcatcggacttactcgcgagaagacgattcaccgcagggttccgtaaaagcccgccttgaacacgcctggccggattcattggcgaaggggcagttaattaaagatgatgaagggcgcgatcagttgcaggctatgccaaaagcgacgcgctcttcgatgtttcccgatccctggcgaaccaacccggttggccgtttctgggatcgtctgcgtgggcgggatgtaacgccgcgctatgtttctcgtctgacaaaagaagagcaggcgagcgagcaaaaatggcgtaccgtcggcactatacgccgctatattttgttaattttgactctggcgcaaaccgtcgtcgcgacctggtatatgaagaccattctgccttatcagggatgggcgctcatcaatcctatggatatggtggggcaggatatttgggtctcctttatgcagctcctgccctacatgctgcaaaccggtatcctgattttgtttgccgtgctgttctgctgggtgtcagccggattctggacggcgctgatgggcttcctgcaactgcttatcgggcgcgataagtacagcatctccgcgtctacggttggcgatgagcccctcaatccggaacaccggacggcgctgatcatgcctatctgtaatgaagacgttagtcgcgttttcgccggtctgcgcgcgacctgggagtccgttaaagccacaggcaacgccgcgcatttcgacgtctatatccttagcgacagttataacccggatatctgcgtggcggagcaaaaggcgtggatggagcttatcgcggaagtgcagggcgaaggccaaattttttaccgtcgccgccgccgccgtatgaaacgcaaaagcggcaatattgacgatttttgccgccgctggggcaatcagtacagctatatggtggtgctggacgcggactcagtgatgagcggcgagtgtctgagcggcttggtgcgcctgatggaagcgaatccaaacgccgggattatccagtcttcgccgaaagcgtcggggatggatactctgtatgcccgctgccaacagttcgcgacccgcgtctatgggccgctgtttaccgccgggctgcacttctggcagttgggggagtcgcactactgggggcacaatgccattatccgcgtgaagccgtttatcgagcactgcgctctggcgccgctgccgggagaaggttcgttcgccggatcgattctttcccacgactttgtggaggcggcgctaatgcgtcgggcagggtggggcgtctggattgcctacgatctccccggctcctatgaagagctgccgccaaacctgctggatgagcttaaacgcgaccgccgctggtgtcacggcaacctgatgaactttcgtctgttcctggtgaaaggaatgcacccggtgcatcgcgccgtgttcctgacgggggtaatgtcatatctgtccgcgccgttatggtttatgttcctcgcgctttctaccgcgctgcaggtcgttcatgcgttaacagagccgcaatatttccttcagccgcgccagctttttccggtctggccgcagtggcgtccggaactggcaatcgcgctgtttgcatcaacgatggtgctgctgttcctgccgaagctgctcagtattatgctgatctggtgtaaaggcaccaaagagtatggcggtttctggcgcgttacgctgtcgctgttgctggaagtgctgttctccgtattgctggcgccggtgcgtatgctgtttcataccgtgtttgtggtcagcgcgtttctcggctgggaagtggtctggaactcaccgcaacgcgacgatgattctacgccgtggggagaagcctttatgcgtcacggctctcaactgctgctggggctggtctgggcggtgggtatggcgtggctggatttacgctttctgttctggctggcgccgattgtcttttcgctgattctgtcgccatttgtttcggtgatctccagtcgttcaacggtaggattacgcaccaaacgctggaagctgttcctgatcccggaagagtattcgccgcctcaggtgttggtcgataccgataaatatctggagatgaatcgccgccgtattctggacgatggctttatgcatgcggtatttaacccgtcgcttaatgcgctggcgaccgcgatggccactgcgcgtcaccgcgccagtaaggtactggaaatagcccgcgatcgtcatgtggagcaggcgctaaacgaaacgccggagaaactgaaccgcgatcggcgtctggttttgctcagcgatccggtgacgatggcgcgtttacactatcgggtctggaatgcgccagagagatactcttcctgggtaaaccattatcagtctctcgtcctgaatccgcaggcgttgcagggacgaacatcgtcagcgagataa

SEQ ID NO: 38933 - DNA, 1053 bp, Salmonella typhimurium
atgccagtgttacacaaccgcatctctaatgacgagctgaaagccaaaatgctggcggaaagcgagccgcgtacgacaatttctttttataaatatttcactatcgcctctccgcaacagacgcgggacgcgttgtatcaggtgtttacggcgttggacgtttttggtcgcgtttacctggcgcatgaaggcatcaatgcgcaaatcagcgtgccgcaaagcaagctcgagacgtttcgtcaacagctttatacgttcgaccccgcgctggacggggtgcgtttaaatatcgcgctggaggatgacggaaagtcattttgggtgctgcgtatgaaagttcgcgaccgtatcgttgctgacggtattgacgatccgacttttgacgccagtaatgtcggcgattatctgaaggcggcagatgtgaatgcgatgctggacgatcctgacgcggtctttattgatatgcgcaaccactatgagtatgaagtcggccatttcgaaaatgctctggaaatcccggcggatacgtttcgtgaacagttgccaaaagcggttgaaatgctgcgggaacatgcagataaaaagatagtgatgtactgtaccggcggtattcgttgtgagaaagccagcgcctggatgaaacacaacggtttcaataaagtctggcatattgagggtggcatcattgagtacgcccgtcgcgcgcgcgcgcaggggcttcccgttcgctttatcggcaaaaactttgtatttgatgagcgaatgggcgaacgaatctcggatgaggttatcgcgcattgccatcagtgcggcgcgtcctgcgatagccataccaactgcaaaaatgacggttgccatctgctgtttatccagtgtccgcagtgcgccagtaaatttaacggctgctgtagtgaacaatgctgtgaagagttggccttgccggaggaagaacagcgccgacgtcgcgcgggtcgcgagaacggcaacaaaatttttaataaatcgcgtggtcggcttaatagcaaactgagcattcccgatccggctgagtaa

SEQ ID NO: 38934 - DNA, 600 bp, Salmonella typhimurium
gtgcgtctgacagcaaaacagataacctggctaaaagtttgtctgcatcttgccggttttttgccgcttctgtggctcttttgggcgataaatcacggtggactcagcgcagacccggtaaaggatatccaacactttaccggcagaaccgcgctcaaatttttgctcgccaccttgctggtttcaccgctggcgcgctacgctaaacagccattattgatacgcacacgccgcctgttaggattatggtgtttcgtttgggctacgctgcatttaaccagctatgccttactggaactggggatacataacctggcgctgttaggaagcgagttgatttcacgcccttatttgacgcttgggatcattagctggctggtgttattggcgctgacgttgacctcaacgcaatttgcgcagcgtaaattgggcaaacgctggcaaacactgcataacgtcgtctatcttgtcgcgatcctggctcccatacattacctgtggtcggtaaagattttatcaccgcaaccggtcatctacgcggcattagcgttagcccttttagcgttgcgttaccggaagtttcgccagtggtggcgctag

SEQ ID NO: 38935 - DNA, 471 bp, Salmonella typhimurium
atggatattcgtaagattaaaaaactgatcgagctggttgaagaatcaggtatctccgaactggaaatttctgaaggcgaagaatctgttcgcatcagccgcacaacggcaaacgccggttttccggtgatgcagcaggcttatgcggcgccgatgatgcagcaacccgctctgtctaacgctgtcgcgccagcggctactccagcaatggaagcgcctgccgcagcggaaatcagtggtcacatcgtacgctccccaatggttggtactttctaccgcaccccaagcccggacgcgaaagcgttcatcgaagtgggccagaaagtgaacgtgggcgataccctgtgcatcgttgaagccatgaaaatgatgaaccagatcgaagctgacaaagcaggtactgtgaaagcgattctggtcgaaagtggtcaaccggtagaatttgacgagccactggtcgtcatcgagtaa

SEQ ID NO: 38936 - DNA, 1350 bp, Salmonella typhimurium
atgttggataaaattgtcatcgccaaccgcggcgagatcgcactacgtattcttcgagcctgtaaagaactcggcatcaagaccgtcgctgtgcactcaagcgcggatcgcgatttaaaacacgtattgctggcggatgagacggtctgtattggtccggcaccgtccgtaaaaagttatctgaacatcccggctatcattagcgccgctgaaatcaccggcgcggtggcaatccacccgggttacggcttcctttctgagaacgccaattttgccgagcaggttgaacgctccggctttatctttatcggcccgaaagcggacaccatccgcctgatgggcgataaagtgtccgcgattaccgcgatgaaaaaagcgggcgtgccgaccgtaccaggatctgacggcccgctgggcgacgatatgaatgcgaaccgcgctcatgccaaacgtattggctatccggtgatcatcaaagcgtccggcggcggcggcggccgcggtatgcgcgtagttcgtagcgatgctgaactggcgcagtccatctccatgaccaaagcggaagcgaaagcagctttcagcaacgacatggtatacatggaaaaatacctggaaaatccacgccacatcgaaattcaggtgctggcggacggccagggcaacgctatctatctggcggaacgcgactgttccatgcagcgtcgccaccagaaagtggttgaagaagccccggcgccaggcattacgccggaactgcgtcgctatatcggcgaacgctgcgcgaaagcgtgcgtagacatcggctatcgcggcgcagggacgttcgaattcctgttcgaaaacggcgagttctatttcatcgaaatgaacacccgtattcaggttgaacacccggtgactgaaatgattaccggcgtcgatttgatcaaagagcagttgcgcatcgcggcgggtcagccgctgtcgatcacacaggacgaagttgtcgttcgaggccatgcggtagaatgccgtatcaatgccgaagatccgaacaccttcctgccaagcccaggcaaaatcacgcgcttccatgcgcctggcggctttggcgttcgttgggaatcccatatctacgcgggctacacggtgccgccgtactatgattccatgatcggcaaactcatctgctacggtgaaaaccgcgacgtggcgattgcccgtatgaaaaatgccctgcaggaactgattatcgatggtatcaaaaccaatatcgatctgcagacccgcatcatgaatgacgagcacttccagcacggtggaaccaacatccactatctggagaaaaaactcggtcttcaggaaaagtaa

SEQ ID NO: 38937 - DNA, 1452 bp, Salmonella typhimurium
atgcagcttgaggtcattctaccgctggtagcctatctggtcgtggtcttcggggtctcgatttacgctatgcgcaagcgtaccgccggcacctttttaaacgaatattttcttggcagccgttcgatgggcgggatcgtgctcgcgatgacgcttaccgccacctatattagcgccagttcatttatcggcggtcccggcgcggcttataaatacggtctgggctgggtcttgctggcgatgatccagcttcccgccgtctggctttcactgggtattctgggtaaaaaattcgctatcctggcgcgtcgctataatgccgtcacgcttaacgatatgctattcgctcgttaccaaagccgcctgctggtgtggttggcaagcctgagtttattggtcgcgtttattggcgcaatgaccgtacaatttatcggcggcgcgcgactgctggaaaccgcggcgggaattccctacgaaaccggcctgctaatatttggcgtcagtatcgcactctatacggcgtttggcggctttcgcgccagcgtacttaacgatacgctacagggcctggtgatgctggtcggcacgatagtgctgctggtgggcgtgatccatgcggcgggcggtctaagtcaggccgttgacacgctgcacgctctcgaccccaaactggtaacgccgcagggcgccgatgacatactttctcccgcctttatgacctctttttgggtactggtctgttttggtgtgattggcctgccgcatacggcggtgcgctgcatctcctataaagacagtaaagcggtacaccggggcattattatcggtacgattgtcgtggcgattttaatgttcgggatgcaccttgccggcgcgctgggtcgcgcggtgcttccggatctgacggtgccggatctggtgatcccaacgctaatggtgaaagttttgccgccgtttgccgccgggatcttcctcgctgcgccaatggcggcgatcatgtcaacaattaacgcccaactgctgcaaagttccgcgacgatcattaaagatctctatctcaacctgcgccccgatcagatgcaaaatgagatccggctgaagcgtatgtcggcagcgattacattactgctaggcgcgctgttgctgctggccgcatggaaaccgccagagatgatcatttggctcaacctgctggcgtttggcggcctggaagcggtgttcttatggccgctggtattgggcctttactgggagcgggcaaacgcggcaggcgcattaagcgccatgatcgtgggcggcgtgctatatgccctgcttgccacatttaatattcagtacctgggctttcatccgattgtgcccgcgttactgttaagtttattggcttttctgatcggaaaccgattcggctcttccgcttcgcaagccaccgtattgtctactgataaataa

SEQ ID NO: 38938 - DNA, 1158 bp, Salmonella typhimurium
atgacgaaacatgccaggttttcactcctgccctcattcatcatattctctgctgcgctgctggccggttgtaatgaccagggagatacccaggctcatgccggcgagccgcaagtcaccgtccatgtggtcgaaacagcgccgctagccgtaacgaccgaacttcccggacgtacgtccgcatttcgcattgcggaggttcgcccccaggtgagcgggatcgtgcttaaaagaaacttcaccgaaggtagcgatgtagaggccgggcagtcgctctatcagatcgatcctgccacttatcaggctgattatgacagcgctaaaggcgaacttgctaaaagcgaagcggctgcggctatcgcgcacctgacggtcaaacgctatgttccactggtcggcacaaaatatatcagccaacaggaatatgatcaggcgattgccgacgcccgccaggccgatgccgccgttgtggcggcaaaagccgctgttgaaagcgcgcgtattaaccttgcgtataccaaagtcacctcacccatcagcgggcgtataggaaaatctaatgtgactgaaggcgcgctggtgactaatggtcagtcaactgaactggctaccgtgcaacaactcgatccgatttatgtcgacgtgacgcaatcaagcaacgactttatgcgactcaagcaatccgtcgaacaaggtaacctgcataaagacagcgccagtagcacggttcaactggtaatggaaaatggtcaggtctacccgattaaaggcacgctgcaattttccgacgttaccgtagatgaaagcaccggctctatcacgctcagggcggtgttccctaacccgcaacacagtctgcttcccggtatgtttgttcgcgcccgcattgatgaaggcgtccagcccaatgccatccttgtcccccagcagggcgtaacccgcacgccgcgcggcgacgcaatggtgatggtggttaacgataaaagccaggtcgaagcccgcaatgtcgtggcggcgcaggctattggcgataaatggctcatcagcgaagggttaaaaccgggcgataaggtcatcgtcagcggcttacaaaaagcgcgaccgggcgtccaggtgaaagccactaccgatgctcctgcagcgaaaacggcgcaataa

SEQ ID NO: 38939 - DNA, 3114 bp, Salmonella typhimurium
atggcaaacttttttattagacgtcctattttcgcctgggttctggccattatcctgatgatggctggcgcactggcaataatgcaacttcccgttgcgcagtatccaaccattgcgccgccagcggtttctatttctgcaacctatcctggcgcggatgcgcagacggtacaggatacggttactcaggttatcgaacaaaatatgaacggtatcgataacctgatgtatatgtcctctaccagcgactctgctggtagcgtgaccatcaccctgaccttccagtccggaaccgatccggatatcgcgcaggttcaggtgcaaaataaattgcagctcgccacgcctttactgccgcaagaagtccagcagcaggggattagcgttgaaaaatccagcagcagctttttgatggtcgccgggttcgtctcagataatccgaacactacccaggacgacatctctgactatgtcgcctctaacattaaggattctatcagccgtctgaatggtgtgggcgacgttcagctatttggcgcacagtacgccatgcgtatctggctggatgcgaatctgctaaataaataccagctcacgccagttgacgtcatcaaccagttaaaagtacagaacgaccagattgcggcaggccaactgggcggcacgccagcattaccgggccagcagcttaacgcctcaatcatcgcccaaacgcgtctgaaagatccggaagagttcggcaaagttacgttgcgcgtcaataccgacggctctgtcgtccatctcaaagatgtcgcgcgtattgagcttggcggtgaaaactataacgttgtagcgcgcattaacggtaaaccggcctccggtctcggtattaaactggcgaccggcgctaacgcgctggataccgcaaccgcaatcaaagtgaaactggcggagctgcagcctttcttccctcagggaatgaaggtggtttatccttatgacacaacgcccttcgtaaaaatatctatccacgaagtggtaaaaacgctgtttgaagcgattattctggtgttcctggtaatgtatctgttcttacagaatatccgggcaaccctgattcctaccatcgctgttcctgtcgtgttgctaggcacttttgcggtactcgccgcctttggctattccatcaataccctgacgatgtttggtatggtactggcgatagggctgttggttgacgatgcgatagtggtcgtagaaaacgttgaacgtgtaatgatggaggataacctttctccccgagaggcgacggaaaaatccatgtcgcagattcagggagcgctggttggtatcgcgatggtactgtctgcggtatttatcccgatggccttttttggcggctcgaccggggcaatttatcgccagttctctattactattgtttcagcaatggcgctatccgttctggttgcgttgattctgacgccagcactgtgcgctacgctgcttaaacccgtatctgctgaacatcacgagaaaaaaagcggcttctttggctggttcaataccaggtttgaccacagcgttaaccactatactaacagcgtaagcggcatcgtgcgtaatacgggtcgctatctcattatctatctacttattgtagtcggaatggcggttctgtttttacgcctcccgacctccttcctgccggaagaagatcagggagtattcctgaccatgattcagctcccctctggcgctacgcaagaacgtacgcagaaagtgctggatcaagtcactcattactacctgaataatgaaaaagcgaacgtcgaaagcgtgtttaccgtaaacggctttagctttagcggtcagggacaaaactcagggatggcatttgtcagccttaaaccctgggaagagcgtaacggtgaagaaaatagcgtcgaagccgttatcgccagagcgacacgcgcctttagccagattcgcgacgggttggtgttccccttcaacatgccggcaattgtcgagttaggtaccgcaacaggtttcgacttcgaactgattgatcagggaggactcggtcacgatgcgttaacaaaagcgcgtaatcaactcctgggtatggtcgcgaagcatcctgatctattagtgcgcgtacgcccgaacgggctggaagacacgccacagttcaagctggatgtcgatcaagaaaaagcgcaggcgctcggcgtttcgctgtctgatatcaacgaaaccatctccgcggcgttgggcggctattacgttaacgactttatcgatcgcggacgagtgaaaaaagtatacgttcaggctgacgctcagttccgtatgctgccgggagatatcaacaatctttatgttcgcagcgctaatggcgagatggtgcccttctctacctttagctcagcacggtggatttatggttcgccacgcctggaacgctataacgggatgccgtcaatggaactgctcggcgaagcagcacccggacgaagcaccggtgaagccatgtcgttaatggaaaacctggcttcacagctaccaaacggtattggctatgactggacaggtatgtcgtatcaggaacggttgtcaggtaaccaggcgccggcgctgtacgcaatctcactcattgtcgttttcctctgccttgccgctctgtatgaaagctggtcaattccgttctcggtaatgctggtcgtaccgctcggcgtggttggcgctctgcttgcagcgtcattgcgcggtctgaacaatgacgtttacttccaggttggcttgttaaccactattggcctttctgctaaaaacgccatcctgattgtcgagttcgccaaagatctcatggaaaaagaaggacgtggattgattgaagcgacgctggaagcatcccgtatgcgtttacgtcctattctaatgacctcgctggcctttattctcggggtaatgccgttagttatcagtcgtggcgcaggtagtggtgcacagaacgcagtaggcacaggggttatggggggaatgttaaccgcaaccttattagctatcttcttcgtgccggtattcttcgttgttgtaaaacgccgatttaatcgccatcatgattaa

SEQ ID NO: 38940 - DNA, 1290 bp, Salmonella typhimurium
atgaaaaaacaaaacaatttacgtagtctggcagcacaggccgttgaacaggtcgtcgagcagggacaatcattaagtaatgtgctcccgccgctgcaacaaaaagtcgccgataaagacaaagcgctacttcaggagctgtgctttggcgtactgcgcaccctttcacagctggaatggctgatcaataagctgatgtctcgtccaatgaccggcaagcagcgtacagtgcattacttaattatggtcggcttttatcagttgctgtacacccgcgttcctccccatgcggcgctggctgaaaccgttgaaggcgcggtctccatcaaacgtccgcagttgaaagggttaattaacggcgtcctgcgccagttccagcgccagcaggaaacgttgcttaatgagtttgcgaccagcgatgcgcgctttttacatccaggttggctggtaaagcgtttgcaaaatgcttaccccacacagtggcaacacattattgaagcgaataaccagcgtccaccgatgtggctacgtgtaaatcgtacacaccacacccgcgacggttggcttggcttacttgaagacgcaggcatgaagggatatccccatcccgattatcccgacgctgtacgtctggaaacgccagctccggtacatgctttacccggttttgctgagggttgggtaactgtccaggatgcctctgcgcagggatgtgcggtttttctcgctcctcagaacggtgagcacattttagacttgtgcgccgcgcccggcggtaaaaccacgcatattctcgaagtggcccccgaagcagacgtgttggcagttgatattgatgaacaacgactctcccgcgtttacgacaacctaaagcgtcttgggatgaaagcgacagttaaacaaggggatggacgttatccctcccaatggtgcggcgagcagcagtttgaccgtattctgctggatgcgccctgctccgcaaccggcgtcattcgccgtcatccagatatcaaatggctgcgtcgcgatcgcgatatcgcggaactggcgcaattacaggcggaaattcttgatgccgtctggccgcgcctgaagcccggcgggacgctggtttacgccacctgttccgtactgccggaagaaaaccgcgatcagatcaaaacctttttacaacgcactcccgatgccgcgctcagcgaaacgggaacacctgatcagccaggacaacagaatctgccgggcggcgaagaaggtgatgggttcttttacgctaagctaatcaagaagtga

SEQ ID NO: 38941 - DNA, 1377 bp, Salmonella typhimurium
atgaaaattatcatactgggcgcagggcaagttggcggaacactggcggaaaacctggtcggcgaaaacaacgacatcacggtggttgataccaacggcgaacggttacgcagtttgcaagataagttcgatctacgcgtagttcaggggcatggttcgcatccccgcgtgttgcgcgaagcgggcgctgacgatgcggatatgctggtcgctgtcaccagttcagatgaaactaatatggttgcctgccaggtagcctattcactcttcaacactccaaaccgtatcgcccgcattcgctccccggactatgttcgcgatgcggataaactctttcattctgaagcggttccgattgatcatctgatcgcgccggagcagttggttatcgataatatttatcgcctgatcgagtatccgggagcattacaggttgtaaactttgccgaagggaaagtcagtctggcagtagttaaagcctactatggcggtccactaataggtaacgcgctctcgacaatgcgagagcatatgccgcatatcgatacccgcgttgccgcaattttccgccatgacagaccaatccgtcctcagggctcgactatcgtggaagcaggggatgaagtcttctttattgcggcttcacagcatatccgtgcagtaatgagcgaattacagcgtctggaaaaaccctacaagcgcatcatgctggtgggcggcggcaatatcggcgccgggctggcaaggcgtctggaaaaagactatagcgttaaattgatcgaacgcgatcaacaacgcgccgcagaattggctgagaaactgcaaaacacgatcgtcttttttggcgacgcttccgatcaggaattgctggcggaggagcatattgatcaggtcgatctctttatcgcggtcactaacgatgatgaagccaatatcatgtccgcgatgttggctaagcggatgggcgccaagaaagtgatggtgttgatccaacgtcgcgcttatgtcgatcttgtgcagggtagcgttatagatattgcgatttctccgcagcaggccaccatctctgcattactgagccatgtgcgtaaagcggatatcgtcggcgtttcctcactacgtcgcggggttgccgaagccatcgaagccgtcgcgcacggcgatgaaagcacttcccgcgtggttggccgcgtcattgacgaaattaaactgccgccaggcaccattattggcgcggtggttcgcggtaatgatgtcatgatcgctaatgacaatttgcgcattgaacaaggcgatcacgtcattatgtttttgaccgataaaaagtttattaccgacgtcgaacgtctgttccagccaagtcctttcttcctctaa

SEQ ID NO: 38942 - DNA, 600 bp, Salmonella typhimurium
atgaaaaaacattattctgtccaatatgaaaccggggatatcgtctttacctgtataggtgccgcgcttttcggccagatatccaccgcttcacagtgctggagcaaccatgttgggattattattggtcataatggtgatgactatctggtggcggaaagtcgcgtccccctctcaaccgtcaccacgctgtcactgtttatacaacgttcagccggacaacgttacgcggttcgtcgcctgtgcggcggcctgacggtcgaacagaaactcgccatcatggaacaggttcccgcccggctgaataagttttatcacacggggtttaaatatgagtcatcgcgccagttctgctcgaaatttgtgtttgatatctataaagaagcattgtgtattccggtaggcgatattgagacattcgaagaattgcttcacagcaatcctgatgcgaaactcgccttctggaagttctggtttttaggttcaatcccgtgggatcgtaagacggtgacgcccgccagcctgtggcatcatcccaatttagaattaattagcgcctgtggaattgaaacccctcaacgcgaggctgagggagaatga

SEQ ID NO: 38943 - DNA, 567 bp, Salmonella typhimurium
atgctgaaactcaacgcgaccacaaccgccctggtggttattgatttacaggaaggaattcttccgtttgccggcggcccgtatacggcaaatgaggtggtcgcccgcgccgcgcggctggcggaaaagtgtcgtgccaacggctcgcccgtggttatggtacgcgtcggatggtctgatgattatgccgaagcgttaaaacaacccgtggatgccgcaacgcctgcgcacgcgttgccggaaaactggtggacctggcctacggcattgggtaaaaaggacagcgatctggaagtgactaaacgccagtggggcgcgttttacggcaccgatctggaattacagcttcgccgccggggtatcgacaccatcatattgtgcgggatctcaaccaatatcggcgtcgaatccacagcgcgtaacgcctgggagttggggtttaaccttattattgccgaagatgcctgtagcgccgccagcagtgagcagcatcagagcagtatgacacatattttcccgcgcattggccgggtacgcagcgtagaggatattttaaacgccttatga

SEQ ID NO: 38944 - DNA, 1734 bp, Salmonella typhimurium
gtgaatattcaggctcttctctcagaaaaagttagtcaggccatgattgctgcaggcgcgcctgcagattgcgagccccaggttcgtcagtcagccaaagttcagttcggcgactatcaggccaacggcatgatggcagttgcgaaaaaactgggtatggccccccgacaacttgcagagcaggtgctgactcatctggatctcagcggcatcgccagcaaggttgaaatcgccggccctggctttatcaatattttcctcgaaccggcttttctcgctgaacaggtgcaacaggcgctggcctccgatcgtctgggcgtttctcagccgactcgtcagacgattgtcgtcgactactccgcgcccaacgtcgcgaaagagatgcacgttggtcatctacgctccacgattatcggcgatgcggcagtgcgcacgctggagtttctgggccatcatgttattcgcgctaaccacgtcggcgactggggcacccagttcggtatgcttatcgcctggctggaaaaacagcagcaggaaaacgcgggcgacatggcgctggcggatctcgaaggattctaccgcgatgcgaaaaagcattatgacgaagatgaagcgtttgccgagcgcgcgcgtaactacgtcgtcaaattgcagagcggtgatacctatttccgtgagatgtggcgtaagctggttgatatcacgatgacgcaaaaccagatcacctatgatcgtctgaacgtcactctgacgcgtgacgatgtgatgggcgaaagtctgtataatccgatgctgccgggcatcgtcgccgatctgaaagccaaaggactggcggttgaaagcgaaggcgcaacggtggttttccttgatgagtttaaaaacaaggaaggcgacccgatgggcgtcattattcagaagaaagatggcggttatctgtataccactaccgatatcgcctgcgccaaataccgttacgaaacgctgcacgccgaccgcgtgctctactacattgactcccgtcagcaccagcacctgatgcaggcctggaccattgtgcgtaaagccggttatgtgccggattccgttccgctggaacaccacatgttcggcatgatgttgggtaaagacggtaaaccgtttaaaactcgcgcgggcggtacggtgaaactggcggacctgctggatgaggcgctggagcgcgcgcgtcgtctggtggcggagaagaacccggatatgccggctgacgagctggaaaaactggctaacgccgtcggtattggcgcggtgaaatacgccgatctgtcaaaaaaccgcaccactgactatatcttcgactgggataatatgttggctttcgaaggcaataccgcaccttatatgcagtatgcctatacgcgtgtgctgtctgttttccgtaaagcgaacatcgacgagcaggcgctggcgagcgcgccggttatcattagcgaagatcgcgaagcgcagcttgctgcccgtctgctgcagtttgaagaaaccctgacggtggtcgcgcgtgaaggtacgccgcacgtcatgtgcgcatatctgtatgacgtcgccgggctgttctccggcttctacgagcactgccctattctcagcgccgagaatgacgcggttcgcaatagccgcctaaaactggcgcaactgacggcgaagacgctgaaactgggtctggatacgttgggtatcgaaaccgtagaacgcatgtaa

SEQ ID NO: 38945 - DNA, 792 bp, Salmonella typhimurium
atgcccgtttttgctttacttgcccttgtcgcctactccttcagcctcgcgctgatcgttcccggactgttgcaaaaaaacagcggctggcggcgtatggctattctttctgcggtcatcgcgctggtgtgccatgctgtcgcgctggaatcgcgtattctgcccggcggcgacagtggacaaaacctgagcctgctgaatgtcggttcgctggtcagcctgatgatctgcacggtgatgaccattgtcgcgtcgcgtaatcgcggctggctacttctgcctattgtctatgcttttgcgctgattaacctggccttcgccacgttcatgcctaatgaatatattacgcatctggaagcgaccccaggcatgatggtgcacatcggtctgtcgcttttctcttacgcgacgctgataatcgccgctctgtatgcgctacagctggcgtggatcgactatcagttgaagaacaaaaagctggcgtttagtaatgaaatgccgccattgatgagcattgagcgcaaaatgtttcatatcacgcagattggcgtcgtactgctgacccttactctgtgtaccggcctgttttacatgcataacctgttcagtactgaaaatattgataaagccgtgctctctatcgtggcatggtttgtctatatcgttctgctgtgggggcattaccatgaaggctggcggggtcggcgggtcgtgtggtttaacgtcgcaggcgcgggtattctgacgctggcctattttggtagccgcatattacagcaatttgtaagctaa

SEQ ID NO: 38946 - DNA, 1908 bp, Salmonella typhimurium
atgattgttttctcctcgttacaaattcgtcgcggcgtgcgcgtcctactggacaatgcctcggctaccattaatccaggccagaaagtcggcctggtgggtaaaaacggctgcggtaaatctaccctgctggcattgctaaaaaatgaaatcagcgccgatgccgggagttttaccctgcccggaacctggcaattagcgtgggtgaatcaggaaacacctgcgttgcctcagccagcgattgagtatgtcattgacggcgaccgtgaataccggcagctggaggcgcagcttaacgacgccaacgaacgtaacgacggacatgctatcgcctccatacatggcaagctggacgccatcgacgcatggaccgttcgttcgcgcgccgccagcctgctacacggtctcggcttctctaacgatcagctggaacgtccggtcagcgacttttccggcggctggcggatgcgccttaacctggcccaggcgctgatttgccgttccgatttactgctgctcgacgaaccgaccaaccacctcgatctggatgccgtcatctggctggaaaaatggctgaagagctatccgggcaccctgattctgatctcccacgatcgcgactttcttgacccgatagtggataaaattatccatatcgaacaacagactctgttcgagtacaccggcaactacagcgcgtttgaagttcagcgcgccacgcgcctggcgcaacagcaggcgatgtatgagagtcagcaggagcgtgtggcgcatctgcaaagctacatcgaccgtttccgcgctaaagcgaccaaggccaagcaggcgcaaagccgtatcaagatgctggagcgtatggagctgattgcgccggctcatgtcgacaacccgttccatttcagcttccgcgcgccggaaagcctgccgaacccgctgctgaagatggaaaaagtcagcgcaggttatggcgatcgcatcattctggaatccatcaagctgaacctggtgcccggctcgcgtatcggcctgctgggtcgcaacggcgcggggaaatcgacgctgatcaagctgctggcgggcgaactggaaccgttgcacggtgaaatcggcctcgccaaaggcattaagctcggctacttcgcccagcaccaactggagttcctgcgcgccgatgaatccccgctgcaacatatggcgcgtctggcgccgcaggaactggagcagaagctgcgcgactatctcggcggcttcggtttccagggcgacaaagtaacggaagagacgcaacgtttctccggcggcgagaaagcgcgcctggtactggcgctgatcgtctggcagcgtccaaatctgctgttgctcgatgaaccgaccaaccacctggatctcgacatgcgtcaggcgctcaccgaagcgctgattgatttcgaaggcgcattggtcgtcgtgtcgcacgaccgccacctgattcgctccaccactgacgacctctatctggttcacgacaaaaaggtcgaaccgttcgacggagacctggaagattatcagcaatggctgagcgacgtgcagaaacaggaaaaccaggccgacaacgcgccgaaggaaaacaacgccaacagcgctcagtcacgcaaagatcagaagcgtcgcgaagccgagctacgcactctgacgcaaccgctgcgtaaagagattacccgtctggaaaaagagatggaaaagctcaacgcccaactggcgcaggcggaagagaagcttggcgacagcagcctgtatgacccaagccgtaaagcggagatgaccgagtgtctgcaactgcaggccagcgccaaatccgggctggaagcgtgtgaaatggcatggcttgaggcgcaggagcagcttgagcagatgatgcagaacgactaa

SEQ ID NO: 38947 - DNA, 879 bp, Salmonella typhimurium
atgaataatcatttcaagtgtatcggcattgtggggcatccgcgtcatcccaccgcactcacgacacatgaaatgctctaccgttggctatgcgatcagggttatgaggtcattgtggagcaacaaatcgcccacgaattacagctaaaaaatgtgccaaccggcacgctggcggaaattggtcaacaggcggatctggcggtagttgtgggcggcgacggcaatatgcttggcgcagcgcgtacgctggcgcgttatgacatcaatgtgattggcattaaccgcggtaatcttggcttcctgaccgatctcgatccggacaacgccctgcaacaattatctgatgtgctggaagggcgctatatctccgaaaaacgttttctgctggaagcgcaggtctgccaacaggaccgccagaagcgtatcagcacagccattaatgaagtggtgctgcatccgggaaaagtggcgcatatgatcgaattcgaggtttatattgatgaaaccttcgctttttcacagcgatctgatggtctgatcatttctacgccgaccggctccaccgcctattcgctctccgcaggcggccctattctgaccccttcactggatgccatcaccctggtgccgatgttcccgcataccttgtcggcacgcccgttagtcattaacagcagtagcacgattcgtctgcgtttttcgcatcgccgtagcgatctggaaattagctgcgacagtcagatagcgctgcctattcaggaaggagaagatgtgctgattcgccgctgcgactaccatctcaacctgatacatcccaaagactatagctatttcaatacattaagcacaaaactcggctggtcaaaaaaattattctaa

SEQ ID NO: 38948 - DNA, 504 bp, Salmonella typhimurium
atggcagctgtaggaatggttcaaaagctcaacacgccaatgaaccttgagttttacgcatcaaatctttacctccatctaagcgaatggtgttctgaacacagtttaacaggcaccgccacctttcttcgtacccaggcgcaaggcaacgtgacgcaaatgatgcgcatgtttaattttatgaaaaacgccggcgccacccctatcgttaaagccattgacgttccgggtgaagagctctgctctctggaagaattgttccagaaaaccctggaggattatcagcaacgcgccagcacgctgtcgcgtctggcagatgaagcgaaagcgctgaatgatgcctcaacgcttgattttctccataccctggaaaaagagcagcagcaggatggcgtacttttacaaactattctcgaagaagttcgcagcgctaaacgagcagggctatgcctggcgcaaaccgatcagcatctccttaacgtcgtgacctatcagcatcactga

SEQ ID NO: 38949 - DNA, 336 bp, Salmonella typhimurium
atgaagcctcttatttttactctttcactgctagccctgacgggatgcaccattactcgacaagcgcaggtcagcgaagccagcccgataagcggcatcgtgcgcctgacgtataaccagccgctattttttacttcacggacagatgattatgtatctcacgggaccgcaacacgcgaatgccagcagatgggctatgccgatgccgtttcgtttggtcagccggtaggaacctgtagcatttatgcgggctcgttgtgtctgaacacccgatttaccctctcctggcagtgccggggcgttgccgtcccgcaaatcatgccgctttattattaa

SEQ ID NO: 38950 - DNA, 483 bp, Salmonella typhimurium
atgacgaagaaaaaagcacataaaccgggctcagccaccatcgcgctgaataagcgcgcccggcacgaatactttatcgaagaagagttcgaggctggtctcgccctgcaaggctgggaagtaaaatctctgcgcgcaggaaaagccaatatcggcgacagttacgttatcctcaaagatggcgaggcctggctgtttggcgcaaactttacgccgatggcggtcgcctcgacacatgttgtatgcgacccaacccgaacccgcaaactgttgttaaatcagcgtgagcttgattcgctgtatggccgtattaatcgtgaaggttatactgtcgtcgcgctttctctgtactggaaaaatgcctggtgcaaagtgaagatcggcgtggcgaaaggtaaaaaacaacatgataaacgttccgatcttaaagaacgtgagtggcaactggataaagcacgcattatgaaaaatgcaggccgataa

SEQ ID NO: 38951 - DNA, 2181 bp, Salmonella typhimurium
atgacccgcgccgcccccgatgtagaagaggtactcagtgagcgcgcgctaagccaatgggcgcaggccatcagctatgtcgccggtcattatcgcgttgcctgttctcccggttcaattcaggccaacgccccgtggcttaggggtaaaagcagaacgaccgccttaacgcagctcgcgcggcaggcgggtttatcctttcatgcgccggacatagacaaaacggcatttagtcagtggcgattgccgttggttgtcgagctccgggacgggcagttattggtcatcgaacatgttaatggcgaagaggcggtagacgtttttgtgattgaagaagagggtcagcgtaaccgcctgacgctcagcgagttattgccggagatcctctatgttgccgcgctacgcccgctatcggcgctcaaggatagccgcgtcgaccgctatatctcccgctttaaacccgactggatgcgcgagctggttctgcaggatattcgcccttatttaccggtaatggtcgccgcctttctgattaacgtgctgtcgctggccgggattgtgttctctatgcaggtttacgatcgggtgatccccgctcagtcatatcctaccctgtacgtgctctccttcggcgtgctggtagcggtgctgttcggttttctgctgcgtgaagcgcgtacgcacattatggacgtgctcggtaaacgcgccgatatgcgcatttccgatcgggtattcggtcacgcgttaaggctgcgcaacagcgctattccccgttccaccggcagttttatctcgcagttacgcgaactagagcagatccgcgagatgattacctcttcaacgctggcgaccattgtcgatctgcctttctttttcctgtttatgatagtcctggcgattattgccccaccgctggcatggatagcgcccgtggcggctctgctgatgatcctgccgggcgtcgcactgcaaaaaaaactggctgtcctcgccaaccaggccgcccacgaagcgacgctacgcaatgcagtcttggtcgaaagcgttcaggggctggaggatattaaactgatgcaggcggagaaccgctttcttcagcagtggaatagctatatccgtattaccggcgagtcgggtctacgcacccgcaaactcacgcaagggcttatcagttgggggatgtcggtacaaagtctggtgtatgccgcagtgattatgttcggcgcgccgatggttattgaaggcagtatgactaccggcgccgtggtcgccgcgtcgatgctcggctcgcggatgatcgcgccaatggctaacctgtgcggcgtgctggcgcgctggcagcaggtgaaagcggcgaagatgggtctcgacaacattatgcaactgcccaccgagacacagcatgacgatagcctgatacaccgcgacatcctccacgggcattacctctttgaaaacgctcagtttcgttaccataacgacgatcaacgcataccgttgcgcctcgtgcgtctggagatcatgccaggcgagcggattgcgatactggggcgtaacggtgcgggtaaatccacacttttacaggcgatggcgggcggcctggagatgattcagggagatgcccggcttgataatctcagcttgtcgcacatcgatatggcggatttacgccgcaacatcggctttcttagccagaacgcgcggcttttcttcggcaccctacgagagaacctgacgctcggcgcgccgcacgccaacgatgaacagatttttgacgcgctcgaagtcagcggcggcgccgtcttcgtcaggcggctggcaaaagggttggatcatcccattatggagggtggtaacggcctgtccggcgggcagcgtcagtccctgttgctggcgagaatgctgctgcgctcccccaatattgtgctacttgacgaacccagcgcctcgctggacgagcatacggaacgagagtttattcagcggttacatcagtggcttggcaatcgaaccctggtcgtcgcgacgcaccgggtaccaatactggagctggttgagcgtgtcgttgtcctgaaagaaggacaactggtgatggatgcgccaaaagcgcaggcgcttaacgcggatcggatgcaaagtcaccgtcgggagtggaaaaatgaaaatcaatcagcatga

SEQ ID NO: 38952 - DNA, 996 bp, Salmonella typhimurium
atgagtaatcttagcggtaccgataaaagcgtcattttgttgatgaccattggcgaagaccgggcggcagaggtgtttaaacacctctccacccgcgaagtacaggcgttaagtacggcgatggctaacgtgcgtcagatctccaacaaacaactgacggacgtactatcagagtttgagcaagaagcggagcagttcgccgcgctgaatatcaacgccaacgaatacctgcgctccgtactggttaaagcgctgggcgaagaacgcgcctccagcctgctggaagatattctggaaacgcgcgataccaccagcggtatcgaaacgctcaactttatggaaccgcagagtgccgccgacctgattcgcgacgaacacccgcagattatcgccaccattctggtccacctcaaacgcagtcaggccgccgatattctggcgctgtttgacgagcgtctgcgtcatgatgtgatgctgcgtatcgcgacatttggcggcgtacagccggcggcgctggcggagttgaccgaagtgctgaatggcctgctcgatggtcagaacctgaaacgcagcaaaatgggtggcgtaagaaccgcggcggaaattatcaacctgatgaaaacgcagcaggaagaagcggttattaccgctgtgcgcgaattcgacggcgaactggcgcagaaaatcatcgacgagatgttcctgttcgaaaatctggtggatgtggacgatcgcagtatccagcgtctgctgcaggaagtggattccgaatcgctgctgatcgctctgaaaggcgccgaaccgccattacgcgagaagttcctgcgcaatatgtcccagcgcgccgccgatatcctgcgcgacgaccttgccaaccgtggcccggttcgtctgtctcaggtggaaaacgagcagaaagcgattctgcttattgtgcgtcgtctggcggaaaccggcgaaatggtgattggcagcggcgaggatacctatgtctaa

SEQ ID NO: 38953 - DNA, 624 bp, Salmonella typhimurium
atgtcaacgattattatggatttgtgcagttacacccggctagggttaagcgggtatctggtcagcagaggggtgaaaaaaagggaaatcaacgacatcgaaaccgttgacgaactcgctatcgcttgtggcgcgcatcagccttcggtggtgtttattaatgaggactgtttcattcatacgccttcagacagtcaacaaataaagcaaatcattaatcaacatcctgacacgttatttattgtttttatggcaattgctaatgtgcattttgatgaatatttattagtaagaaaaaacttattgattagctcgaaatcgattaaacctgactcgctggatacccttcttggcgatattctgaaaaaagagtcgggtatttcaggaaccataaatttaccaacattatcgttaagtcgaactgaatccagcatgttgcgaatgtggatggaaggtcagggaaccattcagatttctgacagaatgaatattaaagcaaaaacagtatcctcccataaggggaatataaaaagaaagataaaaacgcataataaacaagtgatctatcacgtagtacggctgacagataacgtcactaacggcatttttgttaacatgcgctga

SEQ ID NO: 38954 - DNA, 1197 bp, Salmonella typhimurium
atgaacagaaaagttctggcactgcttgtcccggcgttattagtggcaggcgcagcaaatgcggctgaagtttataataaaaatggcaacaaactcgacctgtacggcaaagttgatggtctgcgttacttctctgacaatgcaggcgacgacggcgaccagtcctacgcccgttttggctttaaaggcgaaacgcagattaacgatatgctgaccggctatggtcagtgggaatacaacattaaggtaaacaccaccgaaggcgaaggtgcaaactcctggactcgtctgggctttgccggtctgaaattcggcgagtacggctctttcgattatggccgtaactatggtgttatctacgacattgaagcctggaccgatgcgctgccggaattcggcggtgacacttatacccagaccgatgtctatatgctgggcagaaccaacggcgttgctacctaccgtaataccgacttcttcggtctggtggaaggcctgaacttcgcgttgcagtaccagggtaataatgaagatcctggcgcaggcgaaggaacagccaacggcagcgatgcagatagtggtactcgcaaactggcccgtgaaaacggcgacggtttcggtatgtctacctcctacgactttgacttcgggttaagcctgggtgcggcctactcttcctctgaccgtacggacaatcaggttgctagtgggcgtggtgatggccatcattactatggcaatagctatgccggcggtgaaactgccgaagcctggaccgtaggtgtcaaatatgacgcctataacgtatacctggcggccatgtacgctgaaacccgcaacatgacctattatggcggcggcgatggcggtgatggcggtatcgctaacaaaacccagaactttgaagtggttgcacagtatcagttcgatttcggtctgcgtccgtccatcgcctacttgcagtctaagggcaaagatttaggcggccaggatatggatagccgtggtaactatcgttacaccgacaaagatctggttaaatatgttgacgttggtatgacttactacttcaacaaaaatatgtccacctacgttgattataaaatcaacctgctggacgaagatgatgacttctacgcaaacaacggtattgcaaccgatgatatcgtaggtgttggtctggtctaccagttctaa

SEQ ID NO: 38955 - DNA, 846 bp, Salmonella typhimurium
atgaataacttaccggtcgttcgctcgccctggcgcattctgattctggtgctggggtttacttttctctatgcgccgatgttaatgttggtgatttactcgtttaacagttcgaagctggtgacggtgtgggcgggatggtcgacgcgctggtatggcgagctctttcgggataccgccatgatgagcgcagtgggactaagcctgacaattgccgcctgtgcggcgacgatggcggtggtgctcggtaccattgctgcggtggtgatggtgcgatttggacggtttcgcggcgcaaacggctttgcgtttatgatcaccgcgccgctggtgatgccggatgtgattaccgggctgtcgctgctgctgctgtttgtcgcgctcggtcatgctatcggctggccctccgatcgcgggatgctgaccatctggttggcgcacgtcactttctgtactgcctacgtggcagtggtgatcgcttcgcgattacgcgaactggatcgttcgattgaagaggcggcgatggatcttggcgcggcgccgttaaaggtcttttttgtcattacgttaccgatgatcatgccagcggtgatctcgggctggctgttggcctttacgctttcccttgacgatctggtgattgccagcttcgtttccggtcccggcgccaccacgctaccgatgctggttttctccagcgtgcgcatgggcgtgaacccggaaatcaacgcgctggcgacgttaatcctcggcgtggtaggaatcgtcggatttattgcctggtacctgatggcgcgagcggaaaaacagcggattcgcgatatccagcgtgcaagacgcggctga

SEQ ID NO: 38956 - DNA, 474 bp, Salmonella typhimurium
ttgggatttataaagcaatcaacctcatcacatgcccgtttaaatgtgcctacgctggtgcaggttgcggctatggcgattattttgattcgcggtctcgatgtgctgatgattatgaataccctcggcatacgcgggatgggcgagtttattcatcgcagcgtgcagacgtggagcttaaccctggtctttctggccagcttagtgctggtctttgttgaaatttattgtgcgttttcgctggtgaaaggccgtagctgggcgcgctgggtgtacctggcgacacaaattattgtgagcggatatctgtgggcggcgtcgttaggctacgggtatcctgagttgtttagcatcgcgggagaatcgaagcgtgatatcctgcattccctggtcatgcaaaaactccccgatcttttaattctgtttctgctgtttattcccgctcccagccgtcggttcttccggctgcaataa

SEQ ID NO: 38957 - DNA, 486 bp, Salmonella typhimurium
atgaatctgttacctgtattgctgaaaaaatactggttgcaactctcagtgactttgctgattgctgcacttgcatggacaacagagcattaccgcgacaacgccattcagtataaatcgcagcgcgataccgccagccatcgcctgacgctggcgaacgcgacaattaccgacatgacgaagcgccagcgtgacattgccgccctcgatgccagatatacaaaggaactcgctgatgcgaaagctgagaatgatgctttgcgcgatgatgtcgccgctggccgtcgtcgcctgctcgtcaacgccacctgtcccgcaatgccgacaggtaaatccacctccgccgcccgcgtggataatgcagcccgccccagactggcagactccgctcaacgggattatttcaccctcaaagagcgagtgacaacaatgcaaaagcaactggaaggggcacaggactatatccggacacaatgtttgaagtga

SEQ ID NO: 38958 - DNA, 2373 bp, Salmonella typhimurium
atgccagtacttatttccggcgtactgaaagatggtacgggaatgccggtacagaactgcaccattcagctgaaggcctgccggaccagtacggcggtggtcgtgaatacggtggcatcggaaaatccggatgaagccgggcgttacagcatggatgtggagcaggggcagtacactgtcacactcctggtggaagggtatcccccttcacctgccggagttattacggtctacgttgattcaaaaccgggaaccctgaatgattttctgggggccatgacggaagacgacgtccgcccggaggctcttcggcgttttgaggcgatggtggaagaagttgcccgccaggcatcggaggcatcgcggaatgccaccgccgcagggcaggcatctgaacaggcgcagacatcagcaggtcaggcggcggaaagcgccacggcagcagctagtgcagccggagcggcagacgcatcagccacacaggcggcctcatccgcagcgtctgcggagagcagcgcaggtacggcgaccacaaaagccggggaggcatcagccagcgcggcgtcggctgacacagccagaacggcggcagccgcatcggaggccgcagcgaaaacatctgaagcgaatgcagatgcctcccgtactgccgccggagattcagctgctgccgcagccgccagcgcgacggcggcgcagacatcagcagagcgcgccggagcatccgaaaccgccgcgaagacgtcagaaacgcaggcggcttccagtgccggtgatgcaggtgcgtcagccactgcggcggcagcgtcggaaaaggcggcagccgcatcggcagccgaagcaaaaacatctgagacaaacgcagcaacgtcagcaagtacagcagcggccagcgcaacagccgcctcgtcatcagcatcggaggcatccacccacgccgccgcatctgataccagcgcatcactggcagcgcaaagcagagctgctgccggagaatcggcaaccagagccgaagaggccgcgaaacgggccgaagatattgcggacgtgatttccctggaagatgccagcctgacgaaaaaaggcatcgttcagttgagcagcgccacggacagtgacagcgaagcgctggcgtccacaccaaaagcggtaaaaaccgttatgggtgaggtacagaccaaagccccgctggacagtccggcgctgaccggtacgccaacggcaccaacgccggaaaccacagctgcaggtattgaaattgccacggcagcgtttgtggctgcgaaagtggcacagttggttggttctgcgccggaagcgctggacacgctgaaagaactggctgacgcgctgggtaacgatcctaattttgctaccacggtactgaataaactggcgggcaagcagccgctggacgatacactgacggcgctgtcaggaaaaagcgttgacggtcttatcgaatacattggtttaaggaacacaattgacaaggctgccggtgctttgcccgctggtggtacagctgttgcggcaaacagactggtgtcacgcggcgcacttccggcactgactggtacgacaagaggcagtgatagcggcctgataatgggcgaggtctacaacaatggctatccgacgcaatacggaaatattttacgtctgaccggaaccggtgatggggaaatcctcattggctggagcggggcaaacggtgcgccagcgcccgcatatattcgcagccatcgtgataccgccgacgctgagtggtccgaatgggcaatgctctacaccacactaaacccacctccggattcgcatccagtaggggcggcgattgcatggccatctgatgctactccggcaggttacgctctgatgcaggggcaatcgtttgataaatctgcttacccgttactggctatagcgtatccgtccggcgttattcctgacatgcgaggctggacaatcaaaggtaaacccgccagcggtcgcgcagtgttgtcacaggaaatggacggcaacaaatcgcactcgcacacggcgcgggcacaggataccgacttagggacaaaaaccacctcatcatttgattacggcacgaaatcgaccaatacaacgggcggccatacacatgagtttggcggttatatcaattcatactggggagactcaaatcacacctcatttcagcctggaggtggtgcgtggacacaggccgctggcgaccatgcgcatacagtttatatcggaggacacgagcacaccatgtatatcggcccacacggacacgtcgttattgtggacgcagatggtaatgcggaaaccacggttaaaaacattgcatttaactacatagtgaggctggcataa

SEQ ID NO: 38959 - DNA, 924 bp, Salmonella typhimurium
gtgagaacattacggattggcattgtcgggttaggcggtattgcgcagaaggcctggctgccggtattaaccaacaccgccggatggacgttacagggcgcctggtctccttcgcgggataaagccttacgtatttgcgaaagctggcgcataccgtatgtggattcgctggcgaatttagcgtccagctgcgatgcggtctttgtccactccagtaccgcaagccattatgccgtggtcagcgaacttctcaatgccggcgtccatgtctgcgtggataaaccgctggcggaaaatctacgtgatgccgaacggctggtggcgctggcggcgcaaaaaaaattgacgctgatggttggctttaatcgccgtttcgcgccgctgtaccgcgaactgaagacgcgcctcggcactgcggcgtcactacgtatggataaacatcgtaccgatagcgtcgggccgcacgacttacgttttactttgctcgatgactatctgcatgtcgtggataccgctctgtggctggcgggcggcgaggcgcgccttgccagcggcacgttgctcaccagcgagtccggcgaaatgtgctatgcggaacatcatttttccgccgacaaactacaaattaccaccagtatgcaccggcgcgccggaagtcagcgtgaatcggtccaggccgtcaccgacggcgggctatatgacgtgacggatatgcgtgaatggcgcgaagagcgcgggcagggtattctcatcaaacccattcctagttggcaaacgacgcttgaacagcgtggttttgtcggatgcgcgcggcatttcattgactgcgtacaaaatcagacggttccggaaacggcgggggagcaggcgattttggcccagcgcgtcgtggaggcgctgtggcgggacgccatcagcgaataa

SEQ ID NO: 38960 - DNA, 1659 bp, Salmonella typhimurium
atgattctcgaacgcgttgaaatagtaggatttcgcggtatcaaccgactgtcgttgatgctggagcaaaacaacgtgctgattggggaaaacgcctggggcaaatccagcctgctggatgcgctgactctgttattgtcgccagaactcgatctctaccattttgtccgtgaggatttctggtttccgcctggcgacataaaaggacgcgagcatcacctgcatattattctgacttttcgcgaaacgcagccagggcggcatcgggtacgtcgttatagagcgctggaagcatgctggtcgctttgcgaggatgattttcaccgtattttttatcggctagagggcgaatgcggcgccgatggcagcgtgatgacgctgcgcagttttctcaatagcgatgggcagccattactggtggaaaatattaacgatcaggtgcgccacctggttcgtctgatgccagtgctacgtttgcgcgatgcgcgctttatgcgacgtattcgcaacggtacggtgcccaatgtgccggatgttgaagtcacggcccgacagctggattttctggcgcgtgagctggcgacccggccgcaaaatttaaccgacgggcagattcgtcagggactgtccgcgatggtgcaactgcttgaacactatttctcagagcagggcgcaggacaggcgcgtcaccgactcatgcgccggcgttcgcaaaatgagcagcgtacgtggcgctatctggatattattaatcggatgatcgacaaaccgggcagccggtcgcatcgggtgatcctgctggggcttttctccacgctgttacaggcgaaagggacgctgcggttacataaagacgcacgaccattactgctggtggaagatccggaaacccgtttacatcccattatgctttcagtcgcctggcaattgctcaatctgttaccgctacagcggatagcgacaaccaactcaggcgaactgctttcgctaacgccggtggaacatgtcgtacggctggtgcgcgaatcttcccgcgtcgccgcctggcgtctgggcccgggcgggttaagcgcggaagatggacggcgcatcgcctttcatatccgctttaatcgcgcgtcgtcgctgtttgcgcgttgctggctactggtggaaggcgagacggaaacctgggttattaatgagctggcgcgtcagtgtggacatcattttgatgcggagggcattaaagtcattgagtttgctcagtctggcctgaaaccgctggtgaagttcgcccgccgtatgggaatcgagtggcatgtcctggtggatggcgacgaagcggggaaaaaatatgccgcgacggtccgcagtctgcttaataacgatcgggaagaagaacgcgaacatctcacggcgttgcctgcgctggatatggaacattttatgtatcgtcagggctttgccgatgtttttcaccgggttgcgcaacttccgcctaatgtgccgatgaatacccggaaaattatcactaaagctatccaccgctcgtcaaagccggatttggcgattgaagtcgcgatggaagccgggcggcgcggaattgacgccgtgccgccgctgttcagaaagatgttctcgcgcgtggtttggctggcgcggggccgggcggattag

SEQ ID NO: 38961 - DNA, 699 bp, Salmonella typhimurium
atgtctattgccgtaaatatgaatgacccgaccaacacgggcgtcaaaacgacgaccggcagcggatcgatgaccggaagcaacgctgccgatctgcaaagcagtttcctgaccttactggtcgcgcaattgaagaaccaggacccgactaacccattacaaaataatgagttaacgacacagttggcgcaaatcagtaccgtgagcggcattgaaaaactgaatacgacgctgggggctatttccgggcaaatcgataatagtcagtccctacaggcgaccacgctgattggacatggcgttatggtgcctggcaccacaattctggcgggtaaaggcgcggaagaaggggccgtgacgtccacgacgccgtttggcgtggaattgcaacagcctgcggacaaagtgacggcaaccattaccgataaagatggccgggtggtacggacgctggagatcggtgagttgcgagccggggtacacacctttacctgggatggtaagcaaacggacggaacaacggtaccgaatggttcttacaacattgcgattaccgccagcaatggcgggacgcaactggtggcgcagccgctgcaattcgctctggtacagggcgtgacgaagggcagtaacggcaacctgttggatctgggtacctacggcaccaccacactcgacgaagttcggcaaataatctaa

SEQ ID NO: 38962 - DNA, 2277 bp, Salmonella typhimurium
atgctcaatcaagaactggaactcagtttaaacatggctttcgccagagcgcgcgagcaccgtcatgagtttatgaccgtcgagcatctgttgctggcgctgctcagcaacccatcggctcgcgaagcgctggaagcatgctccgtggatctggtggcgctccgtcaggaactcgaagccttcattgaacaaaccacacccgtactgcctgccagtgaagaagagcgtgatacgcagccgacgttaagtttccagcgtgtcctgcaacgtgccgtcttccacgttcagtcttccgggcgtagtgaagtgactggcgcgaatgtgctggtggctatctttagcgaacaggaatcacaggcggcttatctgctgcgcaagcatgaagtgagccgtctggatatcgtgaactttatttctcacgggacgcgaaaagacgaaccgagccaatcttccgatctcggcaatcagccaactggcgacgaacaagctggcggggaggaacgtatggaaaacttcacgacgaatcttaaccaacttgctcgcgtgggcggcatcgatccgctgattggtcgtgaaaaagaactggaacgcgcgatccaggtcttgtgtcgtcgccgtaaaaataacccgttgctggtaggggaatccggcgtcggcaaaacggcgattgccgaagggctggcctggcgtatcgtgcagggcgatgtgccggaagtgatggccgattgcaccatttactcgctggatatcggttcgctgctggcgggcaccaaataccgcggcgattttgaaaaacggtttaaggcgttgctgaaacagcttgagcaggataccaacagcatcctgtttatcgatgaaatccataccattatcggcgctggcgcggcgtcgggcggacaggtggatgcggcaaatctgattaaaccgctgctttccagcggtaagatccgggtgatcggctcaacgacctatcaggaattcagcaatatttttgagaaagaccgggcattagcgcgccgtttccagaaaattgatattaccgagccttcggtggaagagacggtgcaaattatcaacggcttgaaacctaagtacgaagcgcaccacgacgtgcgttataccgcgaaagcggtgcgtgcggcggtcgagctggcggtaaaatatatcaatgaccgccatctgccggataaagccattgacgtgattgacgaagcgggcgctcgggcgcgtctgatgccggtgagcaaacgtaagaaaacggtcaacgtggcggatattgagtccgtagtggcgcgaattgcgcgaattcctgaaaagagcgtctcgcagagcgatcgcgatacgctgaagaacctgggcgatcgtctgaaaatgctggtcttcggccaggataacgcgattgaggcgctgaccgaagctattaagatgagtcgtgcgggtctgggccatgagcataaacctgtcggctcattcttgttcgccgggccaactggcgtagggaaaactgaagttacggtacagctttcaaaagcgctgggtattgagctgttgcgcttcgatatgtctgaatatatggagcgtcatacggtgagccgtttgatcggcgcacctccgggatacgtcggtttcgaccagggcgggctgctgacggatgcggtgattaagcatcctcatgcggtgctgttgctggatgagatcgaaaaagcgcacccggatgtctttaacctgctgctgcaggtgatggataacggtacgctgaccgataacaacggccgcaaggcggatttccgcaacgtggtgctggtgatgaccaccaacgctggcgtgcgagaaaccgaacgtaaatctattggtcttattcatcaggacaacagtaccgatgcgatgggcgagatcaagaaagtgtttacgccggagttccgtaaccgtctcgacaacattatttggttcgatcatctgtctggcgaggtgattcatcaggttgtcgataagtttatcgtcgagttgcaggctcagttggatcagaaaggcgtctctctggaagtcagtcaggaagcgcgcgactggctggcggaaaagggctatgaccgggcgatgggcgcacgaccaatggcgcgtgtgattcaggataacctgaaaaaaccgctggccaatgagttgttgtttggatcgctggttgacggcggacaggtcaccgtcgcgctggataaagagaaaaatgcgttgacgtatgacttccagagtgcgcaaaagcacaagccggaagccgcgcactaa

SEQ ID NO: 38963 - DNA, 4056 bp, Salmonella typhimurium
ttgagccaggaatatactgaagacaaagacgtcacattgacgaagttaagcagcgggcgccgacttttggaagcgttgttgatacttattgccctttttgccgtctggttgatggcggccttgttgagctttaacccttcggaccccagttggtcgcaaaccgcctggcatgaacccatccataatttaggcggcgcgccgggcgcgtggctggccgatacactgttctttatttttggcgtaatggcctacaccatccctgtcattattgtcggcgggtgttggtttgcgtggcgtcatcagtctacggatgattacatcgactattttgctgtgtcgctacgccttatcggcgtgctggcgctgattctcacttcctgcggtctggcggccattaatgccgacgatatctggtatttcgcctccggcggcgtaattggcagcctgttaagcaccacgctgcagccgttgttgcatagtagcggcggaacgataatgcttctctgtatttgggctgccgggctgacgctctttaccggctggtcctgggtcagtatcgccgaaaaattaggcggctggctgcttaatatactgaccttcgccagcaaccgtacccggcgtgatgatacgtgggttgacgacgaagagtatgatgacgaatacgatgaagaaaccgacggcgtgcagcgtgaatctcgccgggcgcgtattttgcgcggcgcgttggcgcgtcgtaagcgactggctgaaaaattcagcaatccacggggccgtcagaccgatgccgcgctcttttccggcaaacggatggatgatgacgaggacattcagtatagcgcgcgcggcgtcgctgccgatcccgacgacgttctgttttcgggcaaccgtgcgacgcagccggaatatgatgaatatgatccgctgttaaacggccattctgtcaccgaaccggtcgccgccgctgcggctgcaactgccgtcacccagacgtgggcagcgtccgccgatcccataatgcaaacgccgcccatgcctggggctgagccggttgtcgcgcaaccgaccgtggagtggcagcccgtaccggggccgcaaaccggcgaaccggttatcgcgcctgcgccggaggggtatcagccgcatccgcaatatgctcaaccgcaggaggcgcaaagtgcgccgtggcagcaacctgtgcctgtcgcttccgcgccgcaatacgccgcgacgccagcgaccgcagcagaatatgactctcttgcgccgcaggaaacacagccgcaatggcagccggagccgacccatcagccgacgccggtttatcagccggagccgatagcggctgaaccttctcacatgccgccgccggttatcgaacagccggttgccaccgagcctgaacctgacacagaagagaccagacctgcccgtcctccgctttactattttgaagaggtggaagagaaacgcgcccgtgagcgcgaacaactggcggcatggtatcaaccgattccggagccggtaaaagagaacgtgccggtcaaacctacggtatctgtcgcgccgtccataccgccagtggaagcggtagccgccgccgcgtcgcttgacgcaggtattaagagtggcgccctggcagcaggcgccgcggccgctgcgcctgcatttagtctggctaccggcggcgcgccgcgtccgcaggtgaaagaggggattggtccgcaactgccgcgtccgaaccgcgttcgcgtgccgacccgacgggaactggcatcgtacggtattaagctgccgtcacagaggattgcagaagaaaaagcccgcgaggcggagcgcaatcagtacgagacgggcgcgcagctaaccgatgaagaaatagatgcaatgcatcaggacgagttagcccgtcagtttgcgcagtcgcagcagcatcgttatggtgagacgtatcagcatgatacgcaacaggcagaagatgacgataccgctgcggaagctgaattagcccgccagtttgccgcttcgcaacagcagcgctattccggcgagcaacccgctggcgcgcagccgttctcactggacgatctggatttctcgccaatgaaagtattggttgatgaaggtccgcacgaaccgctgttcacgccgggtgtcatgcccgagtcaacgcctgttcagcaaccggtagcgccgcagcctcagccacagtaccagcagccgcaacagccggtagcgccgcaaccgcagtatcagcagccgcagcagccggtagcgccgcagccgcagtatcagcagccgcaacagccggtagcgcctcagccgcagtatcagcagccgcaacagccggtagcgccgcagccgcagtatcagcagccgcaacagccggtagcgccgcagccgcagtatcagcagccgcagcagccggtagcgccgcagccacagtatcagcagccgcagcagccggtagcgccgcagccacagtatcagcagccgcaacagccgacagcgccgcaagacagcttgatccacccgctgttgatgcgtaacggcgacagccgtccattacagcgtccgacgacgccgctgccttcgttagatcttctgacaccgccgccgagcgaagttgaaccggtagatacctttgcgctggaacaaatggcgcgtctggttgaagcgcgtctggcggatttccgcattaaagctgatgtggtgaactattcgccaggcccggtcattactcgttttgaactgaatctggccccgggcgttaaagcagcgcgtatctccaacctttcccgggatctggcgcgctcattgtcaacggtagccgtacgcgttgtggaagtcattccaggcaaaccttacgtagggttggaattgccgaacaagaaacggcaaaccgtttatctgcgcgaagtgttggataacgccaaattccgcgagaatccgtcgccgcttaccgtggtgttaggtaaggatatcgcgggcgatccggtagtggcggatctggcgaaaatgcctcacctgctggtggccggtacgaccggttccggtaagtcggtcggggttaacgccatgatcctcagtatgctgtataaagcgcagccggaagacgttcgctttatcatgatcgacccgaaaatgttagaactctcggtctatgaaggtataccgcatctgctgacggaagttgttaccgacatgaaagacgcggctaacgcgttacgctggagcgtcaatgagatggagcgtcgctataagctgatgtccgcgctcggcgtgcgtaatctggctggttataacgagaaaatcgccgaagcggcccgcatgggacgtccgattccggacccgtactggaagccgggcgacagtatggatgttcagcatccggttctggaaaaactgccgtatatcgtggtactggttgatgaatttgccgacctgatgatgaccgttggtaaaaaagttgaagagctgatcgcgcgtctggcgcagaaagcgcgcgccgcggggattcacctggtactggcgacgcagcgtccgtcggtcgatgtgattactggtttaattaaagccaacattccaacccgtatcgcttttaccgtatccagcaagatcgactcccgcaccattcttgatcagggtggcgctgagtcgctgctaggtatgggggacatgctctactccggaccaaactccaccatgccggtacgtgtccatggggcgtttgtgcgtgaccaggaagtccatgcggtggttcaggactggaaagcgcgcggtcgtccgcaatatgtggatggcattacctccgacagcgaaagcgaaggtggcggtggcggttttgacggcggcgaagaattagatgcgctattcgatcaggccgttaatttcgtcactcagaagcgaaaagcgtccatttccggcgttcagcgtcagttccgcatcggctataaccgtgcggcgcgtattatcgaacagatggaagcgcagggtattgtcagcgctcaggggcataacggtaatcgtgaagtgctggctccgccgccttttgagtaa

SEQ ID NO: 38964 - DNA, 1344 bp, Salmonella typhimurium
gtgagcaatctgtcgctcgatttttctgataatacgtttcaaccgctggccgcgcgaatgcggccggaaaatttagcgcagtatatcggccagcagcatttgctggccgcaggtaagccgttgcctcgcgctattgaggccgggcatctgcactccatgattttatgggggccgccagggacggggaaaaccacgctcgctgaagtgatcgcccgctacgccagcgccgatgtcgagcgtatttccgccgtcacttctggggtaaaagagattcgcgaagctatcgagcgcgcccgccagaatcgtaatgccggtcgccgtaccatcctgtttgtcgatgaagtgcatcgctttaacaaaagccagcaggacgcctttttaccgcatatcgaagatggcactatcacctttatcggcgcgaccacggaaaatccctcttttgagctgaactcagcgctcttgtcgcgagcgcgggtctatctgctgaaatcgttgaccactgacgatattgagcaagtactggaccaggcgatgcaggacaaaacgcgtggttacggcgatcaggatatcgtgttaccggatgagacacggcgagcgattgctgagctggtcaatggcgacgcgcggcgcgccttaaatacgctggaaatgatggctgatatggcggaggcggatgacagcggcaaacgcgttttattgcccgccttgttgaccgagatcgccggcgagcgcagcgcgcgttttgataacaaaggcgatcgcttctacgatcttatttccgccttacataaatcagtgcgcggcagcgcgccggatgccgccctctattggtatgcccgtatcattactgcgggaggcgatccgctgtacgtggcgcgtcgctgcctggcgattgcctcggaagatgtgggtaatgccgatccgcgcgcgatgcaggtcgccattgccgcgtgggattgtttcacccgcgttggcccggctgaaggcgaaagggcgatcgcgcaggctatcgtttatctcgcctgcgcaccgaagagcaacgccgtctataccgcctttaaggctgcgctggccgacgcgcgcgaacgtcctgattatgacgttcctgtccatctgcgtaatgcgccaaccaaactgatgaaagagatgggctatggccaggagtaccgctatgcccacgatgagcccaatgcctatgctgcgggtgaagtgtacttcccgccggaaatcgcgcaaacgcgctattatcatccgacaaatcgtggtctggaaggcaagattggcgaaaagctcgcctggctggctgaacaggatcaaaatagccccacaaaacgctaccgctag

SEQ ID NO: 38965 - DNA, 954 bp, Salmonella typhimurium
atgtatacgaagattattggtactggcagctatctgcccgaacaagtgcggactaacgccgatctggaaaaaatggttgagacctctgacgagtggattgtcactcgtacaggtattcgtaaacgccatatcgccgcgccgaatgaaactgtcgcgacgatgggctttaccgctgcgaatcgcgcgattgagatggcggggatcgataaagaccaaattggcttgattgtggtggctaccacatcagcaacgcatgcatttccaagcgcggcatgtcagattcaaagtatgctcggtattaaaggttgcccggcgtttgatgtcgcggcagcgtgcgcaggtttcacctacgcgttaagcatcgccgaccagtacgttaaatccggcgcggttaaacacgcgctggtggtcggttccgatgtattagcccgcacttgcgatcctggcgatcgcggtacgatcattattttcggcgatggcgcaggcgcggccgtactgagcgcttctgaagaaccgggtattatctccactcatcttcatgccgatggccgttacggtgaattactgaccctgccgaatgccgatcgcgtaaatccggataacccgatttacctgacaatggcgggcaatgaagtctttaaagtggcggtcactgaactggcgcatattgtcgatgagacgctggcggctaataacctggatcgctcagaactcgattggctggtgccgcatcaggctaacctgcgtatcattagcgcgacagcgaaaaaactcggcatgtcgatggacaatgtcgtcgtcacgctggacaggcacggcaatacctccgcggcttctgtgccgtgcgcgctggatgaagccgtgcgtgacgggcgaattaaagccggtcagctggtattgcttgaagccttcgggggtggattcacctggggctccgcgctgattcgtttctag

SEQ ID NO: 38966 - DNA, 1293 bp, Salmonella typhimurium
atgctcgatcccaatctgctgcgtaatgagccagacgcagtcgctgaaaaactggcacgccggggctttaagctggatgtagataagctgcgcgctcttgaagagcgtcgtaaagttttgcaggtcaacacggaaaacctgcaggcggagcgtaattctcgatcgaaatccatcggccaggcgaaagcgcgcggggaagatatcgagcctttacgcctggaagtgaataaactgggcgaagagctggatgcggcgaaagccgagctggataccttgctggcggagatccgcgatatcgcactgaccatcccaaacctgcctgcggatgaagtgccggtaggtaaagatgaaaacgacaacgttgaagtcagccgctggggtaccccgcgtgagtttgattttgaaatccgcgatcacgtcaccttaggggaaatgcactccggcctcgactttgccgccgcggttaagctgaccggctcccgttttgtggtgatgaaaggacagattgcgcgtatgcatcgcgcattgtcgcagttcatgttggatctgcatacggaacagcacggctatagcgaaaactacgtgccgtatctggttaaccacgacacgctgtatggcaccggtcaattgccgaaattcgcaggcgacttgttccatacccgtccgctggaagaagaagcagacagcagcaactatgctttgatcccgacggcggaggttccgctgaccaatctggtacgcgatgaaatcatcgacgaagatcagctgccgattaaaatgacggcgcatacgccttgtttccgttctgaagcaggttcttatggtcgtgatacccgtggcctgattcgtatgcatcagtttgacaaagttgagatggtgcagatcgttcgcccggaagattctatggctgcgttggaagagatgaccggccacgcggaaaaagtgctccagctactgggactgccgtaccgtaaaatcattctgtgcactggcgatatgggcttcggcgcctgcaaaacctatgacctcgaagtctgggttccggcgcagaatacctaccgcgagatctcttcctgctctaacgtctgggacttccaggcgcgtcgtatgcaggcacgttgtcgcagcaagtccgacaaaaagacccgtctggtccataccctgaatggttctggtctggcggtaggtcgtaccctggtggctgtgatggaaaactatcagcaggctgatggccgcattgaagtgccggaagtattacgtccgtacatgaacggactggaatatatcggctaa

SEQ ID NO: 38967 - DNA, 930 bp, Salmonella typhimurium
atgacgcaatttgcatttgtgttccccggtcagggttctcagagcgttgggatgttggccgagatggcggcaaattaccctatcgtagaagaaacgtttgctgaagcttctgcggctctgggatatgatctgtgggcgctcacccagcaaggtccagcggaagaactgaataaaacctggcagacgcagccggcgttattaaccgcttccgtcgcgctttggcgcgtttggcagcagcagggcggtaaaatgcctgcgttaatggcaggtcacagcctgggcgaatattccgcgctggtttgcgctggcgtcatcaactttgctgatgccgttcgtctggtggaaatgcgcggtaaattcatgcaggaagcggttccggaaggcactggcggcatgtctgcgatcatcgggctggatgatgcctctattgctaaagcctgtgaagaatctgccgaagggcaggttgtttcgccggttaactttaactcgccgggacaggtggttatcgccgggcataaagaggcggtagaacgtgcgggcgcagcctgtaaagccgctggcgcgaaacgcgcgctgccgctgccggtgagcgtaccgtcgcactgcgcgctgatgaaaccagcggcagataagctggcggttgaattagccaaaattacctttagcgcgccaacggtgccggtagtgaacaacgttgacgtgaaatgtgaaaccgatgccgccgctatccgcgatgcgctggttcgccagttgtacaatccggtacagtggacgaagagcgtggaatttatcgcggcgcagggcgttgaacatctttatgaagtgggtccaggtaaagtcctcactggtctgacgaaacgtattgtcgacaccctgacagcgtcggcgctgaacgagccggcggcgctgtctgcggcacttacgcaataa

SEQ ID NO: 38968 - DNA, 735 bp, Salmonella typhimurium
atgagctttgaaggaaagattgcgctggtgactggtgcaagccgtggcataggccgcgcaattgcagagactctcgttgcccgcggcgcgaaagttatcgggactgcgaccagtgaaaatggtgcgaagaacattagcgactatttaggtgctaacgggaaaggtttgatgttgaatgtgaccgatcctgcatctattgaatctgttctggaaaatattcgcgcagaatttggtgaagtggatatcctggttaataatgccggtatcactcgtgataatctgttgatgcgaatgaaagatgatgagtggaacgatattatcgaaaccaacttatcatccgttttccgcctgtcaaaagcggtaatgcgcgctatgatgaaaaagcgttgtggtcgcattatcactattggttctgtggttggtaccatgggaaatgcaggtcaggcaaactacgctgcggcgaaagcgggcctgatcggtttcagtaaatcactggcgcgtgaagttgcgtcccgtggtattactgtcaatgttgtggctccgggttttattgaaacggacatgacgcgtgcgctgtctgacgatcagcgtgcgggtatcctggcgcaggtgcctgcgggtcgcctcggcggcgctcaggaaatcgccagtgcggttgcatttttagcctctgacgaagcgagttacatcactggtgagactctgcacgtcaacggcggaatgtacatggtttaa

SEQ ID NO: 38969 - DNA, 237 bp, Salmonella typhimurium
atgagcactatcgaagaacgcgttaagaaaattatcggcgaacagctgggcgttaagcaggaagaagtaaccaacaatgcttctttcgttgaagacctgggcgcagattctcttgacaccgttgagctggtaatggctctggaagaagagtttgatactgagattccggacgaagaagctgagaaaatcaccaccgttcaggctgccattgattacatcaacggccaccaggcgtaa

SEQ ID NO: 38970 - DNA, 1242 bp, Salmonella typhimurium
gtgtctaagcgtcgtgtagttgtgaccggactgggcatgttgtctcctgtcggcaataccgtagagtctacctggaaagctctccttgccggtcagagtggcatcagcctgatcgaccatttcgatactagcgcctatgcaacgaaatttgctggcttagtaaaggattttaactgtgatgacattatctcgcgcaaagaacagcgcaagatggatgccttcattcaatatggaattgtcgctggcgtacaggccatgcaggattctggccttgaagtgacggaagagaacgcaagccgtattggcgccgctatcggctccggtatcggtggtctcggtctgatcgaagaaaaccacagttcgctggtaaaaggcggaccgcgtaagattagcccgttctttgtcccgtcgacgattgttaacatggtagcaggccatctgactatcatgtatggcctgcgtgggccaagcatctctattgcgactgcctgtacttcaggcgtgcataacatcggccatgccgcgcgtatcatcgcctatggcgatgcggacgcgatggtggcaggtggcgcagaaaaagccagtacgccgctgggtgtaggtggttttggcgcagcgcgcgcgctgtcgacccgcaacgataacccacaggcggcgagccgtccgtgggataaagaacgcgatggttttgtactgggcgacggtgccggtatgttggtgcttgaagagtacgaacatgcaaaagcgcgtggtgcgaaaatctatgccgaaatcgtcggctttggtatgagcagcgatgcttaccatatgacgtcgccgccggaaaatggcgcaggcgctgcgctggcgatggttaacgcgttgcgtgatgccgcgattgagcctgctcagattggctacgtcaacgcgcacggcacgtcgacgcctgccggcgacaaagctgagacgcaggcggttaagtcagtctttggcgatgctgcaagccgagtgatggtgagctcgaccaaatcgatgaccggccatctgttgggcgccgcaggcgcagtagagtctattttctctattctggcgctgcgcgatcaggccattccgccaaccattaatctggataacccggatgaaggttgcgatctggacttcgtgccgcatgaagcgcgccaggtcagcgatctggagtacgctctgtgcaactcctttggttttggcggaactaacggttccttgatctttaaaaagatctaa

SEQ ID NO: 38971 - DNA, 810 bp, Salmonella typhimurium
atgtttttaattaatggccatgcgcaggatcaacttgctgtaagcgaccgggcgacgcagttcggcgatggcagttttacgaccgcacgtattgttgatggcaacatttgccatctggaagcgcatcttcagcgcttgcaggttgcctgtgaaaaattacggatcgcttttagccattggtcgacccttcggcaagagatgacaatgttggccacagggcatgattcaggcgtgttgaaagtgatcattagccgtggtagcggcggccggggatacagcgccatgaattgtcaggcagctacccgaatcctctccgtttctgcttatcccgcttattattctcagtggcgtaagcaaggcatcactcttacccttagtcccataccgcttgggcgcaatccttatcttgccggattaaaacatctgaaccgcctcgaacaggtgttgattcgctctcatcttgagcagacggacgccgatgaggcgctggttcttgacagcgagggatgggttacggaatgctgtgcggctaatttgttctggcgtacaggcgacattgtttttacgccgcgtctggatcaggccggggtgaacggcattatgcgacaattttgtttacgccaactggcgcaatctcctttccaggttcttgaagtacaggcgagagaggaggcagtcaggcaggcggatgagattatcatctgcaacgcgctaatgccgattattcccatacgcgcctatcacgggacgtcgtattcttcgcgaacactgtttcaatttttagccccattttgtgagcatccgaattag

SEQ ID NO: 38972 - DNA, 642 bp, Salmonella typhimurium
atgggcagtaattatatcgtcatcgagggcctggaaggcgccggaaaaaccactgcgcgcgacgtggtggtggagacccttgagcaactgggtattcgtaatatgatttttacccgtgagccgggcggtacgcagcttgccgaaaaactaagaagtctggtgctggatattcgatcggtaggcgacgaagtgattaccgataaagcggaagtgctgatgttttatgccgctcgcgtacagctcgtcgaaacggtaatcaaacccgcgctggcgcaaggcgtatgggtgatcggcgatcgccacgatctctcgacccaggcgtatcaggggggagggcgcggcattgatcaaaccatgctggcgacactacgcgatgccgtgctgggcgattttcgtcctgacctgacgctgtatctggatgtcacgccggaagtcgggctaaaacgcgccagagcgcgcggcgatttggatcgcattgagcaggaatcttttgatttctttaaccggactcgcgcgcgctatctggaactggcggcgcaagactcgcgtatccgcaccattgacgcgacccagccgctggatgccgtcatgcgcgacattcgcgccacggtgacgaagtgggtgcaggagcaagcggcatga

SEQ ID NO: 38973 - DNA, 798 bp, Salmonella typhimurium
atgtttttagtcgactcacactgccatcttgatggtctggattatcaatctttgcataaggacgtggacgatgtgctggcgaaagccgccgcgcgcgatgtgaagttctgtttagcggtggcgacgacgctgccggggtatcgccatatgcgcaagctggtgggcaagcgcgataatgtggtcttttcctgcggcgtgcatccgttaaatcaggatgaagcatatgacgtagaagaactgcgcctccttgctgcagaagacgatgtggtggcgatgggcgagaccgggcttgattacttttacacgcctgagaccaaaatccgccagcaggcgtcttttattcatcatatccagattggccgcgaattgcataaaccggtgattgtccatactcgcgacgcgcgtgccgatacgctggctatcctgcgcgaagaaaaagtgacggattgcggcggcgtactacactgttttacagaagacagagaaacggccggcaaattgttggatctggggttttatatctctttttccggcatcgtaacgttccgtaacgctgaacagttgcgtgatgcggcgcgctatgtgccgctggatcgattattagtcgagaccgattctccttatctggcaccggtgccgcatcgcggtaaagagaaccagcctgcgatggtacgcgacgtcgcagaatatatggcggtattgaaaggggttgccgttgaagaactggcgcagatcaccaccgataactttgctcgcctgttccatattgacgcgtctcgcctgtcatcaatccgttaa

SEQ ID NO: 38974 - DNA, 1026 bp, Salmonella typhimurium
gtgggcccagtaatgttgaatgtcgaaggatgtgagctggatgcggaggagcgcgagatactggcgcatccgctggttggcgggcttattctgttcacgcgtaattaccatgacccggaacagttgcgcgaattagtgcgccagattcgggcggcatcgcgtaaccatctggtggtggccgtcgatcaggaaggcgggcgcgtacagcgtttccgtgaagggtttacccgcctgcccgcggcgcaatctttttttgcgctgcatgggctggaagagggggggcgactggcgcaggaggcagggtggctgatggccagcgaaatgatcgcgatggatattgatatcagttttgcgccagtgctggatgtcgggcatatcagcgcggcaattggcgagcgttcttatcatgccgatccagcaaaagcgttggcaatggcaacgcgctttattgacggcatgcatgacgccgggatgaaaacgaccggtaagcatttccccggccacggcgcggtcacggcggactcccacaaagagacgccgtgcgatccacgtcctgaaacggacatccgtggcaaagatatgtcggtgttccgcacgctgattagcgagaataaactggatgcgattatgcctgcccacgtgatctaccgcgctatcgatccgcgtccggcaagcggttcgccgtactggctgaaaacggtgctgcgtcaggagttaggctttgatggcgtcattttctccgacgatctgtcgatggagggcgcggcgattatgggcagctatgctgagcgcgctcaggcgtcgctggatgcgggttgcgatatgattctggtctgcaataatcgtaaaggcgcagtcagcgtgctggataatctgtcgccgatcaaagcagaacgtgttacacgtttgtatcataaaggttcattttcacgccgggagctcatggactcagcacgctggaaaacagccagcgcccagctcaaccagttacatgaacgctggcaggaagaaaaagcaggtcattaa

SEQ ID NO: 38975 - DNA, 1305 bp, Salmonella typhimurium
ttgactacaccattaaaaaagatcgtgattgtcggcggcggcgctggcgggctggaaatggcgacgcagttaggccataaactggggcgcaagaaaaaagcgaaaatcacgctggtagacagaaatcacagccatctgtggaaaccattgctgcacgaagtggcgactggctctctggacgaaggcgtggatgcgctgagctatctggctcatgcgcgtaatcatggtttccagttccagctggggtcggtgatggatatcgatcgcgaagcgaaaaccatcaccattgccgagttgcgtgatgaaaagggcgaactgctggtgccggagcgcaaaatcgcgtatgacacgctggtgatggcgctgggcagcacctctaatgatttcaacacgccgggcgtgaaagagcactgtatcttcctcgataacccgcatcaggcgcgccgttttcaccaggagatgctgaacctgttcctcaagtattcggctaatctgggcgcgaacggtaaggtcaatatcgccatcgttggcggcggtgcgacgggggttgagctgtcggctgaactgcataatgcggtaaaacagctgcatagctatggttataaggggctgaccaacgacgcgctgaacgtgacgttggttgaggctggcgagcgtattctgcctgcgttgccgccgcgtatctccagcgccgcgcataatgaactgaccaaactgggcgttcgcgtgctgacgcaaactatggtcaccagcgccgacgaaggcggtctgcatacgaaagaaggtgaatatattcaggccgatctgatggtgtgggcggcgggtatcaaagcgccagattttatgaaagagattggtggtctggaaacgaaccgcattaaccaactggtggtggaaccgacgctgcaaaccacgcgcgatcctgatatttatgcgattggcgactgcgcttcctgcgcacgtccggagggaggttttgtgccgcctcgcgctcaggcggcgcatcagatggctacctgcgcgatgaaaaacattctggcgcagatgaatggcaaaccgctgaaagcttaccagtataaagatcatggatcgctggtctctctgtccaacttctctaccgtgggtagtctgatggggaacctgacccgcggttcaatgatgattgaaggacgtatcgcccgcttcgtgtatatctcgctataccgtatgcaccagatagcgctgcatggatactttaaaaccggcctgatgatgctggtgggcagtattaaccgcgtcattcgtccgcgcctgaaactgcattaa

SEQ ID NO: 38976 - DNA, 1311 bp, Salmonella typhimurium
ttgtcggcctttttcagaataacgctgacgaactcttacggttcagacatttacgcattccgctttcgcttatatactcgggactttgctaacagcaaccagacggattacatgtatcaacctgtcgctctattcattggcctgcgttacatgcgcgggcgtgcagcagatcgcttcggtcgcttcgtttcctggctttccactatcggcattaccctgggggtgatggcgctggtcacggtattgtcggtgatgaacggttttgagcgcgaactgcaaaataacattcttggtttgatgcctcaggccatcctctctgctgaacatggttctcttaacccgaatcagatgccggaaaaagcggtgaatctgcaaggcgttaaccgtattgcgccgctgacgacgggcgatgtcgtactgcaaagcgcgcgtagcgttgcggttggcgtgatgttaggtatcgatccggcgcaaaaagatccattaacgccgtatctggtcaatgtgaagcaaagcgaattacagccgggtaagtataatgtcatcctcggcgagcagctcgccggacagttaggggtcaaccgcggcgatcagattcggctaatggtgccatctgccagccagtttacgccaatgggacgcctgcccagccagcgtctgtttacggtgattggcacatttgccgccaatagcgaggtcgatggctatgaaatgctggtcaatattcaggacgcgtcgcgtttaatgcgctatccggcaggcaatattaccggctggcgtctgtggctggatgaaccgctgcaagtcgataccctcagccaacagacgctgccgcaaggcacgaagtggcaggactggcgcgaacgcaaaggcgagttgttccaggctgtgcgcatggaaaagaacatgatgggattgttgctgagcctcatcgtggcggtcgcggcttttaacattattacttcgttgggcctgatggttatggagaagcagggtgaagtggcgattttacaaactcaagggctgacgccgcgacaaattatgatggtctttatggtgcagggcgccagcgccgggattatcggcgcgctgttgggcgccgcgctgggcgcattgcttgccagccaactgaataacctgatgccgatcatcggcgcgtttctggatggcgctgcgttgcccgtggcgatagagccgttacaggtgatcgttatcgcgctggtggcaatggccatcgcgctgctttctacgctttatccttcctggcgcgctgccgccactcaacccgctgaggctttacgttatgaataa

SEQ ID NO: 38977 - DNA, 1230 bp, Salmonella typhimurium
atggataaactacttgagcgttttttacactacgtatcgctggatacccaatcaaagtcgggtgttcggcaggttcccagcactgaggggcagtggaagttactacgtttgctcaaacagcagctcgaagagatggggctggttaacattacattaagtgaaaaagggacgttgatggcgacgctcccggccaatgttgagggggatattcccgccattggttttatctcccatgtggatacctctccggatttcagcggtaaaaacgttaacccgcagattgtcgagaattatcgcggcggcgatatagcattagggattggcgatgaggtgttgtcacccgtgatgttcccggtactgcatcaattactgggacagacgctgattactaccgatggtaagacattgctgggcgcggacgataaagccggcgttgcggagatcatgaccgcgctggcggtgctgaaaggtaatcctattccccacggcgacattaaagtggcgtttacgcctgacgaagaggtagggaaaggcgcgaagcacttcgatgttgaggcctttggcgcgcagtgggcatatacggtcgacggcggcggcgtgggagaactggagtttgaaaacttcaatgccgcctcggtgaatatcaaaatcgtcggcaataacgtgcatcccggtacggcaaaaggcgtgatggtcaatgcgctgtcgttggcggcgaggattcacgcggaagtgccggcggatgaagcgcctgaaaccaccgaaggttacgaagggttttatcatctggccagcatgaaaggcaccgttgaccgggccgaaatgcactacatcattcgcgatttcgaccgtaagcagtttgaagcgcgtaaacgcaaaatgatggagattgccaaaaaagtcggtaaggggctgcatccggactgctatatcgaactggtgattgaagacagttattacaatatgcgcgaaaaagtagttgaacatccgcatattctcgatatcgcccagcaggccatgcgcgactgtcatattacgccggagatgaaaccgattcgcggcggtacagacggggcgcaactgtcgtttatgggtctgccatgtcctaatctctttaccggcggatataactatcatggtaaacatgagtttgtgacgctggaggggatggaaaaagcggtacaggtgattgtgcgtatcgcggagctgacggctaagcgcgggcagtag

SEQ ID NO: 38978 - DNA, 1650 bp, Salmonella typhimurium
atgaaaaacatcaatccaacgcagacttctgcctggcaggcgctccagaaacactacgatgaaatgaaagacgttacgatcgctgagcttttcgcgaacgatagcgaccgtttcgctaaattttccgcgacgtttgacgatctgatgctggtggatttctccaaaaaccgcatcaccgaagagacgctggcaaaattacaggatctggcgaaagagaccgatctggccggcgcgattaaatccatgttctccggcgagaagatcaaccgcaccgaagaccgcgccgtgctgcacgtggcgctgcgtaaccgtagcaatacgccgatcattgtggacggcaaagatgtgatgccggaagtgaacgccgtacttgagaagatgaaaactttctcgcaagcgattatctccggtcagtggaaaggctacaccggtaaggccatcaccgacgtggtgaacatcggtatcggcggttccgacctcggcccgttcatggtgaccgaagcgctgcgtccgtataaaaatcatctgactatgcacttcgtctctaacgtcgatggtacccacatcgctgaagtgctgaagaaagtgaaccctgaaaccacgctgttcctggtcgcgtcgaaaactttcaccacccaggaaaccatgaccaacgcccacagcgcgcgcgactggttcctgaaaactgcaggcgatgaaaaacacgtggcgaaacactttgctgcgctctccaccaacgccaaagcggtcggcgaatttggtatcgacacggccaatatgttcgagttctgggactgggtcggtggtcgttactcgctgtggtctgccatcgggctgtccattattctgtccgtcggtttcgacaactttgtcgagctgctttccggcgcgcacgcgatggacaagcatttctccaccactccggcggagaaaaacctacccattctgctggcgttgattggcatctggtacaacaatttcttcggcgcggaaaccgaagccattctgccgtatgaccagtatatgcaccgtttcgccgcctacttccagcagggtaacatggaatccaacggtaaatacgttgaccgtaacggcaacgccgtggattaccagacaggcccaattatctggggcgaaccaggcaccaacggtcagcacgcgttttatcaattgattcaccagggtactaaaatggtgccgtgtgattttatcgccccggctatcacccataacccgctatccgatcatcatcagaagctgctgtctaacttcttcgcgcagaccgaagcgctggcgtttggtaaatcccgcgaggtggttgagcaggaatatcgcgatcagggtaaagatccggcgcagcttgaacacgttgtgccattcaaagtgtttgaaggcaaccgcccgaccaactctatcctgctgcgcgaaattacgccgttcagcctgggcgcactgattgcgttgtatgagcataaaatctttacgcagggcgtcatcctgaacatctttactttcgaccagtggggcgttgagttgggtaaacagttggctaaccgtattctgccggagttgggcgatgataaagctatttcgtcccatgatagctctactaacggtctgattaaccgttataaagcctggcgcgcctga

SEQ ID NO: 38979 - DNA, 1251 bp, Salmonella typhimurium
atggaaagcaaagtagttgttccggtggaaggtaagaagatcaccctgcaaaacggcaaactcaacgttcctgagaatccgattatcccgtttattgaaggcgatggtatcggtgttgatgtcactccagccatgcttaaagtagtcgatgccgccgtcgagaaagcctataaaggcgagcgtaaaatttcctggatggaaatttacaccggagaaaaatccacacaggtttacggccaggatgtctggcttcccgctgaaacccttgatttaattcgtgactaccgcgtagcgattaaaggtccattgaccacgccggttggcggcggtatccgctctctgaacgttgccctgcgtcaggagcttgacctgtacgtttgtctgcgtcccgttcgttactatcagggcacgccaagtccggtgaaacatccggagctgaccgatatggtcatcttccgtgaaaactctgaagacatctacgccggaattgaatggaaagctgactctgcagacgctgagaaagtgatcaagttcctgcgcgaagagatgggcgtgaagaaaattcgcttcccggagcactgcggtatcggtatcaaaccgtgttctgaagaaggcactaaacgtctggttcgcgcggcgattgaatacgctattaccaacgatcgcgattccgtcacgctggtacataaaggcaatatcatgaagttcaccgaaggcgcgtttaaagactggggctaccagttggcgcgcgacgagttcggcggtgagcttattgacggcggtccgtggctgaaaattaagaacccgaacacgggtaaagagatcgtggttaaagacgttatcgccgatgcgttcctgcaacaaatcctgttgcgtccggcggaatacgacgttatcgcctgtatgaacctgaacggtgactatatttccgatgccctggcggctcaggttggcggtatcggtattgcaccgggtgcgaatatcggcgacgaatgcgcgttgtttgaagcgactcacgggactgcgccgaaatatgcgggccaggataaagtcaacccaggctccattattctgtctgcggagatgatgctgcgccacatgcagtggttcgaagccgcagacctgattgttaaaggtatggaaggcgcgattgccgcgaagaccgtgacctatgactttgaacgcctgatggaaggcgctaagctgctgaaatgtagtgagtttggtgacgcgattatcgcgaatatgtaa

SEQ ID NO: 38980 - DNA, 1110 bp, Salmonella typhimurium
atggcgagcgtacagctacgaaatgtaacgaaagcctggggtgacgtggtggtatcgaaagatattaacctcgatatccatgacggggagttcgtggtgtttgtgggaccgtcaggctgtggtaaatcgaccttgctgcgtatgatcgccgggcttgaaaccatcaccagtggcgacctgtttatcggggaaacccgtatgaatgatattccgcctgccgagcgcggcgtgggcatggtattccagtcttatgcgctctatccccatctctccgttgcagaaaacatgtctttcggcctcaagctggcgggcgccaaaaaagaggtaatgaatcaacgcgtcaaccaggtggcggaagtgctgcaactggcgcatctgctggaacgtaagccaaaagcgctttccggcgggcagcgtcagcgcgtagcgattggccgcacgctggtggcggagccgcgtgtgtttttgctggatgaaccgctctctaacctggatgccgcgctacgcgtgcagatgcgcattgaaatttctcgcctgcataaacgtctgggccgcacgatgatttacgtcacccacgatcaggtcgaggcgatgaccctggccgacaaaatcgtggtgctggacgccggtcgcgtcgcgcaggtcggtaagccgctggagctgtaccactatccggcggaccgttttgtcgcgggcttcatcggctcgccgaagatgaacttcctgccggtgaaagtgaccgccaccgcgattgaacaagtccaggtcgaactgccgaatcgccagcaaatctggctgccggtcgaaagtcgcggcgtgcaggtcggcgccaatatgtctttaggcattcggccggaacacctgctgccgagcgatatcgccgatgtcaccctggaaggcgaagtccaggtggtcgagcagttagggcacgaaacacaaattcatatccagatccccgccatccgtcaaaacctggtttatcgccagaatgacgtggtgttggtagaagagggcgccacattcgctatcggcctgccgccagagcgctgtcatctgttccgcgaggatggcagcgcatgtcgtcgtctgcatcaagagccgggtgtttaa

SEQ ID NO: 38981 - DNA, 1359 bp, Salmonella typhimurium
atgatgattactctgcgcaaactcccactggcggttgctgtcgcagcgggcgtaatgtccgctcaggcaatggctgtcgatttccacggttacgcccgttccggtattggctggacgggaagcggcggcgaacaacagtgtttccaggcaacgggtgcccaaagtaaataccgtctcggtaacgaatgtgaaacctatgcggaactgaaactgggccaggaagtgtggaaagagggcgataagagcttctatttcgacaccaacgtcgcctattcggttaaccagcagaacgactgggaatcgaccgatcccgccttccgcgaagcgaacgtgcagggtaaaaacctgattgaatggctgccgggctctaccatctgggccggtaagcgcttctatcagcgtcatgacgtacacatgatcgacttctactactgggatatttcaggtcctggcgcaggtatcgaaaatatcgatctgggcttcggtaagctttcactggcggcgacccggtctactgaagcgggcggctcttacaccttcagcagccagaatatttatgatgaagtgaaagataccgctaacgacgtctttgacgtacgtctggctggtctgcaaacgaacccggacggcgtactggagctaggcgttgattacggtcgcgccaatacgaccgatggttataagctggctgatggggcatcgaaagacggctggatgttcaccgccgaacacacgcaaagcatgttgaaaggctataacaagtttgtcgtgcaatatgccaccgatgccatgaccacgcagggtaaaggccaggcgcgcggttccgacggttcttcatctttcactgaagaattgtctgatggaaccaaaattaattacgccaataaggtcatcaataataatggcaatatgtggcgtattttggatcatggcgccatctcgcttggtgataaatgggatttgatgtacgtcggtatgtaccagaatatcgattgggataataacctgggtactgagtggtggaccgtgggtgtacgtccaatgtacaagtggacgccaatcatgagcaccctgctggaagtcggctacgacaacgtgaaatctcagcagaccggcgatcgtaacaatcaatataaaatcaccctggcgcaacagtggcaggcgggcgacagcatctggtcgcgtccggctatccgtattttcgccacctacgcgaaatgggatgagaaatggggctatatcaaagacggcgataacatttcccgttatgccgcagcgactaactccggcatttccaccaacagccgtggcgatagcgatgagtggaccttcggcgcccagatggaaatctggtggtaa

SEQ ID NO: 38982 - DNA, 468 bp, Salmonella typhimurium
atggcactcagaaccttgtcagcacttcccgtgtttgctgattctcttttctctgaccgtttcaaccgtattgatagacttttcagtcaattaacaggagatacgccagtcgctgcgacgccagcttacgatctgcaaaagcgcgatgcgaataactatctgcttaccgtgagcgttcctggctggaaagaggaagagcttgaaattgaaacggttggcggcaacctgaatattacgggtaaacacactgaagagacggtagaggatcagacgcactggatttatcgtggtattcgtaaggcggatttccagttgagtttttctttgcctgaacatgctaaggtgaataatgcgaaactggaacagggcctcttgttggtcgagatttaccaggagatccctgaaagcgagaaaccgaaaaaaattgccatagaaagcaaaccaaaggcgattgaacacaaatcataa

SEQ ID NO: 38983 - DNA, 213 bp, Salmonella typhimurium
atgatgaataaagacgaagccggcggtaactggaaacagtttaaaggtaaaatgaaagaacaatggggcaaactgaccgatgacgatatgaccgttatcgaaggtaaacgcgaccaactggtaggtaaaatccaggagcgttacggttaccagaaagatcaggcggaaaaagaggttgttgactgggaaacccgtaacaactatcgctggtaa

SEQ ID NO: 38984 - DNA, 999 bp, Salmonella typhimurium
atgcagcctgaaacccagtcctccgctttacctgcttatcgcttctccatcgcgcctatgctcgactggacggacagacattgccgctatttcctgcgtttgctgtctcgccagacgcagctctacaccgaaatggtgaccacgggcgcgattattcacggtaagggtgactatctggcttatagcgaagaagagcatccggtcgctctacagcttggtggaagcgatccggctcagcttgcgcattgtgcaaagctggcggaagcgcgtggctacgatgaaattaacctcaacgtggggtgcccttccgatcgcgtgcaaaacggtatgtttggcgcctgtttgatgggcaatgcgcaactggtcgccgattgtgttaaagccatgcgtgatgtcgtctcgattccggtgacggtaaaaacccgcattggtattgacgatcaggacagctatgcgtttctgtgtgatttcatcgatacggtttccggtcagggcgaatgcgagatgtttattatccatgcgcgcaaagcctggctttctggcttaagcccgaaagaaaatcgtgagatcccgccgctggattacccgcgcgtctatcagctaaagcgggattttccgcacctgaccatgtccattaacggcggcatcaaatcgctggaagaggcgaaggagcacctgcgccatatggatggcgtcatggttggccgcgaagcttatcagaatccgggtatactggccgcggtggatcgggagatttttggcgccgataccaccgatgccgacccggttgcggtggttcgcgcgatgtatccctatattgagcgtgaattgagccagggagcgtatctggggcatatcactcgccatatgctggggttgttccagggcatccccggcgcgcggcagtggcgtcgctatctgagcgaaaacgcccataaagctggcgcggatgttgctgtactggagcaggcgctaaaactggtggcagacaagcgttaa

SEQ ID NO: 38985 - DNA, 1416 bp, Salmonella typhimurium
atggcaggaaataaacccttcaacaaaccacagactgatgcccgcgaccgcgatccgcaggttgccgggataaaagtgccgccgcactcgattgaagcggaacagtcggtgttgggcggtttaatgctggataacgagcgctgggacgatgtggccgagcgcgtggtggcggaagatttctatacccgcccgcatcgccatatctttacggagatggggcgcttgcaggaaagcggcagtcctatcgacctgattacgctcgcggaatcgctggagcggcagggccaactggacagcgtcggcggtttcgcctatctggcggagctgtctaaaaacacgccaagcgcggcgaatatcagtgcttatgcggacattgtgcgcgaacgcgccgtggtccgcgatatgatcgcggtggcgcatgaaattgcggacgccggttacgatccacaggggcgcaatagcgacgaactgctggatctggcggagtcgcgcgtcttccagatcgcggaaaaccgggccaacaaagacgaaggtccgaaaagcatcgaccagattctcgacgccaccgtggcgcgtattgagcagttgttccagcaaccgcacgatggcgttacaggcgtggataccggctatcaggatctcaataaaaagacggcagggttacagcgttcggatttgattatcgtcgcggcgcgtccctccatgggtaaaaccacttttgcgatgaacctctgcgaaaatgcggcgatgttgcaagataagccggtactgatctttagtctggagatgcccggcgaacagatcatgatgcgtatgctggcctcgctgtcccgcgtcgatcagacacgtattcgtaccggtcaacttgatgatgaagactgggcgcgaatctccggcacgatgggcattctgctggagaaacgcaatatgtatattgacgactcctcaggtcttacgccgacagaagtccgttcgcgcgcgcggcgtattttccgcgaacatggcgggttaagtctgattatgatcgactacctgcaattgatgcgtgtgccgtcgctttctgataaccgtactctggaaatcgccgaaatttctcgctcgttgaaagcgctggcgaaggaactccaggtgccggtcgtggcgctatcgcagcttaaccgctccctggaacaacgcgcggataaacgtccggtgaactccgacctgcgtgaatccggctctattgaacaggatgccgacttaattatgtttatctaccgtgatgaggtttatcacgagaacagcgacttaaaaggcattgctgaaattattattggtaagcaacgtaacggtcctatcggtacggttcgtctgacgttcaatggtcagtggtcgcgcttcgataactatgcgggaccgcaatacgatgatgagtaa

SEQ ID NO: 38986 - DNA, 1080 bp, Salmonella typhimurium
atgcaagcggcaacagtcgtcattaaccgccgcgctctgcgacacaacctgcaacgtctgcgtgaactggcgcctgccagtaagctggttgcggtggtgaaagcgaacgcttatggacacggtcttctggagaccgcgcgaacgctccctgatgctgacgcttttggcgtggcgcgtcttgaagaggctctacgtctgcgagcgggcgggatcacgcagccaatcctgctgctggagggttttttcgacgccgccgatttgccgaccatttccgcgcaatgtctgcataccgccgtacataatcaagagcagcttgccgccctggaggcggtggagctggcggagccggtaacggtctggatgaagctggataccggtatgcatcgtctcggcgtgcgtcccgaagaggcggaggcgttctaccagcgtctgacgcactgtaaaaatgtacgccagccggtgaatatcgtcagccattttgcccgtgcggatgagccggaatgcggcgctaccgaacatcagctcgacatttttaatgccttctgtcagggtaaacccggtcagcgctctattgccgcgtctggcggtatcctgctgtggccgcagtctcactttgactgggcgcgtccgggcatcattttgtatggcgtatcgccgctggagcacaaaccctgggggccggattttggttttcagccggtgatgtccttaacctccagtttgatcgcggtgcgtgaccacaaagcgggcgaaccggtgggctacggcgggacatgggtgagtgagcgcgacacgcgcctgggcgtggtggcgatgggttatggcgatggctacccacgagcggcgccttccggtacgccagtactggtcaatggtcgtgaagttccgattgtcgggcgggtggcgatggatatgatttgcgtagatttggggccaaacgcgcaggataacgcgggcgatccggtggtcttatggggtgaaggtctgccggttgaacgtatcgctgaaatgacaaaagtaagtgcttacgaacttatcacgcgcctgacctcaagggtggcgatgaagtatattgattaa

SEQ ID NO: 38987 - DNA, 2088 bp, Salmonella typhimurium
atgtggcgaagactgatttatcacccagagattaattacgcactacggcaaacgctggtgctgtgcctgcctgtggctgttggtttattaataggccagctacacctgggcttgcttttctctctcgttcccgcctgctgcaacattgcaggtctggataccccgcacaaacgcttttttaaacgcctgatcatcggcgcgtcgctgttcgccggatgcagtctggtaacgcaacttctgctggcggaatccatccccctgccgttgatcctgaccggcctcacgctggtgcttggcgtgacggcggaaattagcccgcttcacgcgcggctactgccagcatcgctgattgccgccatctttaccctgagccttgcgggatacatgcccgtctgggagccgctgctcatttatgcgctgggcacgctatggtacggcgtgtttaactggttttggttctggctatggcgcgaacagccgctgcgcgagtcattgagtttgttataccgtgaactggccgattattgcgaagcgaaatacagcctgctcacccaacatatcgatccggaaaaagcgctgcctcccctgctgatacgccagcaaaaagcggtcgatctcattacccagtgttaccaacagatgcatatgctttcggcgcacaacaataatgattacaagcgtctactacgggcttttcaggaagcgatggatttgcaggagcacatctccgtcagcttgcatcagccggaagaggtacagaaactggtagaacgcagccatgcggaagaggtgattcgctggaatgcgcaaacggtcgccgcccgtctgcgcgtgctggcggatgacattctttatcatcgtctgccgacgcgcttctccatggaaaaacagattggcgctctggagaagatcgccaatcagcatcctgaaaatccggtaggccagttctgctattggcacttcagtcgaatcgcccgtgtgctgcgtactcagcgaccgctgtacgcccgcgacctgatggccgataaacagcgtcgtttgccgctacttccggcgctgaaaaattatatgtctcttaaatcgccggcgctacgcaacgccggacgcatcagcgtgatgatgagcatcgccagtctgatgggcagtgcgttgcacctgcctaaaccgtactggatactcatgacggtgctgtttgtcacccaaaacggctatggcgcgacgcgcgtacgtattctgcaccgttcggtcggaacgctggtcggcctggtgattgccggcgtcacgctgcacttacatattcccgaaagcattacgctggcggtcatgctggtactaacgctggcaagttatctgattattcgtaaaaactacggctgggcgacggtcggctttacggtgacggcggtatacaccatccagttactgacgttaaacggagagcagtttattgtgccgaggctgatcgatacgctgattggctgtttaattgcctttggcggcatggtctggctgtggccgcaatggcaaagcgggctattacgtaaaaacgcccatgatgcgctggaagccgctcaagaagctatccgactgatcctcagtaacgatccgcaggccaccccgctcgcttatcaaagaatgcgggtcaaccaggcgcataacacgttattcaactcgttaaatcaggcaatgcaggaacccggattcaatacccactatctgtcggatatgaaactatgggtcacgcacagccagtttattgtcgagcatatcaacgctatgacgacgctggcgcgggaacacaccatgctgacgccggatctggcgcagcgctatctggaatcttgcgagattgcgattcagcgctgccagcagcgcctggagtacgacaggccaggcggctccggcgatgtcaatattctggagtcgccggacatgccgtcacatggcttattgagcactctggaacaacatttacagcgcatcatcggccatctgaacaccatgcacaccatttcgtcgatggcctggcgtcagcgtccgcatcacggtatctggctgagtaagcggctacgggatacaaaaggttaa

SEQ ID NO: 38988 - DNA, 1182 bp, Salmonella typhimurium
atgactaacagcaaccgcatcaagctcacatggatcagctttctttcctacgccctgaccggggcgctggtgattgtcaccgggatggtgatgggaaatatcgcagactattttcatctgcccgtttccagcatgagtaacacctttacttttctgaacgccgggattttgatctcgatcttcctcaatgcgtggctgatggaaatcatcccgctgaaaacacagctacgctttggttttatcctgatggtgctggcggtggccgggctgatgttcggccatagcctggcgttgttctcagcggcgatgtttgtgctggggctggtcagcgggatcaccatgtcgattggcaccttcctgattacgcaactttatgaagggcgtcagcgcggttcccgactgctgtttaccgactccttcttcagcatggcggggatgatttttcctatggtcgccgccttcctgctggcgcgtagtattgagtggtactgggtctacgcctgcatcggcctggtctacctggcgattttcatcctgaccttcggctgtgaatttccggcgctgggtaaacatgcgcagcactctcaggcgcctgtcgtcaaagaaaaatggggcattggcgtactgtttctggccgtcgccgcgctgtgctatatcctcggtcaattaggctttatctcctgggtgccggaatacgccaaaggcctcggcatgagcctgaatgacgccggggcgctggtgagtgatttctggatgtcctatatgtttggcatgtgggcgttcagctttatcctgcgctttttcgatctgcaacgcattctgaccgtactggcgggtatggcggcggtactgatgtatctgtttattaccggcacgcaggcgcatatgccgtggtttattctgacgctgggcttcttctccagcgccatttatacctccatcattacgctgggatcgcagcaaacgaaagtggcctcgcctaagctggttaacttcattctgacctgcggcaccatcggaacaatgctgaccttcgtcgtcaccggcccgattgtagcgcacagcggcccacaggcggcgttactcaccgcgaatggtctgtatgcggtggtctttgtgatgtgctttgcgctcggctttgtatcccgtcatcgtcagcatagcgcgccggctacgcattga

SEQ ID NO: 38989 - DNA, 2544 bp, Salmonella typhimurium
atgagcaaagtcagactcgctattatcggtaatggtatggtcggccaccgctttattgaggatctccttgataaatccgacgctagcctgttcgacattaccgtgttctgtgaagaaccccgtaaagcctatgaccgtgtccacctgtcatcctacttctctcaccacaccgcggaagagctctctctggtgcgtgaaggattttacgagaagcacggcgtaaaggtactggttggcgaacgcgcaattaccattaaccgtcaggagaaagtgattcactccagcgcgggtcgtaccgtttattatgacaagctgatcatggcgaccggttcctatccgtggatcccgccgattaaaggctccgaaacccaggattgcttcgtttaccgtaccattgaagacctcaacgctatcgaagcctgcgcccgtcgcagcaagcgcggggcggtggtcggcggcggtctgctggggctggaagccgctggcgcgctgaaaaacctcggcgtggaaacgcacgtcattgaatttgcgccaatgctgatggcagaacagctcgatcagatgggcggcgagcagctacgtcgcaagatcgaaagcatgggcgtgcgtgtacacaccagtaaaaacacgcaagagattgttcagcagggtaacgaagcgcgtaagactatgcgttttgccgacggcagcgagctggaagtcgatttcatcgtcttctctaccggtattcgcccccgcgacaagctggctacccagtgcggtctggccgtcgcgcagcgcggcgggatcgtgattaacgacacctgccagacgtccgacccggatatctacgctatcggcgagtgcgccagttggaacaaccgcgtttacggtctggtcgcaccaggctataaaatggcccaggtcgccgttgaccacatcctcggcagtgaaaacgcctttgaaggggcggatctcagcgccaagctgaagctgctgggcgtggacgtcggcggcatcggcgacgcgcatggccgcacgccgggcgcgcgtagttacgtttacctcgatgaaagcaaagaagtctacaaacgtctaattgtcagcgaagataacaaaacgctgctcggcgcagtactggtcggcgacaccagcgattacggcaatttgctgcaactggtactgaacgccatcgaactgccggaaaacccggattcgctgatcctgccgtcgcacgcgggcagtggtaaacccgctatcggcgtggataaactgccggacagcgcgcagatctgctcctgcttcgatgtgactaaaggcgatctgatcgccgctatcaataaaggctgccataccgtggcggcgctgaaagcggaaaccaaagccggaaccggctgcggcggctgcatcccgctggtgacgcaggtactgaacgccgaactggcgaaacagggtattgaagtcaacaacaacctgtgcgagcactttgcttattctcgtcaggaactgttccacttaatccgcgtggaaggtatcaaaacctttgaagaactgctggcgaaacacggtaaaggctacggctgcgaagtgtgtaagccgaccgtcggttcgctgctggcgtcgtgctggaacgaatacatcctcaagccgcagcacacgccgctacaggatactaacgataacttcctagcgaatatccagaaagacggtacttactcggtgatcccgcgctcggcgggcggcgaaatcaccccggaaggtctggtggccgtgggtcgtatcgcccgcgagtttaacctctataccaaaatcaccggttctcagcgtatcggcctgtttggcgcgcaaaaagacgatctgccggaaatctggcgtcagttgattgaagccggtttcgaaaccggtcacgcgtatgccaaagcgctgcggatggcgaaaacctgcgtcggcagcacctggtgccgctacggcgtgggcgacagcgtcggtttcggcgtggagctggaaaaccgctacaaaggcattcgtaccccgcacaaaatgaaattcggcgtctccggctgtacccgtgaatgtgcggaagcgcagggcaaagatgtgggtatcatcgccacggagaaaggctggaacctgtacgtctgcggtaacggcgggatgaaaccgcgtcatgcggatctgctggcagccgatctcgatcgcgacacgctgatcaagtacctcgaccgctttatgatgttctacatccgtactgccgacaaactgacccgtaccgcgccgtggctggataatctggaaggcggcatcgagtacctgaaatcggtcatcatcgacgataagctgggcctgaacgaacatctggaagaagagatggcgcgcctgcgcgcagcggtggtctgcgagtggacagaaaccgttaacaccccatccgcacaggttcgctttaagcactttatcaacagcgacaaacgcgacccgaacgtccaggttgtgcctgaacgtgaacagcatcgtccggccacgccgtatgaacgtatcccggtcactctggtggaggaaaacgcatga

SEQ ID NO: 38990 - DNA, 531 bp, Salmonella typhimurium
atggccagcagaggcgtaaacaaggtgattctcgttggtaatctgggccaggacccggaagtacgctatatgccgagtggcggcgctgtcgccaacttaacgctggctacttctgaatcctggcgcgataagcagaccggcgaaatgaaagagcagactgaatggcaccgggtggtgatgttcggcaaactggcggaagtggccggcgaatatctgcgtaaaggttctcaggtgtatatcgaaggtcaattgcgtacccgcaagtggaccgatcagagtggccaggaacgctatacgactgaaattaacgttccgcagatcggcggcgtgatgcagatgctgggtggtcgccagggcggcggcgcaccggcaggcggtcagcagcaggggggttggggtcagccgcaacaacctcagcagccgcagggcggcaaccagttcagcggcggcgcgcagtcgcgtccacagcaatccgcgccagcgccgtctaacgaaccgccaatggattttgacgacgacattccgttctga

SEQ ID NO: 38991 - DNA, 1374 bp, Salmonella typhimurium
gtggaccatttgcctatattttgtcaattacgcgaccgcgactgtctgatcgtcggcggtggcgatgtcgcagaacgcaaagcacggttactgctggaagcaggcgcacgtttaacggtcaatgcgctaacctttattccacagttcaccgtatgggcaaatgaaggcatgttgactctggttgagggaccgttcgacgaaacgcttctcgactcgtgttggctggcgatcgcggccactgacgacgataccgtcaaccagcgcgtcagcgacgcggcggagtcacgccgtatcttttgcaacgtggtggatgcgccgaaagccgccagctttatcatgccctccattattgaccgctcgccgctgatggtcgccgtctcctcgggcggcacctccccggtgctggcgcgtctgctgcgcgagaaactggaatcgctgctgccgcagcatctggggcaggtcgcgcgctatgccgggcaactccgcgcccgagtgaaaaagcagtttgccacgatgggcgagcgtcgtcgcttctgggaaaaatttttcgtcaatgaccggctggcgcagtcgctggcgaatgccgatgagaaagcggttaacgcgacaaccgaacgcctgtttagcgaaccgctggatcaccgtggcgaagtcgtgctggtcggcgccgggccgggcgatgccggactgctgacgctgaaagggttacaacaaatccaacaggcggatatcgtggtttacgatcgcctcgtctccgacgacattatgaacctggtacgccgcgatgccgatcgggtctttgtggggaaacgcgcgggttaccactgcgtcccacaggaggaaatcaaccagatcctgctgcgtgaagcgcaaaaaggtaaacgcgtggtacgcctgaaaggcggcgatccctttatctttggtcgcggcggcgaagagctggaaacgctgtgtcatgccggtattcctttctcggtagtgccggggattaccgcggcttccggctgctccgcctactccggtattccgctaactcatcgcgattacgcccagagcgtacgtctggtcacgggtcacctgaaaaccggcggcgagctggactgggaaaacctggcggcagaaaaacagacgctggtgttctacatggggctgaatcaggcagcgactatccaggaaaaactgatcgcattcggtatgcaggccgatatgccggttgcgctggtagaaaacggtacctccgtgaagcaacgcgtcgtccacggtgtgctgacgcagctcggtgaattagcgcaacaggttgaaagcccggcgctgattatcgttggtcgcgtggtagccttacgcgataaattaaattggttctctaatcattaa

SEQ ID NO: 38992 - DNA, 171 bp, Salmonella typhimurium
atgtttaaatttgtaaaaattgccgttgtggcaggggttctggcgacgctcactgcttgtactggtcatatcgaaaacaaaaaaaataactgcagctacgattatttgctgcaccctgcaatttctatttctaaaattattggcggttgcggcccggctgccgatcaataa

SEQ ID NO: 38993 - DNA, 16680 bp, Salmonella typhimurium
atgggaaataaaagcatacaaaagttttttgccgatcaaaattctgtaattgatttatcttctttgggtaatgccaaaggcgcaaaagtttctctttccgggccagacatgaacattaccacgccgcgtggttcagtgatcattgtcaatggcgctctttattcaagtatcaaaggcaataacctcgctgttaaatttaaagataagactattaccggcgctaaaattctgggcagcgtagatttaaaagatattcaactggagagaattgacagctcattggttgattctgctcaggtagaaaagaaaggtaatggcaaacgacgaaataagaaggaagaagaggaattaaaaaagcagcttgacgatgctgaaaacgcaaagaaagaagctgataaggcgaaggaagaagcagagaaagctaaggaggctgcagaaaaagcgctcaatgaagcgtttgaagtacagaactcgtcaaagcaaattgaagaaatgctgcagaactttttggctgacaatgtagcaaaagacaatctggctcagcaaagcgatgcttcccagcaaaatacacaggctaaagcaacgcaggcttctaaacagaacgatgctgaaaaagttcttcctcaacctattaataaaaataccagtactggcaaaagtaatagcagtaaaaatgaggaaaataagctcgatgccgagtctgttaaagagccgcttaaagtcacattagcgcttgcggccgagagtaacagcggtagcaaagatgatagtataactaattttaccaaacctcagtttgtaggtagcactgctcccaatgccacggttattattaaaattaatggtattgctgtcggtcaggctgtagcggatagtttgggtaacttcacctttacagcgcctgaaacattgactgatggaacatataatctggaggcagaggccaagactgctgatgggagcggtagcgccaaacttgtcattactatcgattccgttaccgataaaccaacatttgaactttcgcctgaaagtagtgtgtccggtcataagggcttaacgccgaccttgacgccttcaattgttggtacggcggaagagaatgctaaggttgacatttatgtagataataaactggttgccagcgttgatgtcgataaagatggaaactggagttatgaatttaaggataatgaattatctgagggcgaaaatagtataaaagtcgttgctgtagataaagcaggtaataaaaacgaaacgacggatagtatcataaccgacaccattgctccagaaaagccgacgattgagctggatgatagtagtgattccggcattaaaaatgacaacattacaaatagcaccctgccaacatttattggtgtggcggaacccggttctacagtctctatttatcttggacttaaacatcttggtgaggtcattgttgctaaagatgggacatggagctatacgcttactacgccgctcaaggatggcgaatacaatataacagcaacagctactgatattgccgggcatacctcagcgacggcaaatctgccttttactattgatacacgtatcagctatttcagcgctgagattgaaacgacgaatgatagcggtattgtcggagataacgttactaacaatactcgcccaacctttacaggtaaaactgagccaaatgctattatcagtgtcataaatagtgagactggcgaagaggttatttttaaagcgaatgacaagggcgaatggacgttcaatttcacttccgactcagtggaagggattaacaatcttacgttcactgttgaagatgtcgctggcaacaaaaaggatttttcctttagttacgttattgatactattgcccctgtacctccgacggtttctttggaggattatgttgttttgccgaatggtataattttatcagggaatgatttaccggctttagtcggtacggcagagccaaagtctaccatcttattgatgcgagatggtaaattatatgacagcattgaggttgactcaaacgggacctggaattatcagtttagtaataaatttcttcagggcgcctatgatattgaaatcatttctcaggatgccgccggcaataaatcctctactgttaaatattcttttactattcaaactgaagttgtacctccaaaagcggaactcgatgccagtgatgattccggtgcaaaaggcgactggattaccaataaacataatgctctgacattactgggaacagcggataggtttgctaccgtaaatatccttattgacggtaaaacgataggcgtgacgactgcggatgcagacggtaactggaattttgatatttccagaaatctgtctgacaatgtttataagattacggttgaatccatcgatcctttaggaagaacgtcatctgtagattatcagcttaccattgatagctttacgccgatccctactgttatgttgcatgatagcgctgactctggcgttaaaggcgatatgattactaaaattaatacaccgttgtttaccgggatggctgaagctaatgctaaggtttccatctatgttgacggtgtgttaagtggtgaggctattgctggcgatgatggtgtatggaattttcaatttaccacagcgttatccgatggctcgcatgacgtaacggtaaaggtagaagatattgccggtaatactgcctcctcatcagcgtataatttccaaatcgtaacgcaaacgcaaaaaccaacaatagagttggtcaacgatacgggggttgataatacagaccatattattaatgaaaagaatcctgcactgacaggaaccgctgcaccctattcaacggttaaactctatattgatggtgcactgatcgctgaggtcagaacaaataaagatggcagatgggagtataccctgaaagccgatcaaggtttggttgatggcgatcatagaataaccgcttcagttgaagatatcgctggcaacattgctcattcggatcctttcttaattagcgtcgatactgctatttcaataccgatagtttcattgagcccggattcagattcgggaatttcagatgataatttaacgaatatcgttaaacctaccttgcacctaaaagatattgatccggacattatcagtgttcaggtatgggatgccatgtctgatacgcagatcggtgttgccacgcaacaacctgatggttcatgggcctatacctttacttcagatttaacggaaggcttgcatcaggtttatgtcaaggttgaggacattgcgggtaataaagcgaacagcgcgatattcgattttactatcgataccacagtatcaacgccggtgatttccctgctttctaaggatgatacgggggttacaggcgataacctgaccaatatcaataagccaggttttgctatttccggtgttgatgccgatgcgcatcgggtcgtcgtacaggtgatgcacaatggcgtgagcgaagagatcgaactttcccacctcaatggtagttggttatttataccagggaatacgtgggcggatggcagctacacgttaacggtgaaagtagaagataaggcaggaaataccaactactcagcgccgctgacggtcgttatcgatacccaaatcgccattgatggggtggaactggtcaacgatagcggcgtgaaaggcgataatatgaccaacgacgaccgtccccactttcgtgtgacggtacctacggatgtcaatgaagtccgtctgagcattgacggtggtaattcgtgggttcaggcaactccgggcgtggcaggaagctgggagtatatctggccgacagacctggcagatggtcaatacacgctaacggtggaagcgactgataaagcaggcaatacagtgacgaagaccatcgatttcgcggtggataccacgctgtcagtgccggtcatcgtactggatagcgcggacgacaccggcatccagggcgataacatgacgaatagcacccagccgacatttgccctgcagcatattgatgatgatgccgttcgcgttacggtcagcgtggagcatggcggcgtcaccaccacatttgacgccacgaaaggcacaggcggatggacctttacgccgccgacatcatgggcggatggtgattataccctgagtgtgtcagtcgaagataaagcggggaacaccagccattctgcatcgctgacggtgacggtggacacgcaaatcgccattaataacattgaactggtcaatgacagcggtattcccgacgataatctgactaataatgtgcgtccgcacttccaggtgacggtaccgacggatgtcaacgtggtgcgcctgagcattgacggcggcaagacgtggttcaacgctacccagagcgcgacgccaggcgtctgggattatatctggccggatgatgtggccgacggaggctataccctgacggtagaagcgaccgatgaggcgggaaataaggcaacacagacgctcgatttcaccatcgataccactctgtctgtgccgaccctctcgctggacagcgcagatgacagcggcatcgcgggcgataatatcaccaatgttaaaacgccgggctttaccctcaacaatattgataccgatgtcagccgggtgatagtggaggtaatgcacaatggcattaaacaggaggtgccactggttcagaccggcggacagtggcgctttgcgccgaccagcgactgggcggacggcgactatatcctgacggtgaaggtagaagatagggccggaaatgtgaagcagtccgcgccgttgacggtgacagtagacacgcatatcgccattgaccgtattgaactggttaacgacagcggtatccccggcgataatctgaccaatgaagcgcgcccgcactttcaggtgacagtaccggcggatgttaacggtgtaagactgagtattgatggcggcaaaacgtggtttgacgccacgcagagcgcgacgtcgggcgtctgggattacacctggctgacgaatgtggctaacggccctcacaccctgatggtggaagcgtccgacaaggcgggaaacaaaacgacgcagaaactggacttcaccatcgataccattctgtcagaaccgacgattaccctggacagcgcggatgatagcgccgctggcgataacatcaccaacgttaagatgccaggctttaccctcggtaatatcgacgccgacgtgaccaaagtggtggtgacggtggcgcatgatggtaagaaccaacagatagagttgattaagaacggcggtgtgtggcgctttacgccgggcgcagcctggaccgatggcgactatacgttgacggtaaaggtagaagataaggcgggtaatacaaattattctgcgccgctgacggtgactatcgatacgcaaacgtctattgatcgcattgagcttcttaatgacacgggtattgtcggggataacctgaccaatgaagcacgtccacagtttcatattacggtaccgacggacgtgaactctgtgcaactgagtcttgatggcggcatcaactgggttaacgcaacgctgacgtctgacggcgtttgggagtatatatggccgacagatctggtcgaaaatacgtataccctgacagtgaaagcaaccgatgttgcaggcaacacggcgacggaaacgctcaattttatcattgataccacattgtcgacaccgaccatcacgctggatagcgcagatgatagcggcaccgccaacgataataagactaacgttaaaacgccgggttttattatcggcggtattgattctgacgtgactcaggtcgtcgtgcaggtgatgcgcgatggtcacagcgaggaggtggagctgacgcagactaacgggcagtggcgttttgtacccggcagcgcgtggactgatggcgactatacgctgacggtaacggtgaaagatgaggcgggtaatattcgccactcagcgccgttgacggtcaccatcgatacgcaaatcaccattgaccatattgaactggtcaatgacagcggtattcccgacgataatctgactaataatgtgcgtccgcacttccaggtgacggtaccgacggatgtcaacgtggtgcgcctgagcattgacggcggtaagacgtggttcaacgctacccagagcgcgacgccgggcgtctgggattatacctggctggctgatgtgggagagggtaagcataccctgacagtggaggcgaccgacaaggcgggaaacaaaacgacgcagcaactggacttcatcatcgataccctactgtcagaaccgactatcgtgctggacagcacggacgacagcggaacaaaaggcgatcacctgaccaacgtaaataagccgacgtttttactgggcaatattgacgcagacgcgcggtatgtcacggttgaggtacagcatggcggcacgaaagaggtgctgacggccaccaaagacgcgaccggcaactggagcgtgacaccgaccggcacatgggcagatggcgactatacgctgacagtgagggtggaagatgaggcggggaacgaaaaacactcagcgtcgctgacggtcactgttgatacccaaatcaccattgatgttattgaactggttaatgataacggtattcccggcgacaatatgactaacgacgcccatccgcagttccgcgtgacggtaccgggggacgttaacgaagtcagtctgagcattgacggtggcgtgacctgggttaaggcgacacagagcgcgacgccgggcgtctggaattatacctggccgggcaccgtgccggatggcgactatacgctgaatgtgaaagcgactgacaatgcgggtaatacggtgacggagacactccacttcactattgatactacgttgtcgacgccggtgatcgtactggatagcgcggacgacagtggtgtccatggcgataacatgaccaatcacacccagccgacatttgccctgcagcatattgatgatgatgccgttcgcgttacggtcagcgtagagcatggcggcgtcaccaccacatttgacgccacgaaagacgcaggcggatggacctttacgccgacaggggcgtgggcggatggtgattataccctgagtgtgtcagtcgaagataaagcggggaacaccagccattctgcatcgctgacggtgacggtggacacgcaaatcgccattaataacattgaactggtcaatgacagcggtattcccgacgataatctgactaataacgtgcgtccgcacttccaggtgacggtaccgactgatgtcaacgtggtgcgcctgagcattgacggcggcaagacgtggttcaacgcgacccagagcgcgacgccgggtgtctgggattatacctggctggctgatgtgggagaggggaagcataccctgacagtggaggcgaccgacaaggcgggaaacaaaacgacgcagcaactggacttcatcatcgataccctactgtcagaaccgactatcgtgctggacaacacggacgacagcggaacaaaaggcgataacctgaccaacgtaaataagccgacgtttttactgggcaatattgacgcagacgcgcggtatgtcacggttgaggtgcaacatggcggcacgaaagaagtgctgacggccaccaaaggcgcgaccggcatctggagcgtgacaccgaccggcacatgggcagatggcgactatacgctgacggtgagggtggaggatgatgcggggaacgtaaaatactcagcgccgctgacggtcacggttgacacccaaatcaccatcgatgttattgaactggttaatgataacggtattcccggcgacaacctgaccaatgacgttcgtccacacttccgcgtcacggtgccaggggatgtcaacgaggtacgtctgagtatcgacggcggtaatacgtgggttcgtgcaacacagggcacggcagggatctgggattacacctggccgaaagatgtgaccgacgggctacataccctgacggtagaagcgaccgataaggcgggaaataagacgacgcagacgctcgattttaccattgatacccggctgtcaacgcctaccatcgctatggatagcagggacgatacaggtgccattggcgatcatattacgagcgtcaaaagaccgggctttactattggcaatattgacgccgatgcgcactcggtcattttgcggatcacacagggcggcaatagccaggaagtgacactaacccaggttggaggacagtggcgctttacgccagatgctgactgggcggacggtagctatacgctgacggtagaggtaacggataacgcaggaaacgttcgtcagtccacgccgctggtggtgacggtggacacgcaaaccagcattactgatattacattggtcaatgatcatggcgtgcctgatgacaatctaactaatagcacccgtccgcagtttgagatcacggtgccggcggatgtgaattctgtgcaactgagcattgatgggggcgcaaactgggtgagcgcgacgcagggtatcgaaggcgtctggggctatacctggccaacggatatgggcgatggaaaacacaccctaaccgtcatggtcaccgacagagcgggcaatacggcgacgcaaacgcttgaatttttcatcgacacccggttgtcgacgccgaccattgcgctggatagcacggatgataccggtacgcctggcgatgatatgaccaatcgcacccgaccgacctttattctgcagaatatcgattcggatgttatcaacgttacagtcagcgtcacgcataatggaacgacaacctcgtttactgcgacacagggggctggaggatggagctttacaccgccagcgccgtggggcgacggtgattatacgctgacggtgacagtggaggatcgggcgggaaatacgcgtccgtctacgccgctgacggtgacagtggatacgcaaatagccattgatcgtattgaattagtcaacgatagcggcgtccctggcgataatgtgacaaaacatgtgcgtccgcagttccagatctcggtaccggatgatgtggaaaaggttcttctgagtattgacggcggcacgacctgggttactgcaatcaagagttcgacggctggcatttgggattacacctggccgacggatatgccagagggacagcataccctgaccgtggaagtgactgacggtgcgggtaataagatgacggagacgctcaatttcactatcgatatcacgttgttaacgccaaccattgagctagcgcccgatcaggataccggacagaataagaacgataatctgaccagcgtcactcagccggtatttgtgttggggagtatcgataaagatgttcgacacgtggaattgagtattgagcataacggcacgtttaaaacggtggtactcaccgaatcagccgacggctggcgctatcgaccggattctgctttggcggacggtagctacacattcaccgtgacggtaacagatgtggcaggcaaccagcaaacatccgcgcctttaaaggtgacgatagacggtacgttgactacgccggtgattgaactggcagctggcgaagatagcggtactgttggcgatcgcctcaccaatcacgatcggcctgtgttcgacatacatcaggttgattctgacgttacgcgcgtgatggtcaaagtaacttacaacggtaaaacgcacgaggaagcggcggtattcaccaatggtcaatggcgctttacgccttctgcgagctgggctgatggctcatatcagttagccgttgtggtggaagatctggcggggaatgtaaaagagtctgcgccgtttgaggtgcgtattgataccacgacaaccattaacaatatcgtattgcttaatgataccggcgtgcagaatgatcaattaacgaatgttgccaaaccgtcattcagaattgacgttcccggtgatgtcgtccaggtacgtgtaaccctggatggtggcgctaactggaatgtgatacgcaaaaatgccgacggacagtggatttttgacagcccgaatactctggttgacggcacatatacccttcgcgtagaggccacggatgaggcaggtaatattgcgaataaagatttagtatttaatatcgatactaatatacaggttcctactattgctttagacgcaggacaagataccggagcgaataccgccgataatattactaatatttcacgacccacctttacgattggtaatgttgaccccgatgttatcaaagtcgtggtgacgattgatggtcatgattataacgcgactaaggttggggctggttggcaatttacaccaggcaatgccattccggatggttcttataatattaccgttacggttgaagataaggccggaaataccgcgacatcgaaaccattacctgttgtgatagatacgacggctgaaattgaaagcgtcacgttggttacagatagcggtgatagcgatgtagataacattaccaaagtcgacaagccgcagtttagtattgttaccgctgatgatattacccatgtgcgcgttaaaatcgataacgccgctaattggattgaactcacaaaaggaggggatggccgctggatatttaatgtcggttcggcattacctgatgggcaacacactctcttggttgatgtgactgatatcgccggcaacgttgcgcaagaaacgctgcagtttacgattgatacgactctgcgagagccgacaattgtactcgatcccacccatgatactggtgatgatactaatgataatcttaccaggattaacaaaccggtgtttattatcggtaatgtcgataatgatgtatcacacattgtggttcatattgatggtcgggattacaccattgaaaacacaggggggaatttaacctttacgccggatcaaccgctgtctgacggtcagcatacgatctctgttaccgtaacggatattgctggtaataccaaaacatcggccgaactgcggattgaaatcgacacgcaggttcagattgacagtgttacgttaacaacagatagcggcgtcaacgatcacgataatgtcaccaatgctacccgtccctcttttgaaattgcaacgcctgatgatgtgacatcggtgctggtttctttcgatggcgtaaactggacgcccatcagtaaaaatgcggccgggcagtgggaatttactgcaggtagcgcattgcctgatggtcattatactctccatgtccaggcgacggatcgggcagggaatacggcaaattccacgctgggcttcaccgtggatacgcagattgacggcctgagcgtcgtgatgctggacgacgccggaaaggattctacggatggtattacgaatattacctctccacgttttgaaatttcagccagagaaccgctgcagagcgtgacggtaattttaaacgggaaatccagcacactgactcagggggcaggtaataaatggctgtttacccctgatacaccgttagtggatggaacttacaaaatagaaatagtggctgaagatatcgcaggtaataaaattagcaaagaggtatcattcacaatagacactattgtttctgatcccagtattgatttgctggatgcggatgatactggcgaaagcgctgttgataatattacgagtgtcactacaccacgtttcgttattggcaatgtacccgccgatattgatactgttgtaatcagaattaacggcgtttcttatccggttacggcaaatggcaataacctctgggaatttcaggttcccgttgcgttaaacgatggcgtatatgaagccgttgttgtcttcagagatattgccggaaatacttctgaaactaagctgccctttaccattgataccacgacaagcgtcagtgtcagaatggagccagcgtctgataccggaaattccaatagcgataaccttacgaataagcaaaatcccaaattcgaaggtactgcagagcccaatgcgaaactggtgattaccattgttgacgataagtcaggtcgggaggttttaaaacaaacgattacggttggcgctgatggcaactggagtgtgacgccgaatatactgccggatggcatgtataccatcaacgtcgtcgcaacagatgtcgcgggaaatactgcgcaaacgcaggaaagattcactatcgatacggttacgatcgatcccaccattcgcctttcggatccatctattgatgatcagcatgaagcaaccagcctgcgtcctgagttcaaagggtttgccgaagcgttctcgacgattatgattcagtgggatgggaaagtggtcggctcggcaaacgccaatgcgaatggcgaatggagttggacgccgccatcagtattagcgccaggctcctatgttgtgagcattgttgccaaagataaagcgggtaatgaatcgtcgcaggtcgactttcctgtcgtaatacctgttattgatgtcacgcctccaaccataaagctcagcgaggagagcgatagtggcgccttaggagactttaccacgaataataaaacgccgaccctgattgggagcacgttacctaatacgattgtgagtatttatgtggatggcgtgaaggtcggcgaggcgacagcggatacagcgggtcgatatactttccagttatcggaaatgaaagatggccattatgtcgtccaggtgggtatcgtcaaccctcgcgataatagcgaactgcgttctaccgccgttgatgtcactatcgataccgaggttgctgaactggtatggaatatatctggaatgcatgagggcggatatatcaatacggtgacgccggagattggcggcaccagtgagccaaacagcaaaatcactatctttgtgaatggcgttgaaaaagcgattgcttatacgacaggcgcaggacactggggcgtagtattacccgctttgggtaatgacggtaattatgaattaacgtttaaagttgaagacgttgccggtaatatcagagagtttggtccgcagaatgtaatactggatacagtaatttcgccgttaaccgtggtattacgcgaagctgatgacagtggcaaagttggcgactggatcaccaataaatctcatgtcaccatcgatggtactgccgaagccggaagtactttaaccatcaggaatccgcagggagtggttattgctaccctggtggtaggcaatgatggtcgatggagcgcagaattagatctgcgtgaaggtagtaatgcctttgtcgtggtatcggaagataaagcgggcaacagtcaacaaaaagagattctgatagaacatgatacgcagattgaaatcagcgatatttcattaagtcgggatactaatagcggtgataaatatgatctgattaccaataataagtctccggtactggttgccatgaccgatcccggcgcgacggtacaggtttatattaatggtgtgttacaaggcacagtagaggcgagttcgtcaggtaatattagctataccatgccggcaaatagcgccgacggcgagtatcaggtgcaatttgttgctacggatactgctggtaaccgggttgagtctgcgattacaaccgtgacaatcgattctcaaattgctgtctttgatattgatgaagattcattaccggccctctctaataaccgagcgttgtcagtctcaggtgtcggggaggctggttctcaggtcagcatctttgtcgatggtaaattagtcaacgttgttatggttgaggctgatggcacatggcgcgcgccgatactgctgcaagatgatggtacgtttaatattcatttcagcattactgacgttgctggcaacactgaagtgagcaaggattatagcgtggatgtcgattcatcaaccgacttcccaacgctcaaccttgaagatgcaagcaactctggttcacttgacgatctgattactaatcacaacaagcctgtattagttggcaccgcagaagcgggagccacaatccatatttatgtggatgaaaagatcgtggcaaatgttcttgtgcttgaagatggaacctggtcctatcagtttgataatgcgttaaaagatggtgaatattctatccgtgtggttgccgaagacccggcaggtaatacggcagaatcgcctcgcttactcgtcacgatagataccagtacgtttatcgataatcctgctatggtggcaggttctgataatggtattttcagtaatgatagtataacgagtcagacccggcctacgtttagtatttttggagaaatgaaccagagtgttcagattttcattgatggagtgctagtcgatacgatcacggtgaccgacagaaatcaagtttatcgacctgagtcaccgttgggcgatggttcccatagcatttattatgttatcaccgataaagcaggcaacacggctacctcgaaaacgctaaactttactatcgatacctttaatacgacgcctgtcgccattgattctatcggtggacaaacgttagcagagatgaccggtagtgatggcaaaatatatataacggacacgacgcgtaacttattgtttagtggcagtgccgagcccaatagcaaaatagaaatcatcattaatggcttaaatgtgggggaagtttgggttaatgaaaaaggccactggcagatgccggtgaacccgctttatttcacagaaggccaactggatatcactgttaaatctacggaccgtgctggtaacgtaaatcaggaaaagtattccatttgggttgatacgcatatcaaggtatttaccagcgagcttgatgacaataaatcatcatcgaaaacggaatggtggagtaatagcgatctcattaccatgcgaggcacgggtgaaattggcgctacggtatcattaatcgtggctggcgtcacgctggcaactgctgttgtggcggcaacaggacgatgggaattatcaacagacaagcttccagaagggacttacgatattagtttggtcattgaagatagcgccggaaatcgttgggaagatgtgcgtgaaatatttattgaccgaacgccgccaaatgctccggtcgtaacgtattcagatattgtcaacgatctaattattatgcaggggacggcggaagccaaatctcagctaataataaccgatagtgaggggaatacttatacgttaaccgttcctgataatggtaaatggagtatggctatcccgtatccatcagaagggaagtttaccattacgagtgtggatgctattggtaaccggagtgatgatgtccctctcgatatcatgaaagaggttcccgttatttcattatctccagactcagacagtggtacggtgggcgataatattacgcgagataagcaacctacctttattatcgggaatctggaaagcgatgttgtggtcgttcaggtcgatatcaatgggaccgtatataatgctgaaaaaaatgccgatggcgtttggttctttacgccaggtacaccgttagctgatggttcctatacgatatcggtaatcgcaagcgatgccgcgggtaatcagaaaaactcgttacccattactgtcacgatcgacagcacgctgacggtgccggagattgcgttggcagcaggtgaagacaatggcgcttcagacagcgataacgtgacgaatcacacccagcctaagttcacgctgcagcatattgatgctgatgtgaccggggtgaccgtaaacgtgacgcataatggcgtgacagacatctatcaggcgacgcaaggcgcggatggctggaccttcacgccgccagccgcctggaatgacggtaactacacgctgagcgtgacggtggtggatcgcgcggggaattcacagcaatctgcttcgctagcggtgacggttgactcaacggtgacggtaacagcggatagccagcatgacgatgcgagcgatgacgccacggcaacagcggttactccaccggagtctgaaacagtgaatgccgaaagcgctacgcatcttcgtacagagccgtctgcggcggaagaaagcgtggtgaaggtgacagcctatagtattacattgttaaacgctgactctggggatgaaatagatcgttcaattagtcagacaccttcttttgaaatatcagtacctgagaatattgttaatgtcagtattatgtttgaaggagaagagtttactctgccgataactaaccagaaagcaatattcgaagttccgctatctttggaagatggtgaatatactatggacgtgaaattcattgataaagacaatgatttcctgattaaggagaaaacattctcagtcgatcactcctcggcggatattgtgaacgcaatgaatgtaagaggaaagaccgaggatgatattaatgattccccttccacgagttctgtagggcacaacaataacggcgctattgatgttttcgccgttaatgaagttacgctacctgtagataatcaagaagaacacgcataa

SEQ ID NO: 38994 - DNA, 492 bp, Salmonella typhimurium
atgcgccggattttatcggtattactggaaaacgaatctggggcgttatcgcgggttatcggcctcttttcgcaacgcggatataatattgaaagcctgaccgtcgcgccgacagacgatccgacgttgtcgcgcatgactatccagacggtaggcgatgaaaaagtgcttgagcaaattgaaaagcaactgcacaagctggttgatgtgctgcgcgtcagcgagctgggacagggagcgcacgttgagcgggaaatcatgctggtgaaaatccaggccagcggctacggacgggaagaggtgaagcgtaatacggaaattttccgtggtcagattattgacgttacgccaacgctgtataccgttcaactggcgggcaccagcgataaactggatgcttttctggcctcgctgcgcgacgtggcgaaaattgttgaagtggcgcgttcaggcgtcgtcgggctttcgcgcggcgataagattatgcgctga

SEQ ID NO: 38995 - DNA, 459 bp, Salmonella typhimurium
atgttccggggggcaacgttagtcaatctcgacagtaaagggcgcctgaccgtgccgacccgttatcgggagcaactgatcgagagcgctaccggtcaaatggtatgtaccattgacatccatcacccatgcctgctgctttaccccctgcctgaatgggaaattattgagcaaaagttatctcgtctgtcgagcatgaacccggtagaacgtcgcgtacagcgtttactgttgggccatgccagcgaatgtcagatggatggtgcaggtcgattactgatcgcgccagttctgcggcaacatgccggactgacgaaagaagtgatgctggttggacagttcaacaaatttgagctgtgggatgaaacgacctggtatcaacaggtcaaggaagatatcgacgctgaacagtcagctaccgaaacgttatcggagcggctgcaggacttgtctctataa

SEQ ID NO: 38996 - DNA, 942 bp, Salmonella typhimurium
atgatggaaaattttaaacacactacggtactgttggatgaagccgttaatgggctgaatattcgtccggatggtatctatattgatggcacatttggtcgcggcggccactcgcgcctgatcctctcgcaactgggcgaagaggggcgcttgctggcgatcgatcgcgatccgcaggcgatcgccgttgcgcagaccattaatgatcctcgcttctccatcattcatggacctttttccgcgctggctgattatgtagccgagcgcgagcttaccggcaagattgacgggatccttctcgatcttggcgtctcttctccgcagcttgacgatgcggagcgcggtttttcatttatgcgcgacggtccgctggatatgcgaatggacccgacgcgcggccagtctgccgccgagtggttacaaacggcggaggaagcggatatcgcctgggtgctgaaaacattcggcgaggagcgttttgccaaacgtattgctcgcgccattgttgagcgcaatcgcgaacagccgatgacccgcaccaaagagctggcggaagtggttgcggcggcgaccccggtaaaagacaaattcaaacatcccgcgacccgtaccttccaggcggtgcgcatctgggtaaacagtgaactggaggagatagagcaggcgctaaaaagctcgctcagcgtactggccccaggcgggcggctttcaatcatcagtttccactcgctggaagaccgtattgtgaaacgctttatgcgtgagcaaagccgcggtccgcaggtaccggcgggattaccgatgacggaagcgcagctcaaaaaactgggcggtcgtgagttacgagcgttaggcaagttgatgccgggtgaaaaagaggtagctgaaaatcctcgggcccgtagttcagttctgcgtatcgcagagaggacgaacgcatga

SEQ ID NO: 38997 - DNA, 1767 bp, Salmonella typhimurium
atgaaagcagcggcaaaaacgcaaaaatcgaaacgccaggaagaacagaccaacttcatcagttggcgttttgcgttgctgtgcggctgtattttactggcgctggtttttttacttggacgcgcggcgtggctacagattatcgccccggatatgctggtgcgtcagggcgatatgcgttcgctgcgtgttcaggaagtctccacctcacgcggtatgattaccgaccgttccgggcgtccactggcggtcagcgtaccggttaaggcgatctgggccgacccgaaagaagttcatgacgccggcggcatcagcgttggcgatcgctggaaagcgctttctactgcgctcaatattccactcgatcagctctccgcccgtatcaacgccaacccgaaagggcgttttatttatctggcgcgccaggtaaatcctgacatggcggactacatcaaaaaactcaaactgccggggattcatttgcgtgaagagtcccgccgctactacccgtcaggagaagtaaccgctcacctcatcggttttaccaacgtcgacagtcaggggattgaaggcgttgaaaagagctttgataagtggcttaccggtcagcctggcgagcgaatcgtgcgtaaagaccgctatggccgcgtgattgaggatatctcctccactgacagtcaggcagcgcacaatctggcgttaagcattgatgaacgcttacaggcgctggtttaccgcgaactgaacaacgcggtggcgtttaacaaggcggaatccggtagcgcggtgctggtcgatgtcaataccggtgaagtactggcgatggcgaatagcccttcctataaccccaacaaccttgccggtacgccgaaagacgcgatgcgtaaccgtaccatcaccgacgtgtttgaaccgggttctacggttaagccgatggtggtgatgactgcgcttcagcgcggtatcgtcaacgaaaatacggtgttgaataccgttccataccgaattaacggccacgaaattaaagacgtggcgcgctacagcgaattaaccctgaccggggttctacagaagtcgagtaacgtcggtgtatccaaactggcgttagcgatgccgtcctcagcgttagtagatacttactcacgttttgggctaggaaaggcgaccaatttggggttggtcggagaacgcagtggcttatatcctcaaaaacaacggtggtccgacatagagagggccaccttctctttcggctacgggctaatggtaacgccgttacagttagcgcgagtctatgcaaccatcggcagctatggcatttatcgcccgctgtcgattaccaaagttgatccgcctgtacccggcgaacgcatcttccctgaatccaccgtacgcaccgtggtgcatatgatggaaagcgtggcgctgccgggcggcggcggcgtgaaggcagcgattaaaggctaccgtatcgcgattaaaaccggtacggcgaaaaaagtggggccggacggtcgctacatcaacaaatacattgcttacaccgcaggcgtcgcgcctgcgagtcagccgcgcttcgcgctggtggttgtcatcaacgatccgcaggcgggtaaatactacggcggcgccgtttccgcgccggtatttggtgccatcatgggcggcgttctgcgcaccatgaacatcgaaccggacgcgctggcaacgggcgaaaaaaatgaattcgtaattaatcaaggcgagggaacaggtggcagatcgtaa

SEQ ID NO: 38998 - DNA, 1488 bp, Salmonella typhimurium
gtggcagatcgtaatttgcgcgaccttcttgctccgtgggtggctggactacccgcgcgagaactgcgagagatgacgctcgacagccgtgtggctgcggcgggcgatctctttgtggcagtggtgggtcatcaggcggacgggcgtcgatatatcccgcaggcgatagcgcaaggcgtagctgccattattgcagaggcgaaagacgaggcgagcgacggtgagattcgcgaaatgcacggcgtaccagtcgtctatctcagccagctcaatgagcgtttatctgcgctggcgggccgcttttaccatgagccatctgaaaacatgcgtctggtggcggtgaccggcaccaatggcaagaccaccaccacccaactactggcgcagtggagccagttgctcggcgaaaccagcgcagtgatgggaacggtaggcaacggactgttgggtaaagtgatcccgacggagaacacaaccggttccgctgtggatgttcagcatgtgctggccagtctggttgcgcagggcgcgaccttcggcgcgatggaagtctcttctcacggcctggtgcagcatcgcgtggcggcgttgaaatttgccgcctccgtgtttactaatttgagccgcgaccatctcgactatcatggcgatatggcgcattacgaggcggcaaaatggatgctttattccacccaccatcatggtcaggcaatcgtcaacgccgatgatgaagttggacgccgctggctggcgtcgctacccgatgcggtcgcggtatcaatggaagggcatatcaaccctaactgtcacggtcgttggctgaaagcggaggcggtggagtaccacgaccgcggagcgacgattcgttttgcttcaagctggggtgaaggcgaaatcgaaagccgcttgatgggcgcgtttaacgtcagcaacttactgctggcattggcgacgctactggcgctgggctatccgttaacggatttgctgaaaaccgccgcgcgtttgcagccggtttgcgggcgtatggaagtgttcactgcgccaggcaaaccgacggtggtggtggattacgcgcacacgccggatgcgctggaaaaagcgttgcaggcggcgcgtctgcattgcgccggaaaattgtggtgcgtctttggctgtggcggggatcgtgacaaaggtaagcgcccactcatgggggccattgccgaagaattcgcggatatcgtcgtggtgactgacgataacccgcgtaccgaggagccgcgcgccattatcaacgatattctggccggaatgctggacgccgggcaggtcagggtaatggaaggccgcgctgaggcggtaaccaatgccattatgcaggcaaaagacaatgacgtcgtgctgattgcaggtaaagggcacgaggattaccagattgtcggcacgcagcgtcttgattattcagaccgcgtgaccgcagcgcgtttgctgggggtgatcgcatga

SEQ ID NO: 38999 - DNA, 1359 bp, Salmonella typhimurium
atgattagcgtaacgctcagcaaaattgccgatgtccttggcgccgaacaccgcggggcggatctcacgctcgatacggtcattaccgacacacggaaagtgacgccgggatgcctgttcgtggcgctgaaaggggaacgctttgatgcgcatgattttgctgataaagcaaaagcgaacggcgctggcgccctgctggtcagtcgtcctctggatatcgatctcccgcaggtgattgtaaaagacacgcgtcaggcatttggccaactggccgcctgggtacgtatgcaggtaccggcgcgggtggtggcgttaaccggttcgtccggcaaaacctcggtcaaagagatgaccgccgcgattcttagccagtgcggaaatactctgtataccgcaggcaattttaacaacgacatcggcgtgccgataacgctgctgcgcttaaaccatgattatgactatgcggtaatcgagttaggcgctaatcaccagggagaaatcgcctggaccgttagcctgacgcgcccggaagcggcgctggtcaataacctggcggcggcgcatctggaaggcttcggctcgttggccggcgtggcgaaagcgaaaggcgaaatctataccggtttgcctgagaacggtatcgcgattatgaatgccgataataatgactggctgaactggcaaagcattattggcgatcgtctggtgtggcgcttttcgccgaatgcggcaaacagcgactttaccgctgcgaatatccacgtgacgtcacacggtaccgaatttaccctgcaaacgccgatgggcagcattgatgtgctgctgccgttgccggggcggcacaatattgccaacgcgctggcggccgctgctttatcaatggcggtgggggctacgctgacggcgattaaagcagggctggcggcgttaaaagccgtacccgggcgtctgttcccgattcagctaagtgaaaaccaactggtactggatgacgcttataacgccaacgttggttcgatgaccgccgcagtgcaggtcctttctgaaatgcccggctaccgcgtgctggtggtaggcgatatggccgagctgggcgcagaaagcgaagcgtgccacctccaggttggtgaggccgcaaaagcggcgggtattgatcgcgtgttaagcaccggaaaactcagtcaggctatcagccacgccagcggcgtcggcgaacattttgccgataaagccgcgctcattgcgcgtttacacgctctgcttcaggagcaaccaatgatgactattttagtgaaaggatcacgcagcgccgcgatggaagatgtggttcatgcgttacaggagaaaggttcatgttag

SEQ ID NO: 39000 - DNA, 1647 bp, Salmonella typhimurium
atggaaattttcttcacaatactcatcatgacccttgtggtctcgctgtcgggggtatttacgcgtgtattacccttccagcttcctttaccccttatgcagatcgccgttggcgcgctgttggcgtggccgacgtttggtttgcatgtggaattcgacccggaactcttcctggtgctgtttattccgccgctgctgtttgcggatggctggaaaacgccgacccgtgaatttcttgagcatggacgagagattttcgggctggcgctggcgctggtcctggtaacggtcgttggaatcggcttcctgatttattggctggtgcccggcattccgctgatccccgcctttgcactggccgccgtgctgtcgccgaccgatgcggtagcgctctccggaattgtgggcgaggggcgtatcccgaaaaaaatcatgggcattctgcagggagaggcgttaatgaacgacgcctccggtctggtatcgctgaaattcgccgtcgcggtggcgatggggacgatggtctttaccgtcggcggcgcgacgctggaattttttaaggtcgctatcggcggtattctggcgggttttgtagtcagttggctgtatggccgctcgctgcgttttttgagccgctggggtggcgatgaacccgcgactcaaatcgtcctgctgtttctgctgcccttcgcgtcttacctgattgccgaacatattggcgtctcaggcatcctggccgcggttgccgccgggatgaccatcacccgttctggcgtaatgcgccgcgcgccgctggcaatgcgtttgcgcgcgaacagtacctgggcgatgctggaatttgtctttaacggtatggtctttctgctgttgggactgcaattgccagggattctggaatcttcgctggcggcggcggaagctgacccgaatgtcgaaacctggatgctctttaccgatatcgtgctgatttatgcggcattgatgctggttcgcttcggctggctgtggaccatgaaaaagttcagcctgcgctttttgaagaagaaaccgatggagttcgccagctggacgtcgcgtgaaattctgattgcttccttcgctggcgttcgtggggcgatcaccctggctggtgtgctctctataccgttacttttgccggatggcagcggatttccggcgcgttatgaactggtattcctggcggctggcgtcattctgttctcgttatttgtcggcgtgatcatgctgccgctgctgttgcaacatctggaagtcgccgatcatgcgcaacagttgaaagaggagcgtatcgcccgcgcggcgacggcggaagtggcgattgtcgccattcagaaaatggaagagcgtctggcggcggataccgaagaaaacatcgataatcagttgcttactgaagtaagctcacgtgtcattggtaacttgcgtcgccgtgccgatgggcgaaacgatgtcgaaagctccatacaggaagaaaacctggagcgacgtttccgtctggcggcgctgcgttccgagcgcgccgagttgtatcatctgcgcgccacgcgagaaatcagcaatgaaacattgcaaaagctgctgcacgacctggatttgatggaagcgctactgatagaaaatcagtag

SEQ ID NO: 39001 - DNA, 2577 bp, Salmonella typhimurium
atgacactaaatgggaaatctccagtgaagttcgtaaagtatttattgatccttgcagtatgttgcatcctgctgggagcaggctcgatttatggcctttatcgctatattgagccacagctacctgacgtcgcgacattgaaagatgtgcgtttgcaaattccgatgcaggtttacagcgcggatggcgaacttatcgcgcaatatggcgaaaaacgtcgtattcccgttacgctcgatcaaattccgccggaaatgatcaacgcctttatcgccaccgaagatagccgcttttatgagcatcacggcattgacccggtaggtattttccgtgcggccagcgtcgcgctcttctccggtcacgcatcgcagggagcaagtaccattacccagcaactggcgcgaaacttcttccttagccccgaacgcacgctgatgcgcaagatcaaggaagcgtttctggcgattcgtattgagcagttgctgaataaaaatgagatcctcgaactctatctgaacaagatctatctcggctaccgcgcctatggcgttggcgcggcggcacaggtctactttggtaagacggtcgaccagcttagtctaagcgaaatggcggttatcgccgggctaccgaaagcgccttctacctttaacccgctctactcgatggatcgggcgatagcgcgccgtaacgtagtgctttcgcgaatgttaagcgagggatatatcactcaggcgcagtacgatcaggcccgtagcgaacctatcgacgcaaattatcacgcgccggaaatcgccttctccgcgccttatctgtcggaaatggtgcgccaggaaatgtataaccgttatggcgaaagcgcttacgaagatggttatcgtatttacacgaccatcacccgcaaagtgcagcaggccgcgcaacaggcggtgcgtaataacgtgctggactatgacatgcgccacggttatcgcggcccggcgaatgtgctatggaaagtgggcgaaacagcgtgggacagtaaaaaaattaccgatacgttgaaagcgttgccgacctacggaccgctgcttcccgccgtggtcaccagcgctaatccgcaagaggcgaccgctgcgcttgccgacggtacgtccgtttcgctacatatggaaggaatgcgttgggcgcggccttaccgctcggatacgcagcaggggccgacgccgcgtaaagttaccgatgtcgtccagacaggtcagcaaatctgggttcgtcaggtggataacgactggtggctggcgcaggtaccggaagtgaactccgcgctggtttcgcttaacccgcaaacaggcgcggtactggcgctggtcggcggtttcgattttaatcagagtaaatttaaccgcgcgacgcaagctttgcgtcaggtggggtcgaacatcaaaccgttcctctacaccgccgcaatggataaagggctgacgctcgccagtatgctcaacgatgtgccgatttcccgctgggacgccggggcaggttcagactggcgtccgaaaaactccccgccgcagtacgccggaccgattcgtttacgccaggggctggggcagtcgaaaaacgtggtgatggtacgcgccatgcgcgccatgggcgtcgactatgcggcggagtatttgcaacgcttcggcttcccggcgcagaatatcgtgcataccgaatcgctggcgctgggctccgcctccttcacgccgatgcaggttgcgcgcggttatgcggtgatggcgaacggcggtttcctgatcgacccgtatttcatcagcaagattgagaacgatcagggcggcgtgatcttcgaagcgaaaccgaaaatcgcctgcccggagtgcgatatcccggtcatttacggcaatacgcagaaatctgacgtgctggaaaacaccaatgtggaagaggtcgcggtttcgcaagagcagcaaaacagcgccgtaccgatgcctgagctggaacaggcaaaccaggcgctggtcgcgcaaaacggcacgcaggaatacgcgccgcatgtgatcaatacgccgctggcgtttctgatcaaaagcgcgctgaacaccaatatctttggcgaacccggctggatgggtaccggctggcgtgcggcgcgcgaccttaaacgtcgcgatatcggcggcaaaaccggtacgaccaacagctcgaaagacgcatggttctccggctatggtcctggcgtcgtcacttccgtatggatcggctttgacgatcaccgccgtgatttaggccgcaccaccgcttccggcgcgatcaaagatcaaatctccggctatgagggcggcgcgaagagcgcgcaacctgcatgggacgcctatatgaaagccgtgctggaaggcgtgccggaacagccgctaacgccgccgccgggcatcgtcacggtgaatatcgaccgcagtaccggacaactggcgagcggcggtaacagccgtgaagagtatttcatcgaaggcacgcagccgacacaacaggcggtacacgaggtgggaaccaccattattgataatggtgaaacacacgaactgttctga

SEQ ID NO: 39002 - DNA, 1083 bp, Salmonella typhimurium
atgttagtttggctggccgagcatttggtcaaatattattccggctttaacgtcttttcttatctgacgtttcgcgccatcgtcagcctgttgaccgcgctgttcatctctttatggatgggcccgcgtatgatcgctcgtctgcaaaaactctcttttggccaggtggtacgtaacgatggcccggaatcgcacttcagtaaacgcggtacgccgacgatgggcggcatcatgatcctgacgtcgattgtgatttccgttctgttatgggcttacccgtctaacccgtacgtctggtgcgtgctggtggtattgatcggctacggcattatcggttttgtcgatgactaccgcaaagtggtgcggaaagataccaaagggctgattgcgcgctggaaatatttctggatgtcggttatcgcgctcggcgtggcctttgcgctttatctcgtcgggaaagacacgcccgcgacccaactggtggtgccgttctttaaagatgttatgccgcaattggggctgttttacattctgctgtcctactttgtcatcgtcggtacgggtaacgccgtgaacctgaccgacgggcttgatggtctggcgattatgccgactgtcttcgttgccgccggctttgcgctggtggcctgggcgaccgggaacatgaacttcgccaattacctgcatattccgtatttacgccatgcgggcgagctggtgattgtctgtacggcgattgtcggcgcgggattaggattcttgtggtttaacacctatccggcgcaggtttttatgggcgatgtcggatcgctggcgttgggcggtgcgttgggcattatcgccgtgctgctgcgtcaggaatttctgctggtgatcatgggcggcgtctttgtggtggaaactctgtcggtcatcctgcaggtgggttcctttaaactacgcggacagcgtattttccgtatggcgcctatccatcaccactatgaactgaaaggctggccggaaccgcgcgtgattgtgcgcttctggattatttcgctgatgctggtgctgattggcctggcaacgctgaaggtacgttaa

SEQ ID NO: 39003 - DNA, 1317 bp, Salmonella typhimurium
atggctgattaccaggacaaaaacgtcgtcattattggtctgggcttaaccggactctcttgcgtggacttttttctcgcccgcggcgtgacgccgcgggtgatggatactcgcgtgacgccgccgggtctggataagctgccgcaagaggttgagcgtcacgttggcggcctgaacgacgagtggctcttagcggcggatttaatcgtcgccagccctggtattgctctggcgcatccctctcttagcgctgccgccagcgctggagtggaaattgtcggcgatatcgaactgttttgccgcgaagcgcaagcgccgattgtggccatcaccggctcgaacggcaaaagcaccgtgaccaccttagtgggcgagatggcgaaagcggcgggcgtcaatgtcggcgttggcggcaatatcggtcttccggcgctgatgctgctggatgccgatcgcgaattgtacgtgctggaattatccagtttccaactggaaactacctcaagtttgcaagcggcggcggcaacggtgctcaacgtcactgaagatcatatggaccggtatccgtttggtttgcaacagtaccgggcggcgaaactgcgcgtctacgagaaggcgaaagtgtgcgtagtgaatgccgatgacgcgttgacgatgccggtacgcggggccgatgaacgctgcgttagctttggcgtcaatatgggcgattatcaccttaatcgtcagcagggcgaaacctggctgcgagtcaaaggcgagaaggtgctgaacgtgaaagagatgaagctttccggtcagcataactataccaatgcgttagcggcgctggcgctggcggatgccgtaggtctgccgcgcgccagcagtttgaaggcgttgacgacatttaccggtctggcgcatcgcttccagctggcgttggagcataacggcgtacgttggatcaacgactcgaaagcgaccaacgtcggcagtaccgaagcggcgctaaacggtttgcatgtggacggtacgctacatctgctgctgggcggcgacggtaagtcggcagacttttctccgctgacacgctatctgaccggcgatcgtatccgcctgtattgctttgggcgcgatggcgcgcagcttgccgcactgcgtccggaaatcgcccaacagactgagacgatggaagaggcgatgcgtttgctggcgccgcgcgttcagccgggtgatatggtgctgctgtcgcccgcttgcgctagcctcgatcagtttaaaaattttgagcaacggggcgatgtctttacccgtctggcgaaggagttaggttga

SEQ ID NO: 39004 - DNA, 1245 bp, Salmonella typhimurium
atgcgtttatctctcccccgtctgagaatgccgcgcgtaccaggctttggcctcctggcctggctgtttgcggcgcttaaaggctgggtgatggcttcgcgcgataaagacgccgacagtctgatcatgtatgaccgcacgctgctatggctgaccttcgggctggcggcgattggttttgtcatggtgacgtcggcctccatgccagtcgggcagcgcctggcgaacgatccgtttttgtttgccaaacgtgatgcgctctatatcttcctggcattttgtctggcgatggtcacgctacgtttgcccatgaccttctggcaaaaatacagcacgacgatgctgattgcgtcgatcattatgctgcttatcgtgttggtcgtcgggagctcggttaacggggcgtcgcgctggattgcgctggggccgctgcgtattcagcctgcggagtttaccaagctgtcgctgttctgctacctcgcgaactatctggtgcgtaaggttgatgaggtgcgaaataacctgcgcggctttttaaaaccaatgggcgtgattctggtgctggcggtgttactgctggcgcagcctgacctcgggacggtggtcgtactgtttgtcaccacgctggcgatgctgtttctcgccggggcgaaattatggcagttcatcgccattatcgggatgggcatctcggcggtgattctgttaatcctcgccgaaccgtatcgtattcgtcgcgttacttcgttctggaacccctgggaagatccgttcggcagcggttatcagctgacgcagtcgctgatggcttttggtcgcggtgagatatgggggcaagggctggggaattcggtgcagaaactggagtatttgccggaggcgcacaccgatttcatcttcgccattattggggaagaactgggttatatcggtgtggtattggcgcttttaatggtattcttcgtcgcttttcgcgcgatgtcgattggccgtaaggcattggagattgaccaccgtttttccggatttttagcgtgttctatcggtatctggtttagtttccaggcgctggtaaacgttggcgcggccgcggggatgctgccgaccaaaggtcttacgctgccgctgatcagttatggcgggtcgagtctgttgattatgtcgacggccattatgtttttattacgtattgattatgaaacgcgtctggaaaaagcgcaggcgtttacacgaggttctcgatga

SEQ ID NO: 39005 - DNA, 1068 bp, Salmonella typhimurium
atgagtggtcaaccgaagcggttaatggtgatggcgggcggtaccggcgggcacgtgttcccgggactggccgttgcgcatcatttaatggcccagggctggcaggttcgctggctgggtaccgccgatcgtatggaagcggatttagtgccgaagcatggcatcgacattgactttattcggatctccggtctacgcggtaaaggcgtaaaagcgcttctggcggcgccgctgcggatttttaacgcctggcggcaggcgcgggcgatcatgaagcggtttaagccggatgtcgtgctgggaatgggcggttatgtttccggccccggcggtcttgccgcatggtcattgggtattccggtcgtcttgcatgagcaaaacggtatcgccgggctaaccaatcagtggctggccaaaatcgcgaccacagtgatgcaggcgtttcccggtgcgtttccgaacgcggaagtggtgggtaacccggtgcgtaccgacgtactggcgttgccgttgccgcaggtgcgtctggccggtcgtgacggcccgattcgcgtgttggtggtcggcggttctcagggggcgcgagtcctgaaccagacgatgccgcaggttgccgccagactgggcgatacggttacaatctggcatcaaagcggaaaaggcgcgcagctcacggtagagcaggcatatgccggggcgggacaaccgcagcataaggtaacggaatttatcgatgacatggccgccgcctatgcgtgggcggatgtagtggtatgtcgttccggcgctttaacggtgagcgagatcgccgccgccgggttaccggcgatattcgtgccgtttcagcataaagacaggcagcagtactggaatgcgctgccgttagaaaacgccggcgcagctaagatttttgagcagccgcagtttactgtagaggctgtcgccgacaccctggcggggtggtcgcgcgaggcgttgttaaccatggcggagcgtgcccgcgcggtatccattccggatgctaccgagcgcgtcgccagtgaagttagccgggttgcccggacataa

SEQ ID NO: 39006 - DNA, 1476 bp, Salmonella typhimurium
atgaatacacaacaactggcaaaactgcgttccatcgtgcccgaaatgcgtcgcgttcggcacattcactttgtcggcatcggtggtgctggtatgggcggtattgccgaagttctggccaatgaagggtatcagatcagtggttccgatttagcgccgaatccggtgacccagcagttgacgagcctgggggcgacgattttctttaaccatcgtccggaaaatgtgcgtgatgccagcgtggtcgtcgtttccagcgcaatttccgcggataacccggaaattgtcgcggcgcatgaagcgcgtattccggttattcgccgtgcggaaatgctggcggaactgatgcgttttcgccacggcatcgccattgccgggacgcacggaaaaaccacaacgaccgcgatggtgtccagtatttatgccgaagcggggctggacccgactttcgtgaatggcggactggtgaaagccgcaggcgttcatgcgcgtctgggccatagtcgttacctgattgccgaggcagatgagagcgacgcgtccttcctgcatttgcagccgatggtcgcgatcgtcaccaacatcgaagccgaccatatggatacctatcatggcgactttgaaaatttaaagcagacgtttattaacttcctgcataacctgccgttctacggtcgcgcggtaatgtgcgtcgatgatccggtcatccgcgagttgctgccgcgggtggggcgtcagaccacgacgtatggctttagcgaggatgctgacgtccgcgtagaagattatcagcagatagggccgcaggggcactttacgctgttgcgccagggaatgccggatctgcatgtcacgttgaatgcgccgggtcgccacaatgccctgaatgccgcggcggcagtggcggtagcgaccgaagaaggcatcgccgatgacgctatcctgcgcgcgctggaaagcttccaggggaccgggcgtcgttttgacttcctcggcgagttcccgcttgagccggtgaatggtaaagccgggacggcgatgctggtggatgactatggtcatcatccgactgaagtagatgccaccattaaagctgcgcgagcagggtggccggataaaaacctggtgatgctgtttcagccgcaccgttacacgcgcacgcgcgatctgtatgacgatttcgccaatgtgctgacccaggtcgatgcgctgctgatgctggacgtttacccggcgggtgaagcgccgattccgggcgcggatagccgttctttatgtcgtacgattcgtaatcggggaaaaattgacccgattctggtttccgatccggctcaggttgcgacaatgttagcgccggtgctgacgggtaacgacttgatattagtgcaaggcgcaggaaatgttggcaaaattgcgcgttacttatctgaaatcaagctgaagccgcaaatccaggaggaagagcaacatggctga

SEQ ID NO: 39007 - DNA, 921 bp, Salmonella typhimurium
atggctgataaaatcgcggtcctgttgggcggaacctctgcggagcgggacgtttcgttaaattccggcgcggcagtgttggccgggctacgtgaaggcggcattaatgcgcatcccgtcgatccgcaagaggtcgatgtcgcgcagcttaaagcaatgggctttcagaaggtctttattgcgttgcatggccgtggcggtgaagatggcaccttacagggaatgcttgaactgctcggcctgccttataccggtagcggcgtgatggcctcggcgctttccatggataaactgcgcagtaaattgctgtggcagggcgcaggcttaccggttgcgccgtgggtcgcgctgacgcgcgctgagtttgaaaaaggtcttagcgaagaacaaaaagcgcgaatttcggcgctgggtttaccgctgatcgtcaaacccagccgtgaaggctccagcgtcggtatgacgaaagtagtagaagaaaatgctttacagggtgcgttatcattggcttttcagcatgatgacgaaatactgattgagaaatggctgtgcggtccggaatttacagtggcgatagttggcgaagaaattttaccgtcaattcgtatccaaccggcaggaaccttctatgattatgaggcgaagtatctctctgatgagactcagtatttctgccctgccggtttagatgcgtcccaggaagccgcgctacagtctctcgtcctgcaggcatggaaagctttaggctgcacgggatgggggcgtattgacgtcatgctggacagcgatggtcagttttatctgctggaagccaatacttctccggggatgaccagccatagtctggtgccgatggcggcgcgtcaggcgggaatgagcttctcgcagttagtggtacgaattctggagttggcggactga

SEQ ID NO: 39008 - DNA, 831 bp, Salmonella typhimurium
atgtcgcaggctgcgctgaacacgcgaaacagtgatgaagagacgccttcttcacgccgcaataatggaacgcgtcttgcaggaattttattcctgctgacggtactgtgcaccgtgtttgttagcgggtgggtcgtgttagggtggatggaagatgcgcagcgtttaccgttatcaaagctggtattaaccggcgagcgtcactacacgcgtaacgatgatatccgtcaggcgatactggctctgggcgcgccgggaaccttcatgacgcaggatgtgaacattatccagagccagattgagcgtttgccgtggattaaacaggccagcgtcagaaaacagtggcctgatgaattgaagattcatctggttgaatatgtgccgattgcgcgttggaatgatcaacatatggtcgatgctgaagggaacaccttcagcgtgccgtcagaccgcatcggcaaacaggttttacccatgttgtatggcccggaaggcagcgcgagtgaagtgttgcagggataccgcgagatggggcaggtgctggctaaggataaattcactctaaaggaagcggcgatgaccgcacgtcgctcctggcaattgacgcttaataacggcattaagctcaatctcggcaggggcgatacgatgaaaaggttggctcgctttgtagaactctatccggttttacagcagcaggcgcaaaccgatggcaaacggattagctacgttgatttgcgttatgactcaggtgcggcagttggctgggcgccgctcccccctgaggaatctaatcagcaacagaatcaggcacaggcagaacaacaatga

SEQ ID NO: 39009 - DNA, 1263 bp, Salmonella typhimurium
atgatcaaggcgacggacagaaaactggtagtaggactggagattggcaccgcgaaggttgccgctttagtaggggaagttctgcccgacggtatggtcaatatcattggcgtgggcagttgcccatcgcggggtatggataaaggcggggtgaatgaccttgagtcagtggtgaaatgcgttcagcgcgccattgaccaggcggaattgatggccgattgccagatctcctcggtatatctggcgctttccggcaaacatattagctgtcagaatgaaattggtatggtgcccatttccgaagaggaagtgacgcaagaagatgtggaaaacgtcgtgcatactgcgaagtcagtgcgcgtgcgcgatgaacatcgcgtgctgcatgtgattcctcaggagtacgccattgactaccaggaaggcattaaaaatccggtcggtctttccggcgtgcgtatgcaggcgaaagtacatttgattacctgccacaacgatatggcaaaaaacattgtcaaagctgttgaacgttgtggtctgaaagttgaccaactgatatttgccggactggcggccagttattccgtgttaacggaagatgaacgtgaactgggcgtctgtgtcgtggatatcggcggtggtacaatggatatcgccgtttatactggcggcgcgctgcgtcataccaaagtgatcccttacgcggggaacgtggtgaccagcgatatcgcttatgcctttggtacgccgccgagcgatgctgaagccattaaagttcgccacggttgcgcgctgggttccattgtcggtaaagacgagagcgttgaagtaccgagcgtaggcgggcgtccgccgcgcagcctgcaacgccagacgctggcggaagtgattgagccgcgttacaccgagctgctcaatctggtcaacgaagagatattgcaattacaggaacagcttcgccaacaaggggtaaaacatcacctggcggcggggattgtgttaaccggcggcgcggcgcaaatcgaagggcttgctgcttgcgctcagcgcgtgtttcatacgcaggtgcgtatcggcgcgccgctgaatatcaccggtctgacggattatgcccaggagccgtattactcaacggcggtgggattgcttcactacgggaaagagtcccacttaaacggtgaagcagaagtggaaaaacgtgttacggcatcagttggctcgtggatcaagcgacttaatagctggctgcgaaaagagttttaa

SEQ ID NO: 39010 - DNA, 1152 bp, Salmonella typhimurium
atgtttgaacctatggaactaaccaacgacgcggtgattaaagtcatcggcgtcggtggtggcggcggtaacgctgttgaacacatggtgcgcgagcgcatcgaaggtgttgaattcttcgcggtgaataccgacgctcaggcgttgcgtaaaacggcggttggccagaccattcaaattggtagcggcattaccaaaggtctgggcgctggcgctaacccggaagtcggtcgtaacgcggcggacgaagaccgtgaagcgctgcgtgcggcgcttgaaggcgcagacatggtatttatcgcggcaggcatgggcggcggtaccggaaccggcgcggcgccagtggttgctgaagtggcaaaagatttaggtattctgaccgttgccgtggtgactaagcctttcaattttgaaggcaaaaagcgcatggcatttgcggagcagggtatcaccgagctgtccaagcatgtggactcgttgatcaccatcccgaacgacaagctgctgaaagtgctgggccgtggtatctccctgctcgacgcgttcggcgcggctaacgacgtgctgaaaggcgcggttcagggcatcgcagagctgatcacccgcccgggtctgatgaacgtcgactttgctgacgtgcgtaccgtgatgtctgaaatgggctacgcaatgatgggctccggcgtggcgagcggtgaagaccgtgcggaagaagcggctgaaatggctatttcttctccgctgctggaagatatcgacctgtccggcgcgcgcggcgtgttggtcaacattactgcgggcttcgacctgcgtctggatgagttcgaaaccgtcggtaacaccatccgtgcctttgcatcggataacgccaccgtggttatcggtacttctctggacccggatatgaacgacgaactgcgcgtgaccgttgttgccactggaattggtatggacaagcgtcctgaaatcactctggtcaccaataaacaggtgcagcagccggtgttggatcgttatcagcagcacggtatggcgccgctgacgcaggagcaaaaaacggtcgcgaaagtggttaacgacaatacaccacaggcggcgaaagagccggattatctggatatccccgcattcctgcgtaagcaagctgattaa

SEQ ID NO: 39011 - DNA, 918 bp, Salmonella typhimurium
atgatcaaacaaaggacacttaaacgtatcgttcaggcgactggcgtcggtttacacaccggcaaaaaagtcaccctgacattacgccctgcgccggccaataccggggtcatctatcgtcgcaccgacttgaatccaccggtagatttcccggccgatgccaaatctgtgcgtgataccatgctctgtacgtgtctggtgaatgagcatgatgtacggatttcaaccgttgagcacctgaatgctgctctggcgggcttaggtatcgataacatcgttattgaggttaatgccccggaaatcccgatcatggatggcagtgccgctccgtttgtctacctgctgcttgatgccggtattgatgaactgaactgcgccaaaaaattcgtacgcatcaaagagactgttcgggttgaagatggcgataaatgggctgaattcagaccgtacaatggttttacgttggatttcaccatcgactttaaccatccggcgatcgattccagcagccagcgctacgcgatgaacttctctgcggatgcgttcatgcgccagatcagccgtgcgcgtaccttcggttttatgcgtgatatcgaatatctgcagtcccgcggcctgtgcctgggcggcagcttcgattgtgccatcgttgttgacgattatcgcgtattgaacgaagacggcctgcgttttgaagatgaattcgttcgtcacaaaatgcttgacgcgatcggtgacttgttcatgtgtggtcacaatattattggtgcgtttaccgcgtataaatccggtcacgcattgaataataaattgttacaggcagtcctggcaaaacaggaagcctgggaatttgtgaccttccaggacgacgcagaactgccgttggctttcaaagcgccttcgacggtactggcataa

SEQ ID NO: 39012 - DNA, 402 bp, Salmonella typhimurium
atgaaagaaaagtcctccgttgaggtcagactggataaatggctgtgggccgcgcgtttttataaaacccgcgcgatggcccgcgagatgattgaaggcggtaaggtgcattacaacggccagcgcagtaagccgagcaaaatcgtcgagctgaacgcaacccttaccctgcgtcagggaaatgacgaacggacggtgatcgttaaagccatcaccgaacagcgccgtccggccagcgaagccgtcgctctgtatgaagagacggcggaaagcgtggaaaaacgcgaaaaaatggcgcaggcgcgcaagcttaacgccctgaccatgccgcatccggacaggcgaccggacaagaaagagcgccgcgacctgttacgatttaaacacggcgacagcgaataa

SEQ ID NO: 39013 - DNA, 885 bp, Salmonella typhimurium
atgattatgccgcaacatgaccaattacatcgttatctgtttgaaaactttgccgttcgcggcgagctggtaaccgtttcggaaaccttgcaacagatcctcgacaatcataactatccgcagccggtgaaaaccgtactggccgaactgctggtcgccactagcctactgaccgcgacgctgaagtttgctggtgacattacggtacagctccagggcgacgggccgttaagcctggcggtgatcaatggcaataatcagcagcagatgcgcggcgtagctcgcgttcagggcgatatccctgacaatgcggatctcaaaacgctggttggcaacggctatctggtgatcaccattacgccggaagagggtgaacgctatcagggcgtggtgggtctggaaggcgatactctggcggcgtgcctggaagattacttcctgcgctccgagcagttgccgacgcgcctgtttatccgtaccggcgatgtcgacggtaaaccggcggcaggtggaatgttgcttcaggtgatgccggcacagaacgcgcaggcggaggatttcgaccatctggctatgttgacggaaaccattaaaagcgaagagctgctgacgttaccggcaaatgacgtgctgtggcgtttgtatcacgaagaagaagtcacgctctacgatccgcaaaatgttgaattcaaatgcacctgttcacgcgaacgttgcgcgggcgcgctgaaaacattgccggatgaagaagtggacagcattctggcggaagaaggcgaaatcgatatgcactgcgattactgcggcaatcattacctgttcaatgcgatggatatcgcggagatccgtaacaacgcctctcctgccgatccacaggttcattaa

SEQ ID NO: 39014 - DNA, 1617 bp, Salmonella typhimurium
atgcgcgttaacaatttaaccccgcaagatctcaaggcttatggtatcaacgacgtccaggatatcgtttacaatcccagctacgacaccctttatcaggaagaacttaatcctggtctggaaggctatgagcgtggcgtgttaactaacctgggcgctgttgccgttgataccggtatttttaccggtcgttcgcctaaggataagtatattgttcgcgacgacaccacgcgtgatacgctgtggtggtccgataagggtaaaggtaaaaacgataataagccgctttcccaggaaacctggcaacacctgaaaggtctggtgacgcatcagctttctggtaaacgcttattcattgttgatgcgttctgcggcgcaaatgccgatacgcgtctttccgtgcgctttattacggaagtcgcctggcaggcccacttcgttaaaaatatgttcattcgcccaacggacgaagagctggtaggcttcaaacctgactttattgtcatgaacggcgcgaagtgcaccaacccgcagtggaaagagcaagggctgaactcggaaaacttcgtggcgttcaacctgactgaacgtattcagcttattggcggcacctggtacggcggcgaaatgaaaaaagggatgttctcggtaatgaactacctgctgccgctcaaaggtatcgcctcaatgcactgttccgccaacgtgggtgaaaaaggcgatgtcgcggtcttcttcggcctttccggtaccggaaaaaccactctctccaccgacccgaaacgtcgtctgattggcgatgatgagcacggttgggatgacgacggcgtgttcaattttgaaggcggctgctacgccaaaaccatcaaactgtcgaaagaagcggagccagaaatttatcatgcgattcgccgtgatgcgctgctggaaaacgtcaccgtgcgcgaagacggcaccgttgatttcgacgatggttccaaaaccgaaaacacccgcgtctcttacccgatctatcatatcgataacatcgttaagcccgtgtccaaagcaggtcacgccaccaaggttatcttcctgacggcggacttcggcgtgttgccgccggtttcccgtttaaccgctaaccagacgcagtaccacttcctgtcaggtttcaccgctaaactggccggcaccgaacgcggcgtcaccgaaccgacccccaccttctccgcctgcttcggcgccgcgttcctgacgctgcacccaacgcagtatgctgaggtgctggtgaaacgtatgcaggcagcaggcgcgcaggcttatctggttaacaccggctggaatggcaccggcaaacgtatctccatcaaagatacgcgcgcaattatcgacgccattctgaacggttctcttgataacgcggaaaccttccgtctgccgctgttcgatctggcgatcccgactgaactgccaggcgtggatacccacattctcgacccgcgtaacacctacgcgtcgccggaacaatggcaggaaaaagccaccgcgctggcgaaactgttcattgagaacttcgagaagtatacggataccccggcaggcgaagcgctggttagcgccggaccgaagctgtaa

SEQ ID NO: 39015 - DNA, 2328 bp, Salmonella typhimurium
atgaatgattctttctgccgcattattgcgggtgaaatccaggcaaatgccggacaggttgaagctgccgttcgcctgcttgacgaagggaacaccgtgccgtttatcgcacgttatcgtaaagaaatcaccggcggtctggatgacacgcagttgcgtaacctggaaacgcgtctgggctatctgcgtgagctggaagacaggcgtcaggccatcctcaagtccatttccgaacaaggcaaactgaccgatgagctggctggcgccatcaacgctacgttaagtaagaccgagctcgaagacctctacctgccctataaacctaaacgccgcacccgtggacaaatcgccattgaagccggccttgagccgctggccgatctgctctggaacgagccgtcccacgatcctgacgtggaagcggcaaagtacattgatggcgacaaaggcgtggcggacacgaaagccgcgctcgacggcgcacgctacattctgatggagcgctttgccgaagacgccgcattgctggcgaaagtacgtgattacctgtggaagaacgcccatctggtcgccaccgtcgtgagcggcaaagaggaagaaggggcaaaattccgcgactatttcgaccatcatgagcccattgctaacgtcccgtctcaccgtgcgctggccatgttccgtggtcgtaacgaaggcattctgcaactttcgctcaatgccgacccacagtttgatgagccgccgaaagagagctactgcgagcaaatcatcatggaccatctcggcctgcggctaaataacgccccggcggatagctggcgcaaaggcgtagtgagctggacgtggcgtatcaaagtcttaatgcacctcgaaaccgaactgatgggcaccgtgcgcgaacgtgcggaagacgaagcgattaacgtgtttgcgcgtaacctgcacgacctgctgatggcagcccccgcaggcctgcgcgccacgatgggccttgatcctggcctgcgtaccggcgtaaaagtcgctgtcgttgacggcaccggcaagctggtggcgacggataccatttatccgcataccggtcaggcggccaaagcggctaccgtgatcgccgcgctgtgcgaaaaataccacgtcgaactggtcgcgattggcaacggtacggcctcgcgtgaaaccgaacgcttctatctcgacgtacaaaaacagttcccgaacgtgacggcgcagaaagtgatcgtcagcgaagcgggggcgtccgtgtattccgcttctgagctggcggcgcaggagtttccggatctcgacgtctccctgcgcggcgcggtctctatcgcgcgtcgtctacaggatccgctggcggaactggtgaaaatcgatccgaaatccatcggcgtcggccaatatcaacacgatgtcagccagacccagttggcccgtaaactggatgcggtggtcgaagactgcgtaaacgccgtcggcgtcgatttgaataccgcctccgtgccgctgctgacccgcgtcgcgggcttaacgcgcatgatggcgcaaaacatcgtcgcctggcgcgatgagaacggtcagttccagaaccgccagcaactgttgaaggtgagccgtctggggccgaaagcgtttgagcagtgcgcgggcttcctgcgtattaaccacggcgataacccgctggatgcgtccaccgtccacccggaagcctatccggttgtcgaacgcattctggcggcgacgcagcaagcgctaaaagatctgatgggcaacagcaacgaattgcgccacctcaaggccgctgattttaccgacgataaattcggcgtgccgaccgtgagcgatatcatcaaagagctggaaaaaccgggccgcgacccgcgtcctgaatttaaaaccgcgcaattcgccgatggcgttgaaaccatgaacgacctgctaccggggatgattctggaaggggcggtcactaacgtcaccaatttcggcgcgtttgtcgatatcggcgttcatcaggatggcctggtccacatctcttccctgtcgactaagttcgtcgacgatccacacaccgtggtaaaagctggcgacatcgtgaaggtgaaagtgctggaagtggatctgcaacgtaagcgtattgcgctgacgatgcgtctggacgaacagcccggcgaaaccgccgctcgccgcggcggcggcgccgatcgcgctcagggcaaccgcccggcatcaaaagcggcgaaaccgcgcggtcgtgacgcccagccagccggtaacagcgccatgatggacgcgctggcagccgcaatgggaaaaaaacgctaa

SEQ ID NO: 39016 - DNA, 228 bp, Salmonella typhimurium
atgcaattcactcctgacactgcgtggaaaatcaccggctttgcgcgtgaaatcagcccggcgtatcgtcaaaaactgctttcgctcggcatgttgcccggctcttcatttaatgtcgtccgcgtcgcgcccttaggcgatccgatccatatcgaaacacgacgcgtgagtctggttttgcgtaaaaaggatttggcgttaatagaagtggaagcggtttcctgttaa

SEQ ID NO: 39017 - DNA, 2706 bp, Salmonella typhimurium
atgctaatcaaattattaaccaaagtattcggtagccgtaacgatcgtacgctgcgtcgtatgcgtaaggccgtcagccttattaatgcgatggaaccggagatggaaaaactctccgatgacgaactgaaagcgaaaaccaacgaatttcgcgcccgtattgaaaaaggcgaaagcgtagagagcctgattccggaagcgttcgcggtggtgcgtgaagccagtaaacgcgtctttgggatgcgtcacttcgacgttcagctattgggtggtatggtgctcaacgatcgttgtatcgccgaaatgcgtactggtgaaggtaagacgctgaccgcaacgctgccagcctacctgaacgcgctgtccggcaaaggcgttcatgtggtaaccgtgaacgactatttggcgcagcgtgacgccgaaaacaaccgtccgctattcgaattcctcggtatgtccgttggtatcaacctgccaggtatgcctgcgccagccaaacgtgaagcttacgctgccgacatcacttacggcactaacaacgaatacggttttgactacctgcgcgacaacatggcgttcagcccggaagagcgcgtgcagcgtaaactgcattatgcgctggtggatgaggtcgactccatcctgatcgatgaagcgcgtacgccgctgatcatttccggcccggcggaagatagctcggaaatgtacaaaaaagtgaacaaaatcattccgcacctgattcgtcaggagaaagaagattctgacactttccagggcgaaggccacttctccgttgatgagaaagcgcgccaggttaacctgaccgaacgcggtctggtgctgattgaagagctactggtgcaagaaggcattatggatgagggcgagtcgctctactcgcctggcaatattatgctgatgcatcacgtcaccgccgcgctgcgcgcgcacgcgctgtttacccgtgacgtggattacattgtgaaagacggcgaagtcatcattgttgatgaacataccggtcgtaccatgcaggggcgtcgctggtctgacggtctgcaccaggcggtagaagcgaaagaaggcgttgaaattcagaatgaaaaccagacgctggcgtctatcaccttccagaactacttccgtctgtatgaaaagctggccggtatgaccggtacggcggatactgaagccttcgaatttagctctatctataagctggacaccgtcgttgttccgaccaaccgtccgatgatccgtaaagatttgccggatctggtctacatgaccgaagcggaaaaaatccaggccattatcgaagatattaaagaacgtaccgcgaacggtcagccagtgctggtcgggacgatttctatcgagaaatctgaagtggtctccagagagctgaccaaagcgggcatcaaacataacgtactgaacgcaaaattccacgccaacgaagcaggcatcgttgcgcaggctggttatccagcggcggtcactatcgctaccaacatggcgggtcgtggtactgatattatgctgggcggtagctggcaggcggaagtcgccgcgctggaagcgccgacggaagaacagattgcgcagattaaagcggactggcaggtacgccatgacgcggttctggctgccggcggtctgcatatcattggcaccgagcgccatgaatcccgccgtatcgacaaccagctgcgtggccgttccggtcgccagggcgatccgggttcttcccgtttctacctgtcgatggaagatgcgctgatgcgtattttcgcctccgatcgtgtctccggtatgatgcgtaaactgggaatgaagccgggcgaagcgattgagcacccgtgggtgacgaaagctatcgctaacgcgcagcgtaaagtagaaagccgtaacttcgatattcgtaagcaactgctggaatatgatgatgtggcgaacgatcagcgccgtgcaatttatacccagcgtaacgaactgctggatgtgtctgacgtgagcgacaccattaacagcattcgcgaagatgtctttaaggcgactatcgacgcctacattccgccgcagtcgctggaagagatgtgggacatcccgggtttgcaggaacgcctgaaaaacgacttcgacctggagatgccgattgccgaatggctggataaagagccggagctgcatgaggagacgctgcgtgagcgcatcctggcgcagtccatcgaggtgtatcagcgtaaagaagaggtggttggcgctgaaatgatgcgtcatttcgaaaaaggcgtgatgctgcaaacgctcgattccctgtggaaagagcatctggcggcgatggattacctgcgtcagggtattcatctgcgtggctatgcgcaaaaagatccgaagcaggaatacaagcgcgaatccttcgctatgttcgccgcgatgctggaatcgctgaaatatgaagtaatcagtaccctgagcaaagtccaggtacgtatgccggaagaggtcgaagcgatggaaatgcagcgtcgcgaagaggcggagcgcctggcgcagatgcagcagctaagccatcaggatgacgatgccgccgtggctgccgatctggccgcccaaaccggcgaacgtaagattggacgtaacgatccttgcccttgcggttctggtaagaaatacaaacagtgtcacggtcgcctgagctaa

SEQ ID NO: 39018 - DNA, 1317 bp, Salmonella typhimurium
atgccattagtcatcgttgctatcggtgttatcttgttacttcttctgatgatccgcttcaaaatgaacggatttatcgcccttgtcctggtagcgctcgctgtcgggttgatgcagggaatgcctctggataaagtcatcggctccatcaaagccggtgtcggtggtacgcttggcagtctggccctgattatggggttcggcgccatgctgggcaaaatgcttgccgactgcggcggcgctcaacgtatcgccactaccctgatcgcgaaatttggtaaaaagcatattcagtgggccgtagtgttaaccggctttaccgtcggcttcgctctgttctatgaagtgggcttcgttctgatgctgccgctggtattcaccattgccgcagcggcgaatatcccgctactgtacgtcggcgtgccgatggccgcggcgctctccgtcacacacggcttcctgccgccgcacccgggtccaaccgcaatcgccacgattttccatgccgatatgggtaagacgctgctgtttggtacgattctggcgatcccgaccgtgatccttgccggaccggtttacgcccgtttcctgaaaggcatcgataagccgatcccagaaggcctgtacagcgcgaaaacttttacggaagaagagatgccgggctttggcgtcagcgtctggacgtcgctggttccggttattctgatggcgatgcgtgcgattgccgagatgattctgccaaaaggccacgctttcctgcccgttgccgagttcctgggcgacccggtaatggctacgttaattgccgtactgattgcgatgttcacctttggcctgaaccgcgggcgttccatggatcagattaacgatacgctggtctcttccatcaaaattatcgccatgatgctgctgatcatcggcggcggcggcgcattcaagcaggtgctggtcgatagcggcgtggataaatacatcgcttcaatgatgcatgaaaccaatgtctctccgctgttgatggcgtggtctatcgcggcggttctgcgtatcgcgctgggctctgcgactgtcgcggcgattaccgcaggcggcattgcggcgccgctgatcgccactaccggcgttagccctgaactgatggttatcgcggtcggttccgggagcgtgattttctctcacgtcaacgacccgggcttctggctgttcaaagagtatttcaatttgactatcggcgagaccattaaatcctggtcgatgctggaaacgatcatctccgtctgcggcctgatcggctgtctgctgttgggtatggtggtttaa

SEQ ID NO: 39019 - DNA, 765 bp, Salmonella typhimurium
atggcctacagcaaaatccgccaaccaaaactctccgatgtgatcgagcagcagctggagtttttaatccttgagggaacattgcgtcccggagaaaaactcccaccggaacgtgaactggcaaaacagttcgacgtctcccgtccctccttgcgcgaggcgattcaacgtctcgaagcgaagggattgttgcttcgtcgtcagggcggcggaaccttcgtgcagagcagcctgtggcagagctttagcgacccgctggtggaactgctctccgatcaccctgaatcccagtttgacctgctcgaaacgcgccatgcgctggaaggcattgcggcttattacgcggcgctgcgcagcaccgacgaagataaagaccgtattcgcgagctgcaccatgctattgagctggcgcaagagtccggcgatctggatgccgagtccgaagccgtgctccagtatcaaatcgccgtcaccgaagcggcgcacaacgtggtattgcttcatctgctaaggtgtatggagccgatgctggcgcaaaacgtgcggcagaacttcgaattgctgtatgcgcgtcgggagatgctgccgctggtgagtacgcatcgcacccgtatatttgaagccattatggccggaaaaccagaagaagcgcgtgaagcgtcacaccgacatctggcgtttatcgaagagattatgctggacagaagccgtgaggagagccgtcgtgaacgcgctttacgccgcctggaacagcgcaagaattag

SEQ ID NO: 39020 - DNA, 1890 bp, Salmonella typhimurium
atggctatcgaaatcaaagtaccggacatcgggacagatgaagttgaaatcaccgagattctggtcaaagtgggcgacaaagtggaagctgaacagtcgctgatcaccgtagaaggcgacaaagcctctatggaagtcccgtctccgcaggctggcgtcgtgaaagagatcaaagtctctgtcggcgacaaaaccgagaccggtgcacttatcatgattttcgattccgccgaaggtgcagccgacgctgcacctgctaaggcagaagagaagaaagaagcggcgccggcagcagcacctgctgcggcagcggcgaaagacgttcacgttccggatatcggcagtgacgaagttgaagtgactgaagtgatggtgaaagtgggcgacaccgtagaagctgaacagtcgctgatcaccgtcgaaggcgacaaggcctctatggaagttcctgctccgtttgcaggcaccgtgaaagagatcaaagtgaacaccggtgataaagtctctaccggctctctgattatggtcttcgaagtggcgggtgaagcaggcgcagcagcaccagcgaaagcggaagccgctccggctgcggctgctccagcagcagcgacgggcgtgaaagacgttaacgtaccggacatcggcggcgacgaagttgaagtcaccgaagtgatggtcaaagtcggcgataaagttaccgctgaacagtcgctgatcaccgtagaaggcgacaaagcctctatggaagttccggctccgttcgcgggtaccgtgaaagaaatcaagatcagcaccggcgataaagtgaaaaccggttctctgattatggtcttcgaagtagaaggcgcagcgcctgcggccgctccggctaaacaggaagcggcggcgccggctccggcggcgaaagctgagaagcctgctgccccggctgcaaaagcggaaggcaaatctgagttcgctgaaaacgacgcgtacgttcacgctactccgctgattcgccgtctggcgcgcgagtttggcgtcaacctggcgaaagtgaaaggcaccggtcgtaaaggccgtattctgcgcgaagacgttcaggcttacgtgaaagacgctatcaaacgcgcggaacgtgcgccggctgctgcgggcggcggtatcccgggtatgctgccgtggccgaaagtggacttcagcaagtttggtgaagttgaagaagtggaactgggccgtatccagaaaatctctggcgcgaacctgagccgtaactgggtgatgatcccgcacgttacgcacttcgacaaaaccgatatcaccgatctggaagcgttccgtaaacagcagaacgccgaagctgagaagcgcaaactggatgtgaaatacacgccagtggtcttcatcatgaaagcggttgccgctgctctggaacagatgccgcgcttcaacagctctctgtccgaagacggtcagcgtctgaccctgaagaaatacatcaacatcggcgtggcggttgataccccgaatggcctggtggttccggtctttaaagacgtgaataagaagagcgtgaccgagctgtctcgtgaactgaccaccatctccaaaaaagcgcgtgatggtaagctgaccgctggcgaaatgcagggtggttgcttcactatctccagcatcggcggcctgggaactacccacttcgcgccgattgttaacgcgccggaagtggctatcctcggcgtttctaagtcggcgatggaaccggtgtggaatgggaaagagtttgtgccgcgtctgatgatgcctatctctctttccttcgaccaccgtgtgatcgatggtgctgatggtgcgcgtttcattaccattatcaacaatatgttgtctgacattcgccgtctggtgatgtaa

SEQ ID NO: 39021 - DNA, 1425 bp, Salmonella typhimurium
atgagtactgaaatcaaaactcaggtcgtggtacttggggcgggcccggcaggctattctgccgctttccgttgcgctgatttaggtctggaaaccgtaattgtagaacgctacaacacccttggcggtgtttgtctgaacgtcggctgtatcccttctaaagcgctgctgcacgtagcaaaagttatcgaagaagccaaagcgctggctgaacacggtatcgtcttcggtgagccgaaaaccgatatcgacaagattcgtacctggaaagagaaagtgatcacgcagctgaccggcggtctggcgggtatggccaaaggccgtaaagtgaaagtggtcaacggtctgggtaaattcaccggggcgaacaccctggaagtggaaggcgaaaacggcaaaaccgtgatcaacttcgacaacgcgatcatcgcggcaggttctcgtccgatccaattaccgtttattccgcatgaagacccgcgcgtatgggattctaccgacgctctggaactgaaagaagtgccgaagcgtatgctggtcatgggcggcggtatcatcggtctggaaatgggtaccgtataccacgcgctgggttcagagattgacgtggttgaaatgttcgaccaggttatcccggcggctgataaagacatcgttaaagtcttcaccaagcgcatcagcaagaaattcaacctgatgctggaaaccaaagtgactgccgttgaagcgaaagaagacggtatctacgtttcgatggaaggcaaaaaagccccggctgaagcgcagcgttatgatgcggttctggtggcgattggtcgtgtgccgaacggtaaaaacctcgacgcgggcaaagctggcgtggaagttgacgaccgtggctttatccgcgtggacaaacagctgcgcaccaacgtgccgcacatcttcgctatcggcgatatcgtcggtcagccgatgctggcgcataaaggcgttcacgaaggccacgttgccgctgaagttatcgccgggaagaaacactacttcgatccgaaagttatcccgtctatcgcgtacaccgagccagaagtggcatgggttggcctgaccgagaaagaagcgaaagaaaaaggcatcagctatgaaaccgccaccttcccgtgggcagcttctggccgtgctatcgcttctgactgtgcagacggtatgaccaaactgattttcgacaaagaatctcaccgcgtgatcggcggggcgattgtcggtaccaacggcggcgagctgctgggtgaaatcggtctggcgatcgaaatgggctgtgacgcggaagacatcgcgctgaccattcatgcgcacccgactctgcacgagtccgtcggtctggctgctgaagtgttcgaaggtagtattaccgacctgccgaacccgaaagcgaagaagaaataa

SEQ ID NO: 39022 - DNA, 2598 bp, Salmonella typhimurium
gtgctagaagaataccgtaagcacgtagctgagcgtgctgcccaggggattgtgccaaaacctttagacgcaacccaaatggctgcgcttgtcgagctgctgaagaccccgcctgtgggcgaagaagaattcctgttagacctgttgatcaaccgcgttcctcctggcgtagatgaagccgcttatgttaaagccggttttctcgctgctgtcgcgaaaggcgacaccacctccccgctggtctccccagaaaaagccattgaactgctgggcaccatgcagggtggttacaacattcatccgctgattgatgcgctggacgatgcgaaactggcgccgattgctgccaaagcactgtcccacaccctgctgatgttcgataacttctacgacgtagaagagaaagccaaagcgggcaatgaatatgccaaacaggtgatgcaatcctgggccgacgccgaatggttcctgagccgtccgccgctggcggaaaaaatcaccgtcaccgttttcaaagtgaccggcgaaacgaataccgacgatctctctccggcgccggatgcgtggtcgagaccggatatcccgttacatgcgcaggcgatgctgaaaaacgcccgtgaaggcattgagccggatcagccaggcgttgtcggcccgatcaaacaaatcgaagcattgcagaaaaaaggctacccgctggcttacgtgggtgacgtggtgggcaccggttcttcccgtaaatccgcgaccaactccgtgctgtggttcatgggcgatgacatcccgaacgtgccgaataagcgcggcggcggtctgtgcctcggcggcaaaattgcgcctatcttctttaacactatggaagatgcgggcgcgctgccgattgaagttgacgtttctaacctgaatatgggcgatgtgattgacgtctacccgtacaaaggcgaagtacgcaatcatgaaaccggcgagctactggcaaccttcgaactgaaaaccgacgtgctgattgacgaagtgcgtgccggtggtcgtattccgctgattatcggccgtggcctgaccaccaaagcgcgtgaagcgctggggctgccgcactcagacgttttccgtcaggcaaaagacgtggcggaaagcagccgtggcttctcgctggcacagaaaatggtcggtcgcgcctgtggtgtgaaaggtatccgtccgggcgcgtactgcgaaccgaaaatgacctccgtcggttctcaggatactaccggcccgatgacccgcgacgagctgaaagacctggcctgtctgggattctccgccgatctggtcatgcagtcgttctgtcacaccgcagcctatccgaagccggttgacgtcaccacgcaccacacgctgccagacttcattatgaaccgtggcggtgtctctctgcgtccgggcgacggcgtgattcactcctggctgaaccgtatgctgctgccggataccgtcggtaccggcggtgactcccatacccgtttcccgattggtatctctttcccggcgggttctggtctggtggcgtttgccgccgcgaccggcgtgatgccgctggatatgccggaatccgtgctggtgcgcttcaaaggcaaaatgcagccgggcatcaccctgcgcgatctggtacacgccatcccgctgtacgccatcaaacagggcctgctgaccgttgagaagaaaggcaagaaaaacatcttctctggccgcatcctggaaatcgaaggtctgccggatctgaaagtcgagcaggcgtttgagctgaccgatgcttccgccgagcgttccgctgccggttgtaccatcaagctgaacaaagagccgattgttgaatacctgacctccaacatcgtcctgctgaagtggatgatcgccgaaggctacggcgaccgccgtacgctggaacgtcgtatccagggcatggaaaaatggctggcggacccgcagctgctggaagccgatgctgacgcagagtacgcggcggtgatcgacatcgatctggcggatatcaaagagccaatcctctgtgcgccgaacgatccggacgacgcgcgtctgctgtctgacgtgcagggcgagaagatcgacgaagtgttcatcggctcctgcatgactaacatcggccacttccgtgcagccggcaagctgctggacaaccataaaggccaactgccgactcgcctgtgggtggcgccgccaacccgtatggacgccgcgcagctgaccgaagaaggttactacagcgtgttcggtaagagcggtgcgcgtattgagatccctggctgttccctgtgtatgggtaaccaggcgcgtgtggctgacggtgcgacggtggtttccacttctacccgtaacttcccgaaccgtttaggtaccggtgcgaacgtcttcctggcttctgcggagctggcggcggttgcggcgctgatcggcaaactgccgacgccggaagagtaccagacctacgtggcacaggtggataagacggcggtggatacttaccgttacctgaactttgaccagctttctcagtacaccgagaaagcagatggcgtgattttccagactgcggtttaa

SEQ ID NO: 39023 - DNA, 1272 bp, Salmonella typhimurium
atgaaaatgatagttatcgccgatgattttaccggatcgaatgataccggcgtccagttggcgaagaagggggcgagaacggaagtcatgttgagcgcgtcgcaaaaaccgtcccgccgcgccgatgtgttagtcattaacaccgaaagccgggcgatgcccgcagatcaggcggcatctgccgtttatgccgcgctttcgccgtggtgtgagacatcgccagcgccgctggtgtacaaaaaaatcgactccacatttcgcggcaatatcggcgccgaagtgacggcggccatgcgcgccagtcagcgaaaactggccgttatcgccgccgcgatccctgcggccggacgcacgacgcttgaaggaaaatgtctggttaatggcgtcccgctactggaaaccgaatttgccagcgatccgaaaacgcccattgtctcttcccgtattgccgagatagtggcgttgcaaagtgagatccctgtgtatgaagtctttttgcaggatgtccgacgcggcgggttaagcgccttacttacggcttatgcggctgagggcgaagggattatcgtcgtggatgcggtggaagagcgggacctgacgttgattgcgcaagcggcgtgtgaacaaccgtcgatgccgctgctcgtcggcgcagcgggtctggcgaatgcgttgccggttgaactttttatgcaagaccggcagcggctgccggtgctggtggtggccggttcgatgagcgaagccacgcgacgtcaggtggataatgcgctgtgccggggacgtgcggaggtcgtggatatcgatgccgcgcgcatggtgtcggatagcgcggaacaggaaatcgcgtctgtcgtagagcaggcctgcgcgctgttaagtcagcatcgacatacgattttacgcaccagccgtcgcgcagaagatcgacagttaatcgacgcgttgtgcgaaaaatccgcgatgagccgtcagcaattgggcgagcgactgagccagcggcttggcgtcgtcacgttaaacattatcgagcaggcgcggattggcgggctgtttctgaccggcggcgatatcgcaaccgccgtcgccggcgcgcttggcgctgaaggttatcgcattcagagcgaggtggcgccctgtattccctgtggaacgtttgtaaacagcgaaattgacgatctgccggtcattaccaaagcgggcggattcggttcagacagtacgttgtgtgacgcgctttattatattgaggagatgtattgtggagactaa

SEQ ID NO: 39024 - DNA, 798 bp, Salmonella typhimurium
atgattaagtggccctggaaagcacaagaaataacccagaacgaagactggccgtgggatgatgcgctggctatacctcttctggtaaacctcaccgcgcaagaacaggctcggcttattgcgctagccgaacgttttttgcagcagaaaagactggtagcgctacagggatttgagctcgactcgttaaaaagtgcacgtattgcgttaattttttgcttaccgatcctggagctcggtattgagtggcttgatggttttcatgaagtgctcatttatcccgcgccctttgtggtagatgatgaatgggaagatgacataggtctggtgcacagccagcgtgtcgtacagtcggggcaaagctggcaacaagggcccattattctgaactggctggatatccaggactcgttcgatgcttcgggtttcaatctcattattcatgaagtcgcgcacaaactggatatgcgtaatggcgatcgcgccagcggcatccctttcatcccgttgcgcgatgtggctggctgggaacacgatctccacgcggcaatgaataatattcaggatgaaatcgatcttgttggcgaaagcgctgccagtatagatgcctatgccgccaccgaccctgctgaatgttttgccgtgttgtcagagtattttttcagcgcgccagaactgtttgctccacgtttcccggcactatggcagcgtttttgccagttctatcgccaggatccttctcagcgcttacgggtaagcgctgccgaaggcgactacggcgaggaatccgaacattaa

SEQ ID NO: 39025 - DNA, 906 bp, Salmonella typhimurium
atgactcagattacgaaatttcacggcgtatttccgccagttccgaccattgttaatgcgcagggagagttagataaagtcggcatggcaaccttgctggatcatcttattgcaagcaaggtcaatggcgtattactgctgggcagtggaggggaattttgccatatgaccaatgcgctgcgtctggaaaccgcagagttttgcgtccgtcatattaaccgccgtattccagtactattaggtattagcagcaccagcacgcaggaagtgattgagtatggtcagcatgccgaccgactcgaagtcgatgccgtgctggtactcaatccctactatgccagattgaccgatgagtatatttatcatcatttcaaaaccgtggctaataacataaaaagcccggtgattctctacaactttccagcattgacgggacaggaccttagcgttgatttaattacccggctggcgcaagatcaccccaatattatcggcattaaggataccgttgataatatcagccatattcgtgaaatcatcaataatgtcaggccagtgcgtccggacttcgttattttctccggctatgatgaatatatgatggatacgcttatcttaggcggcaacggcgggatcccagcgacagcgaactttgcgccacagctaacctgcgggatctaccgcgcgtggtgtgaaaaagagtatgagaccatgttcggattacagcgcaggctgtccgcgctttccactatttacagcctggattcacctttcttcgggataatcaaaaaggcaattcagcttagcggagtcgatatttcaactcatgtaatgccccccgttttgccggcaaatgaagaacatatttcgaatttgaagcagatcttacagcgtgcgggactttaa

SEQ ID NO: 39026 - DNA, 906 bp, Salmonella typhimurium
atgcgttacgacatcagtcgtgacgcgatctgctatggattttttatgagattactaaaacgcgttattgtggttgtactcttgggcgtgattttatttatggtcagggacgatatacgctatgtttatcaactgatcctcaaatatggtgataaaccctcggcgctggcactgagtagctataaagcggttattcagcaaaaaccagtcgcaggagttaagagtaacctttcaggtttgacctactccgccgaagacaggatgcttttcgccgttattaataatccccctgaactggtctggttaacgacagaagggcagctggtaggacggatgccgctgcagggcatccacgacccggagtctattgcatggagtgggggcaaccagttccagataggcagtgagaaagatggcgcggtctataaaacacaggtggatattcagcgcggcaccatgcagataatctccatggtgaagcttgagggctatgacaaagcaaaaaataaagggctggaaggtacggcatgggatgcgaaaaatgagagattatatgccgcaaaagaaagaaaacccattatgatcaaagaagtagagatgagcaaaaatggtatcaccagagcgttgccttctgccatcactgcgagtgtgagcgatgtctccggacttgaataccatgccccaacggattcgctgctggtgttgtcggacgagtcaaaaatgattcttgaggtcagttccgagtggcgggtgcgcgatcgattgttcctgacggcggagtggtcagggctcagagacgatatcccccagccagaagggattgccatggataatgaaaataatttgtatattgtgagtgaaccaaatctgttttataaattttcgtgtgatatacagaatgactaa

SEQ ID NO: 39027 - DNA, 927 bp, Salmonella typhimurium
atgaccattgcgctggaacttcaacaacttaaaaaaacctatcccggcggcgttcaggcgttgcgcggcatagatttgcaggtcgaagcgggggatttttacgcgcttctggggccaaatggagcagggaaatcgaccaccatcggtattatcagctcattggttaataaaacgtccgggcgcgttaacgtttttggttacgacctggaaaaagacgtggttaacgccaagcgacagcttggactggtgccacaggagtttaactttaacccgtttgaaacggtgcaacagatcgtagtgaatcaggcgggttattacggcgtggaacataaagaggcggttttacgtagcgaaaagtatttaaaacagctcgatctgtgggaaaaacgtcatgaacgcgcgcggatgctctccggtgggatgaagcgccgcctgatgatcgcccgcgcgctgatgcatgagcctaaactattgattctcgatgagccgacggcgggcgtcgatatcgaattgcgtcgctcgatgtggggattcctgaaagatttaaacgccaaaggcaccacgattattcttaccacccactatctggaagaggcagaaatgctgtgccgcaatatcggtattattcagcacggcgagctggtggaaaatacctccatgaaaaatctgctttcaaagctgaaatcggagacgtttattctggatttagcgccaaaaagcccgctacctaagcttacgggttatcaatatcgtctggtggatacctcgactctggaggtggaagtgttacgcgagcagggggttaacagtgtctttagccaactgagcgagcagggggttcaggtattaagtatgcgtaataaagccaaccgtctggaagaactgtttgtgtcgctggtgcatgaaaaacaaggagatcgcgcatga

SEQ ID NO: 39028 - DNA, 1035 bp, Salmonella typhimurium
atgaaaggtttcctgcaaaccgtaacaggcccggtggcgcatacggatatggggctgacgctaccgcatgaacatctgtttaacgatctgtcttcggtcgtagacgagccacattatgctttttcacagcaactggtgggaaagaaagtcagtgctgacctgcagtggggactgaaacacgacccatactgctgcgccgataacatggaccgcaaagagattgatgatgttatcttcgaaatcaataactttatgtctttgggcggcaggacgattgtcgacgccaccggatcagaatccattggacgggacgcctcagcgctgcgagaagttgccttaaaaacgggtttgaatatcgttgcgtcatccggaccttatctggagaaatttgaaagtacccggatccataaacctgttgagctgttagcctcactcattgataaagaactgaatcagggtattggcgagacggatattcgcgctggcatgatcggtgaaatcggcgtatcccccgcgtttacccaagcggagcgtaacagcctgcgggcagcgtctctggcacaatgtaacaacccccacacggcaatgaatatccatatgccggggtggctgcggctgggggatgaggtgctggatatcgtgctggaagaaatgaacgtctctccggcaaaagtctcgctggcgcattcggacccttcaggaaaagatgtcgtctatcaacgtaaaatgctcgaccgtggcgtatggcttgaatttgacatgattggtctggacatcaccttcccaaaagaaggtgtcgcgccgggcgttcaggagaccgcagatgcagtagcgaatctgattgcactgggttacgccgaccaaatcgttttaagccatgatgtttttctcaaacagatgtgggcgaaaaatggcggaaatggctgggggtttgtcccgaatgtcttcctcgcctatctggctgctcgcggagtagacaacgatactctgcgcaagctttgtattgataatccagcccgattactcacggcataa

SEQ ID NO: 39029 - DNA, 987 bp, Salmonella typhimurium
atgattctgatgaatgcactgactgccgtaaaagcgaacacagatgatttagcccaacgccatactggtttcacccttgccccttcggcgcagtcgccgcgcctgctggcgttaacgtttacggcggataccacaaaacaatttcttcatcaggttgcgcagtggccggtgcaggcgctggaatacaaatctttcttacgttttaaaatcggcaagatcctcgacgatctgtgcggcaatcagctacaaccgctgttgatcaaaacgctcctcaaccgtgcacaaggcgcgctgttgatcagcgccgaagggatcgatgatgtcgcacaggcagaagagatggtcaaactggcgacggcggtggcgcatcttattggtcgctccaactacgatgcgatgagcggccagtactacgcgcgtttcgtggtcaaaaacgtcgacaactccgacagttatctgcgccagccccaccgcgtaatggaactgcacaatgacggtacctatgttgaggaggtgaccgactacgtgctgatgatgaaaatcgacgaacagaatatggaaggcggtaattcgctgttgctgcaccttgatgactgggaacatctggagtcgttttttacccatccgctggcgcgtcgcgtcatgcgctgggcggcgccgccaagcaaaaatgttagccatgacgtctggcacccggtgtttgatgtcgaccaacaaggccgcccggtcatgcgttatatcgaccagttcgtccagccaaaagactttgaagaaggcgtctggctcagcgagctttcagacgcgctggaaaccagtcaaaacatcctctccgtaccggtaccggtcggcaaattcctgttgattaacaatctgttctggctacatggacgcgatcgttttacgccgcatcctgacttgcgtcgcgaactgatgcgccagcgcggttacttcgcctacgccgccagccattatcaaactcaccaataa

SEQ ID NO: 39030 - DNA, 2475 bp, Salmonella typhimurium
atgctacaatgcggcgcaaagaaagttaaccccgtggagccgtttgtgacgtcattgcccgttgccgccgtattgcctgaattgttgacagccctaaaaatcgcgccgcaggttttgttgtccgcgcctaccggggcggggaaatccacctggctgccgttgcaactcctgcaacaggggccggttgctggaaaaatcctcctgcttgaaccgcgtcgtctggcggcgcgtaatgtcgcacagcgtctggcggaagcgttgaatgaaaagcctggcgaaacggtaggttaccggatgcgcgcgcaaagctgcgtggggccgcgtacccggctggaagtggtgaccgaaggcgtattgaccagaatgattcagcgcgatcccgaattacgcggcgtggggctggtgatactggatgaatttcatgagcgcagtttacaggcggatttagcgttggcgctgttgctggatatccagcaagggctccgtgacgatctcaggctgttaatcatgtctgcgacgctggataacgacaggctttgtcagcgactgcctgatgcgccgacgatcgtctcggaggggcgcgcgttcccggtggagcgacgttatcagccgcttgcggcgcatttgcgttttgatgaagccgtcgcgatggcgacagcggaactgctgcgcaatgaaaacggttcgctgctgctatttttacccggcgtaggcgaaatacagcgcgttcatgaacatctggcgtcgcgggtagggagcgatgtcctgctttgtccgctgtatggcgcattgtctctggaagcgcaacgcaaagcgattgttccggcacccgccgggatgcgtaaagtggtgttggcgactaacattgccgaaaccagtttgacgattgaagggattcgtctggtcgtcgatagcgctcaggagcgcgtggcgcgatttgacgcgcgaacgggactgacgcggctggttacgcagcgtatcagtcaggcatcaatgacgcagcgcgcggggcgcgccggacgactggcgccgggtatctgtttacatctgctggccaaagaacaggcggagcgggcggcggcgcaaagcgatccggaaatcttacacagcgacctttccggtttattgatggaggtgttgcagtggggatgtcacgatccggcatcgcttttctggctggacaggccgccggaggtgaatcttcaggccgcccgccgtttattattgatgttaggcgcgctggagggcgagcggttaagcgcgcggggccggaaaatggcggcaatgggtaacgatccgcgcctggcggcgatgttagtcaacgccggcgagggcgatagcgccgccactgccgccatgctcgcggccatccttgaggacccgccgcgcggcggcggtacggatttaagcgtagtattttcgcggcgacagccgggctggcagcagcgtagccagcagcttttaaaacggctgcaggtgcgtaatggcgagccggatagcgcgcttattatgccgctgttggccagagcgtttagcgaccgcatcgcgcggcgtcgtggtcaggaagggcgctatcagttagccaatggtatgggcgcgatgttagatgcggatgacgcgttgggacgtcatgaatggctgatcgcgccgctgttactgcaaggtagcgcctcgccggacgcccgaatattgttggcgcagccgctggatattgcctcgctgattcaggcgtgtcctgatttactgcgccagtccgacacggttgaatgggacgaggcgcagggaacgttgaaagcatggcgcagaatgcgtattggacagttgacggttagcgttcagccactggcgaagccgtctgaagaggagcttcatcaggcgatgctgaacggcatccgcgataaaggtctgtccgtccttaactggacgccggaagcggagcagttccgtctgcgtctgcactgtgcggcgaaatggctgccggaatatgactggcctgccgtggatgaggcgtcgctgctggcgactctggaaaattggttgctgccgcacatgacaggcgtacagtcgttacgagggctaaaatccctgaacgttaatcaggcgttacggggactgcttgactatgccatgctgcaacgtctggatagtgaactgcctgggcattacactgtgccgacgggaagccgaataacgattcgttatcatgaagataacccgcccgcgctggcggtcagaatgcaggaaatgtttggcgaagcgaagaccccaaccatcgctcagggccgcgtgccgctggtgctggaactgctttcgccagcgcagcgaccgctacagattacgcgcgatttaagcgctttctggcagggggcgtatcgcgaagtgcaaaaagagatgaagggccgttaccccaaacatgtctggccggacgatccggcgaatacggccccaacgcggcgcacgaagaagtattcgtga

SEQ ID NO: 39031 - DNA, 2523 bp, Salmonella typhimurium
atggcggggaatgaccgcgagccgattggacgtaaggggaaaccgtcacgtcctgtgaaacaaaaggtgagccgtcgtcggcagcatgacgacgattatgatgatgactatgaggatgaagaaccgatgccgcgtaaaggtaagggcaaagggcgtaagcctcgtggcaagcgcggctggctgtggctattgctaaaactgtttatcgtttttgtggtgctgttcgccatttacggcgtctatctggatcaaaaaatccgcagccgtatcgatggcaaggtctggcagcttccggcggcggtatatggccggatggtgaaccttgagccagacatgcctgtcagcaaaaacgagatggtgaaattgctggaagcgacgcagtatcgtctggtgacgaagatgacccgtcccggcgaatttaccgtgcaggccaatagcattgagatgatccgtcgtccgtttgacttcccggacagcaaagaagggcaggtgcgcgcgcggctgacgttcagtgacgggcgtctggaaaccatcgtcaatctggataacaaccgccagtttggcttcttccgtctcgatccgcggcttatcaccatgctttcttcgccaaatggcgagcagcgtttattcgtcccgcgcagcggtttcccggatctgctggtcgatacgctgttggcgacggaagaccgtcatttctatgagcatgatggcattagtctttactctatcgggcgtgcggtgctggccaacctgacggcgggacgcacggtgcagggggccagtacgctgacccagcagctggtgaagaacctgttcctctccagcgaaagatcatactggcgtaaagcgaatgaagcctacatggcgctgatcatggatgcccgttacagtaaagatcgtattcttgagctgtacatgaacgaggtctacctcggtcaaagcggggacaatgaaattcgcggttttccgctggcgagcctgtattactttggtcgtccggtagaggaactgagcctcgatcagcaggcgttactggtggggatggtaaaaggggcgtcgatttataacccgtggcgtaacccgaaactggcgttggagcgtcgtaacctggtgttacgcctgttacagcagcagaaaatcatcgatcaggaactctatgacatgctgagcgcgcgtccgcttggcgtacagccgcgcggcggcgttatttcaccgcagccagcgtttatgcagatggttcgtcaggaactgcaggcgaagctgggggataaaattaaagatctctccggcgtgaagatcttcaccacctttgactccgtggcgcaggatgccgcagaaaaagccgttgtcgaaggtattccggcgttgaagaagcagcgtaaattgagcgatctggaaaccgcgatggtggtggtggatcgctttagcggcgaggtgcgcgcgatggttggcggggcggagccgcagtatgccggctataaccgtgccatgcaggcgcgccgttccatcgggtcgctggcgaaaccggcgacctatctgaccgcgttaagtcagccgaacttataccgtctgaacacctggattgccgatgcgccgatttctctgcgccagccgaatggtcaggtctggtcgccgcagaacgacgatcgtcgctacagcgaaagcgggaaagtgatgctggtggatgcgttaactcgctcaatgaacgtaccgacggtcaatctggggatggcgttaggtttaccggcggtaaccgatacctggacgaagctcggcgtgccgaaagatcagctcaatccggttccggctatgctgttaggagcgctgaacctgacgccgatcgaagtggcgcaggcgttccagactatcgccagcggcggaaatcgcgcgccgttatcagcgctgcgttcagttattgcggaagatggtaaagtgctgtaccaaagttatccgcaagctgaacgcgccgtaccggcacaggcggcttacctgacgctctggacaatgcagcaggtcgtccagcgtggtacggggcgtcagcttggcgcgaaatatccgggtctgcatctggccggtaaaaccgggacgacaaacaacaatgtcgatacctggtttgccggtatcgacggcagccaggtgactatcacctgggtaggccgtgataacaaccagccgacgaaattgtacggcgccagcggcgcgatggcgatttaccagcgctatctggcgaaccagacgccgacgcctttagttctgacgccgccggaagatgtggtggatatgggcgttgattacgacggtaattttgtctgtagcggcggtatgcgcactctgccggtctggacggacgatccaaatacgctgtgccagcagggcgagatgatgcagcaacagcagcagccgtcaggcaatccgttcgatcagtcgtctcagccgcagcagcctgcgcagcaacagccgccgaaagaagagaagagcgacggcgttgccggctggattaaggagatgttcggcggcaattaa

SEQ ID NO: 39032 - DNA, 2190 bp, Salmonella typhimurium
atggcgcgtcttaaaactgctcagccaaactcctcactgcgtaaaatcgcagttgtagtagccacagcggttagcggcatgtctgtctatgcacaggcggcggttcaaccgaaagaagaaaccattaccgtaaccgcagcgcctgccgcgcaggaaagtgcctggggaccggctccgaccatcgccgcgaagcgttccgccaccaccaccaaaactgatacacctatcgaaaaaacgccacagtcggtttcggtggtcactaacgaagagatgcagatgcatcaattccagtcagtaaaagaagcgttgggttacacgccgggtgtaacggtaagcagccgcggcgcttccaatacctatgacttcgtgattatccgtggcttctcttccgtcggcctgagccagaacaactatctggatggcctgaaattgcaggggaacttctacaacgatgcggttattgatccctacatgcttgagcgtgttgagttgatgcgtggcccaacgtccgtcctctacggtaagagcaacccgggcggtatcatttcgatggttagcaagcggccgactactgagccgctgaaagaaattcaattcaaaatggggacggacaatttgttccagaccggttttgattttagtgattccctggatgacaacggtgagttctcatatcgtctgacggggctggcgcgttcgacaaatgagcagcaaaagagttctgagtcgcagcgctatgcgattgcgccctcttttacctggcgtcctgatgagaaaacgaattttacgttcctttcttatttccagaacgaaccagagaccggctactacggctggctgccgaaagagggaacggttgaaccgttaccgaatggtaaacgcttgccgacagatttcaatgaaggggcgtcaaacaacacctattctcgtaacgagaaaatggtgggatacagtttcgagcatggcttcaacgacacttttaccgtgcgccagaatttacgttttgtcgaaatgaaaaccgcgcaaaaaagcgtctatggcacggggattgcggcggacggccatacgcttaaccgcggtactatcgttgacaacgagcgtttacagaatttcagcgtagatacacaactggaaagtaaattcgcgaccggcgatattgatcatacgttgctgacgggtgtcgatttcatgcgtatgcgtaatgatattaacgcgacgtttggtagcgcgccgtcaatcgatctctataacaattaccatcctgaatactttgctttcggcggcgctgagccgtaccagatgaacgaaagtaaacaaacaggcctctatgttcaggatcaggcggaatggaataagtgggtatttactctcggcggccgctatgactggtctaaacaagcgacaacggtgcgtcagaattccactacgccgacagaaggatatattgaacgtaatgaccaccagttcacctggcgcggtggcgtaaactacgtattcgataatggaatttcaccttacttcagctatagccaatctttcgagccaagcgccttcgatttgtggagcaccccacgcgtttcttacaagccgtcaaaaggcgagcaatatgaagcaggggtgaaatatgtaccgaaagacatgccggttgttgttacgggtgccgtttatcagctgaccaaaaccaataacctgaccgccgatccaaccaacccattagcgcaggtgccggcaggcgaaattcgtgcgcgaggtgtagagctggaagccaaagcagcattgacggctaacatcaatatgacggcgtcttacacttatactgatgctgaatacacgaaagacactaatctgaaagggaatacgccagagcaggtgcctgaacacatggcgtcgttgtggggcgattacaccttcaacgaaggtccgttgtcaggtttaacgctgggaacaggcggtcgttttattggttccagttacggcgatccggctaatagcttcaaggtaggcagcgcagcggtgatggatgcggtcgtcaagtacgatctggcgcgttttggtatggcgggctccagcattgcggttaacgttaataatctgctcgaccgcgaatacgtcgccagctgcttccagacctacggctgtttctggggcgcagaacgtcaggtcgttgcaacggcaaccttccgtttctaa

SEQ ID NO: 39033 - DNA, 1449 bp, Salmonella typhimurium
atgcaacttaacgactctaccctgttccgccagcaggcctttatcgatggcgactggcgcgacgcgcgcggcggcgatgtcatccccgtgagcaaccccgccaacgggaaaccgcttggcaatgtgcccaaaatgggggcggaagagacgcgcgacgccatcaacgccgccaatcgcgccctgcccgcctggcgcgcgctcaccgccaaagagcgagccaatatcctgcgtcgctggttcaatctgatgatggaacatcaggacgatttggcgcgtctgatgacgctggaacagggtaaaccgctggcggaagcgaaaggcgaaattagctacgccgcctcgtttattgaatggttcgccgaagaggggaagcgtatctatggcgacacgattccaggccatcaggccgataaacggctgctggtgattaaacagcccatcggcgtcaccgccgcgattaccccgtggaactttccctcggcaatgatcacccgtaaagccggccccgcgctggccgcaggctgcacaatggtactcaaacccgccagccagacgccgttttccgcgctggcgctggcggaactggcccagcgcgccggaattcccgcaggcgtatttaacgtcgttaccggttcggcaggcgatatcggcggcgagctgaccagcaacccgctggtacgcaaactgtcgtttaccggctcgacggagattggccgccagctaatggaacaatgcgccaaagacattaaaaaagtgtcactggaattgggcggcaatgcgccgtttatcgtctttgacgatgccgatctggataaagccgtcgaaggcgcgctggcttcgaagtttcgcaacgccgggcagacctgtgtctgcgccaatagattgtatgttcaggacggcgtttacgatcgttttgcggaaaaactcaaccaggcggtaaataagctcgcggtcggtgacggcctgcaagccgacgtcgctatcgggccgctgattgatgaaaaagccgtggcgaaagtccaggaacatatcgccgatgcgctggaaaaaggcgcccgcgtcattacgggcggtgaagcgcacaaattgggcggcaacttctttcaaccgaccattctggcggatgttcctgataacgcgaaagtcgccaaagaagagacattcgggccgctcgcgcctctgttccgcttcagcgacgaggcggacgtcatcaggcaggctaacgataccgagttcggcctggcagcctatttttatgcacgcgatttaagccgcgttttccgcgtcggcgaagcgctggaatacggcatcgtcggtattaataccggcattatctccaacgaagtcgcgcctttcggcggcattaaggcctccggattaggccgagaaggttccaaatacggcatcgaagattatttagaaatcaaatatatgtgcatcggcctttaa

SEQ ID NO: 39034 - DNA, 1401 bp, Salmonella typhimurium
atggggcaattgtcagaatcacatgcattagggggcgggctgaaatcacgccacgtcaccatgttatcgatcgccggcgtcatcggcgccagcctgtttgtcggttccagcgtggcgattgcggaggccggccctgcggtactgctggcctatctgttcgcaggacttttagtcgtcatgattatgcgaatgctggctgaaatggccgtcgccacaccggataccggatctttttccacctatgcggataaagcgatcggcccctgggccgggtataccatcggctggttatactggtggttttgggtgctggttattccgctggaggccaatattgccgccattattctgaattcatggataccgggtattccggtatggctattttcattagtgattacgcttgccttaaccggaagcaatttattgagcgtcaaaaattacggcgagttcgaattctggctggcgctatgtaaagtaattgccattctggcgtttatcgcgctgggcgcgacggcgattagcggtttttatccgtatgctgaggtaagcggtatctcccggctctgggatcacggcggttttatgcctaacggcttcggcgcggtgttaagcgccatgttgatcaccatgttctcttttatgggcgcggaaatcgttactattgctgccgcggaatccgatacgccggataaacatatcgtacgcgccaccaattctgttatctggcgaatttccatcttttacctgtgttccatttttgtggtggtggcgctgatcccgtggaatatgccgggtctgaaaagcgtaggttcgtaccgttcggtactggagctgcttcatattccgcacgcaaaattcattatggactgcgtgattttattgtcggtgaccagttgtctgaactccgcattatataccgcctcccggatgctctattcccttagccgccgcggcgatgctcctgcgataatgggaaaaactaaccgtagcaaaacgccctgggtagcggttctcctctctaccggcgcggcctttttaaccgttatcgtcaattattacgccccggcaaaagtgtttaaatttcttatcgacagttccggcgccatcgcgctgctggtctatctggtgattgcgatttcgcaattgcgaatgcgtaaaattctgctggcgcagggcggagaaattaagctgaaaatgtggctttatccgtggctcacctggctggttatcggctttatctgctttgtcctggtggtgatgctatttcgaccggcacagcaactagaagtcatttcaacggggctgttagggctgggcataataggtactgtccccattatgtctcgctggaaaaaactgataaggtggcaaaaagcccccctgcaaaacctacgttag

SEQ ID NO: 39035 - DNA, 300 bp, Salmonella typhimurium
atgacagagcttgaacaacttcaggccagcgcagaacaggcggcggccctgctcaaagcgatgagccacccaaaaagattactgattttatgtatgctttgcggttcgccaaaaaccagcgcaggcgaactggcgcgcattaccgggctaagcccctccgcgacgtcgcaacatctggcgcggatgcgggaagaagggctgattgatagtcaacgcgatgcccagcgcattcactatttcattaaaaatgaggcggttaatacgattatcgccacgttaaagaatctctattgtccataa

SEQ ID NO: 39036 - DNA, 798 bp, Salmonella typhimurium
atgcaggaaaaccacattcattccgataccacctttgcgctgcgaagcgtcgcctttcgtgtgccgggccgcacgcttttacaccccctctcgttaacgtttcccgcaggtcgcgtcaccggacttattggtcataatggttccggtaaatccacgctgttaaaaatgctgggccgccatcagccgccttccgaaggggatattctgctcgacaatcagccgctggcgagctggagcagcaaggcgtttgcccgcaaagttgcctatctgcctcaacaattgccacaggcggaaggaatgacggtgcgcgaactggtggcgattggccgctatccgtggcacggcgcgctgggacgctttggcgtcgcggaccgggaaaaagtagacgaggcgattacgctggtcggcttaaaaccgctggcgcatcgtctggtagacagtctttccggcggtgaacgccagcgcgcgtggattgccatgctggtcgcgcaggacagccgttgtctgctgctggatgagccgacgtcagcgctggatatcgcccatcaggttgacgtgctggcgctggtgcatcgtttaagccaacagcgcgggctgacggtggtagcggtgctgcacgatatcaacatggcggcccgctactgtgattatttagtcgcgctacgcggcggtgaaatgattgcgcaaggaacgcctgcggaactgatgcgcagtgacacgctggaacagatttacggtatcccgatgggtatccttccgcatccggcgggcgcggcacctgtgagttttgtgtattaa

SEQ ID NO: 39037 - DNA, 891 bp, Salmonella typhimurium
atgcgtgatttatatcctcttactcgccgccgtttattaacggcgatggcgctctcgccgctgctgtggcaaatgaatacggcgcaggctgccgctatcgatccccgccggattgtggcgctggagtggctgccggttgagctgctgctggcgctcggtattacgccgtatggcgtggcggacgtgccaaattataagctgtgggttagcgaaccgccgttgccggattcggtgattgatgtgggtcttcgcactgaacccaatctcgaactgctgacggagatgaagccgtcgtttatggtctggtcggcaggctacggaccctcgccggagaaactggcgcggatcgcgccggggcgcgggttcgattttagcgacggcaaaaagccgctggcggtggcccgacgctcgctggttgaactggcgcagacgctgaatctggaagctgcggcagaaaaacatctggcgcaatacgatcgcttcatcgccagccagaagccgcattttatccgccgcggggggcgtccgttactgatgacgacgcttatcgatccgcggcatatgctggtgctcggcccgaattgcctgttccaggaggtgctggacgagtatggcatcgtcaatgcctggcagggtgaaaccaacttttggggcagtacggcggttagcatcgatcggctggcgatgtataaagaagcggatgtgatctgcttcgatcacgggaataacaccgatatgaacgcgctgatggcaacgccgctgtggcaggccatgccgtttgtccgcgccgggcgctttcaccgggtgcccgccgtttggttctatggcgcgaccctctccacgatgcactttgtccgcatcctgaataacgtgttgggaggcaaagcgtga

SEQ ID NO: 39038 - DNA, 2058 bp, Salmonella typhimurium
gtgagcagaaaacgtgaaatgccggatggcggcgcgaaaagcgtcttatccgacctacggttcgggcgctttgtaggccggataaggcgaagccgccatccggcgttgctgttattggcgctgtttgttgccgcctgctggctgacatgggttaacttctccgttgcgctaccgcgcagccagtggcaacaggctatctggtcaccggatatcgacatcattgagcagatgatttttcattacagccagctgccaagactggcgatttcgctgctggtgggcgcggggcttgggctggtaggcgtcctgttccagcaagtattacgtaacccgctggcggaaccgaccacgctgggcgtggcgaccggcgcgcaattggggatcacggtgactacgctttgggcgattcccggcgcgctgaccacgcagtttgccgccctgacgggagcctgtatcgtcggcgcgctggtgttcggcgtggcgtggggcaaacgtctgtcgccagtgaccctgatcctcgccgggctggtggttagcctctattgtggcgcaatcaaccagttactggtgattttccaccacgatcagttgcaaagcatgtttttatggagcaccggaacgctaacgcaaaccgactggagcggcgtgcagcgtctgtggccgcagttgctgggcggtgtgatgctcacgttattgttgttacgcccgatgacgctgatggggctggatgacggcgttgcgcgtaatctgggtctggcgctgtcgttagcgcgtctggcggcgctgtcgctggcgattgtgttgagcgctctgctggtcaacgcggtgggcattatcggttttatcggcctgtttgcgccgctgctggcgaaaatgcttggcgcaagacgtctgctggcgcgcctgatgctggcgccgctcattggggcgcttattttgtggctatccgatcagattatcctttggctaacccgcgtatggatggaggtttccaccgggtcagtgacggcgttaatcggcgcgccgctgctcctgtggctgctgccgcggcttaaaagcatgagcgcgccggatatgaacgccagcgatcgtgtggcagcggaacgtcggcacgttcttgcttttgccgttgccggtggcgcgctcctgctgctggcaacatgggtcgccctctcttttggtcgcgacgcgcacggctggacgtgggcgagcggaacgctgcttgaagaactgatgccgtggcgctggccgcggatactggcggcgttaatggcgggcgtcatgctggcggtggcgggctgcattattcagcgtctgaccggtaatccaatggccagcccggaagtgctggggatcagttccggagccgcgtttggcgtggtgttgatgctgtttttggtgccggggaatgccttcggttggctactgcctgccggaagcctgggcgcggcggcgacactgctgattattatgatagccgccgggcgcggcggtttctcgccgcaacggatgttgctggcggggatggcgctcagcaccgcgtttaccatgctgctaatgatgctccaggcgagcggcgacccgcggatggcggaagtattgacctggctctcaggatctacctataacgccactggcgggcaggttacgcgaaccgcgatcgtgatggtgattttgctggccattgtgccgttgtgtcgccgctggttaacgattttgcccctgggcggcgatgccgcgcgtgcggtgggcatggcgcttacgccgtcgcgtatcgcgctgctggcgctggcggcttgtttgacggcaaccgcgacgatgaccattgggccgctgagtttcgttggactgatggcgccgcatattgcgcggatgctcggttttcgccggacgatgccgcatatggtcatctcggcgctggcagggggcgttttactggtctttgccgactggtgcggcaggatggcgctatttccgtatcagatcccggcgggactgctttcaagctttattggcgcgccgtactttatctatttgctacgtaaacagagtcggtaa

SEQ ID NO: 39039 - DNA, 753 bp, Salmonella typhimurium
atgatgtcattaaaacgttataacctggccgctgttttgctgcttttgctgggcggctacggtagcgcccaggccgccatcgcgcccgatcgcacccgcctggtgtttcgcggcgaagataaatcgataagcgtcgatctgaaaaacgccaacagcaaactgccctatctggcgcagtcctgggtggaagatgagaagggcgtcaaaatcacctcgcctttaatcgtcgtcccaccggtccagcgcattgagccgtcggcaatcggacaggtcaaaattcaggggatgccggcgctggcgtcgctcccccaggatcgggaaacccttttttattacaacgtgcgcgaaattccgccgcaaagcgacaagcccaatacgctgcaaatcgccctgcaaacgcgcatcaaagttttttaccgcccgcaggcgctatcgaaaatcgatatgcagcatccctggcaatacaagatcacccttcagcgtcagggcaatggctatcaggtgagcaacacaaccggctactacgtggtgttaagcaacgccagcaaccgcatggacggcacaccagccagaggctttagccctttagtgattgcaccaaaaagcaacgtgacgctgggaggggacgccagtgaattaggtcactcgcctgtgctgacttacgtcaacgattatggcgcgcggttaccgctgatttttaactgtactgacaacagttgtgcggtagatgaagcaaaaagcagaaagtcgtaa

SEQ ID NO: 39040 - DNA, 411 bp, Salmonella typhimurium
atgagcgcgctcgtctacttctccagcagctctgaaaatacgcaccgctttatgcagcgtctggggctgcctgccacgcgtattccgctcaatgagcgggagcgaattcaggtagacgaaccgtacattctggttgtgccgtcatacggcggcggcgggatggccggtgcggtgccgcgacaggtgatccgctttttaaatgatgaacacaaccgggcgcgcattcgcggcgttatcgcctccggtaatcgcaatttcggcgatgcctggggatgcgctggcgatgtgatagcacaaaaatgcggcgtcccctggctgtaccgctttgagctcatgggcacacaacgcgacatcgataatgtccgaaaaggagtaaatgaattttggcaacaactaccccggagcgcgtaa

SEQ ID NO: 39041 - DNA, 2145 bp, Salmonella typhimurium
ttggcaacaactaccccggagcgcgtaatgcaggaaaccatggattaccacgccctgaacgcgatgctgaatctttacgataaagcaggccatattcagttcgacaaggaccagcaggcgatcgacgccttctttgccacccacgtccgcccgcattccgtgacgtttgccagccagcatgaacgtctggggacgctggttcgggaagggtattacgatgacgccgtcctcgcgcgttacgaccgcgccttcgtccttcgcctgttcgagcacgcccatgccagcggctttcgcttccagacgtttcttggcgcctggaagttctataccagttacacgctgaaaaccttcgacggcaaacgttatctggaacactttgaagatcgggtgacaatggtggcgttgacgctggcgcagggtgacgaaacgctggccacccaactgaccgatgaaatgctttctggtcgctttcagcccgctaccccgacttttttaaattgcggcaaacagcagcgtggggaactggtctcctgcttcctgctccgtatcgaagacaacatggagtcgatcgggcgggcggtgaattcggcgctgcaactctccaaacgcggcggcggcgtcgcgtttttactctccaatctgcgcgaggcgggcgcgccgatcaaacgcattgagaatcagtcttccggcgtgatcccggtgatgaaaatgctggaagacgcgttttcgtatgccaaccaacttggcgcgcgccagggggccggcgcggtttatctccatgcgcaccatccggatattctgcgttttctggataccaaacgagaaaacgctgacgaaaaaatccggatcaaaacgctctctctcggcgtggtgatcccggatatcaccttccggctggcgaaagaaaacgcgcaaatggcgctcttttcgccctatgacatacaacgacgctacggcaaaccgtttggcgatatcgccattagcgaacggtacgatgaattaattgccgatccgcacgtgcgcaaaacctatattaacgcccgtgacttttttcaaacactggcggagattcagttcgaatccgggtatccctacatcatgtttgaagatacggtaaaccgcgcgaatcccattgctggtcgcattaatatgagcaacctgtgctcagaaattttacaggtcaatagcgcttcccgttacgacgataaccttgactatacccacatcgggcatgacatctcctgcaatctcggctcgctgaatatcgctcacgtcatggattcaccggacattggccgtaccgtagaaaccgctattcgcggcctgacggcggtgtcggacatgagccatatacgcagcgtgccctcaatagccgccggtaatgccgcctctcatgccatcggtctgggccagatgaatctgcatggctatctggcgagggaaggtattgcctacggttcgccggaggcgttggatttcaccaatctctatttttacaccattacctggcatgccgtgcatacttcaatgcggctagcccgcgaacgcggcaaaaccttcgccggatttgcgcagtcgcgctatgccagcggcgactattttacgcagtatttacaggacgactggcaaccgaaaacagcgaaagtcagggcgctatttgcccgcagcggcattacgctgcccacacgagaaatgtggctaaagctgcgcgacgatgtgatgcgctatggcatctataaccaaaatttgcaggcggtgccgccgaccggttcgatttcttacattaatcatgcgacctccagcattcatccgattgtggccaaaattgagattcgcaaagagggcaaaaccgggcgtgtgtattaccccgcgccgtttatgaccaatgaaaacctggacatgtatcaggatgcttacgatatcggtccggaaaaaattattgatacctatgccgaggccacgcgccacgtcgatcaagggctgtcgctcaccctgtttttccccgataccgccacgacccgcgatatcaacaaggcgcagatctatgcctggcgaaaaggtattaagtccctgtattacatccggcttcgccagttggcgctggaaggtactgaaattgaaggctgcgtatcctgcgcgctataa

SEQ ID NO: 39042 - DNA, 960 bp, Salmonella typhimurium
atgaaattatctcgtattagcgccatcaactggaacaagatccaggacgacaaagatctggaggtatggaaccggctgaccagtaacttctggctgccggaaaaagtgccgttatcgaatgatattccggcctggcagacgctgagcgccgccgaacagcagctcaccattcgcgtgtttacgggacttacgctgctcgacactatccagaacatcgcaggcgcgccgtcgttaatggcagatgccatcacgccgcatgaagaggcagtgctgtcgaacatcagctttatggaagcggtacacgcccgctcttacagttctattttctccacgctgtgccagacgaaagaggttgatgccgcctacgcctggagcgaagaaaacccaccgcttcagcgtaaggcgcagattattttagctcattacgtcagcgatgaaccgctaaagaaaaagattgccagcgtctttttagagtcttttctgttctattccggcttctggttgccgatgtatttctccagccgcggtaagctcacgaacactgccgacctgattcgtttaatcattcgcgatgaagcggttcacggttattatattggctataagtatcagatagcgctacaaaaactatcggcaatcgagcgtgaagagttaaagcttttcgcgctggatttgttgatggaactgtacgacaacgaaatccgctacacagaagcgttatatgcggaaaccggctgggttaacgacgtcaaagccttcttgtgctacaacgccaataaagccttaatgaacctgggttatgaggcgttatttccgccggagatggcagacgtgaatcccgcaatccttgccgcgctctcgccgaatgccgacgaaaaccatgatttcttttccggctcaggttcatcttatgtgatggggaaaacagtcgaaaccgaagacgaagactggaatttttaa

SEQ ID NO: 39043 - DNA, 1203 bp, Salmonella typhimurium
atggcaattaaattagaagtgaagaatctgtataaaatatttggagagcatccgcagcgtgccttcaaatatattgaaaagggactatcgaaagagcaaatactggaaaaaacggggctatcgcttggcgttaaagacgccagtctggccattgaagaaggcgagatatttgtcatcatgggattatccggctcgggtaaatccacaatggtacgccttctcaatcgcctgattgaacccacccgcggacaggtactgattgacggcgttgatattgccaaaatatcagacgctgagcttcgcgaggtgcgcaggaaaaagattgcgatggtcttccagtcatttgcgctcatgccgcatatgaccgtgctggataatacggcattcggtatggaattagcgggcatcgcggcgcaagagcgtcgcgaaaaagcgctggacgccttgcgtcaggtggggcttgagaattacgctcacgcctacccggatgaactttccggtgggatgcgtcagcgtgttgggcttgcccgcgcgctggcaatcaaccctgatatcttattaatggatgaagcgttttccgccctcgatccattaattcgtaccgaaatgcaggatgagctggtgaaattacaggcgaaacatcagcgcaccattgtctttatttcccacgatcttgatgaggctatgcgtattggcgacaggattgccattatgcaaaatggcgaggtcgtacaggttggtacgccggatgagatcctgaataatccggcaaatgattatgtccgcacgttcttccgtggcgtggatattagtcaggtctttagcgccaaagatattgcccgtcgcagcccggtcggattaattcgtaaaacgccaggtttcggtccccgttcggcactgaaattattacaggacgaagaccgtgaatatggttacgtcattgagcgtggcaataaattcgtgggcgtcgtgtccatcgactcattaaaagcggcattaagccaggcgcaagggattgaagcggcgcttatcgacgaccctttagtcgttgatgcgcaaaccccactcagcgagttgctctctcacgtcggccaggcgccctgcgcggtgccggttgtcgatgaagaacaccagtatgttggcattatttcaaaacgtatgttgctacaggctttagatcgcgaggggggtaacaatggctga

SEQ ID NO: 39044 - DNA, 1428 bp, Salmonella typhimurium
atgaaaaaaaccacattagcaatgagtgcactggctctgagtttaggtttggcattgtcgcctctgtctgccacggcggctgaaacgtcctcttcagcaatgactgcccagcagatgccaagcctggcaccgatgctcgaaaaagtgatgccatcggtggtcagtattaatgttgaaggtagcaccacggtgaatacgccgcgtatgccgcgtaatttccagcagttctttggcgatgactccccgttctgccaggacggttctccgttccagaattctccgttctgccagggcggcggtaacggcggcaacggcggtcaacaacagaaattcatggcgctgggctccggcgtaattattgacgccgcgaagggctacgtcgtcaccaacaaccacgtggttgataacgccagcgtgattaaagtacagcttagcgatgggcgtaaattcgatgctaaagtggtgggcaaagatccgcgttctgatatcgcgctgattcaaattcagaatccgaagaacctgacggcgattaagctggcggactccgacgcgctgcgcgtgggggattataccgtcgctattggtaacccgtttggtctgggcgaaacggtgacgtcaggtatcgtttcggcgctggggcgtagcggcctgaacgtagaaaattacgagaactttattcagaccgacgccgcgattaaccgtggtaactccggcggcgcgctggtgaacctgaacggtgagctgatcggtattaacaccgcgattctggcgccggacggcggcaacatcggtatcggcttcgctatccccagtaacatggtgaaaaacctgacgtcgcagatggtggaatacggccaggtgaaacgcggcgaactggggatcatggggactgagctgaattccgaattggcgaaagcgatgaaagtcgacgcccagcgaggcgcgttcgtcagccaggtgatgccgaattcgtccgcggcgaaagcgggtatcaaagccggggatgtcattacctcgctgaacggtaaaccgatcagcagctttgcggcgctgcgcgctcaggtcggcactatgccggtcggcagcaaaatcagcctcggtctgctgcgtgaaggtaaagcgattacggtgaatctggaactgcagcagagcagccagagtcaggttgattccagcaccatcttcagcgggattgaaggcgctgaaatgagcaataaaggccaggataaaggcgttgtggtgagcagcgtgaaagcgaactcacccgccgcgcaaattggcctcaaaaaaggcgatgtgattatcggcgctaaccagcagccggtgaaaaatatcgccgagctgcgtaagattctcgacagcaagccgtcggttctggcgctgaatattcagcgtggtgatagttctatttatttgctgatgcagtaa

SEQ ID NO: 39045 - DNA, 1158 bp, Salmonella typhimurium
atggctggctggcatcttgataccaaaatggcgcaggatatcgtggcgcgcactatgcgcatcatcgataccaatatcaacgtaatggatgcccgcgggcgcattatcggcagcggcgatcgggaacgtattggtgaattgcacgaaggcgcgctgttagtgctgtcgcagggccgggttgtggatatcgacgacgccgtggcgcgacacctgcacggggtgcgtcaggggattaatcttcccttacgtcttgagggcgaaattgtcggcgtgatcggcctcaccggcgaaccagagcacctgcgtaaatatggcgaactggtgtgtatgactgccgaaatgatgctggagcagtcgcggttaatgcaccttttggcgcaggatagccgtttgcgcgaagagttggtgatgaacctgattcaggccgaagaaaatacgccggcgctggtggaatgggcgcagcgtttggggatcgatttgaaccagccgcgtgtggcggcggtggtggaagtcgacagcggccagcttggcgtcgatagcgcaatggcggaacttcagcagttgcagaatgcgcttaccacgccggagcgtaacaacctgatagccattgtttctctcaccgagatggtggtactcaaacccgccttaaactcgtttggtcgttgggatgctgaagatcatcgtaagcgcgtagagcagcttatctcgcgcatgaaagagaatggtcagctacgttttcgcgtggcgctgggcaattactttaccgggccgggcagtattgcacgctcataccgcacggcgcgcaccacgatgatggtcggcaaacagcgaatgccagagagccgcagctatttttatcaggatttgatgctgccggtcctgttagatagcctgcgtggcggctggcaggccaatgagctggcgcgcccgctggtaaaactcaaagcgatggataacaacgggttattacgtcggacgctgacggcgtggtttcgccataatgtccagccgctggcgacctctaaggcgctgtttattcatcgtaacacgctggaatatcggctaaatcgtatttcggaactgaccgggctggatttgggaaattttgacgatcggctgttgctgtatgtggcgctacaactggatgaacagcgttaa

SEQ ID NO: 39046 - DNA, 531 bp, Salmonella typhimurium
atggatagttcgtttacgcccattgaacaaatgctaaaatttcgcgccagccgtcacgaagactttccttatcaggaaattcttttgactcgtctttgtatgcacatgcaaggcaagctcctggaaaaccgcaataagatgctgaaggctcaagggattaacgagacgttgtttatggcgttgattacgctggagtctcaggaaaaccacagtattcagccgtctgaattaagctgcgcgctgggttcatctcgcaccaatgcgacacgcattgcagatgagctggaaaaacgcggctggattgagcgtcgtgagagcgataacgaccgccgttgcctgcatctgcaattaacggagaaaggccaggcatttttgcaagaagtgcttccgcctcagcatcattgtctgcatcaactctggtcatcacttagcacagccgaaaaagatcaacttgagcacatcactcgtaaactcctgacgcgtcttgatcaaatggagcaggaaggcactgttcttgaggcgctgcgctaa

SEQ ID NO: 39047 - DNA, 1431 bp, Salmonella typhimurium
gtgacagttaaaaacgacagcatacagagcacattcctcttccacgattacgaaaccttcggtacgcatccagccctcgacagacctgcgcaattcgccgcgctccgtacggataacgacttcaacgttattggcgagccggaggtgttttattgcaaacccgccgatgattatctaccgcagcccggcgcggtgctgattaccggcatcacgccgcaggaagcgcgtgagaaaggagaaaacgaagccgctttcgccagacgcattcatgcgctgttcaccgttcctaaaacctgcgttgtgggctacaacaatgtgcgctttgatgatgaagtcacgcgcaatattttttatcgcaacttttacgatccctacgcctggagctggcagcatgataattcacgttgggatctattggatgtcatgcgcgcctgttatgcgctgcgcccggagggaattaactggccggaaaacgacgacggcctgcccagctttcgtctggaacatttaacccgggcgaacgggatcgaacacagcaacgcgcatgatgcgatggcggatgtctacgccactattgcgatggcgcaactggtgaaaacacgccagccgcggctgtttgattatctttatagccaccgcagtaaacataaactggcggcgctgattgacgttccgcaaatgaagccgctggtgcatgtctccggcatgtttggcgcgtggcgcggtaatacaagctgggtcgcgccgctggcgtggcatcctgaaaaccgtaacgcggtgatcatggtcgatttagcaggcgatatttctcctcttcttgagctggacagcgatacccttcgcgagcggctttatacggccaaagccgatcttggcgatcacgccgcagtgccggtaaagctggtgcatatcaataaatgtccggtactggcgcaggcgaataccttgcgcccggaggatgccgaccggctgggaattaaccgccagcactgcctggataacctgaaagtgctgcgtgaaaacccgcaggtccgcgacaaagtggtggcgattttcgccgaagccgaaccttttgccgcctcggataacgttgatgcccagctctatgatggttttttcagcgatgccgatcgcgcagccatgaaaatcgtactcgaaaccgagccgcgtaacctgcccgcgctggatattacctttgtcgataagcgcattgagaagctgctgtttaattaccgcgcacgcaattttcccggtacgctggatgacgcagagcagcagcgctggctggagcatcgccgtcaggtgctgacgccggagtttttacaacagtatgccaatgaattgcagatgctttctcagcagtatgcggaagataaaacgaagctggggttgctgaaatcactgtggcagtacgcaaccgagattgtgtaa

SEQ ID NO: 39048 - DNA, 900 bp, Salmonella typhimurium
atgttagacaacacccgcttacgcatagctattcagaaatcaggccgtttaagcgatgattcacgagaattgctggcccgctgcggcataaaaattaatttacacactcagcgcctgattgcgatggcggaaaacatgccgattgatatcctgcgcgtgcgtgatgatgacattccgggtctggtaatggatggcgtggtcgatctcggtattatcggcgaaaacgtgctggaagaagagctactcaaccgccgcgcacagggcgaagatccacgctatttaaccctgcgccgtcttgacttcggcggctgccgtttatcgctggcaacaccggttgacgaagcctgggacggcccggccgcgctggacggtaaacgtatcgctacctcatatccgcacctcctcaaacgctacctcgaccagaaaggcgtctcttttaaatcgtgtctgttaaatggttctgtcgaagtcgcgccgcgcgcggggctggccgacgctatctgcgatttggtctctaccggcgcgacgcttgaagctaacggcctgcgtgaagtcgaagttatctaccgctctaaagcctgtctgattcagcgcgacggtgagatggcacagagcaagcaagagctgatcgataaattgctgacccgtattcagggcgtgattcaggcgcgcgaatcgaaatacatcatgatgcacgcgccaagtgaacgcctggaagaggttatcgccctgctgccaggcgccgaaaggccgacaattctgccgctggcaggcgagcaacagcgcgtggcgatgcacatggtcagcagcgaaacgttgttctgggaaaccatggagaaactgaaagcgcttggcgccagctcgattctggtactgccgatcgagaagatgatggagtga

SEQ ID NO: 39049 - DNA, 780 bp, Salmonella typhimurium
atgaatcaagttgccgttgtcattggcggaggccagaccctgggggcattcctttgccgtgggcttgcagaagaaggataccgcgtggcggtcgttgatattcaaagcgataaagccgcgaatgtcgcccaggaaattaacgccgattttggcgaaggtatggcgtacggttttggcgccgacgccaccagcgagcagagcgtgctggcgctttcccgcggcgtagacgagattttcgggcgcgtcgatctgctggtttacagcgcgggtatcgccaaagcggcgtttatcagcgatttccagttgggcgattttgaccgctcgctacaggtgaatctggtgggctatttcctctgcgcccgtgagttttcccgcctgatgatccgcgacggcattcaggggcgcattattcagattaactctaaatccggcaaagtgggcagtaaacacaactccggctacagcgcggcgaaattcggcggcgtggggttaacccagtctctggcgctggatctggcggaatacggcattaccgtacactcgttgatgctcggcaacctgttgaaatcgccgatgttccagtcactgctgccgcaatacgccactaaactgggcattaagcccgatgaggtggaacagtattacattgataaagtaccgctcaaacgcgggtgtgattatcaggatgtgctgaacatgctgttattttatgccagcccgaaagcgtcttattgcaccgggcagtcgatcaacgtaaccggcggtcaagtgatgttctga

SEQ ID NO: 39050 - DNA, 2445 bp, Salmonella typhimurium
atgaaaactaagatccctgatgccgtgctggcagccgaggtgagccgtcgtggtttagtcaaaaccaccgcgataggcggcctggcgatggccagtagcgcatttaccctgccatttacccgcatcgctaacgccgcagaggcaataagcccggcgaaaaccggcgagaaagtcgtctggagcgcctgtacggtaaactgtggcagccgttgtccgctacgtatgcatgttgtggatggcgaaatcaaatatgtagaaacggataataccggaaacgatgattacgatggcctgcaccaggttcgcgcctgcctgcgcggtcgttctatgcgccgtcgcgtctataacccggatcggctcaagtatccgatgaagcgcgtcggcgcgcgcggcgaaggtaaatttgagcgtattagctgggacgaagcctacgatatcattgccaccaatatgcagcgtcttatcaaagagtatggcaacgagtccatttatctgaactatggcacgggaacgctgggcggcactttgacacgttcatggccgccaggaaaaacgctggtcgctcgtctgatgaactgctgcggcggttatcttaatcactacggtgattactcttccgcgcaaatcgcagcgggtctgaactacacctatggcggctgggcggatggcaatagtccgtccgacattgaaaacagtaagctggtggtattgtttggcaataaccctggcgaaacccgcatgagcgggggcggtgtaacgtattatcttgaacaggcgcggcagaaatcaaacgcgcggatgatcattatcgaccctcgttacaccgacactggcgctggtcgcgaagatgagtggattccgattcgtccaggtaccgatgcggcgctggtcaatggtctggcatatgtcttaatcaccgagaacatggtcgatcagccgttcctggataaatattgcgttggttatgacgaaaaaaccttgcctgccagcgcgccgaaaaacggtcactacaaagcctatattctgggccagggtaaagacggtatcgcgaagacgccggagtgggcggcgcaaattaccggtatcccggcggatcgcattattaagctggcgcgagaaatcggcagcgctaaacccgcctatatttgccagggatggggaccacaacgtcatgctaatggagaaatcgccacgcgcgccatctcgatgctggcgatcctgacgggtaatgttgggattaacggaggtaatagcggcgcgcgcgaagggtcttatgccctgccatttgaacgtatgcccacgttagaaaacccggttgaaaccagcatctccatgtttatgtggaccgatgccattgaacgcggcccggaaatgacggcgctgcgtgatggcgtgcgggggaaagataagctggacgtgccgatcaaaatgatctggaactatgctggcaactgtttgattaaccagcactctgagattaaccgcacccacgaaatcctgcaggatgacaagaaatgcgaaatgatcgtcgttatcgactgtcatatgacctcgtcggcaaaatacgccgatattctgttgcctgattgcactgcttctgagcagatggactttgcgctggatgcctcctgcgggaacatgtcttacgttatcttcactgaccaggcgattaaaccgcgcttcgagtgtaagacgatttatgagatgaccagcgaactggcgaaacgtcttggcgtggaacaacagtttaccgaaggacggacgcaagaagagtggatgcgtcatctgtacgaacagtcgcgtaaatccattccgaatctgcccacctttgaggagttccgtaagcaaggcatcttcaaacagcgtgaccccgaaggccaccatgtcgcctataaagacttccgcgaagatccgcaagcgaatccacttacaacgccatcgggcaagattgaaatctattcacaggcgttggcggatatcgccgccacctgggagctgccggaaggcgacgtgatcgatccattaccgatctacacgccaggttttgaaaactataacgatccgctaacggataaattcccgctgcagttgacgggtttccactataaagcgcgtgtacattccacttatggcaacgtagacgtactgaaagccgcctgtcgccaggaaatgtggattaacccaatggatgcgcagaaacgcggtatcaacaatggcgacaaagtccgcatcttcaacgatcgcggcgaagtacatatcgaggctaaagtgacgccgcgcatgatgccgggcgtggtcgccctgggagaaggcgcatggtatgacccggatgcaaaacgcgtggatcagggcggatgtattaacgtactgacgacccaacgtccttctccgctggcgaaggggaacccgtcacatacgaacctcgttcaggttgaaaaggcgtaa

SEQ ID NO: 39051 - DNA, 684 bp, Salmonella typhimurium
atgacggcaattgccccggtaataaccattgatggcccaagcggtgcaggtaaaggcaccttgtgcaaagcaatggcggaagcattgcaatggcatctgctggattccggcgcgatataccgcgtactggcgctggcggcattgcatcaccatgtcgatctcgcctctgaagatgcgctggtgccgctggcgtcccatctggacgtgcgtttcgtctcaacggacggcaacctggaagttatcctggaaggcgaggacgttagcggcgaaatccgtacgcaggaagtcgcgaacgcggcatcccaggtggcggcattcccacgcgtgcgtgaagcgcttcttcgccgccaacgcgcattccgcgaagcgcctggtttaatcgccgatggacgcgatatggggaccgtggtcttcccggatgcgccggtaaaaattttccttgacgcctcctcggaggaacgtgcgcatcgacgtatgctacagttgcaggagaatggctttagtgttaactttgaacgccttttggccgagatcaaggaacgcgacgatcgcgatcgtcatcgtgccgttgcgccgttagttcctgctgctgatgcattagttttggattctacccgattaagcattgagcaagtgattgaaaaagcgttacaatatgcgcgccaaaaattggctctcgcttaa

SEQ ID NO: 39052 - DNA, 1674 bp, Salmonella typhimurium
atgactgaatcttttgctcaactctttgaagaatccttaaaagaaatcgaaacccgcccgggttccatcgttcgtggtgttgttgttgctatcgacaaagacgtagtactggttgacgccggtctgaaatctgagtctgccattccggctgagcagttcaaaaacgcccagggcgaactggaaatccaggttggtgacgaagttgacgttgctctggatgcagtagaagacggcttcggtgaaactctgctctctcgtgagaaagctaaacgtcacgaagcatggatcacgctggaaaaagcttacgaagatgctgaaactgttaccggtgttatcaacggcaaagttaagggtggcttcactgttgagctgaacggtattcgcgcgttcctgccaggttctctggtagacgttcgtccggtgcgtgatactctgcacctggaaggcaaagagcttgaattcaaagtaatcaagctggaccagaaacgtaacaacgttgtggtttctcgtcgtgccgttatcgaatccgaaaacagcgcagaacgcgatcagctgctggaaaacctgcaggaaggcatggaagttaaaggtatcgttaagaacctcactgactacggtgcattcgttgatctgggcggcgttgacggcctgctgcacatcactgatatggcctggaaacgcgttaagcatccgagcgaaatcgtgaacgttggcgacgaaatcaatgtgaaagtgctgaaattcgaccgcgagcgtacccgtgtatccctgggcctgaaacagctgggcgaagatccgtgggttgctatcgctaaacgttatccggaaggtaccaaactgaccggtcgcgtgaccaacctgaccgattacggctgcttcgttgaaatcgaagaaggcgttgaaggcctggttcacgtttccgaaatggactggaccaacaaaaacatccacccgtccaaagtggttaacgttggcgacgtagtggaagtgatggttctggatatcgacgaagaacgtcgtcgtatctccctgggtctgaagcagtgcaaatctaacccgtggcagcagttcgcagaaacccacaacaagggcgaccgcgttgaaggtaaaatcaagtctatcactgacttcggtatcttcatcggcctggacggcggcatcgacggcctggttcacctgtctgacatctcctggaacgttgcaggcgaagaagcagttcgtgaatacaaaaaaggcgacgaaatcgctgcagttgttctgcaggttgacgcagaacgtgaacgtatctccctgggcgttaaacagctcgcagaagatccgttcaacaactgggttgctctgaacaagaaaggcgctatcgtaaccggtaaagtcactgcagttgacgctaaaggcgcaaccgtagaactggccgacggcgttgaaggttacctgcgtgcttctgaagcatcccgtgaccgcgttgaagatgcgactctggttctgagcgttggcgacgacgttgaagctaaattcaccggcgttgatcgtaaaaaccgcgcaatcagcctgtctgttcgtgcgaaagacgaagctgacgagaaagatgccatcgcaactgttaacaaacaggaagatgcaaacttctctaacaacgcaatggctgaagcattcaaagcagctaaaggcgagtaa

SEQ ID NO: 39053 - DNA, 1749 bp, Salmonella typhimurium
atgcataacgataaagatctctctacgtggcagaccttccgccgactgtggccaaccatagcgccttttaaagcaggtctgatcgtggcgggcatagcgttaattctcaacgcagccagcgataccttcatgctatcgctcctcaagccattactggatgatggtttcggtaaaacggatcgctcagtgttgctgtggatgccgctggtggttattgggctgatgatattacgaggcatcactagctatatctccagctactgtatttcatgggtgtcaggcaaggtggtaatgaccatgcgccgtcgcctgtttggccatatgatgggaatgcccgtcgccttctttgataaacagtctaccggtacgctgctgtcgcgtattacatacgattcagaacaggttgcctcttcttcatctggcgcgctgattaccgtggtgcgtgaaggggcatcgatcatcggattgtttatcatgatgttctattacagctggcagttgtcgatcatcctggttgttttagcgccgattgtgtcgattgcgattcgcgttgtctcaaagcggttccgcagcatcagtaaaaatatgcagaacacgatgggacaagtgactaccagcgctgaacaaatgctgaaaggacacaaagaggtactgatttttggcggtcaggaagtcgaaactaaacgctttgataaagtcagcaataagatgcgactgcaaggcatgaaaatggtctctgcctcgtcaatttccgatcctatcattcagctcattgcctcgctggcgctggcgtttgtcctctatgctgcgagcttcccaagcgtaatggatagcctgacggcagggaccatcaccgtggtgttctcctccatgatcgcgctgatgcgtccattaaaatcgctgacaaacgttaacgcgcagttccagcgtgggatggcggcttgtcaaacgttgtttgcgattctggatagcgaacaggagaaagatgaaggtaaacgtgtcattgaccgcgcgaccggcgatctcgaattccgcaatgtgacgtttacttacccgggccgtgaagtgccggcattgcgtaacatcaatttgaaaattcctgccgggaaaaccgtggcgctggtggggcgttccggatcgggtaaatcaactatcgccagtctgatcacccgtttctacgatattgatgaagggcacatcctgatggatggtcacgatctacgcgaatacactctggcctctctacgtaatcaggtggcgctggtttcgcaaaacgtgcatctgtttaacgacacggtcgccaataacattgcttatgcccggacggaagaatacagccgcgagcagattgaagaggcggcgcgcatggcctatgccatggactttatcaataagatggataatggcctggataccatcatcggcgaaaacggcgtactgctttccggcggtcagcgccagcgtatcgcgatcgcccgcgccttactgcgcgacagcccgattctgatccttgatgaagctacgtccgcgctggataccgaatctgaacgtgcgattcaggcagcgttggatgagctgcagaaaaaccgtacctctctggtgattgcgcaccgtctctccaccatcgaacaggcggatgagatcgttgtagtcgaagacggtattatcgttgagcgcggcactcatagcgagctgctggcgcaacacggcgtttacgcccagctacataagatgcaatttggccaatga

SEQ ID NO: 39054 - DNA, 480 bp, Salmonella typhimurium
atgtttgttggcctgttgcttgtctcgctaattgttgccggtcggctggcaaatcactaccgaaataacgccatcacctacaaagagcagcgcgataccgttactcataggctgacgctggcgaacgcgacaattaccgacatgactaagcgccagcgtgacgttgccgccctcgatgaaaaatacacgaaggaattagccgatgcgaaagctgagaatgatgctttgcgcgatgatgttgccgctggccgccgtcgcctgtacgtcaacgcaacatgccccgcagtgccgacaggtaaatccacctccaccgcccgcatggataatgcagccagccccagactggcagactccgctcaacgggattatttcgccctcaaagagcgagtgaagacgatgcaaaagcaactggaaggggcgcaggcgtacattcgcacccaatgccacggtaatgcaggaaaaactagtaaccaatggtga

SEQ ID NO: 39055 - DNA, 363 bp, Salmonella typhimurium
atgcggcaaattccacaaaatcatattcatacacgttccacgccattctggaacaaagagacggcgcctgccggaattttcgaacgccaccttgataagggaacgcgacccgacgtttatcctcgtctctcggtgatgcagggggcggtcaaatatctcggatacgctgatgaacattgctctgagccggaagagatcatggtgatcaatgccggcgagtttggcgtgtttcctccggaaaagtggcacaatattgaggtcatgacggatgatacctattttaacatcgacttttttgtcgcgccggaagtactgatggaaggggcgacctcacgaaaagtcattcatgccgggagagaataa

SEQ ID NO: 39056 - DNA, 183 bp, Salmonella typhimurium
atgggaaaagctacttataccgtcacggtcacgaataatagcaacggcgtctctgtggactatgaaacggaagcaccgatgacgttgctggtacctgaagttgcagcagaagttgtgaaggatttggtcaataccgtgcgttcctacgataccgaaaacgaacacgacgtttgcggttggtaa

SEQ ID NO: 39057 - DNA, 249 bp, Salmonella typhimurium
atgggcattctttcatggattatttttggacttattgcgggtattttggctaagtggatcatgccaggtaaagatggcggcggattctttatgacgatcattctggggatcgttggtgcggtagtcggaggatggatcagtacgttctttggctttggcaaagtggatggtttcaacttcggcagctttgcagtcgcggtgatcggcgcgattgtcgtgctgttaatctacagaaaaatcaaaagctaa

SEQ ID NO: 39058 - DNA, 2439 bp, Salmonella typhimurium
atgccagtacttatttccggcgtactgaaggatggtacgggaacgccggtacagaactgcaccattcagctgaaggcctgccggaccagtacgacggtggtcgtgaatacggtggcatcagaaaatccggatgacgccgggcgctacagcatggatgtggagcaggggcagtacactgtcacgctcctggtggacgggtatcccccgtcacatgccggagttattacggtttacgatgattcaaagccgggcaccctgaatgattttctgggggccatgacagaagacgacgtccgcccggaggcgctgcggcgttttgaggcgatggtggaagaagttgcccgccaggcatcggaggcatcgcggaatgccaccgccgcagggcaggcatctgaacaggcgcagacatcagcaggtcaggcatcggaaagcgccacggcagcagtgaatgcagccggagcggcagaagcatcagccacacaggcagcctcatccgcagcatctgcggagagcagcgcaggtacggcgaccacaaaagccggggaggcatcagccagcgcggcgtcggctgacacagccagaacggcggcagccgcatcggcagccgcagcgaaaacatctgaagcgaatgcagatgcctcccgtactgccgccggcgattcagctgctgccgcagccgccagcgcgacggcggcgcagacatcagcagagcgcgccggagcatccgaaaccgccgcgaagacgtcagaaacgcaggcggcttccagtgccggtgatgcaggtgcgtcagccactgcggcggcagcgtcggaaaaggcggcagccgcatcggcagccgcagcgaaaacatctgagacaaatgcagcaacgtcagcaagtacagcagcggccagcgcaacagccgcctcgtcatcagcatcggaggcatccactcacgccgccgcatctgataccagcgcatcactggcggcgcaaagcagtactgctgccggagcagcagccaccagagcagaagatgccgcaaaacgggcagaagatatcgcggacgtgatttccctggaagatgccagcctgacgaaaaaaggtatcgttaagttaagcagcgccacggacagtgacagcgaagcgctggcagccacgccaaaggcggtccatgctgtcatggacgaggtacagaccaaagcgccgctggacagtccggcactgactggtacgccaacagcaccaactccggaaaccgcagctgcaggtattgaaattgccacggcagcgtttgtggctgcgaaagtggcgcagttggttggttctgcgccggaaacgctggacacgctgaaagaactggctgacgcgctgggtaacgatccgaactttgccaccactgtactgaataaactggcgggcaagcagccgctggacgatacactgacggcgctgtcaggaaaaagcgttgacggtcttatcgaatacgttggtttacgggaaaccataaatcacgccgccgatgcattactaaaatcacagaacggtggcgatattccggaaaagccgctgtttgtacaaaatatcggagcgctccctgcatcaggtacggctgttgcagcgaacagactggcatcacgcggcgcgcttccggcactgactggtgcgacaagaggcagcgatagcggcctgataatgggcgaggtctacaacaatggctatccgacgcaatacggaaatattttacgtctgaccggaactggtgatggggaaatcctcattggctggagcgggacaaacggtgcgccagcgcccgcatatattcgcagtcatcgagataccgccgatgctgagtggtccgaatgggcgatgctctacacctcactaaatccgccaccgaattcgtatccagtaggtgcggcgatagcatggccgtctgatgctaccccagccggttacgccctgatgcaggggcaatcgtttgataaatctgcttacccgttactggctatagcgtatccgtccggcattatccctgacatgcggggctggacaataaagggtaagcccatcagtggacgtgctgtactgtcgcaagaaatggacggcaacaaatcgcacagtcacagcgccagagcgcaggatactgacttagggacaaaatctacctcatcctttgattacggcacgaaatcgaccaataccacgggcaatcatactcaccagttcggcggttatatcaattcatactggggagattccaatcacacctcatttcagcctggaggtggtgcatggacacaggccgctggcgaccatgcacatacagtttatatcggaggacatgagcacaccatgtatataggtccacacggacacgtcgttattgtggacgcagacggtaatgcggaaaccacggttaaaaacattgcatttaactacatagtgaggctggcataa

SEQ ID NO: 39059 - DNA, 1950 bp, Salmonella typhimurium
atgcggttgtttattgccgaaaaaccgagtctggggcgcgccattgcggatgtgctgccaaaaccgcaccgtaaaggcgatggttttattgagtgcggaaacgggcaggtcgtcacctggtgtattggtcatttgctggaacaggcgcagccggatgcgtatgacagccgttatgcgcgctggaatctggctgacctgcctatcgtgccggaaaaatggcagcttcagcctcgtccttccgtcaccaaacagctcaatgtgattaagcgctttttgcatcaagccggtgaaattattcacgccggcgacccggatcgcgaagggcagcttctggttgatgaagtgctggattatctccagcttcctgccgaaaagcgccagcaggtgcggcgttgtctgataaacgaccttaacccgcaggcggtcgagcgtgctattgacaggctgcgggcgaacagcgacttcgtgccgctgtgcgtatccgcgctggcgcgagcgcgagcggactggctgtatggcattaatatgacccgcgcttacacgatcctgggccggaatgccggctatcagggcgtgttatccgtgggacgcgtgcagacgccggtactggggctggtggtgcggcgagacgaagagattgagaacttcgtcgccaaagacttctttgaagtgaaggcgcacatcgttacgcctgccgacgagcgttttaccgctatctggcagccgagcgaggcgtgcgaaccttatcaggatgaagaggggcgcttgcttcatcgtccgctggcggagcatgtagtgaaccgaatcaacggtcagcccgcgctggtaaccagttataatgataaacgggaatcagaatccgcgccgctgccgttttcgctctcgacgctacagattgaagccgccaaacgctttggcctgagcgcgcaaaacgtgcttgatatttgtcagaagctatatgaaacccacaaactgattacctatccgcgttccgactgccgttatctgccggaagaacactttgccggacggcaggcggtcatgaacgcgattagcgtccacgccccggatttactgccgcagcctgtggttaatcctgatacgcgcaatcgctgctgggatgacaaaaaagtggatgcgcaccacgcgattatcccgacggcgcgcagttcttctgtccatttgacggaaaacgaagcgaaagtgtacaccctgattgcgcgtcagtatctgatgcagttctgcccggacgcggtgtttcgtaaatgcgttattgaactggaaatcgccaaagggaaatttgtcgccaaagcgcgttttctggcggaagccggttggcggacgttactgggcagtaaagagcgcgacgaggaaaacgacggtacgccgctgccggttgtcgccaaaggtgatgagttgctgtgtgaaaagggggaagtggtcgaacgccaaacccagccgccgcgtcatttcactgatgcgacattgctttccgcgatgaccggaattgcccgcttcgtgcaggataaagatctgaaaaagatcctgcgcgcgaccgatgggctggggacggaagccacgcgcgccgggattatcgagctgctgttcaaacgtagctttctgaccaaaaaaggtcgctacattcattctaccgatgctggcaaagcgttaatacattcgctgccggagatggcggcccgtccagatatgaccgcgcactgggaatctgttttgacgcaaatcagcgaaaagcagtgccgttaccaggatttcatgcaaccgctggtcggcacgttatatcagctgatcgagcaggctaagcgcacgccggtgaagcgcttcagagggatagtcgcgccaggcggtggagacaagaaaaagagcgcgccgcgtaagcgagcgggcaaaaaaagcccgcctgctgcggagacaggccgtcagaccgaataa

SEQ ID NO: 39060 - DNA, 1479 bp, Salmonella typhimurium
atgacgctatggataaacggcgactggataaccggtcagggcgaacgccgccgcaaaacgaacccggtgagcgcggagatactttggcaggggaatgacgctaatgcggcacaggtcgccgaggcctgtcaggcggcgcgcgcggcgtttcctcgctgggccagacagccttttgccgcacgacaggctatcgtagagaaatttgccgccctgctggaggcacataaagccgagctcacggaggtcatcgcacgtgaaaccggtaaaccgcgctgggaggcggcgacggaagtgacggcgatgatcaataagattgccatctcgattaaggcttaccacgccagaacaggcgcacaaaaaagcgaacttgtcgatggcgccgcgacgttgcgccatcgtcctcacggtgtgctggcggtattcggcccttataactttcccggccatttaccgaatggccatattgtgcccgcgttgctggcaggcaatacgctgatcttcaaacctagcgagctaacgccatggaccggggaaacggtaataaaactctgggaacgggcggggctaccggcaggcgttcttaatctggtgcagggcggccgggagaccggacaagcgctgagttcgctcgacgatctcgacggactgctgtttaccggcagcgccagtaccggatatcagcttcatcgccagctatccggccagccggaaaaaatcctggcccttgaaatgggcggaaacaacccgctcattattgaggatgcggcaaatatagatgcggcggtacatctgacgctgcaatcggcgtttattaccgccggacagcgctgtacctgcgcgcgacgccttctggtaaaacagggtgcgcagggagatgcatttctggcgcggctggttgacgtcgccggacgtctgcagcccggcagatgggacgacgatccgcagccgtttatcggcggactgatttcagcgcaggcggcacagcatgtgatggaggcctggcgtcaacgagaggcattaggcggtcgcacgctactggcgccgcggaaggtcaaagagggaacctctctgctgacgcctggcatcattgagctgacgggcgtcgcggatgtgccggatgaagaggtgtttggtccgctgctgaacgtctggcgttatgcgcatttcgatgaggcgattcgtctggcgaataatacccgttttggtctgtcgtgtgggctggtgtcgacggatcgcgcgcagttcgaacagctcttgctggaggcgcgggcagggatcgttaactggaataaaccgctcaccggggcagcgagtactgcgccgtttggtggtgtcggcgcgtctggtaaccatcggcccagcgcctggtatgccgccgattattgcgcctggccgatggccagtctggaatctcccgaactaacgttgcctgcgacattaagccccggcctcgacttttctcgcagggaggcggtatga

SEQ ID NO: 39061 - DNA, 2613 bp, Salmonella typhimurium
atgacacaacagccacaagccaaataccgccatgactatcgcgcgccggattaccagattactgatattgacttgacctttgacctcgatgccgaaaaaaccgtggtcaccgcaataagccaggctgttcgtcatggcgcgcctgatgcgcctcttcgccttgatggggaagatttaacgctggtatctatccacgtcaacgatgcgccgtggacagcatataaagaagaagagggcgcgcttgtcatcagcgacctgccagagcgttttacgttacgcattgtcaacgagataagtccggcggcgaatacggcgctggaaggattgtaccagtcaggcgatgcgctctgtacccagtgtgaagcggagggcttccgccatattacctggtatcttgaccgcccggacgtactggcgcgatttaccaccaaaattattgccgataaaagcaaatatccgttcctgctctccaatggcaaccgtgttgcacagggcgagctggagaatggccgtcactgggttcagtggcaagatccgttcccgaaaccgtgttatctgtttgcgctggtggccggtgattttgacgtgctgcgcgatacctttaccacccgctccgggcgtgaagtcgcattagaactgtacgttgaccgtggcaatctggatcgtgcgccgtgggcaatgacctcgctgaaaaattccatgaaatgggatgaagcgcgttttgggctcgaatatgacctcgacatctatatgattgtcgcggtggatttctttaatatgggcgcgatggagaataaaggtctcaatatctttaactccaaatacgtgctggcgcgaaccgataccgcgacggataaagattatctcgatattgagcgcgtgataggccatgagtatttccacaactggaccggcaaccgcgtcacctgccgcgactggttccagttgagcctgaaagaggggctaaccgtgttccgcgatcaggagtttagctctgatttggggtcacgcgcggtgaaccgcatcagtaacgtgcgtaccatgcgcggtttacaattcgcggaagacgccagcccgatggcgcatcctatccgcccggataaagtaatcgaaatgaataacttctacaccctcaccgtttatgaaaagggcgcggaagtcattcgcatgatccacacgttgctgggtgaggaaaatttccagaaggggatgcagctttattttgagcgccatgacggcagcgccgcgacgtgtgatgacttcgtacaggcgatggaagatgcttctaatgtcgatttgtcccatttccgccgctggtacagtcagtccggcacgccgattgtaacggtaaaagatgattataatccggaaaccgagcagtacacgttgaccatcagccagcgcactccggcgacggcggatcaggcggagaagcagccgctgcatattccattcgccatcgaactgtacgataacgaaggcaacgtcattccgttgcaaaaaggcggtcacccggtcaacgccgtgctgaacgtcacgcaggcggagcagacatttaccttcgataatgtttacttccagcctgttccggccttgctgtgcgagttttcagcgccggtgaagctggaatataaatggagcgatcagcagttgacgttcctgatgcgccatgcgcgcaatgatttctcccgttgggatgcggcgcaaagcctgctggccacatacattaaactgaatgtggcgcgtcatcagcaggggcaaccgctatcgcttccggtgcatgtcgctgatgcgttccgcgcagtactgttggatgagaaaatcgatccggcgttggccgcagaaattttaacgctgccttcggccaatgaaattgcggagctgtttgaggtcattgacccgatcgccattgcgcaagttcgtgaagcgctaacgcgtacgctggcggcagaactggcggatgagttcctggctatctataacgccaatcatctggatgagtatcgtgttgatcacggcgatatcggtaagcgcacgctgcgcaatgcttgcctgcgcttcctggcgtttggcgagacggagctggctaatacgctggtcagcaaacagtatcgcgacgccaataatatgaccgatgcgctggcggccctgtctgctgctgtggcggcgcagttgccgtgccgcgatacgctgatgcaggagtatgacgataagtggcatcaggacggcctggtgatggataaatggtttatcctgcaatccacaagcccggcggaaaatgtactggaaaccgtacgcggcctgctcaaacaccgttctttcagtatgagcaacccgaaccgcatccgttcattaattggcgcgtttgctggcagcaacccggcggcgttccatgcgcaagacggtagcggataccagttcctggtcgagatgctgaccgatctgaatagccgtaacccgcaggtagcatctcgcctcattgaaccgctgattcgtctgaaacgttatgatgataagcgtcaggagaaaatgcgtgcggcgctggagcagttaaaaggactggagaatctttccggcgatctgtacgagaagataactaaagcgttagcctga

SEQ ID NO: 39062 - DNA, 969 bp, Salmonella typhimurium
atggataactttctggcgttgacgctaagcggcacgacaccgcgggtgacgcaggggaagggcgcgggttttcgctggcgctggttaggccatggtctgcttgaactcacgcccgatgcgccggtcgaccgcgcgttaattctttctgcggggatacacggtaatgaaaccgcgccggtcgagatgctggataagctgctgtcggcgctgtattcaggcagcttgacgttaacgtggcgagtgctggtggtactcggcaatccgcaggcgctggcggcgggaatacgctattgtcacagcgatatgaaccgtatgtttggcgggcgttggcagtcctttgccgaaagcgatgaaacgcggcgggcgcgtgagctggagctaagtctggagaccttcttttcatctggccaggcgcgggtacgctggcatctggatctgcataccgccattcgtggctcgcatcatttgcgttttggcgtattgccgcagcgcgaccgcccgtgggagacagattttctggcgtggctgggcgcggcaggactagaggcgttggtatttcatcaggcgcccggcggtacgtttacgcactttagctctgaacatttcggcgcgctttcctgtacgctggagttgggaaaggcgttgccgtttaggcaaaacgatctgacgcagttcaacgtaacctcgcaggcgttgtcggcgttgctgagcggtgtcgaaacgtcaacctcgttttcgccgccgctacgctatcgggtggtgtcgcaaatcacgcgtcacagcgacaagttcgcgctttatatggatgcgcaaacgctgaattttactgcctttgcgaagggaacgttgctggccgaggagggggataagcgcgtgacggtgacgcatgacgttgaatatgttctctttcctaatccctctgtcgcctgcggattgcgggctggattaatgctggaaagactgccctga

SEQ ID NO: 39063 - DNA, 486 bp, Salmonella typhimurium
atgcgtaaactgactgctctatttgttgcctctaccctggcgatgggtgctgcgaatctcgctcatgccgctgagactaccaccgccgcgccagcggatgcgaagccaatgatgcagcataaaggtaaatttggcccacatcacgatatgatgtttaaaaacctgaacctgacggacgcacagaagcaacaaattcgcgacattatgaaagcgcagcgcgagcaaatgaaacgtccgctgctggaagagcgtcgcgccatgcatgatattatcgccagcgataccttcgataaagccaaagccgaagcgcaaattacgaaaatggaagcgcagcgcaaggccaatatgctggcgcatatggaaacccagaataaaatttataacgttctgacgccggagcagaaaaagcaatataacgctaattttgagaagcgtctgacggaacgcccggcgcaagaaggtaaaatgcctgctgcggcagaataa

SEQ ID NO: 39064 - DNA, 1359 bp, Salmonella typhimurium
atgagtaacgttattgcttcacttgaaaaggtactccttccttttgctgtaaaaataggaaagcagccacacgttaatgcaatcaagaacggctttattcgtttaatgccattaacccttgcgggggcgatgtttgtattaattaataacgttttcctgagctttggggaggggtcgtttttttattccatgggcattcggcttgatgcctcaaccattgaaacacttaatggattgaaaggcatcggcgggaacgtctataacggcacattgggcattatgtcgctcatggcgccattttttatcggcatggcgctggcggaagagcgcaaggttgatgcgctggccgccggattgctttccgtggcggcatttatgaccgtaacgccgtatagtgtcggcgaggcctatgccgtaggcgctaactggctgggtggtgcaaatattatctccggtattattattggcctggtggtcgcggagatgtttacatttattgtccggcgcaactgggtgattaagctaccggacagcgtaccggcttcggtgtctcgttcattctcagcattaattcccggctttattattctctctattatggggattatttcctgggcgctgtctaattacggttctaacttccatcagattattatggacactatctctacgccgctggcatcgctgggtagcgtggtagggtgggcatatgtcatttttgtaccgctgctgtggttctttggtattcatggttcgctggcgctgaccgcgctggacagcggcatcatgacgccctgggcgctggaaaacatctctatttaccagcagtatggctccgtcgatgcggcgctggaagccggtaaaacgttccatatctgggcgaaaccgatgctggattcttatatcttcctcggtggtagcggcgcaacgctgggtctgatcatcgctatcttcctggcatcccgtcgcgcggactatcgccaggtggcaaaactggcgctgccgtcaggtatcttccagattaacgaacccatcctgtttggcctgccgattattatgaacccggtgatgtttatccccttcattctggttcagccgattctggcggcgattacgctggtggcttactatttgggtattattccgccgattaccaatattgcgccgtggaccatgccaaccgggttgggggcgttctttaacaccaacggcagtgtcgccgcgttgctggttgcgctatttaacctggcggtcgctaccctgatttatctccccttcgtggtggtggctaacaaagcgcagaacgccatcgagcaggaagaaagcgaagaagatatcgctaacgcactgaaattctaa

SEQ ID NO: 39065 - DNA, 348 bp, Salmonella typhimurium
atgtttgatcttgaaaatgttgtagataaccagaccgcggctgaggaactcgaagaagtcgttatggggcttatcatcaattctggtcaggcgcgcagcctggcatatggcgcgctcagaaaagcgaaagaaggcgattttgaggcggcgaaagcgatgatggaccagtcgcgcatagcgctcaatgaagcgcatcttgtgcagacaaaactcatcgaaggcgatcagggcgaaggcaaaatgaaagtcagtctggtcctggttcacgctcaggatcatttgatgacatcaatgctggctcgtgaactgatcgccgagttgattgagctccatgagaaactgaaataa

SEQ ID NO: 39066 - DNA, 1929 bp, Salmonella typhimurium
atgcctgttattactcttcctgatggcagccaacgccattatgaccaccctgtaagcccgatggatgttgctctggacattggtcctggcctggcgaaagccaccattgcgggccgtgtgaatggcgagctggttgatgcttccgatctgattgaaaatgatgcgacgctttccatcatcaccgcaaaagatgaagagggtctggagatcattcgtcactcttgtgcgcatctgttaggtcacgctatcaagcaactttggccgcacacgaaaatggcgatcggcccggttgtcgacaacggtttttactatgacgttgatcttgaccgcacgctaactcaggaagatgtcgaagcgctcgaaaagcggatgcatgagctcgccgagaaaaattacgacgttatcaagaaaaaggtgagctggcatgacgcgcgcgaaaccttcgtgaagcgcggcgagacttacaaagtcgctattcttgatgaaaatatcgcccatgatgataagccaggcttgtaccatcatgaagaatatgtcgacatgtgtcgtggtccgcacgtgccgaatatgcgtttctgccatcactttaaactgatgaaaactgccggcgcatactggcgcggtgacagcaataataagatgttgcagcgtatttacggtacggcatgggcagataaaaaagccctgaacgcttatctgcagcgcctggaagaggccgcaaaacgcgaccatcgtaaaattggtaagcagctcgacctgtatcatatgcaggaagaagcgccgggcatggtgttctggcataacgacggctggactatcttccgcgagctggaggtctttgttcgttctaaactcaaagaataccagtatcaagaagttaaaggcccgttcatgatggaccgtgtgctgtgggaaaaaaccgggcactgggacaactataaagatgcgatgttcaccacatcctcagaaaaccgcgaatattgcatcaagccgatgaactgcccgggccacgttcagatctttaaccagggtctgaaatcctatcgtgatttgccgctgcgtatggcggaattcggtagctgccaccgtaacgagccatcaggcgcgctgcatggtctgatgcgcgtacgcggctttacgcaggatgatgcgcatatcttctgcaccgaagagcagatccgcgatgaagttaacgcttgtattcgtatggtctacgatatgtacagcacctttggcttcgagaagatcgtcgtcaagctttccactcgtcctgataagcgtatcggcagcgatgagatgtgggatcgtgctgaggcggatctggcggttgcgctggaagaaaataatatcccgtttgagtatcaactgggtgaaggcgcattctacggtccgaaaattgaatttaccttatatgactgcctcgatcgtgcatggcagtgcggtacagtacagctggacttctccttaccgtctcgtctgagcgcctcctatgtaggcgaagacaacgagcgtaaggtgccggtaatgattcaccgtgcgattcttgggtcgatggaacgcttcatcggtatcctgaccgaagagttcgctggtttcttcccgacatggctcgcgcctgttcaggtagtcgtgatgaatattaccgattcgcagtctgaatacgttaacgaattgacgcagaaactacaaaatgcgggcattcgtgtaaaagcagacttgagaaatgagaagattggctttaaaatccgcgagcacactttacgtcgtgtcccttatatgttggtctgtggtgataaagaggtggaagcaggcaaagttgccgttcgcacccgccgcggtaaagacctgggcagtctggacgtaaatgacgtgattgagaagctgcaacaagagattcgcagccgcagtcttcaacaactggaggaataa

SEQ ID NO: 39067 - DNA, 435 bp, Salmonella typhimurium
gtgagtctgagagaagctctggaaaaagctgaagaagccggagtagacttagtcgaaatcagccctaacgccgagccgccggtttgtcgtataatggattacggcaaattcctctatgaaaagagtaagtcttctaaggaacagaagaaaaagcaaaaagttatccaggtgaaggaaattaaattccgtcctgggacagatgaaggcgactatcaggtaaaactccgcagcctgattcgctttctcgaagagggcgataaggccaaaatcacgctgcgtttccgcggtcgtgaaatggcccaccagcaaatcggtatggaagtgcttaatcgcgtgaaagacgatttgcaagaactggcagtggtcgaatccttcccaacgaagatcgaaggccgtcagatgatcatggtgcttgctcctaagaagaaacagtaa

SEQ ID NO: 39068 - DNA, 198 bp, Salmonella typhimurium
atgccaaaaattaagaccgtacgcggtgctgctaagcgcttcaaaaaaaccggtaaaggtggttttaagcacaagcacgctaacctgcgtcacattctgaccaaaaaagcgactaaacgtaaacgtcacctgcgtccgaaagccatggtttctaaaggcgatctgggcctggttatcgcgtgcctgccgtacgcataa

SEQ ID NO: 39069 - DNA, 357 bp, Salmonella typhimurium
atggctcgcgtaaaacgtggtgtaattgcacgcgcacgtcacaagaaaattttgaaacaagccaaaggctactacggtgcgcgttctcgcgtataccgcgttgccttccaggcagttatcaaagctggtcagtatgcttaccgtgaccgtcgtcaacgtaagcgtcagttccgtcaactgtggattgcgcgtatcaacgcagcagcacgtcagaacggtatttcttacagcaaattcatcaacggcctgaaaaaagcctctgttgaaatcgaccgtaagatcctggctgatatcgccgtattcgacaaagtcgcgttcaccgcgctggttgaaaaagcgaaagcagctctggcataa

SEQ ID NO: 39070 - DNA, 984 bp, Salmonella typhimurium
atgtcacatctcgcagagctggttgccaatgcagcggccgccattaaccaggcgtcagatgttgccgcgttagacaatgtacgcgtcgaatatttgggcaagaaagggcatttaacccttcagatgacgaccctacgcgatctgccgccggaagagcgtccggcagccggggcagtcattaacgccgcgaaagagcaggtacaacaggcgcttaacgcgcgtaaagccgagctggaaagcgcagcgcttaacgcccgtctggccgctgagaccatcgatatctccctgccggggcgccgtattgagaacggtggtctgcatccggtcacgcgtaccattgaccgtattgaaagtttcttcggcgagcttggttttaccgtggcgactggcccggaaattgaagatgactaccataacttcgatgcgttaaacattccgggtcatcacccggcccgcgccgatcatgataccttctggtttgacgcgacccgtctgctgcgtacccagacgtctggcgtccagatccggacgatgaaagcgcagcaaccgccgatccgtattattgcgccgggccgtgtataccgtaatgactacgaccagacgcatactccgatgttccatcagatggaaggtctgattgttgataccaacatcagcttcaccaacctcaaaggtacgctgcacgacttcctgcgtaatttctttgaggaggatctgcagattcgcttccgtccttcttattttccgttcaccgaaccttctgcggaagtggatgtgatgggtaaaaacggcaaatggctggaagtgctgggctgcgggatggtgcatccgaatgtgctgcgtaatgtcggtatcgatccggaaatctattctggcttcgcttttggtatggggatggaacgtctgaccatgttgcgttacggcgtcaccgacctgcgttcattcttcgaaaacgatctgcgtttccttaaacagtttaaataa

SEQ ID NO: 39071 - DNA, 2388 bp, Salmonella typhimurium
atgaaattcagcgaactgtggttacgcgagtgggttaacccggcaattgatagcgatgcgttggctaaccagattacgatggctggcctggaagtagacggcgttgagccggtcgcgggaagcttcaatggcgttgtggttggggaagtggttgagtgcgcccagcatccgaacgctgacaaattgcgtgtaacgaaagtcaacgtcggcggagaacgcctgttggatatcgtctgcggcgcgccaaactgtcgtcaggggctgaaagtagcggtggccaccattggcgctattctgccgggcgatttcaaaattaaagcggcaaaactgcgtggcgaaccgtctgaagggatgctgtgctccttctccgaactggggatttccgacgatcacagcggcattatcgaactgccggcggatgcgccgctgggtaccgatatccgtgaatacctgaagcttgacgacaataccatcgaaattagcgtcacgccgaaccgtgcggattgcttaggtatcatcggcgttgcgcgcgatgtggcggtactgaacaaagcgccgctccaggagcctgaaatggcgccggttacggcaaccatcagcgatacgctgccgattacggtagaggccgctgatgcgtgtcctcgctatctgggccgggtggtaaaaggcattaatgttaacgcgccgacgccgctgtggatgaaagagaaactgcgtcgctgcggtattcgctccatcgatgcggtggttgacgtcacgaactatgtgctgctcgaactgggtcagccaatgcatgctttcgataaagatcgcattgatggcggtattgtcgtgcggatggcaaaagagggtgaaaccgtcgtcctgctggacggtagcgaagcgacgttaaatgcggacacgctggtgatcgccgatcaccataaggcgctggggatagccggtatttttggcggcgaacattccggcgtgaacggcgaaacgcaaaatgtgctgctggaatgtgcgtactttaatccgctgtctatcaccggtcgcgctcgccgccacggtctgcataccgatgcgtctcaccgctacgagcgcggggtggacccggcgctgcaatataaagcgatagagcgcgctactcgtctgcttcttgatatctgtggcggtgatgcgggtccgataattgatgtgagcaacgaagcaacgttgccgaaacgcgccaccattacgctgcgtcgcagtaaactggatcgcctgatcgggcatcatattgcggatgagcaggtcagtgatattctgcgtcgtctgggctgtgaagtgaccgaagggcaggacgagtggaaagccgtagcgccgacctggcgtttcgatatggagattgaagaagatctggtggaagaggtggcccgcgtttacggctataacaatattccggacgagccaattcaggccggtttaatcatggggacgcaccgtgaagccgatctgtcgttgaagcgggttaaaaccatgctgaacgacaaaggctatcaggaagtgattacctatagctttgtcgatcctaaagtacaacagctcatccatccaggcgcagaagcgctgctgctgccaaaccctatctccgttgagatgtcggcgatgcgtctgtctctgtggagcggattgttggcgacggtggtctataaccaaaaccgtcagcagaatcgcgtgcgtatttttgaaaccggtttacgtttcgttccggatacacaagccaatctgggtattcgacaggatctgatgctggctggcgtgatttgcggtaaccgctatgatgagcactggaacctggcaaaagagaccgttgatttctatgatttgaaaggcgatctggaagcagtactggatttaaccggcaaactgggtgatatccagtttaaggcggagatgaatccggctctgcatccgggacagtctgcggcgatttatctgaaagatgaacgtattggttttattggggttgttcaccctgaactggaacgtaaactggatctgaatggtcgtacgctggtgtttgaactggaatggaataagctcgcagaccgtatcgtgccgcaggcgcgggagatttcacgcttcccggccaaccgtcgcgatattgcggttgttgttgcagaaaacgttcccgcagcggatattttatccgaatgtaagaaagttggcgtaaatcaggtagttggcgtaaacttatttgacgtgtaccgcggtaagggtgttgcggagggttataagagcctcgctatcagcctgatccttcaggataccaaccgtacactcgaagaagaggagattgccgctaccgtcgccaaatgtgtagaggcattaaaagagcgattccaggcatcattgagggattga

SEQ ID NO: 39072 - DNA, 981 bp, Salmonella typhimurium
atgctgacttttgcccgccaacaacagcgacgaaacgttcgctggcttctgagcctgtcactgctggtgctactggctacacttctgagcttatgcgcaggcgaacagtggattgcccccggtgactggttaagcgcccggggggaactgtttgtctggcaaattcgccttccccgcacgcttgcggtattgctggttggcgctgcgctggcgctatctggcgctgtgatgcaggcgctgtttgaaaacccacttgctgaaccgggtctgctcggcgtttcgaatggggccggtgttgggcttattgccgccgtcttactggggcaggggcaactgccaggatgggcgctgggactgtgcgctatagccggcgcgctcattattacgttaattctgctgcgttttgcgcgccgccatctctctaccagccgcttgttgttggcgggcgtcgcgctgggcattatctgtagcgcgctgatgacgtgggctatctatttttccacctctttcgatctgcggcaattaatgtactggatgatgggaggatttggcggcgttgactggcagcagagctggctaatgattgcgctcatcccggtactgatctggatatgttgccagtcgcaaccgctgaatatgctggcgctaggggaaacctcggcgcggcagcttggcctgccgctgtggttctggcgcaatttgttggtcgtcgccaccggctggatggtgggcgtcagcgtggcgatggcgggggcgattggttttatcggtctggttattccgcacatcctgcgcttatgtggtttaaccgatcaccgggttttacttcccggctgcgcgctggccggggctatcgccctgctattggctgatgtggtcgcccgactggcactggcgtcggctgaactgcctatcggggtggtcaccgccacattgggggcgccagtgtttatctggctgctactcaaatccgcgcgttag

SEQ ID NO: 39073 - DNA, 333 bp, Salmonella typhimurium
atgcagattggaaaactggcggcattgactggcgttagcatacggatgcttcggtactacgagagcgcaggtttgcttcatccttcgcgaaccgatacgggctatcgcagtttctcgtcagaagatgtggatattgtcagacggatacttattctaaatggtgcaggtttcacgttaccggttgtgtgtagtttgctgaactgcgtacatgcaggaacctcaccttgcgaggaactaaaagctaaagtgcgagaacaactggcacagatagaccgtcagtttgacgcgctctcggaaagccgcaatcttctcaataagtttcttaatgactag

SEQ ID NO: 39074 - DNA, 714 bp, Salmonella typhimurium
atgattgcttcacttgatgagctttaccattccgaactctttttccttcccgtcatggatgaaaacgctcggcttgttggtttagagattattgcaacgtttgccgctgaagacggcgccgtgcggatgccgactgagttggtagcgcctcgcctttcggtggaggaacaatactgtctgtttgttgaaaaactggcgttgttagaaacctgtcagcacttttttattcagcataaacttattgcatggcttaatttaccgcctgcaattagtgacttattattattagatagcgaacttttttcccgggcagcgcgctttccgtttcttgaattagctataaatgagaattatcctgggttaaaccagggcaaaaacaatgaaacgttagctaatctggcaatgcatttcccattaatgctggcaaattttggggcaggcgaggcgtcgactaaagctattttcgatgggcttttcaaacgagtcatgttggataaaaattttattcagcagcgagctgaaatgatctcattcgaaccattcatgcacgctattgttgcccagatctcctccagctgcgagtcgctgatgattgccggtattgatactgaggcgatgtttgcgcgcgcagcgccattggggtttagcgcattccagggcggactatggcctccggtgccggtaagccagctcattaaactcgttcagcgataa

SEQ ID NO: 39075 - DNA, 1647 bp, Salmonella typhimurium
atggcagctaaagacgtaaaattcggtaacgacgctcgtgtgaaaatgctgcgcggcgtaaacgtactggcagatgcagtgaaagttaccctcggtccgaaaggccgtaacgtggttctggataaatctttcggtgcgccgactatcactaaagatggtgtttccgtagcgcgtgaaatcgaactggaagacaagtttgaaaacatgggcgcgcaaatggtgaaagaagttgcctctaaagcgaacgatgctgcaggcgacggcaccaccaccgcgaccgtactggcgcagtccatcattaccgaaggcttgaaagccgttgctgcgggcatgaacccgatggacctgaaacgtggtatcgacaaagcggttgctgcggcggttgaagagctgaaagccctgtccgtaccgtgctccgactctaaagcgattgctcaggtaggtactatctccgctaactccgacgaaaccgtaggtaaactgatcgcggaagcgatggataaagtcggtaaagaaggcgtcatcaccgttgaagacggtaccggtctgcaggacgaactggacgtggttgaaggtatgcagtttgaccgcggctacctgtctccttacttcatcaacaagccggaaactggcgcagtagagctggaaagcccgttcatcctgctggctgataagaaaatctccaacatccgcgaaatgctgccggttctggaagccgttgcaaaagcaggcaaaccgctgctgatcatcgctgaagatgttgaaggcgaagcgctggctaccctggttgttaacaccatgcgtggcatcgtgaaagtggctgctgttaaggcacctggcttcggcgatcgtcgtaaggcgatgctgcaggatatcgctaccctgaccggcggtaccgtaatctctgaagagatcggtatggagctggaaaaagcaaccctggaagacctgggtcaggcgaaacgtgttgtgatcaacaaagacaccaccaccatcatcgatggcgtgggtgaagaagctgccatccagggccgtgttgctcagatccgtcagcagattgaagaagcgacctccgactacgatcgtgaaaaactgcaggagcgcgtagcgaaactggcaggcggcgttgcggttatcaaagttggcgctgcgaccgaagttgaaatgaaagagaagaaagcccgcgttgaagatgccctgcacgcgacccgtgctgcggtagaagaaggcgtggttgctggtggtggcgttgcgctgatccgcgttgcttctaaaattgctgacctgaaaggccagaacgaagaccagaacgtgggtatcaaagttgcgctgcgcgcaatggaagctccgctgcgtcagatcgtgctgaactgcggcgaagagccgtctgttgtcgctaacaccgttaaaggcggcgacggtaactacggttacaacgcagcaactgaagaatacggcaacatgatcgatatgggtatcctggacccaaccaaagttacccgttctgcgctgcagtacgctgcttctgtggctggtctgatgatcactaccgagtgcatggtgaccgacctgccgaaaagcgatgctcctgatttaggcgctgctggcggcatgggtggtatgggtggtatgggcggcatgatgtaa

SEQ ID NO: 39076 - DNA, 372 bp, Salmonella typhimurium
ttgattatggggaataacatgcacgtgaaatatttagcagggatcgttggcgccgcgctgctgatggcgggttgtagctccagcaacgaactcaccgctgccggccaaaatgtacgctttgtcgaagataagccgggcgcggaatgccagcttattggtacggcaactggtaaacagagtaactggttttcaggccagcacggcgaagagggtggctcaatgcgtggcgcagcgaacgatctgcgtaatcaggcagccgcgatgggtggaaacgtgctgtatggcgtaagtagtccgtcacagggcatgttgtccagttttgtcccgacggccagcgagatgaacggccaggtttataaatgtccgaactga

SEQ ID NO: 39077 - DNA, 1236 bp, Salmonella typhimurium
atgtctcagaacaaggctcgcaacatgccatatttgctggctgttatctgcatttattttagttactttctccacggcatgagtgttattacactagcccagaacatgacctcccttgcacagaaattctccacggatagtgccggtattgcctatttaatctctggcattggtcttggtcgtctggtcagtattttattctttggcgtactgtccgataaatttggccgtcgggcaataatactgcttggcgccgtactatatatgctgtttttcttcggtattcccgccagtcctaacctgatgatcgctttcatattagcggtgtgtgtcggcgtggcgaactccgcgctggataccggcggataccctgcattaatggagtgttttcccaaagcatcgggctcggcagttattctggttaaagcgatggtctcttttgggcaaatgatttatccccttatcgtcagcgccttgctagtcaaccatatctggtacggctacgcggtggtaatccccggtatccttttcgtcctcatcacgttgatgctgttgaaaagccgttttcccagccaacttgtcgatgccagtattgcgaaagaattaccccagatgaacagtactcccctcgtctggctggaaggcgtagcttccgttttatttggcgtcgccgcgttctcaaccttctatgtgattgtggtctggatgcctaaatatgcgatggccttcgccggaatggcggaatccgacgcgctgaaaaccatctcttattacagtatgggatcgttggtttgcgtgtttatttttgccgcattgctgaaaaaaatggttcgccccatctgggccaatgttttcaatgccgggctggcgacaatcaccgctgcggcaatttacctgtatccctctccactgatctgtaatgctggcgccttcgtgattggtttttccgctgctggaggtattttacaattaggcgtatcggtaatgtcggaatttttccctaagagtaaagctaaagtcaccagtatatatatgatgatggggggcgtagctaactttcttatcccactgattaccggttatctctctactattggcctgcaatatatcattttgttagattttgcctttgcactactgacatttatcaccgccattattgtatttattcgctattatcgcgtatttaagatcccgcaaaacgatgtccgatttggcgagcattatttccagtaa

SEQ ID NO: 39078 - DNA, 978 bp, Salmonella typhimurium
atgagcgaaacggcaacctggcagccgagcgcgtccatccccaatttattaaaacgtgcggcgattatggcggaaatccgtcgtttctttgccgatcgtggagtgcttgaggttgagacgccctgcatgagtcaggcgacggtcacagacattcatctgttcccgttcgaaacgcgtttcgtcggacctggccattcccaggggatcaacctctatttaatgaccagtccggaataccatatgaaacgcctgctggcggcagggtgcggcccggttttccagctatgccgcagtttccgtaatgaagagatgggacgacatcataatccggaattcactatgctggagtggtatcgcccgcattacgatatgtaccgcctgatgaatgaagtggatgatttgcttcagcaagtgctggattgtcaacctgcggaaagtctctcctatcaacaggcgtttcagcgccatctggagattgacccgttatcagcagataaaacgcaactgcgtgaggcggcggcaaagcttgatttaagcaatatcgccgatacggaagaagaccgtgatacgttgctgcaactgttgttcacgatgggggttgagccgcatataggtaaagaaaagccgacctttatttatcactttccggcaagtcaggcatcgctggcacaaatcagtaccgaggatcatcgcgtcgccgagcgctttgaggtgtactacaaaggtattgagctggcgaatggtttccacgaactgacggacgcacgtgagcaacaacagcgctttgaacaggacaatcgtaagcgcgccgctcgcggtctgccgcagcagccgattgaccaaaatctactggatgcgctggccgccggtctaccggattgttccggcgtggcgctgggtgttgatcgtctggtgatgctggcgctgggagcagaaagcctggcggacgtgattgcttttacggtcgatcgggcgtaa

SEQ ID NO: 39079 - DNA, 1503 bp, Salmonella typhimurium
atgacccacacgataaaaaagatgagccttattgggcttatcctgatgatttttacttctgtttttggttttgcgaatagcccgtcggcgttttatttaatggggtatagcgcaatcccatggtatatattttctgccttgctgttttttattccattcgccttaatgatggctgaaatgggttccgcttatcgcaaagaagagggcgggatctattcgtggatgaataatagcgtggggccacgttacgcgtttattggcacgtttatgtggttttcatcgtatgtcatatggatggtaagtacggcggcaaaaatttgggtaccgttttctacttttgtttttggcgccgatatgacgcagcactggcgtattgcagggcttgagcctacgcaggttgtcgggctgctcgccgtcggctggatgattctggtgacgtgtgtcgccgccagagggatcaataaaattgcgcgaattacggcggtcggaggtattgccgtaatgtgtcttaatttagttttattgttagtgagtgtcgctattttgttattaaatggtgggcattttgcacaagaaattaattttacctcgtcaccgaatccgggttatcactccggcctggcaatgttgtcatttgtggtatttgctatttttgcgtacggcggtattgaggctgtcggcggactggtggataaaaccgagaaaccggaaaagaattttgcgaaaggtattgttttcgcggctattgtgatttcaattggttattctttggcgatctttttatggggcgtcagcactaactggcaacagatattaagtaatagcgccgttaacttagggaatatcacctacattctgatgtcgagtttaggcacgacattaggtaacgcgttaaacctttctccggaagcagcgatgacggtgggcgtctggtttgcgcgtatcaccggcctttctatgtttctggcttataccggcgcgttttttacgttgagctattcaccgctgaaagccattattcaggggacgccaaaagcgttgtggcccgcgccgatgacgacactgaacgctaacggtatgccggcgaccgctatgtggctacagtgcgtgctggtgagtctgtttattttgctggtctcttttggcggtgacaccgcatcggcgttttataacaaactcacgctgatggcgaacgtctcaatgaccttgccatacctgttccttgcgctggcatttcccttctttaaagcgcgtcaggatctggagcggccatttgttctctttaaaaccaaagcctctaccctggtcgcgacgggtgttgtggtgctggtggtgacgtttgccaacgtctttaccatcatccagccagtgattgaagctggggactgggacagcgccttgtggatgatcggcggcccgatcttcttctcgctgctggcgatggcgatttatcagaattacagtagccgcatgagcgccgatccggagtgggcggcggagtaa

SEQ ID NO: 39080 - DNA, 747 bp, Salmonella typhimurium
atgttaagcattaaagatttacaggtcagtgtggaagaaaaagcgattttgcgtggcctgaatctggagattcgccccggcgaagttcatgccattatggggccgaacggttccgggaaaagcacgctctccgccaccctggcgggacgtgaagattatgaggtcaccggcggctcggttacgttcaaaggtaaagatctgcttgaactgtcgccggaggaacgggcgggtgaagggatttttatggccttccagtacccggtagaaatccccggcgtcagtaaccagtttttcctgcaaaccgcgctgaatgccgtgcgcgcctaccgcgggcaggcgtcgttggatcgctttgattttcaggatctgatggaagaaaagatcgcattgctgaaaatgccggaagatttactgacccgttcggtaaacgtcggtttttccggcggggagaaaaagcgcaatgatattttgcaaatggcggtgctggagccggaactgtgcatccttgatgagtcggactccggactggatatcgatgcgttgaaaattgtggcggaaggcgtcaacgcgttacgcgacgataaacgcgcttttattatcgtgacccactatcagcgcatactggactacatcaagcccgattacgtccacgtcctctatcaggggcgaattgtccgttccggcgattttactctggtcaaacaactggaggagcagggttatggctggcttaccgaacagcagtaa

SEQ ID NO: 39081 - DNA, 1857 bp, Salmonella typhimurium
atgccgattcaggttctgccgccgcagcttgcgaaccaaatcgccgctggcgaagtggtggaacgccctgcgtcggttgttaaagagctggtagagaatagtctggatgcaggcgccacccgcgttgatatcgacatcgagcgtggcggcgcgaagcttattcgtattcgcgacaatggctgcggcattaaaaaagaggagctggcgctggcgctggcccgtcatgccaccagtaaaatcgcctcgcttgacgatctggaagcgattatcagtctgggatttcgcggcgaagcgctggccagtatcagttcggtctcgcgtttgacgctaacgtcgcgcacggcggagcaggcggaagcctggcaggcgtatgcggaagggcgcgatatggacgtgacggtaaaacccgccgcgcacccggtcggcaccaccctggaagttctggatctcttttacaatacgcccgcccggcgcaaattcatgcgtaccgaaaaaacggaatttaatcacatcgatgagatcatccgtcgtattgcattggcccgttttgacgtcacgcttaacctgtcgcacaacggcaaattggtacggcagtatcgcgctgtcgcaaaggacgggcaaaaagagcgccggttaggcgccatctgcggcacgccgtttctcgaacaggcactggcgatcgagtggcagcatggcgatctgaccctgcgcggctgggtcgccgatccgaatcacaccaccacggcgttaacggagatccagtactgttatgtgaatggccgcatgatgcgcgaccgcttgatcaaccatgccattcgccaggcctgtgaagataaactgggcgcggaccaacagcctgcgtttgtgctgtatctggagattgacccgcatcaggtggatgtcaatgttcatcccgccaagcacgaagtgcgttttcatcaatcccggctggtgcacgacttcatctatcaaggggtgctgagcgttctgcaacagcagacggaaacggcgctgccgctggaggagattgcgccagcgccgcggcatgtccaggaaaaccgtatcgccgccgggcgcaaccattttgctgtacccgccgagccaactgcggcgcgcgagcccgcgacaccgcgttattccggcggcgcatcgggcggtaacggcgggcgtcagtccgcaggtggttggccgcacgcgcagccaggttatcagaagcagcagggcgaggtttatcgcacgcttttacagacgccgacggcgagccccgcgccggagtcggttacgcctgcgcttgacggacatagccagagtttcggtcgcgtactgacaatagtcggcggtgactgcgcgttgctggaacacgcggggactatccagctcttgtcgctaccggttgcggagcgttggctgcgtcaggcgcagcttacaccgggtcaaagtccggtttgcgcgcagccgttgctgattccgctgcgtttaaaagtgagcgccgatgaaaaagccgcgctgcaaaaagcccaatctttgttgggagaattgggtattgaatttcagtcagatgcgcagcatgtgaccattcgggcggtgcctttacccttacgacaacaaaatttacaaatcttgattcctgaactgataggctacctggcgcaacagaccacatttgcaacggtcaatattgcacaatggatagcgcgtaatgtgcagagcgaacatccgcagtggtcgatggcgcaggccatatcgctgctggcggatgttgagcggctatgtccgcagctggtaaaagcgccgccgggtggcctgttacaacctgttgatttacattcggcgatgaacgccctgaagcatgaatga

SEQ ID NO: 39082 - DNA, 666 bp, Salmonella typhimurium
atgactccgtttacacaatcacagcgcataaaagcgttgttctggctatcgctattccatttactggtgatcatttccagtaactatctggtgcagctccccatcactatttttggtttccacacgacctggggcgcgtttagttttccttttatttttctcgccaccgatcttaccgtgcgtatttttggcgcaccgctggcgcgccgcattatcttcgccgtcatgatccctgcgctgctggtgtcatatgtggtgtcatcgctgttctatatgggcgcctggcaaggtttcgccgcgctggcgaactttaatctgtttgtcgcccgtatcgccgccgccagctttatggcctacgcgctgggacagatccttgatgtccatgtgtttaaccgcctgcgccaaaatcgtcgctggtggctggcgccgaccgcttcaacgctgtttggcaatatcagcgatacccttgcctttttcttcattgcgttctggcgaagccccgatgcctttatggccgggcactggatggaaattgcgctggtggattattgctttaaggtgctcatcagcattattttcttcctgccgatgtacggcgttctactgaatatgttgctgaaaaagctggcagataaatctgaaatttccccattaccggcaagttaa

SEQ ID NO: 39083 - DNA, 1260 bp, Salmonella typhimurium
atggcgtggaatcagcccggtaataacggacaggaccgcgacccgtggggaagcagcaaacctggcagcaactctgggggaaatggaaacaaaggtggccgcgatcagggacctcccgatctggatgatatcttccgtaagctgagtaaaaaactcggtggttttgggggcggtaaaggcaccggttccggcggcggtagctcatcgcaaggcccacgtccgcaactgggaggccgtattgtcgccatcgccgcggcggcagtagtcattatctgggcggccagcggtttttataccattaaagaagccgagcgcggcgttgtgacgcgttttggtaaattcagccatctggtagagccaggtctgaactggaagccgacatttattgacgacgtcacgccggtgaacgtcgaagcggtgcgcgaactggcggcgtcaggcgtgatgctgacgtctgatgaaaacgtcgtgcgcgttgaaatgaacgtgcaataccgcgtcaccgatccgcagaaatatctgtttagcgtgaccagcccggacgatagcctgcgtcaggccaccgacagcgcgctgcgtggcgtcattggtaaatacacgatggatcgcatcctgaccgaaggtcgtaccgttattcgtagcgatacccaacgcgagctggaagagactatcaaaccgtacaacatggggattaccctgctggacgtgaacttccaggctgcgcgcccgccggaagaggtgaaagccgcctttgacgacgcgattgccgcacgtgaaaacgagcagcagtacattcgtgaagcggaagcgtataccaacgaagttcagccgcgcgccaacggtcaggcgcagcgtattctggaagaggcacgcgcctataaaacccagactatcctggaagcgcagggtgaagtcgcccggtttgcgaagattttgccggaatataaagccgcgccgcagattacacgcgagcgtctgtatattgaaacgatggaaaaagtgctgagccatacccgtaaagtactggttaacgacaagagcggtaatttaatggtgctgccgttagatcagatgctgaaaggcgggaatgcgccggcggcaaagagcgacaatagcgccagcaacctgctgcgcctgccgccgtccacaaagtctaacgccagcggagcaagcaacacgtcgtcctcaaatcagggcgatattatggaccaacgccgcgcgaatgcgcagcgtaacgactaccagcgtcagggggaataa

SEQ ID NO: 39084 - DNA, 1299 bp, Salmonella typhimurium
atgggtaacaacgtcgtcgtactgggcacccaatggggtgacgaaggtaaaggaaagatcgtcgatcttctgactgaacgggctaaatatgttgtacgctaccagggcggtcacaacgcaggccatactctcgtaatcaacggtgaaaaaaccgttctccatcttattccatcaggtattcttcgcgagaatgtaaccagcatcatcggtaacggtgttgtgctgtctccgagcgcgctgatgaaagagatgaaagaactggaagaccgtggcatccccgttcgtgagcgtctgctgctgtctgaagcctgtccgctgatccttgattatcacgttgcgctggataacgcgcgtgagaaagcgcgtggcgcgaaagcgatcggcaccaccgggcgtggaatcgggcctgcttatgaagataaagtggcacgtcgcggtctgcgtgttggtgaccttttcgacaaagaaaccttcgctgaaaaactgaaagaagtgatggaatatcacaacttccagttggttaactactacaaagctgaagcggttgattaccagaaagttctggatgatacgatggctgttgccgacatcctgacttctatggttgttgacgtttcggacctgctcgaccaggcgcgtcagcgtggcgatttcgtcatgtttgaaggtgcgcagggtaccctgctggatatcgaccacggtacttatccgtacgtaacttcttctaacaccactgcaggtggcgtggcgaccggttccggcctgggcccgcgttatgttgattacgttctgggtatcctcaaagcttactccactcgcgtaggtgcgggtccgttcccgaccgaactgtttgatgaaaccggcgagttcctctgcaagcagggtaacgaatatggcgctactaccggccgtcgtcgtcgtaccggctggctggacaccgttgccgttcgtcgtgcggtacagctgaactccctgtctggcttctgcctgaccaaactggacgtgctggatggcctgaaagaggtgaaactctgcgtggcttaccgtatgccggatggtcgcgaagtgactaccactccgctggcagctgacgactggaaaggtgtagagccgatttacgaaaccatgccgggctggtctgaatccaccttcggcgtgaaagatcgtagcggtctgccgcaggcggcgctgaactacatcaagcgtattgaagaactgaccggcgtgccgattgatattatttctaccggccccgatcgtactgagacgatgattctgcgcgacccgttcgacgcgtaa

SEQ ID NO: 39085 - DNA, 426 bp, Salmonella typhimurium
gtgcagttaacgagtttcaccgattacggcttacgtgcgctaatctatatggcgtcgttaccagatggacgaatgaccagcatttctgaggtgacagaagtctacggcgtgtcccgtaatcatatggtcaaaattatcaatcagcttagccgggcgggctttgtcaccgccgttcggggaaaaaatggcggtatccgcctgggtaaaccggctaatactatttgtattggcgatgtggtgcgtgagctggaacccttatcactggtcaactgtagcagcgaattttgccacatcacccctgcctgtcgtctgaaacaggcgctttctaaggccgtgcagagttttctcaaggagctggataactacacgcttgccgatttggttgaagagaatcaaccgctttataaattattactggtggagtga

SEQ ID NO: 39086 - DNA, 1497 bp, Salmonella typhimurium
atgctacatttgtttgctggcctggatttacataccgggcttttattattgcttgctctggcttttgtgctgttctacgaagcgattaacggcttccatgacacagccaatgcagtcgcaaccgtgatttacacccgtgcgatgcgttcgcagctggcggttgtcatggcggcggtgtttaacttttttggcgttttgctggggggtctcagcgtggcgtatgccattgtgcatatgctaccgacggatctcctgctcaacatgggttccgcgcacggcctcgctatggtcttttccatgttgctggcggcgattatctggaacctcggtacctggtatttcgggttgccggcgtccagttcccacacgctgattggcgccattatcggcatcggtttaaccaatgcgatgatgaccggcacgtcagtggtggatgcgcttaacatcccgaaagttatcaatattttcggttcactcattatctcccctattgtcggtctggtattcgccggcggtctgattttcttgctgcgccgctactggagcggtactaagaaacgcgcccgtatccacctgacgccagccgaacgtgaaaagaaagacggcaagaaaaagccgccgttctggacgcgtatcgcgctgatcctctccgctatcggcgtggcgttttcgcatggcgcgaacgatggtcagaaaggcattggcctggtcatgctggtgctgattggcgtcgcgcctgcgggtttcgtggtcaatatgaatgcctccagctacgaaatcacccgtacgcgcgatgctatcaacaatgtcgaaacgtactttgagcagcgtcctgacctgctgaaagccgtcaccggcgttgaccaactgattccctctccggaaccgggcgcgactgaaccgactgaattccactgccatccggctaacaccattaacgcgcttaaccgtgcgaaagggatgctggcaaacgtggaaagctacgacaagttaagcgttgaacagcgtagtcagttgcgtcgcattatgctgtgcatttccgacacgaccgacaaagtcgtgaaattgcctggcgtaagcagcgatgaccagcgcctgctgaaaaagctgaagaccgatatgttaagcaccattgagtatgcgccagtgtggatcattatggcagtggcgttggcgctgggtattggtacgatgatcggctggcgtcgcgtggcgaccactatcggcgagaaaattggtaaaaaaggcatgacgtatgcgcagggaatgtcggcgcagatgacggcggcagtctctatcggtcttgccagctacaccggtatgccagtttctaccactcacgtactctcctcttcagtggcgggaaccatggtcgttgatggcggcgggttgcagcgtaaaaccgtgaccagcattctgatggcctgggtatttacgttaccggcggcgattattctttccggcgtgctgtactggctttccctgaagattatttaa

SEQ ID NO: 39087 - DNA, 1302 bp, Salmonella typhimurium
atgtccggaacgtataatgctactattcgccgggtggtggtttccgcctggataggaaactccattgaatattatgattttctattatacggcctggcaagcgcgctggtatttggcccgcttttttttcctggcgccagcccattgactgcaacgttatcttcttttgccagtttcggcgtgggatttatctcccgaccgctgggcgcgctattttttggcaacaggggagatacgcttgggcgtaaaaacacgttattaattacgttaggggggatgggcgcggtcacgtttctcatcggttgcctgccttcttacgccagtattggcgcgctggcgcctgctttactggttattctgcgttttctacagggatttatggttggaggcgaatggggaggcgccatgttgatggtcgtggaatatgctgctggaaagcaccgggggcggttaagcgcgctatcgcaaacaggaggactcacgggacaattattggcgacaggcgtatttatagtcgtgacccaattaccgcaggaggcgttgttatcgtggggatggcgtattccttttctgctcagtgcgcttttggtgttgcctggattatatatgcgtcatcgtctggatgagacgcctgtcttccgtgcgtttaaaaagcagcaggccattaatcataggcagcaaagagaagaaaggccggtggtcaaagtagtacgagaacaatggcgcagcattttgctgattataattctgcgttttgcggaaagcgttcccttttttcttgctaccgtcttcgcggtttcctgggcgacgacgcagcttgggattgccagcctgactattctgtacattgtaatgttcacctgtctgctggcgtatcccatgcacgtgctatttggcatcatgtcggatcggcgtggctgccgtcaggtgtatattttcggcgcgctttttgtcgcggcaatggcttttccctttttctggctgctggaaagccgttcgctcatactgatgacaatgggctacgttctgcttattaacattggtcataattcactgaatgccgtgcaaccttcttttttcgccggactgtttcatccgcctgtacgctacagcggttcatcaattggcgctcagttgggggcggttgtggcagggggattcacgccgtttatcgctaaagcgttaagcgcagtctatgataacagttgggcgttggttgccggttatgtcgttttgactgcgttggcttcggcgtttgcggcaaagattgcgccggaaaccgtgttaccgcattcgccgtaa

SEQ ID NO: 39088 - DNA, 726 bp, Salmonella typhimurium
atggcaactgtttccatgcgcgacatgctcaaggctggtgttcactttggtcaccagacccgttactggaacccgaaaatgaagcctttcatcttcggcgcgcgtaacaaagttcacatcatcaaccttgagaaaactgtaccgatgttcaacgaagctctggctgaactgaacaagatctctgctcgtaaaggtaaaatccttttcgttggtactaaacgcgctgcaagcgaagcggtgaaagaagctgctaacagctgcgaccagttcttcgtgaaccatcgctggctgggcggtatgctgactaactggaaaacagttcgtcagtccatcaaacgtctgaaagacctggaaactcagtctcaggacggtactttcgaaaagctgaccaagaaagaagcgctgatgcgtactcgtgagcttgagaaactggaaaacagcctgggcggtatcaaagacatgggcggtctgccggacgctctgttcgttatcgatgctgaccacgagcacattgctatcaaagaagcgaacaacctgggtatcccggtatttgctatcgttgataccaactctgatccggatggcgttgacttcgttatcccgggtaacgatgacgcaatccgtgctgttagcctgtacctgggcgctgtcgctgcaaccgttcgtgaaggccgttctcaggatctggcttcccaggcggaagaaagcttcgtagaagccgagtaa

SEQ ID NO: 39089 - DNA, 852 bp, Salmonella typhimurium
atggctgaaattaccgcatccctggtaaaagagctgcgtgagcgtaccggcgcaggcatgatggattgcaaaaaagcgctgactgaagcgaatggcgacattgagctggcaatcgaaaacatgcgtaagtccggcgctatcaaagcggcgaaaaaagcaggcaacgtggctgctgacggcgtaatcaaaaccaaaatcgacggcaacgtcgctttcattctggaagttaactgccagactgacttcgtggctaaagatgctggcttccaggcatttgctgacaaagtgctggacgccgctgttgctggcaaaatcactgacgtagaagttctgaaagcacagttcgaagaagagcgcgttgctctggtagcgaaaattggcgagaacatcaacattcgtcgcgtcgcttccctggaaggcgacgttctgggttcttaccagcacggtgcgcgcatcggcgttctggttgccgctaaaggcgctgacgaagagctggttaaacagctggcgatgcacgttgcggcaagcaagccggaattcgttaagccggaagacgtgtctgctgacgtggtagagaaagagtaccaggtacagctggacatcgcgatgcagtccggtaagccgaaagaaatcgcagagaaaatggttgaaggccgcatgaagaaattcaccggcgaagtttctctgactggtcagcctttcgtcatggaaccgagcaaatctgttggccaactgctgaaagagcacaacgctgacgtgactggcttcatccgctttgaagtgggcgaaggcattgagaaagtcgagactgactttgcagcagaagttgctgcgatgtctaagcagtcctga

SEQ ID NO: 39090 - DNA, 726 bp, Salmonella typhimurium
atggctaccaatgcaaaacccgtctataaacgcattctgcttaaattaagcggcgaagctctgcagggtacggaaggcttcggtattgatgcaagcatactggatcgtatggctcaggagatcaaagaactggttgaactgggtattcaggttggtgtggtgattggcggtggtaacctgttccgtggcgcgggtctggcaaaagcggggatgaaccgcgttgtgggcgaccacatgggcatgttggccaccgtcatgaacggcctggcaatgcgtgatgcgcttcaccgcgcctatgtgaacgcccgcctgatgtcggcaattcctttaaacggcgtgtgcgacaactacagttgggccgaggcgattagcctgctgcgtaataaccgtgttgtgattctgtctgcaggtacgggtaacccgttcttcactaccgactctgcggcttgtctgcgcgggatcgaaattgaagcggatgtcgtactgaaagcgaccaaagtggatggcgtattcactgccgatccggcaaaagatccttccgcgaccatgtacgatcagctgacctacagcgaagtgctggataaagagctgaaagtgatggatctggcggcgttcacgctggctcgtgaccacaaactgccgattcgtgttttcaacatgaacaaaccgggcgcgctgcgtcgtgtggtgatgggcgaaaaagaagggacgttaatcacggaataa

SEQ ID NO: 39091 - DNA, 843 bp, Salmonella typhimurium
atgctcagttatcgtcacagctttcacgctggcaaccacgccgacgtccttaaacataccgttcagagcctgatcatcgagtcgctaaaagagaaagaaaaaccgtttctctatctggacacgcacgcgggcgcggggcgttatcagttgggcagcgaacatgctgaacgtaccggagagtatctggaaggcatcgcccgtatctggcagcaggacgatctgcccgccgaactggaaccgtatattagcgtcgtaaaacatttcaaccgcagcgggcagttacgctactatccgggctctccgttaatcgcccgccagttgctgcgtgagcaggacagtctgcaactcacggaattgcatcccagcgacttcccactgttgcgcgcggagtttcaaaaagacaaccgcgcccgcgtggaacgcgctgacggctatcagcaactgaaagccaaattgccgccggtttcccgccgcggtctgatcctcattgacccgccttatgaaatgaaaaccgactaccaggcggtagtcagcggcatcagcgagggttataaacgtttcgccaccgggacatacgcgctatggtatccggtggtgctccgccagcaaattaagcgcatgattcatgagctggaggccaccggcatccgtaaaatcctgcaaattgagctggcgatccgcccggacagcgatcagcgcgggatgacggcgtccggtatgatcgtggttaacccgccgtggaaactggagcagcagatgaacaacgtgctaccgtggctgcacagcaggttggcgccaaacggtcacggacacacttcggtaagctggatcgtgccggagtaa

SEQ ID NO: 39092 - DNA, 1353 bp, Salmonella typhimurium
atgaccaaacactatgattacatcgctatcggcggcggcagcggcggtatcgcctcgattaaccgcgccgctatgtacggccagaaatgcgcgctcatcgaagccaaagagctgggcggcacctgtgttaacgtgggctgcgtgccgaagaaagtgatgtggcatgccgcgcagattcgtgaagcgattcatctgtatggcccggactacggttttgacaccacgattaatcagttcgactggagcaagctgattgccagccgtaccgcgtatattgaccgcatccatacttcatacgacaacgtgctgggcaaaaataacgtggatgtgattaaaggctttgcccgctttgtcgatgccaaaaccattgaagtgaacggcgaaaccatcaccgccgaccatattttgatcgctaccggcggccgtccgagccatcctgagattccaggcgtggaatacggcattgattccgacggtttctttgcgctatctgccttgccggagcgcgtcgcggtggtaggcgcaggttatatcgccgttgaactggctggcgttatcaacgcgctgggggcgaaaacgcatctgtttgtccgtaaacatgcgccgctgcgcagttttgacccgatgattagcgaaacgctggttgaggtgatgaacgccgaaggcccgcaactgcatactcacgccgtgccgaaagcggtggtgaaaaacgccgacggcagtctgactctggaactggaagatggccgcagtgaaaccgttgattgcctgatctgggccattggtcgcgaaccgtcgaccgacaatattaatctggcggcagcgggcgtgaaaaccaatgaaaaaggttacatcattgtcgataaattccagaataccaacgttgaaggcatttacgccgttggcgacaatactggcgcggtagaactaacgccagtcgccgtcgccgccggtcgccgtctctccgagcgcctgtttaacaacaagccggaagagcatctggactacagcaacatcccgaccgtggtctttagccatccgcctatcggcaccgtcgggttaagcgagccgcaggcgcgcgagcagtacggcgacgagcaggtgaaagtctataaatcatcgtttaccgctatgtataccgcggtaacgacacaccgccagccgtgccgtatgaagctggtctgcgtcgggccggaagaaaaaattgtgggtatccacggtatcggcttcggcatggatgaaatgttgcagggcttcgcagtggcgctgaagatgggcgctaccaagaaagacttcgataataccgtcgctattcacccgaccgcatcggaagagtttgtgaccatgcgttaa

SEQ ID NO: 39093 - DNA, 1431 bp, Salmonella typhimurium
gtgactcagcaacctcgtctaccggagatcgttatggagatcctctacaacatctttaccattttctttaatcaggtaatgaccaatgccccgctattactgggtattgtgacctgcctgggctatatcctgctgcgcaaaagcgtcagcgtgatcatcaaagggacgatcaaaaccatcattggcttcatgctgctacaggccgggtccggcattctgaccagcacctttaaaccggtggtggcgaaaatgtctgaggtctacggcatcaacggcgcgatttccgatacctatgcttcgatgatggcaacgatcgaacggatgggtgatgcgtatagttgggtaggctacgcggtgttgctcgcgctggcgctgaatatttgttacgtcttgttgcgacgcattaccggtattcgcaccatcatgttgaccgggcacatcatgttccagcaggcggggctgattgcggtctctttctatatcttcggctattccatgtggaccaccattatctgcacggcgatactggtttccctgtactggggtattacctccaacatgatgtacaagccgactcaggaagtgacggacggctgcggtttctccattggtcaccagcagcagtttgcttcctggattgcctataaagtcgcgccgttcctgggcaaaaaagaggaaagcgttgaagacctcaaactgccgggctggctgaacattttccatgacaacatcgtctccacggcgattgtaatgaccatcttctttggtgccattctgctctcttttggtatcgataccgtacaggcgatggcgggtaaaacccactggacaatctatatcctgcaaaccggtttctcctttgcggtggcgatcttcatcatcacccaaggcgtgcgtatgtttgtcgccgagctctctgaggcctttaacggtatctcccagcgtctgattccgggcgcagtactggcgattgactgcgccgctatttatagcttcgcgcctaacgcggtggtctggggctttatgtggggcaccatcggccagctgattgcggttggcatcctggttgcctgcggctcctcgatcctgattattcctggctttatcccgatgttcttctctaacgccactatcggcgtgttcgctaaccacttcggcggctggcgtgcggcgctgaaaatttgtctggtgatggggatgattgaaatctttggttgcgtctgggcggtgaaactcaccggtatgagtgcctggatgggtatggcggactggtcgattctggcaccgccgatgatgcagggcttcttctccctcggtatcgcctttatggccgtcatcattgtaattgcactggcttatatgttcttcgctggccgcgcactgcgcgcagaagaagatgcagaaaaacaactggcagaacagtctgcttaa

SEQ ID NO: 39094 - DNA, 558 bp, Salmonella typhimurium
gtgattagcgatatcagaaaagatgctgaagtacgcatggaaaaatgcgttgaagcgttcaaaacccaaatcagcaaagtgcgcacgggtcgtgcttctcccagcctgctggatggtattgtcgtagaatactatggcactccgaccccgctgcgccagttggcaagcgtaacggtagaagactcccgtaccttaaaaattaacgtgtttgaccgttctatggggccagccgttgaaaaagcgatcatggcgtcagacctcggtttgaatccaagctctgcgggcaccgacattcgcgttccgctgccgccgctgaccgaagaacgtcgtaaagatctgacgaaaattgtccgtggcgaagcggagcaggcgcgtgtcgccgttcgtaacgtccgtcgtgatgcgaacgataaagtaaaagctctgctgaaagataaagcgatcagtgaagatgacgatcgtcgctctcaggaagaagtacagaaaatgaccgacgcggcaattaagaaagttgatgcggcgttggcagataaagaagcagaactgatgcagttctga

SEQ ID NO: 39095 - DNA, 759 bp, Salmonella typhimurium
atgttgtctgcaactcaaccagtaagcgaaaatttgccagcgcatggctgccgtcatgttgcaataattatggatggcaatggtcgctgggcgaaaaagcaagggaagatccgggcctttgggcataaagccggggcgaagtccgtccggcgagcggtctcttttgctgccaataacggtattgatgcgttaacgctgtatgcctttagtagtgaaaactggaaccgaccggcgcaggaagtgagcgcgttaatggagctgtttgtgtgggcgctggatagcgaagtcaaaagcctgcaccgccataacgttcgcctgcgtattatcggcgatatcagtcgattcaactcacgtttacaagaacgtattcgcaaatcagaagcgcttaccgcccataatacgggtctaacgctgaatatcgctgcgaattacggcggacgttgggatattgtccagggagtccgacaactggcggaacaggtgcaggctggagtgctgcgccccgatcagattgatgaagagagactaggccagcaaatctgtatgcatgagctggcgcctgtggatttagtaattaggactgggggagagcatcgcattagtaactttttgctttggcaaattgcctatgccgaactttactttacggatgttctttggcccgatttcgatgaacaagactttgaaggtgcgctgcatgcctttgctaatcgagagcgtcgtttcggcggtaccgagcctggtgatgacaaagcctga

SEQ ID NO: 39096 - DNA, 858 bp, Salmonella typhimurium
ttgctgaagtatcgcctgatttctgcttttgtgttaatacccgcggtcatcgctgcgctttttttattgccgccggtggggttcgccattattacgctggttgtctgtatgctggccgcgtgggaatggggacagttaagcggtttcgccgcgcgttcacagcgggtttggctggcggtgctgtgtggtctgttattggcgctgatgctatttttgttgcctgagtatcatcacaacattcgtcaaccgctggttgagatgtcgctttgggcatcgttaggatggtgggttgtcgcgctactgctggtgctattttatcccggttcggcggcaatctggcgcaactcaaaaacattgcgtctcattttcggtttgttaactattgtgccatttttctggggcatgctggcgctgcgcgcctggcactatgacgagaatcattacagtggcgcaatatggctactctatgtcatgatcctggtctggggagcggactctggcgcgtatatgtttggtaaattatttggcaaacataagctggcgccgaaggtttccccgggtaaaacctggcaagggtttatcggcgggcttgctacggctgccgtgatctcatggggctacggtatgtgggcgaatctgaatgttgcgcctgttatcttgctgatttgctctgtggtggcggctctggcttctgtactgggcgacctcaccgagagtatgtttaagcgcgaagcaggaattaaggatagcggccacttgattccaggccatggcggcattctggaccgaattgacagtctgacggctgccgtaccggtctttgcttgcctgttgttactggtgttcaggacgctctaa

SEQ ID NO: 39097 - DNA, 1026 bp, Salmonella typhimurium
atgccttcaattcgactggctgacttagcagaacagttggatgcagaattacacggtgatggcgatatcgtcatcaccggcgttgcgtccatgcaatctgcaacaacaggccacattacgtttatggtgaatcctaagtaccgtgaacacttaggtttatgccaggcttctgcggttgtcatgacgcaggacgatcttccttttgctaagagtgcggcgctggtagttaaaaatccctacctgacctacgcgcgcatggcgcaaattttagatactacgccgcagcccgcgcagaatatcgcgccaagcgccgtgattgatgcgacggcaacgctgggtagcaatgtttcagtcggcgcgaatgcggtgattgaatctggcgtacaactgggcgataacgtggttatcggcgcaggctgtttcgtcggaaaaaatagcaaaatcggggcgggttcacgcttgtgggcgaacgtaacgatttaccacgacattcagatcggtgagaattgcctgatccagtccagtacggtgatcggcgcggacggttttggctacgctaacgatcgtggcaactgggtgaagatcccacaactgggccgggtcattattggcgatcgtgtcgagatcggcgcttgtaccaccattgaccgtggcgcgttggatgatactgttattggcaatggcgtgattattgataatcagtgccagattgcacataacgtcgtgattggcgacaatacggcagttgccggtggcgtcattatggcgggtagcctgaagattggccgttactgcatgattggcggcgccagcgtgatcaatgggcatatggaaatatgcgacaaagtcacggtaactggcatgggtatggtgatgcgtcccatcacggaaccgggcgtctactcctcaggcattccgctgcaacccaacaaagtatggcgtaaaactgctgcactggtgatgaacattgatgatatgagcaagcgtctcaaagcgattgagcgcaaggttaatcaacaagactaa

SEQ ID NO: 39098 - DNA, 456 bp, Salmonella typhimurium
ttgactactaacactcatactctgcagattgaagagattttagagcttctgccgcaccgttttccgtttttactggtcgatcgcgtgctggactttgaagaaggtcgttttctgcgtgcggtgaaaaatgtctccgtcaacgagccgtttttccaggggcatttcccgggcaaaccgattttgccaggcgtgctgattctggaagcgatggcgcaggcaaccggtattctggcgtttaaaagcgttggtaaactggaacctggcgaactgtattatttcgcgggtattgatgaagcgcgctttaagcgtccggtggtgccaggcgatcagatgatcatggaagtcactttcgagaaaacgcgccgtggcctgacccgctttaaaggggttgcgctggtcgacggtaaagtcgtgtgcgaagcaaccatgatgtgtgctcgtagccgggaggcctga

SEQ ID NO: 39099 - DNA, 360 bp, Salmonella typhimurium
atggtttccactctgattaccgtcgccgttatcgcctggtgtgcgcagctggcgctgggcggctggcagatttcccgctttaatcgggctttcgataaacttagccaacaggggcgggtcggcgtcgggcgctccggcgggcgttttaagccccgggtggtggttgccgtggcgctggacgaacagcagcgggtgacggacactttattgatgaaaggccttacggtattcgccagaccggttaaaattgccgcaatgcaaggaaaacatttgcatgaattacagcctgatgtgatctttccccatgattcgctcgcgcagaatgcactatcattggcgcttaaactgaaacatgggtaa

SEQ ID NO: 39100 - DNA, 465 bp, Salmonella typhimurium
atgaaattacgtgattcactggcggagaataattctatccgcctgcaggctgaagcgaatacctggcaggaagccgtcaagatcggcgtcgatttactggtggctgcagacgtggtagagccgcgctattaccaggcgattctggatggcgttgagcagtttggcccctattttgtgattgcccccggcctggcgatgccgcatggccgcccggaagaaggggtgaagaaaaccggtttttcgctggtgaccctgaaaaagccgctggagttcaaccacgaagataacgacccggtcgatattctgatcaccatggcggcggttgatgccaacactcaccaggaagtgggcatcatgcagatcgtcaacctgtttgaagacgaagctaattttgaccgtttacgcgcctgccgtaccgcgcaggaagtcctggatctcattgaccgcaccaacgcggcagcttaa

SEQ ID NO: 39101 - DNA, 687 bp, Salmonella typhimurium
atgcaaaagctcaagcagcaggtatttgacgctaacatggatttgccccgttatgggctggtgacctttacctggggcaacgtcagcgctatcgatcgcgaacgcgggctggtggtgattaagccaagcggtgtcgcctatgaaaccatgaaggtagatgacatggtggtggtggatatggatggcaaagtggtggagggacgttatcgtccttcttccgataccgctacccatctggcgctgtatcaacgctatccgtcgcttggcggcgtcgttcatacccactccacccacgccacggcatgggcgcaggcggggatggctattccagcgctcggcaccacgcacgcggactatttctttggcgatattccttgtaccagagcgttaagcgaagaagaagtgcagggcgagtacgagctgaacaccggcaaggtgatcatcgaaacgctgggcgaggtggaaccgctgcatacgccaggtattgtcgtgtatcaacacgggccgttcgcctgggggaaagatgcgcacgatgcggtacataacgcggtcgtcatggaggaagtggcgcgaatggcgtggattgcgcgcggtattaacccggcgctgaatcccatcgacgattatctgatgaataaacacttcatgcgtaagcatggcccgaatgcgtattacgggcagaagtga

SEQ ID NO: 39102 - DNA, 396 bp, Salmonella typhimurium
atgcgtcattacgaaatcgtttttatggtccatcctgaccagagcgaacaggttccgggtatgatcgagcgttactctgccgccatcactggcgcagaaggcaagatccaccgtctggaagactggggccgccgtcagctggcttacccgatcaacaaactgcacaaagcgcactacgttctgatgaacgttgaagcgccgcaggaagtgatcgatgagctggaaactaccttccgcttcaacgatgccgttatccgcagcatggttatgcgtactaagcacgctgttaccgaagcttctccgatggttaaagcgaaagacgagcgccgtgagcgtcgcgatgatttcgctaacgaaaccgcagatgatgctgaagctggggattctgaagagtaa

SEQ ID NO: 39103 - DNA, 315 bp, Salmonella typhimurium
atgaccaaccgtctggcgttgtccggcaccgtgtgcagggccccccttcgaaaggtcagtccatcaggaattccgcattgccagttcgtgcttgagcatcgttctgtgcaagaggaagccggctttcaccggcaggcgtggtgccaaatgcccgttattgttagcggacacgaaaaccaggccattactcacagtataacggtcggcagccgcataaccgttcaggggtttatttcttgccacaaggcaaagaacggtctgagcaaaatggttctgcatgccgagcagattgaattgatagattctggagactag

SEQ ID NO: 39104 - DNA, 228 bp, Salmonella typhimurium
atggcacgttatttccgtcgtcgcaagttctgccgtttcaccgcggaaggcgttcaagagatcgactataaagatatcgctacgctgaaaaactacatcaccgaaagcggtaagattgtcccaagccgtatcaccggtacccgtgcaaaataccagcgtcagctgcgtcgcgctatcaaacgcgctcgctacctgtctctgctgccgtacactgatcgccatcagtaa

SEQ ID NO: 39105 - DNA, 450 bp, Salmonella typhimurium
atgcaagttattctgcttgataaagtagcaaacctgggtagcctgggtgatcaggttaacgttaaagcgggctatgctcgtaacttcctggtaccaaagggtaaagctgttccggctaccaagaaaaacgttgaatacttcgaagcacgtcgcgctgaactggaagctaaactggctgacgttctggctgctgcaaatgcacgcgcagagaaaatcaacgccctggaaaccgttactatcgcgtctaaagcaggcgacgaaggtaaactgttcggttccatcggtactcgcgacatcgctgacgctgtgactgcggctggcgttgacgtggctaagagcgaagttcgtctgccgaacggcgttctgcgtaccactggcgaacacgaagtgaacttccaggttcacagcgaagtattcgcaaaagttatcatcaacgtggttgctgagtaa

SEQ ID NO: 39106 - DNA, 1149 bp, Salmonella typhimurium
atggcggcacagcgtcctttaacgattgccctggtcgccggtgaaacgtccggcgatattcttggcgcaggcttaattcgtgcgctgaaagcgcgcgtacccaacgcccgttttgtgggcgttgcggggccgcgtatgcaggccgaagggtgtgaagcctggtacgagatggaagagctggcggtcatgggcattgttgaagtgctcggacgtttacgccgtttgttgcatatccgcgccgatctgacccgccgttttaccgaactcaagcccgatgtctttgtcgggattgatgcccctgatttcaatattaccctcgaaggtaatctgaaaaaaaaagggattaagaccattcattatgtcagcccgtccgtttgggcctggcgacagaaacgcgttttcaaaataggcagatccacccatatggtgttggcttttctgcctttcgaaaaagcgttttacgataaatttaacgtcccgtgccgctttatcggtcacaccatggcggatgccatgccgctggacccggataaaaatgcggcgcgcgacgtgctgggtatcccgcatgacgcccattgtctggcgctactgccaggcagccgtggcgcggaagtggaaatgctcagcgccgatttcctgaaaaccgcacaattgctgcgacagcgctatcccgatctggaagtggtagtgccgctggtgaacgcgaaacgccgcgagcagtttgaaaaaattaaagcggaggttgcgccggatctcgccgttcatttgctggacggcatggcgcgcgaggcgatgatcgccagcgacgcggctctgctggcctcgggtacggcggcactggagtgtatgctggcaaaatgcccgatggtagtgggatatcgtatgaagcccttcactttctggctggcgaaacgtctggtgaaaacggagtatgtgtctttgcctaacctgctggcgggaagagaattagtcaaagagctgttgcaggaagagtgcgaaccgcaaaaactcgccgaagcgctgttgccgctactggcgaacggtaaaaccagccatgcgatgcacgacaccttccgtgaattgcatcagcagatccgctgtaatgccgatgagcaggcggcagatgccgtcctggagttagcacaatga

SEQ ID NO: 39107 - DNA, 597 bp, Salmonella typhimurium
atgatcgaatttgtttatccacacacccatttagtggcgggtgtggatgaagtgggccgtggcccgctggtgggcgccgtagtgaccgccgccgtgatcctcgatccggcgcgtccgatcgtcggtctgaatgattccaaaaaattgtctgaaaagcgtcgtctgtcattgtatgacgagattaaagaaaaggcgttaagctggagtctggggcgcgcggaagcgcatgaaattgatgagctgaatattttgcacgccaccatgctcgccatgcagcgcgctgtcgctggtctgcatattgcgccagaatatgtgctgatcgacggcaatcgctgtccggagctgcctgtgccgtcaatggccgtggtgaaaggcgacagccgcgtggcggagattagcgcggcgtctattctggcgaaagtcacccgcgacgcagaaatggcggcgctggatatcgtttttcctcagtatggctttgcgcagcacaaaggctatccaaccgcttttcatctggaaaagttggcccagtatggcgcgacggcgcaccaccgacgcagttttgcgcctgttaaacgcgctctgggacttgtgtcctga

SEQ ID NO: 39108 - DNA, 3483 bp, Salmonella typhimurium
atgtctgaaccacgtttcgttcacctgcgggtgcacagcgactactctatgatcgatgggctggcgaagaccgggccgctggtgaaaaaggcggcctcattaggtatgcctgcgctggcgatcaccgattttaccaacctctgcggtctggtgaagttctacggagcgggtcatggcgcgggcattaaacccatcgtcggggcggactttaacgttcacaacgaactgctgggagatgagctgactcatctgacggtactggcggcgaataatacgggataccagaacttgacgttgctgatctcgaaagcgtatcagcgcggctacggcgcggcaggcccgattatcgagcgcgactggctggtagagcttaaagaaggtttgatcctgctttccggcgggcgcatgggcgacgtaggccgctgtctgctacgcggcaaccaggcgctggtggaggagtgcgttgctttctatgaagcgcattttcccgatcgctacttcctggaactgatccgtaccggcagacaggatgaagagacctatctccatgctgcggttgagctggctgaggcacgtggtttgccggttgtcgcgacaaacgatgtccgttttcttgaaagcgatgattttgacgcccatgagattcgtgtcgcgatccacgacggtttcacgctcgacgatcctaaacgtccacgcaattattcaccgcagcagtatatgcgcagtgaagaagaaatgtgcgagctgttctccgatattccggaggcgctggaaaatacggtggagattgccaaacgctgcaacgtaacggtgcgtctgggtgaatatttcttgccgcagttcccgaccggcgatatgaccaccgaagattatctggtcaaaaaagcgaaagaggggctggaagagcgtctggctttcctgtttccggacgaagaagagcgcaaaaagcgtcgcccggaatatgacgagcgtctggatattgaactacaggttatcaaccagatggggttccctggctacttcctcatcgtgatggagtttatccagtggtcaaaagataacggcgtgccggtagggccgggacgtggttccggggctggttcgctggtggcctacgcgctgaaaattaccgaccttgatccgctggaatttgacctgctgttcgaacgtttcctgaacccggaacgtgtctcgatgcctgacttcgacgttgacttctgtatggagaaacgcgaccaggtgattgaacacgtcgcagatatgtacgggcgtgatgcggtatcgcaaattatcaccttcggtacgatggcggcgaaagccgttatccgcgatgtgggccgcgtgctggggcatccgtacggttttgtcgatcgtatctcgaagctggtgccgcccgatccgggcatgacgctggcaaaagcctttgaagcggaaccgcaactgccggaaatttacgaggcggatgaagaggtcagagcgctgatcgatatggcgcgtaagctcgaaggcgtcacgcgtaacgccggtaagcacgctggcggcgtggtcatcgcgccgaccaaaattaccgactttgcgccgctgtactgcgatgaagagggcaagcatccggttacccagtttgataaaagcgacgtggaatatgccgggctggtgaagttcgacttcctcggtttgcgtacgctgactatcatcaactgggcgctggagatgatcaacaagcggcgggcgaagaatggcgagccaccgctggatatcgctgccattccgctggacgataaaaaaagcttcgacatgctgcagcgctcggaaaccacggcggtcttccagcttgaatcgcgcggcatgaaagatctgatcaaacgtctgcagccggactgctttgaagatatgatcgcgctggtggccctgttccgtcccggcccgttgcagtcagggatggtagataacttcatcgaccgtaagcacggtcgtgaagaactctcttacccggacgttcagtggcagcatgaaagcctgaagccggtactggagccgacctacggcatcattctgtatcaggaacaggtgatgcagattgcccaggtactttccgggtatactctcggcggcgcggatatgctgcgtcgtgcgatgggtaagaaaaagccggaggagatggccaaacagcgttccgtttttgaagaaggcgcgaaaaagaacggtatcgacggcgaactggcgatgaaaatctttgacctggtggagaaattcgccggttacgggtttaacaaatcgcactccgccgcttatgcgctggtttcttaccagacgctatggctaaaggcgcactatccggcagagtttatggcggcggtgatgactgccgatatggacaacaccgagaaggtcgtcggcctggtggacgagtgctggcggatgggactgaaaattctgccgccggatattaactccgggttgtaccatttccacgttaatgatgagggcgagatcgtctacggtattggcgcgatcaaaggcgtcggcgaaggtccgatcgaagcgatcatcgacgcgcgtaatcagggcggctatttccgcgagctgtttgatctgtgcgcgcggaccgacaccaaaaagctcaaccgccgggtgctggaaaagctgatcatgtccggggcgttcgaccgcctggggccgcaccgcgccgcgctgatgaactcattgggcgatgcgctgaaagccgccgaccagcacgccaaagcggaagctatcggtcagacggatatgttcggcgtgctggcggaagagccggagcaaatcgaacaatcctatgccagctgccagccgtggccggagcaggtggtgttagatggggaacgtgaaacgttggggctgtacctgacgggccaccctatcaatcagtatttaaaagaaattgagcgctatgtcggcggggtaaggctcaaagacatgcatccgacagaacgtggtaaagtcaccacggctgcggggctcgtgattgccgcaagggttatggtcaccaagcgcggcaatcgtatcggcatctgtacgctggatgaccgttccgggcgtctggaagtgatgttatttaccgacgcgctggataaataccagcagttgctggaaaaagaccgcatacttatcgtcagcggacaggtcagctttgatgacttcagcggggggcttaaaatgaccgcccgcgaagtgatggatattgacgaagctcgcgaaaaatacgctcgcgggcttgctatctcgctgacggacaggcaaattgatgaccagcttttaaaccgactccgtcagtctctggaaccccaccgctcggggaccattccagtacatctctactatcagagggcggatgcgcgtgcgcggctgcgttttggcgcaacgtggcgtgtctctccgagcgatcgtttacttaacgatctgcgtggcctcattggttcggagcaggtggaactggagtttgactaa

SEQ ID NO: 39109 - DNA, 960 bp, Salmonella typhimurium
atgagtctgaatttccttgattttgaacagccgatagcagagctggaagcgaaaatcgattctctgactgcggtaagccgccaggatgagaaactggatattaatatcgatgaagaagtccatcgcctgcgcgaaaaaagcgtagaactgacgcgcaaaatcttcgccgatctcggcgcatggcaggtagcccaactggcgcgccatccgcagcgtccgtacaccctggattatgtccgtctggcgtttgatgagtttgatgagctggcgggcgatcgcgcctatgctgatgacaaagccatcgtcggcggtatcgcgcgtctggaagggcgaccggtgatgatcattggtcatcagaaaggtcgtgaaaccaaagaaaaaattcgtcgtaactttggcatgccagcgccggaaggctaccgcaaagcgctgcgcctgatggaaatggctgaacgcttcaacatgccgattatcaccttcatcgacaccccgggtgcataccctggcgtgggcgcggaagagcgtggtcagtctgaagccatcgcccgcaacctgcgtgagatgtctcgtctgaacgtaccggtcatctgcaccgtgattggcgaaggcggctccggcggcgcattggcgattggcgtgggtgataaagtgaatatgctgcaatacagcacctattccgttatctccccggaaggttgcgcctctattttgtggaagagcgccgacaaagcaccattggctgctgaagcgatgggcatcatcgcgccgcgtctgaaagagctgaagctaatcgattccatcattccggagccgctgggcggcgcgcaccgtaatccggaagcgatggcggcatcgctaaaagcgcagctgctggaagatttagccgatctcgatgtgttaagcaccgatgatttaaaaaaccgtcgttaccagcgtttgatgagctacggttacgcctaa

SEQ ID NO: 39110 - DNA, 390 bp, Salmonella typhimurium
atgctgggattaaaacaggttcatcacatcgcgatcattgcgacagactatgcggtgagcaaggcgttttattgcgatattctggggttcgatctgctaagcgaagtctggcgggaagagcgtgactcgtggaagggcgatttggcgctaaacgggcagtatgtgattgagcttttctcttttcccttccctccggcgcgtccaagccgacctgaagcctgcggcctgcgccatctggctttcagcgtggaaaatgtggaaaacgccgttgcgcatctggaaaagcatcaggttaagtgcgaaccgatacgcatcgatccgtataccgggaagcgctttacttttttcaacgatccggacggtttaccgcttgagctgtatgagcagtaa

SEQ ID NO: 39111 - DNA, 1293 bp, Salmonella typhimurium
atgaccactctcacgttgaatacctcgttactctcttctcgccgtattctggctgcctttagcggcggcctggattctacggtgctgttgcatcaactggtgttgtggcgagaacgccatcctgacgtcacgctgcgtgctatccatattcatcacggtttaagccctcatgctgatagctgggtgcggcattgcgaaaccgtatgcgaacgctggcaggttccgctggtagtggagcgggtgacgctggcggataatggcctgggtatcgaggcccatgcgcgtgaagcgcgctaccgggcgttcgcacagacgctattgcctggcgaagtgctggcaaccgcgcagcaccttgacgatcagtgtgaaacgtttctgctggcgttaaagcgcggcagcggtccggccggactttccgcgatgggagaacgctcgccttttgccggaactctgcttcttcgcccgctgttgagagaaacgcggaagacgctggaacagtgggctgtgcgtcatggcttatgctggattgaagatgaaagcaatcaggatgacgcctacgatcgcaattttttacgcctgcgcgcgcttccgctcttacagcagcgctggccgcattttcctgcggcggtagcccgtagtgcgacgctctgcgccgagcaagaaaggctgctggacgagcttctggccagcgatcttactgactgtatcacggcggagggaacattgcggctctctccattaatgtcgatgagcgatgtacggcgggcggcgattttgcgtcgctggctggcgatgcgtaatgcgccgatgccctctcgcgacgcgctggaacgtatctggcaggaggtggcgctggcgcgcgacgatgcctctccctgtttacgctttggcgatcacgagattcgccgttaccagtcgcaactgtggtggattaaatccgtggccggacaacacgaaacgacggtcgcctggcccgtctggcaaacaccgctggcgctgcctgccggcttagggacggtacagctcgttcctggtggcgaactgcgccgaccgcgagaggaagaatccgtcagcattcgttttaaagcgccaggcgtgttacatattgtcgggcgtaacggtggacgtaaattaaagaaaatctggcaggagcaggggatcccgccctggcgacgagataccacgccgctgttgttttacggcgaaacgctgattgcggctgcgggtgtttttgtgacgcgtgagggagcagcagaagataaagaaggggtgagtctggtttggcatgcctga

SEQ ID NO: 39112 - DNA, 873 bp, Salmonella typhimurium
atgtgtacgacttgcggttgcgctgaaggcaacctttatatagaaggcgatgaacataatccgcactcagcgtttcgtagcgcgccctttgccccagcggctcgcccggcgctgaatattaccggcattaaaacgcctgactttgccccaagtcagaccgcagaaggcgatctgcattacggccacggcgaagccggaacccacgcgcctggtatgagtcagcggcggatgcttgaggttgaaatcgacgtgctggacaaaaataatcgtctggctgagcgcaaccgcgcccgtttcgccgcccgccagcaactggtgctcaacctggtgtccagccccgggtccggtaaaaccaccttgctgactgaaacgctgatgaaattgaaagaccgtgtaccgtgcgcggtgattgaaggcgaccagcagacagtgaacgacgccgcccgcatccgcgctaccggcacgcccgccattcaggtcaacaccggtaaaggctgccatcttgacgcgcaaatgatcgccgacgccgcgccgcgcctgccgctggatgaccatggtattctgtttatcgaaaacgtcggtaatcttgtctgcccggccagcttcgatctgggcgaaaagcataaagtcgcagtgctttccgtgaccgaaggtgaagataagccgctgaaatatccccatatgtttgccgctgcgtcgctcatgctgctcaataaagtcgatctgctgccctacctcaattttgacgttgagaagtgcatcgccagcgcgcgtgaagtgaacccggagattgaaattatcctgatttccgccaccagcggcgaaggcatggatcagtggctggcctggctggaggcgcagcgatgtgcatag

SEQ ID NO: 39113 - DNA, 1119 bp, Salmonella typhimurium
atgcgttttgttgacgagtaccgtgcgccggaacaggtaatgcagctcattgaacacctgcgtgaacgcgccgcccttcttccttacactgccgaacgaccgctgcgcattatggaagtctgcgggggtcatacccacgcgatttttaaatttggtctcgatcagttactgcccgaaaacgtggagtttattcacggccccggttgtccggtctgcgtgctgccaatgggacgcatcgacagttgcgtggaaatcgccagccatccggaggtgattttctgcacctttggcgatgccatgcgcgtgccggggaaacagggttctctgttgcaggctaaagcgcgcgcggatgtgcgtattgtttattctccgatggacgcgctgaagctggcgcaggataacccgacccgcaaagtggtatttttcgggctgggctttgaaaccaccatgccgaccaccgccatcacgctgcagcaggcaaaacagcgtgacgtgcgaaacttctactttttttgccagcacattacgctgatcccgacgctgcgtagcctactggagcagccggacaacggcattgacgcctttcttgcgccaggccacgtcagcatggtcatcggcaccgaggcgtaccagtttatcgccgccgattttcatcgcccgctggtggtggctggattcgaaccgcttgatctactgcaaggcgtggtcatgctggttgagcagaaaatagcggccctaagccaggttgaaaatcaataccgtcgcgtggtgccggatgccggaaacatgctggcgcagcaggccattgccgatgtgttctgcgttaatggcgatagcgagtggcgcggtctgggcgtgattgaatcctccggcgtccacctgacgccggagtatcagcgctttgacgccgaagcgcatttccgcccagcgccgcagcaggtctatgacgatccgcgcgcccgctgcggcgaagtgctgaccggcagatgcaagccgcatcagtgcccgctatttggtaaaacatgtaatccagagaccgcgttcggcgcgctgatggtctcttccgaaggcgcatgcgccgcctggtatcagtatcgtcagcaggagtgtgaagtttga

SEQ ID NO: 39114 - DNA, 2079 bp, Salmonella typhimurium
atgtcgtatacacccatgagcgatcttggacagcaaggcttgttcgatatcactcgtaccttattgcagcagcccgatttggcgtcgctcagtgaagcgctttcgcaactggtaaagcgttcagcgctcgccgacagcgccggcattgtgctatggcaggcgcagtcgcaacgcgcacaatattatgcgacgcgagaaaatggccgtcctgttgaatatgaagatgaaaccgtactggcgcacggcccggtacgtcgcatcctttctcgccccgatgcattgcactgtaatttccatgagtttaccgaaacctggccgcagcttgccgcgagcggcctctaccctgaatttggtcattactgtctgcttcctttagccgcggagggccgtattttcggcggctgcgaattcatccgtcaggaagatcgcccctggagtgaaaaggaatatgaccgtctgcatacgtttacccaaattgtcggcgtggtcgccgagcaaattcaaaaccgggtaaacaataacgtcgattatgatctgttgtgccgcgaacgcgataacttccgtattctggttgcgattaccaacgccgtcctgtcgcgtctggatattgatgaactggtaagcgaagtcgcaaaagagattcaccactatttcaatatcgacgcgatcagcatcgtgttgcgcagccatcgcaaaaataagctgaatatctactccacccactaccttgatgagcatcatccggcgcacgaacagagcgaagtcgacgaagccggcacgctcacggagcgcgtctttaaaagtaaagagatgctgcttatcaacctcaacgaacgcgatccgcttgccccctacgaacgcatgctgttcgatacctggggcaatcagatccagacgctttgcctgctgccgttgatgtccggcaagacgatgcttggcgtgctcaaactggcccagtgcgaagaaaaagtgtttaccaccgccaacctcaagctgctgcgtcagattgccgaacgggtagccattgccgtggataatgcgctggcctatcaggaaatccaccgactgaaggaacgcctggtcgacgaaaacctggcgctcacggaacagcttaataacgtcgacagcgagtttggcgagatcatcggacgcagcgaagcgatgtacaacgtgctaaagcaggttgagatggtggcgcagagcgacagtaccgtgctgattctgggcgaaacgggaaccggtaaagagttgattgcccgcgccattcacaacctgagcggacgtagcgggcgcaggatggtaaagatgaactgcgccgcgatgccggcggggctgctggaaagcgatctgtttggtcatgagcgcggcgcgtttaccggcgccagcgcgcagcggattggccgtttcgagctggcggataaaagctcgctgtttctggatgaagtgggcgacatgccgctggagctacagcctaagctgctgcgcgtccttcaggagcaagagtttgaacgtctcggcagcaataaactgatccagaccgacgtgcggctgatcgccgcgactaaccgcgatctgaaaaaaatggtcgccgatcgcgaattccgtaacgatctctactatcggctgaatgtttttccgatccagcttcctccgttgcgcgaacgtccggaagatattccactactggtcaaagcgttcactttcaaaatcgcccgccgaatggggcgtaatatcgacagcattcccgccgaaacgctgcgcacgcttagcagcatggaatggccggggaacgttcgcgagctggagaatgtcgtcgagcgcgccgtgctgctgacgcgcggcaatgtgctacaactgtcgctgccggatattaccgccgtaacgcccgatacctcgcctgttgcgactgaaagcgacaaagaaggcgaagatgaatatcagcttattatacgcgtgctgaaagagaccaatggcgtagtggctggaccaaaaggcgcggcgcagcgtctggggcttaaacgaaccaccctgctgtcgcgtatgaagcgattgggtattgataaagacgcgttagcgtaa

SEQ ID NO: 39115 - DNA, 1299 bp, Salmonella typhimurium
atgcaggacgacacattaccattaaataacagtaacgctacgaccacaccgctttcaacgagattaccgtttacaaaatatgattttggctgggtgctcttgtgtatcggaatggcgatcggcgccggtaccgtcttaatgccagtgcaaatcggtctcaaggggatctgggtatttattaccgcttttatcatcgcctatcccgctacctatattgtgcaggatatttatctaaaaacgttatctgaaagcgaaacctgtgacgattatacggatattatcagtcactatcttggcaaaaactggggcatttttctcggtgtaatctattttcttatgattatccacggggtgtttatttattccctgtcggtggtgtttgatagcgcctcctatatcaaaaccttcggccttactgaggccgatctttcgcagtctattatctataaagtcgcgattttcgccgtgctggtggcgattgcctccggcggggaaaagttattatttaaaatttccggcccgatggtggtggtaaaagtcgggatcattctgatattcggtttcgcgatgatcccacactggaatcttgataatatttccgcctttcccgccgcatcggttttctttcgcgacgtactgctcactatcccattttgcttcttttctgcggtcttcattcaggtgctaaacccaatgaacatcgcctatcgtaagcgcgaacctgaccgtgtgctggccacccggatggcgattcgcacgcatcgcattagctatattacgctgattgccattattctctttttctcgttctcgtttaccttttcgattagtcatgaagaggcggtatcagcattcgagcagaatatttccgcccttgcgctggcagctcaggtaatccctggccatatcatccacattacctctaccatcctcaatatttttgccgtacttaccgcgttctttggtatttatttaggttttcacgaagcgcttaaaggtattgtactgaatgtattgagtcgtattatggatgtcaaaaacgtcaacccactgttactgacatctggaatctgtgtctttatcgtggttactctggttatttgggtttcgtttcgcgtctcagtattggtctttttccagttaggcagtccgctttatggcattgtcgcgtgtattattccctttttcctgatttataaagtagcgcaactggaaaaattacgcggcctgaaaacctggcttattctgttatatggaatattgttgtgcctgtcgccgttattaaaattgattgaataa

SEQ ID NO: 39116 - DNA, 3780 bp, Salmonella typhimurium
atgagtttatggaagaaaataagcctcggcgtgttgattttcattgtggtgttactggcgagcgttgcgtttctggtcgggacgacgacggggctgcatctggtattcagtgcggcgaaccgctgggtgccggggctggagattgggcaggtcaccggcggctggcgggacttatcgttaaaaaatatccgctatgagcagccgggcgttgcggtgaatgcgggcgaaattcatctggccatcgggcttgattgcctgtggcgcagtagcctgtgcgtcaatgatctggcgctaaaagatattaatgtcgctatcgacagcaaaaaaatgccgccctccgaaccggcgcaagaagaggaagaaagcgggccgctgaacctctccacgccctggcccatcacgctgtcgcgcgtggcgttgaataacatcaatatcaagattgatgacactaccgtttcggtgttggattttacctccgggctggcatggcaggagaaaaacctgaccctgaaaccgacgcggcttcagggactgctgatcgcgctgccgaaggtcgctgacgtggcgcaggaagaggtggttgaacccaaaatcgagaaacctcaaccggatgaaaagccgcttggcgaaacgctaaaagatctgtttgcaaaaccggtaatgccggagatgaccgatgttcacctgccgctcaatctgaatatcgagtcatttcgcggcgagcagctacgcatcaccggcgataccgatctgacggtgcgcacgatgctgcttaaagtcagcagtatcgacggtaatatgaagctggatactctggatatcgacgccaaccagggcacggtgaaagcctccggtacggcgcagctcgccaataactggccggttgatattacgctcaacagtacgctgaatatcgatccgctaaagggtgaaaagataaaactcaaggtcggcggcgcgttacgcgaacaactggaggtcggggtgaacctttccgggccgatggatgtcgcgcttcgcgcccagacgcggctggcggaggccggtttaccgctcaatcttgaagtcgtcagccaacgcattgcctggccattgacgggtgatacccagtttcaggctgacgatctgaagctcaaactgagcggtaagatgaccgactatacgttgtcgatgcgaaccgccgtgaaaggacaagatattccgccggcgaccatcacgctggatgccaaagggaatgagcggcagattaatctcgataaactcaccgtcgccgctctggagggaaaaaccgaactgaaagcgctggtggactggcagcaggcgattagctggcgtggcgaactgacgctgaatggcatcaataccgctaaagagattccggactggcccgcgaagcttaacggcgtcatgaaaaccaaaggcagcctctacggcggcacctggcagatggatgtcccggagctcaagctgaccggcaatgtgaagcagaacagcgttaacgttaacgggacgctaaagggcaacagctacatgcagtggacgatcccggggctgcactttgcgctgggcccaaacagcgccgatataaaaggcgagcttggcgttaaggagctgaatcttgacgccgccatcgatgcgccagggctggataatgcgctgccaggactgggcggcatggcaaaaggaatcgttaaagtccgcggtacggtagaagcgccgcagctgttggcggatatcaccgcccgcggcttgcgctggcaggagctgtctgtcgcccaggcgcgcattgagggcgatattaaatccaccgatcagatagcgggccatctcaacgttcgcgtagagcggatttcgcagcccgacgttaatatcaatctggtgacgcttgacgccaaaggcagcgagaagcagcatcagctacagctccgtgttcagggagaaccggtatccggtcaactctccctgacaggcagcttcgatcgcgaggcggcgcgctggaaagggacgttaagcgacacccgtttccagacgccagtggggccatggtcgttgacccgcgcgattgcgctggactaccgtaataaagaacagaaaatcagtatcgggccgcattgttggctgaacccgaacgccgagctgtgcatcccgcaaaccattgatgcgggcgccgcaggacgggcggtggtcaatctcaaccgctttgatctggcgatgctgaagccatttatgcctgataccactcaggccagtgggatctttagcgggaaagcggatgtgtcgtgggacaccacccaggagggattgccgcaggggaaggtcacgctttccggtcgtaatgtgaaggtcacgcagaccgtcaatgacgcgccgttaccggtcgcgtttgagacgctgaacctcagcgccgatctgcacaataatcgcgccgagctgggatggctgattcgcctgacgaacaatggtcaattcgatggccaggtgcaggtaaccgatcctcaggggcggcgcaatctcggcggtaacgtcaacatgcgcaatctcaatctggcgatggtcaaccctgtcttttcgcgcggcgaaaaagcggcgggaatgttaaacgccaggctacgtctgggcggcgatgtgcaaagcccgcagttgtttggtcagttgcagcttagcgcgctggatattgacggtaactttatgccgtttgagatgcagccgagccagctcaccatgaactttagcggtacgcgttcgacgctcgccggtatcgtgcgaacacaacaagggcaaattaacctgaacggcaacgccgactggagtcagattgacaactggcgcgcgcgggtgacggcgaaaggcagccgggtgcggattaccgttccgccgatggtgcgcctggatgtctcgccggatgtggtctttgacgcgacgccttcgctgttcacgttggatgggcgtgtggacgttccgtgggcgcgaattgtggtgcacgacctgccggagagcgcggtcggcgtctccagcgatgtggttatgctcaacaatgacctgcaaccagaaacgccgcagacagcgtctattcccatcaacagtaatctgacggtccacgtcggcaacaacgtgcgcatcgacgccttcgggcttaaagcgcgtttgaccggcgatttgaaagtcgcgcaggataagcaggggctggggctaaatggtcaaatcaatattcctgacggccgattccgcgcctacggccaggacctgcttgtccgtaaaggcgagctgctgttctccggcccgccggatcagccgctgctcaatatcgaagcgatccgtaaccctgacgccaccgaagacgatgttattgcgggcgtgcgcgtcacaggcacagctgatgaacccaaagcggaaatcttctccgatccggcgatgccgcaggctgaagcgctttcttatctgctgcgtgggcaggggttggacagcaatcagagtgatagcgcagcgatgacctccatgcttattggcctgggggttgcgcaaagtggtcaggttgtgggtaaaatcggagagacattcggtgtaagtaatctggcgctggacacgcaaggggtgggcgattcgtcccaggttgtggtcagcggctatgtactgccgggtctacaggtgaagtatggtgtagggatatttgactctctggcgacgctcacgttacgttatcgcctgatgcctaagctatatctggaagcagtgtctggcgtagatcaggcacttgatttgctctatcagtttgagttttag

SEQ ID NO: 39117 - DNA, 567 bp, Salmonella typhimurium
gtggcaaagtttgtacccgcaatttttctcgaccgtgacggcaccattaatgtggatcacggctacgtacatgaaatcgatgcatttgagtttatagacggcgttattgacgctatgcgcgagctaaaaaaaatgggctatgcgttggtggtggtgacgaaccagtccggaatcgcgcgcggcaaattcactgaggcgcagtttgaaacgttaaccgaatggatggactggtcgttggcggatcgcgatgttgatttggacggcatctattattgtcctcaccatccgcagggcagtatagaagagttccgtcaggtatgtgattgccgcaagccgcatccaggaatgcttatctcggcgcgtgatttcctgcatatcgatatggcggcttcttatatggtgggagacaagctggaagatatgcaggcggcagcggcggcaaatgtcgggacaaaagtgctggtgcgtacgggcaaaccggtcacggcagaagcagaaaacgcggcggactgggtgttaaacagccttgctgacctgccatcagcgataaaaaagcagcaaaaataa

SEQ ID NO: 39118 - DNA, 804 bp, Salmonella typhimurium
atgactatccctgcattcggtttaggtacttttcgcctgaaagacgacgtggttatcgcttctgttaaaacggcgcttgaactgggctaccgtgctgtcgacactgcgcaaatctatgataatgaagcggctgttggacaggcgattgctgagagcggcgtaccgcgtaatgagctgtacatcaccaccaagatctggattgaaaaccttagcaaagacaagctaatcccaagcctgaaagagagtctgaaaaaactgcgtaccgattatgtcgatctgacgctgatccactggccatctccgggtgatgccgtgtctgtcgaagaatttatgcaggcattgcttgaagctaaaaaacaagggctgactcgcgaaattggcatttcaaacttcaccattccgttgatggaaaaggctattgccgcggtgggcgcagacaatatcgccaccaaccagattgagctatctccgtatctgcagaatcgtaaggtggttgactgggcgaaagcgcacggtatccacatcacctcttatatgacgctggcatacggtaaggcgctgaaagatgaagtgattgcgcgcattgcggctaaacataatgcgaccccggcgcaggttattctggcatgggcaatgggtgaaggttactccgtgatcccttcatccaccaggcgtgaaaatctggcaagcagcctgctggcgcaggatctgcatctggatgccgaagataaaaatgcgatcgcggcactggactgcaacgatcgtctggttagcccggaaggactggctcctgcctgggattaa

SEQ ID NO: 39119 - DNA, 1176 bp, Salmonella typhimurium
atgcctctcgctttatttgcactgacaataagtgctttcgctatcggtacgactgagtttgtgattgtcggcctggtgccgaccattgctcaacaactggctatctcgttaccttccgccggaatgctggtttcaatctatgcgctgggtgtggctattggcgcgccggtgctaaccgcgctgaccggacgcctgccgcgtaaacagttactggtcgcgctgatggtcttgtttacggcggggaatttgctggcatggcaggcaccgggctatatgacattaatcgtcgcccgtctgctgacgggcctggcgcacggcgtgttcttctcgattggatctaccatcgcgacaagtctggtgccaaaagagaaagcggcttctgcgatcgctattatgtttggtggtttaacggtagcgctggtcacgggcgtgccgctgggaacatttatcggtcagcattttggctggcgtgagaccttccttgcggtatcactgttaggcgtgattgcgctgatgagcagtcaattgctgattccggccaatattcccggtcgggcggccgccagcattcgtgaccaggtgaaagtactgactcatcctcgtctgttgctgatttacgccgttacggcgctgggctacggcggggtattcacggcattcaccttcctggcgccaatgatgcaggatctggcgggattctccccggcagcggtaagctggatcttactggggtatggcgtatcagtggctatcggcaatatctggggcggtaaactggctgataagcatggtgccgtgccggcgctgaaattcattttcgccgcgctgtttgttctgcttatggtcttccaggtgacggcctccacgcagtatgctgcgctggctaccatcctagtgatgggggtctttgccttcggtaacgtaccggggttgcaggtctacgtggtacagaaagcggaacaattcacgcctaatgcggtagatgtggcgtcaggtctgaacattgcggcgtttaacattggtattgcgctgggctccgtgattggcgggcaaacggtggagcattacggtttggcgcagacgccgtggattggcgccctcattgttctggtggctttcctgctgatgggtgtcagcggacgtcttgataaacctgtacgcattgctctggagtaa

SEQ ID NO: 39120 - DNA, 930 bp, Salmonella typhimurium
atggaaaatgtaacctttgtaagtaatagtcatcagcgtcctgccgcagataacttacagaaattaaaatcacttttgacaaatacccggcagcaaattaaaagtcagactcagcaggttaccatcaaaaatctttatgtaagcagtttcactttagtttgctttcggagcggtaaactgacgattagcaataatcacgatacgatttactgtgacgaacctgggatgttggtgctcaaaaaagagcaggtagttaacgtgacgcttgaagaggtcaatggccacatggatttcgatatactcgagataccgacgcaacgacttggcgctctctatgcacttatcccaaacgagcagcaaaccaaaatggcggtacccacagagaaagcgcagaagatcttctatacgcctgactttcctgccagaagagaggtatttgaacatctgaaaacggcgttctcctgtacgaaggatacaagcaaaggttgcagtaactgtaacaacaaaagttgtattgaaaatgaagagttaattccttattttctgctgttcctgcttactgcttttctccgactcccggagagttatgagatcatccttagctcggctcagataacgttaaaggagcgcgtttacaacattatatcttcgtcacccagtagacagtggaagcttacggatgttgccgatcatatatttatgagtacgtcaacgctcaaacggaaacttgcagaagaaggtaccagctttagcgacatctacttatcggcaagaatgaatcaggcagcaaaacttttacgcataggcaaccataatgttaatgctgtagcattaaaatgtggttatgatagcacgtcctacttcattcaatgtttcaaaaaatattttaaaactacgccatcgacattcataaaaatggcgaaccattaa

SEQ ID NO: 39121 - DNA, 1011 bp, Salmonella typhimurium
atgactttaaaagcaggtattgtaggtatcggcatgatcggctccgatcacttaagacgtctggccaacaccgtgtcgggtgtagaggttgttgccgtatgtgatatcgtcgcgggtagggcgcaggcggcgctggataagtatgcgatcgaagccaaagattataatgactatcacgatctgattaatgataaagacgttgaagtggtcatcattaccgcatcaaatgaggcgcacgccgatgtagccgttgccgcgctaaatgctaacaaatatgttttctgtgaaaaaccgctagcggtgacggctgcggattgtcagcgtgtgattgaagcagagcagaaaaatggtaagcgcatggtgcagattggttttatgcgccgctacgacaaaggttacgttcagctgaaaaatattatcgacagcggcgaaatcggtcagccattaatggttcatggacgtcattacaatgccagcacggtgccagaatacaaaacgccacaggctatctatgaaacattgattcatgaaattgacgttatgcactggctgcttaacgaagattataaaaccgttaaggtttacttcccgcgccagtccagcctggtgaccactctgcgtgatccgcagctggttgtaatggaaaccacctccggcatcaatattgtggttgaagtatttgtgaactgccagtatggctacgacattcactgcgatgttaccggcgagaaaggaatggcggagctgccaaccgtcgccagcgccgcggtacggaaagcggcgaagtatagcaccgacatcctggttgactggaaacagcgctttattgatgcctacgacattgagttccaggatttcttcgatcgtctgaacgcaggattgccgccggcaggcccaacgtcatgggatggttatctggctgcggttaccgctgatgcctgcgtgaagtctcaggaaacagggaataccgagattgttgaattaccctcaaaacctgatttctacaaataa

SEQ ID NO: 39122 - DNA, 213 bp, Salmonella typhimurium
atgtccggtaaaatgactggtatcgtaaaatggttcaacgctgataaaggcttcggctttattactcctgatgacggttctaaagacgtgttcgtacacttctccgctattcagaacgatggttacaaatctctggacgaaggtcagaaagtttccttcaccatcgaaagcggcgctaagggcccggcagctggcaacgtaaccagcctgtaa

SEQ ID NO: 39123 - DNA, 2640 bp, Salmonella typhimurium
atggaaactcctgtttcacgcagtgcgttgtatggaaaactggccggcccactattccggtcgctggaatcggcaacggcattttgcaaactacgctctaatccctgggttgagctgactcactggctgcaccagttaacacagcagcccgataacgatattctccacgttcttcggcattaccagatccctctttctgatgtggagaaagcgttactccggcaactggatatgctgcccgccggggccagcgccattagtgatttttctcaccatatcgatctcagcgttgaaaaggcctggatgctggcgagcgtccgttacggcgataacaaaattcgcagcggctggttgctgctggccttgttgaccacgccagaactgcgtcgggtactgagcagtatctgcgcgccgctggccacgcttccggttgatgaactgacggaaatactgccctcgttgatcgaaacatcgccggaagcgcaggagcgcccttacgacggctccggcctggcatcagccattcccggtgaaagcagtcaggcgattcccaacggcgggcaggacggtaaatccgcgctggcaaaatactgtcaggacatgacggcacaggcgcgcgacggcaaaatcgacccggtgacggggcgtgagcatgaaatccgcaccatgacggatattctgctgcgccgtcgccagaataatccactactgactggtgaggcgggcgtcgggaaaacggcggtcgtcgaaggttttgccctcgcgattgcgcagggggaagtgccgcccgcgctgcgggaagtacggctactggcgctggacgttggcgctctgttggccggagccagcatgaaaggcgagtttgaatcgcgtctgaaagggttactggaagaggccgggcgctcgccgcagccggttattctgtttgtcgatgaagttcacactctggtgggcgcgggcggcgcatccggcacgggcgatgccgctaacctgctgaaaccggcgctggcgcgcggcaccctgcggactatcggcgccaccacctggagcgaatacaagcgccatattgagaaagatccggcgctgacccgtcgttttcaggtgttgcagattgccgaaccggaagagatccccgcaatggaaatggtgcgtggtctggtggatacgctggaaaaacaccataacgtactgattctggatgaggcggtacgtgcggcggtacagctttctcaccgctacattcccgcccggcagttgccggataaggccatcagcctgctggataccgccgcggcccgcgtggcgctgacgctgcacacgccgcctgccagcgtacagttcctgcgccagcagctaaaagcggcggaaatggaacggtcgctgttgcagaagcaggaaaaaatggggattcagtcagatgagcggcgcgatgcgctgatggcgcgaattttctcgctcaacaatgaactgactgcatccgaatcccgctggcagcgggagctggaactggtacatacgttgcaggaactgcgtctcgcagagtctgatgctgatgacaaaaccacgctgcaacaggccgaaacggcgctaagggagtggcagggcgacgcgccggtggtgttcccggaagtcagcgcggcggttgtcgcggcgattgtcgccgactggaccggtattcctgctgggcgcatggtgaaagatgaggccagccaggtgctggaactgcctgcccgactggcgcaacgcgttaccgggcaagacggcgcgctggcgcagattggtgaacgtattcagaccgccagggcgggactgggcgatccacgcaaaccggtgggcgtgtttatgctggccgggccgtccggtgtcggtaaaaccgaaaccgcgctggcgctggcggaggctatctacggcggcgagcagaacctggtaaccatcaatatgagcgagttccaggaggctcacaccgtttccacgctgaaaggcgcgccgcccggctatgtgggctatggcgagggtggtgtgctgacggaagcggtgcgtcgccacccctggagcgtagtgctgctcgacgagatcgaaaaagcgcaccatgacgtccacgaactcttctatcaggtgtttgacaagggtgggatggaggacggcgagggtacacatgtcgatttcaaaaacaccacgctattactcaccaccaacgtgggttccgacctcatcagccagatgtgtgaagatccggccttaatgcccgatgctacggggcttaaagaggcgctaatgccggaattgcgcaagcatttcccggcggcatttctgggccgcgtgacggtgatcccttacctgccgctggacgaaacgtcgcgtggcgtgattgcccgtctgcaccttgaccggctggtggcgcggatgagtgaacagcacggcgtgacgctgacgtatagcgaggaactggtcgcacatattgtggcgtgctgtccaatgcatgaaacgggcgcgcggttgctgattggctacatcgaacagcacattctgccacgactgtcgcgctactggttgcaggccatgacggaaaaagccgcgatcaggcagattgatatcggcgttaatggtgatgagcagattgtttttgagatcgtttgctga

SEQ ID NO: 39124 - DNA, 996 bp, Salmonella typhimurium
atgcagcctaaaattaactggattgataacctgcgagggatcgcctgtttaatggtagtgatgatccatactacaacgtggtacatcaccaacgcccacagcgtcagcccgctaaactgggatattgcgaatgtcctgaattcggcttcgcgcgttagcgttcccctgttttttatgatttcaggctatcttttttttggcgagcgctgcgcgcaaccgcggcattttttacgtatcgccctgtgccttatcttttacagcgttgtcgccctggcttacatttcactttttacttcgatcaacgtcgagctttcgctaaaaaatgtgctgcaaaaacccgtgttttaccacctgtggtttttctttgcgattacggtgatctacctggtatcgccattaatccaggtaaaaaacgtgagcggcaaaatgctcctgatgctgatggtgatcattggtattattgctaacccaaatactgtgccgcaaaaaatcggcggcgttgaatggttgcccatcaatctgtatatcagcggcgacacgttctactacattctctacggtatcctgggccgcgccattggaatgatggagacgcaaaagtcatcgctgacgcttatctgcactgccctgttcatcatcgcggtatttgttatttctcgcggcacattgcatgaattacgctggcgcggaaattttgccgatacctggtatctgtattgcggtcccatggtgtttatttgcgccgtctcactgttcacggtagttaaaaataagctgaatgcgcggacgttacctggactggggcttatctcccgccactcgttgggcatttatggtttccacgcactgattatccatgcgctacgtactaatggtctggagttaaaacgttggccgccgttagacatcgtgtgggtttttgccgcgacggtgacaggaagcctgctactttccatgctgttacagcgtattgataaacggaaatgggttagctaa

SEQ ID NO: 39125 - DNA, 4095 bp, Salmonella typhimurium
atgtatgaagcagcccgtgtggatgatcctatctaccacaccagcgcgctcgccgggtttcttatcggcgctatcatcggcatcgccattatcgcgcttgccgcctttgccttctttagctgcggttttcttgccgggctgattctgggttttatggccgatcaaatagcctccggggtattgcaactgggcgaggccatcgggcgctccatccaccacacggcaggaaaaatcctcaccggttcggagaatgtcagcaccaacagtcgcccggcggcgcgcgcggtactgagtacggtgaaatgcgataaccatatcgcagaaaaacgcatcgcccaagggtcggaaaatatctacatcaacagccagcccgccgcccgtaaggatgaccacaccgaatgcgacgcggtgattgaagacggttcgccgaatgtgtttctcggcggcggcacacagacggtactggaaatcagttctgaaattccggactggctgcgcaaggtggtggatgtattgtttgtcgtggcgagtctgctcggcgggctggccggggcgtggcggcaggcggcaaagctggggacgaaatttggcactaaatgtgccgctaagtttatcggcggggagcttgtcgggatggccgtgggtgaggctatcagcgggctgttcagcaatccggtggatgtgaccaccgggcagaaaatcctgctgccggaaacggacttcaccctgcccggtcgcctgccggtcacctgctcgcgtttttacgccagccacctggaaactgtgggactgttgggacggggctggcggctgaactgggaaaccagcctgcgcgatgacgatgaacacatcacgctgaccggcgtacaggggcgggaactgcgttacccgaaaacgatgctgacgcccggccaccagatatttgacccggaagaacagttatacctcagccgcctgcatgacgggcgttacgtgctgcattacaccgatcgcagctattacgtatttggtgattttgacagtgacggcatggcatacctgctgtttatggagacgccgcaccgccagcgcattgtcttcgggcacgaaggaggcagactggtacggatagcctccagcagcgggcatcacctgttactgcaccgcacacagaccccggcaggggagcggctgtcgcgaattgaactggtgcagggcggcacccgtggcaatctggtggagtaccggtatgacgataacggtcaactgaccggcgtggtgaaccgggcgggaacgcaggtgcgtcagtttgcttatgaaaacgggctgatgacggcgcacagcaatgcgacggggttcacctgccgctaccgctggcaggaactcgacggcgcgccgcgcgtgacggagcacgacaccagtgacggcgaacattaccgctttgactatgattttgccgcaggcaccaccaccgtcaccggcaggcagggggagacatggcagtggtggtacgacagggaaacgtatatcaccgcgcaccggacgccgggcggtggaatgtaccgcttcacgtacaacgaagaccacttccctgtcaacattgagctgcccggcggtcgcacggtggcgtatgaatatgacatccagaaccgggtggtgaagacgacagatccggaaggccgggtgacgcagacgcagtggaacggcgagttcgacgaaatcacgcgcacggcgctggacgatgacgctgtctggaaaacgcagtacaacgcccacggccagccagtgcaggagacggacccggaagggcgggtgacgcagtacgcttacgatgaacaggggcagatgtgcagccggacggatgcggcgggcggcacggtggtgacggcgttcgacagccgggggcagatgacgcggtacaccgactgttcagggcgcagcacaggatatgaccacgatgaggacggcaacctgacgcgggtgacggacgcggaagggaaggtggtacgcatcagctacaaccgacttgggttgccggagacggtaaactcaccggggaaacagcaggacaggtatacctggaatgcgctggggctgatgagcagccaccggcgcatcacggggagcgtggagagctggcggtatacgccgcgcggtctgctggcggcgcacacggatgaggagaagcgcgagacgcgctggcagtacacgccggaaggccgggtggcagcgctgaccaacggcaacggggcgcagtaccggttcagtcacgatgcggacggcaggctggtgcgtgaggttcgcccggacggactgagccgtacttttatcctggacgacagcggttatctgacggcgatacagaccacgggcacgcagggcggcgtgcggcgggagacgcagcagcgggatgcgctgggccgtctgttacggacggagaatgaacacggccagcggacgttcagctacaaccggctggaccagataacggcagtgacgctcacgcccacggaggcggggcaacagcagcaccggatgcaggccgacacggtgcgttttgagtatgaccgcagcggctggctgacggcggagcacgcggggaacggtagcatatgttatcagcgcgacgcgctgggcaacccgacggacatcacgctgccggacgggcagcacctgacgcatctgtattacgggagcgggcatctgttacagacggcgctggacggcctgacggtgagcgagtatgagcgcgacagcctgcaccgtcagataatgcgcacgcaggggcagcttgcgacgtacagcggctatgacgacgacgggctgctgagctggcagcgcagtctggcgtccggcagtgcccctgttcttcctggccagcgcccggcgcggcagggctgcgtgacgtcgagggactattactggaacaaccacggcgaggtgggcacgattgacgacggcctgcgtggcagcgtggtgtacagctatgacagaagcggttacctgaccgggcgctcaggtcagatgtatgaccatgaccgttattattacgataaggcgggcaacctgctggataacgaagggcagggagcggtgatgagcaaccggctgccgggctgtggtcgtgaccgttacggctataacgagtggggcgagctgaccacgcggcgcgaccagcaactggagtggaacgcgcaggggcagctgacgcgggtcatcagcggcaacacggagacgcactacggctacgatgcgctggggaggcgaacccgcaaggcgacgtacgggcggcacacgggccatacggcgcggagccggacggactttgtgtgggaggggttcaggctgttgcaggagaacgtgcagcagcagggctggcggacctatctgtacgatgcggaacagccgtacacgccggtggcgagcgtgacggggcggggagaaagcaggcaggtgtggtattaccacacggatgtgacgggcacgccgcaggaggtgacggcggcggacggaacgctggtgtgggcggggtatatcagggggtttggagagaatgcggcggacatcagcaacagcggggcgtactttcaccagccgctgcggctgccggggcagtattttgacgacgagacagggctgcattacaatctgttcagatattatgcaccggagtgtggacggtttgtcagtcaggatccgatcgggctgaggggcgggttaaacctttatcagtatgcgccaaatcctctcaaatatatagacccacttggtttaaccgcgactgttgggcgatggatggggcctgcggaatatcagcaaatgcttgatactgggacagtagtacaaagttcaacagggacaactcatgttgcctaccctgctgatatagatgcttttggtaagcaagcaaaaaatggtgctatgtatgttgaatttgatgtgcctgaaaaatcattagtacctacaaatgaaggatgggcaaaaatagtagggccagattctatcgaagggcgattagctaaacgcaaaggtttgcctgttcctgaaatgccaacagcagaaaacataactgtaaggggcgagaaaattaatggggaagttgaagcaaaatgctaa

SEQ ID NO: 39126 - DNA, 741 bp, Salmonella typhimurium
gtgcagcagcagggctggcggacatatctgtacgatgcggaacagccgtacacgccggtggcgagcgtgacgggaaagggagaaagcaggcaggtgtggtattaccacacggacgtgacgggcacgccgcaggaggtgacggcggcggacggaacgctggtgtgggcggggtatatcaaggggtttggagaaaatgcggcggacatcagcaacagcggggcgtactttcaccagccgctgcggctgccggggcagtattttgacgacgagacagggctgcattacaatctgttcagatattatgcaccggagtgtggacggttcgtcagtcaggatccgattgggctggcgggggggctgaatctttaccagtatgcgcctaatccgattagatggatcgatcctttaggacttgctatcctggagcatcaatctaattttgatgcggcaaggagaaccggatttgaaaatgcgggtatgacaaaccctgaggatgtcactttctcgaaagtcgatcccaaaactggtactgttgttgagtttaaaggtccaaatggggctaaagttgcttatgatgcacctcatgcagatatggatgtgacagcagggcatgataaaccacatgttggttggcaatccgcaggaaaaagaggttccggaggagctaatagaggtaatattacttatgatggcccacaacatccgcatcgctctgactctaagggagatgataaatgttaa

SEQ ID NO: 39127 - DNA, 822 bp, Salmonella typhimurium
atgtcttatgcacgacatttaccggtattaatgtatcaccatgtcagtgataaacccggacagataaccttatctccccgtacgttccgggcgcagatgaaatggctggccgaatctggctggaaaaccgttactgctgcagaggtggaagctttttatcatggtgcaagattgcctcgtaaaagcgtcatgctgacctttgatggcggctggctggataactggttgcaggtttttccggtgctgcaggagtttaatctgcatgcgcatctctttcttgtgaccagtttgatcagtgacggaccggtccgtattcctgcaggcgaaccggtgtactctcatgatgagtgtcaaatgctggttaaacaaggccgggctgatgaggtcatgctgcgctggtcagaggtccgggagatgcacctcagtggccttgttgagtttcactcgcacacgcacacccaccgacgctgggaccagaagcctgtgtcccgtaatccgtcggatttgcttcgtgtcgatattcttcttagtcgtaagcggatgagggagatgctgggttattgcagtcagcatctgtgctggcctgagggctggtattgttctgactatattcatgtggctgaagagttggggttcacatacctgtataccacagaaaggcgtatgaacaatccagtcatcggttcacagcgtattggtcgtatcaacgcaaaggagcgaaagaatgtgggctggctgaaacgtcgtctgttttatcacaccacgcccggattttcttcgctgctggcccggcataagggggcacgtcggatagctgactga

SEQ ID NO: 39128 - DNA, 1251 bp, Salmonella typhimurium
atgacattttcacttttcggcgataaatttacccgccattcaggcattacccgcctgatggaggatctcaacgacggcttacgcacgccaggcgccatcatgcttggcggcggtaacccggcacacatccctgcaatgcaggattatttccagacgctactgacagatatggtagaaagcggcaaagccgctgatgcgctttgtaattatgacggtccccagggaaaaacggcgctactgaatgcactggccgtactgctacgtgaaacgctgggatgggatatcgaaccacagaatattgcgctgacaaatggcagtcagagcgcgtttttctacttatttaatctcttcgccggacgtcgcgccgacggcagtacgaaaaaggtactattcccgcttgcgccggaatacatcggctatgcagattccggtctggaagacgacctcttcgtttcggcgcggccgaatattgaactgctgccggaaggccagtttaagtatcacgtcgattttgagcatctgcacatcggcgaagaaacggggatgatttgcgtctcgcgcccaaccaacccaaccggtaacgttatcaccgacgaagagctgatgaagctggacagactggcgaatcagcacaacatcccactggtgattgataacgcttacggtgtaccgtttccgggcattatctttagcgaggcgcgcccgctgtggaaccccaatattatcctatgcatgagcctctcgaagctggggctgcccggttcccgctgcgggattatcatcgccaatgataagacgattaccgccattgccaacatgaacggcatcatcagccttgcgcccgggggcatgggcccggcgatgatgtgcgaaatgattaagcgtaacgatctgctgcggctgtcggaaacggttatcaaacctttctactatcagcgcgttcaacagacgatcgcgatcattcgtcgctatttatccgaagaacgctgcctgattcataaaccagaaggcgcaatatttttgtggctgtggtttaaagatctgccgattaccaccgagttactctatcaacgcttgaaagcgcgcggcgtgctgatggtgccgggccactatttctttcccggactggataaaccctggccgcacacacaccagtgtatgcggatgaactacgtgcctgaaccggacaaaatcgaggcgggcgtaaaaattctggcagaagagatagaacgcgcctggcgtgaaggctga

SEQ ID NO: 39129 - DNA, 2568 bp, Salmonella typhimurium
atgaatgagtcatttgataaggacttctccaaccacaccccgatgatgcagcagtatctcaagctgaaagcccagcatccggagatcctgctcttttatcgtatgggagacttttacgagctgttttatgacgacgcaaagcgtgcgtcgcagttgctcgatatttcgctgaccaaacgcggcgcatcggctggcgaacctatccctatggcgggtatcccgcaccacgccgtagaaaactacctcgcgaaactggtcaatcagggcgaatccgtcgctatttgcgaacagattggcgatccggccaccagcaaaggtcccgttgaacgtaaggtcgtgcgtatcgttacgcctggcactatcagcgatgaagccctgttacaggagcgtcaggataacctgctggcggctatctggcaggatggtaaaggttacggttacgccacgctggatatcagctccgggcgctttcgtctgagcgaacccgccgaccgtgaaacgatggccgcagagctgcagcgcaccaatcccgccgaactgttgtatgccgaagattttgctgaaatggcgttaatagagggacgccggggtctgcgccgtcgcccgttgtgggagtttgagattgataccgcccgccagcagttaaatctgcagttcggtacgcgggatctggtcggtttcggcgtcgaaaatgcctcgcgtggattatgtgcggcaggctgcctgttacagtacgtaaaagatacccagcgcacctccctgccgcatattcgttccattacgatggaacgccagcaggacagcatcattatggatgccgcgacccgccgcaatctggaaattacccagaacctggccggtggtgtcgaaaataccctcgccgcggtgcttgactgtaccgtgacgccaatgggtagccgaatgcttaaacgctggctgcatatgccggtacgaaataccgacatattacgtgaacgccagcagaccatcggcgccttgcaggacaccgtcagcgaactgcaaccggtgctgcgtcaggtcggcgatttggagcgtatccttgcgcgtctggcgctgcgcaccgcgcgtccgcgcgatctcgcccgaatgcgtcacgccttccagcagctgccggaattgcacgctcagcttgaaaccgttgacagcgcgccggtacaggcgttgcgtaaaaaaatgggcgatttcgccgagctgcgcgacctcctggaacgcgccattattgacgcgccgccggtactggtccgcgacggcggcgttattgcgcccggctaccatgaagagctggacgaatggcgcgcgctggcggacggcgccaccgattatctcgatcgtctggaaattcgcgagcgcgagcgtaccgggctggatacgctgaaagtcggctataacgcggtacatggttattacattcagattagccgtggtcaaagccatctggcgcccatcaattatgtgcgtcgccagacgctgaaaaatgccgaacgctacattattcctgagcttaaagagtacgaagataaagttctgacctcgaaaggcaaagcgctggcgctggaaaaacagctatatgacgaattgtttgatctgctgttgccgcatctggccgatttacagcagagcgccaacgcgctggcggagctggatgtgctggttaacctggccgaacgcgcctggacgctgaattacacctgcccgacatttaccgataaacccggtatccgtattaccgaaggtcgccacccggtggttgaacaggtactgaatgagccgtttatcgctaacccgctcaatttatcgccgcagcgccggatgttgatcattaccggccccaatatgggcggtaaaagtacctatatgcgacaaacggcattgattgccctgctggcctatatcggcagttacgttccggcgcaaaacgtggaaatcggccccatcgaccgtatttttacccgcgtcggcgcagcggacgacctggcctccgggcgttcgacctttatggtggagatgaccgaaaccgcgaacattctgcataatgccacggaaaacagtctggtattgatggatgaaatcgggcgcggtacctccacgtatgacgggctgtcgttggcctgggcctgcgcggagaatctcgcgaataagattaaagcgttaacgctgttcgctacccactacttcgagctgacccaattaccggagaaaatggaaggcgtggcgaacgtccacctggatgcgctggaacacggcgatactatcgcgtttatgcacagcgtgcaggacggcgcggcaagtaagagctatggcctggcggtcgcggcgcttgcgggcgtccctaaagaagtcatcaaacgcgcgcgccagaaactccgcgagctggaaagcatctcgcccaatgcggcggcaacgcaggtggacggcacgcaaatgtcgttgcttgccgccccggaggagacatcgcctgccgttgaagcgctggagaatctcgatccggactccctgacgccacgccaggcgctggagtggatctatcggctgaaaagtctggtgtaa

SEQ ID NO: 39130 - DNA, 1251 bp, Salmonella typhimurium
atgctggaacaaatgggcattgctgctaaagcggcgtcgtataagctggcgctgctctccagcggcgaaaaaaatcgcgtgctggaaaaaatagccgatgaactggaagcgcaaatggaaagtatcctcagcgcgaacgtacaagatgttgagcaggcgcgagccaatggcctgagcgaagcgatgctggaccgcctggcgctgacccctgcgcgtctgaaagcgattgctgacgatgtgcgccaggtctgtaatctcgccgacccggtcgggcaggtgatcgacggcggtctgctggacagcgggctacgtctggagcgccgccgcgtgccgttgggcgtggttggcgttatctatgaggcgcgtccgaatgttaccgttgatgtggcttctttgtgtctgaaaaccggtaatgcggtgattctacgcggtgggaaggagacgtatcgcacgaatgccgcaaccgttcgtgtcattcagaaggcgctgaaagcttgcggtttaccggaggcggcggttcaggcgattgataatccggaccgttcgctggtcaatgaaatgctgcgtatggataagtacatcgatatgctgatcccgcgcggcggcgcaggcttgcataaactgtgccgcgagcaatccaccattccggtgattaccggcgggattggcgtgtgccatatttttgttgatagcagcgcagacatcgccccggcgctgaagattattgttaacgccaaaacccagcgcccgagcacctgtaacacggtggaaaccttgctggtgcatcaggacatcgcagaacgctttttgcctgcgctgagcaagcagatggcggagagcggcgtaacgttgcatggggatgaaaccgtcatgcaggtactgcatggccctgccaaactggtgccgctgaaaccggaagagctggataacgagtttctgtctctggatctgaacgttgtggtggtcgaaaatatggatggcgctatcgcccacattcgcgaacatggtactcagcactccgatgcgattttaacgtgcgatatgcataatgctgcgcgtttcgtgaacgaagtggattccgctgcggtttatgtcaacgcctctacccgttttaccgacggcgggcagtttgggcttggcgcagaagtggcggtcagcacgcagaaattacatgcccgcggtccgatggggcttgaagcgcttaccacctataagtggatcggctttggcgatggtacgattcgtgcgtaa

SEQ ID NO: 39131 - DNA, 1242 bp, Salmonella typhimurium
atgaaaggcagtaatactttccgctgggcaatagcgattggggttgtagtggccgccgccgcattctggttctggcatagccgtagcgaaagcccgaccgccgcgccaggcgtcgccgcgcaagcgccgcataccgcctccgcaggtcgccgcggtatgcgcgacggccctctggcgccggtacaggccgcgaccgcgaccacgcaggccgtaccgcgctatctgagcgggctgggtaccgtgaccgccgcgaataccgttacggtgcgtagccgcgtggatggtcaactcatcgccctgcactttcaggaaggtcagcaggtcaacgcaggcgatctgctggcgcaaatcgatcccagccagtttaaggtcgccctggcgcaggctcagggacagttggcgaaagataacgctacgctggcgaatgcgcgtcgtgatctggcgcgctatcagcaactggcaaaaaccaatctggtttcccgtcaggaactggatgcgcaacaggcgctggtcaacgaaacccagggaaccattaaagcggatgaagctaatgtcgccagcgcgcagttacagctcgactggagtcgtatcacggccccggtctcgggacgcgtgggtctgaaacaggtggatgtcggcaaccagatttccagcagcgataccgcaggtattgtcgtcattacgcaaacgcacccgattgatctcatttttactctgccggaaagcgatatcgcgaccgtagttcaggcacagaaagcggggaaagcgctggtcgtagaagcctgggatcggactaactcgcacaaattgagcgaaggtgtgttgctcagtctggacaaccagattgatcccacgacgggaacgatcaaaattaaagcgcgctttaccaatcaggacgatacgctgttccccaatcaatttgtgaacgcccggatgctggtcgataccgaacaaaatgccgttgtggtgcctgccgcggcggtgcaaatgggcaatgagggccactttgtgtgggtgctgaacgacgaaaataacgtcagcaagaagcgggtaaaaatcggtattcaggataaccgaaacgtggtgatcagcgcaggcttatcggcaggcgatcgcgtcgttaccgatggtattgatcggctgacggaaggcgcaaaagtcgaggtcgttgagccgcaaaccaccgtggcggatgaaaaatccccttcccgccatgaaggtcaaaaaggagcgcgcgcctga

SEQ ID NO: 39132 - DNA, 3123 bp, Salmonella typhimurium
atgcaggtattacctccgggcagcacgggcggcccttcgcgtctgtttattctgcgccccgtggccaccactctgctgatggcggcgattttactcgccgggattatcggctatcgcttcctgcccgtcgccgctttgccggaggtcgactaccccactattcaggttgttacgctctaccctggcgccagcccggatgtcatgacctccgccgtcaccgcgccgcttgagcgccagttcggccagatgtcaggactgaagcagatgtcgtcgcaaagctccggcggcgcgtcagtggtaacgctacagtttcagttgacgctgccgctggacgttgccgagcaggaagtacaggcggcgattaacgcagccaccaatttattgccttccgacctgccgaatccgccgatttacagcaaagtcaatccggcggacccgccgattatgacgcttgccgtcacctcaaactcgatgccgatgacccaggtagaggacatggtagaaacccgcgtggcgcagaagatctcacaggtctccggcgtcgggctggtgacgcttgccggcgggcagcgccctgcggtacgcgtaaaactgaatgctcaggctgtcgccgcgctcggtctgaccagcgaaacggtccgtaccgcaattaccggcgccaacgtcaactcggcgaaaggcagtctggatggccccgaacgggcggtgacgctttctgctaacgatcagatgcagtctgccgacgaataccgcaggcttatcatcgcgtatcaaaacggcgcgccggtacggctgggcgatgtcgccaccgtcgaacagggggcggaaaatagctggctcggcgcatgggcgaatcaagcgccggctatcgtgatgaacgttcaacgccagcctggcgccaatatcattgcgacagcggacagcattcgccagatgctgccccagcttaccgaaagcctgccaaaatcggtgaaggtcacggtcctgtccgatcgcaccaccaatattcgcgcttccgtgcgcgatacccagtttgaactgatgctggcgatcgcgctggtcgtcatgattatctatctgtttttacgtaatattcccgccacaattattcccggcgtcgccgtaccgctgtcgcttatcggcacctttgcggtgatggtgtttttggatttttccattaataacctgacgctgatggcgctcactatcgccacgggtttcgtggtggacgatgcgattgtggtgatcgagaacatctcgcgctacatcgaaaaaggagaaaaaccgctggcggcggcgctcaaaggcgcgggtgaaatcggctttaccattatttccctcaccttttcactgattgcggtgctgatcccgttgctctttatgggcgatattgttggtcgactgttccgcgaatttgcggtgacgttggcggtagcgattttaatctccgccgtcgtctctttgacgctcacgcccatgatgtgcgcgcgtatgctcagccagcagtctctgcgtaaacaaaaccgcttttcccgcgcctgcgagcggatgtttgaccgcgtgatcgccagctacggacgtggattagcgaaagtgctcaaccatccgtggcttacattgagcgtggcattcgccacgctcctgctcagcgttatgctgtggatagtcattccgaaagggttctttccggtacaggataacggcattatccagggaacgctgcaggcgccgcaatcgtcatcgtatgccagtatggcgcaacgtcagcgccaggtggcggagcggatattacaggacccggcggtgcaaagcctgacgacttttgttggcgtagacggcgctaaccccacgctgaatagcgcgcgcctgcaaattaacctcaagccgctggatgcgcgtgatgaccgcgtgcagcaggtgatctcccggctgcaaaccgccgtggcgacgattcccggcgtggagctgtatctccagccgacgcaggatttaaccatcgacacgcaggtcagccgcacacagtatcagtttaccctgcaggccacgacgctcgatgcgctcagccactgggtgccaaaactgcagaacgcgctacagtcgttgccacagctctctgaggtaagcagcgactggcaagatcggggattagcggcctgggtgaatgtcgaccgcgacagcgccagccgtctgggtatcagcatggcggatgtggataacgcgctctacaacgcgttcggacaacgcctgatttcaacgatttatacccaggcgaaccagtaccgtgtcgtgctggaacataataccgccagcatgccgggcctggcggcgctggagacgattcgcctgacgagccgcgacggcggcaccgtaccgctcagcgcgattgcccgcattgagcagcgcttcgctccgctctccatcaatcatttagatcagttcccggttacgacattttcgtttaacgtgccggagagctattcgctcggcgatgcggtgcaggcgattctcgatacggaaaaaacgctcgccctgccagcggatattacaacgcagtttcagggtagtacgctcgccttccaggcggcgctaggcagcaccgtctggcttattgtcgccgccgtggtggcgatgtatatcgtgctcggcgtgctgtatgagagttttatccatccgattacgattctctcaacgctgcctacggcgggcgtcggcgcgctgctggcgctgatcatcgctggtagcgagctcgatattatcgccattatcggcattattttgctgatcggcatcgtgaagaaaaacgccatcatgatgattgacttcgccctcgccgccgaacgcgaacaggggatgagtccgcgcgacgctatcttccaggcctgtctgctgcgttttcgaccgattctgatgaccacgctggcggcgttgctcggggcattgccattaatgttgagtaccggcgttggcacggaattacgtcgcccgttggggatcgcgatggtaggcggcttactggtcagccaggtattaactctgtttaccacaccggtgatttatctcctgtttgaccgcctgtcgctgtacgtgaaaagtcgctttccgcgccataaagaggaggcgtag

SEQ ID NO: 39133 - DNA, 3081 bp, Salmonella typhimurium
atgcgctttttcgcccttttcatctaccgcccggtcgccaccattttgattgccgccgccattacgctgtgcggcattctgggctttcgtctgctgccggtcgccccgctgccgcaggtcgatttcccggtgattatggttagcgcctcgctgccgggcgcctcgccggaaaccatggcttcgtcggtggcgacgccgttggaacgctctttgggacgcattgcaggcgtcaatgaaatgacctccagcagctcgctcggcagtacacgcattattctcgaatttaatttcgatcgtgatattaacggcgcggcgcgcgacgtgcaggccgccattaacgccgcgcaaagcttgttgccaggcggaatgcccagccgcccgacttatcgcaaggccaacccgtccgacgcgccgattatgattttaacgcttacctcggagagctggtcacagggcaaactgtatgatttcgcctctacccaactggcgcaaaccatcgcgcaaattgacggcgtcggcgatgttgacgtcggcggcagctccctgcccgcagtacgtgtaggcttaaacccgcaggcgctctttaaccagggcgtctcgctggatgaggtccgcgaagcgatcgacagcgccaacgtacgccgaccgcaaggcgcaattgaagatagcgtccaccgctggcaaatccagaccaacgacgaactgaaaaccgccgccgaatatcagccgctgattattcactataacaacggcgcggcggtacgcctgggcgacgtcgccagcgtcaccgactcggtgcaggatgtccgtaacgccgggatgacgaacgctaaacccgctattttgttgatgatccgcaagctgccggaggccaatattattcagacggtcgacggcatccgggcaaaactgccggaactgcgggcaatgatccccgccgctatcgatttacaaatcgcccaggatcgttcgccgacgattcgcgcatcgctgcaagaggtagaagagacactggctatctctgttgcgctggtgatcctggtggtgtttttattcctgcgctccgggcgcgccacgctaattcccgccgtcgccgttcccgtttcgctcatcggcaccttcgccgccatgtatctgtgcggcttcagcctcaacaatctgtcgctgatggcgctgactatcgcgaccggatttgtcgttgatgatgccattgtggtgctggaaaatatcgcccgccatctggaggcgggaatgaaacctttgcaggcggcattacagggtacgcgagaagttgggtttacggtcatctccatgagtctgtcgctggtggcggtatttctgccgctgctgttaatgggcggcctgccaggacgattattacgggaattcgccgttaccctctcggtggcgattggcatttcgctggtggtctcgctcacgctgacgccgatgatgtgcggctggatgcttaaatcaagcaaaccgcgcacccaaccgcgtaaacggggcgttggccgtctgctggtcgccttgcaacagggttacggcacgtcattaaaatgggtgcttaaccatacgcgtcttgtcggtgtggtttttcttggcaccgttgcgctgaacatctggctttatatcgccatccctaaaacattctttccggagcaggacaccggcgtgttgatgggcggtattcaggctgaccaaagcatctctttccaggccatgcgcggcaagctgcaggattttatgaaaattattcgcgacgatccggcggtgaataatgtcactggttttaccggcggatcgagggtgaatagcggcatgatgtttattacgctgaagccgcgcggcgaacgcaaagagacggcgcagcaaatcattgatcgactgcgggtcaaactggcaaaagaacctggcgccaggctgtttctgatggcggtacaggatattcgcgtcggcgggcggcaggctaacgccagttaccaatatacgttgctgtctgactctctggcggcgctgcgcgaatgggagccgaaaatacgcaaagcgctctcggccctgccgcaactggcggacgtaaactccgaccagcaggataacggcgcggagatgaaccttatctacgaccgcgacaccatgtcacggctgggtattgatgttcaggccgcaaacagtctgttaaataatgctttcggccagcggcaaatttccaccatttatcagccgatgaaccagtataaagtggtgatggaagtcgatccgcgctatagccaggatatcagcgcgctggagaaaatgttcgttatcaaccgtgacggaaaagcgattcccctctcttatttcgcccaatggcggcccgccaatgcgccgctgtcggtgaaccatcagggactttccgcggcgtccacgattgcctttaacctgccgaccggcacatcgttatcgcaggcgacagaggccattaatcgcaccatgacgcagcttggcgtcccctcgacggtacgcggcagtttttccggaacggcgcaagtcttccagcagaccatgaattcacagcttattttgatagtggcggcgatcgctaccgtctacattgtgctggggatactgtacgaaagctacgtccatccactgaccattctctctactctgccatcggcgggcgttggggcgcttctggcgctggaactcttcaatgcccctttcagcctaatcgccctgatagggatcatgctattaattggcattgtgaagaaaaacgccattatgatggtcgattttgcgcttgaagcgcaacgaagcggcggcctgacgccggaacaagccattttccaggcctgcttgttacgcttccgtccaataatgatgaccacgctggcggcgctgttcggcgcactgccattggtgttatctggcggagacggttcggaattacggcagccgctggggataaccattgtcggcggtttggtcatgagccagctcctgacgctctataccacgccggtggtgtacctctttttcgatcgtctgcggctacgtttttcgcgtaaaaatagcaaaccggtagtagagatatga

SEQ ID NO: 39134 - DNA, 1404 bp, Salmonella typhimurium
atgaaagtctggcggcccggaatcaccggcaagctgtttctggcgatcttcgccacctgcatcgtgctgctgatcagtatgcattgggccgtgcgcgtcagttttgaacgcggatttattgactatatcaaacacggcaacgagcagcggctacaaatgctgggcgatgcgctgggcgaccagtaccagcaacacggcaactggcgttttttacgcaacaacgatcgcttcgttttccagattttgcgttcatttgagcatgacaacgaccgcgataaacccggccccggtatgccgccgcacggttggcgcacccaattctgggtcgtcgatcaaaatggccgggtactggtcggcccacgcggtccggtgccgcatgacggtactcgccgtcccattctggtcaatgacgtcgaagtcggcgcgattatcgcctctcctgtcgagcggctgacgcgcaatacggatattaattttgatatgcagcagcggcgcgccagttggatgatcgtggcgttatcaacgttgctggccgcgctggcgacatttttgctggcgcgtggcctgctcgccccggtcaaacggttggtcgaaggtacgcacagactggcggcgggggattttaccacgcgcgtgactccaaccagcgctgatgagctgggaaaactggcgcaggactttaaccagcttgccagcacgctggaaaaaaaccagcagatgcgccgcgactttatggcggatatttcccacgaactgcgcacgccgctggcggtattgcgcggcgaacttgaagccattcaggatggcgttcgccagttcacgccagaatcggttacctcgctacaggcggaagtcggtacgcttaccaaactggttgacgacctgcatcagctgtcgttgtctgacgagggcgcgctggcttaccaaaaaacgaccgtcgatcttgttcccctgttggaagtcgctggcggcgcgttcagagagcgctttaccagccgggggctaacgctacattacgcgttgccggatagtatgaccgtcttcggcgacccggatcgcctgatgcaactgtttaataatctactggaaaacagtctgcgctacaccgacagcggcggcggcctgcatatttccgccgaacaacgcgacaaatcattattcctgacctttgccgattctgcaccgggcgtcagcgatgaacagttacaaaagctttttgaccgtttttaccgcacggaagtgtcccgtaaccgcgccagcggcggttctggactggggctggcaatatgcgtcaatattgtacacgcgcataacggtcatcttcacgccgctcattcgccttttggcggggttagcattacagtagagttaccgctggatcgcgatttacagagagaagtatga

SEQ ID NO: 39135 - DNA, 1362 bp, Salmonella typhimurium
atgtttaaaccagaactcctttcgccggcgggaacgctgaaaaatatgcgttacgctttcgcttacggtgccgatgccgtctatgcgggccaaccacgctactctttacgcgtgcgtaataacgaattcaatcacgaaaatttgcagcttggcatcaacgaagcccacgcgctcggaaaaaaattctacgtggtggtgaacatcgccccgcataacgccaagctcaaaacctttatccgtgacctgaaacccgtcgtcgagatgggcccggatgcgctgatcatgtccgatccagggttgattatgctggtacgcgagcacttcccggcaatgccgattcacctgtcggtacaggctaatgccgtaaactgggcgacggtaaaattctggcagcagatgggactgacccgcgtgattctctcccgcgagctgtcgctggaagagattgaggaaattcgccagcaggtgccggatatggaaatagaaattttcgtccacggcgcgctatgcatggcctattccggccgctgcctgctttccggctacatcaataaacgcgatccgaatcagggcacctgcaccaatgcctgccgttgggaatataacgtgcaggaaggaaaagaagacgttgtcggcaacatcgtgcataagcatgaaccgattccggtacagaacgttgagccgacgctcggtatcggcgcgccgacggataaagtgtttatgatagaagaggcccaaagaccgggcgaatacatgaccgcgttcgaagacgagcatggcacctatatcatgaactcaaaagatttgcgcgctatcgcccacgtggagcgcctgacgaaaatgggcgtccactcgctgaaaatcgaaggccgcaccaaatccttttattactgcgcccgtaccgcccaggtctaccgtaaggccatcgacgacgccgccgcgggtaaacccttcgaccctacgctgctggaaacgctggaaggtctggctcatcgcggctataccgaaggtttcctgcgtcgccatacgcacgacgattaccagaattacgagtacgggtactccgtttccgaacgccagcaatttgtcggcgagttcaccggtgagcgtaaaggccaactggcggccgtggcggtgaaaaataaattctccgttggcgatagtctggagctgatgacaccgcagggaaatatcaatttcaccctggaacagatggagaacgccaaaggcgacgctatgccggtggcacctggcgatggctataccgtctggatgcccgtcccgcaggacgttacgctggattacgcactattgatgcgtaatttctcaggcgaatcaacgcgtaacccccatgctaagtag

SEQ ID NO: 39136 - DNA, 900 bp, Salmonella typhimurium
atggctaactttcccgccagcttactgatcctcaatggcaaaagcgctgataaccagccgctacgtgaggccattactctacttcgcgacgaaggcatacagattcacgttcgggtaacctgggaaaaaggcgacgcgcagcgttacgttgatgaagcccgtagactgggcgttgaaacggtgattgccggcggcggagacggtaccattaatgaagtgtcgaccgcgctcatccagatccgcgacggcgtagcccctgcactgggccttttgccgctcggcaccgccaacgattttgccaccagcgccggtattcctgaagcgctggacaaagcgctgaaactggcgattgccggaaacgcgatggaaattgatatggccatggtcaatgataaaacctgttttatcaatatggcgacgggcggttttggcacccgcattaccaccgaaacgccggaaaaacttaaagccgcattgggcggcgtctcctatcttatccacggtctgatgagaatggatacgctgacccctgatcgctgcgaaatacgtggcgaaaactttcactggcagggcgatgcgctggtgatcggcattggcaatggtcgtcaggctggcggcgggcagcaattatgtcccaccgcgctgattaacgacggactgttacagctacggatttttaccggcgaagagctgttgccggcgctgttttccacgctcacgcagtcagatgacaatccgaatattattgacggcgcctcagcgtggtttgatattcatgcaccgcatgaaatcacgtttaatctggatggcgaaccactcagcgggcaagaatttcatattgaggtgctgcctggcgcattacgctgtcggctgccgccggactgcccgttgctacgttaa

SEQ ID NO: 39137 - DNA, 1272 bp, Salmonella typhimurium
atgaaaacgacctttaaactgtcgttcatgatgttcgtggagtggtttatctggggcgcctggttcgtccccctgtggctatggctaaataaaagcgggttttccgccggtgaaataggctggtcttatgcctgtaccgccattgcggcgatcctgtcgccgattctggtcggctccgttaccgaccgttttttctcagcgcaaaaagtcctggcggtactgatgtttgcaggcgccgtgctgatgtatttcgcggcgcagcaaaccaccttcgccggattctttccgctgcttctggcctattcattgacctatatgccgaccatcgcgctgacaaacagcattgccttcgctaacgtaccggacgttgaacgcgattttccacgcattcgcgttatgggaaccattgggtggattgcctccggcctcgcctgtggattcctgccgcaaatgttaggctataacgatatttcccccaccaacattccactgctcataaccgccgcaagttcagcgttgctgggcgtatttgcgttctgtctgccagacacgccgccaaaaagcaccggcaagatggatattaaagtgatgctggggctggatgcgctggtcctgctgcgcgataaaaactttctcgttttcttcttctgttcctttctgtttgcgatgccgctggccttctactacatcttcgctaacggctatctgacagaagtaggaatgaagaacgccaccggctggatgacgctcggccagttctctgaaatcttctttatgctggcgctgccctttttcactaagcgctttggtattaaaaaggtattattgcttggtcttattaccgccgcgatccgctacggcttttttgtctatggcggcgcggagacgtacttcacttacgccctgctgttcctcggtattttgctgcacggcgtaagttacgatttctactacgtcaccgcctacatttatgtcgataaaaaagcgccggttcatatgcgtaccgctgcgcaagggcttatcaccctctgctgtcagggattcggcagcctgctgggctatcgtctcggcggcgtgatgatggaaaaaatgtttgcttatccgcaaccggttaacggtctgacattcaactgggcgggcatgtggacgtttggcgcagtgatgattgccgtcatcgcgctactgtttatgattttctttcgcgaatcggacaaagagatcactgctattgacgatcgcgatattgcgttgacacaaggggaagtaaaatga

SEQ ID NO: 39138 - DNA, 2034 bp, Salmonella typhimurium
atgactcaagtcgcgaagaaaattctggtaacgtgcgcgctgccgtacgccaacggctctatccacctcggccatatgctggagcacatccaggctgatgtctgggtccgttaccagcgaatgcgcggccatgaggttaacttcatctgtgccgatgacgctcatggcacgccgatcatgctgaaagcgcagcagcttggtattacgccggagcaaatgatcggtgaaatgagccaggagcaccagaccgatttcgccggttttaatattagctacgacaactaccactcaacgcacagcgacgagaatcgcgagctgtccgagctgatttatacgcgcctgaaagagaacggttttattaagaaccgcaccatctctcaactctacgatccggaaaaaggcatgttcctgccggaccgatttgtgaaaggcacctgcccgaaatgtaaatccgcagaccagtacggcgataactgtgaagtgtgcggcgcgacctacagcccgaccgaacttatcgaaccgaaatccgtggtgtccggcgcgacgccggtaatgcgtgactccgagcactttttctttgacctgccgtcattcagcgaaatgttgcaggcgtggacccgcagcggcgcgctgcaggagcaggtggcgaacaaaatgcaggagtggtttgaatccggcctgcaacagtgggacatttcccgcgacgcgccgtattttggtttcgaaatcccgaacgcgccgggcaaatatttctacgtctggctggacgcgccgattggctatatgggctccttcaaaaatctgtgcgataagcgcggtgacacgaccagttttgatgagtactggaaaaaagactccgatgccgagctgtaccactttatcggcaaagacatcgtctatttccacagcctgttctggcctgccatgctggaaggcagccacttccgtaagccgaccaacctgttcgttcacggttacgtgacggtgaacggcgcgaagatgtctaagtctcgcggcacctttattaaggccagcacctggctgaaacactttgacgccgacagcctgcgctactactacaccgcgaagctttcttcacgcattgatgacatcgacctgaacctggaagactttgtccagcgcgtcaatgccgatatcgtcaataaagtagtcaacctggcctcgcgtaacgccggttttatcaataagcgtttcgacggcgtgctggcggctgaactggccgatccgcaattgtataaaacctttactgacgccgctgcggtgattggcgaagcatgggaaagccgtgaattcggtaaagctatccgtgagattatggcgctggccgacatcgctaaccgttatgttgacgagcaagcgccgtgggtggtggctaaacaagaaggccgcgacgcggacctgcaggccatttgctcaatgggcatcaacctgttccgcgtgctgatgacgtatctgaaaccggtactgccgacgctttctgaacgcgttgaagccttcctgaacagtgagttgaactgggatgccatcgaacagccgctgctcggtcacaaggtcaacacctttaaggcgctctacaatcgcatcgacatgaagcaagttgaagcgctggttgaatcgtctaaagaagaggtgaaagccgcagccgcgccggttaccggcccgttagccgacttcccgattcaggaaaccatcacctttgacgatttcgccaaaattgacctgcgcgtagcattgattgaaaatgctgagttcgtagatggttctgacaaattgctgcgtctgacgctggatctgggcggcgagaagcgtaacgtcttctccggcattcgttccgcctacccggacccgcaggcgctgattggccgccagacggtaatggtcgccaacctcgcgccgcgcaaaatgcgctttggcgtctccgagggaatggtgatggccgcaggacctggcgggaaagatatcttcctgttaagccctgatgacggcgcgaagcctggccaacaggtgaaataa

SEQ ID NO: 39139 - DNA, 474 bp, Salmonella typhimurium
atgaaaaaagacccgaccctacaacaggcacatgacacgatgcggtttttccggcgtggcggctcgctgcgtatgttgttggatgacgatgttacacagccgcttaatactctgtatcgctatgccacgcagcttatggaggtaaaagaattcgccggcgcagcgcgactttttcaattgctgacgatatatgatgcctggtcatttgactactggtttcggttaggggaatgctgccaggctcaaaaacattggggggaagcgatatacgcttatggacgcgcggcacaaattaagattgatgcgccgcaggcgccatgggccgcagcggaatgctatctcgcgtgtgataacgtctgttatgcaatcaaagcgttaaaggccgtggtgcgtatttgcggcgaggtcagtgaacatcaaattctccgacagcgtgcagaaaagatgttacagcaactttctgacaggagctaa

SEQ ID NO: 39140 - DNA, 246 bp, Salmonella typhimurium
atgatcatggatgtacagacgatatttgtcatattagcctttctgctactcccgcttttttgcttccgtgaggcctggaaaggctggcgaaccggcgcggtagataaagttgtcaaaaatgcgcgaaaaccggtttatgtctatcgccatgccgatcccgtacaatattggtcttatctttttctttataccggttgcggttttttatttactggaatgattatttatcttcttttttatcgttaa

SEQ ID NO: 39141 - DNA, 1059 bp, Salmonella typhimurium
atgagcgagaaaacagaacagcctacagaaaagaaattacgtgatggccgtaaggaagggcaggttgtcaaaagtattgaaataacatcattatttcagctgattgcgctttatttgtattttcatttctttactgaaaagatgattttgatactgattgagtcaataactttcacattacaattagtaaataaaccattttcttatgcattaacgcaattgagtcatgctttaatagagtcactgacttctgcactgctgtttctgggcgctggggtaatagttgctactgtgggtagcgtgtttcttcaggtgggggtggttattgccagcaaggccattggttttaaaagcgagcatataaatccggtaagtaattttaagcagatattctctttacatagcgtagtagaattatgtaaatccagcctaaaagttatcatgctatctcttatctttgcctttttcttttattattatgccagtacttttcgggcgctaccgtactgtgggttagcctgtggcgtgcttgtggtttcttctttaataaaatggttatgggtaggggtgatggttttttatatcgtcgttggcatactggactattcttttcaatattataagattagaaaagatctaaaaatgagtaaagatgacgtaaaacaggagcataaagatctggagggcgaccctcaaatgaagacgcggcgtcgggaaatgcagagtgaaatacaaagtgggagtttagctcaatctgttaaacaatctgttgcggtagtgcgtaatccaacgcatattgcggtttgtcttggctatcatcccaccgatatgccaataccacgcgtcctggaaaaaggcagtgatgctcaagctaactatattgttaacatcgctgaacgcaactgcatccccgttgttgaaaatgttgagctggcccgctcattattttttgaagtggaacgcggagataaaattcctgaaacgttatttgaacccgttgcagccttgttacgtatggtgatgaagatagattatgcgcattctaccgaaacaccataa

SEQ ID NO: 39142 - DNA, 642 bp, Salmonella typhimurium
atgtttacggggatcgtacagggtaccgcgaaactggtatcgattgatgaaaaacccaactttcgcacccatgtggtgacgttacctgactacatgctggaggggctggagacgggggcgtcggtagcgcataacggatgctgtttgacggtgactgaaataaacggtaaccagataagttttgatctgatgaaagaaacgttgcgcatcaccaatctgggcgcgttgagggtaggtgatgaggtcaacgtagagcgcgccgccaaattcagcgatgaaatcggtggtcatctgatgtcggggcatattattacgacggcggagatcgcgaaaatcctgacctccgaaaataaccatcaggtgtggtttaaagtgcaggatgcgtccctgatgaagtatatcctgtacaaaggctttatcggcgtcgacggcatcagtttgaccgtcggcgaggtaacgccaacgcgcttctgcgtgcatctcattccggaaacgttggaacgtactacgcttggcagaaaaaaactgggtgagcgtgtgaatatcgagatcgatccgcaaacgcaggcggttgtcgataccgtagaacgcgtactggctgcgcgagaaaatgcggtcagaaatcaggccgacattggctaa

SEQ ID NO: 39143 - DNA, 738 bp, Salmonella typhimurium
atggaaatgctcgaagagcaccgatgttttggcggctggcagcagcgctggcgtcatcatgccgccacgctaaactgcgccatgacattcagcatttttcttccgccgactcaggataatgaaccgcctccggtactgtactggttgtctgggttgacctgcaatgatgagaactttaccaccaaagcaggcgcgcagcgtatcgcagcagaactgggcattgtattggtgatgccggataccagtccacgcggtgaacaggtcgccgacgatagcggatacgatttaggccacggcgccgggttttatctcaatgccacacagccgccctgggccagccattatcgcatgtacgattacctgcgcgatgagcttccggcgcttatccagacacagtttaacgtcagcgaccgttgcgccatcagcgggcactcgatgggcggccacggcgcattaatcatggcgctgaaaaatccgggcaaatacaccagcgtctctgcttttgcgcctatcgtcaaccccagccgcgtgccgtggggaatcaaagcgcttaccgcttatctcggcgaagatgaatcagcctggactgagtgggatagctgcgaattaatgctggccagccagccgcaggacgccattcctgtgctcatcgatcagggcgacagcgatcaattcctcgccgatcagcttcagcccgccgtactggcggaagccgcgcgcaaaccgcctggccgatga

SEQ ID NO: 39144 - DNA, 858 bp, Salmonella typhimurium
atgaaatacatcggagcgcacgtcagcgctgctggcggtctggctaacgcccctgcccgcgcggctgaaattggcgcaacggcctttgcgcttttcacaaaaaaccagcgtcagtggcgtgccgccccccttactccccaggtcattgatgactttaaaatcgcctgtgaaaagtatcatttctcggcggcgcaaatccttccccacgatagttacctgattaatctgggccatccggtcagtgaagcgctggaaaaatcacgcgatgcctttctcgatgaaatgcagcgctgtgaacaactcggcttaaccttgcttaattttcatcccggtagccatctgatgcagattgcacaggaggattgcctggcgcggatcgcggaatccatcaatattgccctcgcgcagaccgagggcgttacggcggttatcgaaaatacagccggtcagggcagtaatctggggtttgagtttgaacagttagccgccatcatcgacggcgtggaagataagtcgcgcgttggcgtctgtatcgatacctgccatgcctttgccgccggatacgatctgcgtacgccagaggcgtgcgaaaaaacattcgccgaattcgggaaaattgtcggatttcagtatttgcgcggaatgcacctgaacgacgccaaaagcgccttcggtagccgcgttgaccgccatcacagtctgggtgaaggcaatatcggccacgatgcgtttcgttggattatgcaggatgggcgttttgacggtattccgctgatactggagaccatcaatcctgatatctgggcggaagagattgcgtggttaaaagcccagcaaattgccgaagcgatggcctga

SEQ ID NO: 39145 - DNA, 441 bp, Salmonella typhimurium
atgaaattggaatcgccactaggttctgatctggcacggttggtgcgcatttggcgtgctctgattgaccatcgcctcaagcctctggaattgacgcagacacattgggtcacgttgcacaatattcatcaattgccgcctgaccagtcgcagattcaattggctaaagcgataggcattgagcagccatcgctggtacgcacgttggatcaacttgaagataaggggctaatttcgcggcaaacctgcgccagcgatcgtcgcgctaagcggattaaactgaccgaaaaagcggacgcgctgatcgctgagatggaagaggtcattcataaaacgcgcggtgaaattttggctgggatttcttcagaggagattgagcttctgattaaacttatcgccaaacttgaacacaatattatggaattgcactctcacgattga

SEQ ID NO: 39146 - DNA, 1182 bp, Salmonella typhimurium
atgcacaacagtcccgccgccgctgcgcctaaatcgtttgacctgacgtctaccgcctttttgatcgtcgcttttctcaccggtattgccggtgcgttacagacgccgacgctcagtatttttctgacggatgaggttcacgcccgtcccggcatggtgggtttcttttttaccggcagcgcggttatcggcattatcgtgagccagtttctggcgggtcgctcagataaaaaaggcgatcgcaaaaaactgatcgttttctgttgcgtgctgggcatgttggcctgcgtgttgtttgcctggaaccgcaactactttattttgctgttcatcggcgtctttctcagtagcttcggctctaccgccaacccgcagatgtttgcgctcgcccgtgaacatgccgatcgtacaggtcgtgaagcggtgatgttcagctcaatcctccgcgcccaggtctcattggcctgggtcattgggccgccgctggcctatgcgctggcgatgggttttagctttacggtgatgtatttgagcgcggcggtagcttttatcgtctgcggcgtcatggtgtggttctttttaccgtcaatgcgcaaagatgcgccgctggcaaccggcacgctggaagcaccgcgtcgtaatcgccgcgatacgctgttgctgtttgtcatctgtacgttaatgtggggaactaacagcctgtatatcattaatatgccgctgtttatcatcaatgagctgcatcttccggaaaaacttgcaggcgtgatgatgggcaccgccgccgggctggagattcccacaatgctgattgcaggttacttcgccaaacggttgggaaaacgcctgttaatgtgcatcgccgttgtcgccggactgtgcttttatgtgggtatgttgctggcgcacgcaccggcgacgttgctcggcttgcagttgctgaacgcgatttacatcggcattcttggcgggattggcatgctctattttcaggatctcatgccaggccaggcgggttcagccaccacgctgtataccaataccattcgcgtcggctggatcattgccggttcgctggcgggaatcgccgcagaaatctggaattaccatgcggtcttctggtttgcgttagtcatgattgtcgccaccatgttctgcctggcgcgtattaaagatgtttaa

SEQ ID NO: 39147 - DNA, 1275 bp, Salmonella typhimurium
atggcaagcagtaacttgattaaacaattgcaagagcgggggctggtagcccaggtgacggacgaagacgcgttggcagagcgactggcgcaaggcccgatcgcgctctattgcggcttcgatcctaccgctgacagcttgcatttggggcatctggttccattgttatgcctgaaacgcttccagcaggcagggcacaaacctgttgcgctggtaggcggcgcgaccggtctgattggcgacccgagcttcaaagccgccgagcgtaaactgaacactgaagagaccgttcaggagtgggtggcgaaaattcgtaaacaggttgccccattcctggactttgattgcggcgaaaactccgccatcgcggccaataactatgactggttcggcagcatgaatgtgctgactttcctgcgcgatatcggtaaacatttttccgttaatcagatgatcaacaaagaagcggtgaagcagcgtctgaaccgtgacgatcagggtatctctttcacggagttctcttataacctgctacaggggtacgacttcgcttgcctgaataaactgcacggcgttgccttacagattggcggttctgaccagtgggggaacatcacttccggtatcgacctgacccgtcgtctgcaccagaatcaggtatttggtttgaccgttccactcatcaccaaagctgacggcacgaaattcggtaaaaccgaaggcggcgctgtctggctggatccgaagaaaaccagtccgtacaaattctaccagttctggattaacaccgcagatgccgatgtttatcgcttcctgaaattcttcacttttatggacattgaagagatcaatgccctggaagaagaagataaaaacagcggtaaagcgccgcgcgcgcagtatgtgctggccgagcaggtgacgcgcctcgttcatggtgaagagggactggtcgcggcgaaacggatcaccgaatgcctgttcagcggttcactgagcgcgctgagcgaagctgactttgagcagttggcgcaggacggcgtaccgatggttgaaatggaaaaaggcgccgacctgatgcaggcgctggtagacgccgaactccagccgtcacgtggtcaggcgcgtaagactatcgcctccaacgctgtcactatcaatggtgaaaaacaatccgatcctgaatacatctttaacgatgaggaccgtctgtttggccgctataccttattacgtcgcggcaaaaagaactattgtctgatttgctggaaataa

SEQ ID NO: 39148 - DNA, 1914 bp, Salmonella typhimurium
gtgcgattccccaaccaacgtttagcgcagctatttgcgatgctgcaaaacgagacgctgccgcaggacgagctggcgcagcggttgtcggtctccacgcgtaccgttcgggcggatatcgccgcgctgaacatgttgctgacgccgcatggcgcgcaatttactctcagccgcggcaacgggtatcagctcaaaattgatgatccggcacgttatcaatccctgcaaacgcagcaatctcccgccctggcgcgcggtccgcgcaccagccaggagcggatacactatttgctggcgcgttttttaacctccgccttctcgctgaagctggaggatttagcagatgaatggtttgtcagccgtgcgacgttgcagaacgacatggcggacgtgcgcgagcatttgctgcgttatcatctgacgctggaaacgcgtccgcgtcatggcatgaaattgtttggcggagagatggcgattcgcgcctgtctgaccgaccttttatggacgctggcgcagcaggagccctctcatccgttaattgttagtaccacgctgaacaccgaggtgtctcaacggctgcggtctcttttgccggatattttctctcattgtcaaatccgcctgaccgatgagggcgagctgtttctgcgtttatactgcgcggtggcggtacggcgtattcgcgaggggtatccgttatcggaatgcgtggcagaggaggtcgatgaaaaggtgcgccatgcggcgcatgagattgcggagctactacaacagctggctgacaagccgctgtcggagccggaagtaagctggctgaaggtgcatattgccgcccgccaggtacaggagattgcccccagcgccattaatgccgatgatgaagaggcgctggtgcactatatcctcaattttattaatacccagtacaactataacctgttgaatgataaacagcttcacgcggacttgctgacccacatcaaaacgatgatcacccgcgtgcgctaccagatcatgatccccaacccactactggaaaatattaagcagcactatccgatggcgtgggatatgacgttggcggcgatatcgagttggggaaaatacacgccgtataccattagcgaaaacgaaatcggttttctggtgctgcatattggcgttgggctggaacgtagttacaacattggctaccagcggcagccgcaggtactgctggtgtgcgatgctggtaatgcgatggtgcggatgattgaagcggtactggcgcggaaatacccgcagattgagattgccctcactctgacactacgcgactatgaggcgcgggacagtattgtggaggattttgtgatttccacggcgcggatcggcgaaaaagataagccggtcatcatgatcgccccctttcctaccgactatcaattggagcagatcggtaagctggtgctggtggacagaacccgtccgtggatgctggataaatatttcgatgcctcgcattttcgcatcgtggagggggaaatagatcaacagacgctgtttaaaacgctgtgcgatcagttgcacgaggaaggctttgttgatgcggcgtttctcgattcggttattgaacgtgaagctatcgtcagtacgttattaggcgacgggattgccttgccgcacgcgctggggctgctggcgaagaaaacggtggtttatacggtgctcgcgccgcaggggattgcctggggtgacgaaacggcgcacgttatttttttactcgccatcagcaaaagtgagtatgaagaggcgatggccatctacgatattttcgtcactttcctgcgcgaacgcgccatgacgcgcctatgcgcatgtcagaattttacgcaatttaaaacggtcgcgatggagtgcgtgagtcgtttttga

SEQ ID NO: 39149 - DNA, 2709 bp, Salmonella typhimurium
atgctaaaaatcattacccgccagctttttgcccggcttaatcgtcatttgccttatcgtctggttcaccgcgatccgctgcccggcgcgcagaccgcggtaaatgcgactatcccgccttcgctgagcgagcgctgtctgaaagtcgcggcaatggagcaggagactctctggcgcgtttttgatacgcacccggagggattaaacgctgccgaggtgacgcgcgcgcgtgaaaagcatggcgaaaaccgccttccggcacagaaaccctcgccgtggtgggtgcatctgtgggtatgttatcgcaatcctttcaacatcttactcacgattcttggcggcatttcttatgccacggaggatctgtttgccgcaggcgttatcgccctgatggtcggtatctcaacgctgctgaattttgtgcaggaagcgcgctcgacaaaagcggcggacgcgctaaaagcgatggtgagcaataccgctaccgtactgcgggttattaatgaaaatggcgaaaatgcctggctggaattacccatcgatcaactggtgcccggcgatattattaagctggcggcgggggatatgatcccggcggatttacggattatccaggcgcgcgatctgtttgtcgcccaggcgtcgctgaccggcgaatctctgccagtcgagaaagtcgccgcgacgcgtgagccccggcaaaataacccgcttgagtgcgacacgctgtgctttatggggacgaacgtcgtgagcggaacggcgcaggccgtggtgatggcgaccggcgccggcacctggtttggtcaattggcggggcgcgtgtcggaacaagataacgagcagaacgctttccagaaaggaattagccgcgtcagtatgttgctgatccgctttatgctggtcatggcgccggtagtactgattattaatggttacacgaaaggtgactggtgggaagcggcgctatttgcgctctcggtcgcggtagggctcaccccggaaatgttgccgatgatcgtcacctccaccctcgcgcgcggggcggtgaagctctcgaaacagaaagttatcgtgaagcaccttgatgcgattcagaacttcggcgcgatggatattctgtgcactgataaaaccggcactctgacgcaggataaaattgtgctggagaatcacacggatatttctggtaagcccagcgagcatgtactgcattgcgcctggctgaacagccattatcagaccggtctaaaaaatttactggatacggcggtcctggagggagtagacgaaaccgccgcgcgtcagctctccggacgctggcagaaaatcgatgagatcccgtttgattttgagcgtcgccggatgtcggtagtggtcgccgaagattcgaacgtgcatcaactggtctgcaaaggcgcgttacaggagatcctgaacgtgtgtactcaggtgcgccacaacggcgatattgtgccgctggacgacaatatgctgcgccgggtgaaacgcgttaccgacacgctgaaccgtcaggggctacgcgtggtcgccgtcgcgaccaaatacctgcctgcgcgtgagggcgattaccaacgtatcgatgagtctgacctcattctggaagggtatatcgcttttctcgatccgccgaaagagaccaccgcgccggcgctgaaagcgctgaaggcgagcggaattacggtgaaaattctcaccggcgacagcgagctggtagcggcgaaagtttgccatgaggttgggctggatgcgggcgatgtcattattggcagtgatattgaagggttaagcgacgacgcgctggcggcgctggccgcccgtacgacgttgtttgcgcgtctgacgccgatgcataaagagcgcatcgtcactttactcaaacgcgaggggcatgtggtcggttttatgggcgacgggattaacgatgctccggcgttgcgggcggcggatattggtatctcggtagatggcgcggtggacatcgcccgtgaagcggccgatattatcctgctggaaaagagcctgatggtgctggaagaaggcgtcattgaaggtcgtcgtactttttctaatatgttgaaatatatcaagatgacggccagctcaaatttcggtaacgtgtttagcgtactggtggcgagcgcctttttgccgttcctgccaatgctgccgctgcacttgctgattcaaaacctactgtacgatgtatcccaggtggcgattccgtttgataatgtcgatgaagaacaaattcaaaagccgcagcgctggaatccggcggatttggggcgctttatggtctttttcggtccgatcagctcgattttcgacattttgaccttttgtctgatgtggtgggtatttcatgcgaatacgccagaaacgcaaactttgttccagtccggctggtttgtggtgggattactgtcgcaaacgctgattgtgcatatgatccgtacccgccgtctgccgtttattcaaagtcgcgccgcttggccgctgatggcgatgacattgttggtgatggtggtgggagtctcgttgccgttttcgccgctggcgtcttacctgcagttgcaggcgctgccgttaagctatttcccgtggctgattgccattctggtgggatatatgacgttaacccagttggtgaaagggttttacagcagacgttatggctggcagtaa

SEQ ID NO: 39150 - DNA, 1497 bp, Salmonella typhimurium
atgagcaactactggctggggttagattgtggtgggagttggctaaaagccgggttgtacgatggcgcaggccgggaagtagcggtgcaacgcctgccgctgcacgctttaagcccgcagccaggctgggttgaacgcgatatgaccgagctgtggcaacagtgcgcctcggtcatcagcaaactgctggcgcacacgggggtgagcggctcacaaatccgcggtctgggtatttccgctcagggtaagggcctgttcctgttagataaaagcgatcggccattaggtaaagcgatactctcttccgaccgtcgcgccatggaaattgtccagcgctggcaaaaagaagcggttccgcaaaaactctacccgctgacccggcaaaccctgtggaccgggcatccagtctcccttttacgctgggtaaaagagaatgagccgcagcgctacgcgcagataggctgcgtcatgatgacgcatgactatctgcgctggtgcttaaccggcgtgaaaggctgtgaggagagcaacatctccgagtccaacctctacaacatggcgacgggccagtacgacccgcgtctgaccgagtggctgggcatcagtgaaatcgacagcgcgctgtcccccgtggtgggttcagccgaaatatgcggggagatcaccgctcaggcagccgccatcaccggtctggcggcgggtacccccgtcgtcggcggcctgtttgatgtggtttccaccgccctttgcgccggtattgaggatgaatcgaccctcaatgcggtgatgggcacctgggccgtcaccagcggcatcgctcacggcctgcgcgaccatgaggcccacccttacgtctatggccgctacgtcaatgacgggcagtatatcgttcacgaagccagcccgacctcctccggcaaccttgaatggtttaccgcccagtggggcgacctctcttttgacgagatcaatcaggcggtcgccagcctgccgaaagccggtagcgaccttttttttctgccgtttctctacggcagcaatgccggactggagatgacctgcggtttttacggcatgcaggcgctgcacaaccgcgcgcacctgctacaggcgctctatgaaggcgtggtcttcagccatatgacccacctcaaccgcatgcgtgaacgctttaccgaggtttgcgccctgcgcgttaccggcggcccggcccactccgacgtctggatgcagatgctggcggacgtcagcggtttacgcattgagctgccgcaggtggaggagaccggctgcttcggcgcggcgctggctgcccgcgtcggcaccggcgtatatcgcgatttccgcgaggcccaacgcgacctgcagcacccggtgcgcacgctgctgccggacatgaccgcgcacgccctctaccagcgcaaataccgccaataccaggatttgattgaagcactacagggctatcacgcccgtattaaggagcacgcattatga

SEQ ID NO: 39151 - DNA, 813 bp, Salmonella typhimurium
atgacggtacggcagcgtctgctgtcgtatttttttaacaggttacgtatgaattacccgcaaatactctctccggtgcttaatttcctgcattgcccgacgccgcaggcgtggattgtccaggcccgcgatccgcaaaatcttcctcttctgcttaccgatcacctgatctgcgaactgaaggctgcgcaaaccgcgttgctgttggtgcgtaaatatgtcgccgataaatcgggcgccgacgcgctgctctcctggctgcaaccttacgaggcgttcgcgtttcgtcaggggccggagccggattttgttgccctgcataaacagattagcaaaagcgccatgccgcaaactgatgacccctggggacgtcagcttatcgaccgtatggtgttattgattaaagaggagttgcaccatttttggcaggtacgcgaggtcatgcaggccagaaacattccttatgtgaaaatcaccgccagccgctacgcgaaaggaatgttgaaagcggtacgcacgcacgaaccgctcaccttaattgataagctgatttgcggggcgtatatcgaagcccgctcctgcgaacgttttgccgctctggcgccctggctggatgaggatttacagacgttttatctctcgcttctgcgctccgaagcacggcattatcaggattacctggcgctggcgcagcagatttccgccgaggacatttctgcgcgcgtgcgctattttggcgaggtagaagctgaccttatcttgtcgccagaccgcgagtttcgttttcatagcggcgtgccagccgccggataa

SEQ ID NO: 39152 - DNA, 1149 bp, Salmonella typhimurium
atgaaagcattacattttggcgcaggtaatatcggtcgtggctttatcggcaaattgctggctgacgcggggatacaactgacgtttgcggatgtaaaccaggtcgtactcgatgccctgaatgcccgtcatagctatcaggttcatgttgtgggtgaaaatgagcaggtggataccgtttccggcgtcaacgctgtcagcagcatcggcgatgatgttgtcgacctgattgcccacgttgatttaatcaccactgccgtgggcccggtggtgcttgagcgtatcgctccggctatcgctaaagggctggtaaaacgtaaggcgcagggcgtggatgccccgctgaatatcatcgcctgtgaaaatatggtgcgcggcaccacgcagctgaaaggccacgtaatgaacgcgctggcggatggcgataaagcctgggttgaacagcacgtcggttttgtcgattccgccgttgaccgtattgtgccgccatctgcttctgcgaccaacgatccgctggaagtgacggtagaaacgttcagcgagtggattgtcgataaaacccagtttaaaggcgcgttgccaaacattccggggatggagttaacggataacctgatggcatttgtcgaacgtaaactcttcacgctgaacacaggtcatgctataaccgcgtacctcggcaaattagccggtcatcaaaccattcgcgacgctattctcgatgagagtattcgcgcggtggtgaaaggcgcgatggaagaaagcggcgcggtgctgatcaaacgctacggttttgatgccgacaaacatgcggcatacattcagaaaatcctcggtcgttttgaaaacccgtatctgaaagatgacgtcgaacgcgtaggtcgtcagccgctacgcaaactcagcgcgggcgaccgtctgatcaaaccgctgcttggcaccctggaatatggtctgccgcatgtaaatctggtcaaagggatcgcggcggcgatgcatttccgtagtgatgaagatccgcaggcgcaggagttggcggctctgattaccgaaaaaggcccgcaggccgcgctggcgcaaatttccgggctggatgccaatagcgatgtggtggcggaggcggttaacgcatataacgcgaccaaatga

SEQ ID NO: 39153 - DNA, 1188 bp, Salmonella typhimurium
atgaataacgttatcagtagtaaagataaccataatcacacgttggtgtttacaggcaagggcggaaagtattttgttatttgccttgtgaatttcttgttgacgtgtatcacgttgggaatctatgcgccgtgggcgatggtgaaatgtcgacgttatatttatactaacatgacgctaaacaatcagccttttgcttacaaagccacgggcggcgcattatttattagtgtgttgttagtttttattatttatattgttagcctctctcttattgaacacggtcatcccggtctcggttttacgctattcggcttattaattgcgattattccttttatggcggtgaaaggattacagtatcaggcgatgatgacttcgcttaatggcgtacattttggattccagtgttccatgcggcgcgcctggtggtacatgttcgctcttcctgtactcctgatggtggcgctttatattgttctttatattatctcactggtaaccatcgccgtcggcggtttagtgttcagtatcgtttttctcggtttgctggctattattgggataggggtcattaacggtattacctacagcaaatggatgaccttgtttggtaatggcgcaaactttggcattcatcgtttctcgattcaggttaatgttaaaacgtgcatcagagggtgcgtgttggcaatgttgacccttttcccttttgctgtcgtgattggttatctaatcgcgccggtgttcaccgacatgattcttttgagtatgatggggaatgcgcaggcaggaggggcgcttattctgcaatattatggccagataatggcatgttatttcctctattttctcgcgattattgtggtaaccagttacttatatgtggcgttacgcaacctgtttttaaacaatttgtcactggcgaacgattcgattcgttttcattcctctgtcactgcacacggtatgctgtggcggttactggtggtgtttgtgatttccggcgtgaccttagggctggcttatccgtggttgaaaatttggctggtgagctggctggcgcagaatacacaggtccagggcgatctggattcgcttgagttaaccaatgatgagaagccgctggaaaacagcccgctaatgtggatttctcgtggcattatgccttacttcccgtttatctga

SEQ ID NO: 39154 - DNA, 591 bp, Salmonella typhimurium
atgacgcagaatccggcgcaggttagcctgcgcccaaataacagattgtcagatatgcaggcaataatggaacaaacccaggcctttgaaaatcgtgtgcttgagcgtctgaatgctggcaaaaccgtacggagcttcctgattaccgccgtcgagttattgaccgaggcggtgaatattctggtgcttcaggtgtttcgcaaagacgactatgccgtgaaatacgctgtggaaccgttgctggacggcgacgggccgctgggcgatctttcggtacgtctgaaacttatctatggcctgggcgtactcagccgcaccgaatatgaagatgcggagctgttaatggcgctgcgcgaagagctgaatcacgatggcaatgagtacgcctttaccgacgatgaaatcctcgggccgtttggcgaactgcactgcgtcatggcgctaccgccgccgccgcattttgatacgtccgacgcggcgctatacgccatgcaaattcagcgctaccagcaggcggtgcgttcgacgatggtcctctctctgaccgagctgatttctaaaatcagcttaaaaaaggcctttcaaaagtaa

SEQ ID NO: 39155 - DNA, 4386 bp, Salmonella typhimurium
atgaatagaatatttaaagtcctctggaatgccgctacgggaacatttgttgtcaccagcgaaaccgcaaaaagccgcggcaaaaaaaacggccgcagaaagctggcagtttccgcactcatcggtcttagcagcattatggtttctgcggatgcactggccaacgcaggaaacgatacaggcgacggcgttactccaacgggtacccagactggaggaaaagggtggattgcaattggtaccgatgccacagccaatacttacaccaacgttgatggcgcaagcgccgcaatgggttataaagcctccgcgatggggaaatggagtaccgccattggttcctacagccagtccaccggcgactcttcgttagcgcttggcgtaaaatcggtttcagccggtgaccgggccattgcaatgggcgcctcatcctcagccagtggaagttattcaatggcaatgggcgtgtatgccaattcgagcggcgcaaaatcggttgcgttaggttataaatctgtcgcgagcggagcaacttcctctgcattaggttatcaagctactgcgagcggcgacgacagcgctgcttttggtaatggcgcaaaagcgataggcaccaactcagttgcccttggctcgggctctgtcgcccaggaagacaattccgtcgccgtgggtaacagcaccactcagcggcagataacctacgttgctaaaggcgacatcaattccaccagtaccgatgccgttacaggtgcgcaaatttattctttaagtcaatccgtcgccgaccgactcggcggaggggcttccgttaatagtgatggtacagtgaatgcgcccctctacgaggtaggcacaggcatctacaataacgtaggtagtgcattaagcgcacttaacacgtctatcactaacacagaggcctctgtcgcaggattagccgaagacgcgctgttgtgggatgaaagcatcagcgcctttagcgctagccacacgggaaacgccagcaaaatcaccaatctggcggcgggtaccctggctgcggacagcaccgatgccgttaacggctctcagttgtttgatacaaatgagaaagtggataagaacactgctgatatcgccaccaataccggcagcatcaaccaaaacactgccgatattaccgctaataccgacagcattaaccagaacacaaccgatatcgccgccaatacgaccagcatcaatcagaacaccactgatatcgccaccaacaccaccaatatcaacagtctgagcgactccgtcaccacgctcaccgatgatgcactgctttgggatgcagcctctggcgcattcagcgctaagcacaacggaagcgacagcaaaatcaccaatctggcggcgggtaccctggccgctgacagcaccgacgccgttaacggctcccagttgtttgatacaaatgagaaagtggatcagaacaccgctgatatcaccaccaataccaacagcatcaatcagaacaccactgatattgccaccaacaccaccaatatcaacaacctgagcgattccatcaccacgctcaccgatgatgccctgttgtgggatgcagcctctggcgcattcagcgctaaccacaacggaagcgccagcaagatcacaaatctggcggcgggcaccctggccgcggacagcaccgatgcggtgaacggctcccagttgtttgccaccaacgaaaatgtgtctcagaacaccgctgatatcaccaccaataccaacagcatcaatcagaacaccactgatattgccaccaacaccaccagtatcaacaacctgagcgattccatcaccacgctcaccgatgatgccctgttatgggatgcagcctctggcacattcagcgccagccgtagcggaagcgccagcaagatcaccaatctggcggcgggcaccctggccgcggacagtacagacgcggtgaacggctcccagttgtatgaaaccaaccagaaggtggatcaaaacacctctgctatcgcagatattaatacgtccatcaccaatcttagctctgacaacctgagctggaatgaaacaacgagttcgttctctgccagccacggaagtagtacgacaaacaaaatcaccaacgttgctgccggagagctgtctgaagaaagtaccgacgcggttaacggatcgcagttgttcgaaaccaatgaaaaagtggatcagaacacgaccgatatcgccgccaataccaccaacatcactcagaacagcaccgcgattgagaacctgaatacttctgtctccgacattaatacgtccattaccggcctcactgataacgctctgttatgggacgaagacaccggcgctttcagcgcaaaccacggtggaagcaccagtaaaataaccaatgtcgccgccggggcgctttctgaggacagtacagacgcggtaaacggatcacagttgtatgaaaccaaccagaaggtggatcaaaacacctctgctatcgcggatatcaatacgtccatcaccaaccttggtaccgatgcactgagctgggatgacgaagagggtgcgttcagcgccagccacggtaccagcggtaccaataagataaccaatgtagcagcaggtgaaatcgccagtgacagtactgacgccgttaatggctctcagctctatgaaactaacatgctgatttctcagtataatgaatctattagccaactagccggcgataccagcgaaacctatatcacggaaaatggtaccggcgtgaaatacatccgtacgaatgataacgggcttgaaggccaggatgcatacgcaacgggtaacggcgcaacggcagtaggttacgacgccgtcgcctctggcgctggcagtctggctcttggccaaaacagcagcagcagcattgagggcagtatcgctttgggcagtggctccacctctaaccgcgctattacaaccggtatacgagaaacgagcgcaacaagcgatggcgtggtgattggctacaatacaacagacagagagttgctgggcgcgttgtcattggggacggatggagaaagctatcgtcaaattaccaacgttgctgacggctctgaagcgcaagatgcggtaacagttcgtcagttacaaaatgccattggtgcggtcactactacaccgaccaagtactaccacgcaaactcaacggaagaagattcactggctgtcggaactgactcactggcaatgggtgcgaagaccatcgtcaatgctgatgcaggtattggtattggtctgaatacactggtgatggctgatgccatcaacgggattgctatcggttctaacgcacgcgccaatcatgcaaacagtattgcaatgggtaatggttctcagaccactcgcggcgcacagactgactacaccgcctacaacatggacacaccgcagaactctgtcggtgagttctctgtcggcagtgaagacggccaacgtcagatcactaacgtcgcggcgggttcggcagataccgatgccgttaacgttggtcaattgaaagtaacggacgcgcaggtttccaggaatacccagagcattactaacctgaatactcaggtatcgaatctggatacccgcgtcaccaatatcgaaaacggcattggcgatatcgtcactaccggtagcaccaagtacttcaagaccaacaccgatggcgcagatgcaaatgcccagggtgcggacagcgtcgcgattggctctggctctattgctgccgctgaaaacagcgtggcgttaggcacaaattccgtcgcagatgaagctaatactgtgtctgtcggctcttctactcaacaacgccgtattaccaacgttgccgcaggggtgaacaacactgacgcggttaatgtggcgcaactgaaagcctcagaagcaggctccgtgcgttatgaaaccaatgcagatggctcggttaactacagtgtgctcaacctgggagacgggagtggcggcaccactcggatcggcaatgtttctgcggcggtgaatgatacggatgcggtgaactatgcgcaattgaaacgcagcgtcgaagaagcaaacacttataccgaccaaaaaatgggtgaaatgaacagcaaaatcaaaggcgtagaaaacaagatgagcggcggtatcgcctcagcgatggcgatggccggtctgccacaagcctacgccccgggcgccaacatgacctcgattgctggcggtacgtttaatggtgaaagtgccgtcgccattggtgtctccatggtaagtgaaagcgggggctgggtgtataaattgcaaggaaccagcaacagccagggcgattactctgcggccattggcgcgggcttccagtggtaa

SEQ ID NO: 39156 - DNA, 1191 bp, Salmonella typhimurium
atgattatttcagcagccagcgattatcgcgccgcagctcagcgcacgttgcctcctttcctcttccactacatcgacggcggcgcgtatgcggaatataccctgcgccgaaatgtggaagacctgtcgcaagtcgctctgcgccagcgcgtgctgaaaaatatgtccgatttaagcctggaaacgaccctgtttaacgaaacgttgtcgatgccggtggcattagcgccggtaggcctgtgcggcatgtacgcccgtcgcggcgaagtacaggccgccgccgccgcagacgcaaagggcattccgttcaccctttccaccgtctccgtctgtccgattgaagaagttgcaccaaccattaagcgcccgatgtggttccagctttatgtactgcgtgaccggggctttatgcgcaacgcgctggaacgtgcaaaagcggcgggctgctccacgctggtctttaccgtggatatgccaacgccgggcgcgcgctaccgtgacgcccactccgggatgagcggcccaaacgcggccatgcgccgttactggcaggcggtgatgcaccctaaatgggcgtgggatgtcggcctgaacggtcgcccgcatgatttaggcaatatttccgcctatctgggtaaaccgaccggccttgaggactatatcggctggctggcaaataacttcgatccgtccatctcctggaaagatctggagtggatacgcgaattctgggacggcccaatggtgatcaaagggatcctcgatccagaagatgcccgcgatgcggtacgtttcggcgctgacggtatcgtggtgtcgaatcacggcggccgccagctcgatggcgtgctctcttccgcccgcgccctgcccgccattgccgatgcggtgaaaggcgatatcgccattctggcggatagcgggatccgtaacgggctggatgtcgtgcgtatgattgcgttgggggccgataccgtactgctgggtcgggcctatctctacgcgctggcgacggcaggaaaagcgggtgtcgccaacctgctggacctgattgagaaagagatgaaggtcgccatgaccctgaccggcgcgaaatccattagcgaaatcagtggcgattcactggtgcaggaactggggaaaagtttgcccgccgcgctggcgccaatgagcaaaggcgatgccgcctga

SEQ ID NO: 39157 - DNA, 1239 bp, Salmonella typhimurium
ttgtgtatgaaaaataatattgaagagacaataggtaagtacttgcctattttaatgatattacctctggcgggtttggcagagttagcttctttatattcaatccaggctttattaccaaagttaagtgaggtttataatatcccattgaatcaggtagggatgattttatctgctgaggtggggtttctggcattagccatgttatttagcggcacgttatctgaccgttttgggcgaaagccaatcattttttattcgttgctggcaggaggtattttaactctattgtgcgcaactgcatcatcatggccgatgctggtggtataccgcgctttgctcggcattgcagtaagtggtattacggcggccgttacagtctatatcagtgaagaagtctctcctgctttggcagggattgttactggatattttatttttggcaattcgctagggagtatgtctggtcgtgtgtttgcaactttgatgatggagcatgtatctatagatacgattttctttatcttcggtggtgttctgattgctatggcactcgcggtgaagttgtttctcccgacatcccgacagtttgttcctacaccttcactacagcttggtgcagtgttgaaaggcgggttggaacattttaagaatatccgcgtatcattatgttttgtcattggatttattcttttcggctcttttacatccatctttaattttctggcgttttacctgcatcgaccgccttatgagctgagctacacctggataggtttgattccagttagcttctcattaactttttttcttgcgccatatgctgcccgtgtcgcgttgaatattgggtcgatgaatgcgctcagtatgctgatcatctgtatgatggtcggtgcatttcttacgctaatcgccccttctctgtgggttttcatttcaggtatcgttttactgtcagtcgcatttttctctgctcattccaccgtattagcctgggtcagttcacggagtccaaacgcaaaaggacaggcgacatcgttttatctgctttgctactactctggcggtgcagtaatggggtatttaaacgggtatcttttctcctggcagggatggaatgctattgcggcatcatgtctgatgatgctggggataggattatttatctgccggtttattttcgcaaaatatgagaaacaaccgcaaatcaaaaaacagtcagttcaggagagtttctga

SEQ ID NO: 39158 - DNA, 1422 bp, Salmonella typhimurium
atgtctgctaaaacgctgtatgaaaaattagttgagtcacataccattcgtgaacttgataacgaaggacatgttttactttatattgatcgttcaatactgaatgaatataccagcccgcaggcatttagcgggttaagagaacgcggccgcaccgttcggcaccccgacacgtttttattgaatattgaccatgttaatcctacgcggtcgcaacgggatgacttaatgaccgatccgggaggacagctacaggttgattactttcgggaaaatgccgctgactttggcatcacattatttgatgtgctggatccgcgtcaggggattgaacacgtggttgctcatgaacaagggctagtgatgcctggcatggtgatcgccgccggggatagtcacacgacaacctacggtgcatttggcgcgctgggctttggtatcgggacgtcggaaattgaacatctgctggccacgcagacgctggtttaccgcaagctcaaaaccatgcgcgtaagtgttcagggagagctacctttcgcctgttccgcaaaagatattgttcttgaattgcttgaacgtattggcgctgatggcgcgacgggatatgccattgaatttgtgggtgaggccatcagcgcgttgagcgttgaaggacgaatgacgctctgcaacatggcggtagaagcgggggcgcgtggtgccattattgcgccggataaaaaggtttttgactatatctacggtaaaccgcaaatgcctgtaggtgaactctggcagcaggcattgctggaatggtcacagttgagcagcgatgctgatgcggtatttgataagacggtggcgatcaactgccatgatcttgagcctaaagtcacctggggaatcagtccggatcaaacaggttccatcaccggacgtgttcctttcccggaacaggaaaccaatccgcttaagcgcctggcgcttgagaaggcccttcattacatgggattaacggctggcatgttgctgaaagatattcgtatctctcacgcttttattggttcatgcacaaatggtcgcattgaggatttgcgtgccgttgcgaaggtgcttgaagggcgcaaaatcgccagccatgttcgcgggatcattgtgcctggttcaacaatggtaagacgccaggcggaagaagaaggactggcgaaaatctttattgctgccggttttgaatggcggcagtcgggttgctcaatgtgccttgcgatgaatgaagatgtattgtcgcccggcgatcgctgtgcatcaggtacgaaccgtaacttccctggacgacagggcgctggagcaagaacgcatttgatgagcccggcgatggttgcggcggcggcggtagcggggcatctggtcgatgttcggtcattacttcaggcaggggaataa

SEQ ID NO: 39159 - DNA, 879 bp, Salmonella typhimurium
atgaaactggttcaatatcttgtgaacggtggcaaacgctacggcattatgcaggaaaccggaataattgatctctcgcagcggcttggcgacaaatatcccactttgaaatctctcctgtgcgctaatgcgctgacggatgcggcgttatggtgtgatgagccggcggattattactaccaggaagtcacttttctgccggtgattgacgatccgcagaagatcatctgtgtcggaatgaattatgccgataagcgtattgagtttaatgaaaccaacccggccccaaccctttttgtccgctttgcggattctcagaccgggcataatggcctgctgctgaagcctgaaaataccaatgagttcgactacgaaggtgaattagccgtagtgattgggcggcgatgctcccgggtcagcgctgaggatgctttagattatgtcgccggatacagctgctatatggatggttcagtgagggactggcagcatagctggtttacggctggaaaaaactggccttcgacaggatcattcggtccgtgtctggtgaccacagacgacattcccgatccccagatgctacgtttactgacacgactaaacgggcgggaggtgcagaacgaatctacggcaaatatgatccatcctatcgcttcactcattgcttatataagcacatttactctgctttcccctggcgacacgatcctcacagggtcgcctggtggagtgggcaaaaaacgcgttccaccgctgtttttacacgatggtgatgttattgaagttgagattgaacatattggaaccctgcgcaatgtcgtccgggatagccgttatttaacatcctctgttagctggcatgacgggagaaagtga

SEQ ID NO: 39160 - DNA, 915 bp, Salmonella typhimurium
atgagtacactgattgaatgcggcgcctctccgtttattccggggtttgcgctcaaggatgttcgtctggaaaatggtctgacggtaagagtggctatcggaggcagcggttcacctttggtactgctacatgggcatccgcagaatcatacaacatggcggaaagtcgcaccgacattggcgcaaaatcatacagtcattttgccggatttgcgtggctatggcgacagcgataaaccaacgagcgatccggcgcaccgtacctattcaaagcgcaccatggcgcaggatatcgtcatgttaatggatgcgctcggcttttcccgttttgcctttgtagggcatgatcgtggcggacgcgtaggacacaggctcgcgctggattatccggatcgtgtgacctgttgtacttttatcgacattgctccaaccgcgacgatgtacgccttgaccgataaatcctttgctacgcgttacttttggtggtttttcctgattcaacctttcccgttacccgaaacgatgattgcgcacgatccggcattttttctgcgtaagcatatttctggccagctaaaaatagagggcgcgacctcgcaggaagcattcaatgaatacctgcgctgttaccagaaccctgagatgatccacgcgatctgtgaggactaccgggctgctgcgacgattgatttggacgatgatgccgcagatacgtcggcgcgtatccggtgtccgttacagttgctgtggggagggctgggaacggtagggcaactatataatgtggttggtacctggaaagaaaaggcgctaaacgttcagggggaagcattgccttgcggacactccccgcaggaagagtgtcctgagtactttatccagaaacttcagtcctttttacattcagtgttataa

SEQ ID NO: 39161 - DNA, 474 bp, Salmonella typhimurium
atgcttaacatcgtactcttcgaaccagaaatcccgccgaataccggcaacatcattcgtctttgcgccaataccggctttcgtctgcacatcatcgaaccgatggggtttacctgggatgataagcgcttacgccgcgcagggctggactatcacgaattcgccgcggttcagcgccatcacgattatgccgcctttgtcgccgccgaaaatccgcagcgcctgtttgcgttgacgacaaagggcacgcccgcccatagcgccgtaagctatcaggatggcgattatttgatgtttggcccggaaacgcgcggcctgcccgccagcattctcgatgcgttgcctaaagagcagaagattcgcattccgatgatgccggatagccgtagcatgaacctgtcgaatgcggtgtcggtggtggtgtatgaagcgtggcgccagttaggatatcccggcgcggtattgcggtcgtaa

SEQ ID NO: 39162 - DNA, 1284 bp, Salmonella typhimurium
atgaggggaaaggcgattaacaccattcaacaggccgtgaaaccaagaacgttttcagtcaggcctttgttctacgccagcgtacttagcgctggcgtattgttgtgcgccttttccgcccacgcggatgaccgtgatcaactcaaatctattcaggccgatatcgccgcgaaagaacgcgacgtacgccagcagcagcaacaacgcgccagcctcctggcacaacttaaagcccaggaagaggccatctcagccgcagcacgtaagctgcgcgaaacgcaaagcaccctggatcagttaaacgcgcaaattgatgagatgaacgcctcaattgccaaactggagcagcaaaaagccagccaggagcgtaatcttgccgcgcagttggacgccgctttccgccagggcgaacacaccggcattcagcttattcttagcggagaagaaagccagcgtgggcaacgcctgcaggcctacttcggctatctgaaccaggcgcgccaggagactatcgccgagctgaaacagactcgcgaacaggtcgccacgcaaaaagccgagctggaagagaagcaaagccaacaacaaacgttgctgtatgagcagcgcgcccagcaggcgaagctggaacaggcgcgtaatgaacgtaagaaaacgcttgccggactggagtcgtctattcagcaaggccagcaacagttaagcgaactacgcgccaacgaatcacgcctacgcaacagtatcgcgcgggcggaagcggcggccaaagcgcgagcggagcgtgaagcccgcgaagcgcaggcggtacgcgataagcagcaggaagcctcgcgtaaaggcagcacctataagccgacggaaagcgagcgctcgctaatgtcccgcaccggcggtctgggcgcgcctcgcggtcaggcatactggccggtacgcggcccgatcttgcatcgctatggcgaacggctgcagggtgagctacgttggaaggggatggtgatcggcgcgtcggaaggcaccgaggtcaaagccatcgccgacggcagggtgattctggcggactggctacaaggctatggcctggtggtggtcgtagagcatggtaaaggcgatatgagcctttacggctataaccagagcgcgctggtcagcgtaggcgcgcaggtgcgcgccggacaacctatcgcccttgtgggcagtagcggcggtcagggcagaccctcgctttatttcgaaattcgtcgccagggtcaggccgtcaatccacagccgtggttgggaagataa

SEQ ID NO: 39163 - DNA, 963 bp, Salmonella typhimurium
ttgcctcagtttcgtcgctccattctcacgctggccactttgctggcgtttgcacatcccgttttcgctggcaagctcgccatcgtgattgatgattttggctatcgcccgcacacggaaaaccaggttctggcgctgccgccaaacatctccgtcgctgtactgcccaacgcgccgcacgcgcgcgaaatggcaactaaagcgcacaatagcgggcatgaggtgttaatccatctgccgatggcgccgctaagcaaacagccgctggagaaggatacgctgcgaccagatatgagcagcgatgagatcgagcgcattatccgcgaggcggtaaacaacgtgccgtatgccgtcgggcttaataaccacatgggcagcgcaatgacttccagcctgttcggtatgcaaaaagttatgcaggcgctggaacattacaatctctattttctcgacagcatgacgattggcaatagccaggcgatgcgcgcggcatccggtacgggtgtgaaagtgatcaagcgcaaagtgttcctcgacgatacgcaaaacgaggcggatatccgtcgtcagtttaatcgcgctatcgaactggcccgtcgcaacggttccgctatcgcgattggtcatccacatcccgcaacggttcgcgtgctgcaacagatggtttatcgcctgccggcggatatcaccctggtacgtccaggcagcctgctcaacgaaccgcaggtagatacgtcccgacctggtgtgacgccgcagaaaattgacgcgccgcgcaatcccttccgcggcgtaaagatgtgcaagccgaaaaaaccgctgcaaccggtctacgctacgcgctttttcagcgtcatcggcgagagcattacgcaaagttccgtggttacctggtttcagcaccagtggcaaggctgggggaaaatcgccgcgcctaaaaacgtgagcgctaagacagattga

SEQ ID NO: 39164 - DNA, 363 bp, Salmonella typhimurium
atgtccaccacgttgtataaagatttcacctttgaagccgctcaccgcctgcctcacgtgcctgaagggcataagtgcggccgcctgcacggacactcgtttatggtgcgtctcgaaattaccggtgaagtcgatccgcataccggttggattatggatttcgcggatctcaaagcggcgtttaaaccgacttacgatcgtcttgatcactactatctgaatgatattccagggctgtccaatcccaccagcgaagtgctggcaaaatggatttgggatcaggttaagcccgtcgtgccgctactgagcgccgtgatggtgaaagagacctgtacagccggctgcgtctatcgcggcgaataa

SEQ ID NO: 39165 - DNA, 954 bp, Salmonella typhimurium
atgcgggttttgatcgttaaaacatcatcgatgggcgacgtattacataccctgcctgcgcttaccgacgcgcaacaggcgattccggggattcaatttgattgggctgtcgaagaagggtttgcacaaattccgtcctggcacagtgctgtcgatcgcgtgattcccgtcgctattcgccgttggcgcaaggcctggttttccgcgcccatcaaagcggaacgcacagcctttcgtcgggcggtatgcgcaaaccaatacgacgctgtgattgatgcgcaggggctggtaaaaagcgcggcgctggtgacgcgtctggcgcatgggataaagcacggtatggactggagtaccgcccgcgaaccgctggccagcctgttctataaccgtaaacaccatatcgcaaagcaacaacatgcggttgaacggacgcgcgagctgttcgccaaaagcctgggatacgataaaccgcagtcgcagggcgattatgccatcgcaaaacattttctgcattgccagcaggcggttagcgatccgtatgcggtgtttttacatgccacgacccgcgatgataaacactggccggaagcaaactggcgcgagcttatcggcctggtgggcaacaccggattacggataaagcttccctggggcgcgcctcatgaggaggcccgggctaaacgactggccgaaggctttgactatgtggatgtgttaccgcgcatgagcctggaggaggtcgccagagtgctggctggcgcaaaatttgtcgtatcggttgataccggcctgagccatctcaccgccgcgctcgacagaccgaatattacgctatatggcccaacggaccctgggttaattggaggttatgggaagaaccaaatggcatgctgctcaccagaacagaacctggcgaatttagatgccacaagcgtatttggaaagattcattaa

SEQ ID NO: 39166 - DNA, 2289 bp, Salmonella typhimurium
atgagtcagtcagaaaatcgtcacgacacgataagcttacttattgaaggtatgacctgcgcgtcgtgcgtcgctcgcgttgaaaaaggtattaaggctgtgcctggcgtaacggacgctacggtgaatctggcgacggagcgcgccaccgtccgcgggacggcgtcggcggaggcggtgatcgcggcgattgaaaaaacggggtataaggcgcgaccgatagagacggcggggcagggcgaagacgactctgaagagaaaaaagaggccgagcgcgtcaggctgaagcgcgatctgattctcgccagcgtgctggcgctccccgtttttgtgcttgaaatgggctcgcaccttattcctggtatgcacgagtgggtgataaaaacgattggcctgcaacaaagctggtactggcaatttgcactgaccctgttggtgctgacgatccccggtcgccgtttttaccttaaagggttcccggcgctggcgcgtctggcgccggacatgaactcgctggtcgccgtgggaaccgcagcggcattcggctactcgctggtggcgacctttacgcccgacctgttgcctgaagggacggtaaacgtctattacgaggccgccgcagtgattgtcgcgcttattctgctggggcgctttctggaggcaagggcgaaggggcggacttccgaagcgattaaacgtctggtggggctacaggcgcgggtcgcgcatgtgttacgcgagggccgcatcgtggatatccctgtcgacgaggttgtgctgggcgactgtgtggaggttcggccaggcgagcggatcccggttgacggcgaagtgaccgaaggccgcagcttcgttgacgagtcgatgattaccggcgaaccgataccggttgagaaatccgcaggaagcgcggtggtgggcggtaccgtaaaccaaaaaggcgcgctcacgctgcgggcgaccgccgtcggcggacagaccatgctggcgcaaatcattcgtctggtggaacaggcgcagggttcaaaactgccgattcaggccgtcgtggataaagtgacgctgtggtttgtcccgatggtgatgcttattgctgcgctgacctttgtggtatggctggcgtttgggccgtcgccagcgctgactttcgctctgatcaatggcgttgcggttctgattatcgcctgtccttgcgcgatgggcctggcgacgccgacctctattatggtgggaaccggtcgtggggcggaaatgggcgtgctgttccgtaagggggaggcgttacagctactcaaagacgctaaggtggtggccgtagacaaaaccgggacgcttaccgaaggccgcccggtactgaccgatctcgacgtggccagcggctttgaacgccgtgaggtgctggcgaaagtcgcggcggtagaatcgcgttcagagcatccgattgcccgtgcgattgtcgtgtcggcagaagaggaagggatcgcgctaccaggcatgagcggcttcgaatcggtgaccgggatgggcgtatacgctaccgttgacggtacgcgtgttgacgtgggggctgatcgctatatgcgcgaaattggcgtggatattagcggcttcgccaccaccgccgaacggttagggcaggaagggaaatcgccgctctatgcggctattgacggtcaactggcggcgattatcgccgtggccgatccgatcaaacccagtacgcccgccgcaattaacgctttacatcagctcggcattaaggtcgccatgatcactggcgataatgcccgcacggcacaggctatcgccagacagttaggaattgatgatgtggttgccgaggtattgccagaagggaaagtcgaggcgatacggcgcctgaaagcggcgtatgggcaggtggcgtttgtcggcgatggcatcaacgatgcgccagcgctggcggagtccgacgtggggctggcgattggcaccggcaccgatgtggcggtggaatccgccgacgtcgtactaatgtccggcaacctgcaaggcgtgccgaatgctatcgcgctgtctaaagcgaccatccgcaatatccaccagaatctgttctgggcctttgcttacaatacggcgctgattcctgtcgcggcaggcgcgctatttccggtctggggcatattattgtcaccggtattcgccgcaggggcgatggcgatgtcgagcgtgttcgtgctgggcaacgctttgcggctgcgccgtttccgggcgccgatggcaaccccatccgacacatccacgacatga

SEQ ID NO: 39167 - DNA, 774 bp, Salmonella typhimurium
atgaaatcaaacacttctcagcaaagaccttaccaggaagtgggcgcaatgatacgggatctgattgttcagacgccgtaccgccccggggagcgcttgccgccggaaagagagatcgctgagaggctcaatgtgacgcgtaccgtcgtgcgtgaagcgctgatcatgctggaaattaaaggtctggttgaagtccgccgcggcgccgggatctacgtgctcgacagcgcggataataacgagatggaaggcgctgacgtcaatcactgtaatgacgccgggccttttgaactgttgcaggcgcgtcagttgctggaaagcaatatcgctgaatttgccgctctgcaggccacccgcgaagacatcattaaaatgcgccaggcgttacaactggaagagcgagagctcgcctccagcgcgccgggcggctcagaaagcggcgatatgcagtttcatctggccattgccgaagcgacccataacagtatgttggtagagctcttccgtcagtcctggcaatggcgtgaaaataatccgatgtggctccagcttcatagccatctgggcgatacgctttaccgtaaggagtggctggtcgatcataagcagatcctcgcggcgttaattaagaaagacgcccgcgcagcgaagctggcgatgtggcagcacctggaaaacgtgaagcagcgtctgctggagttttccaatgttgatgacatctactttgatggctatctgtttgagtcatggccgctggacaacgttgatgcctga

SEQ ID NO: 39168 - DNA, 1170 bp, Salmonella typhimurium
atgacagacacgacgatcctgcaaaacaacacgcatgtcattaagcctaaaaaatcggtcgcgctttccggcgtacctgccggaaataccgctctgtgtaccgtgggaaaaagcggtaacgatctgcactatcgcggttacgacattctcgatctggcggagcactgcgaatttgaagaagtcgcgcatttactgatccacggaaaattaccgacccgcgacgagctgaacgcgtataaaagcaagttaaaagcgctgcgcggattacccgccaatgtccgtaccgttctggaagcgttaccggcggcctcgcacccgatggacgtgatgcgtaccggcgtctccgcgctgggctgcaccctgccggaaaaagagggacataccgtctccggcgcgcgcgatattgccgataagctgttggcctcgctcagctctatccttctttactggtatcactacagccacaacggcgaacgtattcagccggaaaccgacgatgattccatcggcggccatttcctgcatctgctgcacggtgaaaagccaacccaaagctgggaaaaggcgatgcatatttcgctggtgctgtatgccgagcatgagttcaacgcctcgacgtttaccagccgggtgattgccgggactggctcggatgtctactccgcgattatcggcgcgattggcgcgctgcgcggcccgaaacacggcggggcgaatgaggtgtcgctggaaattcaacagcgttatgaaacgccggacgaggcagaggcggatatccgtaaacgcgtggaaaacaaagaggtggtgattggctttggacatccggtttacaccatcgccgacccgcgccatcaggtgatcaaacgggtggcgaaacagctttcagaagaaggcggctcgctgaagatgtaccacatcgccgaccgtctggaaacggtgatgtgggagaccaaaaagatgttcccgaatctcgactggttttcggcggtctcctacaacatgatgggcgtccctaccgaaatgttcaccccgctgtttgtcatcgcccgcgttaccggctgggcggcgcacattattgaacagcgtcaggacaacaaaattattcgcccctctgccaactataccgggccggaagatcgtccgtttgtctcgatagacgatcgttgctaa

SEQ ID NO: 39169 - DNA, 1887 bp, Salmonella typhimurium
atgtcttttagcgaattttatcagcgttccattaacgaaccggaggcgttctgggccgagcaggcccggcgtatcgactggcgacagccgtttacgcagacgctggatcatagccgtccaccgtttgcccgctggttttgcggcggcaccactaacttatgtcataacgccgtcgaccgctggcgggataaacagccggaggcgctggcgctgattgccgtctcatcagagaccgatgaagagcgcacatttaccttcagccagttgcatgatgaagtcaacattgtggccgccatgttgctgtcgctgggcgtgcagcgtggcgatcgcgtattggtctatatgccgatgattgccgaagcgcagataaccctgctggcctgcgcgcgcattggcgcgatccattcggtggtctttggcggttttgcctcgcacagcgtggcggcgcgcattgacgatgccagaccggcgctgattgtgtcggcggatgccggagcgcggggcggtaaaatcctgccgtataaaaagctgctcgatgacgctattgcgcaggcgcagcatcagccgaaacacgttctgctggtggacagagggctggcgaaaatggcatgggtggatgggcgcgatctggattttgccacgttgcgccagcagcatctcggcgcgagcgtgccggtggcgtggctggaatccaacgaaacctcgtgcattctttacacctccggcactaccggcaaaccgaaaggcgtccagcgcgacgtcggcggttatgcggtggcgctggcaacctcgatggacaccatttttggcggcaaggcgggcggcgtattcttttgcgcatcggatatcggctgggtcgtcggccactcctatatcgtttacgcgccgttgctggcaggcatggcgactattgtttacgaaggactgccgacgtacccggactgcggggtctggtggaaaattgtcgagaaataccaggttaaccggatgttttccgccccgaccgcgattcgcgtgctgaaaaaattcccgacggcgcaaatccgcaatcacgatctctcctcgctggaggcgctttatctggccggtgagccgctggacgagccgacggccagttgggtaacggagacgctgggcgtaccggtcatcgacaattattggcagacggagtccggctggccgatcatggcgctggcccgcgcgctggacgacaggccgtcgcgtctgggaagtcccggcgtgccgatgtacggttataacgtccagctactcaatgaagtcaccggcgaaccttgcggcataaatgaaaaggggatgctggtgatcgaagggccgctgccgccgggctgtattcagactatttggggcgacgatgcgcgttttgtgaagacttactggtcgctgtttaaccgtcaggtttatgccactttcgactggggaatccgcgacgccgaggggtattactttattctgggccgtaccgatgatgtgattaatattgcgggtcatcggctggggacgcgagaaatagaagaaagtatctccagctacccgaacgtagcggaagtggcggtagtggggataaaagacgctctgaaagggcaggtagcggtggcgtttgtcattccgaagcagagcgatacgctggcggatcgcgaggcggcgcgcgacgaggaaaacgcgattatggcgctggtggacaaccagatcggtcactttggtcgtccggcgcatgtctggtttgtttcgcagctccccaaaacgcgttccggaaagatgcttcgccgcacgatccaggcgatctgcgaaggccgcgatccgggcgatctgacaaccattgacgatcccgcgtcgttgcagcaaattcgccaggcgatcgaagaatag

SEQ ID NO: 39170 - DNA, 1290 bp, Salmonella typhimurium
atggaaaccactcagaccagcactattgcttcgattgactctcgaagcgcatggcgcaaaacggataccatgtggatgctgggcctttacggcacggctatcggcgcgggcgttctgttcctgccgatcaacgcaggcgtcggcggcatgattccgctcatcatcatggcgattctcgctttcccgatgacctttttcgcacaccgtggtttaacccgcttcgtgctgtccggtaaaaatccgggtgaagacatcactgaagtcgttgaggaacacttcggtatcggcgcaggtaaactgattaccctgctttacttcttcgcgatttaccccatcctgctggtttacagcgtggcgattactaataccgtggaaagcttcctgacccaccagttagcgattaatccgccgccgcgggcgattctttccctgatcctgattgttggcatgatgaccatcgtgcgcttcggcgagcaaatgatcgttaaggcgatgagtatcctggtattcccgttcgtcgctgcgctgatgctgctggccttgtacctgatcccgcagtggaacggcgcggcgctggaaactctgtcctttgattccgccgcgtctaccggtaacggtctgtggatgacgctgtggctggcgattccggtgatggttttctctttcaaccactccccgatcatctcctccttcgcggttgcgaagcgtgaagagtacggtgaaggcgctgagaagaaatgttctaaaattctggccttcgcccacatcatgatggtgctgaccgtgatgttcttcgtcttcagctgcgtgctgagcctgacgccggcagatctggcagcggcaaaagagcagaacatctctattctgtcttacctggcgaaccattttaacgcgccgatcatcgcctggatggcgccgatcattgcgatgattgctatcaccaaatccttcctcggccactaccttggcgcgcgtgaaggctttaacgggatggtgattaaatcgctgcgtggtaaaggtaaatccatcgaaatcaacaaactgaataaaattaccgcgctgttcatgctggtcaccacctggattgtggcgacgctgaaccccagcatcctgggcatgattgaaaccctgggcggcccgatcatcgcgatgattctgttcctgatgccgatgtatgccatccagaaagtaccggcaatgcgtaagtacagcggtcatatcagcaacgtattcgttgtgattatgggcctgattgccatctccgctattttctactcactgttcagctaa

SEQ ID NO: 39171 - DNA, 1368 bp, Salmonella typhimurium
atgattagcgtattcgatatttttaaaatcggcattggcccttccagttctcacaccgtcggaccaatgaaagcaggcaagcagttcacggacgatctgattgcccgccatattcttacagatgtcacccgcgtcgtggtggatgtctacggctctctgtcattgacgggtaaaggccaccacactgatatcgccattattatgggcctggcggggaatctgccggacaccgtcgatatcgacgccattccgtcctttatccaggatgtgaacacccatgggcgtttactactggctaatgggcagcatgaagtcgaatttccggtcgataagtgcatgaatttccacgccgacaacctgtctctgcatgagaacgggatgcgtattaccgcgctggcgggcgataaggtgctctacagccaaacctactactccatcggcggcggctttatcgtcgatgaagagcactttggtttgacgaatagcgaacccgttaacgtaccgtacccttacaaaaccgccgcggatttacagcgccactgccaggagacgggtttgtcgctctccggtctgatgatgcaaaacgaactggctctgcacagtaaagaagcgctggagcagcacttcgccagggtctgggaggtgatgcgcagcggtattgagcgcggtatcaccaccgagggcgtattgccgggcaaactgcgcgttccgcgtcgcgcggcggcgctgcgtcggatgctggtcagtcaggataagaccaccaccgatccgatggcggtcgtcgactggatcaatatgttcgcgctagcagtgaacgaagagaatgccgcaggcggacgagtagtcactgccccgactaacggcgcatgtggtattgttccggcggtgctggcgtactatgacaagtttatccgcgaagtaaatgctaactcgcttgctcgctatatgctggtcgccagcgcgattggctcgctgtataagatgaacgcctctatttccggcgccgaagtgggttgtcagggagaggtcggcgtggcctgttccatggcggcagcgggtctggccgagctgctgggcggtagcccggcgcaggtgtgcatcgccgcagaaatcgccatggagcataatctggggttaacttgcgatccggttgccggtcaggtacaggttccctgcattgagcgtaacgcaattgcttcagtcaaagcggtcaacgccgcgcgtatggccgtgcgccgtaccagcgaaccgcgcgtatgcctcgataaagtgattgagaccatgtacgaaaccggtaaagacatgaacgctaagtaccgcgaaacttcgcgcggcggcctggcgatgaagatcgttacctgcgattaa

SEQ ID NO: 39172 - DNA, 2937 bp, Salmonella typhimurium
atgcactcctggaaaaagaaacttgtagtctcacaattagcattggcttgcactctggcaatcacttctcaggcgaatgctactacttacgatacctggacttattacgacaatcctaccaccgcgcttgattggaataatatggatgccgcaggcactgttgatggtaactatgtaaactatagcggtttcgtttactacaacaatgccaatggtgatttcgatcagacgttcaacggtgacactgttaacggtacgatttctacctattatctgaaccatgattataatgacgcaaccagtaatgagctgaatattagtaattcagttattcatggctcgattacttccatgctgccgattggttattacgatcgttttgatacgttggatcacgatgggtattctgaatattatcggttcaacaacggtactgatactgttgacggaaactggtatgacggtgatgtgttcacgctgaacatcgctaattccaccattgatgatgattatgaagcgttttacttcactgattcctataaggatggtgatgtaactaagtacacaaatgaaacattcgatgtcagcgaaggcgtggcggtgaatcttgatgtagaaagcaacatcaatatttccaacaattcccgtgttgcaggtattgccttgtctcagggaaatacttacaacaacacttacacgacggaatcccataactgggataacaatattaatgtatttgactctactgtaacttccggttcagattatatcctggatagtgcttatactactgacactggtacttttggcacaggtcactttggcaattccgatgagccgagcgattatactggtgctggcgacgttgcattatctttcactgatgacaatggtgcttcagactatgcaatgaagaacaatgtgtacttcagtaattctacgctgatgggtgatgtcaaatttaccagtaactggaacgccaatttcgatgctgatggtgatgatactaacggtgatggtgttcctgataccaaccatggctgggctgatgacggcctcaacgtcgacgaactgaaccttacacttgataatggcagtaagtgggttggtcaggcgacttatactgttgatacaacgtcccgtatgtatgatgttgaaacgaacagccttactccaggcgcaacattggaagataatgcctggaatcgtatcgttggtaatgaagttttccagagcggcgtgtttaacgtgacgctgaacaatggttctgaatgggacaccgttggggactcgactgttgatacgctggctgtaaacaatggttctcaggttaatgtttctaattctgatttaacatcagacaccattgatttgactaatggttcttcactgaacattggtgaaggtggttatgttgacaccgatcacctgacaattgactcctatagtactgttggtttgaccgaatctactggctggagtacttactcaaacctgtatgctaataccatcaccgtaactaacggtggtgtgttggatgtgaatgttggtcagtttgataccgaagtattcagcactgataaactggaactgaccagcggcaatactgctgatcacaacggtaatgttgtttctggtgtgttcaatatccatagcagcgattatgttctgaacgctgacctggtgaacgaccgtacctgggataccactcaggctaactatggttacggtactatcgcaatgaactctgacggtcacctgaccatcaacggtaatggcgatatcaacaacggcgacgaactggataacagctctgttgacaacgttgtagcggctaccggtaactataaagttcgcatcgacaacgctactggtgccggttctgttgcggattacaaaggcaacgagctgatttatgtcaatgacgtaaacaccgacgcaaccttctctgcagcaaacaaagctgacctgggtgcttacacctatcaggctaagcaggaaggcaacactgtcgtgctggaacagatggaactgaccgactacgctaacatggcgctgagcattccttctgcgaacaccaatatctggaacctggaacaagacaccgttggtactcgtctgaccaacgctcgtcatggcctggcggataacggcggcgcatgggtaagctacttcggcggtaacttcaacggcgacaacggcaccattaactacgatcaggatgttaatggcatcatggtcggtgttgataccaaagttgacggtaacaacgctaagtggatcgttggtgcggcagcaggtttcgcgaaaggcgatctgagcgatcgtaccggtcaggtggatcaggacagccagtctgcctacatctactcttccgctcgtttcgcaaacaacatctttgttgacggtaacttgagctactctcacttcaacaacgatttgtctgctaacatgagcgacggtacttacgttgacggcaacacatcttctgacgcctggggcttcggcttgaaactgggttatgatctgaagctgggtgatgcaggctacgtaacgccttacggcagcgtatccggtctgttccagtctggcgacgactaccagctgagcaatgacatgaaagttgacggtcagtcttacgacagcatgcgttatgaactcggtgtagatgcaggttataccttcacttacagcgaagatcaggcgctgaccccgtacttcaaactggcttacgtttacgacgactccaacaacgatgctgacgtaaacggcgactctatcgacaacggcgtagaaggttctgcggtacgtgttggtctgggtactcagttcagcttcacgaagaacttcagcgcctacaccgatgctaactacctcggcggcggtgatgttgatcaagactggtctgcaaacgttggtgttaaatatacctggtaa

SEQ ID NO: 39173 - DNA, 624 bp, Salmonella typhimurium
atgttatctttaagcaagccactacaggaattctacagactcgataaatgcctttctaagcatggtacgcgtttcgagtttgttaacgataaagagattatctgttcacctgatgaaagtaatacccatacctttgttattttagagggggttgtttcgttagttcggggtgataaagttcttattggtattgtgcaggccccttttatttttggcttagccgatggcgtggcgaaaaaagaggcacaatataaattaattgcggagagcggttgcatcggttatcgcctctcatcatcacaaactctcgccatcattgagcagaaccaactgtggcgtgaagccttctgttggatagtatggaaaagtcaggtactggaacttcgtgacaagcagctcattggtaataattcttacgaccaaattcgtgcgacgttaatgacaatgattgagtgggatgaagaacttcgctcacgtattggtgttatgaattatattcatcaacgaacgcgcgtatcgcgatcggtggtggcggaagttctcgcggccctgcgtaagggtaattacattgaaatgaataaaggcaaactgatcagtattaaccgtttgccctccgaatattaa

SEQ ID NO: 39174 - DNA, 864 bp, Salmonella typhimurium
atgatccgcagtatgaccgcctacgcccggcgtgaaatcaagggtgaatggggtagcgcgacctgggaaatgcgctcggtaaaccagcgttatctggaaacttactttcgtctgccggaacagttccgtagtcttgaacccgtcgtgcgcgaacgcattcgtacacgcctgacgcgcggcaaagtcgaatgtatgctgcgttttgaacccgatgccagcgcgcaaggcgagcttattctgaatgaaaagctagcgaaacaattagttagcgccgcaaactgggtcaaaatgcagagcgacgaaggggaaatcaatccggttgatattttgcgctggccaggtgtcatggcggcgcaagagcaggatctggacgcgattgccgcagaaattttagccgcactggacggtacgctggatgactttatcgtcgcgcgcgaaacggaaggccaggcgctgaaagcgctgattgaacaacggctggaaggcgtcagcgccgaagtagcgaaagtccgcgcgcatatgccggaaatcctgcaatggcagcgtgagcgcctggtcgcgaagctggaagatgctcaggttcagttggaaaacaaccgtctggagcaagagctggtgatgatggcgcaacgcattgatgtggcggaagagctggatcgtctggaagcgcacgtcaaagagacttacaacattctgaagaaaaaagaggcggtaggtcgccgtctggacttcatgatgcaagaatttaaccgtgagtcgaacaccctggcctccaaatccatcaacgctgatgtaactaactccgctattgaattaaaagtgttgatcgagcaaatgcgcgagcaaatccagaatattgaataa

SEQ ID NO: 39175 - DNA, 423 bp, Salmonella typhimurium
atgctaaaaaccatttcaccgttaatttccccgacactgctcaaagtgctggccgagatgggccacggggacgaaatcattttttccgacgctcactttcccgcgcatagcctgggcccgcaggtgattcgcgccgatggtcttagcgtcagcgatctactgcgggcaattattccgctctttgagctggatagctacgccccgccgctggtgatgatggccgccgtggaaggcgacacgctcgatcccaacgttgaagcgcgctatcgcgatgccttgtcattagaagcgccgtgcccggatatcgttcgtatcgaccgctatgcgttttatgagcgggcgcaaaaagcgtttgcgatcgttatcacaggtgagtgcgcgaagtacggaaatattcttttaaaaaaaggggtaacgccgtaa

SEQ ID NO: 39176 - DNA, 2112 bp, Salmonella typhimurium
ttgtatctgtttgaaagcctgaatcaactgattcaaacctacctgccggaagaccagattaagcgtcttcggcaggcgtatctcgttgcacgtgacgctcacgagggccagacacgttcaagcggtgaaccctatatcacgcacccggtggcggtggcctgtattctggccgagatgaaactcgactacgaaacgctgatggccgctctgctgcatgacgtgattgaagatacccccgccacctatcaggacatggaacagcttttcggtaaaagcgttgccgagctggtagagggggtgtcgaaacttgataagctcaagtttcgcgataagaaagaggcgcaggccgaaaactttcgcaaaatgattatggcgatggtgcaggatatccgcgtcatcctcattaagcttgctgaccgtacccataacatgcgcacgctgggctcgttacgcccggataaacgtcgtcgtattgcccgtgaaacgctggaaatctacagtcctctggcgcaccgtttaggtattcatcacatcaaaaccgagctggaagagctgggttttgaagcgctgtatcccaatcgttaccgcgtcatcaaagaagtggtaaaagcggcgcgcggcaaccgtaaggagatgatccaaaaaatcctctctgaaatcgaaggacgtttgcaagaggcgggaattccgtgtcgcgttagcggtcgcgaaaaacatctttactcgatctactgcaaaatggtgctcaaagagcagcgttttcactcgatcatggacatttacgctttccgcgtcatcgttcatgactccgatacctgctatcgcgtactcggccagatgcacagtctctataagccgcgtccgggacgggtgaaagactatattgccattcccaaagcgaacggctatcagtctttgcacacctcaatgatcggcccgcacggcgttcctgttgaagtccagatccgtaccgaagatatggatcagatggcggaaatgggggtcgcggcgcactgggcgtataaagaacacggtgagaccagcaccacggcgcagatccgcgcccagcgctggatgcagagcctgctggagctacaacagagcgccggtagttcgtttgaatttatcgaaagcgtaaaatccgatctcttcccggatgagatttacgttttcaccccggaagggcgcattgtcgaactgcccgctggcgctacgccggtggattttgcctatgcagtgcataccgacatcggccacgcctgcgtcggcgcgcgtgtcgaccgccagccttatccgctgtcgcagccgcttagcagcggtcagaccgtcgaaattattaccgcgccgggcgcgcgtcccaacgccgcctggctgaactttgtcgtcagctctaaagcgcgcgctaaaattcgtcagttgctgaaaaacctcaaacgtgatgactccgtaagcctgggccgtcgtctgcttaaccatgccttaggcggtagtcgtaagctggcggaaattccgcaggaaaatattcagcgcgaattggatcgtatgaagctggcaacgcttgacgatctgctggcggaaatcggtctcggcaacgcgatgagcgtagtggtcgcgaaaaatctgcagcaaggcgaagccgtggtgccgaccgttgcgcaatcgaatcacggccacctgccgattaaaggcgcggatggcgtgcttatcacctttgcgaagtgttgtcgtccgatcccaggcgacccgatcatcgctcacgtcagcccaggtaaaggactggtgatccaccacgaatcctgccgtaatatccgtggataccagaaagagccagagaaatttatggcggtcgaatgggacaaagagacggagcaggaattcattaccgaaatcaaggtggaaatgtttaaccatcagggcgcgctggctaacctgacggcggcgattaataccaccacctccaatattcaaagcctgaatactgaagagaaagatggtcgcgtctatagtacctttattcgccttaccgcacgcgatcgcgtacatctggcgaatatcatgcgcaaaatccgcgtgatgccagacgtcattaaagtcacccgtaaccgaaactag

SEQ ID NO: 39177 - DNA, 1212 bp, Salmonella typhimurium
atggaatcctggaaagttaatctaatttccgtttggtttggatgtttttttaccgggctggcaatcagccaaatcctgccattcttacccctttatatttcccagcttggcgtctcttcccatgaagcgttatcaatgtggtccgggttaacgtttagcatcacgtttcttatttccgccattgtgtcgccgatgtggggcagtctcgccgatcgtaaagggcgtaaactgatgctattgcgcgcgtcgctcgggatggcgatagctattctactgcaggcatttgcgacccatgtctggcaacttttcctgctgcgcggaatcatggggttaacgtcaggctatatccccaatgccatggcgctggtagcctctcaggtaccacgcgaacgtagcggctgggcgctcagtacgctttctaccgcgcagatcagcggcgttatcggcgggccgttaatgggcggctttgtcgcggatcatatcgggctgcgggcggtatttctgattaccgccatgctgttggtggtgagctttctggtcacgctatttttaattaaagaaggcgtgcgtccggtcatcaagaaaagcgaacgcctgagcggtaaagccgtttttgcgtcgttaccttatcctgcgctggtgatcagtttgttttttaccacgatggtcattcaactctgtaatggttccatcagtccaatcctggcgctgtttatcaaatcaatgatgccggacagtaataacatcgcctttcttagcgggttaattgcctcggtgcccggtatctctgcgcttatctccgcgcctcgcctgggaaaacttggcgacagaatcggcacggaaagaattctgatggccacgcttatctgcgcagtgctgcttttcttcgcgatgtcctgggtcaccacgccgttccagctggggctgttacgtttcttgttaggctttgccgatggcgcgatgttacccgccgtacaaacgttattggtgaaatactccagcgatcaaattaccggacgtatttttggctacaaccagtcatttatgtacctgggcaacgtggttgggccgttgatgggcgcgacggtatcggcgatggccggtttccgctgggtttttatcgctacggcggcgatcgtgttgatcaatatcgggcaactgaccctggcgttacgtcgtcggcgtaacgcgcaaaaagcgaaaggccaatag

SEQ ID NO: 39178 - DNA, 192 bp, Salmonella typhimurium
atgccaaccagaccaccttatccgcgggaagcttatatcgtcaccattgaaaaaggcacgccgggccagacggtgacgtggtatcagctacgggctgaccatccgaaacctgattcgctcatcagcgagcatccgaccgcagaagaagcgatggatgcgaaaaatcgttacgaagatccggataaatcatag

SEQ ID NO: 39179 - DNA, 834 bp, Salmonella typhimurium
atggaaaagagtcttttagttattgtccgacataaacctgggcgtactcgtctattaatgcgggccttgcaatccattaatgaccagacgttcaaaaaaataaatatcatcattttctgcatggaggaagaattgaaatgtcacaatgtggatgatttttatctgaaagaactgtcaaatatatatagtgttatctacgacgaaagctgtatctttaatgctattaagatgtctgaatctaattatttatgctttatggatgatgacgattcttgggcccctgaatatgtgtcaaggctactcagtgttttggcgaatatacagtcaacgtattcatctgtaaatgcaatagcatgccatacaaataaagttgctgagattgcggaaaataatagaataattataaattcaacgcaaccatggaaccactatttaaatgctggccctgttagttttgatgttatttattacaggaattctattccactttcctcgtgtttattcgataaaaattctgttatcgatatgattgaaagtcataaattatcctctcctgcatttttctggcctttttttattcattaccttgcagaaaatgatgtttggatcttacctgaagcactggcattttatcatttcagagaaaatgatgactttgaatttggcaattataccgtaattaacaatgagttatttgatatagaatgcaaaattgcagaaaataaaatgatgagaagtattgatgactcatcattgctcaatgtgttactttcaaatattgctaacaatagtctttttcataaaatttcttatattgaaaataagattaaataa

SEQ ID NO: 39180 - DNA, 141 bp, Salmonella typhimurium
atgcaggtgttaaactcacttcgcaatgcaaaacaacggcatccggattgccagatagtcaaacgcaaaggacgcttatacgtgatttgtaaaacaaatccgcgttttaaggcggttcaggggcgtaaaaaaagacgttaa

SEQ ID NO: 39181 - DNA, 885 bp, Salmonella typhimurium
atgttacgtaaaaaacaatacaattcaaaagctaatgtgtcatatctgatatatcagcaagcaaacttaatgaaatatacaataacaacaataaagtatgtaaattttcttatatctgatatattagatccgttaattttgaataaattaattacaatggagccgggtttaaccatggaggagaagaaaatgaaaaatagattaaagcgtgactttagtcacatatcaattgaaatacccaaatccatcacccaggtgattaaagagaaaataagggagatgattatccatggcgatttcgatcttgggcaagcgatcagtgaaaatgaactatcaaatattctgatggtaagtaaaacaccaattcgtgaagcttttatttggctgagctataatgaaaacttagtcaacatcattccccgcagtgggacatttgttttttctgtcaccgacgaggatatcaatgatctcatcaaaatgagggttatccttgaacagggcgcaattcgtgaagcgatggagaaaaatgctaacaatgtcatagtcgaattaagcaatattttatcgaagtcagcaaaaattaatgcagagcgagatacgcaagcttacctcaaactggatcatgattttcattatgtttttgtgaaatatgccgataataaatacatttcacaagcacacctgttgatctcagcacgtttattggcaattcgctacagactggattttaccgctgaatatatcaccagctctaaccgtggacatgccactattttggatatgttaaaaaacaacaacgtcgagggcgtctgtaattttatcacgcaccacatcggtagcggttttacagaacgcgcaagaaaacttcttgcgctgaaagcgtaa

SEQ ID NO: 39182 - DNA, 66 bp, Salmonella typhimurium
atgaaccgcatcagcaccaccaccattaccaccatcaccattaccacaggtaacggtgcgggctga

SEQ ID NO: 39183 - DNA, 255 bp, Salmonella typhimurium
atgcgtgaaaagagggatttatggaacatcaaagagagctataccagcagcgcggttatagcgaagacttattacctaagacagaaacccaacgaaactggaaggcatttaactatttcaccttatggatgggatctgtacataacgtgccaaattacgttatggtcggcggtttttttatactggggctatcaacatttaatatcatgttggccattattatcagcgcattatttattgcggcggcgatggtaa

SEQ ID NO: 39184 - DNA, 234 bp, Salmonella typhimurium
atgagaattgaacttgttatcagccgggcaaaacagcttccggaaggtgccgttcctgcgcttgaaaaagaattaattacccgtctccagaatcagtatgaaaactgcaacttaaccatccgtcgaggcagtcaggatggtctgagtatcgtcggtgctgctgatggcgataaaaaacgtatacagagcattctgcaggaaacgtgggaaagcgctgacgactggttttattaa

SEQ ID NO: 39185 - DNA, 141 bp, Salmonella typhimurium
atgaaacgcacttttcaaccgtctgtactgaagcgcaaccgttctcacggcttccgtgctcgtatggctactaaaaatggtcgtcaggttctggcacgtcgtcgtgctaaaggccgcgctcgtctgaccgtttccaagtaa

SEQ ID NO: 39186 - DNA, 360 bp, Salmonella typhimurium
gtggttaagctcgcatttcccagggagttacgtttgttaactcccgctcatttcacattcgtcttccagcaacctcaacgggctggcacgccgcaaatcaccatcctcggccgcctgaattcgctggggcatccccgtatcggtcttaccgtcgccaagaaaaacgttcgacgtgcgcatgaacgcaaccggattaaacgtctgacgcgtgaaagcttccgtctgcgccagcatgaacttcctgcaatggatttcgtggtggtggcgaaaaaaggggttgccgacctcgataaccgtgctctctcggaagcgttggaaaaattatggcgccgccactgtcgcctggctcgcgggtcctga

SEQ ID NO: 39187 - DNA, 534 bp, Salmonella typhimurium
atgtctgaatttgttacggtagctcgcccctacgccaaagcagcttttgactttgccgttgaacaccaaagtgtagagcgctggcaggatatgctggcgtttgccgccgaggtaaccaagaacgaacaaatggcagagcttctctctggcgcgctggcgccggaaacgctcgctgagtcgtttatcgcagtctgcggtgagcagttagacgaaaacggtcagaacctgattcgggtgatggctgaaaataatcgtctgaacgcgctcccggatgttctggagcagtttattcatctgcgtgccgccagtgaagctacctccgaggtagaagttacgtcggcaaccgcattgagtgaagagcagctttcgaaaatcagcgccgcgatggaaaaacgtctgtcacgcaaagtgaagctgaattgcaaaatcgataagtctgtaatggcaggcgttatcatccgggcgggtgatatggtcattgatggcagcgtacgcggccgtcttgagcgccttgcagacgtcttgcagtcttaa

SEQ ID NO: 39188 - DNA, 1071 bp, Salmonella typhimurium
atgctctttacgtggattgtcaaaacctgccagcgtcatttgtccagactgacctggcccgctttgctgggcctgtttatcgggcagtatctgctttgttatctggtgctgcgcctgttgcgcgaaagcgcgttggtgagccagttaagcgattttatctattactgctcggtggtgggttccacattaggttttggcgatcttagcccgcagacggcgccaggacgtctgttcaccgcgctgtggcaaattccggttagcgtcgggttgttcggcgcgttaatgggaaaagtgattgcgcaggtacagggaatgttagcgaaaggaataacgggcatgggcgattatcgccatttacaccatcatatgctggtgattggctggcggggtcatcaaaccgaaaagatgatctcattgctgctatatgacaagcggcgtgcctttgaacgggttctgctgtgcgaactggaagatattcagcatccgctgccgggtaataactgggtggattttatccgcatcagcaactttaacgatccgcaggaacaccagcgcatggggctggagcagtgccagagcgtgattattttcgctcgtaccgatgagcagaccttcacggcggcgctctcgctggcagactatgtacccgcgcagtgccatattgtggtttatctggaagacgagcgttatgccggattactggaaacccactgcccgcgcatggagatagtccgtaacctttccgctgaacaactttcccgttccattcaggacccaggatcatcgcaatctgtcgcttccattatgaatccgatgctgggcgataccggattcgcgctgcctgtcccggcttctgtcgcgcctatgcgatacggcgcgctaatgcgttatatgaagcttcatcatgacgcgacggtgctggggatcagtcactgcaagaatggtcgtggtatggaattgaatccggtgatttcaactgaagtcagaggcggtatgtggctacatctggtcggtaataatcgcattctggctgaagaggtcgcatggcaagagatagaggttcccctatga

SEQ ID NO: 39189 - DNA, 1680 bp, Salmonella typhimurium
atgactcagcatactcaaactccttcaatgccttctccgctctggcaatactggcgcggtctttccggctggaacttctattttctggtcaagtttggcctgctgtgggcaggctatctgaattttcatcctttactgaatttggtattcatggcgtttctgctcatgccaataccaaagtatcgccttcaccggttgcgccactggattgccattcccgtcggcttcgcgctgttctggcatgatacctggctgcccggcccgcaaagcattatgagccaggggacgcaggtggcggaattcagctccggttatctgctcgatctgatcgcccgttttattaactggcaaatgatcggcgccatcttcgtactgctggttgcctggctatttttatcacagtggattcgggtcacggtgtttgtggtcgccatcatggtatggctgaatgtactgacattaaccggcccggtttttacgctgtggccggcaggccagccaaccgatacggtgacgacaactggcggtaacgcggccgctaccgtcgcgacagcgggcgataagccggtcatcggcgatatgcctgcgcaaaccgcgccgccgacgaccgcgaatctgaacgcctggttgaacaccttctatgccgcggaagaaaagcggaaaacgacgttcccggcgcaacttccgcctgatgcgcagccgttcgacctattggtcatcaatatctgttcgctctcctggtcggatgtcgaagcggcaggcctgatgtcacatccgctatggtcgcactttgacattttgtttaaacactttaattccggtacgtcttacagcggcccggcggccattcgtctgctgcgcgccagctgtggtcaaccttcgcatacccgactttatcaaccagccaataacgaatgttatctgtttgataatctggcgaaactgggctttactcagcatctgatgatggatcataacggtgaatttggcggcttcctgaaagaagttcgcgaaaacggcggtatgcagagcgaactgatgaaccagtccggcctgccaaccgccctgctgtcattcgacggctcgccggtatatgacgatctggcggtcctgaaccgctggttgacaggggaagaacgtgaagccaattcccgctccgcgactttctttaacctgctgccgctgcacgatggcaaccacttccccggcgtcagcaaaacggcggattataaaatccgcgcgcagaaactgttcgatgaactggacgccttctttaccgaactggagaaatccgggcgtaaggtgatggtagtcgtcgtaccggagcacggcggcgcgctgaagggcgacagaatgcagatctcaggcctgcgcgatattcccagcccctccatcaccaacgtcccggcgggcgtgaaattttttggcatgaaagccccgcatgagggcgcgccgattgatattaatcagccgagcagctacctggcgatttccgaactggtcgtacgcgccgtggacggtaagctctttaccgaagacagtgtgaactggaacaagctgaccagcaatctgccgcaaaccgcgccggtttcagaaaacgctaatgcggtggtgattcagtaccagggtaagccctacgttcgtctgaatggcggcgactgggtgccttacccgcagtaa

SEQ ID NO: 39190 - DNA, 882 bp, Salmonella typhimurium
atgcagcaatatatcggtattgatgtgggaggaactcacgtcaaatatggcgtgattaacagtgacggcgaagaattaacccatcatcaattcgatacgccagaggacgcctccacgtttacccgcaaatggcaggatgtggtggcgcgttgccaacaggactatgacattgcggcaatcggggtcagtttccctggccatattaatccccataacggtcatgcggcaaaagcgggcgcgctggcttacctggatgacgtcaacctgatggagttgttcagcgggctgaccgatctgccgctggtcgtggagaacgacgcgaactgtgcggcgctgggcgaaatgtggcgaggtgccgggcagcattatgaaaacatggtctgcattaccattggaaccggcattggcggcggtattatcgtcggacgagaactgtatcgcggcgcgcattttcacgccggtgaattcggcgtcatgccggtcgggaacaatggcgaaagtatgcataaaatcgcgtcaaccagcggattaatggcgtcgtgccgccaggcgctggcgctgcctgccgaagagatgccgcctgcggatgtgatcttcgaacgaatggcgaccgatgttcatctgcgtgaggcggtcaatgactgggcgcgttatctttcacgcggcgtttacagcgtgatctctatgtttgatccgggcgtggtgctgatcggcggaggaataagcgaacaggaaaagctctacccgctcctgacgcggcatcttgaaacgtttgaaatgtgggaggcgctccaggtgccgattcagccctgccaactgggaaatcaggcgggcaggctgggcgccgtctggctggcgcagcaaaagctcgaccgaggctaa

SEQ ID NO: 39191 - DNA, 366 bp, Salmonella typhimurium
atgtctatcactaaagatcaaatcattgaagcagtatccgctatgtccgtaatggacgttgtagaactgatttctgcaatggaagaaaaattcggtgtttccgctgctgctgctgtagctgtagctgctggcccggctgaagctgctgaagaaaaaactgaattcgacgtaattctgaaagctgctggcgctaacaaagttgctgttatcaaagcagtacgtggcgcaactggcctgggtctgaaagaagctaaagacctggtagaatctgctccggccgctctgaaagaaggcgtgagcaaagatgacgctgaagcactgaaaaaatctctggaagaagctggcgctgaagttgaagttaaataa

SEQ ID NO: 39192 - DNA, 276 bp, Salmonella typhi
gtggcttctgtttctatcagctgtccctcctgttcagctactgacggggtggtgcgtaacggcaaaagcaccgccggacatcagcgctatctctgctctcactgccgtaaaacatggcaactgcagttcacttacaccgcttctcaacccggtacgcaccagaaaatcattgatatggccatgaatggcgttggatgccgggcaaccgcccgcattatgggcgttggcctcaacacgattttccgccatttaaaaaactcaggccgcagtcggtaa

SEQ ID NO: 39193 - DNA, 1209 bp, Salmonella typhi
atgtgcgaactcgatattttacacgactctctttaccaattctgccccgaattacacttaaaacgactcaacagcttaacgttggcttgccacgccttacttgactgtaaaactctcactcttaccgaacttggccgtaacctgccaaccaaagcgagaacaaaacataacatcaaacgaatcgaccgattgttaggtaatcgtcacctccacaaagagcgactcgctgtataccgttggcatgctagctttatctgttcgggcaatacgatgcccattgtacttgttgactggtctgatatccgtgagcaaaaacggcttatggtattgcgagcttcagtcgcactacacggtcgttctgttactctttatgagaaagcgttcccgctttcagagcaatgttcaaagaaagctcatgaccaatttctagccgaccttgcgagcattctaccgagtaacaccacaccgctcattgtcagtgatgctggctttaaagtgccatggtataaatccgttgagaagctgggttggtactggttaagtcgagtaagaggaaaagtacaatatgcagacctaggagcggaaaactggaaacctatcagcaacttacatgatatgtcatctagtcactcaaagactttaggctataagaggctgactaaaagcaatccaatctcatgccaaattctattgtataaatctcgctctaaaggccgaaaaaatcagcgctcgacacggactcattgtcaccacccgtcacctaaaatctactcagcgtcggcaaaggagccatggattctagcaactaacttacctgttgaaattcgaacacccaaacaacttgttaatatctattcgaagcgaatgcagattgaagaaaccttccgagacttgaaaagtcctgcctacggactaggcctacgccatagccgaacgagcagctcagagcgttttgatatcatgctgctaatcgccctgatgcttcaactaacatgttggcttgcgggcgttcatgctcagaaacaaggttgggacaagcacttccaggctaacacagtcagaaatcgaaacgtactctcaacagttcgcttaggcatggaagttttgcggcattctggctacacaataacaagggaagactcactcgtggctgcaaccctgcttactcaaaatctattcacacatggttacgttttggggaaattatga

SEQ ID NO: 39194 - DNA, 504 bp, Salmonella typhi
atgccgggcaaccgcccgcattatgggcgttggcctcaacacgattttccgccatttaaaaaactcaggccgcagtcggtaacctcgcgcatacagccgggcagtgacgtcatcgtctgcgcggaaatggacgaacagtggggatacgtcggggctaaatcgcgccagcgctggctgttttacgcgtatgacaggctccggaagacggttgttgcgcacgtattcggtgaacgcactatggcgacgctggggcgtcttatgagcctgctgtcaccctttgacgtggtgatatggatgacggatggctggccgctgtatgaatcccgcctgaagggaaagctgcacgtaatcagcaagcgatatacgcagcgaattgagcggcataacctgaatctgaggcagcacctggcacggctgggacggaagtcgctgtcgttctcaaaatcggtggagctgcatgacaaagtcatcgggcattatctgaacataaaacactatcaataa

SEQ ID NO: 39195 - DNA, 192 bp, Salmonella typhi
atgccaaccagaccaccttatccgcgggaagcttatatcgtcaccattgaaaaaggcacgccgggccagacggtgacgtggtatcagctacgggctgaccatccgaaacctgattcgctcatcagcgagcatccgaccgcagaagaagcgatggatgcgaaaaaacgttacgaagatccggataaatcatag

SEQ ID NO: 39196 - DNA, 1197 bp, Salmonella typhi
atgcgtggggatttttacaaacagttaaccaacgatctggaaaccgcccgggcggaaggattgtttaaagaagagcgcattattacgtctgcgcagcaggcggatatcaccgtggcggatggaagccacgttattaacttttgcgccaataactatctcgggctggcgaatcaccctgagctgattaatgccgcaaaagcgggcatggacagccacggtttcggtatggcgtccgtgcgttttatctgcggcacccaggacagccacaaagcgctggagcaaaagctggcaagcttcctcggcatggaagatgcgattctgtattcctcctgtttcgacgctaacggcggcttgtttgagacgttgctgggcgcggaagacgctattatttccgacgcgctgaaccacgcgtctatcattgacggcgtgcgtttgtgtaaagcgaagcgctatcgctatgccaacaacgatatggtagagctggaagctcggctgaaagaggcgcgtgaagccggcgcgcgtcatgtcctgatcgccaccgacggggtgttctcaatggatggcgtcatcgccaatctgaaaggcgtctgtgatctggccgataaatacgatgcgctggtgatggttgatgattctcacgcggtaggctttgtcggcgaaaacggtcgcggttcccatgaatactgcgacgtaatgggccgcgtagatattattaccggtacgctgggcaaagcgttaggcggcgcatccggcggctataccgcggcgcgtaaagaggtcgttgagtggttgcgtcagcgttcccgcccatatctgttctccaactccctggcgccggcaatcgtggcggcttctattaaagtgttggagatggtggaagcgggcgcagaactgcgcgatcgcttgtgggcgaacgcccggcagttccgtgagcagatgtctgccgcgggatttacgctggcaggcgcggatcacgccatcatcccggtaatgctgggagatgcggttgtcgcgcagaaatttgcccgcgaactgcaaaaagagggcatttacgttaccggtttcttctatccggtcgtaccaaaaggtcaggcgcgtattcgtacccagatgtctgcggcgcatacgcctgagcaaattacgcgtgcggtagacgcgttcacgcgtattggtaaacaactgggcgtgattgcctga

SEQ ID NO: 39197 - DNA, 1035 bp, Salmonella typhi
atgaaaaatagtaaaaccaaagtgagtatcattatcccgttatataatgcgggagcggattttaatgcttgcatggcgtcgttaatcgcgcaaacgtggtcggcgctggaaattattattgtgaatgatggatcgacagatcattccattgagatagcaaaacattacgcggaacattacccgcacgttcgactgcttcatcaggccaatgctggcgcatctgtcgcccgtaatcttggtttgcaagcggcgaccggagattatgtcgcctttgtcgatgcggatgacctggtctacccgaagatgtatgaaacgctgatgactatggcgcttaacgatgatctggacgttgcgcagtgtaatgcggactggtgcgtccgaaaaaccgggcacgcctggcaatctattccgaccgatcgtctgcgttccaccggggtattaagcggaccggattggttgcgtatggcattggcctcgcgacgctggacgcatgttgtctggatgggcgtttatcgacgtgcgttaattaccgataacaatattactttcgttcccggactacatcatcaggacatattatggtcgacggaagttatgtttaatgccacgcgcgtacgttataccgaacaatcattatataaatatttcctgcatgataattcggtaagccgtttgcaaagacaaggcaataaaaatcttaattatcagcggcattatattaaaattacgcggttattagaaaagctcaatcgtgattatgcccggcgtattccgatttacccggagtttcgccagcaaattacctgggaagcgttacgcgtttgtcatgcggtgcgtaaagaacctgatattttgacccgccagcgtatgattgccgaaatttttacttctggcatgtatagacggatgatggctaacgtccgcagcgcgaaagcggcttatcagacgctgctctggtccttccggctgtggcaatggcgcgacaaaaccttgtcgcaccgtcgtatggcccgtaaggcgctcaatctgtcttag

SEQ ID NO: 39198 - DNA, 963 bp, Salmonella typhi
ttgcctcagtttcgtcgctccattctcacgctggccactttgctggcatttgcacatcccgttttcgctggcaagctcgccatcgtgattgatgattttggctatcgcccgcacacggaaaaccaggttctggcgctgccgccaaacatctccgtcgctgtactgcccaacgcgccgcacgcgcgcgaaatggcgactaaagcgcacaatagcgggcatgaggtgttaatccatctgccgatggcgccgctaagcaaacagccgctggagaaggatacgctgcgaccagatatgagcagcgatgagatcgagcgcattatccgcgaggcggtaaacaacgtgccgtatgccgttgggcttaataaccacatgggcagcgcaatgacttccagcctgttcggtatgcaaaaagttatgcaggcgctggaacattacaatctctattttctcgacagcatgacgattggcaatagccaggcgatgcgcgcggcatccggtacgggtgtgaaagtgatcaagcgcaaagtgttcctcgacgatacgcaaaacgaggcggatatccgtcgtcagtttaatcgcactatcgaactggcccgtcgcaacggttccgctatcgcgattggtcatccgcatcccgcaacggttcgcgtgctgcaacagatggtttatcgcctgccggcagatatcaccctggtacgtccaggcagcctgctcaacgaaccgcaggtagatacgtctcgacctgatttgacgccgcagaaaattgacgcgccgcgcaatccctttcgcggcgtgaagatgtgcaagccgaaaaaaccgctgcaaccagtctacgctacgcgctttttcagcgtcatcggcgagagcattacgcaaagttccgtgattgtctggtttcagcaccagtggcaaggctgggggaaaatcgccgcgcctaaaaacatgagcgctaagacagattga

SEQ ID NO: 39199 - DNA, 432 bp, Salmonella typhi
atgcaagaaattatgcaatttgttggccgtcatcccatactgagtatcgcctggattgcgttactggtggcggttttatttaccacgttcaaaggtctgacttcaaaagttaaggtgattacacgcggcgaagccacgcgccttatcaacaaagaggacgccgttgttgtggatttacgtcaacgtgacgatttccgtaaaggccatatcgctggcgcgaccaatttgctgccgagcgaaatcaaagccaacaatgttggcgaactggaaaagcacaaagacaagccaattatcgtggtcgacggttctggtatgcagtgccaggaatccgctaacgcgctgacaaaagccggctttgaaaaggtctttgtgttgaaagaaggcgtagcaggctggagcggcgagaatctgcctctggtgcgcggtaagtga

SEQ ID NO: 39200 - DNA, 252 bp, Salmonella typhi
atggccaatattgaaatctacaccaaagcaacctgcccgttttgccatcgtgcaaaggcgctgttaaacagcaagggcgtgagtttccaggaaattgcgattgacggcgacgccgtgaagcgtgaagagatgatcaaacgtagtggccgaacgacggttccgcaaatttttattgatgcacagcacattggcggttgtgacgacttgtatgcgctggatgcgcgtggtggactggatccgctgttgcgttaa

SEQ ID NO: 39201 - DNA, 3105 bp, Salmonella typhi
atgaaaattctcagtttgcgtctgaaaaacctgaactcgctgaaaggagaatggaaggtcgactttaccgccgaaccgtttgccagtaacgggttattcgccattaccggcccgaccggcgcgggaaaaaccaccttgcttgacgccatctgcctggcgctgtaccacgaaacgccgcgcctgaatacggtatcgcaatcgcaaaacgatttgatgacgcgcgatacggcggaatgtctggccgaagtggagtttgaggtaaaaggcgaagcctggcgcgcgttctggagccagaaccgagcccgaaatcggcctgacggcaatctccaggccccacgcgtggagctggcgcggtgttcagacggaaagatctttgccgataaggtaaaggataaactggagatgatcgccacgttgaccgggctggactacgggcgcttcacccgttcaatgttgttatcacaggggcagttcgccgcctttcttaacgccaaagcgaaagagcgcgcagagcttctggaggagctcaccggcactgagatttacgggcagatctccgcacaggtatttgaaaaacataaatcagcccgtctcgaactggaaaagttacaagcgcaggccagcggcgtcgccctattggcggacgaacagttacagcaactggaagccagtttgcaggcgcttactgacgaagagaaacgcctgctggccgaccagcagggacagcagcagcaccttcactggctgacccgaaaaaacgagctccacactgaattacacgcccgacagcaggcgctgtacgcggcgcaagaggcgcgagaaaaagcgcagccgcagctcgcggcgctgacgctggcgcaacctgctcgccagttgcgtccgcattgggagcgcattcaggaacaaacccgcgccgttgagcgtgttcgccagcacagtgatgaagtgaatgctcgcttacaaagcgcgtatcgcctgcgccagcgtatccgcgcctgcgcgcatcgacaattcacgcaactgaacgccacagggcagcggttgaagacatggctggcggaacacgacggcatccgcgtctggcgcagcgaactggcggggtggcgagcattattaacacaacaatcccacgaccgggcgcaactgagccaatggcaacagcagttgctgagcgatatgcgtcagcgtgatgcgctaccgccgctcacgctcgacctcacgccacaggcgctggcggaagccagggcattgcatacccggcagcgtccgctacgccatcgtctcgccgcgcttcaggggcaaattctcccgaaacaaaagcgtcaggcgcagctacaggcagctatcgcgcgtcatcatcaggagcagacgcaatacacccaacgtctggcagataagcgcctgagttataagactaaagcgcaggagcttgcggacgttcgcactatttgcgagcaggaggcgcgcatcaaagatctggaaagccagcgggcgcacttacagtccggccagccgtgtccgctttgcggctcgacgacgcaccccgccatcgccgcctatcaggcgctggaactgagcgcgaatcaaacccgccgcgacgcgctggaaaaagaggtcaaaacgctggcggaagaaggcgctgcgctgcgaggacagttagatgccttaacgcaacaattacagcgggatgaaagcgaggcgcagtcgttgttgcaggaggagcaagcgcttactgaggaatggcaaacgctgtgcgctacgctgggcgttcagctccagccgcaagaagacctcgctggctggctgaccgccgcggaagagcatgagcaacagttggatcagctcagccagcgtcatgctctacaaacgcaaatcgcggcgcatactgaacaggtagcgcgctttaccgcgcagattgcacagcgtcaggcgtcgctgacggctgatttggcgcagtatacgctttcccttcctgcgccagaagacgaggcatcctggctgaatgagcgcgccgacgaagcgaaaatatggcaacagcgtcagacagagttcgcggatttgcaaacgcagatcgacaggcttgccccgttgctggagacgctaccgcaaacggataccgcggattccgacgacgacgtgccgctggataactggcggcagacgcatgatgagtgcgtgtcattacaaagccagttgcaaaccctgcaggaacagacgacgcaggaacagcagcgcgccgccgaggcgatagcgcactttgatgcggcgttaaaaaatagcccgtttgacagccaggcaacgttcctggcggcgttgctggatgaagagaccgtgacccgtctggaaaaacaacaacaaacgctggaaagtcagctacaacaagcgaaggcgttaagcgcgcagtccgcgcaggcgctggctgaccatcagcaacagccacccgccggtctggacccaacgtgtacggcggagcagctcgcgcagcggctggcgcagttggcgcaacaactgcgcgagaacacgacacgccagggggaaatccgccagcaaattaaacaggatgcagataatcggcagcgccaacgggcgctgatggcggaaatgaagcaagcctctcagcaagtggaagactggggctatctcaatgcgctgatcggctctaaagaaggtgataagttccgcaaattcgcccagggactgacgctggataatctggtctggctggcgaatcatcagctcacccgcctgcatggccgctatttattgcagcgcaaagccagcgacgcgctggaactggaggttgtcgatacctggcaggccgacgccgtgcgcgatacgcgaacgttatcaggcggcgaaagcttcctggtcagcctggcgctggcgttatcagatttggtcagccataaaacgcgcattgattccttgttcctggacgaaggcttcggcacgcttgatagcgaaacgctggacgccgcgctggatgcgctcgacgcgctgaatgccagcgggaagaccatcggtgtgattagccacgtggaagccatgaaagaacgtatccccgtgcagataaaagtgaaaaaaaatcaatgggcttggttatag

SEQ ID NO: 39202 - DNA, 1203 bp, Salmonella typhi
atgcgcatcctccacacctctgactggcatctgggacaaaacttctacagtaaaagccgcgccgcggagcatcaggcttttctggactggctgctggagaccgcgcaggcccatcaggtggatgccattattgtcgctggcgatatttttgataccgattcgccgccaagctatgcccgagaactttataaccgtttcgtcgttaatttacagcaaacgggctgtcatctggtggtgctggccggtaatcatgattccgtcgccacgctaaacgaatcgcgcgacattctggcgtttctcaatacaaccgtgatcgccagcgcgggctatgcgcctcggctacttcatcgtcgcgacgggtctccgggcgccgtactgtgccccattccctttttgcgcccgcgcgacattattaccagtcaggcgggattatccggcagcgagaaacagcagcaacttcttcatgcaattgccgattattatcaacagcagtatcaggaagcgtgcctgctacgcggcgaacgaaagctgccggttatcgcaacgggacatttaaccaccgtcggcgccagcaaaagcgatgcggttcgcgacatttatatcggtacgctggatgcctttccggcgcagcatttcccccctgcggattatatcgcattgggacacattcaccgcgcgcaatgtgtcggcggcacagagcatatccgctattgcggctcgcccatcgccctcagctttgatgagtgcggcaaaagcaaatgcgtgcatctggtgaccttcgaccagggaaaatggcaaagtaccgaaagtctggctgtccccgtgactcaactgttggcggttttaaaaggcgacctggcgtcaattaccgaacagcttgagcagtggcgcggcgttgagcaatcgccccccgtctggctggatattgaaatcaccaccgatgattatctgcatgatatccaacgcagaatacaggcattaacggagtcactccccgtagaggtattactggtgcgccgtagccgcgaacagcgtgagcgctcgctggcgaacgagcggcgggaaacattaagcgagcttagcgtggaagaggtttttgcgcggcgtctggcgctggaagcgttagataccccgcagcgcgagcgcctgaatcagctcttttccagcacgctctacgcgttgaatgaggagcatgaggcatga

SEQ ID NO: 39203 - DNA, 1296 bp, Salmonella typhi
gtgctggaacggctgtcatggaaaaggctggtgctggagctggtgctctgttgcatccccgcgcttatccttagcgctttttttggttatctgccgtggtttttactggcggcggtgacgggactgcttgtctggcatttctggaatttgttacgcctctcctggtggctttgggtcgacagaagtatgacgccgccgccggggcggggaagttgggaaccgctgttatacggtttacaccagatgcagttgcgaaataagaagcgtcgccgcgagctggggaacctgattaaacgttttcgcagcggcgcggagtcgctgcctgatgccgtggtactgaccacagaagagggcggcattttttggtgtaacggtttggcgcaacagatactggggctacgctggccggatgacaacgggcagaatattctcaatctactgcgttatccggagtttacccagtatttaaaaacgcgtgatttcacccgtccgcttcatttggtgctcaataccgggcggcatctggagatccgcgtcatgccttataccgataaacaactcctgatggtggcgcgcgatgtgacgcaaatgcatcagcttgaaggcgccagacgtaactttttcgccaacgttagccatgagttgcgtacgccattgacggtattgcaaggctatctggaaatgatgcaggaacaggcgctggaaggggcgacgcgagagaaagcgctgcatacgatgcgcgagcaaacgtatcgtatggaagggctggtaaaacaactgcttacgctgtctaaaattgaggtggccccggcgctgttattaaatgaaaaagtggatgtaccgatgatgctgcgggtcgtggagcgtgaagcgcagacgctcagccagcagaaacatacctttacgtttgcggtcgacgatagtcttagcgttctgggcaatgaagagcagctacgtagcgcgatctcaaacctggtatataacgcagtaaaccatacgccggcgggaacgcatattacggtgagctggcgacgtgccgcgcatggcgctgaattttgcattcaagataacggtccggggattgctgccgagcatattcctcgtctgaccgaacgcttctaccgcgtcgataaagcgcgttcgcggcaaacgggcggcagcggcctgggattggcgattgtgaaacatgcgttgaatcaccatgaaagccgccttgaaatcgacagttcgcctggcaaaggaacgcgatttagctttgtgctgccggaacgtttaattgccaaaaatagtgattaa

SEQ ID NO: 39204 - DNA, 1320 bp, Salmonella typhi
atgacccatcagttaaaatcgcgcgatatcatcgccctgggctttatgacatttgcgctgttcgttggcgcaggcaatattatctttcctcctatggtcggtttgcaggcgggtgaacacgtctggacagccgctattggctttctgattaccgccgtagggctaccggttcttactgttgtggcgctggcgaaagtcggcggcggcgtagacagcctcagtacgccgattggtaaagtggcgggactcctgctggcgaccgtttgctatctggccgtcgggccgttatttgcgacgccgcgtaccgcgacggtgtcgtttgaggtcggtatcgctccgttgaccggcgattctgcaatgccgttgctgatttacagcgtggtctatttcgctatcgttattctggtttccctctatccgggtaagctgctggatacggtagggaatttcctggcgccgttgaaaattattgcgctggtcatcctgtccgtcgcggctatcgtttggcctgccggtccaatcagcaacgccctggacgcttatcagaatgcggccttttctaacggatttgtgaacggctatctgacgatggatacgctgggcgcgatggtgtttggtatcgttattgtgaacgcggcgcgttctcgcggcgtgaccgaagcgcgcctgttgacgcgttacacggtctgggccggcctgatggcgggcgtggggctgacgctgctttaccttgccttgtttcgcttaggttctgacagcgcgacgctggtcgatcagtcagcgaacggcgcagcgattcttcatgcctacgttcagcatacctttggcggcgcgggaagcttcctgctggcggcgctgatctttatcgcgtgtctggtgacggcggtggggctgacctgcgcctgcgctgagtttttcgcgcagtatattccgctgtcttaccgcacgctggtctttattctcggcggcttctctatggtggtgtcaaatctcggactgagccatctgattcaaatctccattccggtgctgacggctatctatccgccgtgtatcgcactggttgtattaagttttacccgctcatggtggcataattccacccgtatcatcgcgccggccatgtttatcagcctgctttttggtatccttgacggcatcaaagcatctgcctttggcgatatgctgccagcctggagtcagcgtttgccgctggcggaacagggactggcgtggttgatgccaacggtggtgatggtgatcctggcgattatctgggatcgcgcggcgggtcggcaggtgacctccagcgctcactaa

SEQ ID NO: 39205 - DNA, 1020 bp, Salmonella typhi
atgaaccaaagtaatgcgtcaatgacagtcatcggtgccggctcgtacggcaccgctctcgccatcactctggcgagaaacggccaccaggttgtcctgtggggccacgacccaaaacatatcgcgaccctggagcacgatcgctgcaacgtcgcgttccttcccgatgtgccttttcccgatacgttacacctggaaagcgacttagcaaccgcgctggcggccagtcgtaacattctggtggtggtgccaagccatgttttcagcgacgtgctgcggcagattaaaccgctgatgcgtccggatgcgcgtctggtatgggcgaccaaaggcctggaagcggaaacggggcgcctgttgcaggatgtcgctcgcgaggcgttaggcgatcaaatcccgctggcggtgatttccggtccgacgttcgctaaagagctggcggcgggtttgccgacggcaatctcgctagcctcaaccgatgagacctttgccgacgatctccagcaactgttgcactgcggaaaaagttttcgcgtctatatcaatgcggattttatcggcgtgcagcttggcggcgcggtgaaaaacgtgattgcgattggcgcggggatgtctgacggcatcggcttcggcgcgaacgcccgcacggcgctaatcacgcgtggactgaccgaaatgtcgcggcttggcgcagcgcttggtgccgatcccgccacctttatggggatggcgggtttaggcgatctggtgctgacctgtaccgacaaccagtcgcgcaaccgtcgttttggcatgatgcttggccagggcatggacgttaaaggcgcgcaggataagattggccaggtggtcgaaggctatcgcaatacgaaagaagttcgtgaattggcgcaccgttttggtgttgaaatgccaataaccgaggaaatttatcaagtattgtattgcggaaaaaacgcgcgcgaggcagcattaacgttattaggtcgcgcccgcaaggaagagctgagtcgccactag

SEQ ID NO: 39206 - DNA, 822 bp, Salmonella typhi
atgccgtgtgaagaactggaaatcgtctggaagaatattaaagctgaagcccgcgctttagctgactgtgagcctatgttggccagtttttatcacgccacgctactcaagcatgaaaatctgggcagtgcgctgagctatatgctggcaaataaactggcttcgcccatcatgcccgctatcgctatccgtgaagtagttgaagaagcctatgccgccgacccggaaatgatcgcgtcggcagcctgcgatattcaggccgtgcgcactcgcgatccggcggtggataaatactccacgccgctgttatatctgaaaggctttcatgcgctacaggcctaccgcattggtcactggttgtggaataaaggtcgccgcgcgctggctatcttcctgcaaaatcaggtttcggtctcgtttcaggtggatattcacccggcagcgaaaattggccgcgggattatgctcgaccatgccaccggtattgtggtgggggagacggcggttattgaggatgatgtgtcgatcctgcaatccgtcaccctgggcggtaccgggaaaacgagcggcgatcgccatcctaaaatccgcgaaggcgtgatgattggcgcgggcgcgaaaattctcggcaatatcgaggtggggcgcggcgcgaaaattggcgcaggctccgtcgttttacagcctgtcccgccgcacactaccgccgcaggcgttccggcgcgtattgtcggcaagccgggcagcgataagccgtcgatggatatggaccagcatttcaacgggctacaccatacgtttgagtatggcgacggcatctga

SEQ ID NO: 39207 - DNA, 2463 bp, Salmonella typhi
atgcgagtgttgaagttcggcggtacatcagtggcaaatgcagaacgttttctgcgtgttgccgatattctggaaagcaattccaggcaagggcaggtagcgaccgtactttccgcccccgcgaaaattaccaaccatctggtggcgatgattgaaaaaactatcggcggccaggatgctttgccgaatatcagcgatgccgaacgtattttttctgacctgctcgcaggacttgccagcgcgcagccgggattcccgcttgcacggttgaaaatggttgtcgaacaagaattcgctcagatcaaacatgttttgcatggtatcagcctgctgggtcagtgcccggatagcatcaacgccgcgctgatttgccgtggcgaaaaaatgtcgatcgcgattatggcgggactcctggaggcgcgtggacatcgcgtcacggtgatcgatccggtagaaaaactgctggcggtgggccattaccttgaatctaccgtcgatatcgcggaatcgactcgccgtatcgccgccagccagatcccggccgatcacatgatcctgatggcgggctttactgccggtaatgaaaagggtgaactggtggtgctgggccgtaatggttccgactattccgccgccgtgctggccgcctgtttacgcgctgactgctgtgaaatctggactgacgtcgatggcgtgtatacctgtgacccgcgccaggtgccggacgccaggctgttgaaatcgatgtcctaccaggaagcgatggagctctcttacttcggcgctaaagtccttcaccctcgcaccataacgcctatcgcccagttccagatcccctgtctgattaaaaataccggcaatccgcaggcgccaggaacgctgatcggcgcgtccagcgacgatgataatctgccggttaaagggatctctaaccttaacaacatggcgatgtttagcgtctccggcccgggaatgaaagggatgattgggatggcggcgcgtgttttcgccgccatgtctcgcgccgggatctcggtggtgctcattacccagtcctcctctgagtacagcatcagcttctgtgtgccgcagagtgactgcgcgcgtgcccgccgtgcgatgcaggatgagttctatctggagctgaaagaggggctgctggagccgctggcggttacggagcggttggcgattatctctgttgtcggcgacggtatgcgcacgctacgcggcatttcagcgaaattcttcgccgcgctggcgcgggctaatatcaatatcgtggcgatcgctcagggatcttctgagcgttccatttctgtggtggtgaataacgacgatgccaccaccggcgtgcgggtaacgcaccagatgctgttcaataccgatcaggtgattgaagtgtttgtcattggcgtcggcggcgtcggcggcgcgctactggaacagcttaaacgtcagcaaacctggctgaagaacaagcacatcgatctacgcgtgtgcggcgtggcgaactcaaaggcgttgctaaccaatgtgcatggcctgaatctggacaactggcaggcggaactggcgcaagcgaacgcgccgttcaatctgggacgtttaattcgcctggtgaaagaatatcatctactcaatccggtgattgttgattgtacctccagtcaggcggtggccgaccagtatgccgacttcctgcgcgaagggttccatgtggtgacgccgaacaagaaagcgaacacctcgtcgatggactactaccatcagctacgtttcgccgccgcgcaatcacggcgcaaattcttgtatgacaccaacgtcggcgccggtttgccggtaatcgaaaacctgcaaaacctgctgaatgcgggtgatgaactgcaaaaattttccggcattctttccgggtcgctctcttttattttcggtaaactggaagaggggatgagtctctcacaggcgaccgctctggcgcgcgagatgggctataccgaacccgatccgcgcgacgatctttccggtatggatgtggcgcgtaaactgttgatcctcgcccgcgagacgggccgcgagctggagctttccgatatcgtgattgaaccggtgttgccggacgagtttgacgcctccggcgatgtgaccgcctttatggcgcatctgccgcagcttgacgacgcgtttgccgcccgtgtggcgaaagctcgtgatgaaggtaaggtattgcgctatgtgggcaatatcgaagaggatggcgtgtgccgcgtgaagattgccgaagttgatggtaacgatccgctcttcaaagtgaaaaacggtgaaaacgcgctggcgttctacagccattattatcagcccttgccgttggtgctgcgcggctacggcgcaggcaatgatgtgacggcggcgggcgtgtttgccgatctgttacggaccctctcatggaagttaggagtttaa

SEQ ID NO: 39208 - DNA, 930 bp, Salmonella typhi
atggtgaaagtgtatgccccggcttccagcgcgaacatgagcgtcggtttcgacgtgttgggcgcggccgtcacacccgttgacggcacgttgctgggcgatgtggtatccgttgaagcagcggatcatttccgtctgcataacctggggcgatttgccgataaactgccgccggagccgcgtgaaaatattgtttatcagtgctgggaacgtttttgccaggcattggggaaaaccatcccggtggcgatgacgctggaaaaaaatatgccgattggttccgggttagggtccagcgcctgttccgtcgtcgccgcgctggtcgcgatgaatgagcactgcggcaaaccgttaaacgacacgcgtctgttggcgctgatgggcgagctggaaggccgtatctccggcagcatccattacgataacgtcgcgccgtgctttcttggcggtatgcagttgatgattgaagaaaacggcattattagtcagcaggtgccgggctttgatgagtggctatgggtactggcttatccgggcattaaagtttccaccgcagaagcacgggccattttgcctgcgcagtatcgccgtcaggattgcattgcgcatggacggcatctggccggttttattcacgcctgttactcgcggcagccgcagcttgccgccgcgctgatgaaagatgttattgccgaaccataccgcgcgcgtttactgccgggctttagccaggcgcggcaggcggtgtcggagatcggcgcgctggcgagcgggatttccggatcggggccgacgctgtttgcgctatgcgataaaccggagacggcgcagcgcgtcgcggactggctgagcaaacattatctgcaaaatcaggaaggcttcgttcatatttgtcggctggatacggcgggcgcacgagtagtgggataa

SEQ ID NO: 39209 - DNA, 1287 bp, Salmonella typhi
atgaaactctataatctgaaagaccataatgagcaggtcagctttgcgcaggccgtcacgcaagggctgggcaaacagcagggacttttttttccgcacgatctgccggagtttagcctgacggaaattgatgagatgctcaaccaggactttgtcagccgtagcgcaaagatcctctcggcatttattggcgatgaaataccgcagcaaattctggaagagcgcgtccgcgcggcgtttgctttcccggcgccggtagcgcaggtagaaagtgatgtcggctgcctggagctgttccatggtccgacgctggcctttaaagacttcggcgggcgttttatggcgcaaatgctgacgcatatcagcggcgataaaccggtgacgattctgaccgcaacgtcaggcgataccggcgcggcggtggctcacgcgttctatggcctggaaaatgtgcgggtcgtcattctctacccgcgcggtaaaatcagtccgttgcaggaaaaactgttctgtacgctgggcggcaacattgagaccgtggcgatcgacggcgatttcgacgcttgccaggcgctggtgaaacaggcatttgatgacgaagaactgaaaacggcgctggggttgaattcggctaattcgattaatatcagccgcctgctggcgcaaatttgctactactttgaagccgtggcgcaactgccgcagggggcgcgtaaccaactggtgatctccgtacccagcggcaactttggcgatttgacggcaggactgctggcgaagtcgttaggcctaccggtgaaacgctttatcgccgccaccaacattaacgatacggtgccgcgttttctgcatgacgggaagtgggcgccaaaagcgacgcaggcgaccctgtcgaatgcgatggatgtcagccagccgaataactggccgcgtgtggaggagctattccgccgtaaaatctggcgtctgactgagctgggctatgcggcggtggatgacactacgacacaacagacgatgcgcgagctgaaagcgaaaggttatatctcggaacctcatgcggcggtagcgtatcgggcattacgcgaccagttaaaccctggcgagtatggcttgtttctcggaacggcgcatccggcgaagtttaaagaaagcgtggagtccattctgggagaaacgctggcattgcctgaagcgctcgccgaacgcgccgatctgccgttgctttcacatcatctgcctgcggattttgccgccctgcgtaagctaatgatgacccgccagtaa

SEQ ID NO: 39210 - DNA, 474 bp, Salmonella typhi
atgcttaacatcgtactcttcgaaccagaaatcccgccgaataccggcaacatcattcgtctttgcgccaataccggctttcgtctgcacatcatcgaaccgatggggtttgcctgggatgataagcgcttacgccgcgcagggttggactatcacgaattcgccgcggttcagcgccatcacgattatgccgcctttgtcgccgccgaaaatccacagcgcctgtttgcgttgacgacaaagggcacgcccgcccatagcgccgtaagctatcaggatggcgattatttgatgtttggcccggaaacgcgcggcctgcccgccagcattctcgatgcgttgcctaaagagcagaagattcgcattccgatgatgccggatagccgtagcatgaacctgtcgaatgcggtgtcggtggtggtgtatgaagcgtggcgccagttaggataccccggcgcggtattgcggtcgtaa

SEQ ID NO: 39211 - DNA, 1191 bp, Salmonella typhi
atgattatttcagcaaccagcgattatcgcgccgcagctcagcgcacgttgcctcctttcctcttccactacatcgacggcggcgcgtatgcggaatataccctgcgccgaaatgtggaagacctgtcgcaagtcgctctgcgccagcgcgtgctgaaaaatatgtccgatttaagcctggaaacgaccctgtttaacgaaacgttgtcgatgccggtggcattagcgccggtaggtctgtgcggcatgtacgcccgtcgcggcgaagtacaggccgccgccgccgcagacgcaaagggcattccgttcaccctttccaccgtctccgtctgtccgattgaagaagtagcccccacgcttaaacgcccgatgtggttccagctttatgtactgcgtgaccggggctttatgcgtaatgcgctggaacgagcaaaagcggcgggctgctccacgctggtctttaccgtggatatgccgacgccgggcgcgcgctaccgtgacgcccactccgggatgagcggcccaaacgcggccatgcgccgttactggcaggcggtgatgcaccctaaatgggcgtgggatgtcggcctgaacggtcgcccgcatgatttaggcaatatttccgcctatctgggtaaaccgaccggccttgaggactatatcggctggctggcaaataacttcgatccgtccatctcctggaaagatctggagtggatacgcgaattctgggacggcccaatggtgatcaaagggatcctcgatccagaagatgcccgcgatgcggtacgtttcggcgctgacggtatcgtggtgtcgaatcacggcggccgccagctcgatggcgtgctctcttccgcccgcgccctgcccgccattgccgatgcggtgaaaggcgatatcgccattctggcggatagcgggattcgtaacgggctggatgtcgtgcgtatgattgcgctgggggccgataccgtactgctgggtcgggcctatctctacgcgctggcgacggcaggaaaaactggcgtcgctaacctactggacctgatcgagaaagagatgaaagtcgccatgaccctgaccggcgcgaaatccattagcgaaatcagtggcgattcactggtgcaggaactggggaaaagtttgcccgccgcgctggcgccaatgagcaaaggcgatgccgcctga

SEQ ID NO: 39212 - DNA, 954 bp, Salmonella typhi
atgacggacaaattgacctcccttcgtcagttcaccaccgtagtggctgataccggagatatcgcggcaatgaagctgtaccagccgcaggatgctacaactaacccttctctcattcttaacgcagcgcaaatcccggaatatcgtaagctgattgacgatgctgtcgcctgggcgaaacagcagagcagcgaccgcgcgcagcaggttgttgacgcgaccgataagctggcggtgaatattggcctggaaatcctgaagctggtgccggggcgtatttctaccgaagttgacgcgcgtctatcttatgacactgaagcgtctatcgccaaagcaaaacgtatcattaaactctacaatgatgcgggtatcagcaacgatcgtatcctgatcaagctggcgtccacctggcagggcattcgcgcagccgaacagctggaaaaagaaggcatcaactgtaacctgacgctgctgttctccttcgcgcaggcgcgtgcgtgcgccgaagcgggcgtctacctgatctcgccgttcgtaggtcgtattcttgactggtataaagccaataccgacaagaaagactatgcgccagctgaagatccgggcgtggtttccgtaacggaaatctacgagtactacaaacagcatggttacgaaaccgtcgttatgggcgcaagcttccgtaacgtaggcgaaattctggagctggcgggctgcgaccgtctgactatcgcgccggcattgctgaaagaactggcggaaagcgaaggggcgattgagcgtaagctctctttctccggcgaagtcaaagcgcgtccggaacgtattaccgaagccgagttcctgtggcagcatcaccaggaccctatggcggttgacaaactggcggatggtatccgtaagtttgcggtagaccaggaaaaactggaaaaaatgatcggcgatctgctgtaa

SEQ ID NO: 39213 - DNA, 591 bp, Salmonella typhi
atgaatactttacgcattggcctggtttccatttctgaccgtgcttccagcggcgtttaccaggataaaggtatcccggcccttgaagagtggctggcatctgcccttaccaccccttttgagctgcaaacgcgactgatcccggatgaacaggcgatcatcgaacagaccttatgtgaactggttgatgagatgagctgtcatctggtgctgaccactggcggtaccggtccggcacgtcgcgacgtcacgccggacgcgacccttgccatcgccgaccgtgaaatgcctggttttggcgaacagatgcgccagatcagcctgcgctttgtgccgaccgccattctttcccgccaggtgggcgttatccgtaaacaggcgttaattcttaatctgcctggacagccaaaatcgatcaaagaaacgctggaaggcgtaaaagcggacgatggcagcgttagcgtgccgggcatttttgcgagcgtgccgtattgcatacagctgcttgacgggccgtatgtcgaaaccgcgccggaagtggttgccgctttccgtccaaagagcgccagacgtgagaatatgtcgtcctga

SEQ ID NO: 39214 - DNA, 3324 bp, Salmonella typhi
atgccgctacgggaacatttattgtcaccagcgagacggcaaaaagccgcggaaaaaaaaagcggccgcagaaagctggcggtttccgcactcgtcggtcttagcagtattatggtctctgcagatgcgctggccaatgcagggaacgataccggcagcattaaccagaacaccactgatattgccaccaacaccaccagtatcaacaatctgagcaactccgtcaccacgctcaccgatgatgccctgctttgggatgcagcctctggcacattcagcgccagccgtaacggaagcgccagcaaaatcaccaatctggcggcaggcaccctggccgcggacagcaccgatgcggttaatggctcccagttgtttgatacgaacgagaaagtggatcagaacaccgctgatatcaccaccaataccaacagcatcaatcagaacaccactgatattgccaccaacaccaccagtatcaacaatctgagcaactccgtcaccacgctcaccgatgatgccctgctttgggatgcagcctctggcacattcagcgccagccgtaacggaagcgccagcaaaatcaccaatctggcggcaggcaccctggccgcggacagcaccgatgcggttaatggctcccagttgtttgatacgaacgagaaagtggatcagaacaccgctgatatcaccaccaataccaacagcatcaatcagaacaccactgatattgccaccaacaccaccagtatcaacaatctgagcaactccgtcaccacgctcaccgacgatgccctgttatgggatgctgactctggcacattcagcgccagccgtaacggaagcgccagcaaaatcaccaatctggcggcgggtaccctggccgcggacagtacagacgccgttaacggctcacaattgtatgaaaccaaccagaaggtggatcaaaacacctctgctatcgcagatattaatacgtccatcaccaatcttagctctgacaacctgagctggaatgaaacaacgaattcgttctctgccagccacggaagtagtacgacaaacaaaatcaccaacgttgctgccggagagctgtctgaagaaagtaccgacgcggttaacggatcgcagttgttcgaaaccaatgaaaaagtggatcagaacacgaccgatatcgccgccaataccaccaacatcactcagaacagcaccgcgattgagaacctgaatacttctgtctccgacattaatacgtccattaccggcctcactgataacgctctgttatgggacgaagacaccggcgctttcagcgcaaaccacggtggaagcaccagtaaaataaccaatgtcgccgccggggcgctttctgaggacagtacagacgcggtaaacggatcacagttgtatgaaaccaaccagaaggtggatcaaaacacctctgctatcgcggatatcaatacgtccatcaccaaccttggtaccgatgcactgagctgggatgacgaagagggtgcgttcagcgccagccacggtaccagcggtaccaataagataactaatgtagcagcaggtgaaatcgccagtgacagtactgacgccattaatggctctcagctctatgaaactaacatgctgatttctcagtataatgaatctattagccaactagccggcgataccagcgaaacctatatcacggaaaatggtaccggcgtgaaatacatccgtacgaatgataacgggcttgaaggccaggatgcatacgcaacgggtaacggcgcaacggcagtaggttacgacgccgtcgcctctggcgctggctgtctggctcttggccaaaacagcagcagcagcattgagggcagtatcgctttgggcagtggctccacctctaaccgcgctattacaaccggtatacgagaaacgagcgcaacaagcgatggcgtggtgattggctacaatacaacagacagagagttgctgggcgcgttgtcattggggacggatggagaaagctatcgtcaaattaccaacgttgctgacggctctgaagcgcaagatgcggtaacagttcgtcagttacaaaatgccattggtgcggtcactactacaccgaccaagtactaccacgcaaactcaacggaagaagattcactggctgtcggaactgactcactggcaatgggtgcgaagactatcgtcaatgctgatgcaggtattggtattggtctgaatacactggtgatggctgatgccatcaacgggattgctatcggttctaacgcacgcgccaaccatgcaaacagtattgcaatgggtaatggttctcagaccactcgcggtgcacagactgactacaccgcctacaacatggacacaccgcagaactctgtcggtgagttctctgtcggcagtgaagacggtcaacgtcagatcactaacgtcgcggcgggttcggcagataccgatgccgttaacgttggtcaattgaaagtaacggacgcgcaggtttccaggaatacccagagcattactaacctgaatactcaggtatcgaatctggatacccgcgtcaccaatatcgaaaacggcattggcgatatcgtcactaccggtagcaccaagtacttcaagaccaacaccgatggcgcagatgcaaatgcccagggtgcggacagcgtcgcgattggctctggctctattgctgccgctgaaaacagcgtggcgttaggcacaaattccgtcgcagatgaagctaatactgtgtctgtcggctcttctactcaacaacgccgtattaccaacgttgccgcaggggtgaacaacactgacgcggttaatgtggcgcaactgaaagcctcagaagcaggctccgtgcgttatgaaaccaatgcagatggctcggttaactatagcgtgctcaacctgggagacgggagtggcggcaccactcggatcggcaatgtttcagcggcggtgaatgatacggatgcggttaactatgcgcaattgaaacgcagcgtcgaagaagcaaacacctataccgaccagaaaatgggggaaatgaacagcaaaatcaaaggcatagaaaacaagatgagcggcggtatcgcttcagcgatggcgatggccggtctgccacaagcctacgccccgggcgccaacatgacctcgattgctggcggtacgtttaatggtgaaagtgccgtcgccattggtgtctccatggtaagtgaaagcgggggctgggtgtataaactgcaaggaaccagcaacagccagggcgattactctgcagccattggcgcgggcttccagtggtaa

SEQ ID NO: 39215 - DNA, 1917 bp, Salmonella typhi
atgggtaaaattattggtatcgacctgggtactaccaactcttgtgtagcgattatggatggaacgcaggcacgcgtgctggagaacgccgagggcgatcgcactacgccttctatcattgcttatacccaggatggtgaaactctggttggtcagccggctaaacgtcaggcagtgacaaacccgcaaaacaccctgtttgcgattaaacgcctgattggccgccgcttccaggacgaagaagttcaacgtgacgtttctatcatgccgtacaaaatcatcggcgccgacaacggcgacgcatggcttgatgtgaaaggtcagaaaatggcgccgccgcagatttctgccgaagtgctgaagaaaatgaagaaaacggctgaagattatctgggcgaaccggtaactgaagcggttatcaccgtaccggcttactttaacgatgcgcagcgtcaggctaccaaagatgctggtcgtatcgcggggctggaagttaaacgtatcatcaacgaaccgactgccgcagcgctggcttacggtctggataaagaagtcggcaaccgtactatcgcggtttacgacctcggtggtggtactttcgatatctctattatcgaaatcgacgaagttgatggcgaaaaaacctttgaagttctggcaaccaacggtgatacccacctgggtggtgaagacttcgatacccgcctgatcaactacctcgttgacgagtttaagaaagatcagggcatcgacctgcgtaacgatccgctggccatgcagcgcctgaaagaagccgcagaaaaagccaaaatcgagctgtcttctgcgcagcagaccgacgtgaacctgccgtacattaccgcagatgccaccggtccgaaacacatgaacatcaaagtgacccgtgcgaaactggaaagcctggttgaagatctggtgaaccgttctatcgagccgctgaaagtcgcactgcaggacgctggcctgtccgtgtctgatatcaacgacgtgatcctcgtcggcggtcagacccgtatgccaatggtgcagaaaaaagtggctgagttcttcggtaaagagccgcgtaaagacgttaacccggacgaagctgtggctatcggcgcagcggtacagggcggcgtattgaccggtgatgtgaaagacgtactgctgctggacgttaccccgctgtctctgggtatcgaaacgatgggtggcgtgatgactccgcttatcaccaaaaacaccaccatcccgaccaagcacagccaggtgttctctactgcggaagacaaccagtctgcggtaaccatccatgtgctgcagggtgagcgtaaacgtgcgtctgataacaaatctctgggtcagttcaacctggatggcatcaacccggcgccgcgcggtatgccgcagatcgaagtcaccttcgatatcgatgctgacggtatcctgcacgtctccgcgaaagataaaaatagcggtaaagagcagaagatcactatcaaggcgtcttctggtctgaacgaggaagaaattcagaaaatggttcgcgatgcagaagcgaacgctgaatccgaccgtaagttcgaagagctggttcagacccgtaaccagggtgaccatctgctgcacagcacccgtaagcaggttgaagaagcaggcgataaactgccggctgatgacaaaaccgctatcgagtctgcgctgagcgcgctggaaactgccctgaaaggcgaagataaagccgctatcgaagcgaaaatgcaggagctggcgcaggtttcccagaaactgatggaaatcgctcagcagcaacatgcgcagcagcaggctggctccgccgacgcttctgcaaacaatgcgaaagatgacgacgttgtcgacgctgagtttgaagaagtaaaagataaaaaataa

SEQ ID NO: 39216 - DNA, 1371 bp, Salmonella typhi
atggaaagcaataataagctaaagcgtgggctgagcacccggcacattcgctttatggcattaggttcggcaatcggcaccggcctgttttacggctcggcggacgccatcaaaatggcggggccgagcgtgctgttggcctatattattggcggggtcgcggcatatatcattatgcgcgcattgggggaaatgtccgttcacaaccctgccgccagctcattttcgcgctatgcgcaggaaaacctcggcccgcttgcgggctacattaccggctggacctactgttttgagatcctgatcgtcgccattgctgacgtgaccgcgttcggcatttacatgggggtctggttccccgccgtgccgcactggatttgggtgcttagcgtggtgctgatcatttgcgccatcaacctgatgagcgtcaagatgttcggcgagctggagttttggttctccttcttcaaagtcgccaccattattatcatgattgtcgcgggtatcggcatcattgtgtggggaattggcaacggcgggcagccgactggcattcataacctgtggagcaacggcggcttcttcagcaatggctggctgggaatgatcatgtcgctgcaaatggtgatgttcgcttacggcgggattgagattatcggtatcaccgccggggaagcgaaagacccggagaaatccattccgcgcgccattaactcagtaccgatgcgtatcctggtattttatgtcggcacgctgttcgtcattatgtctatctatccgtggaatcaggtcggcacaaacggcagcccatttgtgctgacgttccagcatatggggattacctttgccgccagcattctgaactttgtggtattgaccgcctcgctttccgctatcaactccgatgtgtttggcgtaggccgtatgctgcatggtatggcggagcaggggagcgcgccgaaagtctttgccaaaacgtcacgccgtggtattccgtgggtcactgtgctggtgatgacgattgcgctgctgtttgcggtttacctgaactacatcatgccggaaaacgtcttcctggtgattgcctcgctggtgacgtttgcgacggtatgggtatggattatgatcctgctgtcgcaaatcgccttccgtcgtcgtttaccgccggaagaggtaaaagcgctgaagtttaaggtgccgggcggtgtcgtaacgacgatagcgggtctgattttcctggtcttcattattgcgcttatcggctaccatccgaatacccgcatctcactgtatgtgggcttcgcctggatagttctgctgttgattggctggatatttaaacgccgtcgcgaccgtcaattggcgcaggcgtag

SEQ ID NO: 39217 - DNA, 1818 bp, Salmonella typhi
atgttgaatgcctggcacttaccggttgccccgtttgttaagcaacataacgataaattaaccattacgctgtggctgagcggagaaaatccgccgtctcgcgtgacgttgcgctcagaattcgataacgaagaaatctcactggcgatgcgcaaacagcgccgccagccgcagccgggcgtgacggcgtggcgagcgacgctcaatatcgcgttagggcagccccgtcgccgttacagctttaaattgctttggcatgaccgccagcgatggtttacgccgcagggatttagctgctttccacccgcgcgtctggaacaatttgcggttgatgtgccggatagcggcccgcagtgggtcgccgatcaaattttttatcagatcttcccggatcgttttgcccgcagcgcgacgcgtgaagccgatcaggaccgagtgtattaccatcatgccgcgggtcaggagattgtgctacgcgactgggacgatcctttaaccccccaggcgggcggttccaccttttacggcggctgtctgaatggcatttgtgagaagctgccgtatctgaaaaaactgggcgtcacagcgctatatctgaatccggtatttaccgcgccgagcgtccataagtacgacacggaagattatcgccatgtcgatccgcaatttggcggcgatcgggcgctgctacgcctgcggcgtgaaacgcaagcacagggcatgaggctggtgctggatggcgtgtttaaccatagcggcgactcgcatgcgtggtttgacaggcataaccgcagcactggcggcgcgtgccatcacccggactcgccgtggcgcgactggtactccttttcaccacaaggcgtggcgctggactggctgggttatccgagcctgccgaaactcgattatcaatcagaaacgctggtggatgagatctatcgcggtgaggacagtatcgttcgtcactggctaaaggcaccgtggaatatggacggctggcggctggatgtcgtacatatgctgggcgaggcgggcggggcgcgccacaatttgcagcacgtcgccggcattacccgggcggcaaaagaggcgcagcctgaagcctatattgtgggggaacatttcagcgatgcgcggcagtggctacaggccgatgcggaagatgccgccatgaattatcgcggcttcaccttcccgctgtggggatttctcgccaatactgatatcgcttacgaaccacagcatattgatgcccggacctgtatcgcgtggatggataactaccgcgccggattatcgcaccagcagcaactgcgcatgtttaatcaactcgacagccatgatactgcgcgctttaaaaccctgctgggtaaagacgcggcgcgcctgccgctggcggtggtctggctgtttacctggcccggcgtgccatgtatttattacggcgatgaagtcggcgtggacggcgcaaatgaccccatgtgccgcaaaccgttcccatgggatgaacgcaagcaggacggcaacttgctggcgctgtaccagcgtatggcgaaactgcgccagagcagtctggcgctgcgtcgtggcggatgccaggcgctgtatgccgaaggtgacgtagtggtattcgtgcgagtttatcagcagcagcgggcgctggtggcgattaaccggggcgaggcctgtgaagtggcgctggaagcgttgccgttgctgaacgtggccggatggcaatgtaaaacgggaagcggtgacatccgcgagggaagacttagtttacccgcgatttccgcgacggtatggatgaatcgttga

SEQ ID NO: 39218 - DNA, 1065 bp, Salmonella typhi
atgcgcgttaccgatttttcctttgaactacccgaatccttgattgcccactacccacagccggaacgcagtcgctgccgtttgctgtcattagaggggccgacgggcgcgctgacgcacggtactttcaccgatctgctcgataagctcaaccctggcgatttgctggtcttcaataatacccgcgtgatcccggcgcgcctgtttggccgtaaagccagcggcggcaagatagaagtgctggtcgaacgtatgctcgatgataaacgcatcctggcgcatattcgcgcttctaaagcgccaaaaccgggcacggaactgctactgggcgatgacgaaagtattcacgcgaccatgaccgcgcgtcacggcgctctgtttgaagttgagtttaatgacccgcgtccggtgctggatattctcaacgccatcggccatatgccgttgccgccgtatatcgaccgtccggacgaggacgccgaccgcgaactgtatcagacggtttacagtgaaaaaccgggcgccgtcgccgcgccgaccgcggggctgcactttgatgagccgctgctggcggcgcttcgtgagaaaggtgtcgaaatggcgtttgttacgctacacgtcggcgcgggcactttccagccagtgcgtgtcgataccattgaagatcacatcatgcactccgaatatgctgaggtgccgcaagaggtggtcgacgcggtgctggcggcgaaagcgcgcggcaaccgggttatcgccgtcggcacgacctcggtacgctcactggagagcgcggcgcaggcggcaaaaagcgatttgatagagccattcttcggcgatacgcaaatctttatttatccaggttatcaatacaaagtgattgatgcgctgatcaccaacttccatctgccggaatcgacgttgattatgctggtttccgcatttgccggttatcaacacaccatgaatgcctataagactgcggtagaacaaaaatatcgcttttttagctacggggacgcgatgtttatcacgtgcaatccgcaggctatttctgagcgtccgtaa

SEQ ID NO: 39219 - DNA, 1128 bp, Salmonella typhi
atgaaatttgagttagataccaccgatggtcgcgcgcgtcgcggtcgtctggtgtttgatcgtggcgtagtggaaacgcctgcttttatgcctgtgggtacttacggtacggtaaaaggcatgacgccggaagaagtggaagcgaccggcgcgcagattattctcggcaacactttccacctgtggctgcgcccgggtcaggaaatcatgaagctgcacggcgacctgcacgatttcatgcagtggaaagggccgattctcaccgattccggcggcttccaggtcttcagcctcggcgatattcgtaagattaccgagcaaggcgtgcacttccgtaacccgatcaacggcgatccgattttcctcgatccggaaaagtcgatggagatccagtacgatctcggttccgatatcgtgatgatctttgatgaatgtacgccgtacccggcagactgggactatgctaaacgctcgatggagatgtcgttgcgttgggcgaagcgtagccgcgaccgttttgatagccttggcaataagaatgcgctttttggcatcattcagggcagcgtttacgaagatttacgcgatatctcggtgaaaggtctggtagagattggctttgatggctacgctgtcggcggtttggctgtcggtgagccgaaagcagatatgcaccgcattctggagcacgtttgcccgcagatcccggctgacaaaccgcgttacctgatgggcgtgggtaaaccggaagatctggtggaaggggtgcgtcgcggtattgatatgtttgactgtgtcatgccaacgcgaaatgcccgtaatggtcatctgtttgtgaccgacggcgtggtgaagattcgtaatgcaaagcataaaagcgacatcagcccgcttgacgccgagtgcgattgctacacctgtcgcaattattcacgcgcttacttgcatcatctcgaccgttgcaacgaaatattaggtgcgcgtctcaataccattcataacttgcgttactaccagcgtttgatggcgggtttacgcaaggctattgaagagggtaaattagagagcttcgtaaccgagttttaccaacgtcaggggcgacccgttccacctttgaacgttgattaa

SEQ ID NO: 39220 - DNA, 1473 bp, Salmonella typhi
atggaacagaatatcgccaccgcccaggtttccgtcgcccgcccaaactgggacaaatcacgtctggtatcccgtattgtgcatctgggctgcggggcgtttcaccgcgcgcaccaggcgctctttacccatcatctactggaaaagagcgacagcgactggggcatttgtgaagtgaacctgatgccgggtaacgacgcgcggctgatcgcgaacctgaaagcgcaaaatctgctgtacaccgttgcagaacgcggcgcagaaagcaccgaactgaaaattatcggttcaatgaaagaagcgctacaccctgaattcgacggtcatgcagggattctggcggcaatggcgcgcccggaaaccgccatcgtctccttaaccgtaaccgaaaaaggctactgcaccgaccccgccagcggcgagcttgatgtcaataacccgctgatccaaaacgatcttgcccatccacagcagcctaaatccgccattggctatattgtcgaagcgctaaacatgcgccgggagcaaggactgaaagcttttaccgtgctgtcgtgcgataacgtgcgcgagaatggtcacgtcgcgaaggctgccgtcctcggcctggcaaaagctcgcgatgccgccctcgccgcatggattgccgacaatgtgaccttcccctgcaccatggttgaccgcattgttccggcagcgaccgaagagacgctacaactggttgccgaccagttgggcgtttatgatccttgcgctatcgcctgcgaacccttccgccagtgggtcatcgaagataactttgtgaatggtcgcccggactgggataccgtcggcgcgcaattcgttgcagatgtcgtaccgtttgagatgatgaagctgcgtatgcttaacggcagtcactctttcctcgcctatctgggttatctcggcgggtatgacactatcgccgatactatgactaacccggcttaccgtcgcgcggcgctggcgctgatgcttgatgaacaagcgccgacgttgtcaatgccggaaggcaccgatctggaagggtatgcgaatttgttgattgcgcgtttcactaacccctcgttgaaacaccgcacctggcagatcgcgatggatggcagtcagaaactgccgcagcgtctgttggacccggtacgtctgcacttgcaacagggcgatgactatcgccgcctgacgctgggcgtcgccggatggatgcgttatgtcggcggtgtcgatgagcaaggtaaaaccattgatgtcgtcgatccgctgcttgcacagtatcaggcgattcatcagcaatatcagacgccggaagaacgcgttcgcgggctactggccatcgagtctatctttggcaacgacctgccgaagaaccacgaatttgtgcaagccgttaccgacgcttaccaacagctattgcagaatggcgcgaaagccacggtagaagcgctggctaagtaa

SEQ ID NO: 39221 - DNA, 591 bp, Salmonella typhi
atgacgcagaacccggcgcaggttagcctgcgcccaaataacagattgtcagatatgcaggcaataatggaacaaacccaggcctttgaaaatcgtgtgcttgagcgtctgaatgctggcaaaaccgtacggagcttcctgattaccgccgtcgagttactgaccgaggcggtgaatattctggtgcttcaggtgtttcgcaaagacgactatgccgtgaaatacgctgtggaaccgttgctggacggcgacgggccgctgggcgatctttcggtacgtctgaaacttatctatggcctgggcgtactcagccgcaccgaatatgaagatgcggagctgttaatggcgctgcgcgaagagctgaatcacgacggcaatgagtacgcctttaccgacgatgaaatcctcgggccgtttggcgaactgcattgcgtcatggcgctgccgccgccgccacattttgatacatccgacgcggcgctatacgccatgcaaattcagcgctaccagcaggcggtgcgttcgacgatggttctctctctgaccgagctgatttctaaaatcagcttaaaaaaggcctttcaaaagtaa

SEQ ID NO: 39222 - DNA, 1857 bp, Salmonella typhi
atgagcaaaggaaccaccagtcaggatgcccccttcgggacattattgggttacgcccccggcggcgtagcgatctactcttcagattacaattccctcgatccgtgggacgacgacgacgcagcttttcgtagctacatcgacgatgaatacatggggcataaatggcagtgcgtggaatttgcccgccgttttctctttctgaattatggcgttgtttttactgacgtcggcatggcctgggaaattttctcgctgcgttttctgcgcgaggtcgtgaatgacaatattttgcctttgcaggccttcccgaacggttcgccgcgcgcgccggaggccggggcgttgctcatctggcaaaagggcggcgagtttaacgaaaccgggcacgtcgcgattatcacccaactcctggataacaaaattcgcattgctgagcaaaacgttatccacacgccattgccgccagggcagcagtggactcgcgaactggaaatggtcgtagaaaacgggtgttacaccctgcgcgacacctttgatgacacgacgattttaggctggatgatccagaccgacgacacgcaatacagtttgtcacagcctgacatcgcgaatcagtcgctggcgattcgcggcgcaaggctgccagagaaaggtcagtttgacggtcagtggctggatgagcgcgatccgttacaaaaagcctatgtacaggcgaacggacacgttatcaatcaggacccgtaccagtattttaccatcaccgagagcgccgaacaggagcttatcaaagcgaccaatgagttgcatttgatgtacctgcacgccacggacaaagttttaaaagacgataatctgctggcgctattcgatatccccaaaattctttggccgcgcctgcgtctctcctggcagcgccgtcgtcaccatatgatcaccggtcgtatggatttctgcatggatgaacgcgggctgaaagtctatgaatacaatgccgattccgcatcatgccataccgaagcgggattaattctcgaaaaatgggctgagcagggctataccggtaaagggcataacccggcggagggcttaattaacgagctggcaggcgcctggaaacacagtaaagcgcgtcctttcgtccatatcatgcaggatgatgatatcgaggaggactatcacgcgcagtttatgcagcaggcgctgcatcaggccggtttcgcgagcaaaattctccgcgggctgggcgagttgcgctgggatgacgccgggcagttgatcgatggcgacggacggctggtgaattgtgtctggaaaacctgggcgtgggaaacggcaatggagcagatacgcgaagtcagcgagacggagtatgccgcagtgcctattcgtaccgggcacccggaaaatgaagtccggctgattgatgtattactgcgcccggaagtgttggtgtttgaaccgctgtggacggtgatcccgggtaacaaagcgatcctgcccatcctgtggtcgctcttcccacatcatcgctatttgctcgacacggattttaccgttaacgatgagctggtgcagaccggctatgcggtaaaaccgattgccggacgttgcggtagtaatattgatttggtgagccatcaggaagaactcctggataaaaccagcggcaagttcgccacgcagaaaaatatctatcagcagttgtggtgcctgccgaaggtcgccgggaagtatattcaggtctgtacgtttaccgtgggcggtaactacggcggtacgtgcctgcgcggcgatgattcattagtcattaaaaaagagagcgatattgaaccgttaatcgtcatcaaagcgtaa

SEQ ID NO: 39223 - DNA, 1149 bp, Salmonella typhi
atgaaagcattacattttggcgcaggtaatatcggtcgtggctttatcggcaaattgctggctgacgcggggatacaactgacgtttgcggatgtaaaccaggtcgtactcgatgccctgaatgcccgtcatagctatcaggttcatgttgtgggtgaaaatgagcaggtggataccgtttccggcgtcaacgctgtcagcagcatcggcgatgatgttgtcgacctgattgcccacgttgatttaatcaccactgccgtgggcccggtggtgcttgagcgtatcgcaccggctatcgctaaagggctggtaaaacgtaaggcgcagggcgtggatgccccgctgaatatcatcgcctgcgaaaatatggtgcgcggcaccacgcagctgaaaggccacgtaatgaacgcgctggcggatggcgataaagcctgggttgaacagcacgtcggttttgtcgattccgccgttgaccgtattgtgccgccatctgcttctgcgaccaacgatccgctggaagtgacggtagaaaccttcagcgagtggatcgtcgataaaacccagtttaaaggcgcgttgccaaacattccggggatggagttaacggataacctgatggcatttgtcgaacgtaaactcttcacgctgaacacaggtcatgctataaccgcgtacctcggcaaattagccggtcatcaaaccattcgcgacgccattctcgatgagggtattcgcgcggtggtgaaaggcgcgatggaagaaagcggcgcggtgctgatcaaacgctacggttttgatgccgacaaacatgcggcatacattcagaaaatcctcggtcgttttgaaaacccgtatctgaaagatgacgtcgaacgcgtaggccgtcagccgctacgcaaactcagcgcgggcgaccgtctgatcaaaccgctgcttggcaccctggaatatggtctgccgcatgtgaatctggtgaaagggatcgcggcggcgatgcatttccgtagcgatgaagatccgcaggcacaagagttggcggcgctgattaccgaaaaaggcccgcaggccgcgctggcgcaaatttccgggctggatgccaatagcgatgtggtggcggaggcggttaacgcatataacgcgaccaaatga

SEQ ID NO: 39224 - DNA, 609 bp, Salmonella typhi
atgaaactcatcggtagctacaccagcccttttgtgcgcaaaatctctgttctgctgctcgaaaagggtattaccttcgaatttattaatgaactaccttacgaggcggataacggcgtggcgcaatacaaccctctgggtaaggtgccagcgctggtgacggagaaaggggagtactggttcgattcgccgatcatcgcggaatatattgaactgctggatatcgcgccagcgatgctcccgcgtgacccgatggcagcgcttaaagttcgccagcttgaagcgttggctgacggcattatggatgcagcgttggtgtctgtacgcgaacaggcgcgcccggcggcgcaacaatcggaaacggaactgctgcgccagcgggaaaaaatcaaccgcagcctggatatgctcgaaagttatctgagcgacgggacgctaaaaacggatacggtcaatctggcgactatcgcgattgcctgtgcggtaggctatctcaacttccgccgggtcgcgcccggctggtgtgttagccgcccccacctggtcaaactggtcgaaacgctttttcaacgcgaaagctttgcccgcaccgaagcgccaaaggcttga

SEQ ID NO: 39225 - DNA, 1539 bp, Salmonella typhi
atgacgaacaatcccccttcaacacgtattcagccaagtgaatacgggtacccactgaagttaaaagcccgctatgacaattttattggcggtgactgggttgcgcccgccgacggcgaatattatcaaaacctgacgccagtgaccggccagccgctatgtgaagtcgcttcctccggtaaaaaagatatcgatttagcgctcgacgccgcgcataaggcgaaagataagtgggcgcatacgtcagtacaagaccgtgccgctatcttgtttaagatcgccgatcggatggaacaaaacctcgaactgttggcgacagcggaaacttgggataacggtaaaccgattcgtgaaaccagtgccgccgacataccgctggcgatcgatcatttccgctatttcgcctcctgtatacgtgcgcaggagggcgggatcagcgaagttgatagcgaaaccgtggcctaccattttcacgaaccgcttggtgtcgtggggcagataatcccgtggaactttccgctgctgatggcaagctggaaaatggcgccagcgctggcggcaggtaactgcgtggtgcttaaaccggcacgcctgacgccgctttccgttttactgttaatggaagtcattggcgatctgttaccgccgggcgttgtcaacgtcgtgaacggcgcgggcggcgagattggcgaatatctggcgacctcaaaacgtatcgcgaaggtggcgtttaccggttcgacggaagtgggtcaacagatcatgcagtacgccacgcagaacattattccggtgacgctggagttaggcggcaagtcgcccaatatcttcttcgccgacgtgatggatgaggaagatgcgttctttgataaagcgctggagggatttgccctgtttgcctttaaccagggcgaggtgtgtacctgtccaagccgtgcgctggttcaggagtccatctatgagcgctttatggagcgcgctattcgccgggtggagagcattcgcagcgggaacccgctagatagcggtacacagatgggagcgcaggtctctcacggccagcttgagactatcctcaattatatcgatatcggtaaaaaagagggggccgatattctgaccggtgggcgacgcaaggaactggatggcgaacttaaagagggctattaccttgagcctaccattctgtttggtaagaataatatgcgcgtctttcaggaggagatctttggcccggtgctggcggtaaccacctttaaaaccatggagaaggcgctggaaatcgctaacgatacgcaatatggcctgggtgctggcgtctggagccgcaacggcaatctggcctataagatggggcgcggcattcaggccgggcgcgtatggaccaactgctatcacgcctatccggcacatgcggcgtttggcggctataagcagtcgggcatcgggcgcgaaacccataagatgatgctggaacactaccagcaaaccaagtgcctgttggtgagttattccgataagccgctggggctgttctga

SEQ ID NO: 39226 - DNA, 348 bp, Salmonella typhi
atggctatcatcccaaaaaactacgcgcgcctggaaagcggctatcgtgaaaaagcgctgaagctgtttccgtgggtgtgcggacgttgttcccgtgagtttgtgtattcaaatctgcgtgagctgacggtgcatcatatcgatcatgaccacaccaataacccggaagacggcagtaactgggagctattgtgcctctactgccacgatcatgagcattctaaatataccgaagccgatcagtacggttcgacggtcattgccggggaagatgcgcaaaaagatgtcggcgaggcgacttataacccgtttgccgatctgaaagcgatgatgaacaaaaagaaataa

SEQ ID NO: 39227 - DNA, 540 bp, Salmonella typhi
atgacaagacgttacctaagaattctcctggtgggaagtctcttgagcctgaccgcctgcgcgccgcagagcgaagttcgccagatgcatcaaagcattagcaccctgaataaagagatgacccaactgaatcaggaaacggtaaaaattacccaacaaaataagctgaatgcggattcaacccgcggcgtctatttgttgcctggcgccaatacgcctgcccggctggagagtcagatcggtacgctacgtatgacattgctggaaattacgcctgtcgctgacggcgctcacgcaacgttacgcattcagggcaagtcccgcgatccgctaccggcattcagcgctaccgtagagtacgggcaaattcagggcactacggagaactatcaggaggtgaatgcgcagagccttctggtaaatgcgcccgccagcttgctggcgcccagtgatgtcaatattccgttaccgttgaaggggatcacaccggcgcagttaggcttcattcgcatccatgatattcagcctgttaatcaataa

SEQ ID NO: 39228 - DNA, 1104 bp, Salmonella typhi
atgcaggatgagttttacatggcgcgagcgctcaaactggcgcagcgtggacgtttcaccactcacccgaaccctaatgtcggctgtgtcattgttaacaatggcgacatcgtcggcgaaggttatcaccatcgcgccggagagccgcacgccgaggtccatgcgctgcggatggcgggcgcaaaagccaaaggcgcaaccgcctatgtcacgcttgaaccctgtagccatcatgggcgaacgccgccatgttgcgatgcgctgattgcggctggcgtcgcgcgcgtggtcgccgcgatgcaggacccgaacccacaggtcgccgggcgcgggctgtatcgcctgcaacaggcgggtattgcggtcagccacgggttaatgatgagtgaagcggaggcgctcaataaaggcttcctcaaacggatgcgtaccggattcccttatcttcagcttaaactgggtgcctccgtggatggacggacggcgatggccagcggcgaaagccagtggatcacctcgccgcaggcccggcgcgacgttcagcgcttgcgtgcgcaaagccacgctattttaaccagtagcgcgacggtattggctgacgatccggccttgacggtgcgttgggcggagttagacgcctctacacaggcgtcttacccgcaggaaaatctgcgccagccggtgcgaattgttatcgacagccaaaaccgggtaacgcctgcgcatcgtattgtgcagcagcctggcgaaacgtggattgcgcgtacccaggaagatagccacgcgtggcccgattcggttcgtactatcagcgtgccggcgcacaacggacatttggatctggttgtgctgatgatgcagttaggcaggcagcagattaatagcatatgggttgaggccggaccgggactggcgggcgcgttgctgcaagccgggctggtggatgaactgattgtctatgtcgcgcctaaattgttgggaacccaggcgcggggattatgcgaattgccggggcttgagaagctcgccgacgcgccgcaatttaccttcagcgaaatacgtcatgtcggcccggatgtttgcctgcatatggtgagcgcatga

SEQ ID NO: 39229 - DNA, 471 bp, Salmonella typhi
atgaacattattaaagctaacgttgcagcccctgacgctcgtgtcgccatcactattgcgcgtttcaatcagtttatcaacgacagcctgctggatggcgcggttgatgccctgacgcgtattggtcaggtaaaagatgataatattaccgtagtgtgggtgcctggcgcttatgaactgccgctggcgaccgaagcgctggcgaaaagcggtaaatacgacgccgtggttgcgctgggaaccgtgattcgcggggggactgcgcactttgaatatgtggcaggcggcgccagcaatggcctggcaagcgttgcccaggacagcggcgtgccggtagcctttggtgttctgaccaccgagagtattgaacaagccatcgaacgtgctggtacaaaagccggtaataaaggcgcagaagctgcgctgaccgcgcttgaaatgattaatgtattgaaagccattaaggcctga

SEQ ID NO: 39230 - DNA, 420 bp, Salmonella typhi
gtgaaacctgctgctcgtcaccgcgcccgtgagtgtgccgtccaggcgctttactcctggcagttgtcccagaacgacatcgctgatgttgaataccagttcctggcggaacaggacgtaaaagacgtcgacgttctctatttccgtgaactgctatccggggtggcgactaacagcgcgtacctggatggtttaatgaaaccgtatctgtcccgcctgcttgaagagctgggacaggttgaaaaagccgtgctgcgtattgcgttgtttgagctgtcaaaacgcagcgatgtgccttataaagtggccatcaacgaagcgattgaactggcgaaaacctttggcgctgaagacagccacaaattcgtcaacggcgtactggataaagcagctccggtgattcgtcccaacaaaaagtga

SEQ ID NO: 39231 - DNA, 1704 bp, Salmonella typhi
atgagccagagaattactattgatccggtaacccgtattgagggtcatttacgcattgactgcgaaattgagaacggcgtcgtatccaaagcatgggcgtccggcaccatgtggcgcggtatggaagagatcgtgaagaaccgcgatccgcgcgatgcgtggatgattgtgcaacgtatttgcggcgtttgtacgacaactcacgcgatctcctccgttcgtgcggcggaaagcgcgctgaatattgatgttcccgtcaacgcgcagtatatccgtaatattattctggcggcgcataccacccatgaccacattgtccatttctaccagctctctgcgctggactgggtggacattacctctgcgctgaaagccgatccggaaaaagcttctgcgatgctggatggcgtgtcgagctggcacctgaacagcgcgcaagagttcacgaaagttcagaacaagatcaaggatcttgtcgctagcggtcagttaggtattttcgccaatggctactgggggcacccggcaatgcagttaccgccggaggtcaacctgattgcggtcgcccactatctgcaggcgctggaatgtcagcgtgacgctaaccgcgtggtggcgttgctgggcggtaaatcgccgcatatccagaacctggcggtcggtggggtggcgaacccgatcaatctcgacagcatcggtacgttgaaccttgaacgcctgatgtacatcaaatcgtttatcgataagctgagcgattttgtcgagcaggtgtataaagtggataccgcagtcatcgcggcctactatccggaatggctggagcgcggcaaaggcgcggtgaactacctgagcgcgccggaattcccgaccgacggtaaaaacggcagtttcctgttcccgggcggttacattaccaatgccgatctgtcgacataccgtccgatcacctctcactccgatgaattcctgattaaaggtattcaggagagcgcgaagcacgcctggtataaagatgaagcgccgcaggcgccgtgggaaggcaccacgattccggcttacgacggttggtcggatgacggtaaatactcatgggtcaagtcgccgacattctacggcaaaaccgtcgaagtcgggccgctggcgaacatgctatgtaaactggccgcaggtcgtgaatccacgcagaccaagctcaatgaaatcattgcgctttatcagaagctgaccggcaaaacgctggaaatggcgcaacttcactctacgctgggtcgtatcatcgggcgtaccgttcactgttgtgaactgcaaaacgtattgcaggatcaatacaacgcgctgattgtaaatatcggcaaaggcgattacaccacgtttgtgaagccgaacattcaggcgacgggcgagttcaaaggcgtgggcttcctggaggcgccgcgcggtatgctgtctcactggatggtgattaaagacggtattatcagtaactatcaggcagtggtgccatcgacctggaactcaggtccgcgtaacttcaacgatgacgtggggccgtacgaacagtcgctggtcggtacgccgatcgccgatccggcgaagccgctggaagtggtacgtaccatccactccttcgacccttgcatggcgtgcgcggtgcacgtggtggacgccgatggcaatgaagtggtctcggtgaaggttttgtaa

SEQ ID NO: 39232 - DNA, 1179 bp, Salmonella typhi
atgagtcatgatccaaaaccgctgggcggaaaaatcatcagtaaaccggtcattatttttggaccgttaatcgtcctgtgtatgctccttatcgtgaagcgtctggtcttcgggttgggctccgtttccgacctgaacggcggtttcccgtggggcgtctggattgcctttgacctgttgatcggcaccggctttgcctgcggcggttgggcgttggcatgggcggtgtatgtctttaaccgtgggcaataccatccgttggtgcgcccggcattgctggcaagcttgtttggttactcgctgggcggcctgtcgatcactatcgacgtcggtcgttactggaacctgccgtacttctacattccaggtcacttcaacgtgaactcggtactgtttgagacggcggtctgtatgaccatctacatcggcgtgatggcgctggagtttgcgcctgccttgtttgaacgtctgggctggaaagtgtcgctcaagcgtctgaataaggtgatgttctttattatcgcgctgggcgcgctgctgccgacgatgcaccagtcctcaatggggtcattgatgatctcggcgggctataaagtgcatccgctatggcaaagctatgaaatgctgccgctgttctcggttctgaccgcgtttatcatgggcttctccattgtcatatttgagggggcgctggttcaggcaggcctgaaaggaaacggtccggatgagaaaaatttgtttgttaagctgacgaataccatcagcgtgctgctggcgattttcgtcgtcctgcgctttggcgaactgatttatcgcgacaagctgtcctatgcgtttgccggcgatttttactccgctatgttctggattgaagtcgtcctgatggtcttcccgttagtggtgctgcgtgtggcgaaactgcgtaatgactctcgtatgctgtacctgtcggcgctgagcgcgctgttgggttgcgcgacgtggcgtctgacctattcgctggtggcattcaacccgggtggcggctaccactacttcccaacctgggaagaattgttgatttctattggttttgtggctattgagatttgtgcatacatcgtactcattcgtctactgccgatacttcctcctttaaaacaaaacgatcataatcgtcatgaggcgagcaaagcatga

SEQ ID NO: 39233 - DNA, 885 bp, Salmonella typhi
atgtctcatctatacgaccctaccacgcagtattacaccggcgagtatcctaagcaaaaacagccggcgcccggcgtccaggcgaaaatgacgcctgttcctgactgtggtgaaaaaagttatgtcggcagtggtcgccttaaagatcgtaaggcgctggtgacagggggcgactccgggattgggcgcgctgccgctatcgcttacgcgcgtgaaggcacagatgtcgcgatcaactatctgccagcggaagaagaggacgcccagcaggttaaagcgctgattgaggagtgcggccgtaaagcggtgttattgccgggcgatcttagcgacgaatctttcgcccgttcgctggtccataaggcgcgcgaagcgctgggcgggctggacattctggcgctggtagccggtaaacagacggcaatcccggagataaaagatctaaccagcgagcaatttcagcaaaccttcgccgttaacgtttttgccctgttctggataacccaggaagcgattccgctgctgccaaaaggcgccagtattatcacaacgtcgtctatccaggcctatcagcccagtccgcacctgctggattatgcggcaaccaaggcggcaatccttaattacagccgcggcctggcgaaacaggtggcggaaaaaggaattcgcgtgaatattgtcgcgcctggccctatctggacagcgctgcaaatttccggcggccaaacacaggataaaattccgcagtttggccagcagacgccaatgaagcgggccggtcaaccggcagagctggcgccggtgtatgtctatctggcaagccaggaatcaagttacgttaccgcagaagtgcacggcgtgtgcggcggggaacatttaggctaa

SEQ ID NO: 39234 - DNA, 978 bp, Salmonella typhi
atggcatgtggcgagttttccctgattgcccgttattttgaccgtgtaagaagctctcgtcttgatgttgaaaccggtattggcgacgattgcgcgctcctgaatattcctgaaaagcagaccctggcgatcagtaccgatacgctggtggcgggcaaccacttcctccctgatatcgatcctgccgatctggcttataaagcgttggcggtgaatttaagcgatctggccgcgatgggggccgacccggcctggttaacgctggcgttaacgctaccggaagtggatgagccgtggctggaggcttttagcgacagcctgtttgcgctattgaattactacgatatgcagctcattggcggcgacaccacgcgtggaccgctgtcgatgacgctgggtatccacggttatatcccggcagggcgcgcgctcaagcgatctggcgcgaagccgggcgactggatttatgtcaccggtacgccgggcgacagcgctgccgggctggcggttttgcaaaaccggctacaggtgtcggaggagaccgatgctcactatttaattcaacggcatttacgcccgacgccgcgtattttacacggccaggcgctgcgtgacatcgccagcgcggctatcgatctttccgatggtctgatttccgatctggggcatatcgtcaaggccagcggctgtggggcaagagtggatgttgatgcgttgccaaaatccgatgcgatgatgcgccatgttgatgacgggcaggagctgcgttgggcgctttccggcggcgaagactatgagttgtgctttacggtgccggaactgaaccgtggcgcgctggatgtcgccattggtcaactgggtgttccctttacctgcataggccaaatgagcgcagatattgaagggctgaattttgtacgtgacggaatgcctgtcaccttcgactggaaaggatatgaccattttgccacgccataa

SEQ ID NO: 39235 - DNA, 1863 bp, Salmonella typhi
atgagttttgatatagccaaataccctaccctggcattggtcgactccacccaggagttacgactgttaccgaaagagagtctgccgaaactctgcgacgagctacgccgctacttactcgacagcgtaagccgttccagcgggcatttcgcttccgggctgggcacggtagaacttaccgtggcgctgcattatgtctacaacaccccgtttgaccagctaatctgggatgttggacaccaggcttatccacataaaatccttaccggtcgtcgcgacaaaatcggcaccattcgccagaaaggcggtctgcacccgttcccgtggcgcggagaaagcgaatacgatgtgctgagcgttgggcattcctccacctccatcagcgccggtatcggtattgccgtggcggcggagaaagaaggcaaagatcgccgcaccgtctgtgtgattggcgacggcgccatcaccgccggtatggcgtttgaagcaatgaatcacgcaggcgatatccgacccgacatgctggtcattctgaacgacaatgaaatgtcgatttcggaaaacgtcggcgcgctcaacaaccatctggcgcggctactttccggtaagctttactcttctctgcgcgaaggcggaaaaaaagtcttctccggcgtaccgccaattaaagaactgctcaagcgtaccgaagaacatattaaaggcatggttgtgccgggaacactgttcgaagagctgggctttaactacatcgggccggtcgatggtcacgatgtcatggggcttatcagcacattgaagaacatgcgtgacctgaaagggccgcagttcctgcatatcatgaccaaaaaaggccgcggctatgagcccgcggaaaaagatccgatcactttccatgcggtgcctaaatttgatccctccagcggatgtttgccgaaaagcagcggcggtctgccaggttattcaaaaatcttcggtgactggctgtgtgaaaccgccgccaaagacagcaagctgatggcgatcaccccggcaatgcgcgaaggttccggcatggtggaattttcacgtaaattcccggatcgctattttgacgtcgctatcgccgagcagcatgccgtcaccttcgccgcaggtctggcgattggcggctataagcccgtcgtggcgatctactctactttcctgcaacgcgcctacgatcaggtcatccatgacgtcgctatccagaaactgccggtcatgttcgccatcgatcgcgccggtatcgttggcgcggatgggcaaacacaccaaggcgcgttcgatctctcctatctgcgctgcatcccggatatggtgatcatgacgccaagcgacgagaacgaatgtcgccagatgttatttaccgggtatcactataacgacggcccgacggcagtacgttatccacgcggtaatgcgcagggcgtggcgctaaccccgctggaaaaactgcctattggtaaaggtcttgtgaagcgtcatggcgaaaaactggcgattctgaactttggcaccttaatgcctgaggcggcgaaagtcgccgaagcgctgaatgccacgctggtcgacatgcgctttgttaaaccgctggacgacacgttaattctggagatggccgcgcagcatgacgcgctggtgacgctggaagaaaacgccattatgggcggcgctggcagcggcgtaaacgaagtgctaatggcccatcgtaaacctgtacctgtgctgaatatcggtcttccggatttctttatcccgcaaggaacgcaggaagaagcccgcgcggaactggggcttgacgccgcaggcattgaagccaaaatcaaggcctggctggcataa

SEQ ID NO: 39236 - DNA, 900 bp, Salmonella typhi
atggactttacgcagcagctacaggcttgcgtaacgcaagcgaatcaggcgctgagccgttttatcgcgccactgccctttcagaacactcccgtggtcgaagccatgcagtatggcgcattattaggcggtaaacgcctgcggccatttctggtttacgccaccggtcaaatgtttggcgtcagtacggcaacgctggatgcgccagctgcggcggtcgaatgcattcatgcctattcgctgatccatgacgacctgccagcaatggacgatgacgatttgcgtcgcggcctgccgacttgccatattaaatttggcgaagccaacgcaatcctggcgggagacgcgttgcaaacgctggcgtttaccattatcagcgacgcgccgatgccggaagtcgccgatcgcgatcgtatcgcgatgatcgccgaactggcaaacgccagcggtatcgccggtatgtgcggcggtcaggcattggatctggcggcagaaggccagcggatcactctggacgcgctggaacgcattcatcgccataagaccggcgcgctcattcgcgccgccgttagacttggcgcgttgagcgcgggcgataaaggacggaatactctgccgatacttgaccgctatgcagagagtatcggccttgccttccaggttcaggatgacattctggatgtggtgggcgatactgcaacgttaggtaaacgtcagggcgcagaccagcagcttggcaaaagtacctaccctgcacttctgggtcttgagcaagcccggaataaagcccgggacctgatagaggacgcccgtcagtcgttacatcagctggccgcgcaatcactggacacctcggcactggaagcgctagcgaactacataatccagcgtgataaataa

SEQ ID NO: 39237 - DNA, 2172 bp, Salmonella typhi
atgagcgctatctccctgatccaaccggatcgcgaccttttctcctggccgcagtactgggccgcctgttttgggccggcgccgtttttgccgatgtcacgtgaagagatggatcaacttggctgggatagctgcgacatcattctggtgacgggcgacgcgtatgtcgatcatccgagcttcggcatggcgatttgcggccgtatgctggaagcgcagggcttccgcgtggggatcatcgcccagccggactggaacagcaaagacgactttatgcgtctgggtaaaccgaacctgttcttcggcgtcaccgctggcaacatggactcgatgatcaaccgttacaccgctgaccgtaagctgcgccacgatgacgcctacaccccggataacgtcgcgggcaaacgcccggaccgcgccacgctggtctatacccagcgttgcaaagaagcgtggaaagatgtcccggtgatccttggcggcattgaggccagtctgcgccgtaccgcgcattacgactactggtctgatactgtgcgtcgttcagtgttagtcgattccaaagccgacatgctgatgtttggcaacggtgagcgtccgctggtgggagtggcgcaccgtctggcaatgggcgaaaccatcgatcagattcgcgacgtgcgtaacactgcgattatggttaaagaagcgctgccaggctggagcggcgtcgactccactcgtctggacacgccgggtaaaatcgatccaattccccatccctatggcgaggatctgccgtgcgcggataacaagccggtcgcgccgaaaaagcaagaagctaaggcgattaccgtgcagccgccgcgtccgaagccgtgggaaaaaacctatatcctgttgccatcctttgaaaaggtgaaaggcgacaaggtgctgtacgcccatgcgtcgcgtattctgcatcacgaaactaaccctggctgcgcgcgggcgttgatgcaaaaacacggcgaccgctatgtctggatcaacccgcccgccataccgctctccactgaagagatggatagcgtgtttgcgctgccgtatcagcgtgtgccgcacccggcttacggcaatgcccgtattccggcctatgagatgatccgcttttcgatcaatatcatgcgcggctgctttggcggctgctctttctgctcgatcactgaacatgaagggcgcatcattcagagccgctcggaagactctattatcaacgagatcgaagcgatccgcgacacggtgccggggtttaccggcgtgatctccgatctgggcggtcctaccgcgaacatgtatatgctgcgctgtaagtcgccgcgtgcggagcagacctgtcgtcgcctgtcatgcgtctatccggatatctgtccgcatatggatactgaccatacgccgacgatcaatctttatcgccgcgcccgtgagctgaaaggcattaagaaaatcttaattgcctccggcgtgcgctacgacatcgctgtagaagatcctcgctacattaaagagctggcaagccatcatgtgggcggctatctgaagattgcgccggagcatactgaagaaggtccgctgtcgaaaatgatgaagccgggtatgggcagctacgatcgctttaaagagttatttgacctttactctaaacaggccggaaaagagcagtatctgatcccatattttatctccgcgcatccgggcacgcgggacgaggatatggtgaatctggcgctgtggctcaagcgccaccgcttccgtctggatcaggtgcagaacttctacccgtcgccgttggcaaattcgaccaccatgtattacaccggcaaaaacccgctgggtaaaattggttataagagtgaagatgtggtggtgccgaagggagacaggcaacgtcgcctgcataaggcgctgctgcgttatcacgatccggcgaactggccgctgattcgccaggcgctggaagcgatgggcaaaaagcacctgattggcggtcgccgtgagtgtctggtgcctgcgccgaccattgaagagatgcgcgaagcgcgtcgccagaaccgcaatacccgcccggcgttgaccaagcatacgccggtggaacatcagcggcaggggcttgctgctaataagaagcgcgggaaaggcgcggggcgttaa

SEQ ID NO: 39238 - DNA, 738 bp, Salmonella typhi
atgctatatatttttcgtcttattgttaccgttatttactccattctggtctgtgttttcggttctatttactgccttttcagcccacgtaacccaaaacacgtggcgacgtttggacatatgttcggtcgtctggccccgctgtttggcctgaaagtggagtgccgcaaacccgccgatgcggaaaactatggcaatgctatctatattgctaaccatcagaataattatgatatggtcacggcggcgaatattgtgcagccgccaacggtgacggtggggaaaaaaagcctgctttggatcccgttttttgggcaactgtactggctgaccggtaatctgttgattgaccgtaataaccgcgccaaagcgcatagcaccattgcggcagtagttaaccattttaaaaagcgccgtatttctatctggatgttccctgaaggtacgcgtagccggggacgcggtctgctgccgtttaaaaccggcgcgtttcatgcggctatcgcggctggtgtgccgatcattcctgtctgcgtttccaacacctctaacaaagtcaatctaaaccgcctgaacaacggactggttattgtggaaatgctgccgccagtcgacgtcagcgaatatggtaaagatcaggttcgtgagctggcggcccactgccgtgcgttaatggagcaaaaaatcgcggaacttgataaagaggttgcggaacgtgaagcgaccggtaaggtttaa

SEQ ID NO: 39239 - DNA, 495 bp, Salmonella typhi
atgaagatgtttgtccctgccgtcgtcttcgccgccctcgccagcgcctctgcctgggctaacaatggcgataccgcccagccgctggaaaaaatcgccccctatccgcaggcggagaaaggaatgaagcggcaagtgataacccttacccctcagcaggatgaatctaccctcaaagtggaactgttgattggtcaaacgctgaatgtggattgtaaccagcatcgcctcggcggcacgctggaaacaaaaacgctggaaggctggggctacgactattatgtctttgataacgtcacctctccggtatcaaccatgatggcctgccctgaaggtaagaaagagcaaaaattcgtcaccgcctggctgggtgaagacgggatgctgcgctacaacagcaagctgccgatcgtggtgtataccccggcgaatgtggacgtgaaataccgcatctggaaagcggacgctaacgtacagaatgccatcgcgcgataa

SEQ ID NO: 39240 - DNA, 2670 bp, Salmonella typhi
atgagtcagtctgacacaacggtctctacccgattctcccttctaccgggaagcattacccgtttcttcttattgctgatcattgtgctgctggtaacgatgggcgttatggtacagagcgccgtcaacgcctggttgaaagacaaaagctatcaaattgtcgatatcactcacgctattcataaacgcgtggacacctggcggtatgttacctggcaaatttatgacaacatcgccgcgaccactacgccatcgacaggtgaaggacttcaggaaacgcgtctgaaacaggatgtgtattatcttgaaaagccgcgacgtaaaactgaagcgctgattttcggttcccatgacagcgccacgctggaaatgacgcagcgtatgtcaacttatctggatacgctgtggggcgcggaaaacgtgccgtggtcaatgtattacctcaacggacaggataacagcctgattcttatctctaccctaccgttgaaagatctctcttccggctttaaagagtccactattggcaatatcgtcgattcccgccgggcagagatgttgcagcaggcgaatgcgctggatgagcgcgaaagtttctcctcattgcgaaaactggcctggcaaaacggtcactattttacgctgcgcacgaccttcaatcagccaggacatctggcaaccgtggtggcgtttgatctgcccattaatgatttaatcccgccgggaatgccgctggacagttttcggatagagcctgacgcaacccagacgacggggcgaagcagtgaaaaggaagcgccagatagcgtcacgattagctttaacggttcaaaaattgagatctcctcagcgcttaactctaccggaatgcgcctgatctggcaggtaccgttcggtacgcttttgcttgatacgttgcaaaatattttgctgcctttactgctgaacatcgggctgctggcgttggcgttatttggctacgccacgttccgtcatcagccgggacggtcgacggaatcgacatccggcaacgcggcgaataatgagcttcgcgtcttacgcgccattaatgaagagatcgtttctctgctgccgctgggtctgctggtctacgatcaggaaggcaaccgcaccgtgatcagcaataaaatcgccgatcatctgttgccgcatcttaacctgcaaaatattaccagcatggcggagcagcatcagggcgtgattcaggcgacaattaataacgaactgtatgagatccgtctgtttcgcagccagatcgccccccgcacgcagatctttattattcgcgatcaggaccgggaagtgctggtgaataagaagcttaaacaggcgcagcgtttgtatgagaagaatcagcagggccgcgccgcctttatgcaaaatatcagcaacacgcttaaagagcccgtacgccaactggcggttaacgccgcggcagtcaccacgccggaaagcctgaaactggcggatcaggcggatgtattagtacgtatgatcgatgaaatccaactggcgaatatgctggaaaatgacgcatggaaaagcgaagccacgctgttctccctgcaggatcttattgacgaagtcgtgccggaagtgctgcccgccattaagcgtaaagggctgcaactgctgattaataaccatcttagcggcaacgatgaacgctggggcgatcgcgacgccctgcgccggattttgctgctgttgattcagtatgccgtcacgacgaccgctatgggtaaaattacgcttgaagtcgagcaggatgaatctatcgcggagcgtctgactttccgtattctggatacgggcgaaggcgtaacgttaaacgagattgataatctgcatttcccgtatatgaatgaaacgcagggcgaccgttacggcaaagcgaatccgctcaccttctggctgtgcaatcaactggcgcgcaaactgggcggtcatctcaacattaaagcgcgagaaacgctgggcacgcgctataccgttcatgtcaaaatgcttcctcacgatcagcatactcaggtcgaagagcgcctgctggacgacgtgagcgtgatggtcgatgtgacgtccaacgaggttcgcgcgattgtgctgcgtcagttagaaaactggggcgccacctgcatcacgccggatgaaaggcagataagtcaagaatatgatctctttttaacggataatccgtctaatcttactgcctcgggcttgcttttaagcgatgatgagtcaggcgtgcggaaaattggcccgggtcagttgcgcgtcaactttaatatgagcaatgctatgcaggaagctgtactacaacttatcgaagagcagctggcgcaggaagagattcccgcctccccgctcggcggagatgaaaatgccgagcttcatgccagcggctattatgcgctatttgtagacacagtaccggatgatgttaagaggttgtatactgaggcggcaaccagcgatttcgctgcgctggcccaaacggcccaccgcctgaaaggggtgtttgccatgcttaatctggtacccggcaagcagttatgtgtaacgctggaacatctgattcgtgagaaagatgctccaggtatagaaaaatatatcagcgtcattgacgcctacgtcaaaagcttgctgtag

SEQ ID NO: 39241 - DNA, 651 bp, Salmonella typhi
atgaacaatatgaacataattattgccgatgaccacccgattgtactgttcggtattcgcaaatcacttgaacaaatcgagtgggtgaatgttgtcggcgaatttgaagattccacagcattgatcaacaacctgccgaaattagatgcgcatgtgttgatcactgacctctccatgccgggagataaatacggcgatgggatcaccttgatcaagtacatcaagcgtcattttccgagcctgtctattatcgttctgaccatgaacaacaatccggcgatcctgagcgccgtgttggatcttgatattgaagggatcgtactcaaacagggtgcgccaaccgatctgcctaaggcgctggccgcgctgcaaaaaggcaaaaaattcaccccggaaagcgtttctcgtctgctggagaaaatcagcgcaggcggttacggcgataagcgcctgtcgccaaaagagagcgaagtattacgcctgttcgccgagggcttcctggtcaccgaaatcgccaagaagctcaaccgcagcattaagaccatcagcagccagaagaaatcggcgatgatgaaactgggcgtagagaatgatatcgcgctgctcaactatctctcttccgtcaccctgagtccgacagacaaagaataa

SEQ ID NO: 39242 - DNA, 2637 bp, Salmonella typhi
atgagcgaccttgcgagagaaattacaccggtcaacattgaggaagagctgaagagctcctatctggattatgcgatgtctgtcattgttggccgtgcgctgccggatgtccgagatggcctgaagccggtacaccgtcgcgtactttacgccatgaacgtattgggcaatgactggaacaaagcctataaaaaatctgcccgtgtcgttggtgacgtaatcggtaaataccatccccacggcgattccgcagtgtatgacaccatcgttcgtatggcgcagccattctcgctgcgttacatgctggtggatggtcagggtaacttcggttctattgacggcgactccgcggcggcaatgcgttatacggagatccgtctggcgaaaatcgcccacggactgatggccgatctcgaaaaagagacggtggatttcgtggataactatgacggtacggaaaaaattccggacgtcatgccgaccaaaattccgaatctgctggtgaacggttcttccggtatcgcagtaggtatggcgacgaatatcccgccgcacaacctgacggaagtgattaacggctgcctggcgtatatcgacaacgaagacatcagcattgaagggctgatggaacatattccgggtccggacttcccgaccgccgcgatcatcaacggtcgtcgtggtatcgaagaagcctaccgtaccggtcgtggcaaagtgtacattcgcgcccgcgcggaagttgaagctgacgcgaaaacgggccgtgaaaccatcatcgtccatgaaattccctatcaggtgaacaaagcgcgcctgatcgagaaaatcgccgagctggtgaaagataaacgcgtggaaggcatcagcgcgctgcgtgacgaatccgacaaagacgggatgcgcatcgtgattgaagtgaaacgcgatgcggtgggcgaggtggtgcttaataatctctactcccagacccagctacaggtttccttcggtattaacatggtggcgctgcatcacggccagccgaagatcatgaacctgaaagatattatttcagcgttcgtgcgccaccgccgtgaagtggtgacgcgtcggactatttttgaactgcgtaaagcccgtgatcgtgcgcatatccttgaagctctggcgattgcgctggccaacatcgacccgattatcgaactgattcgccgcgcgccgacgccggcggaagcgaaagcggcgctgatttcgcgtccgtgggatctgggcaacgttgctgcgatgctggagcgcgccggtgacgacgccgcgcgtccggaatggctggagccagaatttggcgtgcgtgacggtcaatactacctgactgaacagcaggcgcaggcgattctggatctgcgtttgcagaaactgaccggcctggagcatgaaaaactgctcgacgaatacaaagagttgctggagcagatcgctgaactgctgcacattctgggcagcgccgatcgcctgatggaagtgatccgcgaagagatggagttaattcgcgatcagttcggcgatgagcgtcgtaccgaaatcaccgccaacagcgccgatattaatatcgaagatctgattagccaggaagatgttgtcgtaaccttgtctcatcagggctatgtgaaatatcagccgttaaccgattacgaagcacagcgtcgtggcggtaaaggcaaatcagcagcacgtattaaagaagaagactttatcgaccgcctgctggtggccaacacccatgacaccatcctttgcttctccagccggggccgtctgtactggatgaaggtctatcagttgccggaagccagccgtggcgcgcgcggtcgtccgatcgttaacctgctgccgctggaagccaacgaacgtatcaccgcgattctgccggttcgtgagtacgaagaaggcgtcaacgtctttatggcgaccgccagcggtaccgtgaagaaaacggcgctgaccgaattcagccgtccgcgttccgccggtattatcgcggtaaacctcaacgacggcgacgagctgattggcgttgacctgacttctggttctgacgaagtcatgctgttctcggccgcgggtaaagtggtgcgcttcaaagaagacgccgtccgtgcgatggggcgtaccgcgaccggtgtgcgcggtattaagctggcgggagacgataaagtagtttctctgatcatcccacgcggcgaaggcgctattctgaccgtaacgcaaaacggctacgggaagcgtaccgcagcggacgagtacccgaccaagtctcgtgcgacgcagggcgttatctctatcaaagtgaccgagcgcaacggttccgttgtcggtgcggtacaggtagacgattgcgaccagatcatgatgatcacggatgccggtactctggtgcgtacccgagtgtctgagatcagcgtggtgggacgtaatacccagggcgttatccttatccgcacggcggaagatgaaaacgtagtgggtctgcaacgcgttgctgaaccggtagatgacgaagaactcgatgctatcgacggcagcgtgacggaaggggatgaggatatcgccccggaagcggaaagcgatgacgacgttgcggatgacgctgacgagtaa

SEQ ID NO: 39243 - DNA, 618 bp, Salmonella typhi
atgaataatgctgctgcagtacttgatcagaatggtatcgctataactgcaggcgatattaccgtttataactacgatgctgaaaaccgtgaatatctctctgccactgttgagtatctcgcttatggtgttggaattccggctcactcatgcattgacgcgccaccagaaaaacgccccggcttcgctgtctgtcgtgataccgaccagaacatctggaaatatgttccagaccacagaggcgaaacggtttacagcacagagaatggtaacgctgtgcaaatcacacaaccgggagattaccctcctgatacgacggtgaaacagccagctactatctatgatgtctgggatggtgagacctgggtgacagatgcgggacgacagcacgcagcagaactggaagctgccggagcgcatcgtcagcaacttgaggaacaggcaatggcatctgttgagcttataaatctcaaactacgagccggacgccgattgacgccccaggagacggaaaaactaaacgccgtgcttgatttcatagatgtgcttaatgcgactgacatcagcactgcaccggatatcaactggccggaaatgcctctggcagcagccagttga

SEQ ID NO: 39244 - DNA, 2286 bp, Salmonella typhi
atgaatcagagtctgctggtgacaaagcgtgacggccgtactgagcgcatcaatctcgacaaaattcatcgcgtgcttgattgggcggcagaaggactgaataacgtatcggtttctcaggtcgagctacgctcgcatattcagttttatgatgggattaagacctccgatatccatgaaactatcattaaggccgccgcagacctgatctctcgcgatgcgccggattatcaatacctggctgcgcgtctggcgattttccacctgcgtaagaaagccttcggccagtttgagccgcccgcactttaccaccatgtggtaaaaatggttgagcttggcaaatacgacaatcatctgctggaagactacacggaagaagagttcaagcagatggattcgtttatcgttcacgatcgcgatatgaccttctcctacgctgccgttaagcagctggaagggaaatatctggtgcaaaaccgcgtgaccggcgaaatctatgaaagcgcgcagttcctctacattctggtagtggcctgcctgttctctaactatccgcgtgaaacgcgtcttgactatgtaaaacgtttttacgatgcggtctctacgttcaaaatctcgctgccgacgcccatcatgtccggcgtgcgtaccccgacccgtcagttcagctcctgcgtactgatcgagtgtggcgacagtctggattccatcaacgccacctccagcgcgattgtgaaatacgtttcccagcgcgccggtatcggcatcaacgctggccgcattcgtgcgctgggtagcccgattcgtggcggcgaggcgttccacaccggctgtattccgttctacaagcacttccagacggcggtgaaatcctgctcgcagggcggcgtgcgcggcggcgcggcgacactgttctacccgatgtggcatctggaagtggaaagcctgctggtgctgaaaaacaaccgtggcgtggaaggcaaccgcgtacgtcacatggactacggcatacagatcaacaaactgatgtacacccgcctgctgaagggcggcgacattacgctgttcagtccgtccgatgtacccgggctatacgatgcattcttcgccgaccaggacgaattcgaacgcctgtacgtgaagtatgaaaacgacgacagcatccgcaaacagcgtgtgaaagcggtcgaactgttctcgctgatgatgcaggaacgcgcctctaccggtcgtatctatatccagaacgttgaccactgcaatactcacagtccgttcgatccggttgtcgccccggtacgccagtctaacctgtgtctggagattgccctgccaaccaaaccgctgaacgatgtcaacgatgaaaacggcgaaattgcgttgtgtacgctgtctgccttcaacctgggtgccattaagactctggacgagctggaagaactggctattctggcagtacgcgctttggatgctctgctcgattatcaggattacccgattccggctgccaaacgcggcgcaatgggccgtcgtacgctgggcattggcgtgattaacttcgcctactggctggcgaaaaacggtaaacgttattccgacggcagcgccaataatctgacgcataaaaccttcgaagccattcagtactatctgcttaaagcgtccaacgaactggcgaaagagcaaggcgcctgcccatggttcaacgaaaccacctatgcaaaaggcattttgccgatcgacacctacaaaaaagatctggatgcgatcgtcaacgaaccgctgcactacgactgggaacagctgcgtgagtcgatcaaaacccacggtctgcgtaactccacgctatcggcgctaatgccgtcggaaacgtcatcccagatctccaacgccaccaacggtatcgaaccaccgcgcggctacgtcagcatcaaggcctcgaaagacggtattttgcgtcaggtcgtgccggattatgagcatctgaaagacgcttacgaactgttgtgggagatgccgaacaacgacggttatctgcaactggtgggtatcatgcagaagtttatcgaccagtcgatttccgctaataccaactacgatccgtcacgtttcccgtcaggaaaagtgccgatgcagcaactgctgaaagatttgctcaccgcgtataagtttggcgtgaaaactctgtactatcaaaatacccgcgacggcgcggaagatgcgcaggacgatttggcgccttctattcaggacgatggctgcgaaagcggcgcttgtaagatctga

SEQ ID NO: 39245 - DNA, 1383 bp, Salmonella typhi
atggaaaaaaaactgggactgagcgcgctgaccgcgctggttttaagctcaatgcttggcgcaggtgttttcagtctgccccagaatatggccgccgttgccagtccggctgcgttgttaattggctgggccattaccggcgtggggatactcctactggcattcgccatgttaatccttacgcgcattcgctccgagcttgacggcggcatctttacttacgcccgcgaaggcttcggcgaactgattggcttttgttctgcctggggctattggctgtgcgcggtcatcgccaacgtatcctatttggttatcgtcttttcagcgctgagtttctttaccgatacgcctgccctgcgtctgtttggcgacggtaatacctggcaggctattgtcggcgcttcagtcctgctctggattgtccatttcctcatcctgcgcggcgtacaaacggcagccagcatcaatctggtcgcgactctggcgaaactgttaccgctcggcgcgtttattgtgctggctatcatgatgttcaaactggataccttcacactggacttcaccggtgttgagctcggtattcccgtatgggaacaggtcaagaacaccatgcttattacgctgtgggtgtttattggcgttgaaggcgccgtcgtcgtctcggcccgagcgaaaaataaacgcgatgtaggccgcgccacgctactggcggtactcgcagcgctgggaatatatctcctggtcacgctgctttctcttggcgttcttgcgcgtccggaactggcggagatgcgcaacccgtcgatggccggtctgatggtgaaaatgatggggccgtggggagaaattattattgcagcgggactgattgtgtctgtctgcggggcttatctaagctggactatcatggcggcagaggtgccgtttctggcggcagcctataaatccttcccgggcatcttcgcgcgacaaaatgcgcaaggcgcgccttctgcgtcgttatggctcaccaacatctgtgtgcaaatctgtctggtgctgatctggctgaccggttcggactacaacacactattgacgattgcgtcagaaatgattctggtgccctactttctggtcggcgcatttctgctgaagattgcaacgcgtcccctccatcgggcggtcggtatcggagcctgtatttatggcttatggttattatatgcgtcgggccctatgcacctgctgctgtccgtcgtactgtacgcgcctggattactggttttcctgtatgcgcgtcggacgcacaagcatgacaatgtattaaatcgtcaggaagtcgtgctgattggtttattgctggtcgcggcggttccggctacgtggatgctggtgggttaa

SEQ ID NO: 39246 - DNA, 1131 bp, Salmonella typhi
atggcatacaccactttttcacaaacgaaaaacgatcagctcaaggaacccatgttctttggccagccggtcaacgttgcacgctatgaccagcagaaatatgacatcttcgaaaaactgatcgaaaaacagctctctttcttctggcgtccggaagaggtcgacgtctcccgcgatcgtatcgactatcaggcgttgccggagcacgaaaaacatatcttcatcagcaacctcaaataccagacgctgctggattccattcagggacgtagcccgaacgtcgccctgctgccgctcatttccatcccggagctggagacgtgggtagagacctgggcgttttctgagacgattcactcacgatcctacacccacattattcgtaacatcgtcaacgatccggcgatcgtgtttgacgatatcgtgaccaatgagcaaattcagaagcgcgccgaaggtatctccgcctactacgacgaacttattgagatgaccagttactggcatctgctcggtgaaggcacccataccgttaatggcaaaacggttgtcgtgaatctgcgtgagctgaagaaaaaactgtatctgtgcctgatgagcgtgaacgcgctggaagccatccgcttctacgtcagcttcgcctgctctttcgcatttgccgagcgtgaactgatggaaggcaacgccaaaattatccgtctgatcgcccgtgacgaagcgctgcatctgaccggcacgcaacatatgctgaacctgttgcgtagcggcgtggacgacccggagatggcggaaatcgccgaagagtgtaaacaggaatgctatgacctgttcgtgcaggcggcgcagcaggaaaaagagtgggcggactatctgttccgcgacggttcgatgatcggcctgaataaagatatcctgtgtcaatacgttgaatatattacgaatattcgtatgcaggcagtgggtctggatctgccgttccagacccgctccaacccaatcccgtggatcaatacctggctggtgtccgataacgttcaggttgcgccacaggaagtggaagttagttcttatctggtcggacaaatcgattcggaagtcgataccgacgatctgagtaatttccagctctga

SEQ ID NO: 39247 - DNA, 1152 bp, Salmonella typhi
atgaaaagaaaagtattggcacttgtcatcccggctctgctggctgctggcgcagcacacgccgctgaaatttataacaaagacggcaacaaactggacctttacgggaaagtagacggcctgcactatttctctgatgactcttctaaagatggcgatcagacctatatgcgtgtcggctttaaaggcgaaacgcagattaacgaccaactgaccggttacggccagtgggaatataacgttcaggctaacactaccgaaggcgaaggcgcgaactcctggactcgtctggcattcgccggtctgaaattcggcgactacggctcattcgactatggtcgtaactacggcgtcctgtacgacgtggaaggctggaccgatatgctgcctgagttcggcggcgactcctatacttacgctgacaactacatgaccggtcgtgctaacggcgtggccacctaccgtaacactgatttcttcggtctggtagacggtctgaacttcgcgttgcaatatcagggtaaaaatgaaagccaaagcgctgacgatgtaaatatcggtaccaataaccgtaataatggcgacgatattcgttacgataacggtgatggcttcggtatttctactacctatgatattggcatgggcttcagcgcaggcgctgcgtataccacttccgatcgtactaatgagcaagtcaatgctggcggcacgattgctggcggcgacaaagcggatgcatggacagctggcttgaaatatgatgccaacaacatctatttagcgactatgtattctgaaacccgtaatatgacgccttatggtaaaacggacaagggttatgatggcggcgtagcaaacaaaacgcaaaacttcgaagttacagcccaatatcaatttgatttcggtctgcgcccggcggtttctttcctgatgtctaaaggtaaagatctgacctataacaacgttaatggcgatgataaagacctggttaaatatgctgatgtaggtgctacctactatttcaacaaaaacttctccacctatgttgattataaaatcaacctgctggatgacgacgacccgttctataaagatgccggtatcagcactgatgatatcgtcgcgctgggtatggtttaccagttctaa

SEQ ID NO: 39248 - DNA, 1191 bp, Salmonella typhi
atgagcgacacacgttttgaaagttgtattaaatgtacggtgtgcaccaccgcgtgcccggtcagccgcgttaatcctggctaccctggccctaaacaggccggaccggatggcgaacgcctgcgtctgaaagacggcgcgctgtatgatgaggcgctgaaatattgcattaactgcaaacggtgtgaggtcgcctgtccgtcggacgtgaagattggcgatatcatccagcgcgcccgcgcgaaatacgatacgacgcgcccgtcattgcgtaactttattctcagccataccgatctgatgggcagcgtttcaacgccgttcgcgccggtggtcaataccgccaccgcattaaagccagtgcgccagttgcttgattacgcgctcaaaatcgatcatcgccgcaccttaccaaaatactctttcggcaccttccgccgctggtatcgtagcgtggcggcgcagcaggctaaatacaaagatcaggtcgcctttttccatggctgttttgtgaattacaaccatccgcagctcggaaaagatctgattaaggtgctgaacgcaatgggtactggcgtacagttactgagtaaagagaagtgttgcggcgtaccgctgatcgctaacggttttacggataaagctcgcaaacaggctatcagcaatgtggagtcgctacgagaggcgattgccgtcaaaggtattccggtcatcgccacgtcatccacctgtacgtttgcgttgcgcgatgaatatcctgaagtgctggacgtggacaacgccgggctgcgcgaacatatcgagctggccacccgctggctatggcgcaaactggatgccgggaaaacgctgccgcttaatcctttgccgctgaaagtggtctaccatacgccgtgtcatatggaaaaaatgggctggacgctttacacgcttgaactgttgcggcaaattccggggcttgaattgacggtacttgattcacagtgctgcggcattgccggtacgtatggatttaaaaaggaaaactatccgacatcacagtccatcggcgcgccgctgttccgccagattgaagagagcggcgccgacattgtcgtcaccgattgtgaaacctgtaagtggcaaattgagatgtctacaagcaaacgctgcgaataccccattacgctactggcgaaagcgctgggctaa

SEQ ID NO: 39249 - DNA, 954 bp, Salmonella typhi
gtgagcgatgaggcgcttgcgttgttgtttagcgccgtagagaacggtgatcagaattgtattgatctgttatgcaatcttgcgttacgcaatgataacctgggacatagagttgagaaatttctttttgatctctttagcggaaaaagatcgggatcaccagacatagacaaaaaaatcaatcaggcttgccttgtattacatcaaatcgccaataacgatataacaaaagataatactgagtggaaaaagctacatgccccttccagattactttatatggccggttccgcgacaaccgacctttctaaaaaaataggaatagcacataaaattatgggcgaccagttcgctcagacagatcaagaacaggtaggagttgaaaatctttggtgtagtgcgcgaatgttgtcgtcagatgagctagcagccgcaacgctaggtctggttcaagaatcacctcttctctcggtaaactatcctattgggcttattcatcctaccaccaaagaaaatatattacgcactcagctacttgaaaagatggctcaatcaggattatctgaaaatgaagtctttctgataaatacaggagatcactggcttatctgtttattttataaacttgcagaaaaaataaaatgccttatatttaatacttatcatgatttaaatgaaaatactaagcaagagattatagaagcagcaaaaattacaggcatatcagaaaacgaagatattgattttattgaaaccaatttacaaaataatgtacccaacggctgtggtctattttgttaccatacaattcaactcttatcgaatgcaggacaaaacgatcctgctaccacactacgagaatttgcggaaaatttcttaacgctttcagtagaggaacaaacactatttaacacccaaacccggcgacaaatatatgaatacagtctccagtaa

SEQ ID NO: 39250 - DNA, 1176 bp, Salmonella typhi
atgcaaaaactcattaactcagtgcaaaactatgcctggggaagtaaaactgcgttaacggaactttatggcatcgccaatccgcagcagcagccaatggctgaactctggatgggcgcgcatcccaaaagcagctcgcgaatcaccaccgccaacggcgaaaccgtctccctgcgtgacgccatcgaaaagaataaaaccgccatgctgggcgaagcggtagccaaccgtttcggcgaactgccgtttctgtttaaagtactgtgcgccgcgcagccgctctctattcaggtgcacccgaataagcgcaattccgaaatcggtttcgcgaaagaaaatgcggcgggtatccccatggatgccgcagagcggaactataaagatcctaaccataaaccagagctggtttttgccctggcgcctttcctggcgatgaacgcgttccgcgaattttctgacattgtctctttactgcaacctgtcgccggcgcgcattccgctatcgcccactttttgcaggcgccgaatgctgaacgtctgagccagcttttcgccagcctgttgaatatgcaaggcgaagaaaaatcccgcgcgttagccgtactcaaagcggcgcttaacagccagcaaggcgaaccgtggcaaacgatccgcgtgatttcagagtattatcctgacgacagcgggcttttctctcctttgttgctgaatgtggtcaaactgaatcccggcgaggcgatgttcctgtttgccgaaacgcctcatgcttatctgcagggcgttgcgctggaagtcatggcgaactccgataacgttctgcgcgctggccttacgccaaaatatatcgacatccctgagctggtcgcgaacgtgaagttcgaacctaagcctgccggcgagttgctgactgccccggtgaaaagcggcgcggagctggacttcccaattccggttgacgattttgctttttcactgcacgacctggcgcttcaggagacgagcatcggccaacacagcgccgcgattctgttctgcgttgagggtgaggcggtgttacgtaaagatgaacagcgtctggtactgaagccgggtgaatctgcctttatcggcgcggatgagtctccggttaacgccagcggcacgggccgtttagcgcgtgtttataacaagctgtag

SEQ ID NO: 39251 - DNA, 1116 bp, Salmonella typhi
ttgatggtcaggacgctattgcggctagtcgcacgatggtgtggaatagcgatatctaaaaccggaggcagtgagatgaatgacaaaatccgcgttgggttaatcggttatggctacgccagtaaaacctttcatgcgcccttaattatgggaacgccagggttagagcttgcggcggtatccagcagcgatgaaacaaaagtgaaagcagactggccggcggtctccgtggtctctgagccccgacatttatttaacgatccgcatatcgacctgatcgtgatcccgacgcccaacgatacccatttcccgctggcgaaagctgcgctggaagccggtaagcatgtggtggttgataaaccctttaccgtgacactgtcacaggcgcgagaattggatgcgcttgcgcggagcactggtcgggtactttccgtcttccacaaccgacgctgggacagcgattttttgacgctgaaggccttgctggcggatggcgtgctcggcgaggtgtccttgtttgaatcccactttgatcgcttccgtccccaggtgcgcgaccgctggcgcgagcaaggcgggccgggaagtggtatctggtacgatctggcgccgcacttgttggatcaggccattcaactttttggcctgccggtcagcatgacggtggatttagcgcaactgcgtccgggcgcgcaatctacagattatttccacgcgattttatcctacccccagcgccgcgtgattttgcacggtacgatgctggccgcggcggaatccgcgcgatacatcgttcatggttcgcgcggtagctatgttaaatatggcctcgatccccaggaagaacggttaaaaaacggcgagcgtttaccgcaggaagactggggatacgacatgcgtgacggcgtattgaccctggttgagggagagacgcgcaaagaagagaactggcttacgttgccgggtaactatccggcatattatgccgccatccgcgatgcgttaaacggtaacggtgaaaatcccgtgccggcaagccaggcgattcaaattatggagttgattgaactgggcatggaatcggcaaaacatcgcgcgacgctgtgtcttgcctga

SEQ ID NO: 39252 - DNA, 606 bp, Salmonella typhi
gtgctggcatttaccctacgctttattaaaaacaaacgctatttcgcgattctggcgggggcgttggttattatcgctgggttggcctcacaacatgcctggagcggtaacggtctaccgcagattaacggtaaggcgctggcggcgctggcgaagcagcatccggtagtcgtgttattccgccatgccgagcggtgcgatcgttccgataatacctgcctgtcagacagcacggggattacggtcaacggtgcgcaagatgccagagcgctgggtaaagccttcagtgccgatatacaaaattacaatctctattccagtaatacggtgcgcaccatccagtcggcaacctggttttccgcaggcaggtcgcttacggcggataaaaaaatgatggattgcggcagcggtatttatgcttcaatcaatacgttactgaaaaagtcgcagaataaaaatatagtcatttttacccataatcattgtttgacgtatattgcaaaaaataagcgcggcgtgaagtttgatccggactatcttaatgcgctcgttatgtatgcggaaaacggaaaactctttttagacggtgaatttgttcccggctag

SEQ ID NO: 39253 - DNA, 1983 bp, Salmonella typhi
atgaaagccgttatttttgcctatcacgatatgggatgtcagggcgtgcaggccgtactggatgcaggatatgagattgccgcaattttcactcatgccgacaatcctgcggaaaacaccttttttggctccgtctcccggctggcggcaggattagggattccggtttatgcgccggataacgtaaaccatcctatctgggtcgaccgcatcgctgaacttgcgccagatattattttttcgttctattaccgcaacctgttaagcgaagaaattctgcacctcgccccggctggcgcgttcaatctgcacggttctctattgccagcctatcgtggccgtgcgccgctaaactgggttctggttaacggcgaaagcgaaacgggcgtaacgctgcatcgtatggtcaaacgtgccgacgccggagagattgtcgccagtcaacgcgtcgctattgcgcaggacgatgttgcgcttaccctgcatcataagctatgtcaggccgcgcgccagttacttaatagcatcctgcccaccatgaaatgcggcaatataccttctgttcctcagcgtgagtctgacgctacgtattatggtcgccgcaggccggaagatggccttatcgactggcacaaaccggtttccacggtgcataacctggtgcgggcggtagccgccccctggcccggcgcgttcagctataacggctcgcaaaaattcactatctggtcttcccgaatttgtccggatgcgcaaggcgcgcttcccggctcggtaatttcggtctctccgctgcgggtcgcctgcgccgatggcgcgctggagattattaccggccaggccggagacggcattactgtacagggctcgcagcttgcacagacgcttggtctggtggcgggcgcgtgtttgaaccgtccaccagcgaccagcggtaaacgtcgcattcgcgttctcatcctcggcgtcaacggttttatcggcaatcatttgaccgaacggttactggatgaagagaattacgaggtctacggtatggatatcggcagcaacgccattagccgattcctgctccaccctcgctttcatttcgtggagggagatatcagcatccactcagaatggatcgaatatcatgtcaaaaaatgcgatgtcgtactgccgctggtagcaattgcaaccccgattgaatacacccgcaacccgctgcgcgtctttgaacttgattttgaagaaaacctgcggattatccgttattgcgtgaaataccgtaaacgcgtggttttcccgtctacctctgaagtgtacggcatgtgtacggacgcctcttttgacgaagacaaatcgaatctgatcgtcgggccggtgaataagccgcgctggatttactccgtttccaaacagcttctcgaccgggtgatttgggcttatggcgaaaaagagggattgcgcttcacgcttttccgtccctttaactggatggggccgcggctggatagcctgaacgcggcgcgtatcggcagttcacgcgcgataacgcagttgattctgaacctggtagaagggacgccgatcaagcttatcgacggcggtcagcagaagcgctgtttcaccgatattcgtgacgggatcgaagcattattccgcattattgtgaatgagggcgatcggtgcgatggcaaaatcattaatatcggcaaccctgacaacgaagccagtattcaggaactggcgacgctgttgctcgacagttttgataagcatccgctgcgctgccatttcccaccatttgccggtttccaggtcgtcgaaagccgtagttattacggcaagggttatcaggatgtcgcacaccggaaacccagtatcgacaatgccaggcgctgtctggactgggagccgtctattgcgatgcgtgatacggttgaagaaacgctggacttctttctgcgtagcgtcgatatcgcggaacgcgcatcatga

SEQ ID NO: 39254 - DNA, 378 bp, Salmonella typhi
atgggcgtaatgtggggactgataagcgttgcgattgcctccctcgcccagttgagtttaggattcgccatgatgcgactgccatcgatagcgcatccactggcgtttatttccgggctgggcgcatttaatgccgcgaccctggcgctattcgccggtttggcgggatatctggtttccgtcttctgctggcagaaaacattacacatgctcgcgctcagcaaagcctatgcgctgctgagtctcagttatgtgcttgtctgggtagcctcaatgttgttacccggtttgcaaggcgctttcagcctaaaagcgatgctcggcgtattgtgcattatggcgggggtaatgctgatttttctgcccgccagatcataa

SEQ ID NO: 39255 - DNA, 1275 bp, Salmonella typhi
atggcaagcagtaacttgattaaacaattgcaagagcgggggctggtagcccaggtgacggacgaagacgcgttggcagagcgactggcgcaaggcccgatcgcgctctattgcggcttcgatcctaccgctgacagcttgcatttggggcatctggttccattgttatgcctgaaacgcttccagcaggcagggcacaaacctgttgcgctggtaggcggcgcgaccggtctgattggcgacccgagctttaaagccgccgagcgtaaactgaacactgaagagaccgttcaggagtgggtggcgaaaattcgtaaacaggttgccccattcctggactttgattgcggcgaaaactccgccatcgcggccaataactatgactggttcggcagcatgaatgtgctgactttcctgcgcgatatcggtaaacatttttccgttaatcagatgatcaacaaagaagcggtgaagcagcgtctgaaccgtgacgatcagggtatctctttcacggagttctcttataacctgctacaggggtacgacttcgcttgtctgaataaactgcacggcgttgccttacagattggcggttctgaccagtgggggaacatcacttccggtatcgacctgacccgtcgcctgcaccagaatcaggtatttggtttgaccgttccgctgattaccaaagctgacggcacgaaattcggtaaaaccgaaggcggcgctgtctggctggatccgaagaaaaccagtccgtacaaattctaccagttctggattaacaccgcagatgccgatgtttatcgcttcctgaaattcttcacttttatggacattgaggagatcaatgccctggaagaagaagataaaaacagcggtaaagcgccgcgcgcgcagtatgtactggccgagcaggtgacgcgcctggttcatggtgaagaggggctggtcgcggcgaaacggatcactgaatgcctgttcagcggttcactgagcgcgctgagcgaagctgactttgagcagttggcccaggacggcgtaccgatggttgaaatggaaaaaggcgccgacctgatgcaggcgctggtagacgccgaactccagccgtcacgtggtcaggcgcgtaagactatcgcctccaacgctgtcactatcaatggtgaaaaacaatccgatcctgaatacatctttaacgatgaggaccgtctgtttggccgctataccttattacgtcgcggcaaaaagaactattgtctgatttgctggaaataa

SEQ ID NO: 39256 - DNA, 435 bp, Salmonella typhi
ttggaatcgccactaggttctgatctggcacggttggtgcgcatttggcgtgctctgattgaccatcgcctcaagcctctggaattgacgcagacacattgggtcacgttgcacaatattcatcaattgccgcctgaccagtcgcagattcaattggctaaagcgataggcattgagcagccatcgctggtacgcacgttggatcaacttgaagataaggggctaatttcgcggcaaacctgcgccagcgatcgtcgcgctaagcggattaaactgaccgaaaaagcggagccgctgatcgctgagatggaagaggtcattcataaaacgcgcggtgaaattttggctgggatttcttcagaggagattgagcttctgattaaacttgtcgctaaacttgaacacaacattatggaattgcactctcacgattga

SEQ ID NO: 39257 - DNA, 237 bp, Salmonella typhi
gtgaagtgtatactcaacgccacaggattgcccttacaagatctcatgttgggagcatctgtttactttccgccattcttcaaagcctttgcgcttgggttcgttatctggttgtttattcaccgactcctgcgtgaccggatatactctgatgaaatctggcatcccctgttaatggatctctccctctttacgctttgcgtatgtctgggcctcgttttactgatcgtgtggtaa

SEQ ID NO: 39258 - DNA, 870 bp, Salmonella typhi
gtggtaaatatgtcgttaaaaacaataaaatatttttctactctcattgtcgccgtcgtcgccgttctggccgcgtggtggttatggaattactatatgcagtcaccgtggacgcgcgatggtaaaatccgcgcggaacaggtcagcgtaacgccacaggtttctggcagcattacccaactcaatatcaaagataatcagttcgtcaacgctggggacgttctctttgtcattgataaaacgcccttccatattgcagaacttaacgcgcaggcacagttggccaaagcgcagtccgatctggcaaaagcgaataatgaagccgatcgacgtcgacatttatcgcgtaactacatctctgctgaagatctggatagcgccaatctgaatgttaaagcgatgcaggccagcgtagatgtcgcactggcaacgttaaaacaggcgcagtggcagcttagccagacggaagtaaaagcgccggtatccggctgggtgaccaacctttccacgcgtaccggtgattatgctagcaccggtaagccacttttcgccctggtagatagccattcattttatgtaatgggatatttcgaagaaaccaaactacgccatatccgcgaaggtgagcctgcattaataacactgtatagtggcaatgttaagttacagggtcacgttggcagtatcgggcgcgctatttacgaccaaagcgtggaaagtgactccggtttagtgcccgatatcaaacccaacgtaccgtgggtacgtctggcgcaacgcgtaccggtacgtatcgaatttgacgctttgccgcaggatatcacgctcgtctccggcactacctgcagcgtagccattggacagcggtaa

SEQ ID NO: 39259 - DNA, 600 bp, Salmonella typhi
atgaataagcaaaccgaacatgatacccgcgaacatctgctggccaccggcgagcagctttgtatgcaacggggttttaccggcatggggcttagcgagttgctcaaaaccgcccaggtacctaaagggtcgttttatcactactttcgctcgaaagaagccttcggcgtcgccatgcttgagcgacattacgcctgctatcatcagcgtcttacggcgcacttcacctccggtcccggtaatcatcgcgatcgtcttctcgcctggtatcaggaaacgttaaagcagttttgccagcaaggcgccatcagcggttgcctgacggtgaaactgtcagcggaagtctgcgatctgtcggaggatatgcgctctacgatggataaaggggcgcaggagatcatggcactgcttgcacgcgcgctggaagatggccgtaatagccactgtttacatttcaccggccagccgttgccacaggcgcaggtactttatgccctgtggctgggcgccaatttgcaggccaaaatatcccgtagcgccgcgccgctggaaaatgcgttggcgcatgttaagaccatcattgcaacgcctgagcagtaa

SEQ ID NO: 39260 - DNA, 1842 bp, Salmonella typhi
atgaacatgcttgccttaaccattattctgccattgattggctttgtactgctggcgttctctcgcggacgctggtcggaaaatctctccgcgaccattggcgtgggctccgttggtctggcggcgttggtgacagcgtttgtcgggatggatttcttcgccaacggcaaacaggcgttcagccagccgctgtggacgtggatgtcggtcggtaacttcaacatcggttttaacctggtgctggacggcctgtcgctgaccatgctctctgtggtcaccggcgtcggcttcctgatccacatgttcgcttcctggtacatgcgtggagaagagggctactcccgcttcttcgcttataccaacctgtttatcgccagcatggttgttctggtgctgtccgataacctgctgttgatgtacctcggctgggaaggcgtgggcctgtgctcttatctgttgatcggcttctattacagcgatccgaagaatggcgcggcggcaatgaaagccttcgtggtgacccgtgtcggtgacgtattcctcgccttcgcgctgttcatcctctacaacgaactgggcacgctgaacttccgcgaaatggtcgagctggcgccagcgcactttgctgacggcaacaacatgctgatgtgggcgacgctgatgctgctgggcggcgcggtcggtaaatctgcgcagctaccgttgcagacctggcttgccgacgcgatggccggtccgacgccggtctccgcgctgatccacgccgccaccatggttaccgccggtgtctacctgatcgcacgcacgcatggcctgttcctgatgaccccggaaattctgcatctggtgggcattatcggggcgattacgctggtcatggcgggtttcgccgcgctggtgcagaccgacatcaaacgcgtgctggcctattccaccatgagccagattggctacatgttcctggcgcttggcgtgcaggcgtgggatgcggcgattttccacctgatgacgcacgccttctttaaagcgctgctgttcctggcatccggctcggtaattttggcctgccatcacgaacagaacatctttaagatgggcggtctgcgtaagtccattccactggtgtatgcctgcttcctggtggggggcgcggcgctgtcggcgctgccgctggtcactgcgggcttcttcagtaaggatgagatcctggctggcgcgatggcgaacggtcatatcaatctgatggtggcgggtctggttggcgcgttcatgacctccctgtacaccttccggatgattttcatcgtattccacggtaaagaacaaattcatgctcatgcagggaaggggattacccaccatctgccgctgattgtcctgatgattctgtctacctttgttggcgcgctgattgtgccgcctctgcagggggtgctgccgcagacaactgaactggcgcatggtcgtgtgttgaccctggaaattacctctggcgtagtggcgattgccggcatcctgattgccgcatggctgtggctgggtaaacgtacgctggtgacgtcgatcgccaacagcgcgccgggccatctgctggggacctggtggtataacgcctggggctttgactggctgtacgacaaagtattcgtcaagccattcctcggtatcgcctggctgctgaagcgcgacccgcttaatgcgttgatgaacattccggctatcctttcccgttttgcaggcaaaggcctggtactgagcgagaacggttatttgcgctggtatgtggcatccatgagcatcggcgcggttgtggtgctggcgctgctgatggtactgcgttga

SEQ ID NO: 39261 - DNA, 408 bp, Salmonella typhi
atgcgtttattgcatactatgctgcgcgtcggcgatttgcagcgttccatcgctttttacactaacgttctgggcatgaaattgctgcgtaccagtgagaatccggaatacaaatactcgctggcctttgtgggatatggtccggaaacggaagaagcggtcatcgaactaacctataactggggcgttgagagctacgacatgggcaatgcgtatgggcacatcgcgctgagcgttgacaatgctgctgaagcctgtgaacgcattcgtcagaacggcggcaacgtgacccgtgaagcggggccggtaaaaggcggttcgaccatcatcgccttcgttgaagatccggatggctataaaatcgaattgattgaagctaaagacgcaggccgcggtctgggtaactga

SEQ ID NO: 39262 - DNA, 1026 bp, Salmonella typhi
atggcaacaattaaagatgtagcgaaacgggcaaacgtttccactacaactgtatcacacgtaatcaacaaaacgcgttttgtcgctgaagaaacgcgtaacgcggtctgggcggcaattaaagagctgcactactctcccagcgccgtcgcgcgtagcctgaaggttaaccataccaagtcgataggcttactggcgaccagcagcgaagcggcctattttgccgaaattatcgaggcagttgaaaaaaactgtttccagaaaggctatacgctgattttaggcaacgcctggaataacctggaaaaacagcgcgcctacctgtccatgatggcgcaaaagcgcgtggatggcctgctggtgatgtgttctgagtatccagaacctctgctttccatgctggaagagtatcgccatattccgatggtggtgatggactggggtgaggcgaaggccgattttaccgacacggtgattgataacgcctttgcaggcggctatatggcgggtcgttatctggttgagcgcggccaccgggatatcggcgttattcccggcccgctggagcgcaacacaggcgcggggcggctggcaggctttatgaaagccatggaggaggcgctgatcaacgtgccggacaactggattgttcagggcgacttcgagccggaatccggttaccacgcgatgcagcaaatcttatcgcagtcacatcgccctaccgccgttttctgcggcggcgatattatggcgatgggcgcgctttgcgcagctgacgaaatggggcttcgcgtaccgcaggacgtttcggtgatcggttatgacaatgtgcgtaacgcccgtttctttaccccggcgctgacgacgattcaccagcccaaagactctttaggcgaaaccgcatttaatatgctattggatcgcatcgtcaataagcgtgaagagtcacagtctattgaagttcatccacgcctggttgagcgtcgctcggtcgctgacggcccgttccgcgactatcggcgttaa

SEQ ID NO: 39263 - DNA, 1338 bp, Salmonella typhi
atgaaaaacgttatccgtactcccgaaacccatccgctgacctggcgtctgcgcgatgacaaacagccggtctggctggatgaatatcgtagcaaaaacggctacgaaggcgcgcgtaaggcgctgaccggcctgtctccggatgaaatcgtcagccaggtaaaagacgctggtctgaaagggcgcggcggcgcgggcttttccaccggtctgaagtggagcctgatgccgaaagatgaatccatgaacatccgttacctgctgtgtaacgccgatgaaatggagccgggcacctataaagaccgtctgctgatggaacaactgccgcacctgctggtggaaggcatgctgatctccgcgttcgcgctgaaagcgtatcgtggttacatcttcctgcgcggcgaatatatcgaagcggctgtacatctgcgccgtgcgattgccgaagcaaccgaggccgggctgcttggcaaaaatatcatgggcaccgggttcgacttcgaactgtttgtccacaccggggcagggcgttacatctgtggtgaagaaacggcgctgattaactccctcgaaggccgccgcgcgaacccgcgctccaagccgcctttcccggcgacctccggcgtatggggcaagccgacctgtgtgaataacgtcgaaacgttgtgtaacgtcccggcaatcctcgccaacggcgtggagtggtaccagaacatctcgaaaagcaaagatgcgggtaccaagctgatgggcttctcgggccgcgtgaagaatccgggcctgtgggaattaccgttcggcaccatcgcgcgcgagatcctcgaagactacgccggcggtatgcgtgacggcctgaaattcaaagcctggcaaccgggcggcgcggggacagacttcctgaccgaagcacacctcgatctgccgatggaattcgaaagcatcggtaaagcggggagccgtctgggcaccgcgctggcgatggcggtagaccacgaaatcggcatggtgtcgctggtgcgtaacctggaagagttctttgcccgcgaatcctgcggctggtgtacgccatgccgcgacgggttgccgtggagcgtgaaaattctgcgcgcgctggagcgtggcgaaggccagccgggggatatcgagacgcttgagcaactgtgtcgattcctcgggccgggtaaaaccttctgcgcgcatgcgccgggcgcggttgagccactgcaaagcgcaattaagtatttccgcgaagaattcgaagctggcatcaagcagccgttcagtaatacccatttaatcaatggtattcagccgaacctgctcaaagagcgctggtga

SEQ ID NO: 39264 - DNA, 501 bp, Salmonella typhi
atgcacgagaatcaacaaccacaaaccgaggcttttgagctgagtgcggcagagcgtgaagcgatagagcacgagaagcaccactacgaagacccgcgtgcggcgtccattgaagcgctgaaaatcgttcagaagcagcgtggctgggtgccggacggcgcgatctacgctattgccgatgtgctgggtattccggcgagcgacgtcgaaggcgtcgccacattctacagccagatcttccgtcagccggtcggtcgccacgtgattcgctactgcgacagcgtggtgtgccatatcaccggctatcaggggattcaggccgcgctggaaaaaaatctcaacatcaaaccggggcagacgacctttgatggccgctttacgctgctgccgacctgctgcctggggaattgcgataaagggccgaacatgatgattgatgaggatactcacagccatctgaccccggaagccattcctgaactactggagcggtataaatga

SEQ ID NO: 39265 - DNA, 642 bp, Salmonella typhi
atgtttacggggatcgtacagggtaccgcgaaactggtatcgattgatgaaaaacccaactttcgcacccatgtggtgacgttaccggactacatgctggaggggctggagacgggggcgtcggtagcgcataacggatgctgtttgacggtaactgaaataaacggcaatcagataagctttgatctgatgaaagaaacgttgcgcatcaccaatctgggcgcgttgagggtaggtgatgaggtcaacgtagagcgcgccgccaaattcagcgatgaaatcggtggacatctgatgtcggggcatattattacgacggcggagatcgcgaaaatcctgacctctgaaaataaccatcaggtgtggtttaaagtgcaggatgcgtccctgatgaagtatatcctgtacaagggctttatcggcgtcgacggcatcagtttgaccgtcggcgaggtaacgccaacgcgcttctgcgtgcatctcattccggaaacgctggaacgtactacgcttggcagaaaaaaactgggtgagcgtgtgaatatcgagatcgatccgcaaacgcaggcggttgtcgataccgtagaacgcgtactggctacacgagaaaatgtggtcagaaatcaggccgacattggctaa

SEQ ID NO: 39266 - DNA, 939 bp, Salmonella typhi
atgataaatgcaaatcgtccgataattaacctcgatctcgatctgctgagaacgttcgtggccgttgccgatctgaacaccttcgccgcggcggcggcggcggtatgtcgtactcagtctgcggtcagtcagcaaatgcagcgtcttgagcaactcgtgggaaaggaattgttcgcccgccatggtcgtaacaaacttttgagcgaacacggtatccagcttctggggtacgccagaaaaatcctgcgttttaatgatgaggcgtgttcatcattaatgttcagtaatcttcagggagtgttaacaatcggcgcttctgatgaatcagctgatactatcctgccttttttgcttagccgaatcagctcggtttatccgaaactcgcgcttgatgtacgggtaaaacgcaacgcctatatggtggacatggttaaatcgcaggaagtagatttggtggtgacgactaaccaacctcattcgctggactgtctgaatttgcggacctcgcccacccattggtattgtgcggctgagtatgttttgcaaaggggagagcccgtaccattagtcctgctggacgatcccagcccattccgcgatatggtgctggagacgctaaatgcagcgggtattccctggcggctggcctatgtggcctctacattactggcggtacgcgcggccgttaaagccggtcttggcgtaacggctcgacctgtcgaaatgatgagtcccgaccttcgcgtgctgggcgccgcagatggattaccgcctttgctggatacggaatatatgttgtgccgcgatcccaatagccagaacgagctggcgatggtgattttccatgcgatggaaagctatcaaaacccatggcattacaaccagttttctgcagagggcggagatgatccgctgatggtggaagggggttttgagtag

SEQ ID NO: 39267 - DNA, 648 bp, Salmonella typhi
atgttacaggtataccttgttcgccacggtgaaacgcagtggaacgccgagcgacgtattcagggccaatcggacagtcccctgacggcaaaaggagagcagcaggccatgcaggtaggagaacgcgcccgcagcctcggcatcacccatatcatcagcagcgatttaggccgcacaaaacgcacggcggagattatcgcccaggcgtgcgggtgtgatattacctttgacttccgcctgcgcgagctggatatgggcgtgctggaaaagcgccagatcgattcgctgacggaagaagaagagggctggcgtcgtcagctggtcaacggcacgcaggatggccgcattcctggtggggaatcgatgcaggagttgagcgatcgcgttcatgccgcgctggcgtcctgtctggagctaccgcagggcagccgacctttattggtcagtcacggtatcgcgttgggctgtctggtcagtactatcctgggactacccgcctgggcggaacgccggttacgtttgcgcaactgctctatttcccgtatcgattaccaggaaagtcagtggctggcgtctggctgggtggtagaaaccgcaggggacgtttcgcatctggacacccctgcattggatgagctacagcgttaa

SEQ ID NO: 39268 - DNA, 1350 bp, Salmonella typhi
atgttgaaatcccccctgttgtggaaaatgattacgttaggcggcgccatgatcctgctgttaattcccctgatgatggtacggcacaccatcgtggagcgtgctgattatcgaagccatgtagaagccgctattcgtcagagtaccagcggcccgcaaaaggttgtcggcccgctggtggcggttccggtgacagagctctataccgtgctggaagaggagaaagaggttcagtataagcgcagctatctctatttttggctgccggagtcgctattggtcgaaggcaatcaaaacgttgaagcgcgaaaaataggtatttatcaggggcaggtgtggcataccgatatggcgataaaggcagagtttgatgtggcccgtctgcatgagctgaacagaccgaatattacccttggaaagccctttatcgtcgtgggcgtcggcgatgcgcgcggtatcagcgcagtaaaagcgccgcaggtgaatggtgaaatgctcactgtagaaccggggaccggcttaccggaaagtagagagggcattcatatcccgctaccggacagtcagtgggcgacgcgcaacctgacgttggcgatgtcgttaaatttaagcggaaccggcagcttttcactggttcctgtcgggcgtagcagtgaaatgaccctgaccagtaactggccgcacccaaattttgtgggggattttcttcccggtaaacgcgaaatcagcggttcaggatttcaggctcagtggcaaaccagccggtttgccacgaatctcggcgaacagtttgctgatgcgcaaaaggtggattgggacaacttaccggcgtttagcgtcgctgtatcgacgccagccgatcagtatcaactgacggacagagcgacgaaatatgccattttgttgattacgctaacgtttatggctttctttgtcttcgaaaccctgacgggacagcgattacacccgatgcagtatctgctggtagggttatcgctggtgatgttctacctgctgttgctggcactgtcggaacatatcggtttcacgccagcctggatcgccgcaagcctagtgggcgcgttgatgaatagcgtttatttgcaggcggtactgaaaggatggcgcaatagcgtgctgtttacgttagcgttattggcgctggatggcgtgatgtgggggttactgcgttcggaagatagctcgttgcttctgggtaccggcgttctgctactggcgcttggcggcgtgatgttcctgacgcgccatctggactggtattcgctctcttgtcagcaacgtaagtcattaccgccagtaaaagatgacgaattacgtttgtggaaataa

SEQ ID NO: 39269 - DNA, 1251 bp, Salmonella typhi
atgacattttcacttttcggcgataaatttacccgccattcaggcattacccgcctgatggaggatctcaacgacggcttacgcacgccaggcgccatcatgcttggcggcggtaacccggcacacatccctgcaatgcaggattatttccagacgctactgacagagatggtagaaagcggcaaagccgctgatgcgctttgtaattatgacggtccccagggaaaaacggcgctactgaatgcactggccgtactgctacgtgaaacgctgggatgggatatcgaaccacagaatattgcgctaacaaatggcagtcagagcgcgtttttctacttatttaatctcttcgccggacgtcgcgccgacggcagtacgaaaaaggtactattcccgcttgcgccggaatacatcggctatgcggattccggtctggaagacgacctcttcgtttcggcgcgcccgaatattgagctgctgccggaaggccagtttaagtatcacgtcgattttgagcatctgcacatcggcgaagaaacggggatgatttgcgtctcgcgcccgaccaacccaaccggtaacgttatcaccgacgaagagctgatgaagctggacagactggcgaatcagcacaacatcccactggtgattgataacgcttacggtgtaccgtttccgggcattatctttagcgaggcgcgcccgctgtggaaccccaatattatcctatgcatgagcctctcaaagctggggctgcccggttcccgctgcgggattatcatcgccaatgataagacgattaccgccattgccaacatgaacggcatcatcagccttgcgcccgggggcatgggcccggcgatgatgtgcgaaatgattaagcgtaacgatctgctgcggctgtcggaaacggttatcaaacctttctactatcagcgcgttcaacagacgatcgcgatcattcgtcgctatttatccgaagaacgctgcctgattcataaaccagaaggcgcaatatttttgtggctgtggtttaaagatctgccgattaccaccgagctactctatcaacgcttgaaagcgcgcggcgtgctgatggtgccgggccactatttctttcccggactggataaaccctggccgcacacacaccagtgtatgcggatgaactacgtgcctgaaccggataaaatcgaggcgggcgtaaaaattctggcagaagagatagaacgcgcctggcgtgaaggctga

SEQ ID NO: 39270 - DNA, 1323 bp, Salmonella typhi
atgcaggcttattttgaccaactcgatcgtgttcgctatgaaggccctcaatcgactaacccgctggcatttcgtcattacaatcccgacgagctggttttaggtaaacgtatggaagatcacctgcgtttcgcggcctgttactggcataccttctgctggaacggcgcggatatgtttggcgtaggcgcgtttaatcgtccgtggcagcaaccgggcgaagcgctggagctggcgaaacgcaaagcggacgtggcgtttgaatttttccacaaactgaatgtgcctttttactgcttccatgacgtggatgtgtcgccgaaaggcgcgtcgttgaaagaatataaaaacaacttcgcgcagatggtggatgtgctggcggcgaaacaggagcagagcggcgtaaaactgctgtggggaacggcgaactgctttaccaacccgcgctatggcgcaggcgccgccactaacccggacccggaagtctttagctgtgcagcgacgcaagtggttacggcaatgaacgccacgcataaactgggcggcgaaaattacgtactgtggggcggacgcgaaggttatgaaacgttgctgaataccgatctacgccaggaacgcgaacagattggccgctttatgcaaatggtggttgagcacaaacataaaatgggtttccagggcacgctgctgattgaaccgaaaccgcaggaaccgacaaaacatcagtatgattatgacgttgcaacggtctatggcttcctcaaacagttcggcctggaaaaagagatcaaagtgaacattgaggcgaaccacgccacgctggcgggccattcgttccaccatgaaatcgcaaccgctatcgcgctgggtatttttggctccgttgatgccaaccgcggcgatgcgcaactgggctgggataccgatcagttcccgattagcgttgaagagaacgcgctggtgatgtacgaaatcctgaaagcgggcggattcacgacgggcggtctcaacttcgacgccaaagttcgtcgccagagcaccgataaatacgatctgttctacggtcatatcggcgcgatggatacgatggcgttgtcactgaaaatcgccgcgcgtatggtcgaagacggcgagttggataaacgcgtggcgaagcgctatgccggctggaatggcgagctggggcagcagattctgaaaggacaactctccttaggcgaactggcgcagtatgcggagcagcaccatctggcgccggtacatcaaagcggtcatcaggagctgttagaaaatctggttaaccgttatctgtttgataaataa

SEQ ID NO: 39271 - DNA, 1455 bp, Salmonella typhi
atgtatatcgggatcgatcttggtacatcgggtgtaaaagctatcctgttgaatgagcagggcgatgtgctggctacgtatactgaaaaactgaccgtatcgcgtccgcatcccttatggtcggaacaggaaccagagcagtggtggcaggcgacggatcgtgcggttaaaggtttaggtcggcaacagtcgttaagtggcgtccgggcgttgggcatcgccggacaaatgcatggcgcgacattacttgatagccgtcagcaggttctgcgaccagcgattttatggaatgacggacgctgtagcgaagagtgcgcctggctggaaaaacaggtgccgcagtcgcgagcgataaccggtaatctgatgatgcccggttttaccgcgcccaaattagtttgggtgcagcgccacgaaccggatattttctaccagatagacaaggttctgctgccgaaagattttctgcggctgcgaatgacaggcgtctttgccagcgatatgtcggatgcggcgggaacgatgtggctggacgtgaaaaagcgcgactggagcgacgttatgctcaacgcctgtcatttaacccgacagcagatgccagcgttatttgaaggtagtgacattaccggaacgttgctgccagaggtcgccagcgcatggggaatgccagcagtacctgtggtggcaggcggcggcgacaatgcggctggcgcggtcggcgtaggaatgatcgatgccggacaggcgatgctctcactcggaacatcgggcgtctattttgccgtcagcgacggctttctgagtaaaccggagagcgcagtacacagtttttgccatgcgctgccggaacgctggcatttaatgtctgtgatgttgagcgccgcctcttgtctggactgggcggctaaactcaccgggcaggagaacgtcccggcgctgattgccgccgcacagcaggcggatgagcatgccgattcgatctggtttttgccgtacctgtccggcgagcgcacgccgcataataatccgcaggcaaaaggcgttttctttggtttaacccatcagcatggcccggcggaactggcgcgggcggtactggaaggcgtgggatatgctttggcggacggtatggatgtggttcacgcctgcggcgtcaaacccgccagcgtgacgcttatcggcggcggagcgcgcagcgaatactggcgtcagatgctatctgatattagcgggctacagcttgattatcgtactggcggcgatgtagggccagcgctgggcgcggcgcgtctggcgcaaattgcggtgaataaacagactccgctcgccgatgtattgccgcagttgccgctggagcaggcgcattatcctgatgcgcagcgtcatgcggtttatcaacaacgtcgtgaaaccttccgtcgactctatcagcagctgttgccgttgatgtcataa

SEQ ID NO: 39272 - DNA, 1104 bp, Salmonella typhi
atgacttcgcgtaactatctgttgctgacccctggcccactcaccacctctcgcaccgtgaaagaagcgatgttgttcgatagctgtacctgggatgatgattacaatatcggcgtggtagaacagatccgccagcagttgaccgcactggcaacggcctccgaaggctacacctccgtactgctgcaaggcagcggcagctatgctgtggaagccgtactgggaagcgcattggggccgcaggataaggtgctgatcgtcagcaacggtgcatacggcgcacgaatggtcgagatggccggccttatgggtatcgcccatcacgcttacgactgcggcgaagttgcgcgcccgaacgtgcaggcgatcgacgcgatcctcaacgccgacccgacgatcagccatatcgccatggtgcatagcgaaacgaccaccgggatgctcaaccccattgatgaggttggcgctctggcgcatcgctatggcaaaacctacatcgttgacgccatgagcagcttcggcggcatccccatggatattgcagcattacacatcgactatctgatcagctccgctaataaatgcatccagggcgtgccgggttttgcctttgtgattgcccgcgagcaaaaactggccgcgtgcaaagggcgttcccgctcgctgtcgttagatctctacgcccagtggcgctgcatggaggataaccacggcaaatggcgttttacttcgcccacacataccgtcctggcgtttgcacaggcgctgaaagagctggcgaaagaaggtggcgtggcggcacgtcatcaacgctatcagcaaaatcagcgcagcctggtggccggaatgcgggcgctgggctttaacacgctgctggatgacgagcttcattcgcccattatcaccgccttttattcaccggaagacccgcagtatcgctttagcgaattttatcgccgcctcaaagagcagggctttgttatctatccaggcaaggtgtcgcaaagcgactgcttccgcatcggcaacattggcgaagtatatgccgccgatatcactgccctgctgaccgccattcgtaccgccatgtactggacgaaataa

SEQ ID NO: 39273 - DNA, 912 bp, Salmonella typhi
atgcaaaagtttgataccaggaccttccagggcttgatcctgaccttacaggattactgggctcgccagggctgtaccattgttcaaccattggacatggaagtcggcgcgggaacttctcatccaatgacctgcctgcgcgcgctggggccagagccgatggcgactgcctatgtgcagccttctcgtcgtccgaccgatggccgctacggcgaaaacccgaaccgcttacagcactactatcagttccaggtagtgattaagccgtctccggagaatattcaggagctgtacctcggttctctgaaagagctgggtatggacccgaccattcacgacatccgtttcgtggaagataactgggagaacccgacgctgggtgcctggggactcggctgggaagtgtggctgaatggcatggaagtgacgcagttcacctacttccagcaggtcggcggcctggagtgcaagctggtgaccggtgaaatcacctacggtctggaacgtctggcgatgtatatccagggcgtggacagcgtttacgacctggtctggagcgatggcccgctgggtaaaactacctacggcgacgtgttccatcaaaacgaagttgagcaatccacctataactttgaatacgccgatgtggatttcttattcacctgcttcgagcagtatgagaaagaagcccagcagctactagcactggaaaacccgctgccgctgccggcctacgagcgtattctgaaagccgcccacagcttcaacctgctggatgcgcgtaaagccatctccgtcaccgagcgtcagcgttacattttgcgcattcgcaccctgacaaaagcagtggcagaagcatactacgcttcccgtgaagccctcggcttcccgatgtgcaacaaagataagtaa

SEQ ID NO: 39274 - DNA, 2070 bp, Salmonella typhi
atgtctgagaaaacttttctggtggaaatcggcactgaagagctgccaccaaaagcactgcgcagcctggctgagtcctttgctgcgaactttactgcggagctggataacgctggcctcgcacacggcaccgttcaatggtttgctgctccgcgtcgtctggcgctgaaagtagctaacctggcggaagcgcaaccggatcgtgaaatcgaaaaacgcggcccggcgattgcccaggcgttcgatgctgaaggcaaaccgagcaaagcagcagaaggctgggcgcgtggttgcggtattaccgttgaccaggctgagcgtctgactaccgataaaggcgaatggctgctgtatcgcgcctacgtgaagggcgaaagtaccgaagcactgctgccgaatatggtcgcgacctctctggcgaagctaccgatcccgaaactgatgcgctggggtgcaagcgacgtacacttcgtgcgtccggttcacaccgtaaccctgctgctgggcgacaaagtcattccggctactattctgggcattcagtccgatcgcgtgattcgcggccatcgttttatgggcgagccggaattcactattgacaatgccgatcagtatccggaaatactgcgcgagcgcgggaaagtcatcgccgattacgaagaacgtaaggcgaagattaaagccgatgccgaagaagccgcgcgtaagatcggcggtaacgctgacttaagcgaaagtttgctggaagaagtggcttcgctagtggagtggccggtcgtactgaccgcgaaatttgaagagaaattcctcgctgtgccgtctgaagcgctggtttacaccatgaaaggtgaccagaaatacttcccggtgtatgcgaacgacggcaaactgctgccgaactttatcttcgttgccaacattgaatcgaaagatccacagcaaattatctctggtaacgagaaagtcgttcgtccacgtctggcagatgccgagttcttcttcaacaccgaccgtaaaaaacgtctggaagataacctgccgcgcctgcaaaccgtgctgttccagcaacagctgggtacgctgcgcgacaaaactgatcgcatccaggctctggctggctggattgctgaacagattggtgctgacgttaatcacgctacccgtgcgggcctgctgtctaagtgtgacctgatgaccaacatggtcttcgagttcaccgacacccagggcgttatggggatgcactacgcgcgtcacgatggcgaagcggaagatgtcgcggtggcgttgaacgagcagtatcagccgcgttttgctggtgatgacctgccgtccaacccagtggcttgtgcgctggcgattgctgacaagatggataccctggcgggtatcttcggtatcggtcagcatccgaaaggtgacaaagacccatttgcgctgcgtcgtgccgcacttggcgtgctgcgtattatcgttgagaagaacctcaaccttgatctgcaaacgctgaccgaagaagccgtgcgtctgtatggcgataagctgactaacgccagcgtggttgatgatgtcatcgactttatgctgggccgtttccgcgcatggtatcaggacgaaggttactccgtcgacaccatccaggctgtactggcgcgtcgtccgacccgtccggcagattttgatgcccgcatgaaggcggtgtctcatttccgcaccctggaagaagcctctgcgctggcggcggcgaacaagcgcgtctccaacatcctggcgaaagccactgagccgctgaacgatatcgtccacgcctccgtactgaaagaagcggcggaaattgagttggccagacatctggttgtgctgcgtgataagcttcagccgtactttgccgatggtcgttatcaggaagcgttgattgagctggcggcactgcgcgcgccggtggatgaattcttcgaaaatgtcatggtgaacgcggaagagaaagatatccgtatcaaccgcctgacgctgttgtcgaaactacgcgaactgttcctgcaggttgcggatatttcgttactgcaataa

SEQ ID NO: 39275 - DNA, 213 bp, Salmonella typhi
atgtccggtaaaatgactggtatcgtaaaatggttcaacgctgataaaggcttcggctttattactcctgatgacggttctaaagacgtgttcgtacacttctccgctattcagaacgatggttacaaatctctggacgaaggtcagaaagtttccttcaccatcgaaagcggcgctaaaggcccggcagctggcaacgtaaccagcctgtaa

SEQ ID NO: 39276 - DNA, 1992 bp, Salmonella typhi
atgttcggaaaattatcactggatgcagtaccgttccatgaacctatcgtcatggtaacgatcgctgcaattatcgtcgggggactggcgatactggcagcgattacttacttcggtaagtggacctacctatggaaagagtggttaacgtcggttgaccataaacgcctcggtatcatgtatatcatcgtcgcgattgtgatgctgttacgtggtttcgccgatgccatcatgatgcgtagccagcaggcgcttgcctccgcaggcgaagcgggttttctaccgccgcaccactacgatcagatctttaccgctcacggcgtaatcatgatcttcttcgtggcgatgcccttcgttatcggtctgatgaacctggtggttccgctgcagatcggcgcgcgcgacgttgctttccctttcctgaacaacctgagcttctggttcaccgttgtcggcgttattctggttaacctctcgctgggcgtgggtgaattcgcgcagacagggtggctggcttatccgccgctatcgggaatagagtacagtcccagcgtcggggtcgattactggatatgggcgttgcaactctcgggtattggtacgacgttaaccggtatcaacttcttcgtgacgatcctgaagatgcgtgcgccgggtatgacaatgttcaagatgccggtctttacctgggcctctttgtgcgccaacgtactgatcatcgcctctttcccgattctgacggttaccgtcgcgttgctgaccctggatcgctatctgggcacccatttctttaccaacgatatgggcggcaacatgatgatgtacatcaacctgatttgggcctggggccatccggaagtgtacattctgattctgccggtcttcggggtattctccgaaatcgcagcgaccttctcgcgtaaacgtctgttcggctatacctcgctggtttgggcgaccgtctgtattaccgtactgtcgtttatcgtttggctgcaccacttcttcacgatgggcgcgggcgcgaacgttaacgccttcttcggtatcaccaccatgattatcgccatcccgaccggggtgaagatcttcaactggttgttcaccatgtatcagggccgtatcgtcttccattccgcaatgatgtggaccatcggctttatcgtgaccttctcggtcggcggtatgaccggcgtgctgctggcggtaccgggcgcggacttcgtcctgcacaacagcctgttcctgattgcgcacttccataacgtgatcatcggcggcgtggtgtttggctgcttcgcaggtatgacttactggtggccgaaggcgtttggcttcaagctgaacgaaacctggggtaaacgcgccttctggttctggattatcggtttctttgtagcctttatgccgctgtacgtactgggcttcatgggcatgacccgtcgcctcagccagcaaattgatccgcagttccatacgatgctgatggttgccgccgccggcgccgcgctgattgcgctgggtatcctgtgccaactgattcagatcttcgtttctattcgcgaccgcgatcagaaccgcgatctgaccggcgacccatggggtggccgtacgctggagtggtcaacctcgtctccgccgccgttctataactttgccgttgtgccgcacgttcacgaacgtgacgccttctgggaaatgaaagaaaaaggcgaagcgtaccaacagcctggacagtatgaagagattcatatgccgaaaaatagcggtgccggtattgttatcgccgccttcgcgacggtatttggcttcgccatgatctggcatatctggtggctggcgatagtgggtttcgcaggcatgatcatcagctggattgtaaaaagctttgatgaagatgtggattactacgtgccggtcccggaagtcgaaaaactggaaaaccagcatttcgatgagattactaaggcagggctgaaaaatggcaactga

SEQ ID NO: 39277 - DNA, 957 bp, Salmonella typhi
atgagactcaggaaatacaataaaagtttgggatggttgtcattaattgcaggcactgcattactcagtggctgtaattctgcgctgctggatcccaaaggacagattggactggagcaacgttcgctgatactgacggcatttggcctgatgttgatcgtcgttattcccgccatcttgatggctgttggttttgcctggaagtatcgtgcgagtaataaggatgcgaagtatagcccgaactggtcacactccaataaagtggaagccgtggtctggacggtgcctatcttaatcatcattttccttgccgtactgacctggaaaaccacgcacgcgcttgaaccaagcaagccgctggcgcatgacgaaaaaccgatcaccatcgaagtggtttccatggactggaaatggttcttcatctatccggagcagggtatcgccaccgtcaacgagatcgccttcccggcgaacacgccggtttatttcaaagtgacctccaactccgtgatgaactccttctttatcccgcgtctgggtagccagatttatgccatggccggtatgcaaacacgtttgcatctgatcgccaacgaacccggaacctacgatggcatctccgccagctatagcggcccgggcttctctggtatgaagtttaaagctatcgccaccaaagaccgcgcagaattcgaccaatgggtcgcaaaagcgaagcagtctccgaacaccatgaatgatatggcggcgttcgagaaagtggctatgccaagcgagtacaacaaggtggaatatttctccagcgtgaaaccagatttgttcaaggacgttattaacaaattcatgggccacggtaagagcatggacatgacccaacctgaaggtgagcacagctcgcatgaaggaatggaaggtatggacatgagccacgcggaatccgccaactccaagggttga

SEQ ID NO: 39278 - DNA, 1272 bp, Salmonella typhi
atgacagataaacgcaaagatggctcgggcaaattgttgtactgctctttttgcggcaaaagccagcatgaagtgcgcaagctgattgccggtccatccgtgtatatctgcgacgaatgcgtcgatttatgtaacgacattattcgcgaagaaattaaagaagttgctccgcaccgtgaacgtagtgcgctgccgacgccgcatgaaattcgtactcacctggacgattacgttatcggccaggagcaggcgaaaaaagtgctggcggtggcggtctataaccactacaagcgtctgcgtaacggcgataccagcaatggcgtcgagttaggcaaaagcaacattctgctgactggaccgaccggttccggtaaaacgctgctggcggaaacgctggcgcgcttgctggatgtgccgttcactatggcggatgcgaccacgctgaccgaagcgggttacgtgggggaagacgtcgagaatatcattcagaaactgttgcagaaatgcgactacgacgtgcaaaaagcgcagcgtgggattgtctacattgatgaaatcgataagatttcgcgtaaatcagacaatccgtccattacccgcgatgtttccggcgaaggcgtacagcaggcgttgctgaaactgatcgaaggcaccgtcgccgcggttccaccgcagggcggtcgcaaacatccgcagcaggagttcttacaggtagatacctctaagattctgtttatctgcggcggcgcgtttgccggtctggataaagtgatcgctaaccgtgttgaaaccggctccggcattggttttggcgcgacggtgaaagcgaagtccgacaaagccagtgaaggcgagctgttgtcgcaggttgaaccggaagatttgatcaaatttggtctgattcctgagtttatcggtcgtctgccagtggtggcgacgctgaacgaactcagcgaagaagcgctggttcaaatcctgaaagagccgaaaaatgcgctgaccaagcagtatcaggcgctgtttaacctggaaggcgtcgatctggaattccgtgacgaagcgctgaacgctatcgccaggaaagcgatggcgcgtaaaactggtgcccgtggcctgcgttctatcgtcgaagcggcgctgctggataccatgtacgatttgccatctatggaagacgtcgaaaaagtggtgattgacgagtccgttattgccggtcagagtaagccgttgctgatttacggcaaaccggaagcgcaggcttctggcgaataa

SEQ ID NO: 39279 - DNA, 2355 bp, Salmonella typhi
atgaatcctgagcgttctgaacgcattgaaatccccgtattgcccttgcgcgatgtggtggtttatccgcacatggtcatacccttatttgtagggcgggaaaaatctatccgttgtctggaagcggctatggaccatgataaaaaaatcatgctggtcgcccagaaggaagcatcaacggatgagccgggtgtaaacgatcttttcaccgtcgggaccgtggcctctattttgcagatgctgaaactgcctgacggcaccgtaaaagtgctggttgaggggttacagcgcgcgcgtatttccgcgctgtctgacaacggcgaacatttctccgcgaaggcggagtaccttgattcgccagccattgatgagcgtgaacaagaagtgctggtgcgtaccgctatcagccagttcgaaggctacatcaagctgaacaaaaaaattccgccggaagtgctgacgtcactcaatagcattgacgaccctgcacgtctggctgacaccatcgccgcgcatatgccgctgaaactggcggataaacagtccgtactggagatgtccgacgttaacgaacgtctggaatatctgatggcgatgatggaatctgaaatcgatctgctgcaggttgagaaacgcattcgcaaccgcgtgaaaaagcagatggagaaatcccagcgcgagtactatctgaacgagcaaatgaaagcgattcagaaagaacttggcgagatggacgacgcgccggacgaaaacgaagcgctgaagcgtaagatcgacgcggcgaaaatgccgaaagaggcgaaagagaaagcggaagcggaactgcagaagctgaaaatgatgtctccgatgtcggcggaagcgaccgtggtgcgcggctacatcgactggatggtgcaggtgccgtggaatgcgcgtagcaaggtcaaaaaagacctgcgtcaggcgcaggaaatcctcgatactgaccattatggtctggagcgtgtgaaagaccgcatccttgagtatctcgcggtacaaagccgtgtaaataaaatcaaggggccgatcctgtgtctggtggggccgccgggggtaggtaaaacctcgttgggccagtccatcgctaaagccacagggcgtaaatacgtccgtatggcgctgggcggcgtgcgtgatgaagcggaaatccgcggtcatcgccggacttacattggctctatgccgggtaaactgatccaaaaaatggccaaagtgggggttaaaaacccactattcctgctcgatgagatcgacaaaatgtcctcggacatgcgcggcgatccggcttccgcactgcttgaggtgctggacccggagcagaacgtggcgttcagcgatcattacctggaagtggattacgatctcagcgatgtgatgttcgtcgccacctccaactccatgaacattccggcgccgctgctggatcgtatggaagtgatccgtctgtccggttataccgaagacgagaagctgaatattgctaaacgtcacctgctgccgaagcagatcgagcgtaacgcgctgaagaaaggcgaactgacggtcgacgatagcgcgattatcggtattatccgctattacacgcgtgaagcgggcgttcgtagtctggagcgtgaaatctccaaactgtgccgtaaagcggttaaacaactgttgctcgataagtcgttaaaacatattgaaattaacggcgataatctgcacgactacctcggtgtgcagcgctttgattatggccgcgcggatagcgaaaaccgcgtgggtcaggtgacggggctggcgtggacggaagtgggcggcgatctgttgaccatcgaaaccgcctgcgtaccgggcaaaggcaagctgacctacaccggctcgctcggtgaagtgatgcaggaatctattcaggcggcgctgaccgtggtgcgcgcgcgcgcggaaaaactgggtattaatccggacttttacgaaaaacgcgatatccacgttcacgtgccggaaggcgcaacgccgaaagacggtccaagcgccggtatcgcgatgtgtaccgcgctggtttcctgcctgaccggtaatccggtgcgcgcagatgtggcaatgaccggtgagatcacgctgcgtggtcaggtgttgccgatcggcggcctgaaagaaaaactgttggcggcgcatcgcggcgggattaaaacggtcttaattccattcgaaaataaacgtgatctggaggaaattccggacaacgtgattgccgatctggatattcatcctgtgaagcgcattgaggaagttctgacgcttgctctgcaaaacgaaccgtctggaatgcaggttgtaaccgcaaaatag

SEQ ID NO: 39280 - DNA, 273 bp, Salmonella typhi; identical to SEQ ID NO: 38711

SEQ ID NO: 39281 - DNA, 828 bp, Salmonella typhi
ttggaaagcctgttaaccctacctctggctggtgaggcccgagtcaggattttacaaattacagatactcacctgtttgccgaaaagcatgaaacgctgttaggcgtcaatacctgggaaagttaccaggccgtgctggaggctattcgggcgcaacagtatgaatatgatctgatcgtggcgaccggcgatctggcgcaggatcaatccgctgcggcttatcagcattttgctgagggtatcgcaagctttcgcgcgccttgcgtttggctaccgggcaatcacgattttcagccggcaatgtacagcgcgctgcaagaggcggggatttccccggctaaacgcgtgttaatcggtgaacaatggcagattttgttgctggatagccaggtgtttggcgtcccgcatggcgaactgagcgagttccaactggaatggcttgagcgtaagctcgccgatgcgccagagagacagacattgctcctgttgcaccaccatccgttgccggcagggtgcagttggctggatcagcacagcttgcgtaatgctggtgagctggatagcgtgctggcgaatttcccgcgtgtaaagtatctgctatgcggacatattcaccaggagctggatctcgactggaacggtcgccgtctgttggcgtcgccgtcaacctgcgtacagttcaaaccgcactgcgcgaactttacgctggatactatcgcgccgggctggcgtacgctggagctccaggcgaacggcgtcctggagacggaagtgcatcgcctgcaggatacccggttccgacccgataccgcttcggaaggatactga

SEQ ID NO: 39282 - DNA, 423 bp, Salmonella typhi
atgaagcgttatacacctgacttcccagaaatgatgcgtttgtgcgaaaccaatttttcgcaattgcgccgcctgctgccgcgcaatgacgcccccggtgaaacggtgagctatcaggtgggcaacgtacaatatcggttaacgattgtggaattgacccgatacactacgcttgtaacgatcgagcaaacggcgccagccatcacctactggagcctgccgtcgctgacggtgcgcctctaccatgatgcgatggtggctgaagtgtgttcaagccagcagatctttcgcttcaaagcgcggtatgattatccaaataaaaagttgcatcaacgcgacgaaaagcatcaaattaatcagtttctggccgactggctacgattctgtttagcacatggagcgatggcgattccggtttattag

SEQ ID NO: 39283 - DNA, 1632 bp, Salmonella typhi
atgagatacattaaatcgatgacgcagcagaaacttagtttcttgcttgcgctctatatcggtctgtttatgaattgcgccgtgttttaccgccgtttcggcagttatgcgcaagaatttaccatttggaaaggcctttccgcagttgtcgaacttggcgccacggtgctggtcactttcttcttacttcgtcttctttcactgtttggccgacgcgtctggcgcgtgctggccacgctggtggtgctgttttccgctggcgccagttattacatgaccttcctgaacgtggtgattggctacggcattattgcgtctgttatgaccaccgatatcgatctctcgaaagaggtggtggggctgcactttgtattgtggctgattgccgtgagcgtgcttccgctcatctttatctggagtaaccactgtcgctacacgttgttgcgccagctacgtacgccggggcagcgttttcgcagcgccgctgtagtgatactcgcaggcgtaatggtgtgggcgcctatccgcctgctggatgtacagcagaaaaagtttgaacgggcgacaggcatcgacttacccagctatggcggcgtggtggcgaactcctacctgccctcaaactggttatctgcgttagggctgtatgcctgggcgcaggtagatgagtcgtcggacaataattcgttaataaacccggccaggaaatttacctatgttgcgccgaaagatggggatgacacctacgtcgttttcattatcggtgagacgacccgttgggatcacatggggattttcggctacgagcgtaataccacgccgaagctttctttacgctgtatgtttgtacgggaaggtggggcggataataacccgcagcgtacgttaaaagagcagaatgtttttgccgtactcaaacagctcggattcagttccgatctgtacgccatgcagagcgagatgtggttctatagcaataccatggcggataatatctcttaccgcgagcagattggcgccgagccgcgtaaccgcggtaaaacggtggatgacatgctgttgattgatgagatgcagaactcgcttgcccagaatccggagggtaagcatctgattatcctgcataccaagggatcgcattttaactatacgcagcgttatccgcgcagctacgctcaatggaagcccgaatgtattggggtcgatagcggctgcacgaaagcgcagatgatcaactcttacgataactccgtgacctatgttgatcactttattaccagtgtgttcgatcagctacgtgataaaaaagcgattgtgttctacgcggctgaccacggcgagtcgattaacgaacgcgaacatttgcacggtacgccgcgcaatatggcgccgccggagcaattccgtgttccgatgctggtatggatgtcggataaatatcttgccagtccgcaacatgcgcagatgtccgctcacctgaaacagcaggcggagatcaaagtgccgcgtcgtcatgtggaactgtacgatacgataatgggctgcctggggtatacatcgccgaatggcggcattaaccagaacaacaactggtgccatattcccgatgcgcagaaagtcgccgcgaagtag

SEQ ID NO: 39284 - DNA, 399 bp, Salmonella typhi
atgcaaacacaaatcaaagttcgtggatatcatcttgatgtttatcaacatgttaataatgcccgctatctggaatttctggaagaggcccgttgggatgggctggaaaacagcgacagctttcagtggatgacggcccgcaatattgcctttgtggtggtaaacatcaatataaattaccgtcgcccggcggtattgagcgatctactgaccgtgaccagccaggtacaacagcttaacggtaaaagcggcgtattaagccagacgattacgctggagccagaagggcaggtggtggccgatgcgctcatcacgtttgtttgtattgatttaaaaacgcaaaaagcgctgccgctggaaggcgaattgcgtgaaaagctggaacagatggtgcaataa

SEQ ID NO: 39285 - DNA, 1608 bp, Salmonella typhi
atgagtatttccttgaagaagtcagggatgctgaagcttggtttgagcctggtggccatgaccgttgcagcaagcgtgcaggccaaaaccctggtttattgttcagaaggctcgccggaaggctttaacccacagctctttacgtctggcaccacctatgatgccagctccgtacctatctataaccgtctggttgaattcaaaaccggcaccacggaagtgatcccgggtcttgctgagaagtgggatatcagcgaagacggtaaaacctatacgttccacctacgtaaaggggtgaaatggcaatccagcaaggatttcaaacccacgcgcgagctgaacgccgatgatgtcgtgttctcttttgaccggcagaaaaacgagcagaacccgtaccataaagtgtctggcggcagctatgaatactttgaaggcatggggctgccggatctgattagcgaagtgaagaaggtagacgatcacacggtgcagtttgtgctgacgcgtccggaagcgccgttccttgccgatttagccatggacttcgcctctattctttccaaagaatatgctgacaacatgctgaaagccggtacgccggaaaaagtggatctgaatccggtcggcactggcccattccaactggtgcaatatcagaaagattcccgcattctctacaaagcctttgacggctactggggcacgaagccgaaaattgaccgcctggttttctccattacgcctgacgcctctgtgcgttacgccaaactgcagaagaacgaatgtcaggtgatgccgtatccgaacccggcggatattgcgcgcatgaaagaagataaaaacatcaacctgatggagcaggccggtctgaacgtgggttatctctcctataacgtgcagaaaaaaccgctggatgacgtcaaagttcgccaggcgttgacctatgccgtgaataaagaggccatcatcaaagccgtttatcagggcgcaggcgttgcggcgaaaaacctgatcccgccgacgatgtggggctacaacgacgatattaaagactacggctacgatccggaaaaagcgaaggcgctgctgaaagaagccggtctggaaaaaggcttcaccatcgatctatgggcgatgccggtacagcgtccctataacccgaatgcgcgtcgtatggcggaaatgatccaggcggactgggcgaagattggcgttcaggccaaaattgtcacctatgaatggggcgaatacctcaagcgcgctaaagatggcgagcaccagacggtgatgatgggctggaccggcgataatggcgatccggataacttcttcgccacgctgttcagctgcgatgccgcccagcaaggctccaactattcaaaatggtgctacaagccgtttgaagacctgattcagcctgcgcgtgcgaccgatgaccacaacaagcgtattgaactctataaacaggcccaggttgtgatgcatgaccaggcgccagcgctgatcatcgctcactccacggtttatgagccagtacgtaaagaagttaaaggctatgtggttgacccattaggcaaacatcacttcgaaaacgtctctgtcgaataa

SEQ ID NO: 39286 - DNA, 1020 bp, Salmonella typhi
atgttgcagttcattctccgacgtttgggactcgttatcccgacgtttatcggtattacccttctcacctttgcctttgtccacatgatccccggcgatccggtgatgatcatggcgggtgagcgaggtatttcccctgagcgtcatgctcaactgctggctgaactcggtcttgataaaccgatgtggcagcagtacctccattatatctggggggtgatgcatggcgatttaggcatctcgctgaaaagccgaatccccgtgtgggacgagttcgtacctcgctttaaagcgacgctggaacttggcgtctgcgccatgatttttgccgtcgccgtggggattccggtgggcgtgctggccgcagtgaagcgcggttctatcttcgatcacactgccgttggcctggcgctgaccggttactctatgcctatcttctggtggggcatgatgctgatcatgctggtctccgtccactggaacctgacgccggtttccgggcgcgtgagcgatatggtgttccttgatgataccaatccgttgacgggctttatgctgatcgacaccgctatctggggcgaagagggtaactttattgatgcgctggcgcatatgatcctgcctgcgatggtgctcggcacaatcccgctggccgtcattgtgcgtatgacccgttcgtcgatgctggaagtgctgggggaggattacatccgtaccgcacgcgccaaagggttgaccaggatgcgcgtcattatcgtccatgctctgcgtaacgccatgctgccagtcgtcaccgtgatcggcctgcaggtcgggacgctgttggctggcgcgattctgacagaaactatcttctcgtggcccggtctggggcgctggctgatcgatgcgctgcaacgccgcgattatccggtagtgcagggcggcgtgttactggtagcgacgatgattattctcgtcaacctgctggtagacctgctgtacggcgtggtgaacccgcgtattcggcataagaagtaa

SEQ ID NO: 39287 - DNA, 654 bp, Salmonella typhi
atgaatcagacgctactttcctcttttggtacgccttttgaacgtgttgaacttgcactggatgcgctgcgtgaaggacgcggtgtgatggtgcttgatgatgaagatcgtgaaaacgaaggcgatatgattttccccgcagagacaatgaccgtagaacagatggcgttaaccattcgtcacggtagcggtattgtttgcctgtgtattactgaagatcgccgtaagcagctcgatttgccaatgatggtggaaaacaacaccagcgcctacggcaccggttttaccgtgaccattgaagccgcagaaggcgtgaccaccggcgtttccgccgctgaccgtgtcactacggtgcgtgcggcaattaaggatggcgcaaaaccgtccgatcttaaccgtccggggcacgttttcccactgcgcgctcaggcgggcggcgtgctgacgcgcggcggtcatacggaggcgaccatcgatctgatgacgctggccggttttaaacctgcaggtgtactgtgcgagttgactaacgacgatgggacgatggcgcgcgcgccggagtgtatcgcgtttgcaggccagcataatatggcggtggtcacgattgaagatctggtggcttaccgccaggcgcatgagcgcaaagccagctga

SEQ ID NO: 39288 - DNA, 1014 bp, Salmonella typhi
atgagtacgcatgaggccaccttgcaacagccgctgttgcgggctatcgacctgaaaaaacactatccggtgaagaaggggatcttttctccggaacggctggtaaaagcgctggacggcgtgtcgtttaatctcgaacgcggtaaaacgctggcggtagtgggggagtccggttgtggaaaatccacactgggtcgcctgctgacgatggttgaaacgccaaccggcggcgagctttattaccaggggcaggatctgctcaaacacgatccgcacgcgcagaaactgcggcggcagaaaattcagattgtgtttcagaacccctacggttccctgaacccacgcaagaaagtggggcaaattctggaagaaccgttgctgattaacacctcgctcagcaaagagcagcgccgtgaaaaagcgctggcgatgatggcgaaggtggggctgaaaaccgagcactacgaccgctatccgcatatgttctccggcggccagcgtcagcgtatcgctatcgcccgcggtctgatgcttgatccggacgtagtgattgccgacgaaccggtctccgcgctcgacgtgtcggtgcgcgctcaggtgctgaacctgatgatggatttgcaacaggatatggggctgtcttatgtctttatctcgcacgacctgtcggtggtggagcacattgccgatgaagtaatggtcatgtacttaggccgctgcgtggagaaagggaccaaagagcagatttttaacaatccacgtcatccctatacccaagcgttgctctccgccacgccgcggctgaatccggacgatcgccgtgagcggattaagctgaccggcgagttgccgagtccgctgaacccgccgccgggctgcgccttcaacgcccgctgccgccgtcgcttcggaccctgtacgcagttacagccgcagcttaaagagtacgacggccagttggtggcctgctttgccgtcgatcaggatgaaaacccgcagaagccgctgagttaa

SEQ ID NO: 39289 - DNA, 1299 bp, Salmonella typhi
atgcaggacgacacattaccattaaataacagtaacgctacgaccacaccgctttcaacgagattaccgtttacaaaatatgattttggctgggtgctcttgtgtatcggtatggcaatcggcgccggtaccgtcttaatgccagtgcaaatcggtctcaaggggatctgggtatttattaccgcttttatcatcgcctatcccgctacctatattgtgcaggatatttatctaaaaacgttatctgaaagcgaaacctgtgacgattatacggatattatcagtcactatcttggcaaaaactggggcgtttttctcggtgtaatctattttcttatgattatccacggggtgtttatttactccctgtcggtggtgtttgatagcgcctcctatatcaaaaccttcggccttactgaggccgatctttcgcagtctattatctataaagtcgcgattttcgccgtgctggtggcgattgcctccggcggggaaaagctattatttaaaatttccggcccgatggtagtggtaaaagtcgggatcattctgatattcggtttggcgatgatcccacactggaatcttgataatatttccgcctttcccgccgcatcggttttctttcgcgacgtactgctcactatcccattttgcttcttttctgcggtcttcattcaggtgctaaacccaatgaacatcgcctatcgtaagcgcgaacctgaccgtgtgctggccacccggatggcgattcgcacgcatcgcattagctatattacgctgattgccattattctctttttctcgttttcgtttaccttttcgattagtcatgaagaggcggtatcagcgttcgagcagaatatttccgctcttgcgctggcagctcaggtaatccctggccagatcatccacattacctctaccatcctcaatatttttgccgtacttaccgcgttctttggtatttatttaggttttcacgaagcgcttaaaggtattgtactgaatgtgttgagtcgcattatggatgtcaaaaacatcaacccactgttactgacatctggaatctgtgtctttatcgtggttactctggttatttgggtttcgtttcgcgtctcagtattggtctttttccagttaggcagtccgctttatggcattgtcgcgtgtattattccctttttcctgatttataaagtagcgcaactggaaaaattacgcggcctgaaaacctggcttattctgttatatggaatattgttgtgcctgtcgccgttattaaaattgattgaataa

SEQ ID NO: 39290 - DNA, 570 bp, Salmonella typhi
atgaaactcgtgcacatcgtaagtggtttagcggttgcgatatctctggcggcctgcgctgataaaagcgctgatatccagacgcctgcgccaaaccctaacatgtcgattacagctaaccagtctactattcagcaacccaatgtttccggtaccgtctggatccgccagaaggtcgctctgccgccagatgcggtgctgaccgtgacgctttcagatgcttcgctggctgatgcgccgtctaaggtgctgtcgcaaaaagcggtacgtaccgaaggtaaacaggcgcctttcagttttgtgttgccgtttaacccatcagatattcaacctaacgcgcgtattcttctgagcgcggccatcaccgttgacaataagctggtatttattaccgatagcgtgaaaccggtgattaacaatggcggcactaaagcggatctgacgctggtaccggtacagcaaacggcggtgcctgtgcaggccagcggcggtgcgacgacgacggttccatcgacttcgccgacccaggtcaatccgtcttctgccgttcctgcgcctacccagtattaa

SEQ ID NO: 39291 - DNA, 1551 bp, Salmonella typhi
gtgacaacacgacatctggtcagcctggtaacgggagtgcttatcctgtctgtccttttcccgataggattgagcctgtggctggcgcaccgtcaagttgaaaaaaggtttaacgaagagctggatatcttctcgtcccgggtggcgctacgtacagaaagggtcagtgaccaggcaaaagccgcgttaacgcatattgcctcctttaaaggcgagccctgcagcagcgcccatttactcgccatgcgccgcgtgtcttatagctttcggtatgtccaggaagttctgtatcttaaaaattcgattcccgtttgctcctcacttgaaaaagagagccatattcccgctttccctccgcccatgaaaatcactcgcgacggttatcgcgcctggtttacggcgcaaaacgatctgggtataaaacgctatatggcggcactcgggagcgacagctatatcgtgatgatcgacccggcgtcctttatcgatgtgattccgtttggcgcatggccgattgacgtcgctattattggccgggaacgcaatactgtggttgccagcagcggtaaccttgaccacgctattcttccgctcattcaccatgagacgcccctgcggctggaaaaccgaggcattcagtatgctatccacccctttccggaaatgggcattactatcgtaagctgggcaccgaccgctccgctggaaaggagctggtatcgacaagcgtttatctggctaccggcgggcatcgtaacgggtctgctggctgcggcctttattctgcgtattttgcgtcggctacaatcgccccgccaccgtctccaggatgcgatagacaatcgcgaaattaacgtacactatcagcctattgtctccctgagcagcggaaaaattgtcggtgccgaagccttagctcgctggcaacaggcggacggcactttcctttcgccggaaatttttatcgcgctggctgaacaaaccgggctcacggagccgctaacccggctaatcatcgacaccgtttttgaagacatggggagttggttaaagtcccatcccgaacaacatatttcaatcaatcttgaggcatccgatctggcgtcggaaacgctcccgacgctgttaagcacgctgctgaaccgtagccaaatttctccgtcgcaaatcgcgcttgagttaacggagcgcgagttcgccgatccgaaaaccagcgcgcccattgtcgccagataccgtaacgcgggacattccatttatattgatgactttggcaccggctattccagcctcagctacttacaaaatctggatgtggatgtccttaaaattgataaatcttttgtcgatgcgctggaatataaaaacgtcacgccgcatattattgaaatggcgaaaacgctcaaacttaagatggtcgcagaaggcatcgaaacgaccaggcaagaacagtggctacgccagcatggcgtacattatggtcagggctggttatacagtaagcccctacccgctacggcatttattctttgggtggaacagcggctataa

SEQ ID NO: 39292 - DNA, 552 bp, Salmonella typhi
atgagtgacgaaaaacaaaaaatgatcgctggggcactgtattgcccgaccgatgaaactttatgccaggatcgactgcgggcgcgtcaactcatccatcaatacaattatactacgcctgatgaaataaataagcgtcaggcgattttacgcgacctgttgggtcgatgcgaagacgcctatattgaaccttccttccgttgcgactacggctataatatttttcttggtcactccttttacgctaacttcgactgcgtcatgcttgatgtttgcccaattcatattggcgataattgtatgctcgcgccaggggtacatatctataccgccacgcacccgctggacgccgtcgaacgcaacagcggcagagaattaggtaaacccgtcactatcggaaataacgtctggataggcggacgagccgtcgttaatcctggcgtaaccatcggcgataacgtcgtcgtcgcttcaggcgctgtggtgacaaaaaacgtaccgccagacgtcgtggtaggcggaaatccggcgcgaatcattaaaaaattgtag

SEQ ID NO: 39293 - DNA, 3150 bp, Salmonella typhi
atgcctaatttctttatcgatcgccctatatttgcgtgggtgatcgccatcatcatcatgttggcaggggggctcgcgatcctcaaattgccggtagcgcaatatccgacgattgcgccaccagcagtgacgatctccgcaacctaccctggcgctgatgcgaaaacggtacaggataccgtcacgcaggttatcgaacagaatatgaacggtatcgataacctgatgtatatgtcctccaacagtgactccacggggaccgtacagatcacgctgacctttgaatccggcaccgatgcggatatcgcgcaggttcaggttcagaacaagttgcaactggcaatgccgttacttccccaggaagtacagcaacagggcgtgagcgttgagaagtcctcaagtagcttcctgatggtagtgggcgtcattaacaccgacggcaccatgacccaggaggatatttcggattacgttgccgccaatatgaaagatccgatcagccgtacctctggggtgggcgacgtccagctgtttggttcgcagtatgcgatgcgtatctggatgaatccgacagagctgaccaaataccaactgacgccggtcgacgtgattaacgcgatcaaagcgcagaacgcccaggtcgcggcaggtcagctcggtggtacaccgccggtaaaaggccagcagcttaacgcatcgattattgcccaaacgcgtctgacctcaacggatgagtttggcaaaatcctgctgaaagtgaatcaggatggctctcaggttcgtctgcgggatgtagcgaaaattgagcttggcggcgaaaactacgacgtcatcgcgaaatttaacggtcagccagcgtcaggtcttggcatcaaactggctaccggcgccaacgcgctggataccgctaccgctattcgcgccgaactgaaaaaaatggaaccgttcttcccgccagggatgaaaatcgtctacccgtatgacaccacgccgttcgtgaagatctctattcatgaagtggtaaaaacgctggtcgaagcgattatcctcgtgttcttggtgatgtacctgttcctgcagaacttccgcgcgacgttgattccgactattgcggttccggtggtgttgttgggaacctttgccgtgcttgcggcattcggtttctcgataaacacgctgacgatgttcgggatggtgctcgccatcggcttgctggtggatgacgccatcgtggtggtcgagaacgtcgaacgtgttatgacggaagaaggccttccgccgaaggaagcgacgcgcaaatccatgggccagattcagggcgcattggtgggtatcgcgatggtactgtcggcggtatttattccgatggccttctttggcggctcaaccggggcaatttatcgtcagttctctatcaccatcgtatcggcgatggcgctgtcggtgctggtcgcgctgatcctgacgcccgcgctgtgcgcgacgatgctcaaacccgtcgccaaaggcgatcatggcgaagggaaaaaaggctttttcggctggtttaaccgcctgtttgataagagcacgcatcactacaccgatagcgtagggaatattctgcgcagcaccgggcgttatctgctgctctatctcattatcgtcgtcggtatggcttatctgttcgttcgtctgccaagctctttcttgccggatgaagaccagggcgtattcctgacaatggtccagctccccgccggcgcgacgcaagagcgcacgcaaaaagtgctggatgaggtcacggattactatctgaacaaagagaaagccaacgttgaatcggtattcgccgtcaacggcttcggttttgcagggcgcggtcagaataccggtattgcatttgtgtcgttgaaagactgggccgatcgtccaggcgaaaaaaacaaggttgaagcgattacccagcgggcaaccgcagcgttttcacaaattaaagatgcgatggtcttcgcctttaacctaccggcgattgttgaactgggcaccgcaaccgggtttgacttcgagttgattgaccaggcgggacttggtcacgaaaaactcacccaggcacgtaatcagttgttcggcgaggtggcgaaatatcctgatctgttggtcggcgttcgacctaacggtctggaagatacgccgcagtttaaaatcgatatcgaccaggaaaaagctcaggcgctgggcgtgtctattagcgacattaataccacgctgggcgcagcatggggcggcagctatgtaaacgactttatcgatcgcggtcgtgtgaagaaagtttacgtgatgtccgaagcgaaataccgcatgttgccggatgatattaacgactggtacgttcgtggtagcgatggtcagatggtgccgttctccgcattctcctcttcccgctgggaatatggttcgccgcgtctggaacgctataacggtctgccttcgatggaaattctgggtcaggcggcgccaggcaagagtactggtgaagcgatggcgatgatggaagaactggccagcaagctgccgtcaggcattgggtatgactggaccgggatgtcctaccaggagcggttgtccggcaaccaggcccctgccctgtatgctatctcgctaatcgtcgtcttcctgtgtctggcggcattgtatgagagctggtctatcccgttctccgtaatgctggttgttccgcttggggttatcggcgcgctgctggccgcgaccttccgcggactgactaacgacgtttacttccaggtgggcctgctcacaaccattgggttgtcggcgaagaacgcgatacttatcgtcgaattcgccaaagacttaatggataaagaagggaaaggtctggtagaagcgatgctggaggccgtccggatgcgtttgcgtccgattctgatgacctcgttagcgttcatgctgggggttatgccgctggttatcagttccggcgcgggttccggcgcgcagaatgcggtaggtactggcgtactgggcgggatggtaacggcaaccgtactggctattttcttcgtaccagtcttcttcgtggtggtacgccgccgctttagccgtaaaagcgaagatattgagcatagtcattcgacagaacatcgctga

SEQ ID NO: 39294 - DNA, 1434 bp, Salmonella typhi
atgaaagtaaatctgccagcgtttgaacgtgcaggcgtcatggttgtgggtgatgtaatgctggatcgctattggtatggccccacttgccgtatttcaccggaagcgccggtgcccgtggttaaggtaaataccgttgaggaacgtccgggcggcgcggcgaacgtggcgatgaacattgcgtctctgggagcgaacgcccgtctggtcggcctgacgggtattgatgacgccgcgcgcgcgctgagcaaaacgctggcggaggtcaatgtgaagtgcgacttcgtttctgtgccgacgcatccgacgattaccaaactgcgcgtactatcacgtaatcagcagctcattcgtcttgattttgaagaaggctttgagggcgtggacccgcagccgttgcatgagcgtatcaaccaggcgctgggatcgatcggcgcgctggtattgtccgattatgccaaaggcgctctgaccagcgtgcagactatgatttccctagcgcgccaggcgggcgtgccggtgctcatcgatccgaaaggaacggattttgaacgttaccgcggcgccacgctgctgacgccaaacctttctgaattcgaggcggttgcggggaaatgtaaaagcgaagacgaactggttgaacgcggcatgaagctcattgccgattacgacctttccgcgctgttggtcacgcgttccgaacagggaatgacgctgctgcaaccgaataaagcgccgctacatatgccgacgcaggcgcaggaagtttatgatgttaccggtgcgggcgatacggtgatcggcgtgctggcggcgacgctggcggcgggaaataccctggaggaggcgtgttatttcgccaatgcggcggcgggcgtagtggtaggtaaactcgggacgtcaacggtttcccctattgagctggaaaacgcagtgcgcggacgcgcggataccggcttcggcgtcatgaccgaagaggagttgagacaggccgtcgccagcgcgcgtaagcgtggcgagaaagtggtcatgaccaacggcgttttcgatattctgcacgcgggccacgtctcttatctggcgaacgcgcgcaaactgggcgaccgcctgattgttgcggtcaatagtgacgcctcgactaaacgtctgaaaggcgaaagccgtccggttaatccgctcgaacagcgtatgatcgtgctgggcgcgctggagtcggtcgactgggttgtctcttttgaagaggatacgccgcaacgactgattgccggtattctgccggatctgctggtaaaaggcggcgactataagccggaagagatcgcgggcagcgaagaggtctgggccaacggcggcgaagtcatggtgctgaacttcgaagatggttgttccacgaccaatatcatcaaaaagatccagaccgagagcgagaagtaa

SEQ ID NO: 39295 - DNA, 1302 bp, Salmonella typhi
atggctcaggaaatcgaattaaagtttatcgtcaatcacgacgccgtagatgcgctgcgaaatcatcttcatacgctcggcggcgagcatcatgcgcccagccagttgctgaatatctatttcgaaacgcctgataactggctacgccgccatgatatggggctgcgtattcgtggtgaaaatgggcgctatgaaatgaccatgaaaattgccggccgggtaacgggcgggctgcaccagcgacccgaatacaatgttgcgctaagcgaacccgtgctggatctgacgcaacttccggcggaggtctggccggatggcaacctgcccgacggcctggcatcaagcgtacagccgctgttcagtaccgatttttaccgggaaaaatggtgtctggacgttgacggcagcaggattgaaattgcgctcgatctcggcgacgtaaaagcgggcgagtttgccgaaccaatttgtgagctggagcttgagttgcttcgcggcgatacgcgcgccgtgttaaaactggcgaagcaactgctgtcgcaaaccggtttgcgtcagggcagtctgagtaaggcggcgcgaggttatcacctggcgcaggggaatgcgccgcgagagaatacaccaacggcaattctgcggactgccgcgaaagctacggtagagcaagggctggaggcctcgctggatctggcgttgtcacagtggcagtaccatgaagagctctggctgcgcggcgacgagtcggcgaaagaacatgtgctggatgctatgggattagtgcgccatgccttaatgctttttggtggcattgttccacgtaaagcgagcgctcacttacgtgatctacttacccaggcggaagcgacgatgacatccgcggtgtccgccgtcacagccgtttatagtacgcaaacggcgatggcgaaactggcattgacggaatggctggtgacgaaagcctggcagccatttctggacgcgaaggcgcaggccaaaatggccgattcttttaagcgtttcgccgacattcatctttctcgtcatgctgctgaattaaaaaaagtttttggacaaccgctgggtgataagtatcgcgaccagttgccgcgtttgactcgcgatatcgacagcgttttactgctggccgggtattatgatgcgatggtcgcgcaggcatggctggaaaactggcagggattgcgtcacgccattattaccgggcaacgtattgaaattgaacatttccgtaatgaggccatcaaccagcagccgttctggttgcacagcggaaaacgataa

SEQ ID NO: 39296 - DNA, 1110 bp, Salmonella typhi
atgatgactatgctgcgcggatggataacgatgatcgtcatgctgacggcaataaatgcgcaggcagcgtgtagctggcctgcgtgggaacagttcaagaaagattacattagccagcagggacgcgttatcgatccgggcgatgcgcgaaaaattaccacctccgaagggcagagctacgccatgttctttgccctggcggcgaacgatcgaccggcgttcgcgcaactgtttaactggacgcaaaacaatctggcgcagggatcgctgcgtgaacatctgcccgcctggctgtggggacaaaaagatcccgacacctggtcggtgctggacagcaactccgcgtccgacggcgatatctggatggcatggtcgctgctggaggccggtcgcctgtggaaagagacgcgttataccgaggtgggcacggcgttgctaaaacgcatcgcccgcgaagaggtcgtgaatgtgccggggctgggctcaatgctgctacctggcaaaatcggctttgccgaggcgaatagctggcgttttaacccaagctatctgccgccgcagttggcgcaatactttagccgttttggcgcgccgtggtcgacgctacgggaaaccaatttgcggcttttgttggaaacctcgccgaaaggtttctcgccggactgggtgcgttatgaaagcaagcaaggctggcagttgaaagcggaaaagacgctgatcagtagctacgatgcgattcgcgtctatttatggacgggaatgatgcatgatggcgatccgcaaaaagcgcgtttactggcgcgatttaaaccgatggcgacgttaacgatgaaaaacggcgttccaccggagaaagtggatgtcgtcagcgggaatgcgcaagggacggggccggtcgggttttccgccgctttactgcctttcctgcaaaatcgcggcgcccaggccgtgcagcgacagcgggtcgcagaccattttcctggcagcgatgcctattacaactatgtgctgactctctttggacaaggctgggatcagcaccgttttcgcttcaccgtcaaaggtgaattattacctgactggggccaggaatgcgtaagttcacgttaa

SEQ ID NO: 39297 - DNA, 1242 bp, Salmonella typhi
gtgaagatttatctggtcggtggtgcggttcgggatgcgttgttagggctaccggttaaagataaagattgggtcgttgtcggcgccacgccgcaggagatgcttgatgcgggctaccagcaggtaggccgtgattttcctgtgtttctccacccgcaaactcacgaagaatacgcgctggcgcgtaccgagcgtaaatccggttccggctacacgggtttcacctgctatgccgcgccggacgttaccctggaagccgacctccagcgtcgcgatctgaccattaatgctctggcgcgcgacgatgacggacagattatcgacccttaccacgggcgccgggatctggaggcgcgtctactgcgccatgtctctccggcgtttggcgaagatcccttgcgcgtattgcgcgtggcgcgttttgccgcccgttacgctcatcttagtttccgtatcgccgatgaaacactgacgctaatgcgcgaaatgaccgcggcaggcgagctggaacatctgacgccggaacgggtatggaaagagacggaaaatgcgcttaccacccgcaatccgcaggtttacttccaggtattgcgcgactgcggcgccctgcgcgtcctgtttccggaaatcgacgccctgtttggcgtacccgcgccggcaaagtggcatccggaaattgataccggagttcatacgttgatgacgctgtcgatggccgccatgctcagtccgcagcttgatgtccgtttcgccacgctttgtcatgatgtgggcaaaggcttaacgccgaaaaacctctggccgcgccatcatggccacggcccggtgggcgtgaaactggtcgaacagttatgccagcgtttgcgcgtccccaatgacctgcgtgatttagctaaactggtcgccgcgtaccacgatctgattcacacctttccgatactccagccgaaaacgatcgttaagctgtttgacgccattgatgcatggcgtaaaccgcagcgcgtcgagcagattgcgctgaccagcgaggccgatgtccgtggacgtaccggctttgaagcgtcggattacccgcaggggcgctggctgcgcgaagcctggcaggtggcccaagcggtaccaacgaaagaggtggtggaggccggatttaagggcattgagattcgcgaggagctgacgaagcgacgaattgcagcggtcgccaactggaaagagaagcgctgcccgaaccccgccagctaa

SEQ ID NO: 39298 - DNA, 1974 bp, Salmonella typhi
atggcaatggttgcggccgttgtcatggtgtttgtttttgtcttttgcaccgttttgttgttccatctggtacagcagaaccgctacaacacggctacgcaactggaaagcatcgcgcgctctgttcgggaacctctttcttccgcgattttaaaagcggatctccccggcgcggaaaccattctggaaagtattaaacctgcgggcgtggtgagtcgcgccgatgtggtattgccgaatcagttccaggcgttgcgtaagcgcttcattcctgaacgccccgtcccggttatggtgacgcgtctcttcgaactgccggtacaaatttctttgccggtttattcgctggagcgtcccgccaatccgcaaccgctggcctaccttgtattgcaggcggattcgtaccgtatgtacaagttcgtcatgagcgcgctctctacgttagtgaccatttactcacttttatcgctgatcctgacggtggccatcgcctggtgcgtaaaccgcctgattgtgcatccgctgcgcaaaatcgcccgcgagctgaacgacattccgcagcaggagctgatcggacatcagctggcgttgccgcgtctgcatcaggatgatgaaattgggatgctggtgcgcagctataacctcaaccagcagcttatgcagcgtcaacgcgaggagcaaacggacaacgcgatgcgttttccggtttccgagttgcccaataaagcctttttaatggcgctgctggaacaggttatcacccgccaacagaccaccgcgcttatcatcgtgacgtgcgaaacgttgcgtgacacggcaggcgtgctgcaagaaacgcagcgggagattctattactgacgctggttgagaagctgaagtcggtgctggcgccgcgcatggtgcttacgcaggtcagcgggtatgactttgccattatcgcccacggcgtcaaagagccgtggcacgccatcacattaggtcagcaaatactcactatcattaatgaacgactgcccatccagggtattcaactgcgcccaagctgcagtattggcattgcgatgtattatggcgatctgaccgccgaagcgctctatggtcgcgccgtctccgccgcgtttaccgcgcgccgaaaaggtaaaaatcagatccagttctttgacccggcgcagatggaggccgctcaacagcgccttaccgaagagagcgatatccttaccgcgctggataaccatcagtttgccatttggctgcagccgcaggtcgagatgcgcagcggcaacgtattaagcgccgaagccttgttacgtatgcagcagccggacggtagctgggaattgccggaggggctgattgagcgcattgaatcctgcggcctgatggtcacggtgggccattgggtgctggaagagtcctgccgccagcttgccgcctggcaggagcgcggcgtgacattgccgctctccgtcaatctttccgcgttacagctcatgcaccctggcatggtgtcggatctgctggaattgttaaaccgctatcgtattcaaccgggtacgctgattcttgaggtcactgaaagccgccgtatcgacgatccgcacgctgccgtcgctatcttacgtccgttacgtaatgctggcgtgcgtatcgcactggatgattttggcatgggttacgcggggctgcgccagttacagcatatgaagtcgctaccggtcgatatccttaaaattgataaaatgtttgtcgatgggttaccggatgatcacagtatggtgacggcgattatcctgatggcccgcagtcttaatttacaattgattgccgagggcgtggaggacgaggcgcaacgcgcgtggctggaacaggcgggagtcaacgtcgcgcaaggcttcctgtttgctcggcccgttcccgcggatatctttgaagaacggtatctgtcgcacgaaaatcctgattacaaaagttaa

SEQ ID NO: 39299 - DNA, 1287 bp, Salmonella typhi
atgaaaacctctctgttcaaaagtctttattttcaggtcctgacagcaatcgccattggtattctccttggccattactatcctgaactgggcgcacaaatgaaaccgcttggcgacgcgttcgttaagctcattaagatgatcatcgctcctgtcattttctgtactgtcgtgacgggcatcgcaggcatggaaagcatgaaagcggtggggcgtaccggcgcggtcgcgctgctttactttgaaattgtcagtacgattgcgctgattaacggtcttatcatcgtcaacgttgtgcaacctggcgccgggatgaacgtcgatccggcaacgctggatgcgcaggcggtggccgtttatgccgcacaagccaaggagcagggcattattgccttcctgatggatgtcataccgggcagcgtgatcggcgcgtttgccagcggcaacattctgcaggtcttactgtttgcggtgttgtttggttttgcgctgcaccgtttgggcagcaaaggccagctcattttcaatgtgattgagagtttttcgcaggtcattttcggcatcatcaatatgatcatgcgcctggcgccgattggcgcattcggcgcgatggccttcaccatcggtaaatacggcgtcggttctctggtgcaactggggcagctcattatctgcttctatatcacctgtattctcttcgtggtggtggtgctggggacgattgcacgggtaacgggctttagcatttttaaatttattcgctatatccgggaagaattactcattgtgctcggcacctcctcttccgagtcagcgttgccgcgtatgctcgataagatggaaaaactggggtgccgtaaatcggtggtggggctggtgatcccgacggggtattcgttcaaccttgatggcacctctatctacctgacgatggcggcggtgtttatcgcccaggcgaccaacagccatatggatatcttccaccagatcacgttgctggtcgtgctgctgctatcgtcaaaaggcgccgcgggcgtgaccggaagcggctttatcgtgctggcggccactatctccgccgtaggtcatttgccggtggcgggactggcgttaatcctcggtatcgaccgctttatgtccgaagcgcgcgcgctgactaacctggtgggtaacggcgtggcgacggtggtggttgccaaatgggtgaaagagttagatcaccaaaagctggacgatgtgcttaataatcgtgcgccggatggcaaaacgcacgaaatttcctcctaa

SEQ ID NO: 39300 - DNA, 612 bp, Salmonella typhi
atgagtgcaatcgcgcctggaatgatcctcttcgcgtacctctgcggctcaatttccagtgccattctggtttgccgcatcgccgggctgcccgatccgcgagaaagcggctccggcaacccgggcgcgacgaacgtattacgaatcggtggcaagggagcggctgtcgcggtacttatttttgacatccttaaaggcatgttgcccgtctggggcgcgtatgcgttaggcgttacccctttctggctggggcttatcgctatcgccgcctgtctgggacatatctggccggtcttttttggctttaaaggcgggaaaggcgtagcaaccgcgtttggcgccattgcgcccatcggctgggatttaaccggcgtcatggcaggcacctggctgctgacggtcctgttaagcggttattcatcgttaggggcgattgtcagcgccttgattgcgccgttttacgtctggtggtttaaaccgcagttcactttcccggtgtcgatgctgtcatgtctcattttgctgcgccatcatgacaacatccagcgtctgtggcgtcgccaggagacgaaaatctggacgaagctgaaaaagaaacgccagaaagattga

SEQ ID NO: 39301 - DNA, 1014 bp, Salmonella typhi
atgcgtgtactgggtattgaaacatcttgcgatgaaaccggcatcgctatttacgacgacaaaaaaggtctgttagccaaccaattgtatagtcaggtgaaattacatgctgattacggcggcgtagtgcctgaactggcttcccgcgatcatgtgcgtaaaaccgtgccgctgattcaggcggcattaaaagaagccgctctgacggcgagcgatatcgacgcggtggcctataccgcaggcccgggcttggtcggcgcgctgctggtcggcgcaaccgtcgggcgttcgctggcatttgcctggaatgtgccagccattcctgtacaccatatggaaggtcatctgctggcgccaatgctggaagataaccctccggatttcccgtttgtggcgctgctggtctccggcggacatacgcagctcattagcgtgaccggaatcggtcagtacgaactgctgggagagtcgattgacgatgccgccggtgaagcgtttgataaaaccgccaaattgttggggctggattatcctggcggcccgatgctgtcgaaaatggcgtcgcaggggacggcggggcgttttgtctttccgcgcccgatgaccgatcgcccggggctggattttagtttttccggtctgaaaacctttgccgctaacaccattcgtagtaatggcgacgacgaacaaactcgcgctgatatcgcgcgcgcttttgaagatgcggtcgtggatacgctgatgatcaagtgcaagcgcgcgctggaaagcaccggttttaagcgtcttgtcatggcgggcggcgtcagcgctaaccgcacgctgcgtgcgaagcttgccgaaatgatgcaaaaacgccgcggcgaagtgttctatgcgcgcccggaattttgtaccgacaacggggcgatgatcgcctatgccggaatggtgcggtttaaggcgggcgttacggcggatcttggcgtaacggtacgtccgcgctggccgctggccgagctgccggcggcgtaa

SEQ ID NO: 39302 - DNA, 216 bp, Salmonella typhi; identical to SEQ ID NO: 38803

SEQ ID NO: 39303 - DNA, 3363 bp, Salmonella typhi
atgactatgttgcagctttataaacgttcacagcattttgtttttattacaattagcgttcttattatcctgctgtcctgtcagtctctggcgtttgcccgggggcaaacgaatggcgacctgccgtcaaaagcggatgtgcaaaaccagctggatacgctgaataagcaaaaagatctctccgcccaggataagctcgtccagcaagaccttattgatacgttagctacgctggagaaaatcgagcgggtaaaagaggagaccgtacagctacggcagaaggtggcgcaggcgcctgaaaaaatgcgtcaggcgacggctgcgttgaatgcgctgagcgatgtcgataatgatgatgaaatgcgaaaaacgctgagtgcgctttcgctacgtcagcttgagctgcgcgtggcgcaggtactggatgatttgcaaaactcgcaaaacgatcttgccgcttataacagccagcttgtttcgctacaaacccagccggagcgcgtgcaaaacgccatgtataccgcctcacagcaaatacagcaaatccgtaaccgtctggacggcaataacgtcggcgaagccgcgcttcgccccagccaacaggtgttattacaggcacaacaggcgctgcttaatgcgcagatcgaccagcaacgtaagagtcttgaagggaataccgttttgcaggacaccctgcaaaaacagcgggattacgtgacggccaacagtaatcgccttgaacatcagcttcaacttttacaggaggcggtcaacagtaaacgacttacgctaacggaaaaaacggcccaggaggctatttcgccggacgaaacggcgcgtatccaggcgaacccgttggtaaaacaggaactggatattaaccatcaactcagccagcgtctgattgtcgcgaccgaaaacggcaatatgttgatgcagcaaaacattaaagtaaaaaactggctcgatcgcgctctgcagtcggaaagaaatatcaaagaacagattgccgtcttaaaaggcagcctgttgctgtcgcgtattctttatcaacagcagcaaaccctgccctccgccgacgaactcgaagatatgaccaaccgcattgcggatttgcgtctggagcagtttgaaatcaaccagcagcgtgatgccttattccaaagcgatgcctttgtcgacaagctggaggaggggcataccagcgaggtgaatgatgaagttcatgatgcgttgcttcaggtggtggagatgcgccgtgagctattggatcagctaaataaacagttgggtaaccagctgatgatggcgattaacctgcaagttaaccagcagcagttgatgagcgtctcgaaaaatctgaaagccattctgacgcagcagattttttgggtgaacagtaaccgccctatggactgggactggcttaaagcgttcccccaaacgttaaaagagcaattcagcgccatgaaaatcacggtgaactggcaaaaagcctggcccgcagtatttattgcttttttggccgggttgccgctcttgctcatcgccggtttaatccgctggcgtctgaaatggttaaaagcgtatcaacagaagctggccgccgccgtgggatcgctgcgtaacgatagtcagctcaatacgccaaaagctattctgatcgatctgatccgcgcgctgccggtgtgcctgattatcctcgcgattggattgatcctgctgaccatgcagctaaatatcagcgatctgctctgggcctttagtaaaaagctcgcgatgttctggctggtctttgggctgtgctggaaggtgctggaaaaagaaggcgtggcgatacgccattttggtatgccggcgcagttgaccagccactggcgtcgccagattgtacgcattagcctcgcattgctgccgctgcacttttggtctgtggtggcggagttgtcgccgctgaatctgatggatgacgtgctggggcaggcggttattttcctcaatctgctggtcataacattgctggtgtggccactgtgccgggaaagctggcgcgataaagaatctcacggcattcgactggtgaccgtgacgattctttccattattccagtggcgttaatggtattaacggcgactggctatttctataccaccctgcgcctggcggggcgctggattgaaaccgtctatctggtcattatctggaacctgctttatcaaacggtgctgcgcgggttaagtgtagcggcgcgccggattgcctggcgacgcgcgctggctcgtcgtcagaacctggtaaaagagggagcggaaggggcggaaccacaggaagaacccaccatcgcgttggagcaaattaaccagcaaacattacgtatcacgatgctgctaatgcttgccctgtttggcgttatgttctgggcgatttggtccgatttgatcaccgtattcagctatcttgatagcatcacgctgtggcactacaacggctccgaagctggcgctgcggtggtgaaaagcgtgacgatgggcagcttgctatttgccattattgccgcgatggtggcctgggcgctcatccgcaacttacccggcctgctggaagtgctggtgctttcacgcctgaatatgcgccaaggggcttcgtatgcgatcaccacgatccttaactacgtcattatcgctgttggcgcgatgacagtattcggatcgctcggcgtctcgtgggataaactccagtggctggcggcggcgttgtcggtaggtctcggttttgggctacaggagatcttcggtaactttgtctcgggtttaatcatcctcttcgaacgtccggtacgcattggcgatacggtaacgatcggcacctactccggcacggtcagtaagattcgtattcgcgccaccactattaccgattttgatcgtaaagaagtgatcattccgaacaaagcgttcgtaacggagcggctgattaactggtccctctccgataccacgacacgtctggtgatccggcttggcgtggcctatggctcggatctggagaaagtgaaaagagtcctgctacaggcggcgatggagcatccgaaggtgatgcacgatccggaacctgccgtattcttcaccacctttggcgccagcactctggatcatgaactgcgtctgtatgtgcgtgaattgcgtgatcgtagccatacggtggatgaactgaaccgcgcgatcgatcgactgtgccgtgaaaatgatatcaatattgcctttaaccagcttgaggtgcatctgcataacgcgaagggcgacgaagtcactgaagtgaagcgcgatctcaacggcggcgatctggcgccggcggcaagctaa

SEQ ID NO: 39304 - DNA, 168 bp, Salmonella typhi
atgtcgcttgaaaatgcccctgatgaagtcaaactggccgtggatttaattgtgctgcttgaagagaatcgcttaccggcacgaacggtgctacgcgcgctggaaatagttatgcgtgattatgaaaacaagttaaaaagtacggaagacgactcgcaaacagagtaa

SEQ ID NO: 39305 - DNA, 1929 bp, Salmonella typhi
atgagttatcaggtcttagccagaaaatggcgcccacaaacctttgctgacgtcgtcggccaggaacatgtgctgaccgcactggcgaacggcttgtcgttagggcgcattcatcacgcatatcttttttccggcacgcgcggcgtcggtaaaacttctatcgcccgactgctggcgaaggggctgaactgcgaaaccggtattaccgcgacgccgtgcggcgtttgcgataactgtcgggaaattgagcaagggcgttttgtcgatctcattgagattgacgccgcatcgcgtaccaaagtcgaagacacccgcgacctgctggataacgtccagtacgcgcctgcgcgcggtcgctttaaagtctatctgatcgatgaagtccacatgctgtcgcgccacagctttaatgcgctacttaaaacgcttgaagagccgccagcgcatgtgaaatttttactggcgaccaccgatccgcagaagctgccggtgaccattttgtcgcgctgcctacagtttcatctcaaagcgctggatgttgaacagattcgccatcagcttgagcatattctcaatgaggaacatatcgctcacgaaccccgcgcgttgcagttgttatcacgcgcggctgacggcagcctgcgcgatgcattaagtctgactgaccaggcgatcgccagtggcgacgggcaggtttcgacgcaggcggtaagcgccatgctcggtacgctggacgacgaccaggctttgtcattagtcgaggcagtggttgacgctaacggcgaacgcgtcatgtcgcttatcaacgaggcggcggcgcgcggtattgaatgggaagcgctgctggtcgaaatgcttagcctgctgcaccgtattgcgatggtgcaactttcgcctgccgcgttaggcagcgatatggcggctatcgagcaacggatgcgcgaacttgcccggacggtgcctcccggcgatcttcagctctattatcagacgttgttgattggtcgcaaagaattgccctgggcgccggaccggcggatgggcgttgaaatgacgttattgcgtgcgctggcgtttcacccgcgtatgcccttgccggagcctgaaacgccgcggcagtcttttgcgcccgtggccccaacggcggtaatgacgccgccgcaggtgcagcagccgtcggcgcccgcgccgcagacatcgccagcgccgctgccggcgtctaccagtcaggtgctggcggcgcgcaatcagctacagcgcgcgcagggagtaaccaaaacaaaaaagagtgaaccggcagccgcatcccgcgcgcggccggtgaataactctgcgctggagcggctggcctcggtttcggagcgcgtacaggcgcgcccggcgccgtctgcgctggaaacgacgccagtaaagaaagaggcttatcgctggaaggccaccacgccggtagtgcaaaccaaagaagtggtggctacgccaaaagcgcttaagaaagctctggagcatgaaaaaacgccggagctggcggctaaactggcggcggaagcgattgagcgcgatccgtgggcggcgcaggtaagccagctttctttgcctaagctggtggagcaggtggcgctcaatgcctggaaggagcagaacggcaacgcggtttgtctgcatctgcgctcgacgcagcggcacctcaattccagcggtgcgcagcaaaagctggcgcaagcgctcagcgatctgacgggaacgacggttgaactgaccatcgttgaagatgataatcccgcggtgcgtacgccgctggaatggcgtcaggccatttatgaagagaaactcgcgcaagcgcgtgagtcaattatcgcggataataacattcagacgctgcgtcgattcttcgacgccgagctggatgaagagagtatccgccccatttga

SEQ ID NO: 39306 - DNA, 330 bp, Salmonella typhi
atgtttggaaaaggcggtctgggcaatctgatgaagcaggcccagcagatgcaggaaaaaatgcagaaaatgcaggaagagattgcgcagctggaagtgaccggcgaatccggcgcgggtctggtgaaggttaccatcaacggtgcgcataactgccgccgtgtggaaattgacccaagcctgctggaagatgacaaagagatgctggaagatctggtcgctgcggccttcaacgatgcggcgcgccgcattgaagagacgcaaaaagagaagatggcttccgtctcttccggtatgcaactgccgccaggctttaagatgccattctga

SEQ ID NO: 39307 - DNA, 1746 bp, Salmonella typhi
atggctggacgaatcccacgcgtatttattaatgacctgctggcgagaaccgatatcgtcgatctgatcgacgtgcgcgtaaaactcaagaaacagggcaagaactatcacgcgtgttgtccattccataatgagaaaaccccttctttcaccgtaaacggtgaaaaacagttttatcactgctttggatgcggcgcgcatggcaatgcgatcgactttttgatgaattacgacaagctcgaatttgtcgaaaccgtcgaagaattagcggccatgcataacctggaaattccctatgaagcaggcaccgggcttagccagatagagcgccatcaacggcaaaacctctatcagttgatgaatggtctgaatgacttttatcagcagtcgcttacccatcctgcggcaaaacctgcgcgtgactatctgcaaaagcgcggtctgagcgctgaaattattcagcgtttcgccattggcttcgcgccgcctggttgggataacgcgttaaagcgcttcggtaataacagcgataacaaggcattgttgctggatgccggaatgctggtcaataacgagcagggcagcacttacgatcgtttccgtaatcgggtcatgttccctattcgggacaaacgcggcagggtgattggttttggcggtcgagttctggggaacgacacgccgaaataccttaactctccggaaacggacattttccataaaggccgccagctatatggtctttatgaggctcagcaatatagtgctgaaccgcaacgcttgcttgtggtcgaaggttatatggatgtcgtcgcactagcgcaatacgacattaactatgcggtcgcctcgctgggtacctcaaccacggcagaccatatgcatatgttattccgggcgacgaacaacgtaatttgctgttacgacggcgaccgggctggccgtgatgccgcctggagagcgctggaaacagcaatgccttatatgaccgacggtcggcaggtacgctttatgtttttacctgacggcgaagacccggatacgctggtgcgtaaagaaggcaaggcggcttttgaagcgcggatggagcaggcgcagccgctctctacgtttctgtttaatagcctcctgccgcaggtggatttaagctcgccggatggcagcacgcagttagccgcgctggcgctgccgctcattaatcaggtgcctggcgacacgcaccgtattcagctgcgccagacgttggggctgaagttaggcattttcgatgatagtcagcttgatcgtttagtgccaaaacaggcggaaagcggcgtttcccgcccggctccgcagctaaaacgcacgaccatgcgtatactgataggattactggtgcaaaatccggatctcgcgccgttagtgccgcccttagacgcgctggatcagaataagctgcctggacttggcttatttaaagaattggtcaaaacttgtttggctcagccaggtcttactaccggacaacttctggaactctaccgtggcacaaatgatgctgcgacccttgaaaaattatcgatgtgggacgatatagcagataaggcgattgccgaaaagacctttaccgactcactcaaccatatgtttgattcgctgctgcaactgcgacaagaagagctgatcgctcgcgatcgcactcacggtttaagcagcgaagaacgccgagagctctggacgttaaaccaggagctggccagaaaatga

SEQ ID NO: 39308 - DNA, 1983 bp, Salmonella typhi
atgccgcatatcgttcgggaagcccccgacagccgcagtgagaggcagcggccaaaatataagtatgccctcgctttaaatgtcgacagctataccgtcgacaccaatcaaacgaataagtgtggataccgtcttatggagcaaaacccgcagtcacagctgaaacttcttgtcacccgtggtaaggagcaaggctatctgacctatgctgaggtcaatgaccatctgccggaagatatcgtcgattcagatcaaattgaagatatcatccaaatgatcaacgacatgggtattcaggtaatggaagaagcgcctgatgccgatgatctgctgctggctgaaaataccaccagcaccgatgaagatgcggaagaagctgctgcacaagttctgtccagtgttgagtctgaaatcggtcgtacgactgacccggtacgcatgtatatgcgtgaaatgggcactgttgaactgttgacccgggaaggcgaaatcgacatcgctaaacgtatcgaagacgggatcaaccaggttcaatgctccgttgccgaatacccggaagccattacctatctgctggaacagtacgatcgcgttgaggctgaagaggctcgtttgtccgatcttatcaccggctttgtcgatccgaacgcggaagaagagatggcgccgaccgcaactcacgtcggttctgaactctcccaggaggacctggatgatgacgaagacgaagatgaagaagacggcgacgatgacgccgccgatgacgacaacagcattgaccctgaactggcacgcgaaaaattcgctgaactgcgcgcgcaatacgtcgttacgcgcgacaccatcaaagcgaaaggccgcagccatgctgccgcgcaggaagagattctgaagctgtctgaagtgttcaaacagttccgtctggtaccgaagcaattcgactatctggtcaacagtatgcgcgtgatgatggatcgcgtgcgtactcaggaacgtctgatcatgaagctctgcgtcgagcagtgcaaaatgccgaagaagaactttatcacgctgtttaccggtaacgaaaccagcgaaacctggttcaatgccgctatcgcgatgaacaaaccgtggtcggaaaaactgcacgatgtcgcggaagaagtgcaacgctgcctgcaaaaactgcggcagatagaagaagagaccggtctgaccatcgaacaggtgaaagacatcaaccgtcgcatgtccatcggggaagcgaaagcccgccgtgcgaaaaaagagatggttgaagcgaacttgcgtctggttatttctatcgccaagaaatacaccaaccgaggtctgcagttcctcgatctgattcaggaaggcaacatcggtctgatgaaagcggtagataagttcgaataccgtcgtggttacaagttctccacctacgctacctggtggattcgtcaggcgatcacccgctctatcgccgaccaggcgcgcaccatccgtattccggtgcatatgattgagaccatcaacaagctcaaccgtatttctcgccagatgctgcaagagatgggccgcgagccaacgccggaagagctggctgaacggatgctgatgccggaagataaaattcgtaaggtgctgaaaatcgccaaagagcctatctccatggaaacgccgatcggcgacgatgaagattcgcatctgggtgatttcatcgaggatactaccctcgagctgccgctggactctgccaccaccgagagcctgcgcgccgccactcacgacgttttggctggcctgaccgctcgtgaagcgaaagtcctgcgtatgcgtttcggtatcgatatgaacaccgaccacacgctggaagaagtgggtaaacagttcgacgttacccgcgaacgtatccgtcagatcgaagcgaaggcgctgcgtaaactgcgccaccctagccgttctgaagtgctgcgcagcttcctcgacgattaa

SEQ ID NO: 39309 - DNA, 720 bp, Salmonella typhi
atgatcgagcaacccgacagtaaaagcgccaaaccgctttataagcagcttgaagacgccttaaaagaggctattgcgcgtggagagtataaaccaggccagcagatcccgacggaaaatgaactgagcgtgcgctggcaggtgagcagggtcacggtccgtaaggcgctggatgcgctgacgcgtgaaaatttgctgacccgtgtctccggcaaaggcacctttgtttctggtgagaaatttcagcgtagcatgaccggcatcatgagtttcagcgagttatgccagtcccagggacgtcgcccggggtcacgcaccatcaaatccgtttttgaatcggtagacgatgagacaaaagcgttactgaatatgaacgatggcgaaaaagcggtcgtcattgaacgtatccgctatgccgacgatgtggcggtatcgctggaaaccgtacatcttcccccacgttttgcgtttttgctggacgaagatcttaataatcactctttgtatgaatgcttacgcgagaaataccatttatggtttacccactcccgtaagatgatcgaactggtttatgccagctttgaagtcgcccattatcttggcgttaacgagggttatccgctgatcctgataaaaagtgaaatgattgataacaaaggagaactctcctgcgtttcgcaacagttgattgtcggcgataaaatacggtttaccgtatga

SEQ ID NO: 39310 - DNA, 1290 bp, Salmonella typhi
atgaaagcactaaaccgagaggtcattgactactttaaagagcatgtaaatccaggatttctggaataccggaaatctgttaccgccggcggggattacggagccgtagagtggcaagcgggcagtttgaatacgcttgtcgacacccaggggcaggagtttatcgattgtcttggggggtttggcatctttaacgtggggcaccgtaatcctgttgtggtatccgccgtccagaatcaactcgcaaaacaacctctccacagccaggagttacttgaccccttgcgggcgatgctggcaaaaacgctggcggcgctaacaccggggaaactcaagtacagctttttctgtaacagcggcaccgaatccgtcgaagcggcgctaaaactggcaaaagcgtatcagtcgccgcgcggcaagtttacctttatcgccaccagcggcgcatttcacggcaaatcattgggcgcgctctccgccacggccaaatccaccttccgcagaccctttatgcctttactgccgggcttccgccatgtgccgtttggcaatatcgacgcgatgagcatggcatttagcgaaggcaaaaaaacgggcgacgagatagcagccgtgattctggagcctattcagggtgaaggcggcgtgatcctgccgccgcagggatacctgacagaggtacgtaagctctgtgatgaattcggcgcgctgatgattctggatgaagtacaaaccggcatggggcgtaccggcaagatgtttgcctgcgagcacgaaaatgtgcagcctgatattctgtgtctggcgaaagccctgggcggcggcgtgatgccaattggcgccaccatcgcgactgaggaggtgttttcggttctgttcgacaatcccttcctgcataccaccacttttggcggtaacccgctggcttgtgctgccgcgctggcgaccattaacgtcctgctggaacaaaacctcccggcccaggcggaacaaaaaggcgatacgctcctggatggttttcgacaacttgcgcgtgaatatcccaatctggtacacgaggcgcgcggcaaaggtatgttgatggccattgaatttgtcgataacgaaacgggctaccgttttgccagtgagatgttccgtcaacgcgtgctggtcgctggtacgctgaataatgcgaaaacaattcgtatcgagccaccgctcacgctaaccattgaactgtgcgaacaggtattgaaatcagcgcgtaatgcgctggcggcaatgcaggtgagcgttgaagaggtttaa

SEQ ID NO: 39311 - DNA, 1353 bp, Salmonella typhi
atgaccaaacactatgattacatcgctatcggcggcggcagcggcggtatcgcctcgattaaccgcgccgctatgtacggccagaaatgcgcgctcatcgaagccaaagagctgggcggcacctgtgttaacgtgggctgcgtgccgaagaaagtgatgtggcatgccgcgcagattcgtgaagcgattcatctgtatggcccggactacggttttgacaccacgattaatcagttcgactggagcaagctgattgccagccgtaccgcgtatattgaccgcatccatacttcatacgacaacgtgctgggcaaaaataacgtagatgtgattaaaggctttgcccgctttgtcgatgccaaaaccattgaagtgaacggcgaaaccatcaccgctgaccatattttgatcgctaccggcggccgtccgagccatccgagcattccaggcgtggaatacggcattgattccgacggtttctttgcgctatctgccttgccggagcgcgtcgcggtggtaggcgcaggttatatcgccgttgaactggctggcgttatcaacgcgctgggggcgaaaacgcatctgtttgtccgtaaacatgcgccgctgcgcagttttgacccgatgattagcgaaacgctggttgaggtgatgaacgccgaaggcccgcaactgcatactcacgccgtgccgaaagcggtggtgaaaaacgccgacggcagtctgactctggaactggaagatggccgcagtgaaaccgttgattgcctgatctgggccattggtcgcgaaccgtcgaccgacaatattaatctggcggcagcgggcgtgaaaaccaatgaaaaaggttacatcatcgttgataaatggcagaacacgaacgtagaaggcatttacgccgttggcgacaatactggcgcgatagaactaacgccagtcgccgtcgccgccggtcgccgtctctccgagcgcctgtttaacaacaagccggacgagcatctggactacagcaacatcccgaccgtggtctttagccatccgcctatcggcactgtcgggttaagcgagccgcaggcgcgcgagcagtacggcgacgagcaggtgaaagtctataaatcatcgtttaccgctatgtataccgcggtgacgacgcaccgccagccgtgccgtatgaagctggtctgcgtcgggccggaagaaaaaattgtgggtatccacggtatcggcttcggcatggatgaaatgttgcagggcttcgcagtggcgctgaagatgggcgctaccaagaaagacttcgataataccgtcgctattcacccgaccgcatcggaagagtttgtgaccatgcgttaa

SEQ ID NO: 39312 - DNA, 606 bp, Salmonella typhi
atgcaaaccagtccgctgttaactcagcttatggaagcgttgcgctgccttccgggcgtcggccctaagtcggcgcaacggatggcgtttaccctgttgcagcgcgatcgtagcggcggaatgcgcctggcgcaggcgctgacccgggcgatgtcggaaatcggccactgcgccgactgccgcacctttaccgagcaggatgtttgtaatatctgttcgaacccgcggcgccaggaaaacggccagatttgcgtggtggagagtcctgcggatatctacgccattgagcagaccgggcaattttccgggcggtatttcgtgctgatgggccacctgtcgccgctggacggcatcgggccggatgatatcggtctcgatcgtctggaacagcggctggcgtcagaaaaaatcagcgagctgatcctcgcgaccaacccgacggttgaaggggaggctaccgcgaactatattgccgagctgtgcgcggaggccggcgtcgaagccagtcgtatcgcccacggcgtgccggttggcggcgaactggagatggtcgacggtacgacgctgtcccactcgctggcgggacgccataagattattttctga

SEQ ID NO: 39313 - DNA, 1899 bp, Salmonella typhi
atggcattgttgaggtctatccacatgaaaggacaagaaacgcgtggttttcagtcagaagttaaacagcttctgcacctgatgatccattctctttattccaataaagaaatcttcctgcgtgaactcatctctaacgcctcagatgcggcggacaagctgcgtttccgcgctctgtcaaacccggacctgtatgaaggagatggcgagctgcgtgtgcgcgtctctttcgataaagataagcgtacgttgaccattgccgataacggcgtggggatgaatcgtgatgaggtgattgaccacttaggcaccattgccaagtccggcaccaaatctttcctcgaatcaatggggtccgatcaggcgaaagatagccagctcatcggtcagtttggcgtaggcttctactccgcgtttattgtggccgataaagtgaccgtacgtacccgtgcggcaggcgacaagccggaaaatggcgtgttctgggaatcggcaggcgaaggcgaatataccgttgccgatatcaccaaaaatgaccgtggtacggaaatcaccttacacctgcgtgaaggcgaagatgaattcctcgatgactggcgcgtacgctcaattatcagtaaatattccgatcacatcgcattgccggtagagattgaaaaacgggaagaaaaagacggcgaaaccgtgatttcctgggagaaaatcaacaaggcccaggcgttgtggacccgtaacaagtcggaaattaaagacgacgagtacaacgagttttacaagcacatcgcgcatgatttcaccgatccgctgacctggagccacaaccgcgtggaaggtaagcaggagtacaccagcctgctgtatatcccgtcgcaggcgccgtgggatctgtggaaccgcgatcacaaacatggtctgaagctgtacgtacagcgtgtgttcattatggacgatgccgagcagttcatgccgaactatctgcgtttcgtgcgcggcctgattgattctaatgacctgccgttgaatgtctcccgtgaaatcctgcaggacagcacggtaacgcgtaatctgcgcagcgccctgaccaaacgcgttctgcaaatgctggaaaaactggcgaaagacgacgcggaaaaataccaaaccttctggaaacagttcggtctggtgttgaaagaaggcccggcggaagatcacgccaaccaggaagcgatcgctaaactgttgcgctttgcctccacccataccgactcttccgcccagaccgtgtcgctggaagattacgtctcccggatgaaagaagggcaggaaaaaatctactacatcaccgcagacagctatgcggcggcgaaaaacagcccgcacctggagctgctgcgtaagaaaggcatcgaagtgctgctgctctccgatcgcatcgacgagtggatgatgaactacctgaccgagtttgacggtaaagcattccagtcggtcgctaaagccgatgagtccatcgaaaaactggcggatgaagtcgacgaaaacgcgaaagaagcggaaaaggcgcttgagccgttcgtggagcgtgtcaaaaccctgctgggcgatcgcgtgaaagaggtgcgtctgacacaccgtttaaccgacacgccggcgattgtcaccaccgatgcggatgaaatgagcacccagatggcgaaactgttcgccgcggccggtcagtccgtgccggaagtgaaatacatctttgagctcaacccggatcatgtgctggtcaaacgcactgccgataccaaggatgaagcgcagtttaaagagtgggtcgagctgctgctggatcaggcgctgttcgctgaacgcggtacgctggaagatccgaaccagtttatccgccgtatgaaccagttgctggtgtcctga

SEQ ID NO: 39314 - DNA, 645 bp, Salmonella typhi
atgcgtattattctgcttggcgctccgggcgcgggtaaaggaactcaggctcagttcatcatggagaaatatggtattccgcaaatctccactggcgatatgctgcgcgccgcagtgaaatcaggctccgagttgggcaaacaggcgaaagatatcatggacgccggtaaactggtgaccgatgaactggtgattgcgctggttaaagagcgtatcgcccaggaagactgccgtaacggttttctgctggacggtttcccgcgcacgatcccgcaggctgacgcgatgaaagaagcgggtattgtggtggattacgtgctggaattcgacgtaccggacgaactgatcgttgaccgtattgtgggtcgtcgcgtacacgccgcctctggccgcgtttaccacgttaagtttaatccgccgaaagtggaaggcaaagatgacgtcaccggcgaagatctgacgacccgtaaagacgatcaggaagagaccgttcgcaaacgtctggtggaatatcatcagatgaccgcgccgctgattggctactaccagaaagaagcggaagcgggcaacaccaaatacgctaaagttgacggtacgcaggccgttgccgacgtgcgcgcagcgctggaaaaaatcctcggttaa

SEQ ID NO: 39315 - DNA, 1305 bp, Salmonella typhi
atgaaatttcccggtaaacgtaaatccaaacactattttcccgtcaatgcgcgtgacccgttgttgcaacaaattcagccagaacaggaaaccaacgcctcctgggtcgtcggtatcgaccagacgttggtggatattgaggcgaaagtggatgacgattttattacacgctatggattaagcgccgggcattctctggtgatagaagacgagttggcggagaagctgtatcaggaactgacgcgggaaaatctgatcacccatcagtttgctggcggcaccataggcaatacgatgcataattactcggtactggcggatgaccgttcggtgttactgggcgtgatgtgcagcaacattgagattggcagctacgcttatcgctacctgtgtaatacttccagccgtaccgacctgaattatctgcaagcggtagatggtccgattggccgctgtttcacgctgattggcgaatccggcgagcgtaccttcgctatcagccccggccatatgaatcagctacgggcggaaagtattccggaagcggtgatcgctggcgcttccgcgctggtgttgacctcatatctggtgcgctgtaagcctggcgaaccgatgcctgacgcgacgatgaaagcgatcgaatacgcgaaaaagcataacgtgccggttgtcatgacgctgggcaccaaatttgtgatcgccgataatccgcagtggtggcaggcgtttctcaaagagaatgtctcgattctggcaatgaatgaagaagaagcggaagcgctgaccggcgaaaacgacccgctgctggcggcggataaggcgctggactgggtcgacctggtgttatgcaccgccgggccgatagggttatatatggcaggcttcaccgaagaggaagcaaaacgtaaaactcagcatcctctgctgccgggggctattgctgaatttaaccagtatgaatttagccgggcaatgcgccataaagattgtactaatccgctgcgcgtttattcgcatattgcgccgtatatgggcgggccggaaaaaatcatgaacaccaacggcgcgggcgatggcgcgctggcggcgctgctgcacgatattacggcgaacagttaccatcgtagcaacgtaccgaactccagtaagcacaaattcacctggctgacctattcgtcgctggcgcaggtgtgtaaatatgctaaccgtgtcagttatcaggtactgaaccagcattctccgcgtctgacacgcgggctgccggaacgtgaggacagcctggaagagtcgtactgggatcgctaa

SEQ ID NO: 39316 - DNA, 1677 bp, Salmonella typhi
atgcatcacgctaccccgcttatcaccaccattgtcggcggccttgtgctcgcttttattctcggcatgattgccaacaaattgcgtatttctccactggtgggatatctgttagcgggcgttctggcgggaccttttaccccaggttttgttgcggataccaaactggcgccggagctggcggagctcggcgtgattctattgatgttcggcgtcgggctgcatttttcgctgaaggatttgatggcggtaaagtctatcgccattcccggcgctgtcgctcagatagcggtggcgacgctgctgggtatggcgctttccgccgtgctgggatggtcattaatgaccggcatcgtttttgggctctgtctgtctaccgccagtaccgtcgtcctgctgcgcgcgcttgaggagcgacaactccttgatagccagcgcgggcaaatcgccatcggctggctgattgtcgaagatctggtgatggtgctgacgctggtcttgctgcccgccgttgccggcatggtggaaaaaggcgatgtcggcatagcctcgctggcagtcgatatggggataaccattggtaaagtggtggcgtttatcgccatcatgatgctggtcggacgccgcctggtgccgtggattatggcccgcagcgccgccaccggctcgcgcgagttatttaccctttccgtactggcgctggcgttaggcattgcgtttggcgcggtagaactgtttgacgtctcttttgcgctgggcgcgttcttcgctggaatggtgcttaatgagtcggaactgagtcaccgggcggcgcacgatacgttgccactgcgcgacgcctttgccgtcctgttttttgtttccgtcggcatgttgttcgatccgctagtcttgattcaacagccgctggcggtgttggcgacgcttgccattatcgtctttggtaaatcgatcgctgcgtttttcctggtgcgtatgttcggccactcgccgcgaaccgcgctgaccattgccgccagcctggcgcaaatcggtgagttcgcctttattctcgccggactcggtatggcgctcaatctgctgccgcaggcgggacagaacctggtgctggcaggcgctattttgtcgattatgcttaatcccgtactgtttaccctgctggagaagtatctggcgaaaaccgaaacgctggaagagcaaactctggaagaggctatcgaagaagagaagcaaattccggtggatatctgtaatcatgccctgctggtgggttttggccgcgtaggcagtctgctgggagaaaaattactggcggcggggattccgctggtggttatcgaaacgtcccgtacccgcgtggatgaactgcgcgaacgcgggattcgcgccgtactgggcaacgccgctaacgaagaaatcatgaatctggcgcatctggactgcgcccgctggctgttattgaccatccccaacggttacgaagccggtgagattgtcgcctcagcgcgagaaaaaagccctgatatcgagataatcgcccgcgcgcactatgatgatgaagtgaaatatattaccgagcggggagccaatcaggtagtgatgggcgagcgagaaattgcccgggcgatgctggaactgcttgaaacgccgcccgcgggtgaagtcgtcgccagttaa

SEQ ID NO: 39317 - DNA, 843 bp, Salmonella typhi
atgctcagttatcgtcacagctttcacgctggcaaccacgccgacgtccttaaacataccgttcagagcctgatcatcgagtcgctaaaagagaaagaaaaaccgtttctctatctggacacgcacgcgggcgcggggcgttatcagttgggcagcgaacatgctgaacgtaccggagagtatctggaaggcatcgcccgtatctggcagcaggacgatctgcccgccgaactggaaccgtatattagcgtcgtaaaacatttcaaccgcagcgggcagttacgctactatccgggctccccgttaatcgcccgccagttgctgcgtgagcaggacagtctgcaactcacggaattgcatcccagcgacttcccactgttgcgcgcggagtttcaaaaagacaaccgcgcccgcgtggaacgcgctgacggctatcagcaactgaaagccaaattgccgccggtttcccgccgcggtctgattctcattgacccgccttatgaaatgaaaaccgattaccaggcggtagtcagcggcatcagcgagggttataaacgtttcgccaccggtacatacgcgctatggtatccggtggtactccgccagcaaattaagcgcatgattcatgagctggaggccaccggcatccgtaaaatcctgcaaattgagctggcgatccgcccggacagcgatcagcgcgggatgacggcgtccggtatgatcgtggttaacccgccgtggaaactggagcagcagatgaacaacgtgctaccgtggctgcacagcaggttggcgccaaacggtcacggacacacttcggtaagctggatcgtgccggagtaa

SEQ ID NO: 39318 - DNA, 654 bp, Salmonella typhi
atgttccattatggaaaatgtgtcgttcgcacgttgtttttattactggtttgctgttcgctgtcgggctgtctttcatttgggctgatacttgccaccgataaagatggcaatcgtcatcagtctacctggaaatcggataccgttaccgcgctttccttaggtaaagatagcaacgggaaaacgggctgggtgtttgttggcgaacattttgactacctgttgacccagggcggcgataatgtggtggcgctgttaaaagatgcgactattcgccgggataaaatgcgagtaaaggatggtgttaaattcctgattgatacagataagaaggagtttacgggtgaagtcaatgtgacttacgcctgggtggacgagaaagataaactggcggcggtaggctacgggtttatttgtgcagacggcgcggtaaattgcacgctatccgtcatggacctgaaagggactatccatcagaaaaataaagagcagagcgttacgcagcagctatcgttctatcatcctttcaccgttgagttctatcagtatcagcgcagtatgtccggggcaaaatttggcagagtgttgctgccggtaactttggcgctggatattgtcactatgccgctacagctactgatcttcagtcgttaa

SEQ ID NO: 39319 - DNA, 1035 bp, Salmonella typhi
ttgacgaaaatccctttctggagtccgctgacgtttatgatacgtttcgctgtaattgggactaactggatcacgcgccagtttgtcgacgccgcccatgaaaccggcaaattcaggctcgccgccgtttactcccgtagacttgaacaggcgcagtctttcgcaaatgattatcccgtcgagcatctgtttacctcgctggaagcgatggcgcaaagcgacgcgattgaggcggtttatatcgccagcccgaattccctgcatttctcccagacgcagcgctttttgcagcataaaaaacatgtcatgtgcgaaaagccgctggcttctaacctggcggaggttgatgccgctatcgcctgcgcgcgcgataatcagcgggtactgtttgaagcctttaaaaccgcctgcctgcccaatttcctgctgctgcgggaatcgttgccgaaaatcggcagaatgcataaagcattactaaattactgccagtactcttcacgttatcagcgctatctgaacggtgaaaatccgaatacgtttaatccggccttctccaatggttcgattatggatatcgggtattactgtctggcgtcggcgatcgcgctatggggcgagccgcgcagcgttcaggcgtcggcgaatttattggaaagcggagtagatgcacacggcgtcgtggttatggattacggcgattttagcgtcacgctacagcattccaaagtcagcgactcggtactggccagtgaaattcagggcgagaggggatcgctggtcattgaaaagctgtcggaatgccagaaagtgtgttttgcgccgcgcggcgcgctgatgcaggatctgacccagcctcagcatattaataccatgctgtatgaagccggggcgtttgcccagcttattgaaaaccacgccgtggaacatccggggttgtcgctaagtcgcgccacggcaaaatggctgacagaaatacgccgtcaaaccggggtcatcttcccggcggacgatctgactcatccccctactgcgtaa

SEQ ID NO: 39320 - DNA, 969 bp, Salmonella typhi
atgaatactgttggtacgccattattatggggtggattcgcggttgttgtggtgataatgctatccatcgacttgttgttgcagggacgccgtggcgcacatgcgatgtcgatgaaacaagcggcaggatggtcaatcctgtgggtaacgctctcgctactgtttaacgccgctttctggtggtatctggctgaaacgcaagggcgcgaagttgctgacccgcaggcattagcgttccttaccggctatctgattgaaaagtcgctggccgtagataacgtctttgtctggctgatgctgtttagctatttctccgtccctccggctctgcaacgccgggtgctggtgtatggggttcttggcgcgatcgtgttgcgtactatcatgattttcgccggtacctggcttatcactcagttcgaatggctgctgtatgtgttcggcgccttcttgctgtttaccggcgtaaaaatggcgctggcgaaggaagacgaatccggcattggcgaaaaaccgatggtgcgttggctgcgcgggcatctgcgcatgactgatacgatcgagaacgagcactttttcgtacgtaaaaacggcctgctatatgccacgccgctgctgctggtgctgattatggttgagttcagcgatgtgatcttcgccgttgacagtattccggcgatctttgcggtcaccaccgacccgttcatcgtactgacctctaacctgtttgccatcttaggactgcgcgcgatgtacttcctgctgtccggcgtggcggaacgcttctcgatgctgaaatatggtctggcggtcattctggtctttatcggcattaagatgctgatcgtcgacttctaccatattcctatcgcgatttcgctgggcgtagtgtttggcattctgaccattacgctggtgattaacacctgggttaaccatcagcgcgataagaaactacgagcgcaataa

SEQ ID NO: 39321 - DNA, 384 bp, Salmonella typhi
atgcttaaaccacgcataactgcccgacaactcatttggatcagcgcttttctgctgatgctgaccatactcatgatgacgtggtcaacgctgcgtcagcaagagtcgacgctggccattcgcgcggttaatcagggcgccagtatgccagacggcttctcagttctgcatcatctggatgcgaacggcattcattttaaaagcattacgcctaaaaatgacatgttgctcattaccttcgattcccctgcgcaaagcgccgcagcaaaaacagtgcttgatcaaacgttaccacacggttatgtcgtcgctcagcaggacgatgacaacgaaacggtacagtggttgtcccgcttacgggaaagctcacaccgctttggctaa

SEQ ID NO: 39322 - DNA, 369 bp, Salmonella typhi
atgaaataccgcatcgctttggctatcacgctttttacgcttagcgccggcagctacgctaattcgctttgtcaggaaaaagagcaggatatacaaaaggaaattagctacgctgaaaagcacaacaatcagcgccgtattgagggtctgaacaaggcgctcagcgaagtacgcgccaattgtactgacagcaagctgcgcgccgagcatcagaaaaagatcgctgagcaaaaagaagaggtagccgaacgccaacgtgatttagccgaggcaaaagcaaaaggcgatgcggataaaatagacaaacgtgaacgtaagctggccgaggctcaggatgagctaaaaaaacttgaggccagagactactaa

SEQ ID NO: 39323 - DNA, 1497 bp, Salmonella typhi
atgctacatttgtttgctggcctggatttacataccgggcttttattattgcttgctctggcttttgtgctgttctacgaagcgattaacggtttccatgatacagccaatgcagtcgcaaccgtgatttacacccgtgcgatgcgttcgcagctggcggttgtcatggcggcggtgtttaacttttttggcgttttgctggggggtctcagcgtggcgtatgccattgtgcatatgctaccgacggatctcctgctcaacatgggttccgcgcacggcctcgctatggtcttttccatgttgctggcggcgattatctggaacctcggtacctggtatttcgggttgccggcgtccagttcccacacgctgattggcgccattatcggcatcggtttaaccaatgcgatgatgaccggcacgtcagtggtggatgcgcttaacatcccgaaagttatcaatattttcggttcactcattatctcccctattgtcggtctggtattcgccggcggtctgattttcttgctgcgccgctactggagcggtactaagaaacgcgcccgtatccacctgacgccagccgaacgtgaaaagaaagacggcaagaaaaagccgccattctggacgcgtatcgcgctgatcctctcagctatcggcgtggcgttttcgcatggcgcgaacgatggtcagaaaggcattggcctggtcatgctggtgctgattggcgtcgcgcctgcgggtttcgtggtcaatatgaatgcctccagctacgaaatcacccgtacgcgcgatgctatcaacaatgtcgaaacgtactttgagcagcgtcctgacctgctgaaagccgtcaccggcgttgaccaactgattccctctccggaaccgggcgcgactgaaccgactgaattccactgccatccggctaacaccattaacgcgcttaaccgtgcgaaagggatgctggcaaacgtggaaagctacgacaagttaagcgttgaacagcgtagtcagttgcgtcgcattatgctgtgcatttccgacacgaccgacaaagtcgtgaaattgcctggcgtaagcagcgatgaccagcgcctgctgaaaaagctgaagaccgatatgttaagcaccattgagtatgcgccggtgtggatcattatggcagtggcgttggcgctgggtattggtacgatgatcggctggcgtcgcgtggcgaccactatcggcgagaaaattggtaaaaaaggcatgacgtatgcgcagggaatgtcggcgcagatgacggcggcagtctctatcggtcttgccagctacaccggtatgccagtttctaccactcacgtactctcctcttcagtggcgggaaccatggtcgttgatggcggcgggttacagcgtaaaaccgtgaccagcattctgatggcctgggtatttacgttaccggcggcgattattctttccggcgtgctgtactggctttccctgaagattatttaa

SEQ ID NO: 39324 - DNA, 306 bp, Salmonella typhi
atgtcgaaagataacactacggaacatctgcgcgctgagttgaaatccctgaccgatacgctcgaagaagtgctgagctcttcgggcgaaaagtcgaaagaagagttgagtaagattcgtagcaaagccgagcgcgcgctgaaagagagccgttaccgcctgggcgaaacgggtgatgtgattgccaaacagactcgcgtcgccgccgcccgtgccgatgattatgtgcgcgaaaacccctggacaggcgtaggcattggcgccgctgtcggtctggtgttgggcgtactgctgacgcgtcgttaa

SEQ ID NO: 39325 - DNA, 1203 bp, Salmonella typhi
gtggaaaggtttgatgctgttattataggcgctggcgcagcgggcatgttttgcgccgcacaggcaggacaagcgggtagccgcgtgctgctcatcgataatggcaagaagccaggacgtaaaatcctcatgtccggcggtgggcgctgcaactttactaatctttatgttgagcctgctgcgtatttgagccagaacccccatttttgcaaatcagcattagcccgctatacccagtgggactttatcgatctggtcggcaggtatgggatagcctggcatgagaaaacgctgggacagcttttttgcgatgattccgcccaacgcattgtcgatatgctggttgccgagtgcgacaaaggtggcgtaacgatgcgcctgcgtagcgaggtattgagcgtcgagcgtgatgagtcgggtttcgtactggcgttgaacggcgagacggtgactacgcaaaagctggtgattgccagcggcggcctgtcgatgccggggcttggcgcatcgccgtttggctataaaatcgccgaacagtttggtctcaaggtgttgccgacgcgcgccgggctggtgccctttacgctacataagccgctgttagaacagctccagacgctgtctggcgtctctgtgccctgcgtgattaccgcccgcaatggcacggtatttcgggaaaacctactttttacccatcgtgggctgtccggccccgccgttttacagatttccagctactggcaaccgggcgagttagtgagcattaacttattgccggatctctcgctggaagacgttctcaatgaacagcgtaacgcgcacccgaaccagagtctgaagaacacgctggcgatgcatctgccgaaacggctggtggagtgtttacaacagttggggctcatcccggatgtatcgctcaggcagttgaacgttcgtgaccagcagacgttggttgacacgctgacggcctggcaagtacagcctaacggtaccgaaggctatcggacagcggaagtgacgctgggcggcgtggatacaaacgaactatcatcgcggactatggaggcgcgccgcgtgccgggtctctattttatcggcgaagtgatggacgtcaccggctggttgggcggctataacttccagtgggcctggtcgagcgcctgggcctgcgcgcaggatttgattgcgttaaaaattaactaa

SEQ ID NO: 39326 - DNA, 795 bp, Salmonella typhi
atggagctattaaatcaacttaaacgtttatgccgcgcgctgcgtggtaccccaaatagttggcctgctatcgatctctccctgcccggcggtcgtcatctgcatctggttggcagtattcatatggggacgcgcgatatagctcctcttccagcaaagctggtgaaaaagctacgccaggccgacgcgctggtcgttgaagcggatatttccggtaacgaaacgccattcagcaatctccccaaatgcccgccgttggtcgaacgtctcagcgccgggctgctaaacacactggaaaaacgggtcagcgagttgggtatgccgctgatccattttgataatcaacctttatggcagatagctatggtgctacaggccacgcaggcgcaacggctgggattgcgcccggactatggcattgattatcagctattacaggctgcccgcgaaatgtcgctgccggtgcaagagctggaaggggcgaaacaccagctcgaactactgtgcgatctgcccgatggcgggatggcgctgctcgacgacacgctgacgcactggcacaccaacgcacggcttttgcaggtgatgatcggctggtggcttgaacagccgccgaccagcatcggcgcttcgctccccagaacgtttagccaaccgctgtatgatgtactgatggtgaaacgcaatgaagcctggcgcgacgcgctgctggcactgccaccgggacgctacgtggtagccgtaggggcgctacatctgtacggcgaaggcaacctaccgcaaatattgaaataa

SEQ ID NO: 39327 - DNA, 2502 bp, Salmonella typhi
atgtctcaaactatcgacctgaccctggacggtttgtcctgcggtcattgcgttaaacgcgtgaaagaaagtcttgaacaacgtccggatgttgagctggcggacgttaccgtaaccgaagcgcacgttaccggtaccgccagtgcggacgcgttaattgaaaccatcaaacaagccgggtatggcgcgacgttaagccacccaaaggctaaaccgctgacggagtcatcaatcccgtcggaagcactggcagcggttcctcatgagcttccggtagcgacggccgatgaagaaagccaacagttgctgttaagcggcatgagctgcgccagttgtgtcacccgcgtacaacatgcgctacaaagcgtaccgggcgtcacgcaggcacgggtaaacctggcggaacgcactgcgctggtgatgggcagcgcgtccgccgctgatttagtgcaggcggtggaaaaagccggctacggcgcagaggcgattgaagatgacatcaaacgccgcgagcgccagcaggaaaccgccatcgccaccatgaaacgttttcgctggcaggccatcgtcgccctggcggtcggtataccggtcatggtctgggggatgatcggcgataacatgatggtgaccggcgacaaccgcagcctgtggctggctattggcctgatcacgcttgcggtgatggtttttgcgggcggtcacttttaccgtaacgcgtggaaaagcctgctgaacggcacggcgacgatggatacgctggtggcgctcggcaccggggtcgcctggctctactccatgagcgtcaacctgtggccgcagtggttcccgatggaagcacggcacctctattacgaagccagcgcgatgattatcggtctgattaatctcggacacatgctggaagcgcgcgcccgtcagcgttcctcaaaagcgctggaaaaattactcgatctcaccccgcccaccgcacgcgtcgtaacagaagacggcgaaaaaagcgtcccgctggcggacgttcagccagggatgctgctgcggctcactaccggcgatcgcgtgccggtggatggcgaaattacccagggcgaagcgtggcttgatgaagccatgctgaccggcgaacctattccgcagcaaaaaggcgaaggcgacagcgttcatgccggcaccgtcgtccaggacggcagcatcctgttccgcgccagcgcggtgggcagtcataccacgctgtcacgcattattcgcatggtacgccaggcgcagagcagtaaaccggaaattggccaactggccgataaaatctccgcggtattcgttcccgtagtggtggccattgcgctgttcagcgccgctatctggtatttcttcgggccggcaccgcaaattgtttatacgctggtcatcgccaccaccgtactgattatcgcctgcccttgcgcattaggcctggcgacgccaatgtcgattatttccggcgtaggccgcgcggccgaattcggcgtgctggtacgcgacgccgatgccctgcaacgcgccagtacgttggataccctcgtttttgataaaaccgggacgctgacggaaggcaagccgcaagtggtggcggtaaaaacctttaacggcgttgatgaagctcaggcattacgtctggcagccgcgctcgaacaaggctccagccacccgctggcccatgcgattctggaaaaagccggcgatgataaactgccgcaggtgaacggtttcagaacgctgcgcggactgggcgtcagcggtgaagcggaaggtcatcaactgcttctggggaaccaggcgttactgaacgaacagcacgtcgccacggatgatatgacggcggaaatcaccgcgcaggcctcgcaaggctcgactccagtcctgctggcgattgacggtaaagcggcggcgttactggcggtacgcgatccattgcgcagcgatagtattgccgcacttgaacgcctgcacaatgccggataccgtctggtaatgctcaccggggataacccaacgacggctaacgcgattgccaaagaagcgggtattgatgaagtgattgcgggcgttctgccggatggcaaagccgatgcgattaaacgcctgcaaagccagggtcgtcaggttgcgatggtcggcgatggtatcaacgatgcgcccgcgctggcgcaggcggacgtcggtatcgcgatgggcggtggcagcgatgtggcgattgaaaccgcggcgattacgctgatgcgccatagtctgatgggcgtggcggatgcgctggccatttcgcgcgcgacgttgcgcaatatgaaacaaaacctgcttggcgcatttatctacaacagcattggtatcccggtggccgccggtattctgtggccgtttaccggtaccttgttaaacccggtagtagcgggcgcggcaatggcgctgtcttccattaccgtcgtcagcaatgccaaccggctattgcgctttaaaccgaaagcgtaa

SEQ ID NO: 39328 - DNA, 615 bp, Salmonella typhi
atgaacttcaacactgttttccgctggcatttgcccttcctgtttttgatcctgttaactttccgtgccgccgccgcagacaccttattaattctgggcgatagcctcagcgccggttaccgtatgaccgccagcgcggcatggccgtcgctccttaatgataaatggcaaaacaaaacgtcggtcgttaatgccagtataagcggggatacctcgcagcagggactggcgcgtttgccggcgctgttgcaacagcatcacccgcgctgggtagtggtggagcttggcggcaacgatggcctacgcggttttgcgcctgcgcaaaccgaacagacgctacgtaaaatcattcagacggtgaaagccgccgatgcccaaccgttactgatgcaaattcatctgcccgctaactacggtcgccgttataatgaatcctttagcgccatttatcctaagctcgccaaagagttcgatattcctctattaccgttttttatggaagaggtatatctgaaaccacagtggatgcaggatgacggtattcatcccaaccgcgacgcgcagccgtttattgccgactggatggcgaagcagttgaccccttttctctcctga

SEQ ID NO: 39329 - DNA, 399 bp, Salmonella typhi
atggcggactctcgacaggcacaaggaccaggcaaaagcgtactgggtatcgggcagcggattgtcaccattatcgttgagatggtggaaacccggctgcgactggcggtagtagaactggaagaagagaaagcgaacctctttcagcttttgctgatggtaggtcttaccatgctcttcgcggcgtttggcttaatgagcctgatggttctggtcatctgggctatcgatcctcagtaccgtttgaacgcgatgatcgctaccacagttgtactgttagtgcttgcgctaatcggcggcatctggactttgcgcaaagcgcgtcagtccacgctattgcgccatacgcggcacgaactggctaacgatcggcaaattctggaggacgatcagtcgtga

SEQ ID NO: 39330 - DNA, 987 bp, Salmonella typhi
atgggacaactgatcgatggcgtctggcacgatacctggtatgacaccaaatcttccggggggaaatttcagcgttcagcgtcggctttccgcaactggcttaccgctgacggcgcgcccggaccttccggcgaaggcggattcgccgcagaaaaagatcgttaccatctgtacgtttcccttgcctgcccctgggcgcatcgcacgctcattttccgtaaactgaaaggtctggagccgtttattccggtttctgtcgtgaatccattgatgctggaaaacggctggacgtttgatgatacttttccggcggccaccggcgataccctctatcagcatgaatttctctaccagttgtatctgcacgccgatccacactacagcggccgcgtcaccgtgccggtcttatgggataaaaaaaatcatactatcgtcagcaacgagtccgccgaaatcattcgtatgtttaactccgctttcgatgggctgggcgctaaagccggggattactatccccccgcgctgcaaagcaaaattgacgagttaaacggctggatttatgacaacgttaataacggcgtttataaagcaggcttcgccactagccagcaagcgtatgatgaagcggtagaaaaggtgtttactgcgctggcgcgcctggaacagattctcggacagcaccgctatctgacgggcaaccagttgaccgaggcggatatccgcttatggacgaccctggtacgctttgatccggtttacgtgactcatttcaaatgcgacaaataccgaatcagcgactacctgaatctgtacggtttcctgcgcgatatctatcaaataccgggcattgctgaaaccgtcaatatggaccatattcgtcaccactatttccgtagccataaaacgattaaccccacgggtatcatttctgtcggaccgtggcaggatctgctcgaacctcacgggcacgacgtgcgctttggctaa

SEQ ID NO: 39331 - DNA, 1293 bp, Salmonella typhi
atgaaaacatccaattttcaaaaatggttgatggtcattcttctggcaatcggaggagggaccatttttaaatcgatgtacctcagggaagtattttattacccctggaatgaattcatgggagtgaataacacggattcaggcctgctgatgagttggctggggtttgtggggattgtttcatcttcaattgctggggtgattatcgataaggtgaacaatacccgactgattatttcttttacctttctggctgtgggcgtaaccacattatggcagtcaacagcaccgggtctggctacgcagtatgtcatcatcggcatactatctttcctcgcaaatggtcttttcctagtatcgatggtgcgcgcaacccgcctgattggtaatgccagtgaccaggggaagctgtttggtttcctggagtccggacgtggtatcgctgggtcagccatctctgccgttgccgtagcatggttcgccatgtctgcaaccgaagtggaagggattggcagtgtgctacatgcatacggctttctctacctagcgctgggtgttctgatgtggttcgccatgccccgtgataaccataattctgcttccggagaagaaaaggccaaggaaaaaatatctgtacacgatattctggctgtcatgaaggttaaggaagtctggtttgcagctttctccatctttgcaaccatctccttctatcaggggtcctcatatctggttccttatctgtctgatgtctacggaatgaccgccgaacatgccggaattatcggtatgatccgtgcttatgtcctcgctatcctgattgcaccggttgtgggtctgctcgcagacaaagtcggctcagcgattaaggtgatgaattggctgtttattgccggggtgattggtgtcgccatgttcctggtgatcccacaggatccggctatggtatgggtcctgatcggcaccctgatgattgtaggctccattaactttgctctgcgcgggatcatgtatgcgcaaattgaggaaatgaaggttcctgttcgtctgaccggtaccgttatggggatcatggccactgtgggattctctccggaaatgtttatccatgcgttattcgggtactggcttgatgcatataaagtacagggttacacctacatgtttatcttcatgggtgccatgtttgctctcgctgtattcacttcacttttacttctccgcaatgccaaaacggcatttaagaaaatggatggtaaaccggcagatactttccggactgcggctgaataa

SEQ ID NO: 39332 - DNA, 2295 bp, Salmonella typhi
atgaaggtaaatatcgataccagcgatatgctgtatgccgaagcatggcgtgattttaaaggtacggactggaaagaagaaattaatgtctgtgattttattcagcataactatacgccctatgagggggatgaatcttttctcgccgacgcgacgccagcgaccacagcgttgtgggaaaaggtgatggcgggaatacgtatcgagaacgcgacccatgcgccggtggatttcgataccaacatcgcgacgacgattaccgcgcacgatgcggggtatattgaaaaagagctggaaaaaatcgtcggtttacaaacggataagccgcttaaacgcgctttgcatccgtttggcggcgttaacatgatcaaaagttcattccacgcttatggccgggaaatggacgccgattttgaatatacctttaccgacctgcggaaaacccataatcagggcgtattcgatgtttactcgccggatatgctgcgctgccgtaaatccagcgtattaaccggtttgccggatggttatggtcgcgggcgcattattggcgattatcgccgcgtcgcgctgtatggcatccgttatctggtgcgcgaacgcgagctgcaattcgccgacctgcagtcgaatctggagcggggacagaatcttgaggcgacgattcgcctgcgtgaggagttggcggagcaccgtcgcgcgctgctgcaaatgcaggagatggcggcgaaatacggctatgatatctcccgcccggcgcggaacgcgcaggaagcggtacagtggctctacttcgcttatctggcggcggtaaaatcgcaaaatggcggtgcaatgtcgctgggaagaaccgcctcgttccttgatatctacattgagcgcgatttcaacgcgggtcttctgacagagcagcaggcgcaggagctgatcgaccatttcatcatgaagatccgcatggtgcgcttcctgcgcacgccggaatttgattcgctcttttccggcgatccgatctgggccaccgaagttattggcgggatggggcttgatggccgcacgctggtgacgaagaactctttccgttatctgcataccctgcacacgatggggccagcgccggagccgaacctgaccatactgtggtcagaagcgttgccggtggcattcaagaaatatgctgcgcaggtctccatcgtgacctcatctttgcagtatgaaaacgacgatttaatgcgtaccgactttaacagcgacgattacgccatcgcttgttgcgtcagcccgatggtcatcggtaagcagatgcagttcttcggcgcgcgcgccaaccttgccaaaacgttgctgtacgctatcaatggcggcgttgacgagaaactgaaaatccaggttgggccgaaaaccgcgccgttaacggatgaggtgctggattatgacgcagtaatggagagcctcgaccattttatggactggctggcggtgcagtacattagcgcgctgaacatcattcactatatgcacgataagtacagctatgaagcttcgctgatggcgctgcacgaccgtgatgtgtatcggacgatggcgtgcggcatcgccggactgtcggtggcggcggattccctatccgccatcaggtacgctcaggtgaagccgattcgcgacgaaaatggccttgccatcgactttgctattgaaggcgagtatccgcagtacggcaacaacgatgagcgcgtggacagcatcgcctgcgacctggtgaaacgctttatgcaaaaaattagcgtgttgccgacgtatcgcaatgcggtgccgacgcagtccattttgaccatcacctcgaacgtcgtgtacgggcagaagaccggcaatacgccggatggacgccgcgccggaacgccgttcgcgccgggggcgaacccgatgcacggtcgtgaccgcaaaggggcggtggcctcgctgacgtcggtggcgaaactgccgtttacctacgccaaagacggtatttcgtacaccttctcgattgtgcctgcggcgctcgggaaagaagatgcggtgcggaaaaccaatcttgtcggcctgctggacggctatttccatcatgaagcacaggtagaaggcgggcagcatctgaacgtcaatgtcatgaaccgtgaaatgttgctggatgcgattgaacatccggaaaactacccgaacctgacgatccgcgtttccggctatgccgtgcgcttcaatgcgctgactcgtgagcagcaacaggacgttatttcgcgcacctttactcaggcgatgtaa

SEQ ID NO: 39333 - DNA, 666 bp, Salmonella typhi
atgactccgtttacacaatcacagcgcataaaagcgttgttctggctatcgctattccatttactggtgatcatttccagtaactatctggtgcagctccccatcactatttttggtttccacacgacctggggcgcgtttagttttccttttatttttctcgccaccgatcttaccgtgcgtatttttggcgcaccgctggcgcgccgcattatcttcgccgtcatgatccctgcgctgctggtgtcatatgtggtgtcatcgctgttctatatgggtgcctggcaaggtttcgccgcgttggcgaactttaatctgttcgtcgcccgtatcgccgccgccagctttatggcctacgcgctgggacagatccttgatgtccatgtgtttaaccgcctgcgccaaaatcgtcgctggtggctggcgccgaccgcttcaacgctgtttggcaatatcagcgatacccttgcctttttcttcattgcgttctggcgaagccccgatgcctttatggccgggcactggatggaaattgcgctggtggattattgctttaaggtgctcatcagcattattttcttcctgccgatgtacggcgttctactgaatatgttgctgaaaaagctggcagataaatctgaaatttccccattaccggcaagttaa

SEQ ID NO: 39334 - DNA, 771 bp, Salmonella typhi
atgaataacgctattttcccgaataagtttaaagcggcgctggcggcgcaacaggtgcagattggctgctggtctgcactggcaagcccaatcaccaccgaagtactcggtctggcgggatttgactggctggtgctggatggcgaacatgcgccgaacgatgtgaccaccttaattccgcagttaatggcattgaaaggcagcgccagcgcgcctgtggtacgtgtgccaaccaatgaaccggtcattatcaaacggatgctggatattgggttttataacttcctgatcccctttgttgaaacgcaagaggaagcggctcgcgccgtcgcctcgacgcgttacccgccggaaggcattcgcggcgtctccgtttctcaccgcgcgaatatgttcggcacggtgcctgattactttgcgcagtcgaacaaaaacatcaccattattgttcaaatcgaaagccagttgggtgtcgacaatgttgatgccatcgccgcaacggaaggcgttgatggcatttttgtcggccctagcgatttggccgccgcgctgggtcatctcggcaatgcttctcaccctgacgtgcagcagacgattcaacatattttcgcccgcgctaaagcgcacggtaaaccgtgcggcattctggcgccggtagaggcggatgcccgccgttatctggaatggggcgcgacctttgtcgccgttggcagcgatttaggcgcattccgcgccagcacgcagaagcttgccgacacctttaaaaaataa

SEQ ID NO: 39335 - DNA, 777 bp, Salmonella typhi
atgttacgtttctctgccaatctttctatgctgtttacggaatatgatttcctggaacgctttgataaagcggcgcagtcgggatttcgcggcgtggaattcatgtttccctacgatgacgacatcgaagtgttaaaacgtaagctcagggataataatctggaacatacgttacataatttaccggctggcgactgggcggctggcgaacgtggaattgcctgtattcctgggcgcgaagaagagtttcgcgatggcgtagcggccgcaatccgctatgcacgcgcgttaggcaataagaaaataaattgtctggtgggtaaaacgccgtcaggattctccgcaacggagatctacgacacgttggtcgaaaacctgcgctatgcggcaaatatgctggcgaaagaagacattttattacttatcgaacctattaatcactttgatatgccgggattccatctcaccggcactcaacaggcgttagtattaattaaggatatcggcagcgataatatcaaaattcagtatgatatttatcacatgcaacgcatggaaggggaattaacgcaaaccatgacggcatgggccgataaaataggccatttacagattgctgataacccgcgtcgcggcgagccggggaccggggaaatcaattatgactttatttttaatgtcattaaacagtctgattatgatggctgggttggatgtgaatataaaccactgactaccgcggaagcgggattatcgtggattaatcagtaccgttaa

SEQ ID NO: 39336 - DNA, 879 bp, Salmonella typhi
atgaaactgggatttattggcctgggaattatgggctcgccaatggctatcaatttggcacgcgccggtcatcaattacacgttacgactattggtccagtcgcggacgaactgctctcgctgggggcggtaaatgttgagactgcacgtcaggtgactgaattcgcagacatcatcttcataatggtgccggatacgccgcaggttgaagaggtgttatttggcgaacacggttgcgccaaaacatcgcttcagggaaaaaccatcgtcgatatgagttctatttctcctatcggaaccaaacgttttgcccagcgcgttaatgaaatggacgctgattacctggatgccccggtttccgggggagaaatcggggcgcgtgaaggcactctgtcgattatggtcggcggcgagcagaaagtctttgaccgcgttaaaccgctctttgacatcctgggaaaaaatatcaccctggtgggcggcaatggggatgggcaaacctgtaaggtggctaaccaaattattgttgcgctgaatattgaagcggtttctgaagccttagtgtttgcttcaaaagcaggcgccgatccggtacgcgtgcgccaggcgttaatgggcgggttcgcctcttcacgcattctggaagttcacggcgagcggatgatcaaccggacgttcgagcctggtttcaaaatcgcgcttcatcagaaagaccttaatcttgcattgcaaagcgcaaaagcgctggcgctgaatttaccgaatacggcgacctgccaggaattattcaatacctgtgcggcaaatggcgggagccagcttgatcattcggcaatggtacaggcgctggaattaatggccaatcataaattgtcctaa

SEQ ID NO: 39337 - DNA, 1362 bp, Salmonella typhi
atgtcttttgatttaattattaagaacggtactgtcatcttagaaaacgaagcgagagttatcgatatcgccgtccagggcggaaaaatcgccgcgattggcgagaacctgggggaagcgaaaaacgtgctggatgcgacgggattgatcgtttcgccgggcatggttgacgcgcatacccacatttctgaaccgggccgtacccactgggaaggctatgaaaccggtacgcgcgcggcggcgaaaggcggtattaccacgatgattgagatgccgctcaatcagctgccggcgacggtcgatcgtgagacgattgaactcaagtttgacgcggcaaaaggtaaattgaccatcgacgccgcgcagttgggcggtttggtctcttataacctggatcggctgcatgagctggacgaagtgggcgttgtcggcttcaagtgctttgtcgccacctgcggcgatcgtggcatcgataatgattttcgcgacgttaatgactggcagttttacaaaggcgcgcaaaaactgggagagatggaccagacggtactggtacattgcgaaaatgctctgatttgcgatgagctgggcgaagaagctaaacgcgaaggtcgcgtaacggcgcatgattatgtcgcctcacgtccggtatttactgaagtggaagccattcgtcgcgtgctgtatctggcgaaagcggcaggttgccgtctgcacgtttgtcatatcagcagcccggagggggtagaggaagtaacgcgtgcgcgtcaggaaggccaggatgtcacctgtgaatcgtgcccgcactattttgtcctcgataccgatcagttcgaagagattggcaccctggcaaaatgttctccgccaattcgcgaccaggaaaaccagaaagggatgtgggaaaaactgtttaacggcgaaatcgactgcctggtatccgaccactctccatgtcctccggaaatgaaagcaggcaatatcatgcaagcatggggtggaattgccggactgcaaaactgcatggacgtcatgtttgatgaagcggtgcaaaaacgcggtatgtcgttgccgatgtttggcaaattaatggcgaccaacgccgccgatatttttggtctgaaacataaaggacgtattgcccccggcaaagatgctgacctggtctttattcagcctgacagcagctatgttctgaaaaatgaagatctggaatatcgccataaagtcagtccgtatgttggccgtactattggcgcgcgtattaccaaaacgattttgcgcggcgatgttatttatgacatcgagcatggcttccctgtgccgccaaaaggtcagtttatccttaaacatcagcagtaa

SEQ ID NO: 39338 - DNA, 855 bp, Salmonella typhi
atgttcattatttccagtaaaaatatgctccagaaggcccagcatgcaggctatgccgtgccagcctttaacatccataacctagaaaccttgcaggtggtggtagaaaccgccgcagaaatgcgctcaccgctgatcgttgccggaacaccaggcacgtttagctatgccggaatgggtaacattgtggcgatcgcgggcgatctggctcgtgaatacaatctgccactggccattcatctggatcatcatgaatcgttagccgatattgaaagcaaagttatggcagggatccgttcagtcatgatcgatggttcccactttccctttgaagagaatgtggcgctggtgaaaagcgtggtcgatttttgccatcgctacgacaccagcgtggaggcagaactgggccgccttggtgggatcgaagatgatttagtggtagacagcaaagatgccctttacaccaatccacagcaagcacgtgagtttgtggcgcgcaccggcattgattcgctggcggttgctatcggcacggcacacggtatgtatgccgctgaacctaaacttgattttgagcgactggcagaaatacgcgctctggtggatatccctctggtattgcatggggcatctggtttgccggaaagcgatattcgccaggccatcagccttggggtatgcaaagtcaatgtcgccaccgaactgaaaatcgccttctccgacgccttaaaagagtatttcctacaaaacccgaaagccaatgatccccgccactatatgcaaccagcaaaacaggcgatgaaagaggtggtacgcaaagtaattcatgtttgcggctgtgaagggcaactgtga

SEQ ID NO: 39339 - DNA, 915 bp, Salmonella typhi
gtgatctacacgctaacacttaatagcgcgattgatatgaatatatttagcgatcctttacagccaaatattgtcaatcgcactcaccacaccgagttttgcccaaatggtaaaggggtaaatgttgcgctggttctggatcactttcaaatacctgcgcatatattaggcatttttggtggtttcaccgggcattatattgtagaaagcctgcgtacccgaaaaatgccagtcacaccagcatgggtagaagaacccacgcggattaatattttcattcatgacggcaagcaggaatataaactggtcaaccctggctcatatattccagatgaatgtaaaaaacaaattatcacgattatttcgcaactgcccgatgcagaatatctggtgataagcggcagcctgccacaaggtattgaaagtcgcttttacgcagaaattatgcatatttgtcagcaaaaaaatatcggcgtaattttagatattagtcatccgtcattacgtcagttactggagttcaaaccgttattaattaaaccaaatgatgaagaggttaaagcaatattcggtttaactgtctctgacgacaatgatgcgaaaaatactctaaccactttacatgcacttggtgcacaaaatgttctgctaacccttggcgctaaaggaatgtatttctccaatgggattgattactggttttgtagcgcgccaacggttgatttggtgagctccgcctgtgcaggcgatgctgcactggccgcctttctcagccagtggttatctacaggagaagtggaatatgccttatctcttgccagtgcaacaggagctgatgtcgcaagttctgccggactaggccaacttgcggcaatagaaaccttactttcgcaaatccacgtcagaaagctgtag

SEQ ID NO: 39340 - DNA, 1428 bp, Salmonella typhi
atgaaaaagatcattgcagtgaccggctgccctaccggtattgcgcatacatttatggctgaagaagccttaaaaaatgccgcgaaaaaattatctgttgaaataaaagttgaaaccaatggtgccagcggtgttgaaaatgccattcaacctgctgatctggtagatattgccggagtcattattgcggcggataaagatgtcttacctgatcgctttaatggtttaccggttattgaagtaccggtaaaagaagcaatccatcatcctgcggagctgattaacaaagttattaatggtgaagccccaatacgtaaaggcgaatcaaccaccagcacggaaattatcgaaaaagaatcactggggcgacaaatttataagcacctgatgagtggtgtttcaaatatgctaccttttgtagttgccggaggcatattaattgcggtgtcgcttttatgggggatttattccgctgatcctaattcagctgaatacaatgcaaccgccgcaatgctaatgaaaatcggtcagcaagccttttcgattatggttccggtctttaccgcttatattgcattctctatttctggcagaccagggatggtggctgggtttgtcggcggcttactggcaaatactaccggagcaggatttctcggtgggataattgccggattcgccgccggttacctgatgttatgggtaaagaatcgactcgaaggcttaccgcgtcagtatgaaggcctgaaatcgatttttattatgccgctcattggcgtactggttattggcgtgttgatgtcgctgcttgggcaacctgtcgcagctatcaataatagcatgatgaactggctggcatcgctacaggaagcgaatccaatattgctgggtattgtggtgggtgcaatgtgctcttttgactttggcggcccggtaaacaaagccgcttatgtcaccggcacgcttttactgggccagggcaacttctactttatggctggtgtgtctgccgcatgtattactccaccactggtaattgctctggcgaccaccttctttccaaaaggttttagcgaggaagaacgtgccgcaggcatggttaactatatcctcggttgtacacacatcactgaaggcgcgattcctttcgcagcgaaagatcctttgcgtgtcatcccgatgatgatgattgcttccagcatttccgcagtacttagctacagcttgcgtattcaggttccggctcctcacggcggcttcttaattttacctttggtgagtcagccgctggcctgggtgttatgtatccttgcgggatctgcatgtggtgcgatgatgcttggcctatggagattgtgggctgtgcgcaaaaattcagtcaacacaactcctgtagcaaaggctggaggtcagaatgcagctctgtga

SEQ ID NO: 39341 - DNA, 1374 bp, Salmonella typhi
atgtttagcgaaataatgcgttatatcctcgacttaggcccaacggtgatgttgcctctggtgatcatcgtgttctctaaactgctgggaatgaagcttggggattgttttaaatcgggtttgcatattggtatcggcttcgtgggtattggtctggtcatcggcctgatgctggattctatcggccccgcggcgaaagccatggcggaacatttccaaatcaatctccacgttattgacgtcggctggccgggttcatcgcccatgacctgggcgtcacaaatcgcgctggtcgcgatccctgtcgccatcggggttaacgtcctgatgctggtgacccgcatgacccgcgtggtgaatgtcgatatctggaatatctggcacatgaccttcacgggcgccatgctgcatctggcgaccggttcatactggctggggattctgggcgttgtggttcatgccgcctttgtctacaaactgggggactggtttgccaaagatacccgcgactattttggcctcgaggggattgctatcccacacggctcatccgcgtacctgagccccgtggcggtgctcgttgataccattatcgagaaaattccgggtctcaatcgtattcactttagcgcagacgatgtccagaaacgcttcggaccgtttggcgagccggtgactgtcggcttcgtgatggggctggtgattggtgtactggcaggctacgacaccaaagccgttctgcaactggcagtcaaaaccgcagcggtgatgctgcttatgccacgcgtcattaaacctattatggatggcctaacgcctatcgccaaacatgcgcgtaaacgtctacaggccaaatttggcgggcaggagttcctgataggccttgatccagcgctactgctcggtcatacctctgttgtctccgcgagcctgatattcattccgctgaccatcctgattgccgtcttagtaccggggaaccaggtgctgccgttcggcgacctcgccaccatcggtttctttattgcgatggcggttgcggtacaccagggcaacctgttccgcacgctgatttcaggtgtcattattatgggtatcaccctgtggatagccacgcagacgattggcctgcatacccaactggctgccaatgccggagcgctaaaagctggcgcacaagtcgcctcgctggatcagggcggttctcccatcacctggctgctgattcaactttttacctggcagaatatcgtcggcttcgccgtcattgccattatctatctggccggcgtactgctgacctggcgtcgcgcccgacagtttgtcgcggctgagaaagccacggcgctacagcaaagtcaaatcgcctcttaa

SEQ ID NO: 39342 - DNA, 1044 bp, Salmonella typhi
atgaaatcagtggttattcacgctgagggagacgtgcgcgttgaagaacgtcccttaccacaactgcaagccgaggacgatgtgttggtcaaagtcgttagctcagggctttgcgggtcggatatcccgcgtattttcgcgcagggcgcccattattatcctattacgttaggccatgaattcagcggctacgttgaatcctacggcacaggcgtaacggatatgcagcctggcgatgccgtcgcttgtgtcccgcttcttccctgctttcactgtccgcaatgcgaacgcggttacttttctttatgcaaacagtatcagtttgtaggatcgcgcagcgaaggcggtaatgcggaatatgtggtggtcaaacgggccaatcttttccgcttgccgtctgatatgccgattgaagatggcgcgtttatcgaaccgattaccgtgggcttacacgcctttcatctggcgcagggctgcgaggggaaaaacgtaattatcgtcggggccgggacaattggcctgctggccttacagtgcgcgcgggaactgggcgcgcgaagcgtaacggcgattgatatcaatccgcagaaactggaactggcgaaagcgctcggcgcaacgcatacctgtaatagccgggaaatgaccgccgacgacatccagaccgcgttgtccgacattcagtttgatcaactggttctcgaaacggcaggaactccccagaccgtctcgctggctatcgatatcaccgggccgcgcgcgcaactggcgctggtggggacgttacatcacgatctcaccctgacgacgcgtacattcgggttaattttgcgtaaagagctcacgctcctcggcagttggatgaactactccgcgccatggccaggagaagaatgggaaaccgcagcgcgcctgttggctgaaaaacgtcttcaactgacccctctcattgcccatcgcggcgatgcggaaagctttgcagaagcagtcaaagcgcttaatggcgcgcccatgcagggcaaaatcttacttcaactttcctga

SEQ ID NO: 39343 - DNA, 864 bp, Salmonella typhi
atgaaacaaaacgaatcggcggataattctcagggccaactctttattgtacctactcctatcgggaatttggctgatattacccaacgcgcgctggaagttttacaagccgttgatttaattgccgctgaagacactcgtcacaccggtttattgctgcaacattttgggattaatgcccggttgtttgcgctgcacgaccataacgaacaacaaaaagcggaaacgctggtcgcgaagctgaaagaggggcagaacattgctctggtttccgatgccggaacgccgctaattaatgaccccggctatcacctggtacgtacctgccgtgaagcggggattcgcgtggtgccgctaccagggccgtgtgctgctatcactgcattaagcgccgcaggtttaccatcagatcgtttttgttatgaaggcttcctgcctgccaaatcaaaaggccgccgtgatgcgctaaaagccattgaagcggagccacgaacgctgattttttatgagtccacccatcgtctgttggatagcctggaagatatggtggccgtgtggggcgaatcccgttacgtggtgctggcgcgtgagctgaccaaaacctgggaaaccattcacggcgcgccggtcggcgagctgctggcgtgggtcaaagaagatgaaaaccgtcgcaaaggcgaaatggtgctgattgtcgaagggcataaagcgcaagaagacgacctgcccgccgacgcgctgcgcacgctggcgctgctacaggcagagctgccgctgaaaaaagcggcggcgctggcagcagaaattcacggcgtgaagaaaaatgcgctgtataagtatgcgctggcgcagcaggaagagtaa

SEQ ID NO: 39344 - DNA, 1941 bp, Salmonella typhi
atgatgagttatgtagactggccgccattaattttgaggcacacgtactacatggctgaattcgaaaccacttttgcagatctggggctgaaggctcctatccttgaagcccttaccgatctgggttacgaaaaaccatctccaatccaggcagagtgcattccgcatctgctgggcggtcgcgacgtgctgggcatggcccagaccggtagcggcaaaaccgcagcgttctctttaccgctgctcaacaatcttgatcctgagctgaaggcacctcagattctggtgctggcgccaacccgcgaactggcggtacaggttgccgaagccatgacggatttctctaaacacatgcgcggcgtaaacgtggttgccctgtacggcggtcagcgttatgacgtgcagttacgcgccctgcgtcaggggccgcagatcgttgtcggtacgccgggacgtctgcttgatcacttaaaacgcggcaccctcgacctctctaaactgagtggtctggtgctggatgaagccgacgaaatgctgcgtatgggcttcatcgaagacgttgaaactattatggcgcagatcccggaaggtcatcaaaccgctctgttctccgccaccatgccggaagcgattcgtcgcattacccgccgctttatgaaagagccgcaggaagtgcgcattcagtccagcgtgactacccgtcctgacatcagccagagctactggactgtctggggtatgcgtaaaaacgaagcactggtgcgtttcctggaagcggaagactttgatgcggcgattatcttcgtacgtaccaaaaacgcgaccctggaagtagcagaagcgctggaacgtaacggctacaacagcgccgcgttgaatggcgatatgaaccaggcgctgcgtgagcagactctggaacgcctgaaagatggtcgtctggacatcctgatcgccaccgatgttgcggcacgtggtctggacgttgaacgtatcagcctggtggtgaactacgatattccgatggactccgagtcctacgttcaccgtatcggtcgtaccggtcgtgcgggtcgcgccggtcgcgcgctgctgttcgttgagaaccgcgagcgtcgtctgctgcgcaacatcgaacgcaccatgaagctgaccattccagaagtggaactgccgaacgcagaactgctgggtaaacgccgtctggaaaaattcgccgcgaaagttcagcagcaactggaaagcagcgatctggatcagtaccgtgcgctgctggcgaaaatccagccgtctgccgaaggtgaagagctggatctcgaaacgctggccgccgcactgctgaaaatggcgcagggcgagcgtccgctgattctgccgccggatgcgccgatgcgtcctaagcgtgaattccgtgaccgtgacgaccgtggtccgcgcgatcgtaatgaccgtggcccgcgtggcgatcgtgaagaacgtccgcgtcgtgaacgtcgtgacgttggcgatatgcagttataccgcattgaagtgggccgtgatgacggcgttgaagttcgtcatatcgtgggcgctatcgctaacgaaggcgacattagcagccgttacattggtaacattaagctgttcgcgtctcactccaccatcgagctgccgaaaggtatgccgggcgaagtgctccagcacttcacgcgtactcgcattctgaacaagccgatgaatatgcagctgttgggtgatgcggttccgcacgcgggcggcgaacgtcgcggcggtggtcgtagcttcagtggcgaacgtcgtgaaggcggtcgtaatttcagcggcgaacgtcgtgaaggtggtcgtggtgatggtcgtcgcttcagcggcgaacgtcgtgaaagccgtggtccgcgtcgtgatgactctaccggtcgccgtcgtttcggcggtgatgcgtaa

SEQ ID NO: 39345 - DNA, 2136 bp, Salmonella typhi
ttgcttaatccgatcgttcgtgaattccagtacggccagcataccgttacgctggaaactggcatgatggcgcgtcaggccactgccgctgttatggtaagcatggatgacaccgccgtattcgttaccgttgtcggccagaaaaaagccaagccaggccaggacttcttcccactgaccgttaactatcaggagcgtacctacgctgctggtcgtatcccgggcagcttcttccgtcgtgaaggccgtccaagcgaaggcgaaaccctgatcgcgcgtctgattgaccgcccggttcgtccgctgttcccggaaggtttcgttaacgaagtgcaggttattgcgaccgtcgtttccgttaacccgcaggttaacccggatatcgtggcgatgatcggcgcatccgctgcgctgtcgctgtccggcattccgttcaacggcccaatcggcgcggcgcgcgtaggttacatcaatgaccagtacgtactgaacccgacccaggacgagctgaaagaaagcaagctggacctggtggttgccggtaccgaagcggctgtgctgatggtggaatccgaagctgaactgctgagcgaagacactatgctgggcgcggtggtattcggtcacgagcagcagcaggttgttatccaggcgatcaacgatctggtgaaagaagccggtaaaccgcgttgggactggcagccggaagccgtcaacgacgcgttgaacgcgcgtgttgctgcgctggctgaatctcgtctgagcgacgcgtaccgcatcaccgataaacaagagcgctatgctcaggttgacgtaatcaaatccgaaaccatcgagcagcttattgcagaagatgaaactctggatgctaacgagctgggtgaaatcctgcacgccatcgagaaaaacgtggtacgtagccgcgtactggcaggcgagccgcgtattgatggccgtgaaaaagacatgatccgtggtctggacgtgcgcactggcgtactgccgcgaactcacggttccgctctgtttacccgtggtgaaacgcaggcgctggttaccgcgactctgggtactgcccgtgacgcgcaggtgcttgatgaactgatgggcgagcgcactgacagcttcctgttccactacaacttccctccgtactccgtaggcgaaaccggcatggtcggttctccgaagcgtcgtgaaattggtcacggtcgtctggcgaagcgcggcgtgctggcagtgatgccggacatggataaattcccgtacaccgttcgcgtggtgtctgaaatcaccgaatccaacggttcttcttctatggcttccgtgtgcggcgcttctctggcgctgatggacgctggcgtgccaattaaagccgccgtagcaggtatcgctatgggtctggtgaaagaaggcgacaactacgttgtactgtctgacattctgggcgacgaagatcacctgggcgatatggacttcaaagtggcgggttcccgcgacggtatctctgcgctgcagatggatatcaaaattgaaggtatcaccaaagagatcatgcaggttgcgttgaaccaggctaaaggtgcgcgtctgcacatcctgggcgtgatggaacaggcgatcaacgcgccgcgcggcgatatctctgaatttgcgccgcgtatccataccatcaagatcagcacggacaagatcaaagacgtgatcggtaaaggcggttctgtgatccgcgcgctgactgaagagaccggcaccaccatcgaaattgaagatgacggtactgtgaagatcgcggcgaccgacggtgaaaaagcgaaatacgctatccgtcgtatcgaagagatcaccgcagagatcgaagtcggccgtatctacaatagtaaagtgacccgtatcgttgactttggcgcgtttgttgccatcggcggcggtaaagaaggtctggttcacatctctcaaatcgcggataagcgtgtagagaaagtgaccgattatctgcagatgggtcaggaagtcccggttaaggttctggaagttgaccgccagggccgtgtacgtctgagcattaaagaagcaaccgagcagtctcaacctgcggctgcgccggaagctccggcgagcgaacaggccgagtaa

SEQ ID NO: 39346 - DNA, 456 bp, Salmonella typhi
atgtcgacgccggataatcgctccgtaaatttttttagcttatttcgccgggggcagcactacgcgaagacgtggccgatggaaaagcggctggcgcccgttttcgtcgaaaaccgcgtcattcgtatgacgcgctatgccatacgatttatgccgcctgtcgccgtctttacattatgctggcagatagcgctgggcggtcagttaggtccggccgtggcgaccgccctgttcgccctgagcttgcctatgcagggattatggtggttagggaaacgttccttgacgccattgccgccttcaatccttaactggttttacgaagttcgcggtaaattgcaggaggctggacaagcgctggcgccggtagaaggaaagccggattaccaggcattagctgacacgcttaagcgcgccttcaaacaactggataaaactttcttggatgatttgtaa

SEQ ID NO: 39347 - DNA, 2145 bp, Salmonella typhi
gtgtcccgtattattatgctgatccctaccggaaccagcgtcggtctgaccagcgtcagcctcggcgtcatccgtgctatggaacgcaaaggcgttcgtctgagcgtctttaagcctatcgcccagcctcgcgctggcggcgatgcgcctgaccagaccaccactatcgttcgcgcgaactctaccctgccggcggctgaaccgctgaagatgagccacgttgaatctctgctctccagcaaccagaaagacgtgctgatggaagagatcatcgcaaactaccatgcgaataccaaagacgcggaagtggtgctggttgaaggtctggttccgacccgtaaacatcagttcgctcagtctctgaactatgaaatcgcgaaaacgctgaatgcggaaatcgtttttgtcatgtctcagggtaccgacacgccagaacagctgaacgagcgtatcgaactgacgcgcagcagcttcggcggcgcgaaaaacaccaacatcaccggcgttatcatcaacaaactgaatgcgccggttgatgaacaaggccgtactcgcccggatctgtcagagatttttgacgactcttccaaagcgcaggtgatcaaaatcgatcctgctaaactgcaggaatccagcccgctgccggttctgggcgcggtgccgtggagcttcgacctgattgcgacccgcgctatcgatatggcgcgtcacctgaacgccaccatcattaacgaaggcgatatcaaaacccgccgcgttaaatccgttacgttctgcgcgcgcagtattccgcatatgctggagcatttccgcgcaggatcgttgttagtgacctcagctgaccgtccggacgtactggtcgcagcttgcctggccgcgatgaacggcgtagaaatcggcgccctgctgctgaccggcggctatgaaatggacgcgcgcatttctaaactgtgcgaacgcgcattcgccaccggtctgccggtctttatggtgaacaccaacacctggcagacttcgctgagcctgcaaagcttcaatctggaagttccggttgatgaccatgagcgcatcgagaaagttcaggaatacgtcgcgaactacgttaacgctgactggatcgagtcgctgaccgccacttccgagcgtagccgtcgtctctctccgccggcgttccgctaccaactgactgagctggcgcgtaaagccggtaaacgcgtagtgctgccggaaggcgacgaaccgcgtaccgtcaaagcggcggcaatctgcgctgaacgcggcatcgccacttgcgtactgctgggcaacccggatgaaatcaaccgcgtcgcggcatctcagggcgtagagctgggcgcaggtattgaaatcgtcgatccggaagtggtgcgtgaaagctatgtcgctcgcctggttgagctgcgtaagagcaaaggcatgaccgaaccggttgcccgcgaacagctggaagacaacgtggtgctcggcacgctgatgctggagcaagacgaagtcgacggcctggtttccggcgcggttcataccaccgccaacaccatccgtccgccgctgcagcttattaaaacggcgccgggtagctccctggtctcttctgtgttctttatgctactgccggaacaggtttacgtttacggcgactgcgcaatcaacccagacccgactgcagagcagctggcagaaatcgcgattcagtctgcggattccgccattgccttcggcatcgaaccgcgtgtggcaatgctctcctactccaccggcacctctggcgcgggcagcgacgtagagaaagtacgtgaagcgacgcgtctggcgcaggaaaaacgtcctgacctgatgatcgacggtccgttgcagtacgacgccgcggtcatggctgacgtagcgaaatccaaagcgccgaactcgccggttgcgggtcgcgctaccgtgttcattttcccggatctgaacaccggtaacaccacctacaaagcggtacagcgttctgccgacctgatctccatcgggccgatgctgcagggtatgcgcaagccggtgaacgacctgtcccgtggcgcgctggttgacgatatcgtctacaccatcgccctgacggcgatccaggcttctcaacagcagcagtaa

SEQ ID NO: 39348 - DNA, 1521 bp, Salmonella typhi
atgtctgtcgttacagaatcaaaaacagccagaaaatgggcaatgcccgatacgctggtcatcatcttttttgtcgccattttaaccagtatcgccacctgggtcgtccccgttgggatgtttgatagccaggaagtgcagtatcaggtcgatggtcagacaaaaacccgcaaagtcgtcgacccgcactcttttcgcattgtgaccaatgaggccggggaagcgcagtatcatcgcgtacaatttttcactaccggcgatgaaagaccagggctgatgaattttccgtttgaagggttaacatccggatcgaaattcggcactgccgtcggcatcattatgtttatgttggtgattggcggcgcattcggcatcgtgatgcgtaccggcaccgtggataacggcattctggcgcttattcgccacacgcggggcaacgaagtcctgtttattccggtgctatttgtcctcttttcgttagggggcgccgtatttggcatgggcgaagaggcggtcgcctttgcaattatcatagccccgctgatggtcaggctgggctatgacagcattaccaccgtcctggtgacctatatcgccacccaaattggctttgccagttcgtggatgaacccgttttgcgtagtcgtcgcccaggggattgccggcgtgccggtactttccggctccgggctgcgtattgtggtctggattgtcgccacgctgattgggctggtttttacgctggtctacgcctcacgcgtgaaaaagaatccgctgctttcccgcgtccacgaatccgatcgctatttccgcgaacagcaggatgaagtcgtccagcgccctttcaccttcggcgactggctggtactgctggttctgaccggcgtaatgatttgggtcgtctggggcgtgattgtccacgcctggtttattccggagatcgccagccagtttttcaccatgggcgtggtgatcggcctcatcggcgttatcttccgcctcaacggtatgacggtcaacgtgatggcgtcctcattcaccgaaggggcgaggatgatgatcgcgcccgccttgctggtgggttttgccaaaggcattctgctgctggtcggcaacggcgaagccggggaacccagcgtgctcaatacgttgcttaacagtatcgcgcatggcatcagcgggcttaataatgctatcgccgcctggtttatgctgctcttccaggcggtatttaatttctttgtcacgtccggttcgggccaggcggcgttaaccatgccattactggcgccgctcggcgatctggtcggcgttaaccgtcaggtgactgttcttgccttccagtttggcgatggcttcagccatattatctatccgacatcagcttcgctgatggccacgctgggcgtgtgccgggtcgattttcgcaactggcttaaagtgggggcgtcgctgctgggactgctgtttatcatgtccagcgtggtcgtgattggcgcgcagatgatgggatatcattga

SEQ ID NO: 39349 - DNA, 954 bp, Salmonella typhi
atgattaagcttgcgcccgcagggcttaaagacgatatcgaaatgcgcaaagtttatgccggttttgtcgccgggcagattgaggccggaagcccaattattgcgcttgaggctgatttaatgagctcgatggcgatggacagcgtggcgcgtgactacccgcagcatgtcattaactgcggtattatggaggcgaatgtgattggcacggcggcgggactggcgctgaccggtcgcaaaccgtttgtgcatacctttaccgcttttgccagccgtcgctgttttgatcagctctttatggcgctggattatcagcgtaacaacgtcaaagtgatcgcctccgatgccggagtgacggcgtgccataacggcggcactcatatgtcttttgaagatatggggattgttcgcgggctggcgcactctgtagtactggaggtgacggatgcggtgatgttcgcgaatattttacgccagctaatggacctggacggtttttactggctgcgtaccatccgtaagcaggcgacgagtatctatgcgccaggctctacctttaccattggcaagggcaacgtactgcgcgagggcgatgatattacacttatcgccaacggcattatggtggcggaggcgctggaggcggcgcgccaactggagcaggaaggcgtgagcgctgcggtcattgatatgttcaccttaaagcctatcgatcgcatgttggtgaaaaactacgcggaaaaaacgcggcgtatcgtcacgtgtgaaaaccacagtatccataatggactagggtcagcggtagcggaagtgctggtggaaaactgcccggtgccgatgcgccgtgttggcgtcaaagagcgttatgggcaggtaggaacgcaggatttcttacaacaagagtacggactcaccgccgcagcgattgtagaagccgcgaaatcactgctttaa

SEQ ID NO: 39350 - DNA, 1392 bp, Salmonella typhi
atgtttatccttgaaacgctgaattttgttgttgatattttaaaagtgccatcggtgcttgtagggttaattgcgctgattggtctggtggcgcagaaaaaagcgttttccgatgtggtaaaaggcacgattaaaaccattttaggttttattgtgcttggcggtggcgcaaccgtactggtgggttcattaaacccgctagggggtatgtttgaacacgcttttaatattcagggtattattcctaataatgaagcgatagtctcaatcgcgctggaaaaatatggcgcgtccacggcgttaattatggcatttggtatggtggccaatattgtcgtggcgcgctttacgcgtcttaaatatatctttttgaccggacatcacaccttttacatggcctgtatgattggcgtaatcctgaccgtggcggggtttgagggcgtagggctggtcttcaccggatcgctaatcctggggctggtgatggccttcttcccggcgttggcccaacgttatatgaggcggattaccggtaccgatgacattgcgtttggtcacttcggtaccctgggatatgtgctttccggctggattggcagcctgtgtggtaaaggctcccgctccacggaagagatgaacctgccgaaaaacctcagttttttacgcgacagttctatctcgatttcgctgaccatgatgattatctatctgatcatggcagtcagcgcagggcgtgagtatgtcgaagcgacgtttagcggcgggcaaaactatctggtgtacgccattatcatggcaatcaccttcgccgccggcgtattcatcattctgcaaggcgtccgtctgattctggcggaaattgttccggcctttaccggcttttcagaaaaactggtgccaaacgcgcgtccggcgctggactgcccggtggtgtatccctatgcccctaacgcggtactgattggcttcctgttcagttttctcggcgggctggtggggctgttcctgcttggacagatgaagcttgtgttaatcctgcctggcgttgtgccgcacttctttaccggcgcgaccgcaggcgtctttggcaatgccaccggcggtcgccgcggggcgatgatcggcgcatttgctaatggtctattaatcactttcctgccagtgctgttactgccggttctcggcgcgatcggcttcgccaataccacgttctcggatgctgactttggcgtaatcggtattttgctgggcaacctggcgcgttatctgtcgccgatggctatcacggggctggtggtggcgctattcgcgctactggtggcgtacaacgtgttggccaaaagcaaaaaagcgactgccgaagtgcaggaaaatagcggagcgaaagaatga

SEQ ID NO: 39351 - DNA, 444 bp, Salmonella typhi
atgctgggaacctggttatctgacgcaaccatcacgctacgggagagcgtggaaacgtggccgcaggcgctggaaatttgcggcaaacccctgctggacgcaggtgttatcgcaccggaatacattacggcgattgttcagcagcaccaaaagcttgggccgtattatgtattagcgccagggttagcgatgccgcatgcgaggccggaagagggggcgaaagggttaggtttatcgttactgaaactacagcgcggcgtttcatttggcgcagacgaattcgatccggttgacatcattattatgctggcggcgcctgataagcacagtcatatcgaaatgatatcggctctggcggaattattttccagtgatgtagatatggaaaaattacatcaggcaaaaaacctggaggacattaaaacgattattgaccgtttctga

SEQ ID NO: 39352 - DNA, 645 bp, Salmonella typhi
atgagtaagcctgttattgtgctgtggtcggatgcgaactttttctctccctacgtcttgtccgcctgggtggcattacaagaaaaagggctttcctttactctgaaaacccgcgatctggaccagggagaacatctgcaacctggctggcggggatatgcgctgacgcagcgcgtcccggtgcttgaggccgacaattttgagctgagcgagtcgtccgctattgcggaatacctggaggagcgtttcgcgccgccgcagtgggagcgtatctacccgcacgatttacaaaaacgcgcccgcgcgcgacagattcaggcgtggctacgcagcgatttactgccgcttcgcgaagaacggcctaccgacgtggtgtttgccggggcgaaaaaagcgccgctaagcgaggctggaaaagccagtgcggcaaaactgtttgcgacggctgaagcgctattggggcaggggacgcaaaatttatttggtgaatggtgcattgccgataccgatctggcattgatgatcaatcgtctggtgctgcatggcgatgacgtgccggcgtcgctggcggcgtatgcgacatttcagtggcagcgtgcttccgtacagcgttttattgcgctttcctcgaagcgttcaggctga

SEQ ID NO: 39353 - DNA, 894 bp, Salmonella typhi
atgcagattctgattaccggcggtacgggcctgatagggcgtcatctcattccccggctgttaatactggggcaccaggtgacggtcgttacgcgcaatcccgataacgcgcgtcagattctcgattccagagtgacattatggaaagggctggcggaacgtgagcacctcaatgagattgatgccatcatcaatctggcgggcgaaccgattgccgacaagcgctggacgtcgcaacaaaaagaacggttgtgccaaagccgctgggctatcacgcaaaagttggtggatttaattcatgccagcgctacgccgccctcggtgttgatatccggctccgccacgggctattacggcgatctgggcgacgttgtcgtcactgaagatgagccgccgcacaacgaatttacgcataaactttgcgcccgctgggaacagattgcctgtcgtgcgcagagcgaccagacccgcgtctgcctgctgcgtaccggcgttgtcctggcgccgcaaggcgggattctggggaaaatggttccgccgtttcgcctcggactcggcggtccggtgggtaatggtcggcaatatctggcctggattcacattgacgatatggtcaacggcatcctgtggctgctggataacgatcttcgcggtcccttcaatatggtctcgccgtatcccgtccataatgagcagtttgctcatgcgctgggtcgcgcgctgcgccgcccggcgattattcgcattccggcgacggcaattcgcttattgatgggagagtcgtcagtgctggtactgggcggacagcgggcgctgccaaaacggcttgaagccgccggattcgcatttcgctggtatgatttagaagaggcgctggcggatgtgattcgctaa

SEQ ID NO: 39354 - DNA, 687 bp, Salmonella typhi
atgttgtacgggttttcaggcgtaattttacagggcgcgatcgtcacgctggaactggcgctcagttccgtggtgctggccgtgcttatcggtctcgtcggcgcgggggcgaagctttcgcaaaaccgggtaacggggcttatttttgaagggtacaccaccctgattcgcggggtgccggatctggtattaatgctgctgatattttacggattgcaaatcgcgcttaacgtggtgaccgattcgctgggtatcgaccagatagatattgatccgatggtggccggtattatcacccttggtttcatctacggcgcctattttaccgaaacctttcgcggcgcgtttatggcggtaccgaaaggccatatcgaggcggcgacggcctttggttttacccacgggcaaaccttccggcggattatgttcccggcgatgatgcgttacgccctgccggggatcggcaataactggcaggtgatactcaaagcgacagcgctggtgtcgctgctgggcctggaagatgtcgtcaaagccacgcagcttgccggtaaaagcacctgggagcctttctattttgccgtggtctgtggacttatctacctggtatttaccaccgtttccaatggtgtgctgctcttacttgagcgtcgctattccgtaggcgtgaagagggccgatttgtga

SEQ ID NO: 39355 - DNA, 783 bp, Salmonella typhi
atgaaaaaactggcgttatccctttctctggtgctggcattttccagcgctaccgcagcatttgccgctattccacaaaagattcgcatcggtaccgatcctacatacgcaccgtttgaatccaaaaatgcacaaggtgaattggtcggctttgatatcgatctggccaaagaactgtgcaaccgtatcaacacacagtgtacgttcgtggaaaacccgctggatgcgctgattccgtctttaaaagcgaagaaaattgatgccatcatgtcctcgctgtccatcactgaaaagcgccagcaggaaatcgcgtttaccgacaagctttacgccgctgattcccgtctggtggtggcgaagaactctgatattcagccgaccgtcgcgtcgctgaaaggcaagcgcgtcggcgtgctacaggggacgacgcaggagaccttcggcaatgagcactgggcgccgaaagggattgagatcgtctcttaccaggggcaggacaacatttattccgacctgacggctggccgtattgatgcggcgttccaggacgaggtcgcggccagcgaaggtttccttaaacagcccatcggaaaagactataaattcggcggcccggcggtgaaagatgagaagttattcggcgtaggaaccggtatggggctgcgcaaagaggataacgagctgcgcgaagcgctgaacaaagcctttgctgaaatgcgtgctgacggtacttacgaaaagttggcgaaaaagtactttgattttgatgtttatggcggttaa

SEQ ID NO: 39356 - DNA, 1422 bp, Salmonella typhi
atgagtaacacgaattctggcttacttggcatcaaagacattgtctttatgaatgtcatcgctattctgagtttgcggcaaatccctaacgtggcgccttacggggcatcggccatgttgctatgggtgatagccgcattctgcttgttttttcctttagcgatggtatgcggcgagctgtcaaccggctggccgaaagatggcgggatatttgtctggattaaagaggcatttggtaaacgtattgcatggattgtcgtggtttgttttctcttttcctgcgtactgtttttcccattaatgctgcaattcggctttaccgcgttgggctatatgatcggcggcggcctggcggaaaataaagcgtttatcggtattggttccgcggtaattttctggctattaacgctgatgaatatccgcgggatggaatggacaaaaattattaatagcatcagcgcctggtgcggcgtatttattccctccgccatcctcattttgctggcggtggtatggctatgtaccggacaccagatgcagacggactacactacagcgaaaaactggattccggatctcggacactgggatacgatcgttttcttatccagcatgatgtttgcgtttgccggactggaggtcgccccgatgattgccgggcgtacccgtaatccacagcgtgattttccgcgagcgatggccgtctctgccgccgttatcgttgggatctatatggtcggcacctgggcgctaaatacgcttttacccgccgggaaaaccgacatcgtggcaggcgtcatgcaggctatgcatgctgctgcggacacgctgcatatgccgtggttaattcctgttatggccatctgtatgttttttggcgctctcgggcagattaactcctggctggtggggccgatttatatgctccaggaagcctcgcgtgaagataatctgctgggggaccgaatcggcaaattacatccggtgtggaaaacgcccgcctttgccttgactatacaggcgattattgtcacggtcctgtgtttttcgacttttatttcgccaagcgttgcggcggcttactggatgttaacggcgctaacgaccatcacctattttattccttatctggtgatgttcccggcgttctggcgtttacgtaagactcagccagatacgccaagaagttttaaaattccgggcaaggttttaccggctattttacccgcgctgggctttctttctatcgcctttgccgttgcgctgttatttattccgccttctcaaattgatatgggcggatatttccagtacgccgggaaaattattggcggagccgtgctggcggttgtcgtcgcggagtacatttaccatcgggcgcagaaacgtaatgcccgtttaagcatggcgggaggaaaataa

SEQ ID NO: 39357 - DNA, 915 bp, Salmonella typhi
atgagctggattgaacgaattaaaagcaacattactcccacccgcaaggcaagcattcctgaaggggtgtggaccaagtgtgatagctgcggtcaggttttataccgcgctgagctggaacgtaatcttgaggtctgtcctaagtgtgaccatcatatgcgcatgtcggcgcgcaatcgcctgcatagcctgttagatgaaggttcccttgtggagttgggtagcgagctggagccgaaagacgtgctcaagtttcgcgactccaaaaaatataaagacagactggcgtccgcgcagaaagaaaccggcgagaaagacgcgctggtggtcatgaaagggacgcttcacggtatgccggttgtcgccgccgcgtttgaattcgcgttcatgggcggctcaatggggtctgtcgttggcgcacgcttcgttcgcgccgttgaacaggcgctggaagacaactgtccgttagtgtgtttctctgcttccggcggcgcgcgtatgcaagaagcgctgatgtcgctgatgcagatggcgaaaacctcggcggcgctggctaaaatgcaggaacgtggtctgccctacatctcggtattgaccgatccgacaatgggcggcgtttccgccagttttgcgatgctgggcgatctcaacatcgccgagccaaaagccctgattggcttcgccggcccgcgcgttatcgaacaaaccgttcgtgagaagctcccgccaggattccagcgcagtgagttcctgatcgaaaaaggcgctattgatatgatagtccgccgtccggaaatgcgcctgaagctggcgagcattctggcgaagctgatgaatctgcccgcgccgaacccggacgccccgcgtgaaggcgtggtggtgcctccggcgccggatcaggagtctgaggcctga

SEQ ID NO: 39358 - DNA, 1014 bp, Salmonella typhi
atgtctgaaggctggaacattgccattctgggcgcaacgggcgccgtaggcgaagccctgcttgaaacactggctgaacgccagttcccggtcggtgaaatttatgcgttggcgcgtcatgaaagcgcgggcgagcacctccgttttggtggcaagtcggtcattgtccaggatgcggcggactttgactggacgcaggcgcagttggcgtttttcgttgccggcgcagaggcatcggctgcctggatagacgacgcgaccaatgcaggttgcctggtgatagattccagcggtctgttcgcgctggagcctgatgtgccgctggtcgtgccggaagttaacccgtatgtactggcggattaccgtaaccgtaacgtgattgcggtcgccgatagtctgaccagtcaactgctggcggcgctcaagccgttaatcgatcaggggggactgtcgcgcatcgccgtcaccagtatgttatcagcgtccgcgcaggggaaaaaagcggtcgatgcgctggccggacaaagtgcgaagctgcttaacggcataccgattgatgaagatgatttctttggccgccagttggcgttcaatatgctgccgctgctgccggatcgggaaggcagcgtgcgccaggaacgtcgtatcgtcgatgaagtgcgtaaaattttgcaggatgatggcgtgatgatctccgccagtgtcgtgcagtcgccggtgttctatggccatgcgcagatggtgagctttgaagcgctccgtccgctggcggcggaagaggcgcgcgaggcgttttcccgcggtgaagatatcgtactgtcagaagagacggattacccgacgcaggtgggcgacgcttccggcaatccacagctctctattggctgtgtgcataatgattacggtatgccggaacaaattcagttctggtcagtggcggacaacgtgcgtttcggcggcgcgctgatggccgttaaaattgcggagaagctggtgcaggagtatctgtactga

SEQ ID NO: 39359 - DNA, 1137 bp, Salmonella typhi
gtgaaaattctcgttgatgaaaatatgccttacgcccgcgaattatttagccgcctgggtgaggtaaaggcagtgccgggtcgcccgatccccgttgaagaattgaaccatgccgatgcgttaatggtgcgttcggtcacgaaagtgaatgaatcgctgctgagcggcacgccgattaacttcgttggtactgctacggcaggcaccgatcatgtggatgaggcatggctgaagcaggcgggcatcggtttttcagccgcgcccggctgtaatgctatcgccgtggtggagtatgtgttttccgcgctgttgatgctggccgaacgtgacggcttttcgttacgcgatcgcactatagggattgtcggcgtgggtaacgtcggaagccggctacagaccaggcttgaagcgttgggtatccgcacgttgctgtgcgatccgccacgcgccgcacgcggagacgagggtgattttcgtacgctggatgagctggtgcaggaagcggatgtcctgactttccatacgccgctctataaagacggaccgtacaaaacgctgcatctggccgatgagacgctgatccgtcgactgaaacccggcgccattctcattaacgcctgccgcggcccggtggtggataacgccgcattgctggcgcgactcaatgccgggcagccgctgagcgtggtgcttgatgtgtgggagggcgaaccggatcttaacgtcgcgctactggaagccgtggatatcggcacgtcgcatattgccggctatacgctggaaggcaaagcgcgcggcaccacccaggtctttgaggcgtatagcgcgtttatcggtcgcgagcagcgtgtcgcgctggagacattactgcctgcgcctgagtttggtcgtattacgcttcacggcccgctggatcaaccgacgctgaaaagactggcgcatttggtgtatgatgtgcgccgcgacgatgcgccactgcgtaaagtcgctggaattccgggtgaatttgataaattgcgtaaaaattatcttgagcgccgtgaatggtcgtctttatacgtgatgtgtgacgacgaaacggcagccgccttgctgtgtaagctaggttttaacgctgttcatcacccggcacattaa

SEQ ID NO: 39360 - DNA, 1413 bp, Salmonella typhi
atgaaaaagacgaaaattgtttgtactatcggtccgaaaaccgaatccgaagagatgttaagcaaaatgctggacgcgggcatgaacgtgatgcgtctgaacttctctcatggcgattatgcagaacacggtcagcgtatccagaacttgcgcaacgtgatgagcaaaactggtaaaaaagctgctattctgcttgatactaaaggaccagaaatccgcaccattaaactggaaggcggtaacgacgtttcgctgaaagcgggccaaacctttacttttaccaccgacaaatccgtggtcggtaataatgaaatcgttgccgtcacctatgaaggcttcaccagcgacctgagcgttggcaacaccgtcctggttgacgatggtctgatcggtatggaagtgaccgccatcgaaggcaataaagtcatttgtaaggtgctgaacaacggcgatctgggcgagaacaaaggcgttaacctgccgggcgtttctattgctctgccggcgctggctgaaaaagacaaacaggacctgatcttcggttgcgaacagggcgttgactttgttgctgcgtcctttatccgtaaacgttctgacgttgtcgaaattcgcgagcatctgaaagcccacggcggcgaaaacatccagattatctctaagatcgaaaaccaggaaggcctgaacaacttcgatgaaattctcgaagcttccgacggcatcatggttgcgcgtggcgacctgggcgtagaaatcccggttgaagaagtgatctttgcgcagaaaatgatgatcgaaaaatgtatccgcgcacgtaaagtcgtgatcaccgcgactcagatgctggattctatgatcaaaaatccgcgtccgacccgcgcagaagcaggcgatgttgcaaacgccatcctcgacggtacggatgcggttatgctgtccggcgaatccgcaaaagggaaatacccgctggaagccgtttctatcatggcgaccatctgcgaacgtaccgaccgcgtcatgaacagccgtctggactacaacaacgacagccgtaaactgcgcattacggaagcggtatgccgcggcgcggtagaaaccgccgaaaaattgaaagcgccgctgatcgtggtagcgacccagggcggtaaatccgctcgcgccgtgcgtaaatacttcccggacgccaccatcctggcattgaccaccaatgaagtgaccgcccgtcagttagtactgagcaaaggcgtggtatcgcagctggtgaaagaaatcaattctactgatgatttctaccgtctgggcaaagatgtcgccctacaaagcggcctcgcccagaaaggcgacgtcgtagtgatggtctccggcgcgctggttccaagcggcaccactaacaccgcctctgttcacgtactgtaa

SEQ ID NO: 39361 - DNA, 1086 bp, Salmonella typhi
atggcaggaaacacaattggacaactctttcgcgtaaccactttcggcgaatcacacgggctggcgcttgggggtatcgtcgatggcgtgccgcccggcatcccgttgacggaggccgatctgcagcacgatctcgacagacgccgccctggcacctcgcgctatactactcagcgccgcgaaccggaccaggtaaaaattctctccggcgtgtttgatggcgtgacgaccggcaccagtattggcctgctgattgaaaacaccgatcagcgctcgcaggactacagcgcgattaaagatgtttttcgcccgggacacgcggattacacctatgagcagaaatacggcctgcgcgattaccgcggcggtggacgttcttccgcgcgtgaaaccgcgatgcgcgtagcggcaggggcgatcgccaagaaatacttggcggaaaagttcggcatcgaaatccgcggctgcctgacccagatgggcgacattccgctggagattaaagactggcgtcaggttgagcttaatccgttcttttgccccgatgcggacaaacttgacgcgctggacgaactgatgcgcgcgctgaaaaaagagggtgactccatcggcgcgaaagtgacggtgatggcgagcggcgtgccggcagggcttggcgaaccggtatttgaccgactggatgcggacatcgcccatgcgctgatgagcatcaatgcggtgaaaggcgtggagatcggcgaaggatttaacgtggtggcgctgcgcggcagccagaatcgcgatgaaatcacggcgcagggttttcagagcaaccacgctggcggcatcctcggtggcatcagtagtgggcaacacattgtggcgcatatggcgctgaaacctacctccagcattaccgtgccgggacgtacgatcaaccggatgggtgaagaggtcgagatgatcaccaaagggcgccacgatccgtgtgtggggattcgcgcagtgccgatcgcagaagccatgctggcgatcgtactgatggatcacctgctgcgccatcgggcacagaatgcggatgtaaagacagagattccacgctggtaa

SEQ ID NO: 39362 - DNA, 747 bp, Salmonella typhi
atgttaagcattaaagatttacaggtcagtgtggaagaaaaggcgattttgcgtggcctgaatctggatattcgccccggcgaagttcacgccattatggggccgaacggttccgggaaaagcacgctctccgccaccctggcgggacgtgaagattatgaggtcaccggcggctcggttacgttcaaaggtaaagatctgcttgaactgtcgccggaggaacgggcgggcgaagggatttttatggccttccagtacccggtagaaatccccggcgtcagtaaccagtttttcctgcaaaccgcgctgaatgccgtgcgcgcctatcgagggcaggcgtcgttggatcgctttgattttcaggatctgatggaagaaaagatcgcattgctgaaaatgccggaagatttgctgacccgttcggtaaacgtcggtttttccggcggggagaaaaagcgcaatgatattttgcaaatggcggtgctggaaccggaactgtgcattcttgatgagtcggactccggactggatatcgatgcgttgaaaattgtggcggaaggcgtcaacgcgttacgcgacgataaacgcgcttttattatcgtgacccactatcagcgcatactggactacatcaagcctgattacgtccatgtcctctatcaggggcgaattgtccgttccggcgattttactctggtcaaacaactggaggagcagggttatggctggcttaccgaacagcagtaa

SEQ ID NO: 39363 - DNA, 2148 bp, Salmonella typhi
atgactaccacatcagcttttatgcttagcgtgcgtctggataatgtcgcggttgtcgctattgatgtccctggagaaaaggtgaacaccctgaaagcggagtttgccgcgcaggtacgcgccatcctgaagcagatccgggaaaataaagcgttgcagggcgttgtttttatctcagccaaagcagataactttattgctggcgctgatatcaacatgataggccactgccaaaacgcgcaggaagcggaaacgctggcgcgtcaggggcaacaactgatggcggagatccaggcgttgcctgttccggttatcgccgccattcacggcgcctgtctggggggcggtcttgaaatggcgctggcctgccatcggcgtatctgtaccgatgacgttaaaaccgttctcggactgccggaggtacagttagggcttttaccgggatcgggcggaacgcagcgtcttccgcggctggtgggggtcagtaccgcgctggatatgatcctgacaggtaaacagcttcgcgccagacaggcgcttaaagccgggctggttgatgatgtggtgccgcaaactattttactggaagcggctgtcgagctggctaaaaaagaacgcctggcgcagcggactttaccggtccgtgaacgtatcctggcggggccgctggggcgcgcgctgttatttcgcctggtgcgtaaaaagacggcgcaaaaaacgcagggtaattatccggcgacggagcggatcattgatgtgattgaaaccggactggcgcagggcagcagtagcggctatgacgcggaagcgcgcgctttcggcgagctggcgatgacgccgcaatcgcaggcgctgcgcgctgttttttttgccagtaccgaggtgaaaaaagatcccggtagcgatgcaccgcccggcccgctgaacagcgtgggcatcttaggcggcgggttaatgggcggcggtatcgcctgggttacggcctgtaaaggcggtttgccagtacgaattaaggatataaatactcaggggatcaatcatgctctgaaatacagctgggatctgcttgaaacaaaagtacgccgccgccatatcaaagccagcgaacgcgataaacagttggcgttgatatcaggttcgaccgattaccgtggtttcagtcatcgtgatctggtcattgaagcggtgtttgaagatctgccgttaaaacaacagatggtggcggaagtggagcaaaattgcgctactcacaccatttttgcctccaatacttcttccctgccgattggcgatattgcggcgaatgcggccagaccggaacaggtgattggattgcacttttttagcccggtcgaaaaaatgccgctggttgaggtcattcctcacgcgtctacttccgcgcagaccatcgccacgaccgttaagctggcgaaaaaacagggtaaaaccccgatagtcgtcagtgataaagccgggttttatgttaaccgaattcttgcgccatatatcaatgaggcgattcggatgctgactgaaggcgaacgcgtcgaacatattgacgccgccctggtaaaatttggttttccggtggggccaatccaacttttggatgaggtaggaatcgacacgggcactaaaattattcctgtgcttgaggcggcgtatggagaacgttttagcgcgcctgcaaatgttgtcgcttcaattttgaatgacgatcgcaaaggtagaaaaaatggtcgcggtttctatctttatggcgaaaaagggcgtaaaagcaaaaaacaggttgaccctgctatttataagcttattggcgtgcaagggcagagtcgactgtctgcgcagcaggtggcagagcgctgtgtcatgttaatgcttaacgaagcggcgcgctgtttcgacgaaaaagtgattcgcagcgcgcgcgatggcgatatcggcgccgtgtttggtatcggttttccgccgtttctcggtggcccgttccgctatatggatgctctcgggccgggtgaaatggtggcgacattacagcgcctggccgcactttacggtcctcgttacgcgccttgtgaacaattagtgcgcatggcggagcgcagggagcatttctggacgaatggggaaactgaccagggaaattga

SEQ ID NO: 39364 - DNA, 1311 bp, Salmonella typhi
atgcgtcaggctttaccgttggtcacccgtcagggcgatcgcattgctattgtcagtgggttacgaacccccttcgctcgtcaggccactgcatttcatggtattcccgctgttgatctcggcaagatggtggtaggcgagctgctggcgcgcagtgaaattccagccgatgccattgagcaactggtttttggtcaggtagtacaaatgccggaagcccccaatattgcgcgcgaaattgtgctgggtacgggaatgaatgttcataccgatgcctatagcgtaagccgcgcctgcgccaccagttttcaggcggtagcgaatgtggcggaaagcctgatggccggcacgatacgcgcgggtatcgctggcggcgcagattcgtcgtcggtactgccaataggcgtgagtaaagccctggcgcgggtactggttgatgtcaataaagcccggacgacccgccaacggctgacgcttttttctcgtctgcgcttacgcgacctgctgcccgttcctcccgccgttgctgagtattccaccggtctgcgcatgggcgataccgccgaacagatggcgaaaacgtatggtattacgcgtgaacagcaggacgcgctggcgcatcgttcacatcagcgcgccgcgcaggcatgggcggagggtaaactggcggaagaagtgatgacgacctatgtgccgccgtataaaaacccctttgcagaagacaacaacattcgcggtgcctccacgctggcggactacgctaaactgcgtcccgcttttgaccgaaaacatggctccgtaaccgccgccaacagtacaccgctgaccgacggcgctgccgccgttattctgatgaccgaatcccgcgctaaagagctggggctgcgcccgcttggttatctgcgcagctacgcctttaccgctattgatgtctggcaggacatgctattggggccggcctggtcaacgccgctggcgctggagcgggccgggttgacgatggccgatctgacgctttttgacatgcatgaagcgtttgccgctcagactctggcgaacttacaactgctgggcagcgaacgatttgcccgtgaggtgtttggtcgtgcgcaggcgacaggggaggtggatgacgctaaattcaacgtgctcggcggctcaatcgcctacgggcatccttttgccgcaacgggcgcgcggatgataacccaaacgttgcatgaattacggcgtcggggcggaggttttggcctggtcacggcctgcgcggctggcggtcttggcgcggcgatggttctggaggcggaataa

SEQ ID NO: 39365 - DNA, 1494 bp, Salmonella typhi
atgaaaagaacagtcgttgccagtatgatagggttggcgctatgcgctggatgcgtattatcaaccgcgcaagcggcaaccgcaaagcgtcctaacttagtcattattctggcggatgatttagggtatggcgatctcgccacctacgggcaccgcatcgttaaaacacctaacatagacaaattggcgcaggagggggtgaagtttaccgactattatgcgccagcgcctctgtgttctccttcccgcgcgggcctgttaaccggtcgtatgccgttccgtaccggaatccgttcctggataccggaaggcaaagatgttgcgctggggcgtaatgaactgactatcgccaatctgctaaaacagcagggctacgatacggcgatgatggggaaattacacctgaatgcgggcggcgatcgcaccgatcagccgcaggcgaaagacatgggctttgactatacgttggttaatccggcgggatttgtcaccgatgctacgctggataacgccaaggagcgcccgcgctatggcgtggtgcatcctacggggtggattcgtaatggccaacatattggccgcgcagataagatgagcggcgagtttgtgagctctgaagtggtgaactggctggataataagaaagacgataatccgttcttcttatatgtcgcctttaccgaagtccatagcccgctggcgtcgccgaaaaaataccttgatatgtattcgcagtacatgaccgactaccagaagcagcatccggatctgttctacggcgactgggcagacaaaccgtggcgcggcaccggcgaatattacgccaatatcagctacatggatgagcaggtcggtaaagtgctggataaaattaaggcgatgggcgaggaagataacaccatcgtcatctttaccagcgacaacggccctgtcacgcgcgaagcgcgtaaggtatacgagctgaaactggccggggaaaccgacggtctgcgcgggcgtaaagacaacctgtgggaaggcggcattcgcgtaccggcaatcatcaaatacggcaagcacattccacaggggatggtaacggacacgccggtatatggtcttgactggttgccgacgctggccaacatgatggactttaaactcccgaccgatcgtacctacgacggtcagtctttagttccgctcctgaaggacaagacgttaaaacgccagaaaccgctgatcttcggtatcgatatgccgttccaggacgatccgacggatgagtgggcgatccgcgacggcgactggaagatgatcatcgatcgccagaataaacctaaatatctctataacctgaaaaccgatcgtttcgagacgctcaatcaaattggtaaacagccgcagattgagaaacagctttacggtaagttcctgaagtataaaaaggatattgataacgattcgctgatgaaagcccgtggcgataagccgacgcctgtcacctggggctaa

SEQ ID NO: 39366 - DNA, 285 bp, Salmonella typhi
atgagtaaatgcagtgctgatgaaaccccggtttgctgctgtatggacgttggaaccatcatggacaactccgattgcaccgcgtcatacagccgcgtattcgctacccgcgcagaggctgaagagacgctggcggcgttaaccgaaaaagcgcgtagcgtggagtctgaaccttgccaaattacgccaacctttaccgaggaatccgaaggcgttcgtctggatattgattttgttttcgcctgcgaagcagaaacgctgatcttccagctcggcctgcgttaa

SEQ ID NO: 39367 - DNA, 1314 bp, Salmonella typhi
atggtcatgagccagaaaaccctgtttacaaagtctgctctcgcagtcgcagtggcaatcatctccacccaggcctggtctgcgggctttcagttaaacgaattttcttcctctggccttggccgggcctattcgggtgaaggcgcaatcgcagatgatgcgggtaacgttagccgcaacccggcgttaattaccatgtttgaccgcccgacgttttcagcgggcgcagtttatattgatcctgatgttaatattagcgggacatcgccatctcgtcggacgttagatgcggataacatcgcgccgacggcctgggtgccgaacgtccattttgtcgccccgattaacgaccagtttggctggggggcttctattacctctaactatggtctggcgacagagtttaacgacacatacgccggcggctcggttggcggtacgaccgatcttgaaaccatgaacctgaatttaagcggcgcttatcgcttaaatgaggcctggagcttcggcctcggctttgatgcggtatacgcgcgcgcgaaaatcgaacgttttgcgggcgatttaggccagttggtcgcggcacagaatccggcgctggcgccggtcgcgggtcagattctcagcgacaccaagattgcccacctgaacggtaatcagtggggctttggctggaatgccggtatcctttatgaactggataaaaataaccgctacgcgctgacctaccgctcggaagtcaaaattgactttaaaggcaactacagtagcgatcttcccatcgctataaaccgatttaacctgcctatcccaacggcaaccggcggcgcgacgcagtcaggctacctgacgctgaatctgccggaaatgtgggaagtgtccggttataaccgtgtggcgccacagtgggccatccactatagcctggcctataccagctggagtcagttccaggaattgaaggcaaaatcgaccgccggcgatacgctctttgagaagcatgaaggctttaaagacgcttatcgcattgcgttgggtaccacctattactacgatgacaactggacgttccgtaccggtatcgccttcgatgacagcccggtaccagcgcaaaaccgttctatctctattccggatcaggaccgtttctggctgagcgccggtacgacttacgcctttaacaaagatgcgtctgtcgacgttggcgtctcttatatgcatggtcagagcgtgaaaattaatgaaggcccttatcagtttgaatctgaagggaaagcctggctgttcggtactaactttaactacgcgttctaa

SEQ ID NO: 39368 - DNA, 1119 bp, Salmonella typhi
atggtaaatgttcgtcagcccagggatattgcgcaagtgctgctatcggtgctgtttttagccatcatgattgtggcctgtttgtggatagtacagccttttattttggggtttgcatgggcaggtacgattgttatcgcgacctggcccgttttgctgaaattacaaaaaatattgtggggccgccgctcgcttgccgtactggtcatgacgctgctgttagtgctgctcttcgttattcccgtcgccttgctggtgaacagcattgtcgatggtagcggcccgctcatccatgcagtgaccggcggcgatatgacgctacccgatctggcatggttaaataatattccgttagttggcgccaaactgtatgccggatggcatagcctgctggatatgggcggtagcgctattatggcgaaagtgcggccttatatcggcacaaccacgatctggtttgtcggtcaggcggcgcatatcggacgctttatgatgcactgcgccctgatgctgttgtttagcgccctgctttactggcgcggcgaacaagtggcgatgggtatacgccattttgcctgtcgtctcgcggctaaacgcggcgatgcggcggttctgctggctgcccaggcgatccgcgccgtggcgcttggcgtggtggtcaccgcgctggtacaggcggtacttggcggcgtcgggctggcgatttccggcgtgccttacgctaccctgttgacggtagtgatgatcctttcgtgcctggttcagttggggccgttgccggtattgattccagccattatctggctttactggacaggcgacaccacctggggcaccgtgctgctggtttggagcgccgtcgtcggcactctggataacgtgattcgcccggtactcatccgcatgggcgccgatttaccgctgcttctgatcctttccggggtaatcggcggcctgattgcattcggtatgattggtctgtttattggaccggtgcttctggccgtgacctggcgtttgttctccgcatgggtacatgaagttccggcgccgacgaatgaaccagaggagatccttgaagagctggatgacatcgaggaagccaacaagcagtcataa

SEQ ID NO: 39369 - DNA, 756 bp, Salmonella typhi
atgaagcttcgcctgtcggcgctggcgctgggaaccacactgctggtcgggtgtgcgagttccggtacagaacagcaggggcgttcagacccatttgaagggtttaaccgcaccatgtacaacttcaactttaatgtgctggacccgtatgttgttcggccggtcgcggtcgcctggcgtgattatgttccacagcctgcgcgtaacggtttaagtaatttcaccggcaacctcgaagaaccggcgatcatggtgaactatttcctgcagggcgatccttatcagggtatggtgcatttcacccgtttcttcctgaataccttattagggatgggcggctttattgacgtcgcgggaatggcgaatcctaagctgcagcgcgttgaaccgcatcgctttggcagtacactgggccattatggcgtggggtatgggccttatatgcaacttccgttctacggcagcttcacgctgcgtgaagatggcggggatatggcggataccttgtatccggtgctctcgtggttgacctggccaatgtccataggaaaatggactatcgaagggatagaaacccgcgcgcagttgctggactccgatggtttgctgcgccagtcttccgatccttatattatggtgcgcgaggcatacttccagcgtcatgactttatcgccaatggcggaaaactcaagccgcaggaaaacccgaacgcgcaagcgattcaggacgaactcaaagagatcgactcggaataa

SEQ ID NO: 39370 - DNA, 759 bp, Salmonella typhi
atgaaaaccgtcaccgtaaaaaatcttatcattggcgaagggatgcccaaaattatcgtgtcgttgatgggaagagacatcaatagcgtgaaagcggaggcgctggcctaccgcgaagctacattcgatattctggagtggcgcgtggatcactttatggatatcgcatcgactcaatccgttcttaccgctgcgcgtgttatccgcgatgcgatgcctgacattccgttactgtttactttccgcagcgccaaagaaggcggcgagcagacaataaccactcagcattatctcacgcttaatcgtgccgcaatcgacagcggcctggtcgatatgatcgatcttgagctatttaccggtgatgctgacgttaaagccactgtcgattatgcccatgcgcataatgtttatgtcgtgatgtctaaccacgattttcaccagacgccgtccgcagaggaaatggttctgcggctacgtaaaatgcaagcactcggcgcggatattcccaagattgccgttatgccgcaaagcaagcatgatgtattaacgttactcactgccacgctggagatgcagcaacattacgccgaccgtccggtaattactatgtcaatggcgaaagagggtgtcatttcacgtctggcaggggaagtgtttggctctgccgccacgtttggcgcggtgaagcaggcttcagcgccggggcaaatcgccgtaaatgatctacgcagtgtattaatgattctgcacaacgcctga

SEQ ID NO: 39371 - DNA, 834 bp, Salmonella typhi
atggataatgttgttgatcgccatgttttctatatttctgatggtaccgccatcaccgccgaggtcctgggtcacgcggttatgtcgcagtttccggtgacgatcagcagcatcacgctgccattcgtggaaaacgaaagtcgcgcccgcgccgtcaaagaccaaattgacgccatttatcagcaaaccggcgttcgcccgctggtgttttactcgattgttttacctgaaattcgcgccatcatcttgcagagcgaaggcttctgccaggatatcgtccaggcgctggtggcgccgcttcagcaggagatgaaactggatccgacgccgatcgctcatcgtactcatgggcttaatccgggtaacctgaacaagtatgacgcccgtattgccgctatcgattataccctggcgcatgatgatggcatttcattgcgcaacctcgatcaggcccaggtcattttacttggcgtttcgcgctgtggaaaaacgcccaccagtctctatctggcaatgcaattcggtattcgtgcggctaactaccctttcatcgccgatgatatggataatttgacgctgcccacatcgttaaaaccgctacaacataaactgttcggcctgacaattgaccctgaacgcctggcggcaattcgcgaagaacgccgtgaaaacagtcgctatgcctcgttgcgtcagtgccgcatggaagtggcggaggtcgaagcgctgtatcgtaagaatcagatcccctgcctgaacagcaccaattattccgttgaagagatagccaccaagattctcgatattatggggcttaaccgcaggatgtactag

SEQ ID NO: 39372 - DNA, 1923 bp, Salmonella typhi
ttggaacacttaaaatacagacctgatatagatggattacgcgcaatagcggttttatctgtggtaatattccattatttcccatcattattgccgggtgggtttgttggagtagatatattctttgtgatatctggataccttataacatcaataatattaaaatctgcatcaaacaaatcattttcataccttgatttctataaaaggagagtgcttagaatatttccagcattatccatagttcttgtatcatgtcttattgttggttggatttatttattccaggatgattacaaattacttggtaagcatgtttttagtggctcattctttatatcaaactttactctttggagtgagtctggctattttgattcaaaatcataccttaaacctttactacatttgtggtcgctgggaattgaagagcaattttatataatatggccagtagttatattgctatgctttagaagcaaaaaccataacagaaacatagtattatcatgcgcaactatatttataattagctatgcgattagcatttttacaatggcatctgatggcggagctaattactactctcccgcatcaagattttgggagttaatggctggagcgattatatccacattgagatttataggaataaacacttcgttatcaaaattaatgtccctgttaggaattatactaatcgcattatcaataaccatgatagatgaaaagatgtcatttcctggatatatagcaataatcccaatacttggcgcctctcttataatagcatctaatggtaatgatttagttgtgtcgaaattgcttagtgttaggcctgttgttttctttggtcttattagctatcctctttatttgtggcattggcctatttattcattctatcgttcaatatttgctggctcaccagactaccatgaattaactcttcttttattattatcgttctttttggcgatattaacttattatttaattgaaaaaccactgagaaattccagaagtaaatatatcacagcaatattattagcattatctgtatttgggacgggtttaattggcgcatttatttttcatataaatggagttaaagacagggaaatcaataaatcagcaagtgaatatgcttctgttactgacgtgtacaattattataaatatggagaactactccgtggagggatatgtcactcagtacaacttactgctgccatatccaatggatgtataaaaaatggcaagcataatatatttatcattggtgattcttatgcggcggctcttttcaatgggctttctcattatatagataataaaggttctgattatataataagccaaatgacagatggtaatgctcctcctctatttgttgacggtaaagatgatttacagagaagtgtcatcactctaaacaataatagaattaatgaaattaaacgtgttcagcctgaggtggttctgctgacatggtcagttcgaggaacaaatggagtacatgataaaaagttagcaattgatgcgttatcattaaccattaaaaaaattaaagaggcatcccctgactcaaggattgttttcattggaccagtcccggaatggaatgcaaatttagttaaaataatatctaactacctgagtgagtttaaaaaaactccaccattgtatatgacatatggattaaatagtgaaataagcgagtgggactcttactttagtaacaatgttccaaaaatgggaattgaatatatatcagcatacaaagcattatgtaacgaaagtggatgtcttacaagagttggtaatggtcctgattttatcactgccgttgattggggacatttaacaaagcctggttctgatttcctttttaataaaattggaaataaaataatcaaatag

SEQ ID NO: 39373 - DNA, 264 bp, Salmonella typhi
ttggctaatatcaaatcagctaagaagcgcgccgttcagtctgaaaaggctcgtaagcacaacgcaagccgtcgctctatgatgcgtactttcatcaagaaagtatacgcagctatcgaagctggcgacaaagctgctgcactgaaagcatttaacgaaatgcaaccgatcgtggaccgtcaggctgctaaaggtctgatccacaaaaacaaagctgcacgtcataaagctaacctgactgcacagatcaacaaactggcttaa

SEQ ID NO: 39374 - DNA, 714 bp, Salmonella typhi
atgattgcttcacttgatgagctttaccattccgaactctttttccttcccgtcatggatgaaaacgctcggcttgttggtttagagattattgcaacgtttgccgctgaagacggcgccgtgcggatgccgactgagttggtagcgcctcgcctttcggtggaggaacaatactgtctgtttgttgaaaaactggcgttgttagaaacctgtcagcacttttttattcagcataaacttattgcatggcttaatttaccgcctgcaattagtgacttattattattagatagcgaacttttttcccgggcagcgcgctttccgttttttgaagtagctataaatgagaattatcctgggttaaaccagggcaaaaacaatgaaacgttagctaatctggcaatgcatttcccattaattttggcaaattttggggcaggcgaggcgtcgactaaagctattttcgatgggcttttcaaacgagtcatgttggataaaaattttattcagcagcgagctgaaatgatctcattcgaaccattcatgcacgctattgttgcccagatctcctccagctgcgagtcgctgatgattgccggtattgatactgaggcgatgtttgcgcgcgcagcgccattggggtttagcgcattccagggcggactatggcctccggtgccggtaagccagctcattaaactcgttcagcgataa

SEQ ID NO: 39375 - DNA, 939 bp, Salmonella typhi
atgaagctgatacgcggcatacataatctcagtcaggccccgcatgggtgtgtgctgaccattggtaatttcgacggcgtacatcgggggcatcgcgctctactgcagggtttgcaggaagaaggacgcagacgcggtctgccggtggtggtcatgattttcgaaccgcagccgctggagctgttcgcaacggataaagcgcccgcccgcctgacgcgcctgcgtgaaaaactgcattacctggcgcagtgcggcgtggactatgtgctatgcgtgaaattcgatcgccgctttgccgctttgacggcgcaaacgtttatcagcgaactgctggtggagcgacttggcgtgcaatttcttgccgtcggcgatgatttccgctttggtgctagccgcgcgggcgatttcttgttattacagaaggcgggggcggagtatggttttgcggtttccagcacccaaaccttttgtgaaggcggcgtgcgtatcagtagtaccgcagtgagacaggcgctggcggaagataacctggcgcttgccgaaagtctgctgggacatccctttactatttccgggcgtgtcgttcatggcgacgagctgggacgtaccattggcttcccgacggcgaacttaccgctgcgccgtcaggtctcaccggtaaaaggggtctatgcggtggaagtcaccgggcttggcgataagccgttacccggcgtagcgaacattggcactcgtccaacggtggctggcgtgcgtcaacaactggaagtgcatctgctggacgttgtaatggacctctacggtcgccatatagatgtaatactgcgtaaaaagatacgtaatgagcagcgatttgcgtcgcttgatgagctaaaagcgcaaatcgcacgcgatgagttaacggcccgcaagttttttgggctagccgggcaggtgtaa

SEQ ID NO: 39376 - DNA, 939 bp, Salmonella typhi
atgaaaaaacatgctattgcagtaatgatgatcgccgtattttctgagtcggtttatgcggagtctaccttatttattccggacgtctctcctgagagcgtcacgacatccctttctgtgggggtgttaaacggtaaatccagggagctggtttatgataccgacaccggacggaagctgagtcaactggactggaaaataaaaaatgtcgccacgttgcagggggatttatcatgggaaccctattcgttcatgacgctggacgcccgcggctggacgtctttggcgtcgggatcgggtcatatggttgaccatgactggatgagcagtgagcagccaggctggaccgatcgttcaattcatccggacaccagcgccaactatgctaatgaatacgatttgaacgtgaaaggttggttattgcagggagataactacaaggcgggcgtaacagcgggctatcaggaaactcgttttagctggacggcaagaggcgggtcttatatttatgataatggtcgatatattggtaactttcctcatggcgtgcgcggtataggttatagccagcgtttcgaaatgccctatatcgggctggcgggtgattatcgtattaatgactttgagtgtaatgtactgtttaaatacagcgactgggtaaatgcgcatgataatgacgaacactacatgcgaaaacttaccttccgtgaaaaaacggaaaattcacgatattatggcgcgtctattgacgccggatattatattaccagtaatgcaaaaatctttgctgagttcgcttacagtaaatatgaagaaggtaagggcggtacgcaaatcatagataaaaccagcggtaatacggcgtattttggtggcgatgccgcaggtatagctaataataactatacggttaccgcggggttgcagtaccgcttctag

SEQ ID NO: 39377 - DNA, 2835 bp, Salmonella typhi
atgagtgactataaatcgaccctgaatttgccggaaacagggttcccgatgcgcggcgacctcgccaagcgtgaaccgggaatgctggcgcgttggaccgatgatgatctgtacggcatcattcgtgcggccaaaaaaggcaaaaaaaccttcattctgcatgatggccctccatatgcgaatggcagcattcatattggtcactcagttaacaagattctgaaagacattatcgtgaagtccaaaggactgtcgggatttgactcgccttacgtgccgggctgggactgtcacggtctgcctatcgagctgaaagtcgagcaggagttcggtaagccgggcgagaaattcaccgccgctgaattccgcgccaagtgccgcgaatatgccgccactcaggttgacggccagcgtaaagacttcattcgtctgggcgtgttgggcgactggtcgcatccgtacctgaccatggacttcaaaaccgaagccaacatcatccgcgcgctgggcagaattatcaaaaacggtcatctgcacaaaggcgctaagccggtgcactggtgtgttgactgtcgttccgcgctggcggaagcggaagttgaatattacgacaaaacgtcgccgtctatcgacgtggcgttccgtgccgtcgatcaggatgcggtgaaagcgaagtttggtttgccgggcgtgagcggccctgtgtcgctggttatctggaccaccacgccgtggacgctgccggctaaccgcgccatctccctggcgccggactttgattatgcgctggtgcagatcgacggtcaggcggtgattctggcgaaagatctggttgaaagcgtcatacagcgtattggcgcggctgaatacaccattctcggcaccgtcaaaggcgcggagctggaactgctgcgctttacccatccgtttatgggctttgacgtgccggcgatcctcggcgatcacgtcaccctggatgctggtaccggtgccgttcacaccgcacctggccatggcccggacgactatgtgattggtcagaaatacggtctggaaacggctaacccggttgggccggacggcgcttacctgccaggcacatatccaacgcttgacggtgttaacgtcttcaaagcgaacgatatcgttattgaactgctgaaagaaaaaggcgcgctactgcatgtcgaaaaaatgcagcacagctatccgtgctgttggcgtcacaaaacgccgatcattttccgcgcgaccccgcagtggttcgtcagcatggataaagaagggcttcgtcaacagtcgctgaaagagatcaaaggcgttcagtggatcccggactggggtcaggcgcgtattgaatcaatggtcgctaaccgtcctgactggtgtatctcccgtcagcgtacctggggcgtaccgatgtcgctgttcgtgcataaagaaacgcaggagctgctgccgattgagcgtactctggcggcgatggaagaggtggcgaaacgcgttgaagttgacggtatccaggcgtggtgggatctcgacccgaaagagatcctcggcgaagatgctgatcaatatgagaaagttccggatacgttggacgtttggtttgattccggttccaccagttactccgtggttgacgcccgtccggaattcgccggtcacgctgccgatatgtatctggaagggtctgaccagcatcgcggctggtttatgtcctccctgatgattagcgtggcgatgaaaggcaaagcgccataccgccaggtactgactcacggcttcaccgtcgatggtcaggggcgcaagatgtccaagtccatcggtaacaccgtgtcgccgcaggatgtgatgaataaactgggcgcggatatcctgcgtctgtgggtggcgtctactgactataccggcgaaatggcggtctctgacgaaatcctgaaacgtgctgctgacagctatcgtcgtatccgtaataccgcgcgcttcctgctggcgaacctcaatggcttcaatccggccaccgatatggtcaaaccggaagagatggtggtgctggacaggtgggcggtgggctgcgcgaaaacggcgcagcaagagattctgaaggcatacgaagcttacgacttccatgaagtggtacagcgcctgatgcgcttctgctccgttgaaatggggtcgttctacctcgacatcatcaaagaccgccagtacaccgcgaaggccgatagcgtcgcgcgtcgtagctgccagactgcgctgtatcatatcgcagaggcgctggttcgctggatggcgccgatcatgtccttcacggctgatgaaatctggggctacctgccgggcgagcgtgaaaaatatgtcttcaccggcgaatggtacgacgggttgtttggcctggaagagaatgaagaatttaatgacgcattctgggacgatgtccgctatatcaaggaccaggtcaacaaagagctggaaaatcagaaggccaatggcatcaaatcgaacctggaagcaaaagtgacgctgaaatatgctgacgatgctaacggtacgatcaagaagctgaaactgttgggcgaagaggtcagatttatcttcattacttcccagttcgtgatttctgagcaagcggggggtattgatgatgaaaatattcagtacaatgctggtaatacgacagttcaggcagtggtaacgcgtgccgagggtgataagtgtccgcgctgctggcactacactactgatgtcggcaaggtggcggaacatgcagatatctgcggacgctgtgtcagcaacatcgccggtaatggcgaacaacgtaaatttgcctga

SEQ ID NO: 39378 - DNA, 981 bp, Salmonella typhi
atgctgacttttgcccgccaacaacagcgacgaaacgttcgctggcttctgagcctgtcactgctggtgctactggctacacttctgagcttatgcgcaggcgaacagtggattgcccccggtgactggttaagcgcccggggggaactgtttgtctggcaaattcgccttccccgcacgcttgcggtattgctggttggcgctgcgctggcgctatctggcgccgtgatgcaggcgctgtttgaaaacccacttgctgaaccgggtctgctcggcgtttcgaatggggccggtgttgggcttattgccgccgtcttactggggcaggggcaactgccaggatgggcgctggggctgtgcgctatagccggcgcgctcattattacgttaatcctgctgcgttttgcgcgtcgccatctctctaccagccgcttgttgttggcgggcgtcgcgctgggcattatctgtagcgcgctgatgacgtgggctatctatttttccacctctttcgatctgcggcaattaatgtactggatgatgggaggatttggcggcgttgactggcagcagagctggctaatgattgcgctcatcccggtactgatctggatatgttgccagtcgcaaccgctgaatatgctggcgctaggggaaacctcggcgcggcagcttggcctgccgctgtggctctggcgcaatttgttggtcatcgccaccggctggatggtgggcgtcagcgtggcgatggcgggggcgattggttttatcggtctggttattccgcacatcctgcgcttatgtggtttaaccgatcaccgggttttacttcccggctgcgcgctggccggggctatcgccctgctattggctgatgtggtcgcccgactggcgctggcgtcggctgaactgcctatcggggtggtcaccgccacattgggggcaccagtgtttatctggctgctactcaaatccgcgcgttag

SEQ ID NO: 39379 - DNA, 2388 bp, Salmonella typhi
atgaaattcagcgaactgtggttacgcgagtgggttaacccggcaattgatagcgatgcgttggctaaccagattacgatggctggcctggaagtagacggcgttgagccggtcgcgggaagcttcaatggcgttgtggttggggaagtggttgagtgcgcccagcatccgaacgctgacaaattgcgtgtaacgaaagtcaacgtcggcggagaacgcctgttggatatcgtctgcggcgcgccaaactgtcgtcaggggctgaaagtagcggtggccactattggcgctattctgccgggcgatttcaaaattaaagcggcgaaactgcgcggcgaaccgtctgaagggatgctgtgctccttctccgaactggggatttccgacgatcacagcggcattatcgaactgccggcggatgcgccgttgggtaccgacatccgtgaatacctgaagcttgacgacaataccatcgaaattagcgtcacgccgaaccgtgcggattgcttaggtatcatcggcgttgcgcgtgatgtggcggtactgaacaaagcgccgctccaggagcctgaaatggcgccggttacggcaaccatcagcgatacgctgctgattacggtagaggctgttgatgcgtgtcctcgctatcttggccgggtggtaaaaggtatcaatgttaacgcgccgacgccgctgtggatgaaagagaaactgcgtcgctgcggtattcgctccatcgatgcggtggttgacgtcacgaactatgtgctgctcgaactgggtcagccaatgcatgctttcgataaagatcgcattgatggcggtattgtcgtgcggatggcaaaagagggtgaaaccgtcgtcctgctggacggtagcgaagcgacgttaaatgcggacacgctggtgatcgccgatcaccataaggcgctggggatagccggtatttttggcggcgaacattccggcgtgaacggcgaaacgcaaaatgtgctgctggagtgtgcgtactttaatccgctgtctatcaccggtcgcgctcgccgccacggtctgcataccgatgcgtctcaccgctacgagcgcggggtggacccggcgctgcaatataaaacgatagagcgcgctactcgtctgcttcttgatatctgtggcggtgatgcgggtccgataattgatgtgagcaacgaagcaacgttgccgaaacgcgccaccattactctgcgtcgcagtaaactggatcgcctgatcgggcatcatattgcggatgagcaggtcagtgatattctgcgtcgtctgggctgtgaagtgaccgaagggcaggacgagtggaaagccgtggcgccgacctggcgtttcgatatggagattgaagaagatctggtggaagaggtggcccgcgtttacggctataacaatattccggacgagccaatccaggccggtttaatcatgggaacgcaccgtgaagccgatctgtcgttgaagcgggttaaaaccatgctgaacgacaaaggctatcaggaagtgattacctatagctttgtcgatcctaaagtacaacagctcatccatccaggcgcagaagcgctgctgctgccaaaccctatctccgttgagatgtcggcgatgcgtctgtctctgtggagcggattgttggcgacggtggtctataaccaaaaccgtcagcagaatcgcgtgcgtatttttgaaaccggtttacgtttcgttccggatacacaagccaatctgggtattcgacaggatctgatgctggctggcgtgatttgcggtaaccgctatgatgagcactggaacctggcaaaagagaccgttgatttctatgatttgaaaggcgatctggaagcagtattggatttaaccggcaaactgggtgatatccagtttaaggcggagatgaatccggctctgcatccgggacagtctgcggcgatttatctgaaagatgaacgtattggttttattggggttgttcaccctgaactggaacgtaaactggatctgaatggtcgtacgctggtgtttgaactggaatggaataagctcgcagaccgtatcgtgccgcaggcgcgggagatttcacgcttcccggccaaccgtcgcgatattgcggttgttgttgcagaaaacgttcccgcagcggatattttatccgaatgtaagaaagttggcgtaaatcaggtagttggcgtaaacttatttgacgtgtaccgcggtaagggtgttgcggagggttataaaagcctcgctatcagcctgatccttcaggataccaaccgtacactcgaagaagaggagattgccgctaccgtcgccaaatgtgtagaggcattaaaagagcgattccaggcatcattgagggattga

SEQ ID NO: 39380 - DNA, 984 bp, Salmonella typhi
atgtcacatctcgcagagctggttgccaatgcagcggccgccattaaccaggcgtcagatgttgccgcgttagacaatgtacgcgtcgaatatttgggcaagaaagggcatttaacccttcagatgacgaccctacgcgatctgccgccggaagagcgtccggcagccggggcagtcattaacgccgcgaaagagcaggtacaacaggcgcttaacgcgcgtaaagccgagctggaaagcgcagcgcttaacgctcgtctggccgctgaaactatcgatatctccctgccgggacgccgtattgagaacggcggtctgcatccggtcacgcgtaccattgaccgtattgaaagtttcttcggcgagcttggttttaccgtggcgactggcccggaaatcgaagatgactaccataacttcgatgcgttaaacattccgggtcatcacccggcccgcgccgatcatgataccttctggtttgacgcgacccgtctgctgcggacccagacgtctggtgtccagatccggacgatgaaagcgcagcaaccgccgatccgtattattgcgccgggccgtgtataccgtaatgactacgaccagacgcatactccgatgttccatcagatggaaggtctgattgttgataccaacatcagcttcaccaacctcaaaggtacgctgcacgacttcctgcgtaatttctttgaggaggatctgcagattcgcttccgtccttcttattttccgttcaccgaaccttctgcggaagtggatgtgatgggtaaaaacggcaaatggctggaagtgctgggctgcgggatggtgcatccgaatgtgctgcgtaatgtcggtatcgatccggaaatctattctggcttcgcttttggtatggggatggaacgtctgaccatgttgcgttacggcgtcaccgacctgcgttcattcttcgaaaacgatctgcgtttccttaaacagtttaaataa

SEQ ID NO: 39381 - DNA, 921 bp, Salmonella typhi
atgtttcctcaaagcaaattttcacgcgcgtttttgcacccgcgctactggctgacgtggtttggcgttggcgtcctctggttactggtgcagcttccctacccggttttgcgttttctgggcacccgcaccggtaagctggcgcgccccttcctgaagcgacgtgagtcgatcgctcagaaaaacattgaactctgttttccgaccctctcccgggaagaaagggaaaaactgatcgccgagaatttccactctcttggcatggcgctgcttgaaacgggcatggcctggttctggcctgatagccgggttcgcaaatggtttgatgtggacgggctggacaaccttacccgtgcgcaggcgcaaaatcgcggcgtaatggtcgttggcgtgcattttatgtcgctggaattgggaggccgggtaatgggtctctgccagccgatgatggcgacctatcgtccgcataacaatccgctcatggagtgggtgcagacgcgcggtcgtatgcgctcaaataaagcgatgatcggcagaaacaatctgcgcggcattgtgggcgcgctaaaaaaaggggaagccgtttggtttgctcccgaccaggactacggtcctaaaggcagctcctttgcgccatttttcgcggttgaaaacgtcgccaccaccaacggtacctatgtactgtccaggctgtctggcgccgccatgctgaccgttacaatggtaaggaaatccgataactcgggttatcgtctgtatattacccctgaaatggaaggttacccggcagatgaaaatcaagccgctgcctatatgaataaaattattgagaaagagatcatgcgcgccccggagcaatatctctggattcatcgccgtttcaagactcgcccgttgggggaagcgtcactctacatctga

SEQ ID NO: 39382 - DNA, 357 bp, Salmonella typhi; identical to SEQ ID NO: 39069

SEQ ID NO: 39383 - DNA, 198 bp, Salmonella typhi
atgccaaaaattaagaccgtacgcggtgctgctaagcgcttcaaaaaaaccggtaaaggtggttttaagcacaagcacgctaacctgcgtcacattctgaccaaaaaagcgactaaacgtaaacgtcacctgcgtccgaaagccatggtttctaaaggcgatctgggcttggttatcgcgtgcctgccgtacgcataa

SEQ ID NO: 39384 - DNA, 1776 bp, Salmonella typhi
atgactattgccattaccgacgtcgtcctgcgtgacgcccaccagtctctgttcgccacccgcctgcgccttgacgatatgctgccgattgccgctcagctcgacgacgtgggctacggctcgctggagtgctggggcggcgccacctttgacgcctgtattcgttttctcggcgaagacccgtggctgcgcctgcgcgaactcaaaaaagccatgcccaaaaccccgctgcagatgctgctgcgcggccagaacctgctcggctaccgccactacgccgatgatgtggtggagcgcttcgttgaacgcgcggtgaaaaacggcatggatgtgttccgcgtcttcgatgccatgaacgacccgcgcaatatgaaagccgccctgcaggcggtgcgcagccacggcgcgcacgcccaggggacgctctcctacaccaccagcccggcgcacaccctgcagacctggctggacctgaccgaacagttgttagagaccggcgttgactcgattgccatcaaggatatgtccggcattctcacgccgatggccgcttttgagctggtgagcgaaatcaaaaaacgttttgaggtgcgcctgcacctgcactgtcacgccaccaccgggatggcggagatggccctgctgaaggctatcgaggcgggtgttgacggcgtggacacggcgatttcgtccatgagcgccacctacggccacccggccaccgaggcgctggtggcgacgttggcaggtactgagcacgacaccgggctggatatcctgaagctggaaaatatcgccgcgtacttccgcgaggtgcgcaaaaagtaccatgcctttgaaggccagctgaaaggctacgacagccgtattctggtggcgcaggtaccgggcgggatgctgaccaacctcgaaagccagctgaagcagcagaacgcggcggacaggctggaccaggtgctggcggaaatcccccgcgtgcgcgaggacctcggctttatcccgctggtcaccccgacctcgcagattgtcggcacccaggcggtgctcaacgtcctgaccggcgaacgctacaaaaccatcgcgaaggaaaccgccggcattctgaaaggcgaatacggccacaccccggtgccggttaacgccgcgttacaggcccgcgtgctggaagggagcgctccggtgacctgccgcccggcggacctgctgaagccggagctggctgaactggaagcggacgtcaggcgccaggcgcaggagaaggggattactctggcgggaaacgccatcgacgacgtgctcaccgtggcgctgttcccgcaaatcggcctcaaattccttgagaaccgccataacccggcggcgtttgagccactgccgcaggcggaagccgcgcagccggtggcaaaagcagagaagcctgccgcctccggtatctacaccgtggaagtggaaggcaaagcctttgtggtgagggtcagcgacggcggcgatatcagccagcttactacggctgttccggcggcctcttccgcaccggttcaggctgccgccccggcaggcgccggcaccccggtcaccgcgccgctggcgggcaacatctggaaggtgattgccaccgaaggccagagcgtggccgaaggcgacgtgctgctgattctggaagccatgaagatggaaaccgaaatccgcgccgcgcaggccggcaccgtccgcggtatcgcggtgaagtccggggacgccgtctccgtgggcgacaccctgatgacgctggcgtaa

SEQ ID NO: 39385 - DNA, 1239 bp, Salmonella typhi
atggctgactcccgccctgaacgtcgctttacgcgtatcgatcgccttccgccctatgtttttaacatcaccgctgaactcaaaatggctgcgcgtcggcgcggcgaagatattattgatttcagtatgggtaatcctgatggcgcaacccctccccacattgtcgaaaaactttgcaccgtcgcgcagcgtccggatacgcacggttattccacgtcccgcggcataccgcgtttacgccgcgcgatttctcactggtatcaggaacgttatgatgtcgatatcgatccggaaaccgaagcgattgtgaccatcggttccaaagagggactggcgcatttaatgctggcgacgctggatcatggcgatacggttctggtgccgaaccccagttacccgattcatatctatggcgccgttatcgccggggcgcaggtgcgttcggttccattggtagagggggtggatttcttcaacgagctggagcgcgctattcgcgaaagttatccgaaaccgaaaatgatgattttgggttttccgtctaaccctacggcccagtgcgtcgaactggaattttttgaaaaagtggtcgctctggctaaacgttatgatgtgctggtggtgcacgatctggcgtatgccgatatcgtgtacgacggctggaaagcgccatccattatgcaggtgcccggcgcgcgcgacgtggcggtcgaatttttcacactgtcgaaaagctataatatggcgggctggcgtattgggtttatggtgggcaataaaaccctggtcagcgcgctggcgcgcattaaaagttatcacgattatggtgcttttaccccgcttcaggtggcggctatcgccgctctggaaggcgatcagcagtgcgtgcgcgatatcgccgagcagtataagcgtcgtcgcgatgtgctggtgaagggactgcatgaggcgggctggatggttgaaatgccgaaagcctcaatgtacgtctgggcgaaaatcccggagcaatatgcggcgatgggatcgcttgagtttgccaagaagctgctgaatgaggcgaaggtttgcgtttctccagggataggctttggtgactatggcgacacccatgtacgctttgcattaatagagaatcgcgatcgcattcgccaggccgtcagagggattaaaacgatgttccgcgccgatggcgtgctgccgtcacatccaaaacccgttgaagcgagcacggagtag

SEQ ID NO: 39386 - DNA, 543 bp, Salmonella typhi
attaaaggcggaaaacgagttcaaacggcgcgtccgaatcgtattaatagcgaaattcgcgcgcaagaagttcgcttaacaggtctggaaggcgagcagcttggtattgtgagtctgagagaagctctggaaaaagctgaagaagccggagtagacttagtcgaaatcagccctaacgccgagccgccggtttgtcgtataatggattacggcaaattcctctatgaaaagagtaagtcttctaaggaacagaagaaaaagcaaaaagttatccaggtgaaggaaattaaattccgtcctgggacagatgaaggcgactatcaggtaaaactccgcagcctgattcgctttctcgaagagggcgataaggccaagatcacgctgcgtttccgcggtcgtgaaatggcccaccagcaaatcggtatggaagtgcttaatcgcgtgaaaaacgatttgcaagaactggcagtggtcgaatccttcccaacgaagatcgaaggccgtcagatgatcatggtgcttgctcctaagaagaaacagtaa

SEQ ID NO: 39387 - DNA, 1929 bp, Salmonella typhi
atgcctgttattactcttcctgatggcagccaacgccattatgaccaccctgtaagcccgatggatgttgctctggacattggtcctggcctggcgaaagccaccattgcgggccgtgtgaatggcgagctggttgatgcttccgatctgattgaaaatgatgcgacgctttccatcatcaccgcaaaagatgaagagggtctggagatcattcgtcactcttgcgcgcatctgttaggtcacgctatcaagcaactttggccgcacacgaaaatggcgatcggtccggttgtcgacaacggtttttactatgacgttgatcttgaccgcacgctaactcaggaagatgtcgaagcgctcgaaaagcggatgcatgagctcgccgagaaaaattacgacgttatcaagaagaaagtcagctggcacgaagcgcgtgaaaccttcgtgaagcgtggtgaaagctacaaagtttccattcttgatgaaaacattgctcatgatgacaagccaggcttgtaccatcatgaagaatatgtcgacatgtgtcgtggtccgcacgtgccgaatatgcgtttctgccatcactttaaactgatgaaaactgccggcgcatactggcgcggtgacagcaataataagatgttgcagcgtatttacggtacggcatgggcagataaaaaagccctgaacgcttatctgcagcgcctggaagaggccgcaaaacgcgaccaccgtaaaattggtaagcagctcgacctgtatcatatgcaggaagaagcgccgggcatggtgttctggcataacgacggctggactatcttccgcgagctggaggtctttgttcgttctaaactcaaagagtaccagtatcaagaagttaaaggcccgttcatgatggaccgtgtgctgtgggaaaaaaccgggcactgggacaactataaagatgcgatgttcaccacatcttcagaaaaccgcgaatattgcatcaagccgatgaactgcccgggccacgttcagatctttaaccagggtctgaaatcctatcgtgatttgccgctgcgtatggcggaattcggtagctgccaccgtaacgagccatcaggcgcgctgcatggtctgatgcgcgtacgcggctttacgcaggatgatgcgcatatcttctgcaccgaagagcagatccgcgatgaagttaacgcttgtattcgtatggtctacgatatgtacagcacctttggcttcgagaagatcgtcgtcaaactttccactcgtcctgataagcgtatcggcagcgatgagatgtgggatcgtgctgaggcggatctggcggttgcgctggaagaaaataatatcccgtttgagtatcaactgggtgaaggcgcattctacggtccgaaaattgaatttaccttatatgactgcctcgatcgtgcatggcagtgcggtacagtacagctggacttctccttaccgtctcgtctgagcgcctcctatgtaggcgaagacaacgagcgcaaggtgccggtaatgattcaccgtgcgattcttgggtcgatggaacgcttcatcggtatcctgaccgaagagttcgctggtttcttcccgacatggctcgcgcctgttcaggtagtcgtgatgaatattaccgattcgcagtctgaatacgttaacgaattgacgcagaaactacaaaatgcgggcattcgtgtaaaagcagacttgagaaatgagaagattggctttaaaatccgcgagcacactttacgtcgtgtcccttatatgttggtctgtggtgataaagaggtggaagcaggcaaagttgccgttcgcacccgccgcggtaaagacctgggcagtctggacgtaaatgacgtgattgagaagctgcaacaagagattcgcagccgcagtcttcaacaactggaggaataa

SEQ ID NO: 39388 - DNA, 1236 bp, Salmonella typhi
atgttccacccgcgtgcccgaacgatgctgctgctgtcgctccctgcgctgattattggcgtagcgtcaagcctagttttaatcgcctcgatgaaagtcgcgtcggtttttcagcaatttctttggcaacgactgcccgccagcatcggaatcgcttatgattcgccgttctggatagtgggtatgctcacgctaaccgggatcgtggtgggtttgattatccgttacagtcccggacacgctggccccgatccggccatcgaaccgttaatcagtatgccggtctcgccatctgcgctgcccgggctgcttctcgccttaatcatcggccttgctggtggggtaagtttggggccagagcatccgataatgacaataaatatcgcgctggcggcggctttcggctcccgcctgtttccgcgtatcacggcgttagactggacgattctggcctcagcaggcaccatcggcgcgctgttcggcacgcccgtcgccgcggcgctgattttttcgcaaacgcttagcggctctaacgatattcccatgtgggatcgcctgtttgcgccgttaatggcggcagcggcggggtcactcaccaccagcctgttctttcatccgcatttttcgttacccatcgcccattacacgcagatgcggctggtggacattgccagcggagcgatcgtcgcggcgatcgccattgccgccgggatggtcgccgtctggtgccttccgcgtctgcacgagttgctgcaccgactaaaaaatccggtcctgattctcggcattggcggttttatactgggtattctgggcgtcattggcgggccgcttaccctgtttaaaggcctggacgaaatgcaacaaatggcgtttagccagacgttgggcgcgggagattattttaccttagccgtcgtcaaactcgccgcgctggtcatcgcggcggcgagcggctttcgcggcgggcgcatttttccggctgtgtttatcggcgcggcgctggggctcatgctccatgcccatgttgaggccgtacccgcggcgattaccgtctcctgcgcgattcttggcttagtgctggtagtgacgcgcgacggctggctcagtctgtttatggcggcagtcgtcgtaccggataccaatctgctgccgctgctctgcattgtgatgctccccgcctggctattgctggcgggaaaaccgttgctggccgccaaccgtcacgaaccctaa

SEQ ID NO: 39389 - DNA, 999 bp, Salmonella typhi
atgatttatcagcccgatgagaatcgttatcacacaatggagtatcgtcgctgcgggcgcagcggcgtcaaacttcccgctatttcgctggggttatggcacaacttcggcgatacgacacgggtagaaaatagccgggcgctgctgcaacgcgcgttcgatctgggcattacccactttgatctcgccaataattatgggccgccgccgggctccgcagaatgcaattttggccgcattctgcaggaagattttttaccgtggcgcgatgagttagtcatctccaccaaagcgggctacaccatgtgggatggcccttatggcgactggggttcacggaaataccttatcgccagcctcgatcaaagcctgaaacgtatggggctggagtatgtcgatatcttttatcaccatcgtcccgatcccgaaacgccgcttaaagagacgatgaaagcgttagatcaccttgtgcgccacggcaaagcgttgtacgtggggatctctaactatcctgccgatctggccagacaagctatcgatattctggaggatctcggcacgccttgcctgattcatcagcctaaatattcgctttttgagcgttgggtagaggacgggctgctgacgctgttgcaggaaaaaggcgtcggcagtattgccttctcgccgctggcgggcgggcagctcactgaccgttatctgaatggcattccggaagattcccgcgcggcgagcggaagccgtttccttaaaccagaacagattaccgccgacaaactggaaaaagttcgccggttgaatgaactggctgcacgacggggccaaaaattgtctcagatggcgctcgcctgggtgctgcgtaacgataacgttacctcggtactgattggcgccagcaaaccgtcgcaaatcgaagacgccgtaggaatgctggccaatcgccgtttttcggcggcggaatgtgcagaaattgacgctattctggagggccggttttag

SEQ ID NO: 39390 - DNA, 1242 bp, Salmonella typhi
atgactgacaatcgcgtagagaatagcagcggacgggcggcgcgcaagctaaggctcgcattaatgggacctgcgttcattgccgcgattggttatatcgatcccggtaacttcgcgaccaatattcaggccggcgccagctttggctaccagctactctgggtggtggtctgggcgaacctgatggcgatgctgattcaaatcctctcggcaaaactcgggatcgccaccggcaagaacctggcggagcaaattcgcgaccattatccgcgtccggtagtctggttttactgggtacaggcggaaatcatcgcgatggccaccgatttagctgaatttatcggcgcggcaataggttttaagctgatcctgggcgtctctttactacagggcgcggtattgaccggtatcgcgacgtttctgattttaatgttacagcgccgcggtcaaaaaccgcttgaaaaagtcatcggcggtttactgctttttgtcgccgccgcttacattgtggagctgtttttctctcagcctgatatggcgcagctcggcaaaggaatggttatcccggcgctaccgaacccggaagccgtattcttagccgccggcgtgcttggcgcgacgattatgccgcacgtgatttatctgcactcgtcattaacgcagcatctgcacggcggaacgcggcaacaacggtactcagcaacgaaatgggatgtcgctattgccatgacgattgccggttttgtcaatctggcaatgatggcgaccgccgcggcggcgtttcattttagcggccatactggcatcgccgacctcgatcaggcatacctgacgctggaaccgttactaagccatgcggcggcaacagtgtttggtcttagtctggttgcggcagggctttcctccaccgtggtagggactctggcggggcaggtggtgatgcaagggtttgtccgttttcacattccgctgtgggtacggcgcaccattaccatgctgccctcatttattgtgattttgatggggctggaccctacccgaattctggtgatgagccaggtgctgctgagttttggtattgcgctggcgctggtgccgctcctgattttcaccagtaacgctacgctaatgggcgagctggtgaacacgcggcgggtaaaacagattggctggataattgtcgtgctggtcgtcgccctgaatatctggttgctggttggaacggtgatggggttgtcataa

SEQ ID NO: 39391 - DNA, 870 bp, Salmonella typhi
atgagacctcgtcgcagtatgttgtttatccccggcgcaaatgcggccatgttgagcacctcgtttgtctatggtgcggacgcggtgatgttcgacttagaagacgccgtagcattacgtgagaaagataccgcccgtcttttagtccatcacgcgcttcaacatccgttctatcaggatgttgaaaaagtggtgcgcattaatccactgaacacgccattcggtctggccgatcttgaggccgtcgtgcgtggtggcgcggatatcgtgcgtctgccgaaaaccgacagcaaaaacgatgtgctggagctggaagcgcaggttgaacggatcgaacgtgaatgtggacgtgaagtcggcagtaccaggctgatggcggcgatcgaatcagcgaaaggcgtggtcaatgccgtcgacatcgccacctccagcccgcgcatggtggcaattgcgctggcggcatttgattacgtgatggatatgggcaccagccggggcgatggcaccgagctgttctacgcccgctgcgcagtgctgcatgcggcgcgcgttgcgggtattgccgcctatgatgtcgtttggtcggatatcaataatgaagaaggcttcctgaaggaagtgcagttggcgaaagggcttggttttaacggtaagtccttagtgaatccacgtcagattgagctgttacatcaggcttattctccgacgcgtaaagaagttgagcatgcgcacgaggtgattgccgccgctgaagaggctgagtctcgcggtctgggcgtcgtttcactcaacggcaaaatgattgacggcccgattatcgaccacgcgcgcaaagtggtggcgctgtcggcttccggtattcgtgattaa

SEQ ID NO: 39392 - DNA, 822 bp, Salmonella typhi
atgcatgaagcacaaatccgcgtcgccattgccggcgccggtggccgcatgggacggcagttaatccaggccgccatggcgatggaaggtgttcagctgggtgccgcgctggagcgcgaaggctcttccttgctgggcagcgatgctggcgaactggcgggggcgggaaagtccggcgtgatcgttcaaagcagccttgaggcggtaaaagatgattttgacgttttcatcgattttacccgtccggaaggcacgttgacgcatctggcgttttgccgccagcatggtaaagggatggtgattggtactaccggctttgacgacgccggtaaacaggccattcgtgaggcgtcgcaagagattgcgatcgttttcgccgcaaactttagcgtcggcgttaacgtcatgctcaagctgctggagaaagccgcgaaggtaatgggcgactatagcgatattgaaattattgaagcgcaccaccgccataaagtggatgcaccgtcggggacagcgctggcaatgggcgaggcaatcgccggggcgctggataaagatctgaaggactgcgcggtctactcgcgtgaaggttataccggcgagcgcgtaccgggaacgattggctttgcaaccgttcgggcgggcgacatcgtcggcgaacataccgcgatgtttgccgatattggcgagcgcgtagagattacgcataaagcttccagccgcatgacgtttgcaaatggcgcgttgcgatcggcgttatggctaaaaacgaagaaaaatgggctatttgacatgcgggatgtgctggggctggatgtattatag

SEQ ID NO: 39393 - DNA, 1149 bp, Salmonella typhi
ttgattaagtcagcgctattggttctggaagacggaacccagtttcacggtcgggccataggggcaacaggttcggcggttggggaagtcgttttcaatacttcaatgaccggttatcaagaaatcctcactgatccttcctattcccgccaaatcgtcactcttacttatccccatattggtaatgtcggcaccaatgaagccgatgaagaatcttctcaggttcatgcgcaaggtttagtgattcgcgatctgccgttgattgccagcaacttccgtaacaccgaagacctctcttcttacctgaaacgccataacatcgtggcgattgccgatatcgatacccgcaagctgacccgactgctgcgtgagaaaggcgcacagaacggctgcatcattgcaggcgatagcccggatgcgaagctggcgctggaaaaagcgaaagcatttcctggactgaacggtatggatctggcgaaagaagtgaccacggcggaaacttaccgctggacgcagggtagctggacgctgaaagacggtttaccggaagcgaaatctgaggatgacctgccgttccacgtggtggcctacgattttggcgccaagcgcaacattctacgtatgctggtggatcgcggctgccgcctgacggtggtgccagcgcaaacctctgctgaagaggtgctgaaaatgaatccggacggcatcttcctgtcgaacggccctagcgacccggcgccgtgcgactacgccatcgaggcgattaagaaattcctccagaccgacattcctgtgttcggcatctgcctcggccatcaactgctggcgctggcgagcggtgcgaagaccgttaagatgaagttcggccatcacggcggcaaccatccggtaaaagatatggacagaaacgtggtgatgatcaccgcgcagaaccacggatttgcggtggatgaagactcgctgcccgccaacctgcgcgtgacccacaagtcgctgttcgacggcaccctgcagggcattcaccgtaccgacaaaccggcgttcagcttccagggacacccggaggcgagcccgggcccgcacgatgcggcgccgctgttcgaccactttatcgaattgattaagcactaccgttcttcagcaaaataa

SEQ ID NO: 39394 - DNA, 1425 bp, Salmonella typhi
atgaaaatcaaaactcgcttcgcgcctagcccgacaggttatctgcacgtcggcggcgcgcgtactgctctttattcctggcttttcgcacgtcaccacggcggtgaattcgtgctgcgtattgaagacaccgatcttgagcgttccacgccggaagccattgaagccatcatggatggtatgaactggctgaacctggaatgggacgaaggcccatatttccagaccaaacgttttgatcgctataacgcggtgattgacgagatgctggaggcgggaacagcctataaatgctactgctctaaagagcgtctggagcaactgcgtgaagatcagatggcgaaaggcgagaagccgcgttatgacgggcgttgccgtcacagccacgaacatcatgccgacgatgagccatgcgtggtgcgctttgccaacccgcaggacggttccgttatttttgatgatcagatccgtggcccgatcgaattcagcaatcaggaactggacgatctgatcattcgtcgtaccgacggttccccaacctacaacttctgtgtggtggtggacgactgggatatggaaattacccatgtgattcgtggcgaagaccatatcaacaatactccgcgccagattaacattctgaaagcgttaaacgcgccggtgccgatgtacgcgcatgtgtcgatgattaacggcgacgacggtaaaaagctgtctaaacgtcacggtgcggtgagcgtgatgcagtatcgcgatgacggttatctgccggaagcgttgctgaactatctggtgcgtctgggctggtccagcggcgatcaggaaatcttcacccgcgaagagatgatcaagctgttctccctcggtgcggtgagcaagtctgcgagcgcgttcaacaccgataaactgctgtggctgaaccaccactatatcaatacgctggcgccggaatatgtggcgacgcatttgcagtggcatatcgagcaggaaaatatcgacacccgtaacggcccgcagcttgctgagctggtgaagttgctgggcgaacgctgcaagactctgaaagagatggcgcagagctgccgctacttctatgaagacttcagcgagtttgacgccgatgcggcgaaaaaacacctccgcccggtggcgcgtcagccgctggaagtggtgcgcgacaagctgtcggcgattacggactggtcagcagaaaacgtccaccacgcgattcaggccacggcggatgagctggaagtggggatgggtaaagtagggatgccgctgcgtgtggctgtgaccggtgccggcagtcgcctgcgctggatgtcaccgtacatgcgattggtaaaacccgcagcattgagcgtatcaacaaagcgctgggctttatcgccgagcgtgaaagtcagcagtaacgccagctga

SEQ ID NO: 39395 - DNA, 3228 bp, Salmonella typhi
atgccaaaacgtacagatataaaaagcatcctgattctgggcgcgggcccgattgttatcggtcaggcgtgtgagtttgactactccggcgctcaggcgtgtaaagcgctgcgcgaagaaggctaccgcgttattctggtgaactctaacccggccaccatcatgaccgacccggaaatggccgatgccacctacatcgagccgattcactgggaagtggtgcgcaaaatcatcgaaaaagagcgtccggatgcggtgctgccgaccatgggcggccagaccgcgctgaactgcgcgctggagttggagcggcagggcgtgctcgaagagttcggcgtcaccatgattggcgccaccgccgacgccattgataaagccgaagaccgtcgtcgcttcgatatcgccatgaagaaaattggtctcgacaccgcgcgttccggtatcgcgcacaccatggaagaagcgctggcggttgccgctgacgtgggcttcccgtgcatcatccggcctagctttaccatgggcggcaccggcggcggtatcgcttacaaccgtgaagagttcgaagaaatctgcgaacgcggtctggatctctcgccaaccaacgaattgctgattgatgaatcgctgatcggctggaaagagtacgagatggaagtggtgcgtgataaaaacgacaactgcatcatcgtctgctctatcgaaaatttcgatgcgatgggtatccatactggggactcgatcaccgtggcgcccgcccagactctgaccgacaaagaatatcaaatcatgcgtaacgcctcgatggcggtactgcgtgaaatcggcgtcgaaaccggcggttctaacgtccagttcgcagtgaacccgaaaaacggtcgtctgatcgttatcgaaatgaacccgcgcgtctcccgctcctcggcgctggcgtcgaaagccaccggtttcccgattgccaaagtggccgccaaactggcggtaggttacacccttgacgaactgatgaacgacatcaccggcgggcgtactccggcctccttcgagccgtccatcgactacgttgtgaccaaaattccgcgctttaacttcgagaaattcgccggtgccaacgaccgtctgaccacccagatgaaatcggtcggagaagtgatggcgattggccgcacgcagcaggaatccctgcaaaaagcgctgcgcggcctggaagtcggcgccaccggcttcgacccgaaagtcagcctcgacgacccggaagcgctgaccaaaatccgccgcgagctgaaagatgcgggcgcagatcgtatctggtatatcgccgatgccttccgcgcaggcctctccgtcgacggcgtgttcaacctgaccaacatcgaccgctggttcctggtgcaaattgaagagctggtgcgtctggaagagaaagtaactgaagtcgggattactggcctcaacgccgacttcctgcgtcagctcaagcgtaaaggttttgccgatgcgcgtctggcaaaattggcgggcgtgcgcgagggggaaatccgtaagctgcgcgaccagtatgacctgcacccggtctacaagcgtgtggatacctgcgcggcggaattcgccaccgacaccgcctatatgtactccacttatgaagatgagtgcgaagcgaacccgtccgttgaccgcgataaaatcatggtcctcggcggcggcccgaaccgtatcggccagggcattgagtttgactactgctgcgtacacgcctcgctggcgctgcgcgaagacggttacgagaccatcatggtcaactgtaacccggaaaccgtctctaccgactacgacacttccgaccgcctgtacttcgagccggtgacgctggaagacgtgctggaaatcgtgcgtatcgagaagccgaaaggcgttatcgtgcagtacggcggccagaccccgctaaagctggcgcgcgcgctggaagcggcaggcgtgccggttatcggcaccagcccggacgccatcgaccgcgcggaagaccgcgagcgcttccagcacgcggttgaccgtctgaagctgaagcaaccggccaacgccaccgtcaccgccattgaacaggctgtcgaaaaagcgaaagagatcggctacccgctggtggtgcgtccttcttacgtgctgggcggccgggcgatggaaattgtctatgacgaagccgatctgcgtcgctacttccagacggcggtcagcgtctctaacgatgcgccggtgctgctggatcgcttccttgatgacgcggttgaagtggacgtggacgctatctgcgacggcgaaatggtgctgattggcggtatcatggagcacatcgagcaggcgggcgtacactccggcgactccgcctgttctctgccggcctacacgctaagccaggaaattcaggatgtgatgcgccagcaggtgcagaagctggccttcgagttgcaggtgcgcggcctgatgaacgtgcagtttgcggtgaaagacaacgaagtctacctgattgaagtcaacccgcgtgcggcgcgtactgtgccgttcgtctccaaagccaccggcgtgccgctggcgaaagtggcggcgcgcgtgatggccggcaaatcgctgaccgagcagggcgtgactcaagaaattatcccgccgtactactcggtgaaagaagtggtactgccgttcaacaaattcccgggcgttgacccgctgttagggccagaaatgcgctccaccggggaagtgatgggcgtgggccgtaccttcgcggaagcgttcgccaaggcacagctgggcagtaactccactatgaagaaacagggccgtgcgttgctctcggttcgcgaaggcgacaaagagcgcgtggtggacctggccgctaagctgctgaaacaaggcttcgagctggatgccacccacggtacggcgattgtgctgggcgaagccggtatcaacccgcgtctggtgaacaaggtgcacgaaggtcgtccgcacattcaggaccgcatcaagaatggcgaatatacctacatcatcaacaccaccgcaggccgccgggcgattgaagactcaagggtgattcgccgcagcgcgttgcagtataaggtgcattatgacaccacgctgaacggcggttttgccacgacgatggcgctcaatgccgatgccaccgagaaggtaacctcggtgcaggaaatgcacgcgcagatcaaaaagtcgtaa

SEQ ID NO: 39396 - DNA, 2253 bp, Salmonella typhi
atgtcgcataatgaaaaatccccccatcagtcccccgtgcatgatacccgtgaatcacagcccggcctggactccctggcaccgtcagacggttcacatcgccccacgccagaaccgacgccgccgggcgcgcaaccaacggcccccggcagcttaaaagcgcccgagaccgcgaatgataagctcaccgccctcgacgcctttcgtaaaggcagcgaaaattatgcgctgaccaccaatcagggcgtgcgcatcgccgacgatcaaaattctcttcgcgccggcagccgtggccctacgctgttggaagattttatcctgcgcgagaaaattacccactttgaccatgagcgtatcccggagaggatcgttcacgcccgcggatctgcagcgcacggctatttccagccatataaagacctgagcgacatcacgaaagccgcgtttctgtgcgatccacagaaaattaccccggtctttgttcgcttttcgacagtacagggcggcgcggggtctgctgataccgtacgtgatatccgcggttttgcgaccaaattttataccgaagagggaattttcgatctcgtcggtaataacacgccgatcttttttatccaggatgcgcataagtttccggattttgtgcacgccgttaagcccgaaccacattgggctattccgcaagggcagagcgcgcacgacaccttctgggactatgtttccttacagcctgagacgctgcacaacgtcatgtgggcaatatcggatcgcggtattccacggagttatcggacgatggaagggttcggcattcacaccttccgtctgatcaatgcacaagggaaagcgacctttgtccgtttccactggaaaccgttggcaggtaaagcctcgctggtatgggatgagtcacaaaaactgaccggtcgcgatccggattttcaccgccgggatctgtgggaggccatcgaagcgggcgatttcccggaatacgagctgggcctacaactcattgccgaagaggatgaatttaaattcgattttgatctgctcgatccgaccaaactgattccggaagagttggtgccagtacaacgcgtcggcaaaatggtgttaaaccgtaatccggataactttttcgctgaaaacgaacaggcggcatttcatccaggacatattgttcccggcattgattttaccaacgatccgctgttacaggggcgtctgttctcttataccgacacgcaaatcagtcgtctgggcgggccaaacttccacgaaattccgattaaccgccctacctgcccctaccataacttccagcgtgacggtatgcaccggatggatatcgacaccaatccggcgaactatgaaccaaactccattaatgacaactggccacgcgaaacgccgccagcgccaaaacgcggcggcttcgaatcataccaggaacgcgtggatggtaatgaaatccgcgaacgcagcccctctttcggtgaatattactcgcatcctcgcctgttctggctcagtcagacgccgatagaacagcagcatattattgacgcgttcagctttgagctgggtaaagtcgcccgcgcgtatattcgggagcgggtggtcgatcagttagcgcatattgatgtcacgctggctcagggcgtcgcgcataatctcggttttgcactcacccatgagcaaacgcaaattgccccgcctcctgatgtcaacggtctgaaaaaagatccggcgctcagcctgtatgcggtgccggacggcgatgttaaaggccgagtggtcgctattctgctgaacgacaaggttaacgccgccgaactgttgaccatttttcaggctttaaaagccaaaggcgtccacgtaaaactgctctattcacggatgggggaagtaacggctgatgacggttcaacattaactattgcggcaacctttgccggcgcgccgtcgctaacggtcgatgcggtaatagtaccgtgcggcaatattgccgatatcgagagttgcggcgatgcccgttactaccttctggaagcctacaaacatctgaagcccatcgcactggcaggcgacgcccgacggtttaaggcgcttttaaacattgatagccagggggaagaaggacttgttgaggcagataacgttgaccaccactttatggacactctgctgacgctgatggcggcacaccgtgtctggtcgcgtgcggggaaaattaacgcgattcctgcataa

SEQ ID NO: 39397 - DNA, 348 bp, Salmonella typhi
atgtttgatcttgaaaatgttgtagataaccagacagcggctgaggaactcgaagaagtcgttatggggcttatcatcaattctggtcaggcgcgcagcctggcatatggcgcgctcagaaaagcgaaagaaggcgactttgaggcggcgaaagcgatgatggaccagtcgcgcatagcgctcaatgaagcgcatcttgtgcagacaaaactcatcgaaggcgatcagggcgaaggcaaaatgaaagtcagtctggtcctggttcacgctcaggatcatttgatggcctcaatgctggctcgtgaactgatcgctgagttgattgagctccatgagaaactgaaataa

SEQ ID NO: 39398 - DNA, 2016 bp, Salmonella typhi
atggaaccaatcgaacaacaactgacagaactgcgaaccacgcttcgccatcatgaatatctgtatcatgtgatggatgcgcccgagattctcgacgccgaatatgaccgcctgatgcgggaactgcgagagctggaggcgcaacgtccggaccttatcacgccggattcgcccacgcagcgcgttggcgcggcgccgctgacggcattcaaccagattcgccatgaagtaccgatgctgtcgctcgataacgtatttgatgaagaaagcttcctggcgtttaacaagcgagtgcaggatcgtctaaaaagcacggaaaatgtcatctggtgctgcgagctaaaactggatggcctggcggtcagcattctgtatgaaaacggcgtgctggtgagcgctgcgacgcgtggcgacggcaccaccggtgaagatatcacttcaaacgtgcgcacgattcgcgccattccgttaaagctgcacggcgataacattccggcgcgtcttgaagttcgcggagaggtatttttaccgcagaccgggttcgaaaagatcaatgaagacgcgcgccgtactggcggcaaagtgtttgctaatccgcgtaacgcggcggcgggctcgttgcgtcagctcgatccgcgtattacggcgaagcgaccgctaacatttttctgctacggcgtcggtattctggaaggcggagagttgccggatacgcatctgggacggttgctgcaatttaaagcgtgggggttaccggtcagcgatcgcgtgacgctgtgcgattctccccaggcagtactggatttttatcacaacgtcgaaaaagatcgccccacgctcggttttgatatcgacggcgtggtgattaaggtcaactcgctggctttgcaggaacagctgggctttgtggcccgcgcgccgcgctgggcggtggcgtttaaatttcctgctcaggagcagatgacttttgtgcgcgacgttgagtttcaggtcgggcgcaccggggcgattacgccggtggcgcgtctagaaccggttcaggtggctggtgtgctggtcagcaatgccacgttgcataatgccgatgaaattgagcggcttggcttgcgcattggcgataaggtggttatccgtcgggcaggcgatgtgatccctcaggtggtcaacgtggttctgtccgaacgccctgaagagacgcgtccgattgtgtttccaacgcactgtccggtgtgcggatcggacgtagagcgcgtcgaaggcgaagccgttacccgttgtaccggcgggctgatttgcggcgcgcagcgtaaagagtcgctgaaacattttgtgtcgcgccgggcgatggatgtagacgggatgggcgataagatcatcgaccaactggtggaaagggagtatgtccatacgccagcggatctgttccgtctgacggcgggtaaactgaccggcctggaccgaatggggccaaagtccgcgcaaaatgttgttaacgcgctggaaaaagccaaagcgacgacttttgcgcgttttctctatgcgctgggcatccgtgaagtgggtgaagcgacggcggcggggctggcggcgtacttcggcacgctggaggcgctgcaggctgccaccattgacgagttgcagaaagtacccgacgtggggattgtggtcgctacgcacgtctttaacttttttgccgaagagagcaatcgtgacgtgattgggcagctactggcggaaggggttcactggcccgcgccggtagtcattaatgcgcaagagatcgatagcccgtttgccggtaaaaccgtggtactaaccggtagcctgagccagatgtcccgcgatgacgctaaagcgcgtttagtggctctgggcgcgaaagtggcaggcagcgtatcgaagaaaaccgatctggtgattgccggtgaagcggcgggctccaaactggccaaagcgcaggaactgggtattaccgtgattgatgaagcggaaatgatccgcttactgggtgcctga

SEQ ID NO: 39399 - DNA, 1518 bp, Salmonella typhi
atgaaaaatgaaaagagaaaatcgggaattgaaccgaaggttttttttccgctattaataattgtcgggatactttgctggctaacagtcagagatcttgatgccgctaacgtcgttattaatgcggtattcagttatgtcaccaacgtctggggttgggcatttgaatggtatatggtcgtcatgctcttcagctggttctggctggtttttggcccctatgccaaaaagagattaggtgacgaaaaaccggagtttagcaccgccagctggattttcatgatgttcgcctcctgtacatccgctgcggttctgttctggggctctattgagatctactactatatctccaccccgccgttcggcctggaacccaattccacgggcgcgaaagagataggcctggcgtacagcctgttccactgggggccgctaccgtgggcaacctatagcttcctttccgtggccttcgcctacttcttctttgtacgcaagatggatgtcatccgccccagctccacgctggtaccgctcgtcggtgaaaagcatgcgaaagggttgttcagtaccatcgtcgataacttctacctggtggcgctgatcttcgcgatgggcaccagcctcggtctggctaccccgctggtcaccgagtgtatgcaatggctgttcggtattccgcatacgctgcaattggatgccatcatcattacctgctggatcattctgaacgcgatttgcgtggcctgcggcctgcaaaaaggggtcagaatcgccagcgatgtgcgtagctacctgagcttcctgatgctcggctgggtgtttatcgtcagcggcgccagcttcatcatgaactacttcaccgactccgtcgggatgctgttaatgcacctgccacggatgctgttctataccgacgccatcggtaaaggcggcttcccacagggctggaccgttttctactgggcgtggtgggttatttacgccatccagatgagtatcttcctggcccgtatttcccgtggtcgtaccgtacgtgaactgtgcttcgggatggtgatgggtctgaccgcgtctacctggatcctgtggacagtccttggcagtaacacgctgctgctgatggataaaaacatcctcaacatcccgcaactgattgagcaacacggcgtggcgcgcgccattatcgaaacctgggcagccttgccgctcagcaccgccaccatgtggggcttcttcatcctctgctttattgccaccgtcacgctgattaacgcctgctcttacaccctggcgatgtcgacctgtcgcgaagttcgcgatggtgaagagccgcctctgttagtacgcatcggctggtcggtgctggtcggcatcatcggtatcgttctgctggcgctgggtgggttgaagccgattcagaccgcgattatcgccggaggatgcccgctgttcttcgtcaacattatggtgacgctgtcctttattaaagacgccaaagtgcactggaaagacaagtaa

SEQ ID NO: 39400 - DNA, 1359 bp, Salmonella typhi
atgagtaacgttattgcttcacttgaaaaggtactccttccttttgctgtaaaaataggaaagcagccacacgttaatgcaatcaagaacggctttattcgtttaatgccattaacccttgcgggggcgatgtttgtattaattaataacgttttcctgagctttggggagggggcgtttttttattccatgggcattcggcttgatgcctcaaccattgaaacacttaatggattgaaaggcatcggcgggaacgtctataacggcacattgggcattatgtcgctcatggcgccattttttatcggcatggcgctggcggaagagcgcaaggttgatgcgctggccgccggactgctctccgtggcggcatttatgaccgtaacgccgtatagtgtcggcgaggcctatgccgtaggcgctaactggctgggcggcgcgaatattatctccggtattattattggcctggtggtcgcggagatgtttacatttattgtccggcgcaactgggtgattaaactaccggacagcgtaccggcttcggtgtctcgttcattctcagcattaattcccggctttattattctctctattatggggattattgcctgggcgctgtctaattacggttctaacttccatcagattattatggacactatctctacgccgctggcatcgctgggtagcgtggtagggtgggcatatgtcatttttgtaccgctgctgtggttctttggtattcatggttcgctggcgctgaccgcgctggacagcggcatcatgacgccctgggcgctggaaaacatctctatttaccagcagtatggctccgtcgatgcggcgctggaagccggtaaaacgttccatatctgggcgaaaccgatgctggattcttatatcttcctcggtggtagcggcgcaacgctgggtctgatcatcgctatcttcctggcatcccgtcgcgcggactatcgccaggtggcaaaactggcgctgccgtcaggtatcttccagattaacgaacccatcctgtttggcctgccgattattatgaacccggtgatgtttatccccttcattctggttcagccgattctggcggcgattacgctggtggcttactatttgggtattattccgccgattaccaatattgcgccgtggaccatgccaaccgggctgggggcgttctttaacaccaacggcagtgtcgccgcgttgctggttgcgctatttaacctggcggtcgctaccctgatttatctccccttcgtggtggtggctaacaaagcgcagaacgccatcgagcaggaagaaagcgaagaagatatcgctaacgcactgaaattctaa

SEQ ID NO: 39401 - DNA, 987 bp, Salmonella typhi
atgatgcaggatttgcgtctgatattaatcattgttggcgcgatcgccataatcgctttactggtacatggtttctggaccagccgtaaagaacgatcttctatgttccgcgatcgtccactaaaacgcatgaaatcgaaacgcgacgacgactcgtatgacgacgatgtcgaagaagacgaaggcgtgggtgaagttcgtgttcaccgcgtaaatcatgcccccggccagtcgcaggagcatgatgcccctcgtcagtcgccgcaacaccagtaccagccgccttatgcgtctgcgcaaccgcgtccagcggcgccgccgcagccgcaagcgccgatgcaacagccggttcagcaaccggtccaacctgcgccgcagcctcagcaggttcagccatctgcgccgccggtacagccgccgcaacagcagcctgcaccgccgtcgcaagcgccgcagcctgttgcgcagcccgcgccgccgccatcagcgcaaaccttccagcctgcggaacctgtggttgaggcggaaccggtagtggaagaagcgccggttgtggaaaaaccgcagcgtaaagaggcggtcatcattatgaacgtcgcggcccatcatggcagcgagcttaatggtgaagtgttactgaacagtattcagcagtcaggctttaaatttggcgatatgaatattttccatcgtcatttgagcccggacggcagcggcccggccttgttcagtctcgcgaatatggtcaatccgggaacgttcgatcctgaaatgacggacttcactacgcctggcgtcactatctttatgcaggtaccgtcttacggcgatgcgctgcagaatttcaagctgatgctgcaatccgcgcagcatatcgctgatgaggtcggtggcgtcgtgctggatgaccagcgtcggatgatgacgccgcagaaactgcgcgaatatcaggaccgcatccgcgaggtgatggacgctaacgcctga

SEQ ID NO: 39402 - DNA, 972 bp, Salmonella typhi
atgagtaagatttatgaagataactcgctgactatcggtcatacgccgctggttcgactgaatcgtatcggtaatggacgcattctggcgaaggtggagtcgcgcaacccgagcttcagcgtcaagtgccgtatcggcgccaatatgatttgggatgccgaaaagcgtggcgtactgaaacctggcgtggaactggtggagccgaccagcggcaataccggtattgcgctggcgtatgtcgccgccgcgcgcggttacaaactcaccctgaccatgccggaaaccatgagcattgaacgccgcaagctactcaaagcattaggcgcgaatctggtgctgaccgaaggggcgaaagggatgaaaggcgctattcagaaagccgaagaaattgtcgccagcgatccgcaaaaatatctcctgctccagcagttcagcaaccctgccaacccggaaatccatgaaaaaaccaccggcccggaaatctgggaagacaccgatggtcaggtggatgtgtttatctccggcgtcggcactggcggtacgttaaccggcgtcacgcgttatatcaaagggacgaagggtaaaaccgatcttatcaccgttgcggtagaacccactgactccccggttatcgcccaggcgctggctggtgaagagatcaaaccgggcccacataaaattcagggcatcggcgcaggcttcatcccgggcaacctggatctgaaactgattgataaagtggttggcatcaccaatgaagaagccatttctaccgcgcgccgtctgatggaagaggaaggtattctggcgggaatttcttccggcgccgcggttgctgcagcgcttaagctgcaggaagatgaaagctttaccaataagaatattgtggttatcctaccctcatcaggtgagcgttatctgagcaccgcgttgttcgccgatctctttactgagaaagaactgcaacagtga

SEQ ID NO: 39403 - DNA, 828 bp, Salmonella typhi
atgactctgcagcaagagataatccaggcgcttggcgcgaaaccgcatatcaaccctgaagaagaaattcgccgcagcgtggattttcttaaagcgtacctgaaaacctatccctttttgaaatcgctggtgttaggcatcagcggcgggcaggattcgacgctggccgggaaactcagccagatggctatcaccgaattgcgggaagagaccggtgataatgcgctgcagtttatcgccgttcgtctgccttatggcgtgcaggccgatgaacaggattgccaggacgccattgcttttattcagccggacagagtactcaccgtcaatattaaaggcgccgtcctcgccagcgaacaggcgctgcgcgaagcgggaattgagctgagcgattttgttcgcggcaatgaaaaagcgcgtgagcgaatgaaagcgcaatatagcatcgccggtatgactcacggcgtcgtggtgggcaccgaccatgcggcggaagcgataaccgggttcttcaccaaatatggcgatggcggtaccgatattaacccgcttcatcgccttaacaaacgccagggcaaacagcttctcgcagcgctgggctgtcctgagcatctgtataaaaaagtccccaccgccgatttggaagacgaccgcccttcactgcctgatgaagccgcgctgggcgtaacgtatgacaatattgacgattacctggaaggcaaaacgctggactccgccatcgctaaaactatcgaaggctggtacgtaaaaactgaacataagcgccgtttaccgattacggtattcgacgacttttggaaaaagtaa

SEQ ID NO: 39404 - DNA, 486 bp, Salmonella typhi
atgcgtaaactgactgctctatttgttgcctctaccctggcgatgggtgctgcgaatctggctcatgccgctgagactaccaccgccgcgccagcggatgcgaagccaatgatgcagcataaaggtaaatttggcccacatcacgatatgatgtttaaaaacctgaacctgacagacgcgcagaagcaacaaattcgcgacattataaaagcgcagcgcgagcaaatggaacgtccgctgctggaagagcgtcgcgccatgcatgatattattgccagcgataccttcgataaagccaaagccgaagcgcaaattacgaaaatggaagcacagcgcaaggccaatatgctggcgcatatggaaacccagaataaaatttataacgttctgacgccggagcagaaaaagcaatataacgctaattttgagaagcgtctgacagaacgcccggcgcaagaaggtaaaatgcctgctgcggcagaataa

SEQ ID NO: 39405 - DNA, 969 bp, Salmonella typhi
atggataactttctggcgttgacgctaagcggcacgacaccacgggtgacgcaggggaagggcgcgggttttcgctggcgctggttaggccatggtctgcttgaactcacgcccgatgcgccggtcgaccgcgcgttaattctttctgcggggatacacggtaatgaaaccgcgccggtcgagatgctggataagctgctgtcggcgctgtattcaggcagcttgacgttaacgtggcgagtgctggtggtactcggcaatccgcaggcgctggcggcgggaatacgctattgtcacagtgatatgaaccgtatgtttggcgggcgttggcagtcctttgccgaaagcgatgaaacgcggcgggcgcgtgagctggagctaagtctggagaccttcttttcatctggccaggcgcgggtacgctggcatctggatctgcataccgccattcgtggctcgcatcatttgcgttttggcgtattgccgcagcgcgaccgcccgtgggaggcggattttctggcgtggctgggcgcggcaggactggaggcgttggtatttcatcaggcgcccggcggtacgtttacgcactttagctctgaacatttcggcgcgctttcctgtacgctggagttgggaaaggcgttgccgtttgggcaaaacgatctgacgcagttcagcgtaacctcgcaggcgttgtcggcgttgctgagcggtgtcgaaacgtcaacctcgttttcgccgccgctacgctatcgggtggtgtcgcaaatcacgcgtcacagcgacaagttcgcgctttatatggatgcgcaaacgctgaattttactgcctttgcgaagggaacgttgctggccgaggagggggataagcgcgtgacggtgacgcatgacgttgaatatgttctctttcctaattcctctgtcgcctgcggattgcgggctggattaatgctggaaagactgccctga

SEQ ID NO: 39406 - DNA, 1287 bp, Salmonella typhi
atgacgctatggataaacggcgactggataaccggtcagggcgaacgccgccgcaaaacgaatccggtgagcgaggagatactttggcaggggaatgacgctgatgcggcacaggtcgccgaggcctgtcaggcggcgcgcgcggcgtttcctcgctgggccagacagccttttgcggcacggcaggctatcgtagagaaattttccgtcctgctggaggcgcataaagccgatctcacggaggtcatcgcgcgtgaaaccggtaaaccgcgctgggaggcggcgacggaagtgacggcgatgatcaataagattgccatctcgattaaggcttaccatgccagaaccggcgaacaaaaaagcgaacttgtcgatggtgccgcgacgctgcgccatcgtcctcacggtgtgctggcggtattcggcccttataactttcccggccatttaccgaatggccatattgtgcccgcgttgctggcaggcaatacgctgatcttcaaacctagcgagctaacgccatggaccggggaaacggtaataaaactctgggaacgggcggggttaccggcaggcgttcttaatctggtgcagggcggccgggagaccggacaagcgctgagttcgctcgacgatctcgacggactgctgtttaccggcagcgccagtaccggatatcagcttcatcgtcagctatccggccagccggaaaaaatcctggctcttgaaatgggcggaaacaacccgctcattattgaggatgcgacaaatatggatgcggcggtacatctgacgctgcaatcggcgtttattaccgccggacagcgctgtacttgcgcgcgacgccttctggtaaaacagggcgcgcagggagatgcatttctggcgcggctagttgacgtcgccggacgtctgcagcccggcagatgggacgacgacccgcagccgtttatcggcggactgatttcagcgcaggcggcacagcatgtgatggaggcctggcgtcaacgagaggcattaggcggtcgcacgctactggcgccgcggaaggtcaaagagggaacctctctgctgacgcctggcatcattgagctgacgggcgtcgcggatgtgccggatgaagaggtgtttggtccgctgctgaacgtctggcgttatgcgcatttcgatgaggcgattcgtctggcgaataatacccgttttggtctgtcgtgtgggctggtgtcgacggatcgcgcgcagttcgaacaactcttgctggaggcgcgggcagggatcgttaactga

SEQ ID NO: 39407 - DNA, 480 bp, Salmonella typhi
atgatcagtctgattgcggcgttagcggtggatcgcgtcatcggtatggaaaacgccatgccgtggaacctgcctgccgatctcgcatggtttaaacgtaacacgttaaataaacctgtcgtcatgggacgtcacacctgggagtccatcggacgccccttaccgggacgtaaaaatattattatcagcagccagccgggcaccgacgatcgcgtgcagtgggtgaagtctgtcgatgaggcgattgccgcttgcggcgatgcgccggaaattatggtcattggcggcgggcgcgtgtacgagcagttcctgccaaaggcgcagaagctttatctgacgcatattgatgcggaagtcgaaggcgatacccattttccggattatgaaccggatgactgggaatcggtattcagtgagtttcacgatgccgacgcgcagaattctcacagctattgtttcgagattctggagcgtcgttaa

SEQ ID NO: 39408 - DNA, 822 bp, Salmonella typhi
atgaataatcgagtccatcagggccatttagcccgtaaacgcttcgggcaaaactttctcaacgatcggtttgtgatcgacagtattgtttctgctattaatccgcaaaaaggccaggcgatggttgaaatcggccccggtctggcggcgctgacggagccggtcggcgaacgactggataagctcacggtcattgaacttgaccgcgatctggcggcgcgtttgcaaacccatccgtttttagggccgaagctgactatttatcagcaggacgccatgaccatgaactttggcgaactgtctgcgcagttgggccagccgctgcgtgtgttcggcaatctgccctataatatctccaccccgctgatgttccatctctttagctatactgatgccattgccgacatgcactttatgttgcaaaaagaagtggtaaatcgtctggttgcagggccgaacagcaaagcgtatggtcgtttaagcgtgatggcgcaatattactgtcaggtgatcccggtgcttgaagtgccgccatccgccttcacgccgccgcccaaagtggactccgccgtggtgcgtctggttccacacgcaacgatgccttacccggttaaagatattcgcgtgttgagccgtattaccaccgaggcctttaaccagcgccgtaaaacgatccgtaatagtctcggcaatctttttagcgttgagacgttgacggaaatgggtattgacccggcaatgcgcgcggaaaatatctctgtcgcgcagtactgccagatggccaactatctgtcggaaaacgcgcctttgaaggagagttaa

SEQ ID NO: 39409 - DNA, 1344 bp, Salmonella typhi
atggatcagacatgttctctggaatcgttcctcaaccatgtacaaaagcgcgacccgcatcaaaccgagttcgcgcaagccgtccgtgaagtcatgaccaccctgtggccgtttcttgaacaaaacccccgttaccgccacatgtctttactggaacgtttggttgaaccagagcgcgtaatccagtttcgcgtagtgtggctggacgataaaaatcaggtgcaggtaaatcgcgcctggcgcgtgcagttcaactctgctatcggcccctataaaggcggtatgcgcttccatccttcggtaaacctttccatccttaagttcctcggctttgagcaaacctttaaaaatgccctcaccacgttgccgatgggcggcggtaaaggcggcagcgatttcgatccgaaagggaaaagcgaaggcgaagtgatgcgtttctgccaggcgctgatgactgaactgtatcgccatttagggccggataccgacgtgcctgccggggatatcggcgtgggcgggcgcgaagtgggctttatggcgggaatgatgcgcaagctttccaataacagcgcctgcgtcttcaccggcaaagggctttccttcggcggcagcctgattcgtccggaggcgacgggctatggcctggtctacttcaccgaagcgatgcttaaacgtcatggtctcggttttgaagggatgcgcgtcgccgtgtccggctccggcaacgtagcgcaatacgccattgagaaagcgatggcctttggcgcgcgcgtggttaccgcgtcggattcgagcgggacggtggtcgatgaaagtggcttcacgccagagaagctggcgcggctgtgtgaaattaaagccagccgtgacggtcgcgtcgctgactacgcccgtgagtttggcttaacctatctggaaggccagcagccctggagcgtaccggtggatatcgccctgccatgcgcgacgcagaacgaactggacgttgacgccgcgcgcgtactgattgccaatggcgtgaaagccgtggcggaaggggcaaatatgccaaccacgattgaagcgaccgatctcttccttgaggcgggcgtactgtttgcgccgggtaaagccgccaacgcgggcggcgtggcgacatcggggctggaaatggcgcagaacgccgcgcggttgagctggaaagccgagaaagtggacgcccgtctgcatcatattatgctggatatccaccacgcctgtgtcaagtacggcggcgacaataagcatactaactacgttcagggcgccaacatcgccggtttcgtgaaagtcgccgacgccatgctggcgcagggcgtcatttaa

SEQ ID NO: 39410 - DNA, 1209 bp, Salmonella typhi
atgatgctaatcctgaaagcctacaaattcagactggaaccaacgcctgaacagtcgcagcgtttgcggcagttatgtggttgcgcccgttttgtctggaatttaggtcttgcggagacaaagcgcatccttggttcaggcgaaaagttaccttcggctttcgagttgaacaggatgcttacagtgtggaaaaaaatgccgggacacatctttttacaggatgcttataccgacaatctgcaacaaaagttgaaagacctgcatactgcatggaaacgttgctttgataaaaagctcgcagctaaggccccggtatggaaacgaaaaaatgagggcagagactcaatccgttttgtgaactttgagaaatattgccgccttgaaaatcgcagagtgaagctaccgtcaggtcttgggtgggtaaaattccggcaatctcaacgtgtgaacggtaaaatcaaaaatgcgacaatcagtcagttagcgggacagtggtatatctcgtttcaggttgaagttgaaacggcagaacccaatcacacaagcacaacgatagtcggtctggacgcaggagtaacaaaactcgccacgctttcagacggtacggtataccaaccagtcaacagttttaaagcaagtcagcgcaagctggcaacactccagcggcagttaagccgtaaagtcagattcagcagtaactggcagaaacaaaagcgaaaagtccagcatctgcactcgcacatagccaatatccggcgcgactaccttcataaagttaccagtgaaatcagcaaaaaccacgcgatgatagtcattgaggatttgaaggttagtaacatgtcgaaatcggcaaaaggtacagcagaacagcacggacgaaacgtcaaggccaaatcaggtctgaaccgttcgatactggatcagggctggtatgaaatgcgccgccagcttgagtacaaacagctctggcgtggcggtcaggtgcttgcggttccgccagcatacacaagccagcgttgcgcgtgctgtggtcataccgcgaaagaaaatcgcctgtcacaaagtaaatttgtgtgtcaggcatgcggatatacagcgaacgctgatgtaaacggcgctcgtaacattttagcggcggggcacgccgttcttgcctgtggagggatggtgcagtcaggccgcccgtctgaaacaggaaccagacgctga

SEQ ID NO: 39411 - DNA, 996 bp, Salmonella typhi
atgactatcaaagtaggtatcaacggttttggccgtatcggtcgcattgttttccgtgctgctcagaaacgttctgacatcgagatcgttgcaatcaacgacctgttagacgcagagtacatggcatacatgctgaaatatgactccactcacggccgtttcgacggtactgttgaagtgaaagacggtcatctgatcgttaacggtaaaaaaatccgtgttaccgctgaacgcgatccggctaacctgaaatgggacgaagttggtgttgacgtagtggctgaagctaccggtatcttcctgactgacgaaaccgcgcgtaaacacatcaccgctggcgcgaaaaaagtggttctgacgggtccgtctaaagacaacaccccaatgtttgttaaaggcgctaactttgacaaatacgaaggccaggacatcgtttccaacgcttcctgcaccacaaactgcctggcgccgctggctaaagttatcaacgacaacttcggcatcatcgaaggtctgatgactactgttcacgcgactaccgcaacccagaaaaccgttgacggcccgtctcacaaagactggcgcggcggccgcggcgcatctcagaacatcatcccgtcctctactggcgctgctaaagcggtaggtaaagtactgccggaactgaatggcaaactgactggtatggcgttccgcgttccgactccgaacgtatccgttgttgacctgaccgttcgtctggaaaaagcggctacctacgagcagatcaaagctgctgttaaagctgctgccgaaggcgaaatgaaaggcgttctgggttacaccgaagacgacgttgtatctaccgatttcaacggcgaagtatgcacttccgtgttcgatgctaaagcaggcatcgcgctgaacgacaacttcgtgaaactggtctcctggtacgataacgaaaccggttactccaacaaagtactggacctgattgctcacatctccaaataa

SEQ ID NO: 39412 - DNA, 1287 bp, Salmonella typhi
atgacctggttcatagaccgacgtcttaacggcaaaaataaaagcacggtgaatcgccagcgctttttgcgtcgttataaagcacaaattaagcagtcgatttccgaagcgattaataaacgctcagtgaccgatgtcgacagcggagagtccgtctctattccaaccgatgatattagcgaaccgatgtttcatcaggggcgcggcggtctgcgccatcgcgtccatccgggtaacgatcactttatccagaatgatcgcattgagcgtccgcaaagcggtggcggcggcggttccggcagcggtcaaggtcaggccagccaggacggcgaaggccaggatgagtttgtttttcagatttcaaaagatgagtatctggatctgctctttgaagatttagcgctgcctaatctgaaaaaaaaccagcatcgccagcttaacgagtataaaactcaccgcgccggtttcacctcaaacggcgtgccggccaatatcagcgtggtacgttcgctacaaaactctctggcgcgccgtacagcaatgacggcaggaaaacgccgcgaactgcacgcgctggaaacggaactggagaccatcagccacagcgaaccagcgcaactgcttgaagaggagcggttacgtcgggagattgccgaactacgggctaaaatcgagcgagtgccgtttatcgacacttttgatttacgctataaaaattatgaaaaacgacctgagccctccagccaggcggtgatgttctgtctgatggacgtctcgggttcgatggaccaggcaaccaaagatatggccaagcgtttttacattctgctttatctgtttttgagccgaacgtataagaacgtagaagtggtttatatccgccaccatacccaggcgaaggaagtggatgaacatgagttcttttattcgcaagagaccggggggacgattgtctccagcgcgcttaaactcatggacgaagtagttaaagagcgctacgaccccagtcagtggaacatctatgcggcgcaagcgtcagacggtgataactgggccgacgattcaccgctgtgtcatgagattctggcgaaaaagctgctgccggtagtgcgctattacagctatatcgagattacccgccgcgcccaccagaccttatggcgcgagtatgaacatctgcaggcgacgttcgataacttcgccatgcagcatattcgcgatcaggaggatatttatccggtattccgcgaattgtttcagaaacagagcgccaatcaaagtgcataa

SEQ ID NO: 39413 - DNA, 984 bp, Salmonella typhi
gtgttaaaaaaatatcttccgcttttactcctgtgcgcggcgcctgctttcgccaaacccgttctcaccgtctatacctacgactcgttcgccgccgactgggggccaggcccggcggtgaaaaaagcgtttgaagccgattgcaactgcgagctgaaactggtggcgctggaggatggcgtttcgctgctcaaccgcctgcggatggaggggaagaacagcaaagccgatgtggtgttggggctggacaataatctgctggaggcggccacgcaaactaaactctttgccaaaagcggcgtggcgaatgaggcggtcaaggtgcccggcggctggaaaaacgacacatttgtgccgttcgattacggctatttcgcctttgtctacgataaaagcaagctgaaaaatccgccgaaaagcctgaaagaactggtcgagagcgatcaaaaatggcgggtgatttatcaggatccgcgtaccagtacgccagggctggggctgttactgtggatgcgcaaagtttatggcgataacgcgccgcaggcctggcaaaaactggcggccaaaacggtgacggtgacgaaaggctggagcgaggcctacggtttatttctgaaaggtgaaagcgatttggtgctcagttacaccacctctccggcgtatcacattattgaagagaagaaggacaattacgccgccgcgaacttcagcgaaggccattacttacaggtagaagtcgcggcgcgtaccgtcgccagtaagcagccggaactggcggagaaattcctcaaatttatggtttctccggcgtttcagaacgccatacccaccggcaactggatgtacccggtagcggacgtcgccttacccgcagggtttgaatcattggccaaacccgccacaacgctggaattcacgccgcaacaagtggcagcacaacgccaggcatggattagcgaatggcaacgcgccgtcagccgttaa

SEQ ID NO: 39414 - DNA, 1659 bp, Salmonella typhi
atgccctcaggtcgcctgcaacaacaatttatccgtctctggcaatgttgtgacggtaaaacgcaagacaccacgcttaatgagctggcggatctgctgaactgttcgcgtcgccatatgcgtacgctgctaaatacgatgcaggcgcgcggttggctaacatgggaagccgaggtcggacgcggaaagcgttcgcgtctgacgttcctgtataccggactggcgctgcaacagcagcgggcggaagacctgctggaacaagatcgaatcgatcaactggtacaactggtcggcgataaaagcgctgtcaggcaaatgctgatttcccatctgggacgcagcttccgccaggggcggcatattctgcgggttctttactatcgtccgatgcacaatctcctgccgggaaccgcattacgtcgctcggaaactcatattgcccggcaaattttcagttcgctcacgcgggtaaatgaggaaaacggggaactggaagcggacattgcgcaccactggcagcaaatttcccctttactgtggcgcttctacctgcgccccggcattcattttcatcatggccgcgagctggagatggaagatgtcatcgcctcgctgacgcgtatcaatacgcttccgctttactcgcacatcacaaagatagactcccctaccgcgtggacgctggatattcatctttcccagccggatcgctggttgccgtggctgctgggccaggtcccggcgatgattttgccgcgggagtgggaaacgctggctaatttcgccagccaccctatcggcaccgggccttatgccgtgcggcgtaatacgccaaaccagctcaagatactcgcctttgatgattacttcggctatcgggcgttgatagacgaagtgaacgtctgggtactgccggatatcagtgaagaaccggcctgcggcttgatgctggaagggccaatacaaggcggtgaaaaagcgatagaaagccgactggaagaggggtgctattacctgctattcgacgccagaacgccgcgcggcgcgcatccgcaggtcagagaatgggtaagccacgtcctctcccccaccaatttactctatcatgccgatgaaccgctacagcagctctggttcccggcctatgggcttttaccgcgctggcaccacgcccgtccaggcccgggcgaaaaacccgccgggctggaaaccctcacgctgaccttctatcgcgaacacattgagcaccgggttatcgcccgtatcatgagcgcgcttctggctgaacatcaggtgcatctgcatattcaggagatcgactacgatcaatggcacgccggcgagatcgaaagcgatatctggctcaatagcgctaactttacgctgccgctggatttctcgctgttcgcgcacctgtgcgaagtaccgctcttgcagaactgcattccgcgcgactggcaggacgacgccgcgcagtggcgcgctggcgagatgaacctggcgaactggtgccagcaactgctggccaacaaagcgattgtgccgttgatccaccactggctgattatccagggacaacgcagtatgcgcgggctgcgcatgaataccctcggctggtttgattttaaatcggcgtggtttgcgccgccagatccttaa

SEQ ID NO: 39415 - DNA, 249 bp, Salmonella typhi
atgggtattctttcatggattatttttggacttattgcgggtattttggctaagtggatcatgccaggtaaagatggcggcggattctttatgacgatcattctggggatcgtcggtgcggtagtcggaggatggatcagtacgttctttggctttggcaaagtggatggtttcaacttcggcagctttgcagtcgcggtgatcggcgcgattgttgtgctgttaatctacagaaaaatcaaaagctaa

SEQ ID NO: 39416 - DNA, 1476 bp, Salmonella typhi
atggcaaaacagaaaaaacgtggcttcttttcctggttgggcttcggtgataaagagcagaagcaggaacagaccgaagaacagcagattgttgaggaacaacgaccggttgagccccctgttgaaacggcggcagacgtagacgcgcaaacgcccgcgcacagcaaagcagaaacagaagcctttgcggaagaggtggtggacgttactgagaaagttcaggagagcgaaaaaccgcagccggtagagccggagcccacggcggccattgagatggcagcgccgcagatcgcggtggaacgcgaggaattgccgctgccggaagaggtcaaagacgaggctatctcgccggaagagtggcaggccgaagcggaaaccgtagaggtcattgccgcggtagaagaagagggcgaaaacgcggcgaaattcaccgacgaagagctggaagcgcaggcgctggccgctcaggcggcggaagaggcggtgatggttgttccgccggcggaagaagacgcgccggtggaagcgatcgttcaggagcaggaaaaaccgactaaagaaggtttctttgcccgcctgaaacgcagtctgctgaaaaccaaagaaaatctcggttccggatttatcagtctgttccgcggcaagaaaatcgacgatgatttgttcgaggagctggaagagcagttgctcatcgctgatgtcggggtggaaaccacgcgtaagattatcgctaatctgacggaaggcgccagccgcaaacagcttaaagatgccgaggcgctgtatggtctgttgaaagacgagatgggcgagattctggcgaaggtagacgaaccgcttaatattgaaggtaaaacgccttttgttattctgatggttggcgtgaacggcgtgggtaaaaccaccactatcggtaaactggcgcgccagtttgagcagcagggtaaatcagtgatgctggcggcgggggatactttccgcgcggcggcggtcgaacagctacaggtctggggacagcgtaacaacattccggttatcgcccagcataccggcgcggactccgcctcggtgatttttgacgctatccaggccgcgaaggcgcgtaatgtggatgtgttaattgccgatacggcagggcgtttgcagaacaagtcgcacctgatggaagagctgaaaaaaatcgttcgcgtcatgaaaaagctggacgaagaagcgccacatgaagttatgctgaccattgacgccagcaccggacagaacgcggtaagccaggccaaactgttccatgaagcggtgggcttaaccggtattaccctgaccaagctggacggtacggcgaaaggcggggtgattttctcggtagctgaccagtttggcattcctatccgttacattggcgtgggcgaacgtatcgaggatttgcgtccgtttaaggcggacgattttattgaggcactttttgcccgagaggattaa

SEQ ID NO: 39417 - DNA, 1278 bp, Salmonella typhi
atgaaaccgatgcatattgcgatggctctgttctctgcggcgatgttcttcgttctggctggcgtctttatgggcgtacaactggagctggacggcaccaaactggtggtggataccgccgccgacatccgctggcagtggatctttatcggtacggcagtggtttttttctttcagttgctgcgtccgatgttccagaaagcggtgaagcacgtctccggaccgaagtttattctgccggcgatcgatggctctaccgttaagcaaaagctgtttctgatggcgctgttggttatcgccgtggcgtggccgtttatggtgtcgcgcggtagcgtcgatatcgccactatgaccatgatttatatcatcctcggtctggggctgaacgtggtggtggggctgtccggcctgctggtattgggctacggcggcttttacgccatcggcgcttatacctttgcgctgcttaaccactattacggtttgggtttctggacctgcctgccgctggcgggactggtctccgccgccgccggtttcctgctcggcttcccggtactgcgcctgcgcggcgactatctggcgattgtgacgctcggcttcggcgaaatcgtccgtatcctgttgctcaacaacactgaaattaccggcggcccgaacggcatcagccagatccccaaaccgacgctgtttggtctggagtttagccgcaacacccgagaaggcggctgggataccttcagcaatttctttggcgtgaagtacgacccatccgaccgggtcattttcctctatctggtggccctgttgctggtggtcctgtcgctgtttgtcattaaccgcctgctgcgtatgccgctgggccgggcgtgggaagcgttgcgtgaagatgagatcgcctgtcgctcattaggtttaagcccgacgcgcatcaagctgaccgcttttactatcagcgccgcgtttgccggtttcgccgggacgttgtttgccgcccgccagggctttgtcagcccggaatccttcactttcgccgaatccgccttcgtgctggcgattgtggtgctgggcggaatgggctcgcagtttgcggtgatcctggcggcggttctgttggtggtgtcgcgcgagttgatgcgcgatttcaacgaatacagcatgttgatgctcggcggtttaatggtgttgatgatgatctggcgcccgcagggattgctgccgatgacgcgtccgcagttgaagctgaaaagtggtcaggcgaaaggagagcaggcatga

SEQ ID NO: 39418 - DNA, 1317 bp, Salmonella typhi
atgatatcgttacgacatacagctttaggactggcgctgagtctggcatttacgggtcaggcgttggccgtcaccactattccattctggcattcaatggaaggggagttaggcaaagaagttgattcactggcgcaacgtttcaaccaggccaatccggattacaaaatcgttccggtctataaggggaactatgaacagaacctgagcgccgggatcgcggcattccgtaccggcaacgcgccggcaatattgcaggtttatgaggttgggacagcgaccatgatggcctcgaaagccattaagccggtttatgaagtgtttaaagacgccggtattaactttgacgagtcccagtttgtaccaaccgttgcaggctactacaccgatgctaaaagcgggcatctgctctcccagccctttaacagctccacgccggtactgtactacaacaaagacgcctttaagaaagccggtttagatccggagcagccgccgaaaacttggcaggagctggctgactataccgcgaaattgagagcggcaggcatgaaatgcggttacgccagcggctggcaaggctggatccaactggaaaacttcagcgcctggaacggtctccccttcgccagtaaaaacaatggctttgacggtacagatgcggtgctggagtttaataagccagagcaggtgaaacatatcgcgctgctggaagagatgaataagaaaggcgattttagctatgttgggcgtaaggacgagtctaccgagaagttttataacggtgactgcgcgatgacaaccgcgtcctccggctcgctcgccaatatccgccagtatgccaaatttaactatggcgtgggtatgatgccgtatgacgctgatatcaagggcgcgccgcaaaacgccattatcggcggagccagcctatgggtcatgcagggtaaagataaagaaacctataccggcgtcgccaaattcctcgacttcctggcaaaaccggaaaacgctgctgaatggcatcaaaaaaccggctacctgccgattaccaccgccgcctacgagctgacccgagagcagggttattacgataaaaaccccggtgcggatatcgccactcgccagatgttgaataagccgccgttacccttcaccaaaggcttgcgtctgggcaatatgccgcagattcgtaccatcgtggacgaagagctggaaagcgtctggaccgggaagaaaaccccacaacaggcgttggataccgcggtggatcgcgggaatcagttactgcgtcgttttgagaaagcgagcaaatcttaa

SEQ ID NO: 39419 - DNA, 741 bp, Salmonella typhi
atgagtaactggccttatcctcacattgtcgcccatcgcggcggcggtaaactggcgccggaaaacactctggcggcgattgacgtgggcgcgcgatacgggcacaccatgattgagtttgatgccaagctgtcgaaagacggcgaaattttcctgctgcatgacgataacctggagcgcaccagcaatggttggggtgtggcgggcgagttgaactggcaggatttattgcgtgtggacgctggcggttggtttagcggcgaatttaaaggcgagccgctgccgttgctctcgcaggtggcggagcgctgccgtaaacacggcatgatggcgaatattgagatcaaaccgacaacggggagcggaaggctaacaggacgtgtcgtggcgttggccgcccgcgaactgtgggccgggatgacgccgccgctgctttcttcctttgagatagaggcgctggaagcggcgcaggcggcagtacctgaactgccgcgcgggttactactggataaatggcgtgaagactggcgtgaactgacgacccgtctgggctgtgtttccctccatctcaaccataaattactcgatgagacgcgagtgcaagagattaaggccgcgggtctgcggattctggtgtataccgtcaatcagccccagcgggcggcagagctgctgcgctggggcgtggattgtatctgcaccgatcgcattgatgacatcggccctcactttcagttttaa

SEQ ID NO: 39420 - DNA, 1743 bp, Salmonella typhi
atgaaaccaacgtttatgcgctgggtggcgatcgccgctctgctggccggggggacgtttagcgcggtggccaatcctcccgtcgcgccgccagtctcctatggtgttgaagaagatgtctttcatcctgtacgggcgacgcaagggatggtggcgtccgtggatgcaatggcgacgcaggttggcgtggatatcttaaagcagggcggtaatgccgtggatgccgccgtcgccgtgggctatgcgctggctgtcacgcatccgcaagccgggaatctgggcggcgggggatttatgctgctgcgcactaaagatggcgctaccacggcgatcgattttcgtgaaatggcgccggctgccgcgacccgtgatatgttcctcgacgatcagggtaacgccgatgcgaaaaagtcgctgacgtcgcatctggcatccggtacgccgggtaccgtggcgggtttctcgctggcgctggagaaatacggcacgatgccgctgaataaagtggtgcgtccggcgatgaagctggcggaagagggttttgtggttaacgatgcgctggccgacgacttaaaaacttacggcagcgaagtgatccccaaccatgagaacagcaaagccattttctggaaagacggcgagccgctgaaaaaaggcgataagctgatccagaagaatctggcgaaaagcctggaaatgattgccgaaaacggcccggctgcgttttataaaggggcgattgccgaccagattgccggggaaatgcagaagaacggcggtctgatgaccaaagaggatttagccagctataaagccgttgagcgtacgccaatcagcggtgactatcgcgggtatcaggttttctccatgccgccgccgtcctcgggcggtattcacatcgtgcaaatcctcaatattcttgaaaatttcgacatgaagaagtacggctttggcagcgccgatgccatgcaaatcatggcggaagcggaaaaatacgcctacgctgaccgctcagagtatctgggcgatccggactttgtgaaagtgccgtggcaggcgctgaccaacaaagcctatgcgaaaacgttggccgatcaaatagatattaataaggcaaaaccttccagccagatcaaaccgggcaagctcgccccgtatgaaagcaaccagaccacccacttctcggtggtggataaagacggcaatgctgtggcggtgacctataccctgaacaccaccttcggcacaggaattgtggcgggaaataccggtattctgctgaataatcaaatggatgatttttctgctaagcctggtgtacccaatgtttatggcctagtgggcggcgatgctaacgcggtcgaaccaaaaaaacgtccgctgtcgtcgatgtcgccgactatcgtggtaaaagacggcaaaacctggctggtgaccggtagccctggcgggagtcgaatcatcactactgtgctgcaaatggtagtgaacagcattgattttggcatgaacgtcgccgaagcgaccaacgcgccgcgtttccatcatcaatggttgccggacgaactgcgggtagaaaagggcttcagccccgatacgctgaagttgctggaacagaaagggcagaaagtcgcgctgaaagaagcgatgggcagcacccaaagtattatggttggaccggatggcgaactgtacggtgcgtctgacccgcgttccgtggatgatttaacggcgggatactga

SEQ ID NO: 39421 - DNA, 1386 bp, Salmonella typhi
atgttaaaaatttttaatacactgacgcgccaaaaagaggaattcaaacccattcatgccggggaagtcggcatgtacgtgtgtggtatcaccgtttacgatctctgccacattggccacggacgcacgtttgtcgcttttgacgttgtcgcgcgctatttgcgttttctcggttataagctgaagtatgtgcgtaacattaccgatatcgacgataaaattattaaacgcgccaatgaaaacggcgaaagttttgtcgcgctggtcgacagaatgattgcggaaatgcatcaggacttcgacgcgctgaatattctgcgtccggacagcgagccgcgtgcgacgcaccatattcaggaaattatcgagctcacccgcaccttaatcgagaaagggcacgcctatgtggcggataacggcgatgtgatgtttgatgtaccgaccgatccgacttatgggcagctttcccgtcaggatcttgagcagcttcaggcgggcgcgcgcgtggatgtcgttgacgtgaagcgtaacccgatggacttcgtgctgtggaaaatgtcgaaagagggcgagccgagctggccgtcgccgtggggcgaagggcgtccgggctggcacattgaatgttcggcgatgaactgtaagcagttgggcaaccattttgatattcacggcggcggttccgatctgatgttcccgcaccatgaaaacgagattgcccagtctacctgcgcgcatgacggcgaatacgtcaactactggatgcactccggtatggtgatggtggatcgcgagaagatgtccaaatcgctgggcaacttctttaccgtgcgcgacgtgctgaaatactacgatgcggaaaccgtgcgctacttcctgatgtccgggcattaccgtagccaactgaactacagcgaagagaacctcaagcaggcgcgcgcctcgctggagcggttatacactgcattgcgtggaacggataaatcagcggccccggcgggcggcgaagcgtttgaagcgcgtttcgtggaggcgatgaatgacgatttcaatacgccggaagcctactccgtcctgtttgacatggcgcgtgaagtcaaccgtctgaagggcgaagatatgaccgccgcgaatgcgatggcgtctcatctgcggaagatttccggcgtgctgggactgctggagcaggagccggatgttttcctgcaaagcggcgcgcaggcggatgacggtgaagttgcggaaattgaagccttgattcaacagcgtctggatgcccgtaaagcgaaagactgggcggcggcggacgcggcgcgcgatcgtctcactgaaatgggtattattctggaagatggcccgcagggcaccacctggcgacgtaagtaa

SEQ ID NO: 39422 - DNA, 693 bp, Salmonella typhi
atgctgaatagtataaaattaggatttattgttcttctcacgttatttacttcgctgaacgtacaggcggcgggggggattgcattaggcgccacgcgtgttatttatccctcggcggcgaaacagacttctctggcaatcagtaatagcgatactcaagaacgttacctcgtcaattcatggatcgaaaataacgctgggcagaaagaaaaaacgtttatcgttacgccgcctttattcgtcagcgagcccaaaagtgaaaacacgctgcgtattatctacgccgggcaaccgctacccgaggatcgggagtcgttattctggatgaacgtgaaagccatcccgtcggtcgataaaagtcatattgaaggaaaaaacgttctgcaactggcgattctgtcgcgcatcaaactgttcgtgcgtccggcgaatttgccgcagacgccggaagacgcgccgaccttgctgaaattttcccgtgtcggcaaccatctcaagataaccaacccatctgcttattacctcacgctggtcaatatcagcgtgggtgcgaaaaagattgataacgtgatgatcgcgccaaaaagcgacatgcaaattcccttaccgactggcgcgcagggcagcgtgacatttcagaccgtcaatgattacggcgcattgacgtcggcgacaacagccagtctcggttaa

SEQ ID NO: 39423 - DNA, 2613 bp, Salmonella typhi
atgaagaagacaacctggtttgcagggcgatttcccggctatgtatcaccgttaagcggcgtggcgctgtcggtgttggcagctctgtgtccgctgacgagccgcggcgaaagttatttcaaccctgcgtttttgtcggcggataccgcgtccgtggcggatttatctcgctttgaaaaaggtaatcatcagcctcccggtatttaccgggtggatatctggcgtaacgacgaattcgtagcgacgcaggatattcgttttgaggcgggcgccgtgggcgccggcgataaatccggcggcctgatgccttgttttacaccggagaggattaaacggctgggcgtgaataccgcggtgttccctgtctcagataaaggcgtcgataccacgtgtattcaccttcctgagaaaatcccgggcgcggaggtcgcgttcgatttcgcgtcgatgcgcttaaacattagcttgccgcaggcgtcattgctcaacagcgcgcgtggctatatcccgccggaagagtgggatgaagggatacccgccgcactcattaattacagttttaccggtagccgcggaacagacagcgatagctattttttgagtctgctgagcgggttgaactatggcccctggcggctgcgtaataacggagcctggagctattcgaaaggggacggctatcattcgcaacgctggaacaacattggcacctgggtacagcgcgccatcattccgctaaaaagcgaactggtcatgggggacagccataccgggaacgatgttttcgacagcgtcggctttcgcggagcgcggctgtactcttctgacaatatgtatcccgatagcctgcagggctacgcccccacggtcagagggatcgcccggacggcggcaaagctgacgatacgacagaacgggtatgttatctaccaaagctatgtgccgccgggcgcgtttgcgattaccgatcttaatcctacctcttccagcggcgaccttgaggtgacggtagatgaaaaagacggtagccaacaacgttacacggtgccttactctaccgttccgctattgcagcgtgagggcagggtgaagtatgacctggtggccggggattttcgcagcggcaatagtcagcagtcttcgctattctttttccagggaacggtgattgccggcctgcctgcggggctgacggcttacggcggtacgcaacttgccgatcgttaccgtgctgtggtggtcggggcggggcaaaatttgggtgactggggggccgtgtcggtcgatgtcacacatgcgcgtagccaactggcagatgacagcacccatcaggggcaatcgttgcgttttctgtacgccaaatcgctgaataattacgggactaattttcaattgctgggttaccgctattccacgcgcggattttacaccctggatgatgtggcataccgcagtatggaagggtacgactacgaatacgatagcgacggacgccgccataaagtgccggtggcgcagagctaccacaatctccgctacagcaaaaaaggccgctttcaggtcaatatttcgcaaaatctggggaattacgggtcactgtatctttccggcagtcaacaaaattactggaatacggcggataccaatacctggtatcaactgggatacgccagtggatggcaaggcataagttattcgctgtcatggtcgtggagcgagtcggtggggatctcaggcgccgaccgcattctggcattcaatatgtccgttccgtttagcgttctgaccggacggcgctatgcgcgcgacactattcttgatcgtacttatgccacgtttaacgccaaccgcaaccgcgacggcgacaatagctggcagaccggtgtgggcggcacgcttctggaaggacgtaatctgagctacagcgtgacgcaggggcgtagcagtaccaatggtcatagcggcagcgccagcgctagctggcaggcgacgtatggcacgctgggcgtgggatataactacgatcgcgatcagcatgactataactggcaactttccggcggcgtggtcggtcatacggatggtattacgtttagccaaccgttgggcgataccaatgtcttgattaaagcgccgggagcgaaaggcgtgcgcatcgaaaaccagaccggcgtgaaaacggactggcggggctatgcggtaatgccctacgccacggtatatcgctataaccgcgtcgcgttagataccaacacgatggacaaccataccgatgtcgaaaataacgtcagcagcgtggtgccgactgaaggcgcgctggtgcgggctgcttttgatacgcggataggcgtaagggcaatcattaccgcgaggcttggcggacgtccgttaccgtttggcgcgatagtacgagaaaccgccagcggcattaccagcatggtcggcgatgacggacaaatttatctgagcggcttgccgctaaaaggtgaactgttcatccagtggggagaggggaaaaacgcgcgttgtatcgccccttacgccctggcggaggatagcctgaagcaggcgattacgatagccagcgcgacctgtatccgtccgtcgtcataa

SEQ ID NO: 39424 - DNA, 1035 bp, Salmonella typhi
atgaaaggtttcctgcaaaccgtaacaggcccggtggcgcatacggatatggggctgacgctaccgcatgaacatctgtttaacgatctgtcttcggtcgtagacgagccacattatgctttttcacagcaactggtgggaaagaaagtcagtgctgacctgcagtgggggctgaaacacgacccatactgctgcgccgataacatggacagaaaagagattgatgatgttatcttcgaaatcaataactttatgtctttgggcggcaggacgattgtcgacgccaccggttcagaatccattggacgggatgcctcagcgctacgagaagttgccttaaaaacgggtttgaatatcgttgcgtcatccgggccttatctggagaaatttgaaagcacccggatccataaacctgttgagctgttagcctcactcattgataaagaactgaatcagggtattggcgagacggatattcgcgctggcatgatcggtgaaatcggcgtatctcccgcgtttacccaagcggagcgtaacagcctgcgggcagcgtctctggcacaatgtaacaacccccacacggcgatgaatatccatatgccagggtggctgcgactgggtgatgaggtgctggatatcgtgctggaagaaatgaacgtctctccggcaaaagtctcgctggcgcattcggacccttcaggaaaagatgtcgtctatcaacgtaaaatgctcgaccgcggcgtatggcttgaatttgacatgattggtctggacatcacctttccaaaagaaggtgtcgcgccgggcgttcaggagaccgcagatgcagtagcgaatctgattgcactgggttacgccgaccaaatcgttttaagccatgatgtttttctcaaacagatgtgggcgaaaaatggcggaaatggctgggggtttgtcccgaatgttttcctcgcctatttggctgctcgcggagtagacaacgatactctgcgcaagctttgtattgataatccagcccgattactcacggcataa

SEQ ID NO: 39425 - DNA, 1317 bp, Salmonella typhi
atgccattagtcatcgttgctatcggtgttatcttgttacttcttctgatgatccgcttcaaaatgaacggatttatcgcccttgtcctggtagcgctcgctgtcgggttgatgcagggaatgccgctggataaagtcatcggctccatcaaagccggtgtcggcggtacgcttggcagtctggccctgattatggggttcggcgccatgctgggcaaaatgcttgccgactgcggcggcgctcaacgtatcgccactaccctgatcgcgaaatttggtaaaaagcatattcagtgggccgtagtgttaaccggctttaccgtcggcttcgctctgttctatgaagtgggcttcgttctgatgctgccgctggtattcaccattgccgcagcggcgaatatcccgttactgtacgtcggcgtgccgatggccgcggcgctctccgtcacacacggcttcctgccgccgcacccgggtccaaccgcgatcgccacgattttccatgccgatatgggtaaaacgctgctgtttggtacgattctggcgatcccgaccgtgatccttgccggaccggtttacgcccgttttctgaaaggcatcgataagccgatcccggaaggcctgtacagcgcgaaaacctttacggaagaagagatgccgggctttggcgtcagcgtctggacgtcgctggttccggtgattctgatggcgatgcgtgcggttgccgagatgattctgccaaaaggccacgctttcctgcccgttgccgagttcctgggcgacccggtaatggctacgttgattgccgtactgattgcaatgttcacctttggcctgaaccgcgggcgttcaatggatcagattaacgatacgctggtctcttccatcaaaattatcgccatgatgctgctgatcatcggcggcggcggcgcgttcaagcaggtgctggtcgatagcggcgtggataaatacatcgcttcaatgatgcatgaaaccaatgtctctccgctgttgatggcgtggtctatcgcggcggtgctgcgtatcgcgctgggctctgcgactgtcgcggcgattaccgcaggcggcattgcggcgccactgatcgccacgaccggcgttagtcctgaactgatggttatcgcagtcggttccgggagcgtgattttctctcacgtcaacgacccaggcttctggctgttcaaagagtatttcaatttgactatcggcgagaccattaaatcctggtcgatgctggaaacgatcatctccgtctgcggcctgatcggctgtctgctactgggtatggtggtttaa

SEQ ID NO: 39426 - DNA, 1119 bp, Salmonella typhi
atggcgctgaatgattttcacgtttctgaaccttatacgctcggtattgagctggagatgcaggtgatcaatccacctggctacgatttaagtcaggactcttctacgctgatcgacgccgttaagccccaacttactgcgggagaaattaagcacgatatcaccgaaagtatgctggagatggccacgggcgtctgccgcgatattgaccaggtggcggcccaactttctgccatgcagcacgttattttacaggcggcgtcggaacaccatctcggcatttgcggcggcggtacgcacccttttcaaaaatggcagcgtcaggaggtctgtgataatgagcgctatcaacgcacgctggaaaatttcggctacttaattcaacaggcgacggttttcggtcagcatgtccacgtcggctgcgcgaacggcgacgatgcgatttatcttttacacgggctgtcgcattttgtgccgcactttattgcgctctccgccgcgtctccctatatgcaaggatctgacacccgttttgcctgcgcgcgcctgaatattttttccgcttttcccgataacgggcccatgccgtgggtcagtaactggcaagagtttgccggactatttcgtcgtctgtcttacaccacgatgatcgacagcatcaaagatttgcactgggatatccgccccagcccggcctttggcacggttgaggttcgggtgatggatacgccgctcactcttgatcatgccatcaatatggcaggattgattcaggcgaccgcgcactggctgctgaccgagcgtccctttaaaccgcaggaacaagactatctgttatataaattcaaccgttttcaggcttgccgctatggtctggagggcgtgctaaccgatgtctataccggcgaccgccgtcgcctggcagatgatacgctgcgtctgctggacaacgttaccccctctgcgcgtaagctgggcgccgacagcgccattgacgcgctacgtttgcaggtgaaaaaaggcggtaacgaagcgcaatatatgcgggagtttattgccgacggcggatcgctgataggcctggtacaaaaacattgtgaaatctgggcgggacaatag

SEQ ID NO: 39427 - DNA, 3885 bp, Salmonella typhi
atgacgcagcgtttaccgttagtcgccgcccagccggggatctggatggcggaaaaactctctgatttaccctccgcctggagcgtggcgcactatgtggaactgaatggcgagctggatgcccccttgctggcaaaagcggtagcggtagggatgcaacaggcggatacgctacggatgcgttttaccgaagagaacggcgaggtctggcaatggatagatcctgagcacaccttcggcgaacccccgattgccgatttacgcgaccagcccgatccgcatctcgcggcgctggcgttaatgcaggcggatttacggcaaaacctgcgcgcagatagcggtaagccgctggcgtttcaccagttaatccgcattgatgatacccgctggtattggtatcagcgctatcaccatttgctggtggatggctttagcttcccggcgataactcgccagattgcggcgatttatcgcgcctggcagagcgacgcccctacgccggagtcgccttttaccccctttgtggatgtggttgaggaatatcagcgctatcgccagagcgaggcctggcagcgtgacggcgccttctgggcgcagcagcgccgcgagctgccgccgccggcgtcaatgtctgccgcgccgttgccggggcggtcggcgagcgcggatattctgcgtatgaaattgagcgcgccggcgggggcgtttcgccaactggcggcgcacatgcctgagataccgcgagcggatcttgccctggcgctggtgacgttgtggctgggacgattatgtgggcgtatggattatgccgccggatttatctttatgcggcggatgggctcagcggcgttaacggcgaccgggcctgtccttaacgtgttgccgctggcggttaaccttcatgcgacggaagatctgccaacgctggcgaagcgtcttgcggcgcagttaaagaagatgcgccgccaccagcgttacgacgccgaacagattgtacgcgatagcgggcgagccgcaggggaaacgccgctatttggcccggtgctcaacataaaagtatttgattatcatctggattttcctggcatacaggcgcaaacccataccctggcgacggggccggttaacgatcttgaactggcgctttttccggatgaaaacggcggtctggatattgaattgctggcgaatgcgcagcgttacgatgacgccacgctttcccgccatgccttacggttgatggcgcttatcacgcagtttgctgataacccggcgctgcgctgcggcgatgcgcaaatgctgctggcggaagaacaaacgcaattaacacaccttaataatacggcggtaacgattcccgccgccacgcttagcgatttggtggcgcagcaggcgcaaaaaacgccagaggcttccgcgttggcagatgcgcattatcactttacctaccgtgaaatgcgcgaacaggttgtggcgctggcatacgcgctgcgggaacgcggcgttcagcctggcgatagcgtggcggtggcgttgccgcggtcggtttttctgaccttagcgctgcacggcattgtcgaagcgggcgccgcctggctgccgctggataccggttatcctgacgatcggctgcgaatgatgctggaagatgcgcagccgaaactgttaattacgactcaggcgcagctggcgcgctttcacgatattccggggatggaatatttgtgttatagccaaccgctaccggtcagtgacgccactccgctggggctgtcgctaccgcatcataccgcttacatcattttcacctctggttcgacgggcaggccgaaaggggtgatggtgggacaaacggcgatagtcaaccggctgctgtggatgcaggatcactatccgttgacggcggatgatgtagtagcgcaaaaaacaccgtgcagttttgacgtctcagtatgggagtttttctggccgtttatcgccggggcgaaactggtgatggctgaaccggaagcgcaccgcgatccgctcgcgatgcagcggttctttgcgcaatacggcgtcacgaccacccattttgtgccgtcgatgctggcggcctttattgcctcgctcacgccagcgtcggctgggaaaagctgcgcttccttaaagcgcgttttctgtagcggcgaggccctgccgacggcgctgtgccgcgaatgggagacgttaaccaacgcgccgctacacaatctgtacgggccaacggaggccgcggtggatgtgagctggtatccggcctgtggcgatgagctggcggctgttgacggcaacagtatcccgattggttatcccgtctggaataccggtttacgtattctcgatgcgcatatgcagccggtgccgccgggcgtggctggcgatctctatcttaccggtatccaactggcgcagggctatctggggcgtccggatcttaccgccagccgttttatcgccgatccttttgcgccaggtgaacggatgtaccgtaccggagatgtggcgcgctggctggattccggcgtggtggagtacctgggacgcagcgacgatcagctcaaaattcgggggcaacgtattgaactgggtgagattgaccgcgtcatgcaaacgctgccggatgttgaacaggcggtagcacatgcctgcgtctttaatcaggcggcggcgacgggcggggatgcccggcaactggtcggctatctggtgtcgcactccggtttaccgctggatttaccggcgctgcaggataaattacgccaaaaacttcccgcgcatatggtgccggttgtgctgttgcaacttgccagcttgccgcttagcgctaatggcaagctggatcgcaaagccctgccgctgccggatctgacgccgcgcgtgaaagggcgtgcgccgcagtccgcaacggagattgctgtcgccgcggcgttttcccgcctgctgggctgtgagattaacgacgttgaaagtgatttctttgcgctgggcggacactcgctgctggcgatgaaactggccgcgcagctaagccagacgtttaaccgccaggtgacgccggggcaggtgatggtggcgtctgacgtggcgcagttgagtaagctgctcgatactgacgatgacgaacgctcgcgcaatctggggttcgggccgctgttgccgctgcgtgaaagcgatggtccaacgttattttgtttccatccggcgtcggggttcgcctggcaatttagcgtattatcacgctatctcagcccgtcgtggtcgattatggggattcagtcgccgcgccccgttggccctatgcaaatcgcaaccacccttgatgaggtatgtgaacatcatctggcgacattgctcgcccggcagccgcatggcccttattatttattaggctattcgctgggcgggacgctggcgcaagggatcgccgcccggttgcgcgcgcgcggtgaaacggtggcgtttttggggttactggacacctggccgccggaaacacaaaactggcggggaaaagaggcgaatggcctcaatccggacgtattggcggaaattgaacgcgaacgcgcagcgtttgtcgccgcgcagcagggaaatgcctccgacgccttatttaccgccattgaaggcaattatgcggatgccgtccgtttgctgacgacggcgcatagcgcaccgtttgatggacatgccacgctctttgtggcggataaaacggtgccggaagacgtatcgcctgaacagagctggtcgccgtggatagcgtctttggctatttatcgccagccgtgcgcgcatgtagatattatttctccctccgcttttgaaactatcgggcccatcatcagcgaacttattaataaataa

SEQ ID NO: 39428 - DNA, 795 bp, Salmonella typhi
atgaccgaatccgtagcccgtttgcgcggcgaccagttaacgctgggttatggcagctataccgtcgcaaaaaaccttaatgtttcgattccggacggccattttaccgccatcatcggccctaacggctgcggcaagtcgacgttgctacgtacgctaagccgtctgatgacgcctgttgacggccatgtctggctggatggcgaacaaatacagcgttacgccagtaaagaggtggcgcggcgcatcggattgctggcgcaaaacgccaccacgccgggcgatatcaccgtacaagaactggtcgccagagggcgttatccgcatcagccgttatttacccgctggcgcaaggaagatgccgacgccgtcgccagtgctatgcgtgcaacaggtatcacctcactggcggcgcaaagcgtagacacgctgtccggcggccaacgtcagcgggcgtggatagccatggtgctggcgcaggaaacgtccatcatgctgctggatgagccgacaacgtggctggatattagccatcaaattgatttgttggaattgttaagcgatctcaaccgtgaaaaaggctatacgctagccgccgtcctgcacgacctgaatcaggcctgccgatacgccacacatttgattgcattacgcgaaggtaacattgtcgcacagggcgcgccgaaagagattgttaccgctgagcttatcgaaaaaatctatgggctgcgctgtatgattatcgacgatccggttgccgggacgccgctggtggtaccgctggggcggcgatag

SEQ ID NO: 39429 - DNA, 228 bp, Salmonella typhi
atgcaattcactcctgacactgcgtggaaaatcaccggctttgcgcgtgaaatcagcccggcgtatcgtcaaaaactgctttcgctcggcatgttgcccggctcttcatttaatgttgtccgcgtcgcgcccttaggggatccgatccatatcgaaacacgacgcgtgagtctggttttgcgtaaaaaggatttggcgttaatagaagtggaagcggtttcctgttaa

SEQ ID NO: 39430 - DNA, 2331 bp, Salmonella typhi
atgatgaatgattctttctgccgcattattgcgggtgaaatccaggcaaatgccgggcaggttgaagctgccgttcgcctgcttgacgaagggaacaccgtgccgtttatcgcacgttatcgtaaagaaatcaccggcggtctggatgacacgcagttgcgtaacctggaaacgcgtctgggctatctgcgtgagctggaagacaggcgtcaggccatcctcaagtccatttccgaacaaggcaaactgaccgatgagctggctggcgccatcaacgctacgttaagtaagaccgagctcgaagacctctacctgccctataaacctaaacgccgcacccgtggacaaatcgccattgaagccggccttgagccgctggccgatctgctctggaacgaaccgtcccacgatcctgacgtgaaagcggcaaagtacattgatggcgacaaaggcgtggcggacacgaaagccgcgctcgacggcgcacgctacattctgatggagcgctttgccgaagacgccgcattgctggcgaaagtgcgtgattacctgtggaagaatgcccatctggtcgccacagtcgtgagcggcaaagaggaagaaggggcaaaattccgcgactatttcgaccatcatgagcccattgctaacgtcccgtctcaccgtgcgctggccatgttccgtggtcgtaacgaaggcattctgcaactttcgctcaatgccgacccacagtttgatgagccgccgaaagagagctactgcgagcaaatcatcatggaccatctcggcctgcggctaaataacgccccggcggatagctggcgcaaaggcgtagtgagctggacgtggcgtatcaaagtcttaatgcacctcgaaaccgaactgatgggcaccgtgcgcgaacgtgcggaagacgaagcgattaacgtgtttgcgcgtaacctgcacgacctgctgatggcagcccccgcaggcctgcgcgccacgatgggccttgatcctggcctgcgtaccggcgtaaaagtcgctgtcgttgacggcaccggcaagctggtggcgacggataccatttatccgcataccggtcaggcggccaaagcggctaccgtgatcgccgcgctgtgcgaaaaataccacgtcgaactggtcgcgattggcaacggtacggcttcgcgtgaaaccgaacgtttctatctcgacgtacagaaacagttcccgaacgtgacggcgcagaaagtgatcgtcagcgaagcgggggcgtccgtgtattccgcttctgagctggcggcgcaggagtttccggatctcgacgtctccctgcgcggcgcggtctctatcgcgcgtcgtctgcaggatccgctggcggaactggtgaaaatcgatccgaaatcgatcggcgtcggccaatatcaacacgatgtcagccagacccaattggcccgtaaactggatgcggtggtcgaagactgcgtaaacgccgtcggcgtcgatttgaataccgcctccgtaccgctgctgacccgcgtcgcaggcttaacgcgcatgatggcgcaaaacatcgtcgcctggcgcgatgagaacggtcagttccagaaccgccagcaactgttgaaggtgagccgtctggggccgaaagcgtttgagcagtgcgcgggcttcctgcgtattaaccacggcgataacccgctggatgcctccaccgtccacccggaagcctatccggttgtcgaacgcattctggcggcgacgcagcaagcgctaaaagatctgatgggcaacagcaacgaattgcgtcacctcaaggccgctgattttaccgacgataaattcggcgtgccgaccgtgagcgatatcatcaaagagctggaaaaaccgggccgcgacccgcgtcctgaatttaaaaccgcgcaattcgccgatggcgtcgaaaccatgaacgacctgctgccggggatgattctggaaggggcagtcactaacgtcactaacttcggcgcgtttgtcgatatcggcgttcatcaggatggcctggtccacatctcttccctgtcgactaagttcgtcgacgatccacacaccgtggtaaaagctggcgacatcgtgaaggtgaaagtgctggaagtggatctgcaacgtaagcgtattgcgctgacgatgcgtctggacgaacagcccggcgaaaccgccgctcgccgcggcggcggtgccgatcgcgctcagggcaaccgcccggcgtcaaaagcggcgaaaccgcgcggtcgtgacgcccagccagccggtaacagcgccatgatggacgcgctggcagcggcaatgggaaaaaaacgctaa

SEQ ID NO: 39431 - DNA, 1353 bp, Salmonella typhi
atgaggcgaatgcgcttctcgccgcgaagttcatttgcccgcacgctgttgctcatcgtcaccttgctgttcgtcagcctggtgacgacctacctggtggtgctgaacttcgcgattttgccgagcctccagcagtttaataaggttctggcttacgaagtccgtatgctgatgaccgataagctgcaactggaggacggcacgcagttagtcgtgccgcctgcgtttcgccgggaaatctatcgcgagctggggatctctctctacaccaacgaagccgctgaagaggccgggctgcgttgggcgcaacactacgaattcttaagccaccagatggcgcagcaattaggcggcccgacggaagtgcgggttgaggtcaacaaaagctcgcccgtcgtgtggctcaaaacctggctgtcgcccaatatctgggtgcgcgtgccgctgaccgagattcatcagggcgatttttctccgcttttccgttacacgctggcgatcatgctcctggcgataggcggcgcgtggctgtttattcgtatacagaacagaccgttagtggatcttgaacatgccgccttgcaggtagggaagggaattattccgccgccgctgcgtgaatatggcgcctctgaggtgcgctctgtgacccgggcgtttaaccatatggcagccggcgtgaaacaattggccgatgaccgtacgctattgatggcgggcgtcagccacgacttacgcacgccgctgacccgtattcgtctggcgacggagatgatgggcgaggaagacggttatctcgcggagtcgatcaataaagacatcgaagagtgtaacgccattatcgaacagtttattgactatctgcgtaccggtcaggaaatgccaatggagatggcggatctcaattccgtgctgggcgaggtgattgcggcggaaagcggctatgagcgtgagattaacactgcgcttcaggcaggcagcatccaggtgaaaatgcacccgctctcgattaagcgcgcggtggcgaatatggtggtcaatgctgcccgctatggcaactgctggattaaggtcagcagcggcaccgagtcgcatcgcgcctggttccaggtagaagatgacgggccgggcattaagccggagcagcgtaaacatctgttccagccttttgtgcgcggcgacagcgcccgtagcaccagcggcacagggctggggctggcgattgtgcagcgcattattgataaccataacgggatgctggagattggcaccagcgagcgtggcggattgtcgattcgcgcctggctaccggttcctgtggctcgcgtccaggggacgacaaaagaggcataa

SEQ ID NO: 39432 - DNA, 1620 bp, Salmonella typhi
atgcgcgttaacaatttaaccccgcaagatctcaaggcttatggtatcaacgacgtccaggatatcgtttacaatcccagctacgacaccctttatcaggaagaacttaatcctggtctggaaggctatgagcgtggcgtgttaactaacctgggcgctgttgccgttgataccggtatttttaccggtcgttcgcctaaggataagtatattgttcgcgacgacaccacgcgtgatacgctgtggtggtccgataagggtaaaggtaaaaacgataataagccgctttcccaggaaacctggcaacacctgaaaggtctggtgacgcatcagctttccggtaaacgcttattcattgttgatgcgttctgcggcgcaaatgccgatacgcgtctttccgtgcgctttattacggaagtcgcctggcaggcccacttcgttaaaaatatgttcattcgcccaacggacgaagagctggtaggcttcaaacctgactttattgtcatgaacggcgcgaagtgcaccaacccgcagtggaaagagcaagggctgaactcggaaaacttcgtggcgttcaacctgactgaacgtattcagcttattggcggcacctggtacggcggcgaaatgaaaaaagggatgttctcggtaatgaactacctgctgccgctcaaaggtatcgcctcaatgcactgttccgccaacgtgggtgaaaaaggcgatgtcgcggtcttcttcggcctttccggtaccggaaaaaccactctgtccaccgacccgaaacgtcgtctgattggcgatgatgagcacggttgggatgacgacggcgtgttcaactttgaaggcggctgctacgccaaaaccatcaaactgtcgaaagaagcggagccagaaatttatcatgcgattcgccgtgatgcgctactggaaaacgtcaccgtgcgcgaagacggcaccgtagatttcgacgatggttccaaaaccgaaaacacccgcgtctcttacccgatctatcatatcgataacatcgttaagcccgtatccaaagcaggtcacgccaccaaggttatcttcctgacggcggatgctttcggcgtgttgccgccggtttcccgtttaaccgctaaccagacgcagtaccacttcctgtcgggtttcaccgctaaactggccggcaccgaacgcggcgtcaccgaaccgacccccaccttctccgcctgcttcggcgccgcgttcctgacgctgcacccgacgcagtatgctgaggtgctggtgaaacgtatgcaggcagcaggcgcacaggcttatctggttaacaccggctggaatggcaccggcaaacgtatctccatcaaagatacgcgcgcgattattgacgctattctgaacggttctcttgataacgcggaaaccttccgcctgccgctgttcgatctggcgatcccgactgaactgccaggcgtggatacccacattctcgacccacgtaacacctacgcgtcgccggaacaatggcaggaaaaagccaccgcgctggcgaaactgttcattgagaacttcgagaagtatacggataccccggcaggcgaagcgctggttagcgccggaccgaagctgtaa

SEQ ID NO: 39433 - DNA, 957 bp, Salmonella typhi
gtgagactctccgccttttatcgttggctgcttttagtggttggtttatcaatttcaggaatatccttagcccaggacgccggttggccccggcaaatccaggacagccgaggcgttcatactctggaccacaaacccgcgcgtatcgtctctaccagcgtgacgttaacaggctcgctgctggcgattgatgcgcccgtcgtcgccagcggagccactacgccgaataaccgttttgccgacgatcaagggtttatgcgccagtggagcgatgtagcaaaggctcgccatgtcgcccggctgtacatcggcgaaccgaatgccgaaacggtcgccgcgcaaatgccggatctcattttgattagcgccaccggcggcgactccgcgctggcgctttacgatcagctctccgccatcgcgccgacactcgtcatcaattatgacgataaaagctggcagagtttgctcacgcagcttggcgagatcaccggtcaggagaaacaggccgccgcgcgaatagcggaatttgaggcgcaactgacgacggttaaacagcgaatcgccctgccgccgcagccggttagcgcgctggtgtatactcctgccgcgcatagcgccaatctgtggacgccagaatcagcacaaggcaagctattgacgcagttaggctttacgctggcgacattgccccaagggctgcaaaccagcaaaagccagggtaagcgccacgatatcattcagcttggcggtgaaaatctggccgccgggttaaacggcgaatctcttttcctgtttgccggcgacaacaacgatgttgcggccctttacgccaatccgctgctggcgcacctgccagcggtgcaaaataagcgcgtctatgccctgggtacggagacgttccgtctggattattacagcgcaacgttgctgcttaatcgactggccgccctgttttag

SEQ ID NO: 39434 - DNA, 1614 bp, Salmonella typhi
atgatgcgtatacctttcacccgttggccggatgaatttgcccgccgttatcgtgaaaaaggctactggcaagacgtgccgttgaccgatattctgacccgccacgctgacagcgataagacggcggtcattgaaggcgagcgcgcattcagctatcgccagctaaaccaggccgcggataatctggcctgcagtttacgccgtcagggcatcaaacctggcgaaaccgctctggtacaactggggaatgtaccggaactgtatatcacctttttcgccctgttgaagcttggcgtagcgcccgttctggcgctgtttagccatcaacgtaccgaacttaacgcctatgcgatgcagatcgcgccgacgctggtgattgccgatcgccaacatacgctgttcgccggggaggactttctcaacaggtttgtggctgaacaccgctctgcgcgggtggtgttattgcgcaacgacgacggcgatcacagcctggacgcggcgatgcggcaggcggcggaaggtttcaccgccacgccatcacctgctgacgaagtggcctactttcagctttccggcggtactaccggcacgccaaagcttattccccgtacccataacgactattactacagcgtgcgccgcagcaatgagatttgcggtttcaacgaggagacgcgttttctgtgcgcgattcccgccgcgcataactacgccatgagttcgccgggcgcgctgggcgtttttctcgccaaaggaacggtagtgctggcgaccgatcctggcgccacgctctgtttcccgctgatcgaaaaacaccagattaatgccacggcgctggtgccgcccgcggtcagtctatggctacaggctatccaggagtggggcggcaatgcgccgctggcgtcattaaggttattgcaggttggcggcgcgcggctttctgcgacgctggccgcccgtattccggctgaaattggctgtcagttgcagcaggtcttcggcatggcggaagggttagtgaactatacccggctggacgatagcccggaacggattatcaatacccagggaagacccatgtgtccggacgacgaagtgtgggtggcggatgccgacgggaatccactgccgccgggcgagattggtcgtctgatgacgcgcggcccctatacttttcgcggctatttcaacagtccgcaacacaatgtcagcgcctttgacgccaacggtttttactgttccggcgatctgatctccattgatcaagacggctacatcaccgttcacgggcgtgaaaaagatcagatcaaccggggcggcgagaagatagccgccgaagagatagaaaacctgttactgcgccacccggcggtgatccatgcggcgctggtcagcatggaagatgaactgctgggggaaaaaagttgcgcatatctggtggtaaaagagccgctgcgagcggtacaggtacgccgtttcctgcgagagcagggcgtggcggaatttaaattaccggatcgcgtggagtgcgttgcgtcactgccgctgacgccggttggtaaagtcgataaaaaacaattacgccagcggttggcgtcacgttcaccgctctga

SEQ ID NO: 39435 - DNA, 1710 bp, Salmonella typhi
atggaaagtgtagcgctttcacgtactactcgctggggtatgttgctcactggtttgctgcagggcgtcttgtgctacctgctgatggcctggctggtaccacaaaatagcgactggctgttctatggtatgcctgcgacgatagcgttgtcgtcaatgctattgcttaccgtggtctcttttaaacagcgcgcgctgtggggctggctggggctgatctttgtggtcgtgctggcaatgagcggctggctgaaatggcaggttgaggcggtggagaaatggcgcctggccgagctcctctggctgtatggtctccggcttgtgttgatggcgatgctggtattaccctggatgcaatatcagttacattcgcaaaccggttcggcgcgttatccccagttttatctgcggttatggcataacgtactgacattgtttatcgtcctggtcgccaacggactgttctggctggtgcttctgctctggagcgcgctattcaggctggtgggcatccgctttttcagcacccttttctttgaaactgaagcctttatttatgtgaccatcggcctgattacggcgctggcggtcattctcgcccgcacgcagtcgcgccttgtggcggcggtgcaaaagctgctgacgctgatcgcgacgggtttactgccagtggtgtcgctgctggcattgctgtttattgtgacgttaccctttaccggactggaggcgatttctgcgcgtgtttccgctacggggctgctatccacgctgacgctgatgctgctgctcctcgtggcgattgtcaacgaaccgcaaaagcgcgtattaccctatccgcgcgtactacgcggcatgattagcgcctcgctgtgcgttgccccgatatatatgctgctggcgggctgggcgttatgggtacgcattcagcaatacggctggacgccggatcgtctgtatggcgcgctgacggcgtctgtcttgctggtatggtccttcggttatctgatcggtctgttacgccgcggacgcgaccctgatgagtggcaaggcaaggtgatactgagcgtctctttgttgacgctggtgatattgctgttgctggcctcgcctgtacttgatgtctggcgtattagcgtcaacagccatatggcgcgttaccatagcggtaaaattactgcggatcagatcagcctgtatatgctggatcacagcggcaaacctggccaggaagcgctgaaatcgttgcgggatgacgaggcgtttacgcagaacagaaagcgcaatcgtgaactgatgacgtttttgcagagaaataaggtccctccgacggcggacgatttagcgcgggtggtgatgattgcgcccggtagccagaagccggatgccgcattttgggcgtttgtcaaagagcagagttattcggacgcttcctgccttgaaccggatgcctgcgtgctggtgagtcaggatcttaacggcgacggtcagcctgagcaggtgctgtataactttattgttgccgagagccaggtctacggcttaaaagaggggaaatggacgcagaaagcgttcgcccgattgccggacgggttttctaagacgcaactgttgcacgcgattgccgggcatcggttagactcagcccccaaagcctggcgcgatatcattgttgatggtcagcggttggatgtggattactacaacgagtaa

SEQ ID NO: 39436 - DNA, 879 bp, Salmonella typhi
atgccgcaacatgaccaattacatcgttatctgtttgaaaactttgccgttcgcggcgagctggtgaccgtttcggaaaccttgcaacagatcctcgacaatcataactatccgcagtcggtgaaaaccgtactggccgaactgctggtcgccactagcctgctgaccgcgacgctgaagtttgccggtgacattacggtacagctccagggcgacgggccgttaagcctggcggtgatcaatggcaataatcagcagcagatgcgcggcgtggctcgcgttcagggcgatatccctgacaatgcggatctcaaaacgctggttggcaacggctatctggtgatcaccattacgccggaagagggtgaacgctatcagggcgtggtgggtctggaaggcgatactctggcggcgtgcctggaagattacttcctgcgctccgagcagttgccgacgcgcctgtttatccgtaccggcgatgtcgacggtaaaccggcggcaggtggaatgttgctccaggtgatgccggcacagaacgcgcaggcggaggatttcgaccatctggccatgttgacggaaaccattaaaagcgaagagctgctgacattaccggcaaatgacgtgctgtggcgtttgtatcacgaagaagaagtcacgctctacgatccgcaagaggttgaattcaaatgcacctgttcacgcgaacgttgcgcgggcgcgctgaaaacattgccggatgaagaagtggacagcattctggcggaagaaggcgaaatcgatatgcactgcgattactgcggcaatcattacctgttcaatgcgatggatatcgcggagatccgtaacaacgcctctcctgccgatccacaggttcattaa

SEQ ID NO: 39437 - DNA, 402 bp, Salmonella typhi
atgaaagaaaagtcctccgttgaggtcagactggataaatggctgtgggccgcgcgtttttataaaacccgcgcgctggcccgcgagatgattgaaggcggtaaggtgcattacaacggccagcgcagtaagccgagcaaaatcgtcgagctgaacgcaacccttaccctgcgtcagggaaatgacgaacggacggtgatcgttaaagccatcaccgaacagcgccgtccggccagcgaagccgtcgctctgtatgaagagacggcggaaagcgtggaaaaacgcgaaaaaatggcgcaggcgcgcaagcttaacgccctgaccatgccgcatccggccaggcgaccggacaagaaagagcgccgcgacctgttacgatttaaacacggcgacagcgaataa

SEQ ID NO: 39438 - DNA, 2577 bp, Salmonella typhi
atgacactaaatgggaaatctccagtgaagttcgtaaagtatttattgatccttgcagtatgttgcatcctgctgggagcaggctcgatttatggcctttatcgctatattgagccgcagctacctgacgtcgcgacattgaaagatgtgcgtttacaaattccgatgcaggtttacagcgcggatggcgaacttatcgcgcaatatggcgaaaaacgccgtattcccgttacgctcgatcaaattccgccggaaatgatcaacgcctttatcgccaccgaagatagccgcttttatgagcatcacggtattgacccggtaggtattttccgtgcggccagcgtcgcgctcttctccggtcacgcatcgcagggagcaagtaccattacccagcaactggcgcgaaacttcttccttagccccgaacgcacgctgatgcgcaagatcaaggaagcgtttctggcgattcgtattgagcagttgctgaataaaaatgagatcctcgaactctatctgaacaagatctatctcggctaccgcgcctatggcgttggcgcggcggcacaggtctactttggtaagacggtcgaccagcttagtttaagcgaaatggcggttatcgccgggctacctaaagcgccttctacctttaacccgctctactcgatggatcgggcggtggcgcgccgtaacgtagtgctctcacgaatgttaagcgagggatatatcactcaggcgcagtacgatcaggcccgtagcgaacctatcgacgcaaattatcacgcgccggaaatcgccttctccgcgccttatctgtcggaaatggtgcgccaggaaatgtataaccgttatggcgaaagcgcctatgaagatggttatcgtatttacacgaccatcacccgcaaagtgcagcaggccgcgcaacaggcggtgcgtaataacgtgctggactatgacatgcgccacggttatagcggcccggcgaatgtgctatggaaagtgggcgaaacggcgtgggacagtaaaaaaattaccgatacgttgaaagcgttgccgacctacggaccgctgcttcccgccgtggtcaccagcgctaatccgcaagaggcgaccgctgcgcttgccgacggtacgtccgtttcgctacatatggaaggaatgcgttgggcgcggccttaccgctcggatacacagcaggggccgacgccgcgtaaagttaccgatgtcgtccagacaggtcagcaaatctgggttcgtcaggtggataacgactggtggctggcgcaggtaccggaagtgaactccgcgctggtttcgcttaacccgcaaactggcgcggtactggcgctggtcggcggtttcgattttaatcagagtaaatttaaccgcgcgacgcaagctttgcgtcaggtggggtcgaacatcaaaccgttcctctacaccgccgcaatggataaaggcctgacgctcgccagtatgctcaacgatgtgccgatttcccgctgggacgccggggccggttcagactggcgtccgaaaaactctccgccgcagtacgccggaccgattcgtttacgccaggggctggggcagtcgaaaaacgtggtgatggtacgcgccatgcgcgccatgggcgtcgactatgcggcggagtatctgcaacgcttcggcttcccggcgcagaatatcgtgcataccgaatcgctggcgctgggctccgcctccttcacgccgatgcaggttgcgcgcggttatgcggtgatggcgaacggcggtttcctgatcgacccgtatttcatcagcaagattgagaacgatcagggcggcgtgatcttcgaagcgaaaccgaaaatcgcctgcacggagtgcgatatcccggtcatttacggcaatacgcagaaatccgacgtgctggaaaacaccaatgtggaagaggtcgcggtttcgcaagagcagcaaaacagcgccgtaccgatgcctgagctggaacaggcaaaccaggcgctggtcgcgcaaaacggcacgcaggagtacgcgccgcatgtgatcaatacgccgctggcgtttctgatcaaaagcgcgctgaacaccaatatcttcggcgaacccggctggatgggtaccggctggcgtgcggcgcgcgaccttaaacgtcgcgatatcggcggcaaaaccggtacgaccaacagctcgaaagacgcatggttctccggctatggtcctggcgtcgtcacttccgtatggatcggctttgacgatcaccgccgtgatttaggccgcaccaccgcttccggcgcgatcaaagatcaaatctccggctatgagggcggcgcgaagagcgcgcaacctgcatgggacgcctatatgaaagccgtgctggaaggcgtgccggaacagccgctaacgccgccgccgggcatcgtcacggtgaatatcgaccgcagtaccggacaactggcgagcggcggtaacagccgtgaagagtatttcatcgaaggcacgcagccgacacaacaggcggtacacgaggtgggaaccaccattattgataatggtgaaacacacgaactgttctga

SEQ ID NO: 39439 - DNA, 780 bp, Salmonella typhi
atggcttttaaaacctggcaaataggattgcatattcagcagcatgaagcgctggccatcgccgttattcgcggcgcatcgggctggtccctgcaacgttggtggcgactgccgctgatgaacgcctccacggcagagggtacgattcctgacccgcaatcgctggctcacgtactgcgaccctggagccgcgagctgccgctacgtcaccgtatttatctctcttttcccgcaaatcggacattgcaacgcgcttttccacatccgccgatgcgtctgcgggaacgtgagcaagtcgcatggctttcacaaacgatggcgcgtgagctggatatggatccggacttattgcgtttcgactttcaggacgatgcgctgagccccgcgttcaacgttaccgccgtgcaaagcaaagaaatttcagagctgttaacgctggcgcaaacgctcaatgtacgcatcgctgctgtaacgcccgatgcctgcgcgttacagcgcttgctgccgtttataccttcggggcggcaatgtctggtctggcgcgatgaaagccagtggctgtgggcgacgcgctatgcgtgggggcgtaaatcggcgcgagaggcgatgacgctgcatgaccttgccgcgacgttatccgtcgtgccggaacatatttcgttatgcgccgaaggcgaattcgacccctggcgcgccgttaccgtccgccaaccgccggttccgccggacggttatcgctttgcgattgcgctgggtttagccatgggggagatacgctga

SEQ ID NO: 39440 - DNA, 903 bp, Salmonella typhi
atggctaacctttacgaccttaaaaaatttgatcttaacctgttggttatatttgaatgtatttatcaacatttaagcattagcaaagcagcggaaacactctatattacaccttctgccgtcagtcagtcattgcaacgcctgcgcacgcaattcaatgatcctctatttattcgctcaggcaaaggaattacgcctaccgtaacaggcattaatttacattatcatttagaaaataaccttaacagcctggaacaaactattaatataatgaatcagtccagtctgaagaaaaaatttattatctacagcccacagctgttgatcacccaatatgcgatgaaattagttaaatatatccgcaaagatccacaggttgaaattgaacatcacgacattttgaccactgacgaactgcctgaagatctgcttgcctaccgcaaagcagatgttgtggtttcaatggccccacttaataatcgttctattgtttgtactcactttaataggctagaatgtatcctggtttgcagtgaaaatcatccccgactaggcgacaccgccactatcgatgaaattctacaagagtcatttacgcaactcgtctcccgggcaaccggtatgaaagagtatcattcacttatagatgatgtgctgggggagagaataattggtttaagaagcaaatcggtgatgactatcgccaactccatcagctccacggagcttattggttttttaccacaaacatttgttgactattactcttcctctatcaaacttaaaaaagtcgccacaccttttaccattgctcctatacaattctatcttatgtacaatagagcttcgctgaataatagcggatttgctgagctcattgagtacatcacaaaaaagcgttaa

SEQ ID NO: 39441 - DNA, 564 bp, Salmonella typhi
atgtccttaattaacaccaaaatcaaacctttcaaaaaccaggcgttcaaaaacggtgaattcattgaagtcaccgagaaagataccgaaggccgctggagcgtcttcttcttctacccggccgattttacctttgtttgcccgactgaactgggtgacgttgccgaccattacgaagaactgcagaagctgggcgtagacgtttattccgtctcaaccgatactcactttacgcacaaagcatggcacagcagctctgaaactatcgcaaaaatcaaatatgcgatgatcggcgacccgactggcgccctgacccgtaacttcgacaacatgcgtgaagatgaaggcctggcagaccgtgcgacctttgttgttgacccgcagggtatcattcaggcgatcgaagttaccgctgaaggtatcggccgtgacgcgtctgacctgctgcgtaaaattaaagcagcacagtatgttgccgctcacccaggcgaagtatgcccggcgaaatggaaagaaggtgaagcgactctggctccatccttagacctggtcggtaaaatctaa

SEQ ID NO: 39442 - DNA, 1005 bp, Salmonella typhi
atgactaagcccatcgtttttagtggcgcacagccctcaggtgaattgaccattggcaactatatgggggcattgcgtcagtgggtaaacatgcaggatgactatcattgcatctactgcatcgtagaccaacatgctattaccgtacgtcaggacgcgcagcagctacgtaaagcgacgctggatacgctggcgctgtacttggcatgtggtattgatcctgaaaagagcactattttcgttcagtcccatgtgccggaacatgcgcagcttggctgggcgctgaactgctatacctatttcggcgagctgagccgtatgacgcagtttaaagataaatctgcgcgctatgcggaaaatattaacgccggcctgtttgattacccggtgctgatggcggcagacatcctgctgtaccaaaccaatctggtgccggtaggcgaagatcagaagcagcatctggaactgagccgcgatatcgcccagcgtttcaacgggctgtatggcgatattttcaaagtaccggaaccgtttattccaaaatccggtgcgcgcgtgatgtcgttgctggagccgacgaagaaaatgtccaaatcggacgataaccgtaataacgtaatcggcctgttggaagatccgaaatcggtagtgaagaaaatcaaacgagcggtcactgactccgacgagccgccggtagtgcgttatgatgtgaaagagaaagcgggtgtctctaacctgctggatatcctttccgccgtgaccggtcagagcattcctgagctggaaaaacagtttgaaggtaaaatgtatggccatttgaaaggcgaagtggcggaggcggtttccggaatgctgtctgagttgcaggagcgctatcaccgtttccgcaacgacgaagcgttcttgcagaaggtgatgaaagacggggcggaaaaagccagcgcacgtgcggccgaaacgctgaaagccgtttacgaagccattggctttgtggcgaaaccgtaa

SEQ ID NO: 39443 - DNA, 171 bp, Salmonella typhi
atgtttaaatttgtaaaaattgccgttgtggcaggggttctggcgacgcttaccgcctgtactggtcatatcgaaaacaaaaaaaataactgcagctacgattatttgctgcaccctgcaatttctatttctaaaattattggcggttgcggcccggctgccgatcaataa

SEQ ID NO: 39444 - DNA, 1530 bp, Salmonella typhi
atgacgcagaaaaatgaatctcaacgccaggatcgcgtagtagcctggagccgtcacgctgaaagcgaactgagcgcttaccaaagtgcggcaaaattggatctacaagcgcaaaaaccgcgcgaccacaaactgtgcgccagcctggaagaggccatccgccgttccggtttacgcgacggcatgacgctttcctttcaccacgcttttcgcggcggcgatctgacgattaacctggtgatggaaaccatcgcgaagatgggcttcaaaaatctgaccctggcctccagctcgctgagcgactgccacgcgccgctggttgaacacattcgtaacggggtggtcagccgcatctacacgtcaggcctgcgcggcccgctggcggaagaaatttctcgcggcctgctggctgagccggttcagattcactcccacggcggtcgtgtgcatctggtacaaagcggcgaactcaatattgatgttgcgtttcttggcgtgccctcctgcgatgaattcggtaatgctaacggttataccggcaaagcctgttgcggttctctgggctacgcgatggtggatgccgacagcgcgaagcaggtcgtgatgctgacggagcaactgctgccgtatccgcataacccggcaagcatcgctcaggatcaggttgatctgatcgtgcaaatcgaagaagtcggtgatgcaaacaaaatcggcgctggcgcgacccgcatgaccactaatccgcgtgaactgctgatcgcccgcagcgcggcggaagtcattgctcactccggctacttcaacgaaggtttctccctgcaaaccggcaccggcggcgcatcgctggcggtcacccgcttcctggaagacaaaatgcgtagccgcaacattgtggctaatttcgcgctgggcggtatcaccgccaccatggtcaacctgcatgaaaagggcttaatccgcaaactgcttgacgtgcagagcttcgatcgtaacgctgcgcaatctttggcccgcaacccgaaccatatcgaaatcagcgctaaccagtacgccaactggggctctaaaggcgcttccgtcgaccgtctggacgtggtggtactgagcgcgctggaagtagacacccacttcaatgttaacgtgctgaccggctccgacggcgttctacgcggcgcgtccggcggtcactgcgataccgccgtcgcggcggcgctgtccatcatcgtcgcgccgctggtgcgcggtcgcatcccaacgctggttgataacgtcaccacctgcgtcacaccgggctccagcgttgacattctggtcaccgatcacggtatcgccgtcaatccggcgcgtccggagttggctgaacgcctgaaagcagcgggaatgaaagtggtatcgattgagtggctgcgcgaacgcgcgcaactgcttaccggtcagccccgccctatcgaattcaccgaccgcgtgattgctgtcgtgcgttatcgcgacggttcagtgatcgatgtggtgcatcaggtgaaggaataa

SEQ ID NO: 39445 - DNA, 1374 bp, Salmonella typhi
gtggaccatttgcctatattttgtcaattgcgcgaccgcgactgtctgatcgtcggcggtggcgatgtcgcagaacgcaaagcacggttactgctggaagcaggcgcacgtttaacggtcaatgcgctaacatttattccgcagttcaccgtatgggtaaatgaaggcatgttgactctggttgaggggccgttcgacgaaacgcttctcgactcgtgttggctggcgatcgcggccactgacgacgataccgtcaaccagcgcgtcagcgaagcggcggaatcacgccgtatcttctgcaacgtggtggatgcgccgaaagccgccagctttatcatgccctccattatcgaccgctcgccgctgatggtcgccgtctcctccggcggcacctccccggtgctggcgcgtctgctgcgcgagaaactggaatcgctgctgccgcagcatctggggcaggtcgcgcgctatgccggacagctccgcgcccgagtgaaaaagcagtttgccaccatgggcgaacgtcgtcgcttctgggaaaaatttttcgtcaatgaccggctggcgcagtcgctggcgaatgccgatgagaaagcggttaacgcgacaactgaacacctgtttagcgagccgctggatcaccgtggcgaagtcgtgctggtcggcgccgggccgggcgatgccgggctgcttacgctgaaaggattacaacaaatccaacaggcggatatcgtggtttacgatcgcctcgtttccgacgacattatgaacctggtacgccgcgatgccgatcgggtctttgtggggaaacgcgcgggttaccactgcgtcccacaggaggaaatcaaccagatcctgctgcgtgaagcgcaaaaaggtaaacgcgtggtacgcctgaaaggcggcgatccctttatctttggtcgcggcggcgaagagctggaaacgctgtgtcatgccggtattcctttctcagtagtaccggggattaccgcggcttccggctgctccgcctactccggtattccgctaacccatcgcgattacgcacagagcgtacgtctggtcacgggtcacctgaaaaccggcggcgagctggactgggaaaacctggcggcagaaaaacagacgctggtgttctacatggggctgaatcaggcagcgactatccaggaaaaactgatcgcattcggtatggaggccaatatgccggttgcgctggtggaaaacggtacctccgtaaagcaacgcgtcgttcacggtgtgctgacgcagcttggtgaattagcgcaacaggttgaaagcccggcgctgattatcgttggtcgcgtggtagccttacgcgataaattaaattggttctctaatcattaa

SEQ ID NO: 39446 - DNA, 2544 bp, Salmonella typhi
atgagcaaagtcagactcgctattatcggtaatggtatggtcggccaccgctttattgaggatctccttgataaatccgacgctagcctgttcgacattaccgtgttctgtgaagaaccccgtaaagcctatgaccgtgtccacctgtcatcctacttctctcaccacaccgcggaagagctctctctggtgcgtgaaggattttacgagaagcacggcgtaaaggtactggttggcgaacgcgcaattaccattaaccgtcaggagaaagtgattcactccagcgcgggtcgtaccgtttattatgacaagctgatcatggcgaccggttcctatccgtggattccgccgattaaaggctccgaaacccaggattgcttcgtttaccgtaccattgaagacctcaacgctatcgaagcctgcgcccgccgcagcaagcgcggggcggtggtcggcggcggtctgctggggctggaagccgctggcgcgctgaaaaacctcggcgtggaaacgcacgtcattgaatttgcgccaatgctgatggcggaacaactcgatcaaatgggcggcgagcagctacgtcgcaagatcgaaagcatgggcgtgcgtgtacacaccagtaaaaacacgcaagagattgttcagcagggtaacgaagcgcgtaagactatgcgttttgccgatggcagcgagttggaagtcgattttatcgtcttctctaccggtattcgcccccgcgacaagctggctacccagtgcggtctggccgtcgcgcagcgcggcgggatcgtgattaacgacacctgccagacgtccgacccggatatctacgctatcggcgagtgcgccagttggaacaaccgcgtttacggtctggtcgcaccgggctataaaatggcccaggtcgccgttgaccatatcctcggcagtgaaaacgcctttgaaggcgcggatctcagcgccaaactgaagctgctgggcgtggacgtcggcgggattggcgatgcgcatggccgcacgccgggcgcgcgtagctacgtttacctcgatgaaagcaaagaagtctacaaacgtcttattgtcagcgaagataacaaaacgctgctcggcgcagtactggtcggcgacaccagcgattacggcaatttgctgcaactggtactgaacgccatcgaactgccggaaaacccggattcgctgatcctgccgtcgcacgcgagcagtggtaaacccgctatcggcgtggataaactgccggacagcgcgcagatctgctcctgcttcgatgtgactaaaggcgatctgatcgctgctatcaataaaggctgccataccgtggcagcgctgaaagcggaaaccaaagccggaaccggctgcggcggctgcatcccgctggtgacgcaggtactgaacgccgaactggcgaaacagggtattgaagtcaacaacaacctgtgcgagcactttgcttattctcgtcaggaactgttccacttaatccgcgtggaaggtatcaaaacctttgaagaactgctgacgaaacacggtaaaggctacggctgcgaagtgtgtaagccaaccgtcggttcgctgctggcgtcgtgctggaacgaatacatcctcaaaccgcagcacacgccgctacaggatactaacgataacttcctagcgaatattcagaaagacggcacctactcggtgatcccgcgctcggcgggtggtgaaatcacgccggaaggtctggtggccgtgggtcgtatcgcccgcgagtttaacctctataccaaaatcaccggttctcagcgtatcggtctgttcggcgcgcaaaaagacgatctgccggaaatctggcgtcagttgattgaagccggtttcgaaaccggtcacgcgtacgccaaagcgctgcggatggcgaaaacctgcgtcggcagcacctggtgccgctacggcgtgggcgacagcgtcggtttcggcgtggagctggaaaaccgctacaaaggcattcgtaccccgcacaaaatgaaattcggcgtctccggctgtacccgtgaatgtgcggaagcacagggtaaagatgtcggtatcatcgccactgagaaaggctggaacctgtacgtttgcggtaacggcgggatgaaaccgcgtcatgcggatctgctggcagccgatctcgatcgcgacacgctgatcaagtacctcgaccgctttatgatgttctacatccgtaccgccgataagctgacgcgtaccgcgccgtggctggataacctggaaggcggcatcgaatatctgaagtcggtcattatcgacgataagctgggcctgaacgaacatctggaagaagagatggcgcgcctgcgcgcagcggtggtctgcgagtggacggagaccgtcaacacgccagcggcgcaggttcgtttcaaacacttcatcaacagcgacaaacgcgacccaaatgtccaggttgtgcctgaacgcgaacagcatcgtccggccacgccgtatgaacgcatcccggtcactctggtggaggaaaacgcatga

SEQ ID NO: 39447 - DNA, 1182 bp, Salmonella typhi
atgactaacagcaaccgcatcaagctcacatggatcagctttctttcctacgccctgaccggggcgctggtgattgtcaccgggatggtgatgggaaatatcgcagactattttcagttgcccgtttccagcatgagtaacacctttactttcctgaatgccgggattttgatctcgatcttcctcaatgcgtggttgatggaaatcgtcccgctgaaaacacagctacgctttggttttatcctgatggtactggcggtggccgggctgatgttcagccatagcctggcgttgttctcagcggcgatgtttgtgctggggctggtcagcgggatcaccatgtcgattggcaccttcctgattacgcaactgtatgaagggcgtcagcgcggttcccgactgctgtttaccgactccttcttcagcatggcggggatgatttttcctatggtcgccgccttcctgctggcgcgtagtattgagtggtactgggtctacgcctgcatcggcctggtctacctggcgatttttatcctgaccttcggctgtgaatttccggcgctgggtaaacatgcgcagcactctcaggcgcctgtcgtcaaagaaaaatggggcattggcgtactgtttctggccgtcgccgcgctgtgctatatcctcggtcaattgggctttatctcctgggtgccggaatacgccaaaggcctcggcatgagcctgaatgacgccggggcgctggtgagtgatttctggatgtcctatatgtttggcatgtgggcgttcagctttatcctgcgctttttcgatctgcaacgcatcctgaccgtactggcgggtatggcggcgatactgatgtatctgtttattaccggcacgcaggcgcatatgccgtggtttattctgacgctgggcttcttctccagcgccatttatacctccatcattacgctgggatcgcagcaaacgaaagtggcctcgcctaagctggttaactttattctgacctgcggcaccatcggaacgatgctgaccttcgtcgtcaccggcccgattgtggctcacagcggcccacaggcggcgttactcaccgcgaatggtctgtatgcggtggtctttgtgatgtgctttgcgctcggctttgtctcccgtcatcgccagcatagttcgccagcggcgcattaa

SEQ ID NO: 39448 - DNA, 603 bp, Salmonella typhi
atgagcgataaatttggcgaagggcgcgatccgtacctctatccggggctgaatgtgatgcgtaatcggctggggattcatcaggcccagcgactggcgcaagcggcatacgaaatgaccgcgctccgcgccgctacgattgaactggggccgctggtacgcggcttgcctcatctgtgcgcgattcatcgccagctctatcaggatattttcgactgggcagggcaactgcgggaggtcgatatttaccagggcgatacccgtttctgccactttgcctatatcgaaaaagagggcaatgccctgatgcaggatctggaagaagagggctacctggttggtctgacgcacgagaagtttgtcgagcggctggcgcattactactgtgaaattaatgtgcttcatccgtttcgtttggggagcgggctggcgcagcgcatcttctttgaacaactggcgctacatgcaggctacgcgctgagttggcaaggtattgcggttgaaacatggaatcaggcgaaccagagcggcgcgatgggcgatctctccgctttgcgggcgatttttcagaaagcgataagcgaagctcgcgaaactgagtaa

SEQ ID NO: 39449 - DNA, 312 bp, Salmonella typhi
atgtcgaagacacttttacagatccattttaactttagcggcccttttggcgaggagatgactcagcaactggtcgggctggcggagtctatcaatgaggagccgggcttcatctggaaaatctggacagaaagcgagaaaaaccagcaagctggcggcatttacttgtttgaatccgaagaaacggcgcaggcttatattaaaaaacacactgcgcgtctgaaaaatcttggcgttgatgaggtgacgtttacattatttggcgtgaacgacgcgctgacgaaaataaatcacggcaacctttgccgctaa

SEQ ID NO: 39450 - DNA, 966 bp, Salmonella typhi
atgagtaaacccattgtgatggaacgcggtgtaaaataccgcgatgccgataagatggctcttatcccggttaaaaatgtggtcacagagcgcgacgctctactacgtaaaccggaatggatgaaaataaaacttccggcggattctacccgtatccaaggcatcaaagccgcaatgcgcaaaaatggcctgcattctgtctgtgaggaagcgtcttgcccaaacctggctgaatgtttcaaccacggtaccgctacgtttatgatccttggcgccatttgcactcgccgctgtccgttctgtgatgtcgcccatggccgccccgttgcgccggatgcggaagagccgcagaaactggcgcaaacgatcgccgacatggcgctacgctatgtggtcatcacctctgtcgaccgtgacgatctgcgtgacggcggcgcccagcactttgctgactgcatcaccgccatccgcgccaaaagcccggagataaaaatagagaccctggtgccagacttccgtggacgtatggatcgcgcgctggatattcttaacgcgacgccgccggatgtgtttaaccacaacctggaaaacgtgccgcgtatttaccgccaggttcgtccgggcgccgattacaactggtcgctgaaattactggaacgcttcaaagaagcgcacccggaaattccgacaaaatcgggtctgatggtgggcttaggcgaaaccaatgcggaaatcattgaggttatgcgcgacttacgccgtcacggcgttaccatgctgacgcttggtcagtatctacagccaagccgccatcacctgccggtacagcgttatgtcagcccggaagagtttgacgagatgaaagcagaagccctggcgatgggctttacccatgccgcctgtggcccctgtgtacgttcttcgtaccatgctgatctccaggccaaaggcatggaagtgaaatga

SEQ ID NO: 39451 - DNA, 954 bp, Salmonella typhi
gtgagtgataataatcaggcagaaagacaaccggccgatcaacacctacaagacaaaccgcaaattttcagaacactgagaaatattgacctcaatctgttgacgattttcgaggccgtatatgtccataaagggatcgtcaatgcagcgaaaattcttaacctgacgccgtcagccatcagccagtccattcaaaaattacggactatatttcccgatccgctgtttattcgcaaaggccagggcgtaacgcccacgacgtatgctacgcatctgcacgaatacatcagccaggggctggaatctattcttggcgccctggatcttacgggcagctatgataagcaacgcaccattacaattggcacgacaccttcggtcggcgcgctagtgatgccgattatttaccaggccatcaggccgcgttatcctcagcttttgctgcgcaacattccggtagacgatgccgaaagccagcttagtcagtttcagaccgatctcattatcaatacccatagctataacaaccggagcatccagcatcacgtcctgtttagcgatacgcttgagattgtctgccgccagcatcacccgtgtctggcgaacgccattactgaagagagactgaacagcgcggatcacacctttctgatgctggagggacaacatctttccctcctgcgccagcgactgcaggagacatttcccgatcagcaaatcagttttagcagctacaatatttttaccattgcctcgctgatcgccagcagcgatctgctgggactgatgcccacccgcttctacgacttatttagccgttgctggccgcttgaacgccttccctacgcgccggtgaatagtgaacaggtcgagttctcgctgcattacaataaactgagtctgcgcgatccggtgctggagaacgtcattgatatcatccgtgaggcgttctga

SEQ ID NO: 39452 - DNA, 468 bp, Salmonella typhi
gtgaagctgcaacttgtcgctgtcggcacgaagatgcccgactgggttcaaacgggatttacggaatatctgcgtcgttttccgaaagatatgccctttgagctgatcgaaatccctgcgggcaaacgcggcaagaacgcggatatcaaacgcattctcgacaaagagggcgagcagatgctggccgccgccggtaagaatcgcattgttaccctggatattccaggcaagccgtgggatacgccgcagttagccaatgagctggagcgctggaaacaggacgggcgcgacgtcagtttgctgattggcggcccggaaggattatctcccgcctgcaaagcggcagcggaacagagctggtcgctctcggcgttaacgctccctcacccgctggttcgggttctggtcgcggagagtttgtaccgggcgtggagcatcacaaccaaccacccttatcaccgtgagtga

SEQ ID NO: 39453 - DNA, 2583 bp, Salmonella typhi
atgcaagagcaataccgcccggaagagatagaatccaaagtacagcttcactgggatgagaagcgcacatttgaagtgaccgaagacgagagcaaagagaagtattactgcctgtcgatgcttccctatccttctggccgactacacatgggccacgtacgtaactacaccatcggcgacgtggttgcccgctaccagcatatgctgggcaaaaacgtgctgcagccaatcggctgggacgccttcggcctgccggcggaaggcgcggcggtgaagaacaacaccgcgccggcgccgtggacgtacgacaacatcgcgtacatgaaaaaccagctcaaaacgctgggttttggctatgactggagccgtgaaatcgcgacctgcaccccggaatactaccgttgggaacagaaattcttcaccgagctgtataaaaaaggcctggtgtacaagaagacttctgccgttaactggtgcccgaacgatcagaccgttctcgccaacgaacaggtgatcgacggctgctgctggcgttgcgacaccaaagttgagcgtaaagagatcccacagtggtttatcaaaatcaccgcttacgcagacgagctgttgcgcgatctggataagctggaccactggcctgataccgtaaaaacgatgcagcgcaactggattggccgctctgaaggcgtggaaatcaccttcgatgtgaagggttacgataacacgctgaccgtctataccacccgtccggatacctttatgggcgccacctacctggcagtggccgccggtcatccgctggcgcaaaaagcggcggcgaacaacgccgagctggcggcgttcatcgacgaatgccgtaacaccaaagtggccgaagccgaaatggcgaccatggagaaaaaaggcgtcgacaccggctataaagcgattcatccgttaactggcgaagagatcccggtctgggcggcaaactttgtcctgatggagtacggcactggcgcggtgatggccgttccgggtcacgatcagcgcgactacgaatttgcctccaaatacggtttgaccatcaagccggtgattctggccgctgacggttccgagccggatctttccgaacaggcgctgaccgaaaaaggcgtgctgtttaactccggtgagttcgacggtctggcctttgaagcggcgtttaacgccattgccgataaactggcggaaaaaggcgtcggcgaacgtaaagtgaactaccgtctgcgtgactggggcgtttcccgtcagcgttactggggcgcgccgatcccgatggtcaccctggaagacggcaccgtgctgccgacgccggaagatcaactgccggttattttgccggaagacgtcgtcatggacggcatcaccagcccgatcaaggccgatcctgagtgggcgaaaaccaccgttaacggtatgccggcgctgcgtgaaaccgacaccttcgacacctttatggaatcgtcatggtactacgcgcgttacacctgcccgcagtatcaggaaggaatgctggattcgaaagcggcaaactactggctgccagtcgacatctacatcggcggtattgaacatgccatcatgcacctgctctacttccgcttcttccataagctgatgcgcgatgcgggcatggtcacctctgacgagccggctaaacagttgctgtgccagggcatggtactggcggatgcgttctattatgtcggcgagaacggcgagcgtaactgggtttcgccagttgacgctatcgtcgagcgcgatgaaaaaggccgcatcgtcaaagcaaaagacgcagcgggtcatgagctggtctacactggcatgagtaaaatgtccaagtcgaaaaataacggtatcgacccgcaggtaatggttgaacgttatggcgcggatacggtacgcctgtttatgatgttcgcttctccggcggatatgactctggaatggcaggagtccggcgtagaaggcgcaaaccgctttattaaacgcgtctggaagctggtttacgaacacaccgctaaaggtcctgtcgcggcgctgaacgtcgatgcgctgagcgaagatcaaaaagcgctgcgtcgcgatgtgcataaaaccattgccaaagtgaccgatgatatcggccgccgtcagacgttcaacaccgccattgcggcgatcatggagttgatgaacaaactggcgaaagccccgcaggaaggcgaacaagaccgcgcactgcttcaggaagcgctgcaggccgtcgtgcgtatgcttaacccgttcaccccgcacgtctgctttaccttgtggcaggaactgggtggcgaaggcgatatcgacaacgcgccgtggccggttgccgacgagcaggcaatggtggaaaacaccacgctggttgtcgtgcaggttaacggtaaagttcgcggtaagatcaccgttgcggtggatgccaccgaagaacaggtgcgtgaacgtgcaggccaggaacatctggtggcaaaatatcttgatggcgttaccgtgcgtaaagtgatttacgttccgggtaaactcctcaatctggttgttggctaa

SEQ ID NO: 39454 - DNA, 270 bp, Salmonella typhi
atgtctctaagtactgaagctacagctaaaatcgtttctgagttcggtcgtgacgcaaacgacaccggttctaccgatgttcaggttgctctgttgactgcacagattaaccacctgcagggtcactttgcagagcataaaaaagatcaccacagccgtcgtggtctgctgcgtatggtttctcagcgtcgtaaactgctcgactacctgaaacgtaaagatgttgcacgctacaccgcgctgattgagcgtctgggtctgcgtcgctaa

SEQ ID NO: 39455 - DNA, 945 bp, Salmonella typhi
atgagtcgtcctcgtcgtcgtggccgcgacattcacggcgttctgttgctggataagccgcagggtatgtccagcaatgacgtgctgcagaaagttaagcgcatctacaatgccaaccgcgccgggcataccggcgcgctggacccgctggcgaccggcatgttgccgatttgcctcggcgaagcgacaaaattttcgcagtacttgctggattctgacaaacgctatcgtgttattgcccgtctggggcagcgcacagatacctctgacgccgatggtcaaatcgtgcaggagcgtccggtgactttcagcgctgagcagcttgcgagcgcgctggagacctttcgtggggatatcgaacagattccctcgatgtattcggcgctgaagtatcagggcaggaagctgtacgaatatgcccgccagggtatcgaagtgccgcgcgaagcccgcccgattaccgtctatgagctgctgtttattcgccatgaaggtaacgagctggagctggaagttcattgctccaaaggcacctatattcgcactattattgatgatttaggtgagaaactgggctgtggcgcgcacgtaacgtacctgcgtcgtctgacggtcagcaagtatccggtggatcgtatggtgacgctggagcacttgcagacgctggtagcacaggcggaacagcagggcgttccggcggcgcagttgctcgatccattattgatgccaatggatagtccggcttcggactatcctgttgttaatctgccgttaacatcttcggtatacttcaaaaatggcaacccggttcgtaccacgggcgcgccgttgaagggactggttcgtgtgacggaaggtgaagacgataaatttatcggtatgggcgaaattgacgacgaaggccgtgtcgcgcctcgtcggctggtagtagagtacccggcgtaa

SEQ ID NO: 39456 - DNA, 2679 bp, Salmonella typhi
atgacagatttaaccctaaaagcgctggccgcagagagacaggtttccgtggatcgcctggtacagcagtttgctgatgcaggtatccggaaatctgctgacgactctgtgtccgcacaagaaaaacagactttactggcgcacctgaaccgcgaagcggtttctggccccgataaattgacgctgcagcgtaaaacgcgcagcaccctgaatattcctggtaccggtggaaaaagtaaatcggtacaaatcgaagtccgcaagaagcgcacctttgtgaaacgcgatccgcaagaggctgaacgcctggccgcggaagagcaggcgcagcgtgaagcggaagagcaagcccgtcgtgaggcagaagaacaggccaaacgcgaggcgcaacaaaaagctgaacgcgaggccgcagaacaagctaagcgtgaagccgctgaaaaagcgaaacgtgaagctgcggaaaaagacaaagtgagcaatcaacagactgacgatatgaccaaaaccgcccaggccgaaaaagcccgccgtgagaatgaagctgcagagctgaagcgtaaagcggaagaagaagcacgtcgcaaactcgaagaagaagcgcgtcgtgtagcagaagaagctcgccgcatggcggaagaaaacaaatggaccgcaacgcctgagccagtagaagacaccagtgactatcatgtcaccacttctcagcacgcgcgccaggccgaagacgaaaacgatcgtgaagtagaaggtggtcgtggtcgtggccgtaatgcaaaagcggcgcgtccggcgaaaaaaggcaaacatgccgaatccaaagccgatcgcgaagaagcgcgtgctgcggttcgcggcggtaaaggcggcaagcgtaaagggtcttctttacagcaaggcttccagaagcccgctcaggccgttaaccgtgacgtggtgatcggtgaaaccatcaccgtcggcgaactggcgaacaagatggcggtgaaaggttctcaggtcatcaaagcgatgatgaagctgggcgccatggccaccatcaaccaggtcatcgaccaggaaaccgcacagctggttgccgaagagatgggccacaaagttatcctgcgtcgtgaaaacgaactggaagaagcggtaatgagcgaccgtgataccggcgctgcggctgaaccgcgcgcaccggttgtgaccatcatgggccacgttgaccacggtaaaacctctctgctggactacattcgttccacgaaagtggcctctggcgaagcgggtggcattacccagcacatcggtgcttaccacgttgaaactgacaacgggatgatcaccttcctggacaccccgggccacgccgcgtttacctccatgcgtgctcgtggtgctcaggcaacggatatcgtggttctggttgttgcagcagacgacggcgtgatgccgcagactatcgaagctatccagcacgcgaaagcggcaggtgtgccggtcgtggttgcggtgaacaaaatcgataagccggaagcggatccggatcgtgtgaagaacgaactgtcccagtacggcattctgccggaagagtggggcggcgagagccagttcgttcacgtgtctgcgaaagcgggcaccggtatcgacgaactgcttgacgctatcctgctgcaggccgaagttctggaactgaaagcggttcgtaaaggtatggcgagcggcgcggtgatcgaatccttcctggataaaggtcgtggtccggtggctaccgttctggtacgcgaaggtacgctgcataagggcgatatcgtgctgtgtggcttcgaatacggccgcgtgcgtgcgatgcgtaacgaactgggtcaggaagtgctggaagcgggtccgtccattccggtggaaatcctcggcctgtccggcgttccggctgccggtgacgaagtgaccgtggttcgcgacgagaagaaagcgcgtgaagttgctctgtatcgtcagggtaaattccgtgaagttaaactggctcgtcagcagaaatctaaactcgagaacatgttcgtcaacatgaccgaaggcgaagttcacgaagtgaacatcgtgctgaaggctgacgtacagggttccgtggaagcgatctccgactccttgctgaaactgtctaccgacgaagtgaaagtgaagatcatcggttctggcgtaggtggtatcaccgaaaccgacgcgaccctggctgcggcgtccaacgcgattctggtgggcttcaacgttcgtgctgatgcttctgcgcgtaaagtgattgaatccgaaagtctggatctgcgttactactccgtcatctataacttgatcgacgaagtgaaagcggcgatgagcggcatgctgtctccggaactgaaacagcagatcatcggtctggctgaagtgcgcgatgtgttcaaatcgccgaaattcggcgcgatcgcgggctgtatggttaccgaaggtacaattaaacgccataatccaatccgcgtactgcgcgacaacgtggttatctatgaaggcgagctggaatccctgcgccgcttcaaagatgacgttaacgaagtccgtaacggcatggaatgtggtatcggcgtgaagaactacaacgacgttcgcgttggcgatatgattgaagtgttcgagattatcgagatccaacgtaccatcgcttaa

SEQ ID NO: 39457 - DNA, 1503 bp, Salmonella typhi
atgaacaaagaaattttggctgttgttgaagccgtctccaacgaaaaagcgctgccacgcgaaaaaatttttgaagcgctggaaagtgcgctggcgacagcaacaaagaaaaaatatgagcaggagatcgatgttcgtgtagaaatcgatcgtaaaagcggtgattttgatactttccgccgttggttgatcgttgaagaagtgaccatgccgacgaaggaaattacgctggaagcggcgcgctttgaagacgaaagcctgaatgtcggcgactatgttgaagatcagattgaatctgtcacctttgaccgtatcaccacgcagactgcgaaacaggttatcgtgcagaaagtccgtgaagctgaacgcgcgatggttgtcgatcagttccgcgaccaggaaggcgaaatcgtcactggcgtggtgaagaaagtgaaccgcgacaatatctctttggaaattaaatccgaagggatggccggtaacgctgaagcggtgattctgcgtgaagatatgctgccgcgcgaaaacttccgccctggcgaccgtattcgcggcgtgctgtatgctgttcgcccggaagcgcgtggcgcgcagctgttcgtcacccgttccaagccggaaatgctgatcgagctgttccgcatcgaagtgccggaaatcggcgaagaagtgattgaaattaaagcggcggctcgcgatccgggttctcgtgcgaaaatcgcagtgaaaaccaacgataagcgtatcgatccggtcggcgcttgcgtggggatgcgcggcgcgcgcgttcaggcggtctctaccgaactgggcggtgagcgtatcgatatcgtgctgtgggatgataacccggcgcagttcgtcattaatgcgatggcgccggcagatgtcgcgtctatcgtggtggacgaagataaacataccatggatatcgccgttgaagccggtaatctggcgcaggcgatcggacgtaatggtcagaacgtccacttggcttcgcaattgagcggctgggaactcaacgtaatgaccgttgatgacttgcaggctaaacatcaggctgaagcacatgccgctatcgagatctttactaaatatcttgatattgatgaagagttcgcgaccgttctggtagaagaaggtttctccacgctcgaagaactggcctatgtgccaatgaaagaactgctggaaattgacggccttgatgagccgaccgttgaagcactgcgcgagcgtgctaaaaacgcactggccactctggcgcaggaccaggaagcaagcctaggtgataacaaaccggctgacgatctgctgaatctggaaggattagatcgcgatatggctttcaaactggcggctcgtggtgtttgtacgctggaagatctcgccgaccagggcattgatgatctggctgatatcgaagggttgaccgacgaaaaagccggtgagctgattatggctgcccgtaatatttgctggttcggcgacgaagcgtaa

SEQ ID NO: 39458 - DNA, 1338 bp, Salmonella typhi
atgagtaatcgtaaatatttcggtaccgatgggattcgcggacgtgtaggcaatgcccccattacacctgatttcgtgcttaaactgggttgggctgccggaaaagtgctggcgcgtcatggttcgcgtaaaatcattatcggtaaagatacgcgtatttccggctatatgctggaatccgcgctggaggcaggccttgccgctgcggggctgtcggcctcgtttaccggacctatgccaacgccagccgtcgcctatctgacgcggactttccgcgcggaggcgggtatcgttatctcggcttcccataacccgttctatgataacggcattaaattcttctctatcgacggtacgaaactgcctgacgatgtggaagaagccatcgaagccgaaatggaaaaagagatcacctgcgtagactccgccgagctggggaaagccagccgcatcgtcgacgccgccggacgctatattgagttctgtaaaggcaccttcccgaacgaactgagcctcaacggcctgaaagtggttgtggattgcgccaacggcgctacctaccacatcgctccgaatgtgctgcgcgagctgggcgcgaccgtgatcgccatcggctgtgagccaaacggcgtcaacattaatgaagaagtgggcgcgaccgacgtgcgcgcgttgcaggcgcgcgtgttggcggagaaggcggacctcggcatcgcgcttgacggcgacggcgaccgggtcatcatggttgaccatgaaggcaataaagtcgatggcgatcagatcatgtatatcatcgcgcgcgaagggctgcgccaggggcaactgcgcggcggcgcggtggggacgctgatgagcaatatggggctggagctggcgctcaagcagcttggcattccgtttgcccgggcgaaagtgggcgaccgctatgtgctggaaaaattgcaggaaaaaggctggcgcatcggcgcggaaaactctggtcacgttattctgctggataaaacgaccactggcgacggtattgtggcggggctacaagttctggcggcgatggtgcgtaatcatatgagtctgcacgatctgtgcagcggaatgaaaatgttcccgcagattctggttaacgtgcgttacaccgctggtagcggcgatccgctggaaaatgaagcggtgaaagcggtaacggcggacgtagaagccacgctcggcaatcgtgggcgggtactgctacgtaaatccggtaccgaaccgctgattcgcgtgatggttgaaggcgaggatgaagcgcaggttacggctttcgcccatcgtatcgcggatgcggtaaaagccgtttaa

SEQ ID NO: 39459 - DNA, 849 bp, Salmonella typhi
atgaaactcttcgctcagggcgccacgctcgatctcactcatccgcatgttatggggatcctgaacgtaacgccggattcgttctccgacggcggcgcgcataacacgctgattgaggcggtgaaacatgcgaatttaatggtgaataccggggcgacaattattgatgtggggggggaatcaacgcgaccaggcgcggcagaagtgagcgtggaagaagagctggatcgcgttattccggtactggaagcaatcgcgcaacgttttgaagtgtggatttctgtggatacctctaaacccgaggtgatccgtgaagcggcaagggcgggcgcgcatattatcaatgatgtccgttcactctccgaacccggcgcgttggaagcggcagcggaaaccggcttgccggtcagtcttatgcacatgcagggcaaccccaaaaccatgcaggaggcgccgaaatatgacgatgtctttgccgaggtgaatcgctactttattgagcaaatagcacgttgtgagaaggccggcatcgcaaaagagaaattgttgctcgacccaggattcggtttcggtaaaaatctctctcacaattataccttactggcgcgactgggtgagtttcatcattttaacctgccgctgctggtgggcatgtcacgtaaaacgatggttggtcagttacttaacgtgggaccatcagaccgtctgaacggtagccttgcgtgcgcggtaattgctgcgatgcagggcgcgcagatcattcgcgtccatgacgtcaaagaaaccgtagaggcgatgcgggtggtggaagccactctgtctgcaaagggaaacaaacgctatgagtaa

SEQ ID NO: 39460 - DNA, 1935 bp, Salmonella typhi
atggcgaaaaacctaatactctggctggtcattgccgttgtgctgatgtcagtattccagagctttgggcccagcgagtctaatggccgtaaggtggattactctaccttcctgcaagaggtcaatcaggaccaggttcgcgaagcgcgtatcaacggacgtgagatcaacgttaccaagaaagatagtaaccgttacacgacttacattccgattaatgatccgaagctgcttgataacctgctgactaaaaacgtcaaggttgttggcgaaccacctgaagagccaagcctgctggcttctatcttcatctcctggttcccgatgctgttgctgatcggcgtctggatcttcttcatgcgtcagatgcagggcggcggtggcaaaggcgccatgtcgttcggtaagagcaaggcgcgtatgctgacggaagatcagatcaaaaccacgtttgctgacgttgcgggttgtgacgaagcgaaagaagaagtggcggaactggttgaatacctgcgtgaaccgagccgtttccagaagctgggcggtaaaattccgaaaggcgtcctgatggtcggcccgccgggtaccggtaaaaccctgctggcaaaagccattgcgggtgaagcgaaggtgccattctttacgatttccggttctgactttgtggaaatgttcgtgggtgtcggcgcatctcgtgtgcgtgacatgttcgaacaagccaagaaagcggcaccgtgcattatcttcatcgatgaaatcgacgccgtaggtcgccagcgtggcgctggtctgggcggtggtcacgatgaacgtgagcagacgttgaaccagatgctggttgagatggacggcttcgaaggtaacgaaggtatcatcgttatcgccgcaactaaccgtccggacgtccttgacccggcgctgctgcgtcctggccgttttgaccgtcaggtggtggtaggcctgccggatgttcgcggtcgtgagcagattctgaaggtgcatatgcgtcgcgtaccgttagcgacggacattgatgcggcgatcattgcgcgcggtacgccgggcttctccggtgcggacctggcgaacctggtcaacgaagcggcgctgtttgccgcacgcggcaacaagcgcgtagtgtcgatggttgagttcgagaaagcgaaagacaaaatcatgatgggcgccgaacgtcgctccatggtgatgacggaagcgcagaaagagtcgaccgcgtaccacgaagcgggccacgcgattatcggtcgcctggtgccggaacacgatccggtgcacaaagtgacgattatcccgcgtggtcgtgcgctgggcgtgaccttcttcttgcctgaaggcgacgcgatcagcgccagccgtcagaagctggaaagccaaatcagcacgctgtacggcggccgtctggcggaagagattatctacggcgttgagcatgtttctaccggcgcgtcgaacgacattaaagtcgcgactaacctggcgcgtaacatggtcacccagtggggcttctcggagaaactcggtccgttgctgtacgcggaagaagagggcgaagtgttcctcggccgtagcgtcgcaaaagcgaaacatatgtctgatgaaactgcgcgtatcatcgaccaggaagtgaaagcgctgattgaacgtaactacaatcgcgctcgtcagatcctgactgacaatatggatattctgcacgcgatgaaagatgcgctgatgaaatatgaaaccatcgatgcgccgcagattgatgacctgatggcgcgtcgtgaagtgcgtccgcctgcgggctgggaagatccaaacggcaccaataactctgacagcaatggtacgcctcaggcgccgcgtccggttgatgaaccacgcacgccgaacccgggcaacacgatgtcagagcagctgggcgacaaataa

SEQ ID NO: 39461 - DNA, 1434 bp, Salmonella typhi
atgcgattttccagatttatcatcggattgaccaccagtatagcgttcagcgttcaggccgcgaatattgacgaatacatcaaacagcttccggccggcgccaacctcgcgctgatggtgcaaaagattggcgcgcccgcgccggctattgattatcatagtcagcagatggcgcttcccgccagtacccaaaaggtgattaccgcgctggcggcgctgattcaactcggcccggatttccgttttacgaccacgctggagactaaaggcaacgtcgataacggcatcctgaaaggtgacttaattgcgcgattcggtggcgatccaacgctaagacgtcaggatattcgcaatatggtcgcgacgctgaaaaagtcaggcgtcacgcaaatcgacggcaatgtgcttatcgacacgtcgattttcgccagccacgataaagcgccaggctggccgtggaacgacctgacgcagtgtttcagcgcgcctcccgccgccgccattgttgaccgcaactgtttttctgtgtcgctttatagcgcgcaaaaaccaaacgatttagcttttattcgcgtggcctcttattatccggtaacgatgttcagccaggtacggactctgccgcgcggttcggcagacgcgcagtattgcgagctggatgttgtgcctggcgatttgaaccgttatacgcttaccggctgtttaccacagcgcgccgacccgctgccgctggcctttgctattcaggacggcgccagctacgcgggcgcgatcctcaagcaggaactgaaagaggccgggataacttaccgcggcacgctgctgcgccagacgcaggttaacgagcccggaacgatcgtcgccagtaaacagtcggcgccactgcacgatctgcttaagattatgctgaaaaagtcagacaacatgatcgccgatactgtttttcggatgattggtcatgtcaggtttaacgtgcctggcacctggcgggcgggatcggatgctgttcgccagatcctgcgccaacaggcgggaattgatatcggcaataccattattgccgacggttccggtctttctcgccataacctgatcgctcccgccacgatgatgcaggtgctgcaatatatcgcccaacacgataacgagctgaactttatctctatgctgccgctggcgggctatgacggttcattgcaataccgcgccggcctacatcaggcgggcgtagacggtaaggtttcggcgaaaaccgggtcactgcagggcgtgtacaacctggcgggctttattaccaccgcaagcgggcagcggatggcatttgtacagtatttgtccggctacgcggttccacctgccgatcagcgtaatcgacgtattccgctggtacgcttcgagagtcgattgtacaaggatatttatcagaataactga

SEQ ID NO: 39462 - DNA, 1173 bp, Salmonella typhi
atgaagtttgttgatgaagcatcgattctggtcgttgcaggcgatggcggtaatggctgtgtgagcttccgccgcgaaaaatatatcccgaaaggcggcccggacggcggtgatggcggcgacggcggcgacgtctggatggaagccgatgaaaacctgaatacgctgatcgattaccgctttgaaaaatcgttccgcgctgaacgtggtcagaatggcgcgagccgcgactgtaccggtaaacgcggtaaagacgtgaccatcaaagtgccggtcggtacgcgcgttatcgaccaaggaaccggtgaaacgatgggcgacatgaccaaacacggtcagcgtctgttggtcgcgaagggcggctggcatgggttaggcaatacccgttttaaatcctcggttaaccgtacgccgcgccagaaaaccaatggtacgccgggcgataagcgcgacctgctgctggaactgatgctgctggcggatgtcgggatgctggggatgccaaatgccggtaaatcaacgttcattcgcgcggtatcggcagcaaaaccgaaagtcgcggactatccgtttaccacgctggtgccgagcctgggcgtggtacgtatggacagcgaaaagagttttgtggtggccgacattccggggttgatcgaaggcgcggcggaaggcgcgggcctggggattcgcttcttgaagcacctcgaacgttgccgcgtactgctgcacctcattgatatcgatccgatcgatggttccgatccggtggaaaacgcccgtatcattattggcgaactggaaaaatacagccaggatctggcggctaaaccgcgctggttagtgttcaacaagatcgatctgatggataaatccgaagcggaagagaaagcgaaagcgatcgccgaagcgttgggctgggaagggaaatactatctgatttccgctgccagtcagctaggggtgaaagatctctgctgggatgtgatgacctttatcatcgagaatccgatcgcgcaggctgaagaagcaaaacagccggaaaaagtcgagttcatgtgggacgattatcatcgccagcagttggctgaagtggaagaagacgcagacgatgactgggatgacgactgggatgaagacgacgaagaaggcgtcgagttcatctacaaacgttaa

SEQ ID NO: 39463 - DNA, 258 bp, Salmonella typhi
atggcacataaaaaggctggcggctcgactcgtaacggtcgcgattctgaagctaaacgtctgggcgtaaaacgctttggcggtgaagcagttctggcaggcagcatcatcgttcgtcaacgtggtactaaattccacgctggcaccaacgttggttgcggtcgtgaccacactctgtttgctaaagcagacggtaaagtgaaattcgaagttaaaggcccgaaaaaccgtaaatacatcagcatcgttgctgagtaa

SEQ ID NO: 39464 - DNA, 312 bp, Salmonella typhi
atgtacgcggttttccaaagtggtggtaaacaacaccgagtaagcgaaggtcagaccgttcgcctggaaaagctggacatcgcaactggcgaaactatcgagttcgctgaagttctgatgatcgcaaacggtgaagaagtcaaaatcggcgttcctttcgttgatggcggcgtaatcaaagctgaagttgttgcccacggtcgtggcgagaaagttaaaatcgttaagtttcgtcgccgtaaacactaccgtaagcagcagggccatcgtcagtggttcactgatgtgaaaattaccggcatcagcgcttaa

SEQ ID NO: 39465 - DNA, 972 bp, Salmonella typhi
atgaatttagaaaaaatcaacgagttaaccgcgcaagatatggcgggtgtcaatgcgacaatccttgaacagcttaattccgacgttcaactgattaatcagctaggatattacattattagcggcggcggaaaacgcattcgtccgatgattgccgttcttgccgcgcgtgcggtgggttatcagggtaacgcgcacgtgactatcgccgctctgatcgagtttatccacacggcgacgctgctacatgatgatgtggtggatgaatctgatatgcgtcgcggcaaagcgacggcaaatgccgctttcggtaatgccgccagcgtgttggtcggcgactttatctatacccgcgccttccagatgatgaccagcctcggctcgttaaaagtgctggaagtgatgtcggaagcggtcaatgtgattgcagaaggcgaagtgctgcaattgatgaacgtgaatgacccggacattaccgaagaaaattacatgcgggtgatttacagtaaaacggcccgtctgttcgaagccgccgcccagtgctccggtattcttgccggttgtacgcctgagcaagagaaagggttgcaggactatggccgctaccttggtacggctttccagctcattgacgatctgctggattacagtgccgacggcgagcatctcggtaaaaatgtgggtgatgacctcaatgagggcaaacctaccttaccgttgcttcacgccatgcgccacggtacgccagaacagtcagcgatgatccgtaccgctattgaacaaggtaatggccgtcatcttctggaaccggttctggaagcgatgaccacctgcggctcgctggaatggacgcgtcagcgagcggaagaagaagccgacaaagcgatatccgcgttgcagatattgccggataccccatggcgtgaggcgctaatcggtctcgcacacatcgcggtgcagcgcgatcgttga

SEQ ID NO: 39466 - DNA, 1260 bp, Salmonella typhi
atggataaatttcgtgtacaggggccaacgacgctccagggcgaagtcacaatttccggcgccaaaaacgccgcgctgccgatcctgttcgccgctctgctggcagaagaaccggtagagatccaaaacgttccaaaactgaaagacgtggatacgtcgatgaagctcctgagccaattaggcgcgaaagtggaacgcaatggatcggtacacattgacgccagccaggtgaacgtgttctgcgcgccttatgatctggttaagaccatgcgcgcctcgatatgggcgctggggccgctggttgcccgttttggtcagggacaagtctctctgccggggggctgtactatcggcgcgcgtccggttgatctacatattaccggtctggaacaactgggtgcgaccatcaagctagaagagggctacgtaaaggcctccgtcgaaggacgtcttaaaggggcgcatatcgtgatggataaggtcagcgtcggcgcgaccgtcaccattatgtgcgccgctacgctggcggaagggacgaccatcattgaaaacgccgcgcgcgagccggaaattgtcgacaccgctaacttcctagttacgctgggggcgaagatcgccgggcagggcaccgatcgtattacgatcgagggcgtagagcgtctgggcggcggcgtttatcgtgtgctgccggatcgtatcgaaacggggactttcctggtggcggcagcgatctctcgcggcaaaatcctctgccgtaacgcgcaaccggacactctggacgcggtactggcgaaactgcgcgatgctggcgcggatatcgaagtgggcgaggactggattagtctggacatgcacggcaaacgaccgaaagcggtcaatgtccgtacagcgccgcacccggcattcccgaccgatatgcaggcgcagttcacgttgctgaacctggtggcggaagggacgggctttatcactgaaaccgtctttgaaaaccgttttatgcacgtgcctgaactcagccgcatgggcgcgcgtgcggaaattgaaagcaataccgtcatatgccatggcgtagaaacgctctctggcgcccaggtcatggcgacagatctgcgggcatctgcgagcctggtgctggcgggctgtattgcggaaggcacgacgattgtggatcgcatttatcacatcgatcgcggttatgagcgcatcgaagacaaactgcgcgcgctaggcgcgaatattgaacgcgtgaaaggcgaataa

SEQ ID NO: 39467 - DNA, 900 bp, Salmonella typhi
atgtctcaggttcaaagtggcattttgccggaacattgccgtgcggcaatttggattgaagccaatgtaaaaggcgacctggacgccctgcgcgcggccagcagaacatttgccgataaactggcgaccttcgaagtcaaatttccggacgcccatcttggggccgttgtggcgtttggcaacaatacctggcgtgccctgagtggcggcgtcggggcggaagaactgaaagattttattccttatggtaaagggctggcgccagccacgcagtatgacgtgctgatccatatcctttccctgcgccacgatgtgaatttttctgttgctcaggcggcgatggaagccttcggcgactgtatcgacgtgaaagaagaagttcacggcttccgttgggtggaagaacgcgatctgagcggctttgtcgacgggacagagaacccggcgggcgaagagacgcgtcgtgaagtggcggtgatcaaagatggcgtggatgccggcggcagttatgtgttcgtgcagcgttgggaacacaatctcaagcaacttaaccggatgagtattcacgatcaggagatgatgatcgggcgtaccaaagaagccaatgaagagattgacggcgatgcgcgtccggcaacatctcacctgagccgcgtcgatctcaaagaagatggcaaagggctgaagattgtgcgtcagagcctgccatacggcaccgccagcggtactcatggtctctatttctgcgcttactgcgcacgcctgcacaatatcgaacagcagcttctgagtatgttcggcgataccgacggtaaacgcgacgcaatgctgcgcttcaccaaaccggtgactggcggctactattttgcgccgtcgctggatcgcctgttagcgctataa

SEQ ID NO: 39468 - DNA, 855 bp, Salmonella typhi
atggtactgatgatcgtcagcgggcgttccggatcaggtaaatctgtcgctctgcgcgcgctggaagatatgggattttactgcgtggataacctccccgtcgtgctgttgcccgatctggcgcgaacgctggccgatcgccagatttccgccgccgtcagcattgatgtgcgcaatatacctgaatcacctgagatttttgaacaggcgatgaataatctgcctggcgctttctcgccgcaattgctgtttcttgatgccgaccgcaataccttgattcgccgctacagcgacacgcgccgtttgcatccgctttccagcaaaaatctttctttggagagtgcgatcgataaagagagtgacttgctggagccgttacgctcacgtgcggatctgatcgtcgacacttcagaaatgtccgtccatgagctggcggagatgctgcgtacccggctattgggcaaacgcgagcgcgaactgacgatggtatttgagtccttcggctttaaacatggtatcccgattgatgcggactatgtgtttgatgtccgctttctgcccaacccacactgggacccaaaactgcgccccatgaccgggcttgataagccggtagccgcgtttcttgaccgacacacagaagttcacaattttatctatcagactcgcagctatcttgagctatggttaccgatgctggagaccaacaaccgcagctaccttaccgtcgctatcggttgtaccggcgggaaacaccgttcggtgtatattgcagaacagctggcagactacttccgctcgcgcggtaaaaatgtccagtctcgccatcgcacgctggaaaaacgcaaaacatga

SEQ ID NO: 39469 - DNA, 729 bp, Salmonella typhi
atgagcaaacgacgcatcgcgccgttaacgtttttgcgccgtctacttttacgtatccttgctgcgctcgccgtcttttggggcggcggcattgcgctgtttagcgtggttccggtgcctttttcggcggtgatggcggaacggcagattagcgcctggctcggcggagagttcggttatgtggcgcattctgactgggtcagtatggcggatatctcgccgtggatggggctggcggtaattgcggcggaagaccagaagttccctgagcactggggctttgatgttccggcgattgaaaaagcgctggcgcataatgagcggaatgagagccgtattcgcggcgcctctacgctttcgcagcaaacggcgaaaaatctctttttatgggatggacgcagttgggtgcgcaaaggtctggaggccgggctaacgctgggcattgaaactgtctggagcaaaaagcgcatcctcacggtttatctgaatatcgcggagtttggcgatggtatttttggcgtggaggctgcggcacaacggtattttcataaacctgccagtcgcttgagtgtgtctgaagccgcgttgctggcggcggtattgccaaatccgttacgctataaggcgaatgcgccttctggctatgtgcgtagccggcaggcgtggattatgcgccagatgcgccaactgggcggggaatcttttatgacgcgcaaccagcttaattaa

SEQ ID NO: 39470 - DNA, 4461 bp, Salmonella typhi
atgttgtacgataaatcccttgagaaggataactgtggtttcggcctgatcgcccacatagaaggcgaacctagccacaaggtagtgcgtaccgccatacacgcgctggcccggatgcagcaccgtggcgcgatccttgccgacggtaaaaccggcgacggttgcggcttgctgttacaaaaacctgaccgtttctttcgcatcgtggccgaagagcgcggctggcgcttagccaaaaactacgccgtcgggatgatctttttgaataaagatcctgaactggccgccgcgtcacgccatattgtcgaagaagaattacagcaggaaaccctgtcgattgtcggctggcgcgatgtgccaaccaatgaaggcgtgctcggtgaaatcgccctctcctccctgccgcgtattgagcagatttttgtcaacgctccggcgggctggcgtccgcgcgatatggagcgccgtctgtttatcgcccgccgacgcattgaaaaacgtctgcaggacgacaaagatttctacgtatgcagcctgtcgaacctggtcaacatttataaaggtctgtgtatgccggcggatctgccgcgcttctacctggatcttgcggatctgcgtctggaatcggccatctgcctgttccaccagcgcttttccactaacaccgtgccgcgttggccgctggcgcagccgttccgctacctggcgcataacggcgagattaacaccatcaccggcaaccgccagtgggcgcgcgcccgtacctataaattccagacgccgctgatcccggatttacaatccgctgcgccgtttgttaacgaaaccggttcggattccagctcgctggacaacatgctggaactgctgctggcaggcgggatggacattatccgcgccatgcgcctgttggtgccgcccgcctggcagaacaaccccgatatggaccaggatctgcgcgccttctttgactttaactccatgcatatggagccgtgggacggtccggcaggcatcgtgatgtccgacgggcgcttcgccgcctgtaaccttgaccgtaacggcctgcgcccggcacgctatgtcattaccaaagataagctgatcacctgcgcctccgaagtcggtatctgggactatcagccggatgaagtggtcgagaaaggccgcgtcggcccaggcgagctgatggtgatcgacacccgcggcggacgtattctgcattccgcggaaaccgatgacgatctgaaaagccgccatccgtataaagcgtggatggaaaagaatgttcgccgtctggtgccgtttgaagagttgccagatgaagaagtcggtagccgcgaactggacgatgacctgctcgccagctatcagaaacagtttaactacagcgccgaagagctggactccgttatccgcgtgttgggcgaaaacggccaggaagccgtcggttcaatgggcgacgataccccctttgccgtgctctccagccagccgcgtattatttacgactacttccgccagcagttcgcgcaggttactaacccgcctatcgacccgctgcgggaagcgcacgtcatgtcgctcgccaccagcatcggtcgcgaaatgaacgtcttctgcgaagcggaaggtcaggcccatcgcctgagttttaaatcgccaattctgctgtactccgatttcaaacagctcaccaccatgagcgagcatcactaccgcgccgactggcttgacattacctttgatgtcaccgaaaccacactggacgcgacggttaaggcgctgtgcgataaagcggaacagatggtgcgcaacggcaccgtgctgctggtcctctcggatcgcaatatcggtaagaatcgcctgccggtccccgcgccgatggcggtgggcgcggtgcagactcgtctggtcgatcaaagcctgcgctgcgacgccaacatcatcgtagaaaccggaagcgcccgcgatccgcatcactttgcggtactgctcggctttggcgcaacggccatctatccgtacctggcctacgaaacgctggggcgtctgattgatacccaggccatcgctaaaaactaccgtaccgtgatgcagaactaccgtaacggcatcaacaaggggctgtacaagattatgtccaaaatgggcatttcgaccattgcctcttaccgctgctccaaactgtttgaagcggtcgggctgcacgatgatgtggtaaacctgtgcttccagggcgtggtcagccgtatcggcggcgcgagctttgatgacttccagcaggatctgctgaatctctccaaacgcgcctggctggcgcgcaaacccattagcccgggcggcctgctgaagtacgtccacggcggcgaatatcacgcctataacccggatgtcgtgcgtaccctgcaacaggcggtacagagcggcgagtacagcgattatcaggaatacgccaaactggtcaatgagcgtccggctgcaacgctgcgcgatctgctggcgatacatccagacggcgaggcggtgactatcgacgaggttgagcccgccagtgagctgtttaaacgctttgataccgcagccatgtctatcggcgcattaagtccggaagcgcacgaagcgctggcggaagcgatgaacagcctcggcggcaactccaactccggcgaaggcggcgaagacccggcgcgctacggcaccaataaagtgtcgcgtatcaagcaggtggcttccggccgttttggcgtgacgccagcgtacctggtcaatgccgatgtgattcagattaaagtcgcgcagggcgcgaaaccgggcgaaggcggtcagttgccgggggataaagtcactccgtatatcgctaaactgcgctattcagtgccgggcgtgacgctgatctccccgccgccgcaccacgatatttactctatcgaggacttagcgcagctcattttcgacctcaaacaggtcaacccgaaggcgatgatctccgtgaagctggtgtccgaaccgggcgtcggcaccatcgcgaccggcgtggcgaaagcctatgcagacctcatcaccatcgctggctacgacggcggtaccggcgcaagcccgctctcttcggtgaaatacgctggctgcccgtgggaactaggacttgttgaaacccagcaggcgctggtcgccaacggtctgcgtcacaagattcgtctgcaggtggacggcggtctgaaaaccggcgtcgatatcatcaaagcggcgattctcggtgcagaaagtttcggcttcggcaccggcccgatggtggcgctgggctgtaaatacctgcgcatttgccatctgaacaactgcgcaaccggcgtggcgacgcaggatgaaaaactgcgtaagaaccactatcacggcctgccgttcaaagtgaccaactactttgaatttatcgcccgcgaagtgcgcgagctgatggcttcgcttggcgtgacccgcctggtggatttgattggccgcaccgacctgctgaaagagctggagggcttcaccgctaaacagcagaagctggcgctgtctcgtctactggaaaccgctgaacctcatccgggtaaagcgctgtactgcaccgagaataacccgccgtttgataacggtgtgctgaatgcgcaactgttgcagcaggcgaagccgtttgtcgatgcgcgccagagcaaaaccttctggttcgacatccgcaacaccgatcgttccgtgggtgcgtcgctttccggttacatcgcacagacccacggcgatcaggggctggcttccgatccgattaaagcgcacttcagcggtaccgcaggccagagctttggcgtgtggaacgcgggcggcgtggagttatatctgactggcgatgccaacgactatgtcggtaaaggtatggcaggcggtttgatcgccatcagaccaccggtaggttccgccttcctcagccataaagccagcatcatcggcaacacctgcctgtatggagcgaccggtggccgtctgtacgcggcggggcgcgcgggcgaacgtttcggcgtgcgtaactccggggcgattaccgtagtagagggcatcggcgacaacggctgtgaatacatgaccggcggcatcgtctgcgtgctgggtaaaaccggcgttaacttcggcgcggggatgaccggcggcttcgcctatgtgctggacgaagatggcgaattccgtaaacgcgtgaacccggaactggtagaagtactggacgttgattcgctggctatccacgaagagcatctgcgcggcctgatcaccgagcacgtgcaacatactggttcgcaacgcggcgaagagatcctgtccaggtggtcaagcttctcaacccaattcgcgttagttaagcccaagtccagcgatgtcaaagccctgttgggccaccgtagtcgtagtgcggcagaattgcgcgtgcaggcgcagtaa

SEQ ID NO: 39471 - DNA, 1419 bp, Salmonella typhi
atgagccagaatgtttatcaatttatcgacctgcagcgcgttgatccgccgaagaaaccgctgaagctccgtaagatcgagtttgttgaaatctacgaaccgttttctgaaggtcaggcgaaagcccaggcggatcgctgtttgtcctgcgggaacccctactgcgagtggaaatgtccggtacataactacatcccgaactggctgaaactggctaacgaagggcgtatttttgaggcggctgagctatcgcaccagaccaacaccctgccggaagtgtgtggccgcgtctgcccgcaggaccgcctgtgcgaaggctcctgtacgctgcacgatgagttcggcgcagtgaccatcggtaacattgagcgctatatcaacgataaagcgttcgaaatgggctggcgcccggatatgaccggcgtgcgccagacggacaaacgggtagcgattatcggcgctggtccggcagggctggcgtgcgccgacgtgctgacccgcaacggcgtgaaggcggtggtctttgatcgccatccggaaatcggtggtctgctgaccttcggtattccagctttcaaactggaaaaagaggtgatgacccgtcgtcgcgagatcttcaccggcatgggtattgagttcaaacttaataccgaagtgggtcgtgatgtacagcttgaagatctgctgaaagattacgatgcggtattccttggcgtcggcacctatcagtcgatgcgcggcgggctggaaaatgaagatgcggacggggttttcgacgctctaccgttcctgatcgccaatacgaagcagatcatggggtttggcgaaaccagcgacgaaccatatgtcagcatggaaggcaaacgcgtggtggtgctgggcggcggcgataccgcaatggactgcgtacgcacttccatacgccagggcgcaacgcacgtaacctgtgcttatcgtcgtgatgaagagaacatgccgggttccagacgcgaagtgaaaaacgcgcgcgaggaaggtgtcgagtttcagtttaacgttcaaccgctgggcattgaagtcaatgccaacggcaaagtgagcggcgtaaaaatggtgcgtactgaaatgggcgaaccggatgccaaaggccgtcggcgggcggagatcgtcgccggttccgagcatgtggttccggctgatgcggtggtgatggcgtttggttttcgtccacacagcatggaatggctggcgaaacacagcgtggaactggactcgcagggacgaattatcgcgccggaacgcagcgataatgctttccagaccagcaacccgaaaatcttcgccggtggcgacatcgtgcgcggttccgatctggtggtgacggcgattgccgaaggccgtaaagcggctgacgggattatgaactacctcgaagtgtaa

SEQ ID NO: 39472 - DNA, 1362 bp, Salmonella typhi
atgaaactaaagaccacattgttcggcaatgtttatcagtttaaggatgtaaaagaggtactggctaaagccaacgaactgcgttcgggggatgtgctggccggggttgccgcggcaagttcgcaggagcgcgtagcggcaaaacaggtactgtcggaaatgacggtggcggatatccgcaacaatccggtgattgcctatgaagaggactgcgtgacgcgcctgattcaggatgacgtcaacgaaacggcctataatcggattaaaaactggagcatcagcgaactgcgcgaatacgtactgagcgatgaaacctccgtggacgacatcgcgtttacccgcaaaggcctgacctccgaagtggtggcggcagtggcgaaaatctgctccaacgccgacctgatctacggcggtaagaaaatgccggtgatcaaaaaagccaataccaccatcggtattccgggcacctttagctgccgtttgcagccgaacgatacccgtgacgatgtgcagagtatcgccgcgcaaatctacgaagggctttctttcggcgcaggcgatgcggtgatcggcgttaacccggtgaccgatgacgtggagaacctgacccgcgtgctcgacaccgtttacggcgttatcgataaattcaatattccgacccagggctgcgtgctggcgcacgtcaccacccagattgaagcgattcgtcgcggcgcgccaggcggactgattttccagagcatttgcggcagcgagaagggcttaaaagagttcggtgtcgagctggcaatgctcgacgaagcgcgggcagtgggggcggagttcaaccgcatcgccggggaaaactgcctgtactttgaaaccggacagggctcggcgctgtcggctggtgcgaactttggtgccgaccaggtgacgatggaagcgcgtaactacgggctggctcgctactacgatccgttcctggtgaacaccgtggtgggctttatcgggccggagtatctctacaacgacaggcagattatccgcgccggtctcgaagatcactttatgggcaagctgagcggcatctcgatgggctgcgactgctgctataccaaccatgccgacgccgaccagaaccttaacgaaaacctgatgattctgctcgccactgccggctgtaactacatcatggggatgccgctcggcgacgacatcatgctcaactaccagactaccgctttccacgataccgccaccgtccgtcagttgctgaatttacggccgtcgccggagtttgaacgctggctggaaacgatgggcattatggcaaacggtcgtctgaccaaacgggcgggcgatccgtcactgttcttctga

SEQ ID NO: 39473 - DNA, 1227 bp, Salmonella typhi
atgggaattaacgaaatcatcatgtacatcatgatgttctttatgctgattgccgccgtggacaggatcctgtcgcagttcggcgggtcggcgcgcttcctcggtaaatttggcaagagtatcgaggagtctggcggccagtttgaagagggctttatggcgatgggcgcgttgggactggcgatggttggtatgaccgcgctggcgccggtgctggcgcatgtactggggccggttattatcccggtatacgaaatgctgggcgcgaacccatccatgttcgcgggtacgctactggcttgtgatatgggcggattcttcctcgccaaagagctggccggcggtgatgtcgcggcgtggctatactcagggttaatacttgggtcgatgatggggccgaccattgtgttctccattccggtggcgctcggcattatcgaaccgtctgaccgccgctacctggcgcttggcgtactggcgggtatcgtcaccattcccattggctgcattgcgggggggttgatcgccatgtactcaggtgtgcagatcaatggtcagccagtggagtttaccttcgcgctgatcctgatgaacatgatcccggtattgatcgtcgcggtgctggtagcgctggggctgaagttcatcccggaaaaaatgatcaacggtttccagattttcgccaaatttctggtggcgctgatcaccatcggtctggcggctgcggtggttaaattcctgttgggctgggagttgattccggggctcgacccgatctttatggcgccaggcgacaaacccggcgaagtgatgcgcgccattgaagtgatcggctctatctcctgcgtgctgctcggcgcgtatccgatggtgctgttactgacccgctggtttgaaaaaccgttgatgaatgtcggtaagctgctgaacgtaaataatattgcggcggcaggcatggtagcgaccctggcgaacaatatccccatgttcggcatgatgaagcagatggatacccgcggcaaagtgattaactgcgcatttgccgtctctgcggcgttcgcgctggtcgaccatttaggcttcgccgctgccaacatgaacgccatgatcttcccgatgattgtcggcaagctgatcggcggcgtgacggcgattggcgtggcgatgatgctggtgccgaaagatgacgccgcccaggtgaaaaccgaagcggaggcgcaatcgtga

SEQ ID NO: 39474 - DNA, 639 bp, Salmonella typhi
atggctgtcgctgccaacaaacgttcggtaatgacgctgttttctggtcctactgacatctatagccatcaggtccgcattgtgttggctgaaaagggtgttagttttgagatcgaacatgtggaaaaggacaatccacctcaggatctgattgacctcaacccgaatcaaagcgttccgacactggtggatcgtgagctgaccctgtgggaatctcgcatcattatggaatatctggatgagcgtttcccccatccgccgctgatgccggtttatccggtcgcgcgcggtgaaagccgtctgtacatgcaccgtattgaaaaagactggtatacgctgatgaacgtcatcgtaaacgggtctgcttccgaggtcgactctgcgcgtaaacaactgcgtgaagagctgctggcgattgcgccggtatttggtcagaaaccgtatttcctgagcgacgaattcagcctggttgattgctacctggcgcctctcctgtggcgtttaccgcagttgggtatcgaattcagcggcgcaggggcgaaagagctgaaaggctatatgacccgcgtctttgaacgtgattctttcctggcttctttaaccgaagctgaacgtgaaatgcgcctcggtcggggttaa

SEQ ID NO: 39475 - DNA, 393 bp, Salmonella typhi
atggctgaaaatcaatactacggcactggtcgccgcaaaagttccgcagctcgcgttttcatcaagccgggcaacggtaaaatcgttatcaaccaacgttctctggaacagtacttcggtcgtgaaactgcccgcatggtagttcgtcagccgctggaactggtcgacatggttgagaaactggatctgtacatcactgttaaaggtggtggtatctctggtcaggctggtgcgatccgtcacggtatcacccgcgctctgatggagtacgacgagtccctgcgtggcgaactgcgtaaagctggcttcgttactcgtgacgctcgtcaggttgaacgtaagaaagtcggcctgcgtaaagcacgtcgtcgtccgcagttctccaaacgttaa

SEQ ID NO: 39476 - DNA, 183 bp, Salmonella typhi
atgggaaaagctacttataccgtcacggtcacgaataatagcaacggcgtctctgtggactatgaaacggaagcaccgatgacgttgctggtacctgaagttacagcagaagttgtgaaggatttggtcaataccgtgcgttcctacgataccgaaaacgaacacgacgtttgcggttggtaa

SEQ ID NO: 39477 - DNA, 363 bp, Salmonella typhi
atgcggcaaattccacaaaatcatatccatacacgttccacgcccttctggaacaaagagacggcgcctgccggaattttcgaacgccaccttgataagggaacgcgacccggcgtttatcctcgcctctcggtgatgcagggggcggtcaaatatctcggatacgctgatgaacattgctctgagccggaagagatcatggtgatcaatgccggcgagtttggcgtgtttcctccggaaaagtggcacaatattgaggtcatgacggatgatacctattttaacatcgacttttttgtcgcgccggaagtactgatggaaggggcgacctcacgaaaagtcattcatgccgggagagaataa

SEQ ID NO: 39478 - DNA, 429 bp, Salmonella typhi
atgaaaacttttacagctaaaccagaaaccgtaaaacgcgactggtatgttgttgacgcgaccggtaaaactctgggccgtctggctactgaactggctcgtcgcctgcgcggtaagcacaaagcggaatacactccgcacgtagataccggtgattacatcatcgttctgaacgctgacaaagttgctgtaaccggcaacaagcgtactgacaaagtgtactatcaccacaccggccacatcggtggtatcaaacaagcgacctttgaagagatgattgcccgccgtcctgagcgtgtgattgaaatcgcggttaaaggcatgctgccaaaaggcccgctgggtcgtgctatgttccgtaaactgaaagtttacgcgggcaacgagcacaaccacgcggcacagcaaccgcaagttcttgacatctaa

SEQ ID NO: 39479 - DNA, 405 bp, Salmonella typhi
atgttcatgacctgggaatatgcgctaattggattagtcgtcggtatcatcattggtgccgtggccatgcgttttggtaatcgtaagttacgtcaacagcaggcattgcagtacgaactggaaaaaaacaaagctgagctggaagagtaccgtgaagagctggttagccactttgcccgcagcgcggaactgctggataccatggcgcatgattaccgccagctgtatcagtatatggcgaaaagctccagcagcctgctgccggaaatgtctgcggagtcgaatccgttccgtaaccgtctggcggagtctgaggcgagcaacgatcaggcgccagtacaaatgccacgtgattattctgaaggcgcgtctggcctgttacgtagcggcgcaaagcgcgattaa

SEQ ID NO: 39480 - DNA, 951 bp, Salmonella typhi
atgaaccagctagacggcatcaaacaattcactaccgtcgtcgccgacagcggcgacatcgagtccatccgccactaccagccgcaggatgccacgacaaatccctctttactgttaaaagccgccgggcttgagcagtatggtcatttgattgaggatgcgattgcctggggaaaaaaacacggcggtacgcaggaacagcaggttgcggcagccagcgataaactggcggttaattttggcgcggaaatactgaaaagtattcccggtcgcgtctccactgaagtcgacgcgcggttatcgttcgataaagaaaaaagtatcgagaaagcacgccatctggtggatctctaccagcagcaggatgttgataaatcacgcattctgatcaagctcgccgcgacctgggaaggtattcgcgccgccgaacagctcgaaaaagaaggcattaattgcaacctgacgttgttgttctcttttgcccaggcgcgcgcctgcgccgaagcgggcgtctatttaatctctccgttcgtgggccgaatttacgactggtatcaggcgcgtagtccgctggagccgtatgtcgtggaggaagatcccggcgtgaaatcggtacgcaatatctacgattactttaaacagcatcgctatgaaaccatcgtgatgggtgcaagtttccgccgtactgagcaaatcctcgcgctaaccggctgcgatcgactgactatctcccctaacctgcttaaagagctgaaagaaaaagaagaaccggtgatccgtaaactggtgccttcctcgcagatgttccaccgtcctacgccaatgacggaagcggagttccgctgggaacataatcaggacgcgatggccgtagagaagctgtcggaaggtatccgccttttcgccgttgaccagcgcaaactggaagacctgcttgccgccaaactataa

SEQ ID NO: 39481 - DNA, 1368 bp, Salmonella typhi
atgaaaaaacacacccagctgttaagtgcattagcgttaagtgtcggattaactctttcggcaccgtttccagcccttgcatcgataccaggccaggtgccaggccaggcgacgctgccaagccttgcccctatgctggagaaagtgctgcctgctgtcgtcagcgtaaaagtcgagggaaccgccacccagagccaaaaagtgccggaggagtttaaaaaattctttggcgaggatctgccagaccagccgtcccagccgtttgaaggactcggttcgggggtgattatcgatgccgcgaaaggctatgtattaaccaataatcatgtgattaatcaggcacagaagatcagcattcaactgaatgacggacgcgaattcgacgcgaagctgatcggcggcgacgaccagagcgatatcgctctgttacaaattcagaatcccagcaagttaacgcaaattgccatcgccgattccgacaaactccgcgtcggcgatttcgccgtggcggttggtaatccgtttggccttggacaaaccgccacctccgggattatttcagcgctgggacgcagcgggcttaatctggaagggcttgagaactttattcaaaccgatgcctctattaaccgcggcaactccggcggcgcgctgcttaacctgaacggcgagctgatcgggattaataccgcaatcctcgcgccagggggcgggagcatcggcattggctttgctattccttccaatatggcgcagacgctggcgcagcagttgattcagttcggcgaaatcaaacgcggattgctgggaattaaaggcactgaaatgaccgctgatatcgctaaggcattcaaactgaacgttcagcgtggcgcttttgtcagcgaggttttacccaattcaggttcggcgaaggccggggtgaaatccggagacgtgattatcagtcttaacggtaagccgctgaatagctttgccgaactgcgttcacgtatcgccaccaccgaaccgggcacgaaagtgaagctgggcctgctgcgcgatggtaagccgctggaggtggaagtcacgctggattccaatacctcttcttccgccagcgccgaaatgatcgccccggcgttgcaaggcgcgacgttgagcgacggccagctgaaagacgggacgaaaggcgttaaggttgatagcgtcgaaaaaagcagtcctgccgcgcaggccggtttgcaaaaagatgatgttatcatcggcgttaatcgcgatcgcatcagttctatcgccgaaatgcgcaaagtgatggcggcaaaaccgtccatcattgctcttcaggtagtacgcggcaacgagaacatttatctattgctgcgctaa

SEQ ID NO: 39482 - DNA, 1701 bp, Salmonella typhi
gtgacggttaaacgcccggtctcggccagtctggctaaggcttttttctatattgtgctgttgtctattctgtccaccggcagcgcattactgacgctgaccagcagtttacgggatgccgaagcgatcaatatcgccggttcgctacgaatgcagagctatcggctgggttacgatctgcaaagccgtagcccgcagattaatgcgcatcgtcaacttttccagcacgcgctcaactcgccggtactgcaaaatctcaacgcctggtatgtgccgcaggcggtgaaaactcgctacgcgcgcctgcacgccaactggctggagatgaatagccgcctacaggatggcgacattgtctggtatcagtccaatatcaacaattacgtcgatcaaattgatctcttcgttctggcgttacagcattacgccgagcgtaaagtcatgctggtcgtcgccatatcgctggcgggcggtatcggcatatttacgctggtcttttttaccctacggcgtattcgccagcaggtcgttcgcccgctgaatcaactggtcaccgccagtcagcgaattgaacatggtcagttcgccccgctgccgctggataccagcttacccaatgagctgggattgttggcgaaaacgtttagtcagatgtcgagcgagctgcataaactttatcgttcgctggaagcctcggtggaagaaaaaacgcacgatctgcacgaagcgcaccgccgcctggaggtgttataccagtgctcccaggcgctgaataccagccaaatcgatgtccactgttttcgccatattttgcaaattgtccgtgaacatgacgccgcctggtatctggagttaaccgtgggcgataactggcggattagcgaaggcacgcaaagccccgacctgccgatgcaaatgctgccagtgacgatgcaggacacggtctatggcgaactccactggcaaagccccaacgttaatgcctctacgccgttgctgaacagcgtctccacgatgctggggcgtggtttgtactttaatcaggcgcaaaaacacttccagcaacttttgttaatggaagagcgcgcgacgattgcccgtgagttacacgattcgctggcgcaggtactttcttatttacgtattcaattaacgcttttgaagcgcgccattccagaagataacgccggcgcgcaaagcatcatggcggatttttccagagcgctgaacgacgcctaccgtcagcttcgcgagctactcaccacgttccgtctgacgttacagcaggccgatttaccctccgcattgcatgagatgctggaagatttacagagtcagactccggctaaactcaagttggattgccgtttacccacgctggcgctggatgcgcaaatgcaggtgcatttattgcaaattgtgcgtgaagctgtcctgaacgccattaaacacgccaacgcgagcgaaatcgccgtgagctgcgtcaccgcgcctgacggcgatcataccgtttatattcgcgataatggcattggtatcggcgaaccgcatgagcctgccggacactatggtctgaatataatgcgtgagcgcgcggaacggcttggcggcacgctgaatttttcgcaaccctccggcggcggcacgctggtcagtatcagttttcgctcctccaacaaggaagagagtcagttaacgtaa

SEQ ID NO: 39483 - DNA, 2016 bp, Salmonella typhi
atgtctgatatcgatgcgctacgggcgttaacgtcgcaaatgacacaggaaggcattcgccgtttactggtcatcagcggcgatgcggcgtggtgccgggaacgggccgaggcgatacgcgctgtattgcccggtgactggtgggtcgcgcctgacgcgcccgcccagccgcgctgtacgccacaggcgttacaaacgctgctgggccgtgaatttcgtcatgcgatatttgatgcctggcagggctttgacgccgcagcgtttgccgccctgagcgggaccttgcaggccggaagttggctgcttctgctgatgccgccgtatgagacgtgggaaagccggcctgataccgattcactgcgctggagcgactgcgcgcagcctatccccacaccgcagtttgcacagcatcttaaacggactctttcccgcgatccgcaaacgctgctttggcgacagcgccagccgttttgctggccatcttatccttcccgcgaacgctggcgacccgccaccggcgagccgcagccggagcaggcggctatcttatcgcgtttacgtgaaatgccgcccggcgtggcgacggtgattgccccccgtgggcgcggcaaatcggcgctggccgggcaattcatctcacagatggcgggcacggctatcgtgaccgcaccggcgaaaacggcaacggatatcctggcagcgtttgccggtgagcggttctgctttatggcgccggatgcgctgctggcgagcggggcaagagccgactggctggtggttgacgaggcggcggcaatccccgcgccgctgctgctgcaactggtttcgcgctttccccgcatactactcaccaccaccgttcagggctacgaaggcaccggacgcggttttttacttaagttttgcgcccgttttccgcagcttcaccgctttacgcttcgtcagcctgtccgctgggcgccagaatgcccgctggaaaatatcgtcagcgaggcgctgatattcgacgatgaagcgtttgcgcaggcgccgcatggcgggatagcaatctcggcattttaccagcaggcctgggggaagacgcccgcgttgccgagggctgtgtatcagttactgtcgggggcgcactatcgtacttcgccgttggatctgcgccgaatgatggatgcgccaggacagcatttcttgcaggctacggcgaataaccgtgtggcgggcgccctctggctggtcgaagagggcgggttatccgcagagctcagtcaggctgtatggtgcggtttccggcgtccgcgtggaaatctggtggcgcagtcgctggcggcgcacggtagcgaccctttagccgcgacgctggtcgggcgtcgcgtaagccgtatcgcggtgcaccccgcccgtcagcgcgaaggcatcggtcagcagttgattgcctgcgcgtgcgagcaggcggcgcagtgtgattatctttccgtcagcttcggctatacgccggagctgtggcgcttctggcaacgctgcggctttgtgctggtacggatgggcagccatcgggaggcgagcagcggttgctatacggcgatggcgttattgccgctgagcgacgcgggacaacggctggcgcaacaggaacaccgacgtttgcgccgcgatgcggatatcctgacgcagtggaacggcgaggcgataccgctggcggcgttgcgcgaacaggcgcttaatgatgaagactggcgtgagctggtcggttttgcgttcgcgcaccgcccgctactgacatcgttaggttgcctgcatcgtttactgcaatacagcgcattgccattgccggcgctgagagggcggctggaggaaaaagccagcgatgccgaactgtgcgcccggctacgcatttcaggccgtaaagctctgctggcgttgcagcgtgcgcaggcggcgcaggcgctaattgcgttggatgccggacgaacgcagcgtttgcgcgacgtaatgccaggcggtggggaccatgccggatag

SEQ ID NO: 39484 - DNA, 1968 bp, Salmonella typhi
atgggcattttctccattgccaaccagcacattcgttttgcggtaaagctggcgtgcgccattgtgctggcattatttatcggcttccattttcagctggagacgccgcgttgggcggtgctgaccgccgcgatcgtggcggcaggcccggcatttgccgccggcggggaaccctattccggcgctatccgttatcgcggaatgttgcgtattatcgggacgtttattggctgtatcgccgcgcttatcattattatctctatgatccgcgcgccgctattgatgattctggtgtgctgtgtctgggccggtttttgtacctggatctcctctttagtacggatcgaaaactcttatgcgtggggactgtcaggttatactgcgctgatcattgtgattaccattcagacggagccgctgcttacgccgcaatttgcgcttgagcgctgtagcgaaatcgtcatcggcattggctgcgctattttagcggatctgcttttctcgccgcgatcgataaagcaggaggttgatcgcgaactggactgtttactggtagcgcaatatcagctaatgcaactttgtattaagcatggcgacagcgaagaagtcgacaacgcctggggcgatctggtgcgacgcacggcggcgctggaggggatgcgaagtaatctgaatatggaatcttcgcgctgggtacgcgctaaccgccgcctgaaagcgttgaatacgctttcgctcacgctgattacgcaatcctgtgaaacttatcttattcaaaacacgcggccggaactgattaccgatacattccgggaactgttcgagacgccggttgaaacggtacaggacgtccacaggcagttaaaacggatgcggcgtgtcattgtttggaccggcgagcgcgaaacgcccgtcacgctttatagctgggtaggcgctgcaacgcgctatctgttgcttaaacgcggcgtgatcagtaacaccaaaatcagcgcgacggaagaagagatcctgcaaggcgagcccgtagttaaagtggaatccgctgaacgccaccatgcgatggtgaacttctggcgcaccacgctttcctgcattctggggacattattctggctatggaccggctggacatcgggtaatggcgcgatggtgatgattgccgtggtgacctcgctggcgatgcgtttacccaatccgcgcatggtctgcattgattttatttatggcactctggcggcgttgccgctgggattgctctatttcctggtgattattcccaatacgcagcaaagtatgctgttgttatgtttgagcctggcggtattggggttctttatcggtattgaagttcagaaacggcgtctggggtcgatgggggcgctggccagtacgattaacattattgtgttggataatccgatgacgttccatttcatccagttcctcgacagcgcgttggggcaaattgtcggctgtatgctggcgtttatcgtcatcctgctggtgcgtgataaatccaaagatcgaaccggtcgcgtgctgcttaatcagtttgtttccgctgcggtctcggcaatgacgaccaacgtggtacgccgtaaagaaaaccgtctgcctgcgttatatcagcaactctttttgctgatgaataaattcccaggcgatttgccgaagttccgcctggcgctaacgatgatcattgctcatcaacgtctgcgcgacgcgccgataccggttaatgaagatctgtcagtgttccaccgccagcttcgtcgtaccgcagaccatgttatttccgccggaagcgatgataaacggcgacgctactttggtcagttgctggatgagctggatatctatcaggagaaattacgtatctgggaggcgccgccgcaggtgacggaaccggttaaacgcctgacgggcatgttacataaataccagaacgcgcttaccgatagctaa

SEQ ID NO: 39485 - DNA, 3801 bp, Salmonella typhi
gtgaggcgattgccggggattttattgctcactggagccgcgctcatcgtcattgcagcgctgctggttagcgggctgcgcctggcgttgcctcatcttgacgcctggcgtccagctatcctgaataaaattgagtccgtgaccggcgtgccggtggccgccagccaactctccgcaagctggcaaaattttggccctacgctggaagcgcataatattcatgccgccctgaaagatggcggcgagctgtcgataaaacgcgttacgctggcgctggacgtctggcaaagcctgttgcacatgcgctggcagtttcgcgacctgaccttctggcaactcaatttccgcaccaacacgcctcttcaaagcagcgacggcgaaggcatcgaaaccagccgtttaagcgatcttttcctgcggcagttcgatcatttcgatctgcgcgatagccaaatcagttttctgacgctttcaggacaacgcgcggaactggcgatcccacaacttacctggctaaacggcaaagagcggcaccgagccgaaggcgaggtcagcctctccagcctgaccgggcagcacggcgtgatgcaggtgcggatggatttacgcgatgacgacggtctgctaaataacggcagagtctggttacaggccgacgatattgacgtcaagccgtggctgggcaaatggatgcaggataatgtggcgctccagacggcgcgtttcagtctggaaggctggatgacgctcagtaaaggcgaaatcgccggaggggacgtctggctgaaacagggcggcgcaagctggctgggcgataacacgacgcatacgttgtctgtcgataacctgacggcgcagattagccgcgagcagccgggctggcagttttatattccggacacacggattacgcttgatggcaaaccctggccgagcggagccttaaccgtggcctggctcccgcagcaggacgtcggcggcgagaatcacacacgtagcgatgagctacgcattcgcgccagtaatcttgaactggcggggctggaagcattacgtccgctggcggctaaactgtcgcctgtgctgggcgaaatatggcaggctacgcagccgagcggaaagatcgccacactggcgctggatattccgctacaggcgaccgaaaaaacgcgttttcaggcatcgtgggaaaatcttgcctggaaacagtggaagctgttgcccggcgcggaacatttttccggtacgctggcgggaagcgtagaagacgggcagatgaaggttgcgatgcagcaggctaagatgccctatgaaaccgtttttcgcgcgccgctggaaattgaaaacggcgtcgcgacgcttagctggttgaagaatgagaacggctttcagcttgatggccgcgacattgacgtcaaagcaaaggcggtacatgcgcgcggcgggttccgctatctgcaaccgacgggcgacgaaccgtggctgggtattctggccggaatcagtaccgatgatggatctcaggcgtggcgctattttccggaaaacctgatgggcaaagcgctagtcgattaccttagcggcgcgattcagggcggcgaggcggataacgccacgttggtttacggtggtaacccgcacctctttccctataagcataacgaaggtcagtttgaagtgctggtgccgctacgcaatgcgacgtttgcttttcaacccgactggccggcgctaaaaaatctcaacattgaactggatttcctgaacgacggcctgtggatgcgttcggatagcgtcgatttgggcggggtgaaggccagcaaactcgcggcggcgattccggattattccaaagagaaactgctcattgatgccgatattaacgggccgggaaaagccgttgggccttattttgacgagacgccgctaaaagactcgcttggctcgacgctggcggagctccaattagatggcgatgtgaatgctcgcttacatcttgatattccgctggacggagaacaggttaccgccgagggcgatgtctcgttgcgtaataacagtctgtttattaagccgctaaacagcacgctcaaaaatctgaacggtaaattcagctttgtgaatggcgcgctaaaaagcgggccactgacggcaaactggtttaatcagccgcttaacctggatttcagtacgacggaaggggcaaaagcctatcaggtcgccgtcaacctgaacggtaactggcagccaacgcgtatgggcgtcttaccgccgcaactgaatgacgccctgagcggcagcgtgacgtggaatggtaaagtcggcatcgatcttccatatcacgctgacaccacttatcacatcgagctgaacggcgatctgagaaatgtgagcagtcacttaccttctccgctaaataaacccgcaggcgaagccattccggtgaacattcaggctgacggcaacctgaaaagttttgcgctaacggggagcgcagggagtaaaaatcactttaacagccgctggttattaaatcagaagctgacgttggatcgggctatctggacgacggacagccggacgattccgccattacctgctcaacaaggcgttgagctcaatctgccggcgctggatggcgcgcaatggctggcgttattccagaaaggcgcggcggataacgtgagcagttcggccgagtttcctcaacgcgtcacgttgcgtactcccgcgctatcgctgggcggccagcagtggaacaatttgagcgtcgtttcagccccctcgctgaacggaacaaaaattgaagcgcagggccgtgaggtgaacgccacgctactcatgcgcaaccatgcgccgtggctggcgaacattaagtacctgtactacaaccctggcgtcgcaaaaacgcacgcctcgtcaccaacgccgacatcgccgttggcttcggcgaacacgattagcttccgcggctggccggacttacagcttcgctgcgaagagtgctggctatgggggcaaaaatatgggcgtattgatggcgatttcgccatcaaaggcaatacgctgactctggcgaatggcctgatcgataccggattcgcccgtttgaaagcgaacggcgagtgggtgaatgcgccgggtaatgaacgaacctcgctgaaaggtagtctgcatggtagtaacctcgacacggctgccgggttcttcggcatctcgacgccaatccagaacgcgtcttttaacgtagattacgatctgcactggcgaaacccgccctgtcaacctgaggaagccacgctcaacgggattttacgtacgcgtctgggcaaaggcgagtttactgatctcagtagcggtcatgccggacagctactgcggctgctcagttttgatgcgttgctgcgtaagctgcggtttgacttcagagatacctttagcgagggcttctatttcgactctattcatagtaccgcgtggattaaagatggcgtcctgcatactgacgatacgctggtggatgggctggaagcggatattgcaatgaaaggttctgttgatctggtgcgtcgtcgtcttgatatggaggccgttgtcgcggcggaaatttccgccaccgtgggcgtcgctgccgcgtttgccgttaacccgattgtcggcgcggcggtatttgccgccagtaaagtgttggggccgctatggagcaaggtctccattctgcgttatcgcattaccggtccggtcgatgcgccgcagatcaacgaagttctgcgccaaccgagaaaagaaagccagcaatga

SEQ ID NO: 39486 - DNA, 1044 bp, Salmonella typhi
atgttgaaaaaatttcgtggcatgttttccaatgacctgtccattgacctgggtaccgcgaataccctcatttatgtaaaaggacaaggcatcgtattgaatgagccttccgttgtggccattcgtcaggatcgtgccggttcgccgaaaagcgtggctgcagtcggtcatgatgcgaagcagatgctgggccgtacgccgggcaatatcgctgcgatccgtccgatgaaagatggcgttatcgctgacttctttgtgaccgaaaaaatgctccagcactttattaaacaagtgcacagcaacagctttatgcgcccaagcccgcgcgtactggtatgcgtgccggtcggcgcgacgcaggtagaacgccgcgcgattcgtgaatccgctcagggcgcaggcgcccgtgaagtctttttgatcgaagagccgatggcggccgcgatcggcgcaggtctgccagtttctgaagcaaccggttcaatggttgtggatatcggtggtggtaccactgaagttgccgtgatctccctgaacggcgtggtttactcttcttctgtccgtattggtggtgaccgcttcgacgaagccatcattaattacgttcgtcgtaactacggttctctgattggtgaagccaccgcagaacgtattaaacacgaaatcggttccgcttatccgggcgacgaagtccgcgagatcgaagtgcgtggccgtaacctggcggaaggcgttccacgcggctttaccctgaactcaaacgagattctggaagcgttgcaggaaccgttgaccggtatcgtcagcgcggtaatggtggcgctggaacagtgtccgccggagctggcgtcagacatctccgagcgcggtatggtgctcaccggcggcggcgcgctgctgcgtaaccttgaccgtctgttaatggaagagacgggcattcctgtcgtggttgctgaagatccgctgacctgtgtggcgcgcggcggcggcaaggcgctggaaatgatcgatatgcacggcggcgacctgttcagcgaagagtag

SEQ ID NO: 39487 - DNA, 1941 bp, Salmonella typhi
atgcgattaacgacgaaattctcagcttttatcacgctgctcacgggattaacgatcttcgtgactctgataggttgctcgctaagcttttataacgccgtacagtataagtatgtcagccgtgtgcaggcgacggcaacagccattgatacgcacctggtgacccatgatattgtctcgctgacgccgcaaatcgacgagctcatgatcgcttccgatattgtgcgtgtcgatctgttgcagggggagcgcagcgtctacagccattctcgcgccagaggttatcggccagccggcaccagcgacatgtatcgcgagctggtcgtaccgctgataaaacatccaggaatgtcgctacgtctggtttatcaggacccgatgggtaattattttcactcactgatcaccacggcgccgctgacgctggcgatcggttttatcgttctgattttgtttttatcggtgcgctggctgcagcggcagctttccgggcaggagcttctggaaattcgctcaacgcgtattctgaacggcgaacgcggggcgaatgtccgcggttctgtttacgaatggccagcgcgcaccagtagcgcgcttgatgtattgctttccgaaattcagtttgctcacgaacagcgtagtcgcctggacaccctcattcgctcctacgccgcgcaggacaccaaaaccggactcggtaaccgtctgttctttgataaccagctggcgacgctgctggaagatcaggaaaaagtgggagtgcatggcgtggtgatgatgatccgcttgccagacttcaatcttctgcgcgacagcctgggaggcaatcaggcggaagagcagatgtttatgcttatcaatctgctatcgacattcattatgcgttacccaggctcgctgctggcgcgttatcaccgcagcgactttgccgtgctgctaccgcatcgaacgctgaaagaagcggaaagtattgccggacaacttttaaaagctgtcgatgcgctaccggctaacaaaatgctcgatcgtgacgatatggtacatatcggcatttgcgcctggcgcagcggacagtccaccgatcaggtgatggaacatgctgaagccgcggcgcggaatgccgccctgcaggggggaaatagctgggctatctacgacgacactctgccggaaaaagggcgcggcaatgtgcgctggcgcacattgattgagcagatgctgaaccggggcggaccgcgactttatcaaaaaccggcggtcacgcgagaaggtcgcgtacatcatcgggaattgatgtgtcgcatctatgacggtaaagaagaggtgagctcggcggagtatatgccgatggtgttgcaatttggtttatcggaagagtatgacagattacaaattagccgcctgattacgttgctgggctactggccggatgaaaatctggcaatgcagttgacggttgagtcgctgattcgtccgcgttttcagcgctggttgcgcgatacgttaatgcagtgtgaaaaatcacagcgaaatcgcataattattgaacttgcggaggcagatgtttgtcaacacatcagccggttacaacccatccttcgcttagtcaatgcgcttggcgttcgggtggcggtgacacaggcgggtttgacgctggttagcacgagctggattaaagcgctcaatgtggaattactcaagctgcatccgagtctggtcagaaacattgagaagcgaacggaaaaccagcttctggttcaaagtctggtagaggcctgcgcgggcacgcctacgcaggtttacgcgacgggcgtccgttcgcgcggcgagtggcagacgctgacaaaacgcggcgtggctggcgggcagggtgatttttttgcctcctcccaactacttgacacaaacgtgaaaaaatattcgcaaagatactcggtttaa

SEQ ID NO: 39488 - DNA, 855 bp, Salmonella typhi
atgaaacaaaaagtggttaacattggcgacattaaggtggcaaatgacctgccgtttgtgctgtttggcggtatgaacgtgctggagtcacgcgatctggcaatgcgcatttgtgagcactacgtaaccgttacccagaagctgggtattccttacgtgttcaaggcctcttttgataaagccaaccgttcctctattcactcttaccgtgggccgggtctggaagaagggatgaaaatcttccaggaactcaaacagacatttggcgtaaaagtgatcactgacgtccatgaagccagccaggcgcagcctgtggctgatgtggttgacgtgattcagctcccggcgtttttggcgcgccagaccgacctggtggaagcgatggcgaaaaccggcgctgtgattaacgtgaaaaagccgcagtttgtaagcccgggtcagatgggcaatatcgtggataagttccatgagggcggtaacgataaggtgattctgtgcgatcgcggcgcgaacttcggttatgacaacctggtggtggatatgctgggctttagcgtgatgaaaaaggtctccggcaactcgccggtgattttcgacgttacccatgcgctgcaatgccgcgacccatttggcgctgcctcgggcggtcgtcgtggtcaggtgaccgagctggcgcgcgccggtatggctgtcggtctggcgggcctgttcctggagtcgcatccggacccggctaacgcgaagtgcgacggtccttccgcgctgccgctggcgaaactggagcagttcctgacccagataaaagcgattgatgatttggtgaaaagcttcgacgagctggataccgagaactga

SEQ ID NO: 39489 - DNA, 627 bp, Salmonella typhi
atgaagatcgtggaagtcaaacacccactcgtcaaacacaagctgggtctgatgcgtgaaaacgacattagcactaaacgctttcgtgaactcgcctcagaagtaggcagcctgctgacgtatgaagcgacagccgacctggaaacggaaaaagtcaccatcgaaggctggaatggcccggtggaaatcgaccagatcaaaggtaaaaaaattaccgttgtgccgattctgcgcgcggggttgggcatgatggaaggcgttctggaaaatgtaccgagcgcgcgtatcagcgtagtcgggatgtaccgtaacgaagagacgctcgagccagtaccttatttccagaaactggtatcgaacattgatgagcgcatggcgctgatcgtcgacccgatgctggcgaccggcggttctgtcatcgcgaccatcgacctgctgaaaaaagcaggctgtagcagcattaaggtgctggtgctggtcgccgcgccggaaggcattgcggcgctggaaaaagcgcacccggacgttgaactgtacaccgcctctatcgatcaggggcttaacgagcacggatacattattccggggcttggcgatgccggcgataagatttttggtaccaaataa

SEQ ID NO: 39490 - DNA, 390 bp, Salmonella typhi
atgacaattgcaatgttgctcacgcttcatcttatttgtgttgcgctctccgtcagtttgtttgtcgctcgttactggtggcgctattgcggccatgcgttggccgccgcgcgctggacacgaatcgtgcctcccgtcatagataccctgttactgcttagcggtattgggttaatcgttaaaacgcacatcctgccattcacggagtcgggctcatggctgactgaaaaactgtttggcgttatcatctacatcgttttgggttttattgcgcttgattatcgtcaggcgcgcagccagcaggcgcgttttatcgctttcccgctggcgctggtggtgctgtacatcatcattaaactcgccaccacaaaaataccgttactggggtaa

SEQ ID NO: 39491 - DNA, 834 bp, Salmonella typhi
atggattttcagcactggctacatgaggcggtaaaccagctccgggacagcgacagcccccggcgcgacgccgagatcctgcttgagtacgttacgggcaagaggcggacgtatatcatggcctttggcgaaacgccgcttaccgatgtccagcaacaacagctcgcggagctgctgcagcggcgtaaacagggcgaacccattgcgtacctgacgggcttacgcgaattttggtcgctgccgctcttcgtttctcccgccacgctaatcccgcgcccggataccgaatgtctggttgaacaggcgttggcgcgattgccggtcaaaacctgtcgtattctggatttaggcaccggaaccggcgcgattgcgctggcgctggcctgcgagcgaccggattgcgaggtgactgcggtcgatcgtatgcctgatgcggttgcgctggcgatacgcaacgcggaacatttggctatccggaatgtgcgtatactgcaaagttgttggttcagcgcactatcggggcagcagttcgacatgattgtcagcaatccgccctacattgacgcgcaggacccgcaccttagcgaaggcgatgtacgctttgaaccgcgctcagcgttggtggcggacgaaaacggtatggcggatcttacgcatattatcgataatgcccgccagatgttaacgcccggcggcttcctgctgctggaacacggttggcggcagggcgaagcggtaagagcggctttcaggcggtctggttacacggatgtagaaacgtgtcgtgattatggtggcaatgaacgcgtggcctgcgggcgttttacgccatga

SEQ ID NO: 39492 - DNA, 600 bp, Salmonella typhi
gtgcgtctgacagtaaaacagataacctggctaaaagtttgtctgcatcttgccggttttttgccgcttctgtggctcttttgggcgataaatcacggtggactcagcgcagacccggtaaaggatatccaacactttaccggtagaaccgcgctcaaatttttgctcgccaccttgctggtttcaccgctggcgcgctacgctaaacagccattattgatacgcacacgccgcctgttaggattatggtgtttcgtttgggcgacactgcatttaaccagctatgccttgctggaactggggatacataacctggcgctgttaggaagcgagttgatttcacgcccttatttgacgcttgggatcattagctggctggtgttattggcgctgacgttgacctcaacgcaatttgcgcagcgtaaattgggcaaacgctggcaaacactgcataacgtcgtctatcttgtcgcgatcctggctcccatacattacctgtggtcggtaaagattttatcaccgcaaccggtcatctacgcggcattagcgttagcccttttagcgttgcgttaccggaagtttcgccagtggtggcgctag

SEQ ID NO: 39493 - DNA, 1083 bp, Salmonella typhi
atgaagccttctatcgttgccaaactggaagccctgcacgaacgccatgaggaagttcaggcgttgctgggcgatgcgggaattatcgccgaccaggaccgctttcgcgcattgtcgcgcgaatatgcgcaattaagcgacgtttctcgctgttttacggactggcaacaggttcaggacgatatcgagacggctcagatgatgctcgacgatcctgaaatgcgggaaatggcgcaggaagaactgcgcgaagcgaaagaaaaaagcgaacaactggagcaacagttacaggtactgctgctgccgaaagatccggacgatgaacgaaacgcgttccttgaggttcgcgccggcactggcggcgacgaagccgcgctgtttgccggcgatctgttccgcatgtacagccgttatgccgaagcgcgccgctggcgcgtggagatcatgagcatgagcgaaggcgagcatggcggttataaagagatcatcgccaaaatcagcggcgacggcgtgtatggccgactgaaatttgagtccggcggacaccgcgtacagcgtgttccggcgaccgagtcgcaggggcgtatccatacctccgcctgtaccgtcgccgtgatgccggagctgccggaagccgagctgccggatattaacccggcggatctgcgcattgatacgtttcgttcttccggcgcgggcggtcagcacgttaacaccaccgactccgctatccgtattacccacttgccgaccggcatcgtggtggaatgccaggacgagcgttcgcagcataaaaacaaagcgaaagcgctctcggtgctcggggcgcgcattcacgccgccgaaacggcaaaacgccagcaggccgaggcgtcaacgcgccgcaacctgcttggcagcggcgatcgcagcgatcgtaaccggacctataatttcccgcaggggcgcgtgaccgatcatcgtattaatctgacgttatatcgccttgatgaaacgatggaaggtaagctggatatgctgattgagccgattgttcaggaacaccaggctgacctgttagccgcgttgtccgagcaggaataa

SEQ ID NO: 39494 - DNA, 471 bp, Salmonella typhi
atggatattcgtaagattaaaaaactgatcgagctggttgaagaatcaggtatctccgaactggaaatttctgaaggcgaagaatctgttcgcatcagccgcacaacggcaaacgccggtttcccggtgatgcagcaggcttatgcggcgccgatgatgcagcaacccgctctgtctaacgctgtcgcgccagcggctactccagcaatggaagcgcctgccgcagcggaaatcagtggtcacatcgtacgctccccaatggttggtactttctaccgcaccccaagcccggacgcgaaagcgttcatcgaagtgggccagaaagtgaacgtgggcgataccctgtgcatcgttgaagccatgaaaatgatgaaccagatcgaagcagacaaagcaggcactgtgaaagcgattctggtcgaaagtggtcaaccggtagaatttgacgagccactggtcgtcatcgagtaa

SEQ ID NO: 39495 - DNA, 1257 bp, Salmonella typhi
atgacccttttagcactcggtattaaccataaaacggcacctgtatcgctgcgagaacgcgtaacgttttcgccggacacgcttgatcaggcgctggacagcctgcttgcgcagccaatggtgcagggcggggtcgtgctgtcaacctgtaaccgtacagagctgtatttgagcgtggaagagcaggataacctgcaagaagcgctgatccgctggttatgcgattaccataacctgaacgaggacgatctgcgcaacagtctgtactggcatcaggacaatgacgccgtcagccacctgatgcgcgtcgccagcggtctggattcactggtgctgggcgaaccgcaaatcctcggtcaggtgaaaaaagcgtttgcggattcgcaaaaaggccaccttaacgccagcgcgctggagcgaatgtttcagaagtctttttccgtcgccaagcgagtgcggactgaaaccgatatcggcgccagcgccgtctccgtcgcgtttgccgcctgtacgctcgcccgccaaatctttgaatcgctctcgacggtcactgtactgttagttggcgcgggcgaaactattgaactggtggcgcgtcacctgcgcgagcataaagtacaaaagatgattatcgccaaccgaacccgcgagcgcgcgcaagccctggcggatgaggttggcgctgaggttatctcgctcagcgatatcgacgcccgcttgcaggatgccgatattatcatcagttcgaccgccagcccgctgccgattatcggtaaaggcatggtggagcgcgcattaaaaagccgtcgcaaccagccgatgctgctggtggatatcgccgtaccgcgcgacgttgagccggaagtcggcaaactggcgaacgcttatctttatagcgtcgatgatttacagagcatcatttcgcataatctggcgcagcgtcaggctgcggcggtggaagcggaaacgattgttgagcaggaagccagcgagtttatggcctggctacgcgcccagggggccagcgagaccattcgggaataccgtagtcagtcggagcagattcgtgacgaactgactaccaaagcgctgtcggcccttcaacagggcggtgatgcgcaagccatcttgcaggatctggcatggaaactgaccaaccgcctgattcatgcgccaacgaaatcacttcaacaggctgcccgtgacggggatgacgaacgcctgaatattctgcgcgacagcctcgggctggagtag

SEQ ID NO: 39496 - DNA, 1350 bp, Salmonella typhi
atgttggataaaattgtcatcgccaaccgcggcgagatcgcactacgtattcttcgagcctgtaaagaactcggcatcaagaccgtcgctgtgcactcaagcgcggatcgcgatttaaaacacgtattgctggcggatgagacggtctgtattggcccggcaccgtccgtaaaaagttatctgaacatcccggctatcattagcgccgctgaaatcaccggcgcggtggcaatccacccgggttacggcttcctttctgagaacgccaattttgccgagcaggttgaacgctccggctttatctttatcggcccgaaagcggacaccatccgcctgatgggcgataaagtgtccgcgattaccgcgatgaaaaaagcgggcgtgccgaccgtaccaggatctgacggcccactgggcgacgatatgaatgcgaaccgcgctcatgccaaacgtattggctatccggtgatcatcaaagcgtccggcggcggcggcggccgcggtatgcgcgtggttcgtagcgatgctgaactggcgcagtccatctccatgactaaagcggaagcgaaagcagctttcagcaacgacatggtatacatggaaaaatacctggaaaatccacgccacatcgaaattcaggtgctggcggacggccagggcaacgctatctatctggcggaacgcgactgctccatgcagcgtcgccaccagaaagtggttgaagaagccccggcgccaggcattacgccggaactgcgtcgctatatcggcgaacgctgcgcgaaagcgtgcgtagacatcggctatcgcggcgcaggaacgttcgaattcctgttcgaaaacggcgagttctatttcatcgaaatgaacacccgtattcaggttgaacacccggtaactgaaatgattaccggcgtcgatttgatcaaagagcagttgcgcatcgcggcgggtcagccactgtcgatcacacaggacgaagttgtcgttcgaggccatgcggtagaatgccgtatcaatgccgaagatccgaacaccttcctgccaagccctggcaaaatcacgcgcttccatgcgcctggcggctttggcgttcgctgggaatctcatatctacgcgggctacacggtgccgccgtactatgattccatgatcggcaaactcatctgctacggtgaaaaccgcgacgtggcgattgcccgtatgaaaaatgccctgcaggaactgattatcgatggtatcaaaaccaatatcgatctgcagacccgcatcatgaatgacgagcacttccagcacggtggaaccaacatccactatctggagaaaaaactcggtcttcaggaaaagtaa

SEQ ID NO: 39497 - DNA, 2214 bp, Salmonella typhi
atgaagctgaataaaacttatataaatatcagagataaatggtggggactaccgctcattctcccttcgattttactacctgttttaagtagcgcaaatacttatgcgcttaccagcactggaaatgtggttcttttttacctgccgttagcttttatgcttagtctgatgctctttttcggctgggcagcactgccgggcattgtgcttgctatcttctggcgcagatacccgcagacagggctgtatgaaaccctttctgtgacgatgcactttatcattactatcgtgctaagctggggcggctatcgtgtcttttccccccggcgaaacaatgtttcccacggcgacgcccacctgttgtttcaacgaatgttctggcaggtattttgttcagcgacattatttctggtcatttaccagtttgccgcttttgttggcatgtacgaaagtaaagccagcctgatgggggtaatgccctttaatatcaacacgctgattaattaccaggcgttactggtcggtaaccttgtcggcgtgccattgtgctattttattattcgtactctccgcaatccgctgcacctgcgggggtattatcagcaattaaagctacagattgatagcaaggccactaaaaaagagatcgttatttggctggctgtattgactacactaatgtttatactgtgtatgccattgacggataatagctcaatatttagtaccaactatacgctttcgttattattgccggtcatgctgtggggcgcgatgcgctatggttataagtttatttcaattatctgggccgtcgtgctaattacgtcgattcattattatcagcgttatatgccctggtattcaggttatgatacgcaattagcgattacctcttcgagctatctggttttttcttttattgttaattatatgtctgtactggccacgcgtcagcgcgtagtgagtggtcgcgcacggcggctggcctatcttgacccggttgtacatcttcccaatttacgtgcgttaaaccgcgcgcttaaaaatgcaccctggtctacgatctgttttttacacgtgccgggtctggagctattgggtaaaaattatggcgtcatgctacgcatccagtataagcaaaagctctctcactggattacgccgatgttggcctcaaatgagtgcgtctaccagatgtcagggcacgacctggtgctgcgtcttaatacagaggcgcatcagcagcgtattgaagcgctggataaacatattaagcagtttcggtttatttgggatggactgccgctacagccgcctgttggcgtgagctactgctgcgtgcgttctccggttagccacctttatctgctgttgggcgaattaagcaccagttccgatctttcgttgacgactaacgcgccggaggatttacagcggcgcggcgcaatgcacctgcagcgcgatttgaagggcagaattgcgatgatgaatcgcctgcaacaggcgttggagcacgatcattttttcctgatggcgcagcctattttcggtgttcgtggggacgtttaccatgaaattttactgcgactcagggatgacaacggcgacgttatcaacccggacaattttttacccgtggcgcatgagtttggtttgtcttccgctatcgatctctgggtgattgaaaacacgctacggtttatggcggccagccgggaatatatgcccgcgcatcgttttgccattaatctgtcgccaacatcggtatgccgcgcccgtttccctgcagaagttaagcagctgcttacgcaatatcaggttgaaccctggcaactggtttttgaggtaacggaaagcaactctctcaccaatgctgagcaggcgcagttgacactgggacagctacagcagtttggctgtcagatagcgattgatgatttcggtactggctacgccagctatgcgcggctgaaaaacgttgacgccgatattcttaaaattgacggcagttttattcgcaatatagtgtcaaacagtctcgattatcagattgtggcttctatttgtcatttagcgcgaatgaaaaatatgcaggtcgtcgcggagtatatcgagagcgaagaaatacgaagcgtagtgctgtcgttggggatcgactatcttcagggatatttaattggcgagccgcagctattatctgagattcagtaa

SEQ ID NO: 39498 - DNA, 1452 bp, Salmonella typhi
atgcagcttgaggtcattctaccgctggtagcctatctggtcgtggtcttcggggtctcgatttacgctatgcgcaagcgtaccgccggcacctttttaaacgagtattttcttggcagtcgttcgatgggcgggatcgtgctcgcgatgacgctgaccgccacctatattagcgccagttcatttatcggcggtcccggcgcggcttataaatatggtctgggctgggtcttgctggcgatgatccagcttcccgccgtctggctttcactgggtattctgggtaaaaaattcgctatcctggcgcgtcgctataatgccgtcacgcttaacgatatgctattcgctcgttaccaaagccgcctgctggtgtggttagcaagcctgagtttattggtcgcgtttattggcgcaatgaccgtacaatttatcggcggcgcgcgactactggaaaccgcggcgggaattccctacgaaaccggcctgctaatatttggcgtcagtatcgcactctatacggcgtttggcggctttcgcgccagcgtacttaacgatacgctacagggcctggtgatgctggtcggcacgatagtgctgctggtgggcgtggtgcatgcggcgggcggtttacatcaggccgttgacacgctgcacgctctcgaccccaaactggtaacgccgcagggcgccgatgacatactttctcccgcttttatgacctctttttgggtactggtctgttttggcgtgattggcctgccgcatacggcagtgcgctgcatttcttataaagacagtaaagcggtacaccggggcattattatcggtacgattgtcgtggcgattttaatgttcgggatgcaccttgccggcgcgctgggtcgcgcggtgcttccggatctgacggtgccggatctggtgatcccaacgctaatggtgaaagttttgccgccgtttgccgccgggatcttccttgctgcgccaatggcggcgatcatgtcaacaattaacgcccaactgctgcaaagttccgcgacgatcattaaagatctctatctcaacctgcgtcccgatcagatgcaaaatgagatccggctgaagcgtatgtcggcagcgattacattactgttaggcgcgctgttgctgctggccgcgtggaaaccgccagagatgatcatttggctcaacctgctggcgtttggcggcctggaagcggtgttcttatggccgctggtactgggcctttactgggagcgggcaaacgcggcaggcgcgttaagcgccatgatcgtgggcggcgtgctatatgccctgcttgccacatttaatattcagtacctgggctttcatccgattgtgcccgcgttactgttaagtttattggcttttctgatcggaaaccgattcggctcttccgcttcgcaagccaccgtattgtctactgataaataa

SEQ ID NO: 39499 - DNA, 948 bp, Salmonella typhi
gtgcctgatatgaagctttttgctggtaacgccaccccggaactagcacaacgtattgccaaccgcctgtacacttctctcggcgacgccgccgtaggtcgctttagcgacggcgaagtcagcgtacaaatcaacgaaaatgtacgcggtggtgatattttcatcatccagtccacttgtgccccaaccaacgacaacctgatggaattggtcgttatggttgatgccctgcgtcgtgcttccgcaggtcgtatcaccgccgttatcccctactttggctatgcacgtcaggaccgtcgcgtacgttccgcccgtgtgccgattaccgcaaaagttgtcgctgacttcctgtccagcgtcggcgttgaccgcgttctcaccgtagatctgcatgctgaacagatccagggcttctttgacgttccggttgataacgtgttcggtagcccaatcctgctcgaagatatgctgcaactgaatctggataacccaatcgtggtttccccggatattggcggcgtggttcgtgcccgcgctatcgctaagctgctgaacgataccgatatggctatcattgataaacgtcgtccgcgcgcgaacgtttctcaggtgatgcacatcatcggcgacgtcgctggccgtgactgcgtgctggttgatgatatgatcgataccggcggtactctgtgcaaagcagcagaagcattgaaagaacgtggcgctaaacgcgtgtttgcctacgcgacgcacccgatcttctcaggcaatgcggcaaacaacctgcgcaactccgttattgacgaagtcgttgtctgtgacaccattccgctgaccgacgaaatcaaagcgctgccgaacgtgcgtactttgaccctgtcaggtatgctggccgaagcgattcgccgtatcagcaacgaagaatcgatttccgccatgttcgagcattga

SEQ ID NO: 39500 - DNA, 1686 bp, Salmonella typhi
gtgaacaaattattttcctcacatgtgatgcctttccgcgctctcatcgatgcttgctggaaagaaaaatataccgcctcccggttcacccgtgatgtgatagccgggatcaccgtcgggattattgctatcccgctggcgatggcgctggcaattggcagtggcgttgcgccgcagtatggcctctatacctccgctgtcgccgggatcgtgatcgcgctaaccggcggctcgcgctttagcgtttccggccctaccgccgcgtttgtggtgattttgtatccggtgtcgcaacagtttggtctggcgggcctactggtcgccacgctgatgtcgggcttcttcctgatccttttcggcctggcgagactggggcgattgattgaatatatcccggtgtcggtcacgttgggttttacctcagggattggtattaccatcggtaccatgcagattaaagattttcttggtctgcagatggcccatgtgccagagcactatttgcagaaagtcggcgcgctgtttatggcgttgcccaccgtcaatattggcgatgccgccattggcgtggtaacgctgggaacgctgattttctggccgcgtctcggtattcgtctgccgggacaccttcccgcgctgctggccggttgcgccgtaatggggattgttaatctgctgggcggcaatgtggcgactatcggctcacagttccattacgttctggctgacggcactcagggcaacggcatcccgcagctcctgccgcaactgatgctgccgtggagccttcctggctccgattttacgctaagctgggattcactgcgcgcgctgctgccagcggctttctcgatggcaatgctgggggcaatcgaatcattgctctgcgccgtcgtgctggacggcatgaccggcaccaaacataaagctaacagcgaacttatcggccaggggctggggaatatggtcgcgccgttctttggcggcatcaccgccaccgccgcgattgcccgctctgccgccaacgtccgcgctggcgcgacctctcccgtctcggcggtaattcacgctattctggtcattctggcgctactggtcttagccccgctactctcctggctgccgctttccgcgatggcggcgctactgctgatggtggcatggaatatgagtgaagcccataaagtggtggatctgttacgccatgcgccgaaagatgacattatcgttatgctgctgtgcatgtcattaacggttctgtttgatatggtcatcgccatcagcgtggggattgtccttgcttccctgctgtttatgcgccgtattgcgcgaatgactcgacttgcgccggtcaatgtcgatgtgcctgaagatgtgctggtgctgcgtgttatcggtccgctctttttcgccgcggcggaagggctgtttaccgaccttgagtcacgtattaagggcaaacgtatcgtcgttctgaaatgggacgcagtaccagtgctggatgcaggcgggcttgatgcttttcagcgttttgtgaagcgtctgccggagggttgcgaattgcgtatcagtaacctggagttccaaccgctgcgcacaatggcgcgtgccggtatcaaacccattcctggacgtctgaccttcttcccgaacaggacggaggcgttagcggatttactcagttaa

SEQ ID NO: 39501 - DNA, 1578 bp, Salmonella typhi
atgacggaaaacattcataagcatcgcatcctcattctggacttcggttctcagtacactcaactggttgcgcgccgcgtgcgtgagctgggtgtttactgcgaactgtgggcgtgggatgtgacagaagcacaaattcgtgacttcaacccaagcggcattattctttccggcggcccggaaagcaccaccgaagaaaacagcccgcgcgcgccgcagtatgtctttgaagcaggcgtgccggtatttggcgtctgctacgggatgcagaccatggcgatgcagcttggcggtcatgtagaaggttctaatgagcgtgaatttggttacgcgcaggtcgaagtgctgaccgacagcgcgctggttcgcggtattgaagattccctgaccgccgacggcaaaccgctgctggacgtgtggatgagccacggcgataaagtgacggcgattccgtccgacttcgtgaccgtagccagcaccgaaagctgcccgttcgccatcatggctaacgaagaaaaacgcttctacggcgtacagttccacccggaagtgactcacacccgccagggtatgcgcatgctggagcgttttgtgcgtgatatctgccagtgtgaagccctgtggacgccggcgaagatcatcgacgacgccgtggcgcgcattcgcgagcaggtaggcgacgataaagtgatcctcggtctctccggcggcgtggattcttccgtaaccgcaatgctgctgcaccgcgcgatcggtaaaaatctgacctgtgtattcgtcgacaacggcctgctgcgtctcaacgaagccgagcaggtgatggacatgtttggcgaccattttggtctgaacatcgttcacgtaccggcagaagatcgcttcctgtccgcgttggctggcgaaaacgatccggaagcgaagcgtaagatcattggccgtgtttttgtggaagtgttcgacgaagaagcgttgaaactggaagacgtgaaatggctggcgcagggcaccatctaccctgacgtcatcgaatctgcggcgtctgcaaccggtaaagcgcacgtcatcaaatctcaccacaatgttggcggcctgccgaaagagatgaagatggggctggttgaaccgctgaaagagctgttcaaagacgaagtgcgtaagattggtctggagctgggcctgccgtacgacatgctgtaccgtcatccgttcccggggccgggcctcggcgtacgtgtactgggtgaagtgaagaaagagtactgcgacctgctgcgccgtgctgatgccatcttcattgaagagctgcgtaaggcggatctgtacgacaaagtcagccaggcgttcaccgtcttcctgccagtacgctccgttggcgtaatgggcgatggtcgtaagtacgattgggtggtctctctgcgtgctgtcgaaaccatcgactttatgaccgcgcactgggcgcacctgccgtatgacttcctgggtcgtgtttccaaccgcatcatcaatgaagtcaacgggatttcccgtgtggtgtatgacatcagcggtaaaccaccggctaccattgagtgggaataa

SEQ ID NO: 39502 - DNA, 1092 bp, Salmonella typhi
atgggattcaaatgcggtatcgtcggtctgcccaacgtcgggaaatccaccctgttcaacgcgctgacaaaagccggtattgaagcggcaaactttccgttctgcactatcgaaccgaataccggtgtcgtgccgatgcccgatccgcgtctggaccagttggctgagattgttaaaccgcaacgcattctaccaaccacgatggagttcgtggatatcgccggtctggtaaaaggcgcatccaaaggcgaagggttgggtaaccagttcctgaccaatatccgtgaaaccgaagctatcggtcacgtggttcgctgctttgagaacgacaatatcatccacgtggcgggtaaagtaaatccggcagaagatattgatgttatcaataccgagctggcgctggctgacctcgatacctgcgagcgcgcgatccatcgcgtacagaagaaagccaaaggcggcgataaagacgccaaagcggaactggccgcgctggaaaaatgcctgccgcacctggccgaagcggggatgctgcgttcgctggacctgacggacgaagataaagcggctatccgttatttaagcttcctgacgctgaagccgacaatgtatatcgctaacgtcaatgaagacggttttgaaaataacccgtatctggaccaggttcgcgaaatcgccgcgaaagaaggttcggtcgtggttccggtgtgtgccgccgtcgaagctgatattgctgagctggatgatgacgagcgtgacgaatttatggctgaactgggtctggaagaaccggggctgaaccgcgttattcgcgctggttatcgcctgctgaacctccagacctacttcaccgccggggtgaaagaagttcgcgcatggaccattccggttggcgcaaccgcgccgcaagcagcaggtaaaatccataccgacttcgaaaaaggctttatccgcgctcaaactatcgcctttgacgactttattacctataaaggtgaacaaggcgcgaaagaagccggtaagatgcgagcggaaggcaaagattatatcgttaaagatggcgatataatgaacttcctgttcaacgtctaa

SEQ ID NO: 39503 - DNA, 1350 bp, Salmonella typhi
atgttatcctctcaaacttcctcaatttttaccgtaagccgccttaaccagacggttcgtctgctgttagaacaggagatgggacaggtatggatcagcggcgagatttctaatttcacgcagcctgcgtcgggccactggtactttacgctcaaagacgataccgctcaggtgcgctgtgcgatgttccgcaacagcaaccgccgggtgacgttccgcccgcagcacgggcagcaggtgctggtacgcgccaacattacgctgtacgagccgcgcggcgattatcaaatcatcgccgaaagtatgcagccggctggcgaaggcttgttgcagcagaagtatgagcagctaaaagccaaactccatgccgaaggcttgttcgatcagcagcataaacagccgttgccctccccggcccactgcgttggggtgatcacctcgaaaaccggcgcggcgctgcacgatatcctccacgtgttgaagcgtcgtgacccatccctgcccgttattatctatccaaccgcggtacagggcgacgatgcgccggggcagatcgttcgtgctatcgaactggcaaacacgcgcggcgagtgcgacgtgctgatcgtcggacgcggcggcggttcgctggaagatttgtggagttttaacgacgaacgcgtggcgcgggctatttttgccagccgtattccggtggtcagcgccgtcggtcacgaaaccgacgtcactatcgccgattttgtcgccgacctgcgcgcgccgacgccatcagcagcggcagaaattgtcagccgtaaccagcaggagttgttgcgtcagatccagtccgcccagcagcgtctgggcatggcgatggactactacctcgccaaccgcagccgtcgtttcacgcagatttttcaccgtctgcaacaacaacatccgcaactacgtctggcccgtcagcaaaccgcgctggaacgtctacgccaacggatgggatttgcgcttgaggccaggattaagcaggccactcagcgtcagcaacgcgtaagtcaacgcctgagccagcaaaatccgcagccgcgcattcaccgcgtgcagtcgcgcatccaacagctggaatatcgtctgacggagaatatccgctcacggttaagcgaacagcgcgagcgttttggcaacgcggtcacgcatctggaagcggtcagcccgttagccacgctggcgcgcggctatacggtttcgacgacaacggacggcaaggtgttgaaaaagatcaaacaggtcaaagcaggcgatatcatgaccacgcggctggaggacggctggcttgaaagtgaagtcaaatccgtcacgccgggaacgtaa

SEQ ID NO: 39504 - DNA, 1473 bp, Salmonella typhi
atggtacctgtggtcgcgcttgtcgggcgccctaacgtcggaaaatccacgctatttaaccgtctgacccgcacccgagatgcgttggttgcggatttcccgggtctgactcgtgaccgtaagtacggtcgtgcggaggttgaaggccgcgagtttatctgtatcgacaccggcggtattgacggcaccgaagacggcgtcgaaacgcggatggcggaacagtcgctgctggcgattgaagaagcggatgtggtgttattcatggtagatgcgcgcgctggtctgatgccggcggatgaagcgattgccaaacatctgcgctcccgtgaaaaaccgaccttcctggtggcgaataaaacggatggtctcgatcccgatcaggcggttgtcgatttttactcgctgggattaggcgaaatttatcctatcgccgcctcacatggtcgcggcgtattgagcctgctggaacatgtgcttctgccgtggatggatgatgtcgcaccgcaggaagaagtggatgaagacgcggaatactgggcgcagttcgaggcggaacaaaatggcgaagaagcgccggaagatgattttgacccgcaaagcctgccgataaagctagcgattgtcggtcgcccgaacgtaggtaagtccacactcactaaccgtattctcggcgaagagcgcgtggtggtatacgacatgccgggcaccactcgcgacagtatttatatcccgatggaacgcgacgaacgggaatatgtgctgattgacacggcgggggtgcgtaagcgcggaaaaatcaccgatgcggtagaaaagttctcggtgattaaaacgttacaggcgattgaagacgctaacgtcgtactgttggttatcgatgcgcgcgaggggatctctgaccaggatttgtctctgctgggctttatcctcaatagtgggcgctcactcgttatcgtagtcaacaaatgggatggcctgagccaggaagtcaaagagcaggtgaaagagacgctggatttccgtctgggctttattgattttgcccgcgtgcactttatctctgcgctgcacggcagcggtgtcgggaacctgtttgagtccgtacgcgaggcttacgacagttccactcgccgggtgagcactgcgatgctgacccgtatcatgacgatggcggtggaagatcatcagccgccgctagtgcgcggtcgccgtgtgaagctgaaatatgcccacactggcggctataacccgccgattgtggttattcacggcaaccaggtaaaagatctgccagactcctataagcgctatctgatgaactacttccgcaagtcgttggaagtgatgggtacgccgattcgcattcagtttaaagaaggggagaacccgtatgcgaacaagcgtaacacactgacgccaacgcaaatgcgcaaacgtaagcgtctgatgaagcatatcaagaaaagcaagtaa

SEQ ID NO: 39505 - DNA, 1179 bp, Salmonella typhi
atgcaattgcgtaaattacttctgccagggttgctttccgttaccctgctcagcggctgttcactgtttagcggcgaagaagatgtcgtcaagatgtctccattaccgcaggttgaaaaccagtttaccccgaccactgtctggagcacctctgtcggtaacggaattggtgaattttattctaaccttcatccggtaatggcagataacgtggtctatgcagccgatcgcgcgggcgtggtaaaagcgctcaatgcggatgatggcaaagagatctggtctgtgaatctgggcgagaaagacggctggttctctcgttcgtccgcgctgttgtccggcggcgtcactgtcgcgggcggtcacgtctatatcggcagtgaaaaggccgaggtttatgcgctgaataccagcgacggtaccacagcatggcagacgaaggtcgcaggcgaagcgttgtctcgcccggttgtcagtgatggaatcgtccttatccataccagcaacggtcagttgcaggcgctaaatcaggcggatggcgccattaaatggacggtgaacctggatatgccttcgctgtcgctgcgcggcgaatctgcgccggcaaccgcgttcggcgcggctatcgttggtggtgataatggccgcgtcagcgccgtgttgatgcaacaagggcagatgatttggcagcagcgtatctcccaggccactggcccaacggaaattgaccgtctgagcgacgtcgataccacgccggttgtggtaaacggcgtcgtttacgcgttggcgtataatggtaacttaacggcgctggatctgcgcagtggtcagattatgtggaaacgcgagctggggtcggtcaatgactttatcgtcgacggcgaccgtatctacctggtcgatcagaacgatcgtgtgctggcgctgaccactgacggcggcgtaacgctgtggacgcaaagcgatctgctgcaccgtttgctgacctccccggtactgtataatggtgatttagtcgtcggcgatagcgaaggttatctgcactggattaatgtcgatgacgggcgttttgtggcccaacaaaaagtagacagttccggttttctgaccgaaccgacggtggcggatggtaaactgctcatccaggccaaagacggtacggtctacgcgattacgcgttaa

SEQ ID NO: 39506 - DNA, 1275 bp, Salmonella typhi
gtggcaaaaaacattcaagccattcgcggcatgaacgattatctgcctggcgaaaccgccatctggcagcgcattgaaggcacactcaaaaacgtgctcggcagctacggttacagtgaaatccgcttgccgattgtagagcagaccccgttattcaaacgcgcgatcggtgaagttactgacgtggttgaaaaagagatgtacacctttgaggatcgcaacggcgatagcctgacattgcgccctgaaggtacggcgggctgtgtacgcgccggcatcgaacatggtctcctgtacaatcaggaacagcgtttgtggtatatcgggccgatgttccgtcatgagcgtccgcaaaaaggccgctaccgtcagttccatcagctaggcgccgaagtctttggcttacaaggcccggatatcgacgcggaactgattatgctgaccgcacgctggtggcgcgcgctgggcatctctgaacacgttagcctggagctgaactctattggttccttagaggcgcgtgcgaactatcgcgatgcgctggtcgcgttcctcgaacagcatcaagagacgctggacgaagactgcaaacgccgtatgtataccaatccgctacgcgtgctggattcaaaaaatccggacgtgcaggcgctgctcaacgacgcgcctgttctcggcgactatctcgatgacgattcacgcgagcactttgccggcctgtgtaaattgctggacgcggcggggattgcctacaccgtcaaccagcgtctggtacgcggtctggattactacaaccgcaccgtatttgaatgggtaacaaacagtctggggtcacaaggcaccgtctgtgcgggtggtcgttatgatggtctggtggaacaactgggcggtcgcgctaccccggcagtgggctttgcgatgggcctggaacgacttgttttgttagttcaggcagttaatccggaatttattgcctctcctgttgtcgatatatacctggtagctgccggcgcacaaacgcagtctgcggcaatgacgctggcggagcggctgcgcgatgaaatgccaggcgtgaagctaatgacaaaccacggcggcggcaactttaagaaacagtttgcccgcgccgataagtggggcgcccgtattgcactggttcttggcgaatctgaagtcgccgatgggactgttgtagtgaaggatttgcgctccggtgagcaaacggcagtggcgcaggacagcgtcgccgcgcatttgcgcactttattgggctaa

SEQ ID NO: 39507 - DNA, 1119 bp, Salmonella typhi
atgcataaccaggctccgattcaacgtagaaaatcgacacgtatttacgttgggaatgtgccgattggcgatggcgcccctatcgccgtccagtcgatgactaacacgcgtaccactgacgtggaagcgacggttaatcagatcaaagcgctggagcgcgttggcgcagatattgttcgtgtttctgtaccgaccatggacgccgccgaagcgttcaagcttatcaaacagcaggttagcgtcccgctggttgccgatattcacttcgactaccgcattgcgctgaaagtagcggaatacggcgttgactgcttgcgtattaaccccggcaatatcggtaacgaagaacgcattcgcatggtggtggactgcgcgcgcgacaaaaacatccctatccgtatcggcgtaaatgccggatcgctggaaaaagatctgcaggaaaaatacggagagccgacgccgcaggcgctgctggaatcagccatgcgccatgtcgatcatctcgatcgtctcaactttgatcagttcaaagtgagcgtaaaagcgtccgatgtattccttgccgttgagtcttatcgtttgttggctaaacagatcgatcagccgctgcatctggggatcaccgaagcgggcggcgcgcgtagcggggcggttaagtcggcgatcggtttaggtctgctgttatcggaaggcatcggcgacacgctgcgcgtatcgttggcggccgacccggtggaagagatcaaagtcggtttcgatatcctgaagtcgctgcgtattcgcgcgcgcggcatcaatttcatcgcctgcccgacctgttctcgtcaggagttcgacgttatcggcacggtgaacgcgctggagcagcgtctggaagatatcatcaccccgatggacgtctcgatcatcggttgtgtggtgaacgggccgggcgaagcgctggtatcgacgctgggcgtgacgggcggcaataagaaaagcggcctgtatgaagacggcgtgcgtaaggacagactcgataacgacgatatgatcgcgcagcttgaatcccgtattcgcgcgaaagtaagtcaacttgatgaagcgcgtcggattgacgtgctgcaggttgaaaaataa

SEQ ID NO: 39508 - DNA, 1533 bp, Salmonella typhi
atggcaatgattgattccatgaacaaggacaccacacgtttgagcgatggccccgactggacatttgatctgctggatgtttatctggcagagatagaccgcgtggcgaaactctaccaactggatacttacccgcaccaaattgaagtcatcacttccgaacagatgatggacgcctactccagcgtcgggatgccgatcaactatccgcactggtcgtttggcaaaaagttcattgagacggaacgtctgtataagcatggtcaacaaggactggcttatgaaattgtgatcaactctaatccctgcattgcctacctgatggaagagaacaccatcaccatgcaggcgctggtcatggcgcacgcctgttacggccacaactccttttttaaaaataattatctcttccggagctggacggatgccagctctatcgtcgattacctgattttcgcccggaattacattacccgctgtgaagaacgctacggagtggatgaagtagaaaaactgctcgactcctgccacgcgctgatgaattacggcgtcgatcgctataagcgcccgcagaaaatctcgttgcaggaagagaaagcgcgacaaaaaagccgggaagagtatctacaaagccaggtgaatatgctgtggcgcacgctgccaaaacgcgaggaagaaaaaactgtcgccgaagcacgccgctttcctgctgaaccgcaggaaaacctactctattttatggagaaaaacgccccgttgctcgagccgtggcagcgcgaaattctgcgcatcgtgcgtaaagtcagccagtatttttatccgcagaaacagacgcaggtcatgaacgagggctgggcgaccttctggcactacaccatcctgaaccatctgtatgatgaaggcaaagtgacggaacgctttatgctggagtttttacacagccataccaatgtcgtatttcagccgccctataatagcccctggtatagcggaattaacccctatgcgctcggctttgccatgttccaggatatcaaacgtatttgtcagtcgcccacggatgaagataaatactggtttccggatattgccggttccgactggctggaaacgctgcacttcgccatgcgcgattttaaagatgaaagctttatcagtcagttcctgtcgccaaaagtgatgcgtgatttccgtttcttcacggtacttgatgatgacaggcataattatctggagatctccgccattcataacgaagaaggttatcgggagattcgatcaaaactgtcgtcacagtataacctgagcaacctggagccgaatattcaggtctggaatgtggatttacgcggcgacagatcgctgacgttgcgttatatcccgcataaccgcgcgccgctggataaaggccgcaaagaggtgctgaaacatgtgcatcggttatggggctttgatgtgatgctggagcaacaaaatgaggatggcagcgtagaactgctggagcgttgtccgccgcgcatgaacacgctgtaa

SEQ ID NO: 39509 - DNA, 975 bp, Salmonella typhi
atgaatactgaagccacgcacgaccaaaatgaagcacaaaccaccggcgttcgtctgcgcaatgcccgtgaacaactcggactcagccagcaggctgtcgctgagcgactttgcctgaaggtttctacggtacgcgatattgaagaagataaggcgccgtccgatcttgcttcaaccttcctgcgcggatatatccgctcatatgcgcgtctggtgcatgttccagaagaggaactgctgccggggctggaaaaacaagctccgctgcgcgccgctaaagtcgccccgatgcagagtttctcattaggaaagcgtcgtaaaaaacgcgacggctggttaatgtcttttacctggctggtactgtttgtggtcgtagggctgaccggcgcctggtggtggcagaaccacaaggcgcagcaggaagagatcacgacaatggccgatcaaagcacggctgaactgaacgcagataaagacagcggccaaagcgtaccgctggacaccagtgccgcgacaagccaggatacgacgccagcgcaaacggctccggctcctgcgacgccggttgattcgacggcggcaacgcaaaatacggtagtcgcgccttcgcaggcgaatgtcgatacggctgcgacatctgccgcgccagcggcaacggaaacgccgtccgcgctgccgaccagtcaggctggcgtagcggcgcctgctgccgatccgaacgcgctggtgatgaattttaccgctgactgttggctcgaagtcactgacgccacgggtaaaaaactgtttagcggtatgcagcgtaaagatggcaatttaaacctaaccggtcaggcgccttataaacttaaaattggcgcgccggccgcggtgcagatccagtatcaaggaaaacctgtcgatctgagccgctttatcagaactaatcaggttgcgcgtctgacccttaatgccgaaccgacaccggcgcagtaa

SEQ ID NO: 39510 - DNA, 660 bp, Salmonella typhi
atgtatcaacatcgtaactggcaaggtgccttgcttgattacccggtaagtaaggtggtctgcgtgggcagtaattacgcaaatcacatcaaggagatgggcagcgcgacgccggaagaacccgtgctttttatcaagccggaaaccgcattgtgtgatattcgccagccgctggcgattccggcggatatgggcgctgttcatcatgaagttgagcttgccgtgctgattggcgcaacgctccgccaggcgaccgaagatcatgtacgtaaagcgatagccggttatggcgtggcgcttgatttaaccctgcgcgatattcaagggaaaatgaaaaaggccggacagccttgggaaaaagccaaaggtttcgataacgcatgtccgatttcaggcttcatccctgtcgcggccttctgcggcgatccgcaaaatacggttatcggacttaacgttaatggcgaggttcgccagcaagggtcgaccgcggatatgattcatcctattgtgccccttatcgcctatatgagccgctattttacgctcaaagccggggacgtggtgctaaccggcacgccggcaggcgtggggccattattaagcggcgatgagctggacattcgttttaatggcgaaacgttgtctacccgcgttctgtaa

SEQ ID NO: 39511 - DNA, 333 bp, Salmonella typhi
ttgaggcaagtcaccatcccgttaattcagagtaaaagtatgttttgtgtgatctatagaagtagcaagcgcgatcaaacctatttgtatgtcgaaaaaaaagacgatttttcgcgggtgcctgacgcgttgatgaaaggattcggtcagccgcagttagcgatgatgctgccgcttgatggacgtaaaaaattagtcaatgccgagctcgaaaaagtaaaacaggcgttaagcgagcagggctattatttacaattgccgccgccgccggaagatttgctgaaacaacatctttcttcggtgggacaaaatacgtcgcacgctgaccgttaa

SEQ ID NO: 39512 - DNA, 1365 bp, Salmonella typhi
atgatgaagacgttatctcccactgttatcaccttaccctggcgtccggacgccgctgaacactattttgcgcccgtaaaccatttgccctgggcgatgctgctgcattcaggtgatgctattcatccctataaccgttttgatattctggtcgccgatcctgtcaccacactgaccacgcgcgcccaggaaaccacggtatgtactgcgcgcacgactaccgtcactctcgacgatccgttacacgttttgcagactcaactggaggcgctgccttttcatcctcagcctgaccctgacttaccctttcagggcggcgcgctgggtctgtttggttatgatttagggcggcgtttcgaaattctgcccgatactgccgcgcgcgatatcgctttacccgatatggcgattggcctttacgactgggcgctgattgtcgatcaccataaacaggtagtgtcgctgataagctatcacgatgcagacgcccgatatcgctggctcaccggccagcgcgcgccgacccgaacgcccttcaggcttacctcggcctggcaatccaatatgacgcgttgcgagtatggcgagaagtttcgtcaggtgcaggcctggctgcacagcggggactgctatcaggtcaatctttcccagcgttttcaggcgagctacgagggtgatgaatggcaggctttcgaacgccttaaccgcgcaaatcgcgccccgttcagcgcctttcttcgtttacatgacggcgccatattgagcctttctcccgagcgttttatccaactggagaacggtcatattcagacgcgcccgatcaaaggtacgcttccacggcttaacgatccgcaggcggatcgtcagcaggcgcagaaactggctaattcaatgaaagatcgcgctgaaaatttgatgattgtcgatttgatgcgtaacgacattggccgggtcgccgtaccaggttcggtgaaagtgccggaactgttcgtcgtcgaaccatttcctgccgttcaccatctggttagcaccattactgcccgtttaccagactcgcttcatgccaccgatctgctgcgcgcggctttccccggcggctccattaccggcgcgcctaaagtgcgggcaatggaaattatcgacgaactggagccgcagcgacgcaacgcctggtgcggtagcatcggttatctgagtttctgcggcaagatggataccagtattactatccgcaccgtcacggcaacgcagggccaactctattgctcagccggcggcggtatcgtggccgatagcaacgaagaagcggaatatcaggaaacttttgataaagttaatcgtatcctgcacccactggagaactaa

SEQ ID NO: 39513 - DNA, 579 bp, Salmonella typhi
gtggataccagccgtctgacgctcgatcatttcttatcgcgctttcagcttttgcgcccgcagatgactcatgaaacgttaaatcaacgtcaggccgccgtactgatccctgtggttcgccgcccccagccggggctgctgttgacccagcgggctattcatttgcgcaaacacgccggacaggtcgcctttcccggcggggccgtggacagtaccgatgcttcgcttatcgccgcagcgcttcgcgaagcgcaggaggaagtcgccatcccgccgcaagccgtggaagtgattggcgttttaccgccggtagacagcgtgaccggttttcaggtcaccccggtggtcggcattattccgccaaatctcccctggcgcgccagtgaagacgaagtgtctgcggtgtttgaaatgccgctggcgcaagcgttgcaactgggtcgatatcatccgcttgatgtttaccgtcgcggcaattcgcaccgcgtatggctctcctggtatgagcattatttcgtctggggcatgaccgcaaacattcttcgtgagctggcgctgcaaatcggcgtaaagccctga

SEQ ID NO: 39514 - DNA, 1365 bp, Salmonella typhi
gtgattagcctattcgacatgtttaaggtagggattggtccctcctcttcccacactgttggcccgatgaaggccggtaaacagttcgtcgatgacctagtcgaaaaaggattactggataacgttacccgcgtcgctgtcgatgtctacggctcgctgtcgctgacggggaaaggtcaccataccgatatcgccattattatgggtctggcgggtaatgaacccgctaccgtggatattgatagtatccccggttttattcgcgacgtcgaaacgcgcgagcgtctgttactggcccagggacgtcacgaagtcgacttcccgaaagatgacggaatgcgttttcacaacggcaatttgccgctgcatgaaaacgggatgcagatccacgcctggcatgacgacacggtcatttatagcaagacgtactattccatcggcggcggctttatcgttgatgaagcgcatttcggccaggaagcgacgaatgaggttactgtaccttatccgtttaaatcggcgaaagaaatgctggagtattgcaacagcaccggcctttcactctccggcatggtgatgcaaaacgaactggcgctgcatagcaagaaagagattgaagagtatttcggtcacgtctggcaaaccatgcaggcttgtattgatcgcggtatgaataccgaaggcgttctgccggggccgctgcgcgtaccgcgtcgcgcctctgcgctgcgtcgtatgctggtttccagcgataagctttccagcgatccgatgaacgtcattgactgggtgaacatgtttgctctggcggtgaacgaagagaacgccgcaggcggtcgcgtcgtgacggcgccaaccaacggcgcgtgcggcatcgttcctgcggtactggcttactacgaccattttattgagtctgtcagcccggatatttacacccgctacttcctggcggcaggcgctattggcgcgctgtataagatgaacgcgtctatttccggcgcggaagtcggctgtcagggcgaagtcggggtcgcctgttcgatggcggcggcaggccttgctgaactgttgggcgccagcccggaacaggtttgcgttgccgctgaaatcggcatggagcataacctggggctgacctgcgacccggttgccggtcaggtgcaggtgccgtgtatcgagcgtaacgccattgcttcggttaaagcgatcaacgctgcgcgtatggccatgcgtcgaaccagcgcgccgcgcgtctcgctggataaagtcatcgaaacgatgtacgagaccggaaaagacatgaacgccaaataccgcgaaacgtcgcgcggcgggttggctattaaagtccagtgtgattaa

SEQ ID NO: 39515 - DNA, 969 bp, Salmonella typhi
gtgaccattgctattgttataggcacacatggttgggctgcagagcagttacttaaaacagccgaaatgctgttaggcgagcaggaaaacgtcggctggatcgatttcgttccaggcgaaaatgccgaaacgctgatcgaaaagtacaacgctcagttggctaaactcgataccagtaaaggcgtgctatttctcgttgatacatggggaggcagtccgtttaatgctgccagccgcattgtcgtcgataaagagcgctatgaagttattgccggcgtcaacatcccgatgctggtcgaaacgtttatggctcgtgacgacgatccgagctttgacgagctggtcgcactggcggtagaaaccggtcgtgaaggcgtaaaagcgctgaaagcgaaaccggtagaaaaagccgcgccagcgccggtcgccgccgcgccaaaagcggccacgccggcaaaaccgatgggcccgaatgattatatggttatcgggcttgcccgtattgatgaccgcctcattcacggtcaggtcgctacccgctggaccaaagagaccaatgtcagccgtattattgttgtgagcgatgaagtcgcggcggataccgtacgtaaaacgctgctgacgcaagttgcgccgccgggcgttacggcgcatgtggttgacgtcgcgaagatgattcgcgtctacaataacccgaaatacgccggcgaacgcgtgatgcttctgtttaccaatcctaccgacgtcgagcgcatcgttgagggcggcgtgaaagtcacctccgtgaacattggcggtatggcctatcgtcaaggtaaaacgcaggtgaacaacgccgtttccgtcgatgaaaaggatatcgaagcctttaaaaagctcaacgagcgcggcatcgagcttgaggtgcgtaaagtttccaccgatccgaaactgaaaatgatggatttaattgccaaagtggcgaaataa

SEQ ID NO: 39516 - DNA, 1746 bp, Salmonella typhi
gtgaaaaagaaaagcgacggcgatacccgtaattttacacccatacgttttgcactactttgcactgccattctgctcagtatggcattgttgttagggcgggtggcatggctgcaaattgttacgccgtcgaaactggtgaaacaagaagatatgcgctcgcttcgtgaagtgaccacggcctctccacgcggcatgatcaccgacagagaagggcggcccttagcggtgagcgttccggttaatgctgtctgggccgatccgaaaactatcataagcaaaggcggcgttggctacaatgagcgctggcaggcgctggccagcgccttacatctgtctctcagtacgcttgcggaacgggtaaacagtaacccggcaggtcgttttatctacctcgcgcgccaggtttcaccccagcaagccgaatggatagataaactgaatctaccgggtattaacctgcgggaagagtcgcgccgtttttaccctgccggacatgtagcggccaatttgatcggctttaccaatatcgacgggcagggaatagaaggtattgaaaagagctttaacgcgcaactgacgggaaaaccgggctcccggctggtgcgtaaagataaatttggtcacgttattgagaacattacggaagtgaatccggttcctgctcatgaacttcagcttagcattgatgaacgtctgcaaacggttaccgaagatgcgctggataacgccgtcatctggaacaaagcggaatccggcgctgccgtattgattaacatcccaacgggtgaaattctctcgatggcgagctacccggatttcaacccgaacaaccgtgaaggcgcgcagttggacgattttcgtaaccgcgcgattagcgacactttcgaacccggttctactgtgaagccattggtcattatgactgcgttacagcagggtatcgtgcaaccggacagcgttatcgatacccatccttttactctcgatggacaccgtatccgcgacgtcggctactatccggaactgacattaaccggcattttgcaaaaatccagcgataccggcgtttctcacctttctctggcgatgccggtgcagaaattaatggatacttataaaagctttggtttcggcgtgcctaccggactgggtctcaccggagagagcagcgggttattaccgaaacgccgttactggagtgatttagatcgcgctaccttcgcttttggctatggattaatggtgacgccgctgcaactggcgcatgtttatgccacgattggcagctttggtatctaccgtccgttatcgatcaccaaagttgatccgcccgtgatcggcacgcgagtaatgccggaagaactggtgcacgaggtggaacatatgatggagagcgtcgcgttgcctggcggcggcggaacaaaagccgcagtaagagactaccgtattgcggtcaaaaccgggacggcgaaaaaaattggcgatgatggtaaatacgttgataagtatgtggcatataccgcaggcgtcgcgccggcaagtaaccccagatttgcgctggtggtggtgattaataatccacaaaatggggcttattatggcggtgcggtatctgcgcccgtattcagccagatcatgggcgatgtactgcggctggaaaatgttgagccagacggtatgccagccgattcagatcaccttctggtgatgcatggcagccacgttgcggttccgggctcgtaa

SEQ ID NO: 39517 - DNA, 1908 bp, Salmonella typhi
atgattgttttctcctcgttacaaattcgtcgcggcgtgcgcgtcctactggacaatgcctcggctaccattaatccaggccagaaagtcggcctggtgggtaaaaacggctgcggtaaatctaccctgctggcattgctaaaaaatgaaatcagcgccgatgccgggagttttaccctgcccggaacctggcaattagcgtgggtgaatcaggaaacacctgcgttgcctcagccagcgattgagtatgtcattgacggcgaccgtgaataccggcatctggaggcgcagcttaacgacgccaacgaacgtaacgacgggcatgctatcgcctccatacacggtaagctggacgccatcgacgcatggaccgttcgctcgcgcgccgccagcctgttacacggcctcggcttctctaacgatcagctggaacgtccggtcagcgacttttccggcggctggcggatgcgccttaatctggcccaggcgctgatttgccgttccgatttactgctgctcgacgaaccgaccaaccacctcgatctggatgccgttatctggctggaaaaatggctgaagagctatccaggcaccctgattctgatctcccacgatcgcgattttcttgacccgatagtggataaaattatccatatcgaacagcagactctgttcgagtacaccggtaactacagcgcgtttgaagttcagcgcgccacgcgcctggcgcagcagcaggcgatgtatgagagtcagcaggagcgtgtggcgcatctgcaaagctacatcgaccgtttccgcgccaaggccaccaaggccaagcaggcgcaaagccgtatcaagatgctggagcgtatggagttgattgcgccggctcatgtcgacaacccgttccatttcagcttccgcgcgccggaaagcctgccgaacccgctgctgaagatggaaaaagtcagcgcaggttatggcgatcgcatcattctggaatccatcaagctgaacctggtgcccggctcgcgtatcggcctgctgggccgcaacggcgcggggaaatcgacgctgatcaagctgctggcgggcgaactggaaccgttgcacggtgaaatcggcctcgccaaaggcattaagctcggctacttcgcccagcaccaactggagttcctgcgcgccgatgaatccccgctgcagcatatggcgcgtctggcgccgcaggaactggagcagaagctgcgcgactatctcggcggcttcggtttccagggcgacaaagtaacggaagagacgcaacgtttctccggcggcgagaaagcgcgcctggtactggcgctgatcgtctggcagcgtccaaatctgctactgctcgatgaaccaaccaaccacctggatctcgacatgcgtcaggcgctcaccgaagcgctgattgatttcgaaggcgcattggtcgtcgtgtcgcacgaccgccacctgattcgctccaccaccgacgacctctatctggttcacgacaaaaaggtcgaaccgttcgacggcgacctggaggattatcagcagtggctgagcgacgtgcagaagcaggaaaaccaggccgacgacgcaccgaaggaaaacaacgccaacagcgctcagtcacgcaaagatcagaagcgtcgcgaagccgagctacgcactctaacgcagccgctgcgtaaagagattacccgtctggaaaaagagatggaaaagctcaacgcccaactggcgcaggcggaagagaagcttggcgacagcagcctgtatgacccaagccgtaaagcggagatgaccgagtgtctgcaactgcaggccagcgccaaatccgggctggaagaatgtgaaatggcatggcttgaggcgcaggagcagcttgagcagatgatgcagaacgactaa

SEQ ID NO: 39518 - DNA, 375 bp, Salmonella typhi; identical to SEQ ID NO: 7528

SEQ ID NO: 39519 - DNA, 471 bp, Salmonella typhi
atgccacgtcgtcgcgtcattggtcagcgtaaaattctgccggatccgaagttcggatcagaactgctggctaaatttgtcaatatcctgatggtagatggtaaaaaatctactgcagaatcaatcgtatacagcgcgctggagaccctggctcagcgttctggtaaatctgaactggaagctttcgaagtcgctctcgaaaacgttcgcccgactgtagaagttaaatcccgccgtgtaggtggttctacttatcaggtaccagttgaagtccgtccggtccgtcgtaatgctctggcaatgcgttggatcgtagaagctgctcgtaaacgcggtgataaatccatggctctgcgcctggcgaacgaactttctgacgctgcagacaacaaaggtactgcagttaagaaacgtgaagacgttcaccgtatggcagaagccaacaaggcgttcgcacactaccgttggtaa

SEQ ID NO: 39520 - DNA, 2115 bp, Salmonella typhi
atggctcgtacaacacccatcgcacgctaccgtaatatcggtatcagtgcgcacatcgacgccggtaaaaccactactaccgaacgtattctgttctacaccggtgtaaaccacaaaatcggtgaagttcatgacggcgcagctaccatggactggatggagcaggagcaggagcgtggtattactatcacctccgcagcgactactgcattctggtctggtatggctaagcagtatgaaccgcatcgcatcaacatcatcgacaccccggggcacgttgacttcactatcgaagtagaacgttccatgcgtgttctcgatggtgcggtaatggtttactgcgcagttggtggtgttcagccgcagtctgaaaccgtatggcgtcaggcaaacaaatacaaagttccgcgcattgcgttcgttaacaaaatggaccgcatgggcgcgaacttcctgaaagttgttggtcagatcaaaacccgtctgggcgcgaacccggttccgctgcagctggcaattggtgctgaagaaggtttcaccggcgttgttgacctggtgaaaatgaaagccatcaactggaacgatgccgaccagggcgttaccttcgaatacgaagatatcccggctgacatgcaggacctggctaacgaatggcaccagaacctgatcgagtccgccgcagaagcttctgaagagctgatggaaaaatacctgggtggtgaagaactgactgaagaagagatcaaacaagctctgcgtcagcgcgttctgaacaacgaaatcatcctggtaacctgtggttctgcatttaagaacaaaggtgttcaggcgatgctggatgcggtaattgattacctgccatccccggtagacgtacctgcgatcaacggtattctggacgacggtaaagatactccggctgagcgtcacgcaagcgacgacgagccgttctctgcgctggcgttcaaaatcgctaccgacccgtttgtgggtaacctgaccttcttccgtgtgtactccggtgtggttaactctggtgataccgtactgaactccgtgaaaaccgcacgtgagcgtttcggtcgtatcgttcagatgcacgctaacaaacgtgaagagatcaaagaagttcgcgcgggcgacatcgcggctgctatcggcctgaaagacgtgactaccggtgacaccctgtgtgatccggaaaacccgatcattctggaacgtatggaattccctgagccggtaatctccatcgcggtagaaccgaaaaccaaagctgaccaggaaaaaatgggtctggctctgggccgtctggcgaaagaagacccgtcgttccgcgtatggactgatgaagaatctaaccagaccatcatcgctggtatgggtgaacttcacctagatatcatcgttgaccgtatgaagcgtgaattcaacgttgaagcgaacgtgggtaaacctcaggttgcttaccgcgaagcgattcgcgcgaaagttaccgacatcgaaggtaaacacgcgaaacagtctggtggtcgcggtcagtatggtcatgttgttatcgacatgtacccgctggagccgggctctaacccgaaaggttacgagttcatcaacgacatcaaaggtggtgtaattcctggcgagtacatcccggccgttgataaaggcatccaggagcagctgaaatctggcccgctggcgggttatccggtagttgatctcggtgtgcgtctgcacttcggttcttaccatgacgttgactcctctgagctggcgtttaaactggctgcgtctatcgcctttaaagaaggctttaagaaagcaaaaccagttctgcttgagccgatcatgaaggttgaagtagaaacacctgaagagaataccggtgacgttatcggcgaccttagccgccgtcgtggtatgctcaaaggtcaggaatctgaagttacaggcgttaagatccacgctgaagtaccgctgtctgaaatgttcggatatgcaactcagctgcgttctctgaccaaaggtcgcgcatcgtacactatggaattcctgaagtatgatgatgcgccgaacaacgttgctcaggccgtaatcgaagcccgtggtaaataa

SEQ ID NO: 39521 - DNA, 1185 bp, Salmonella typhi
gtgtctaaagaaaaatttgaacgtacaaaaccgcacgttaacgtcggcaccatcggccacgttgaccacggtaaaactaccctgaccgctgcaatcaccaccgtactggctaaaacctacggcggtgctgctcgtgcattcgaccagatcgataacgctccggaagaaaaagcgcgtggtatcaccatcaacacttctcacgttgaatacgataccccgacccgccactacgcacacgtagactgcccggggcacgccgactatgtaaaaaacatgatcaccggtgctgcgcagatggatggcgcgatcctggttgttgctgcgactgacggcccgatgccgcagacccgtgagcacatcctgctgggtcgtcaggtaggcgttccgtacatcatcgtgttcctgaacaaatgcgacatggttgatgacgaagagctgctggaactggttgaaatggaagttcgtgaacttctgtctcagtacgacttcccgggcgacgacacgccgatcgttcgtggttctgctctgaaagcgctggaaggcgacgcagagtgggaagcgaaaatcatcgaactggctggcttcctggattcttacatcccggaaccagagcgtgcgattgacaagccgttcctgctgccgatcgaagacgtattctccatctccggtcgtggtaccgttgttaccggtcgtgtagaacgcggtatcatcaaagtgggcgaagaagttgaaatcgttggtatcaaagagactcagaagtctacctgtactggcgttgaaatgttccgcaaactgctggacgaaggccgtgctggtgagaacgtaggtgttctgctgcgtggtatcaaacgtgaagaaatcgaacgtggtcaggtactggctaagccgggcaccatcaagccacacaccaagttcgaatctgaagtgtacattctgtccaaagatgaaggcggccgtcatactccgttcttcaaaggctaccgtccgcagttctacttccgtactactgacgtgactggcaccatcgaactgccggaaggcgtagagatggtaatgccgggcgacaacatcaaaatggttgttaccctgatccacccgatcgcaatggacgacggtctgcgtttcgcaatccgtgaaggcggccgtaccgttggcgcgggcgttgttgctaaagttctgggctaa

SEQ ID NO: 39522 - DNA, 312 bp, Salmonella typhi
atgcagaaccaaagaatccgtatccgcctgaaagcgtttgatcatcgtctgatcgatcaatcaaccgcggaaatcgtcgagactgccaagcgcactggtgcgcaggttcgcggtccgatcccgctgccgacccgcaaagagcgctttaccgttctgatctctccgcacgttaacaaagatgcgcgcgatcagtacgaaattcgcactcacaagcgtctggttgacatcgttgagccaaccgagaaaaccgttgatgctctgatgcgtctggacctagctgccggtgtagacgtgcagatcagcctgggttaa

SEQ ID NO: 39523 - DNA, 630 bp, Salmonella typhi
atgattggtttagtcggtaaaaaagtgggtatgacccgcatcttcactgaagatggcgtctctatcccagtaaccgtaatcgaagttgaagcaaaccgtgttactcaggttaaagacctggctaacgatggctaccgcgctgttcaggttactacgggtgctaaaaaagctaaccgtgtcaccaagccggaagcgggtcactttgctaaagctggcgtagaagctggccgtggtctgtgggaattccgtctggctgaaggcgaagaatacaccgtaggtcagagcatcagcgttgaactgtttgctgacgttaaaaaagttgacgtaaccggtacctctaaaggtaaaggtttcgctggtaccgttaagcgctggaacttccgtacccaggacgctactcacggtaactccttgtctcaccgcgttccgggttctatcggtcagaaccagactccgggcaaagtgttcaaaggcaagaaaatggcaggtcagatgggtaatgagcgcgtaaccgttcagagccttgacgtagtacgcgttgacgctgagcgcaacctgctgctggttaagggtggtgttccgggtgcaaccggttgcgacctgatcgttaaaccagctgtgaaggcgtaa

SEQ ID NO: 39524 - DNA, 606 bp, Salmonella typhi
atggaattagtattgaaagacgcgcagagcgcgctgactgtttccgaaactaccttcggtcgtgatttcaacgaagcgctggttcaccaggttgttgttgcttatgcagctggtgctcgtcagggtactcgtgctcagaagactcgtgctgaagtaactggttccggtaaaaaaccgtggcgccagaaaggcactggccgtgcgcgttcaggttctatcaagagcccgatctggcgttccggtggcgtgaccttcgctgctcgtccgcaggaccacagtcaaaaagttaacaagaagatgtaccgcggcgcgctgaaaagcatcctgtccgaactggtacgtcaggatcgtctgatcgttgtcgagaagttctctgtagaagcgccgaaaactaagctgctggcacagaaactgaaagacatggctctggaagatgtgctgatcatcaccggtgagctggacgagaacctgttcctggccgcacgtaacctgcacaaggttgacgtacgcgatgcgactggtatcgacccggttagcctgatcgccttcgacaaagtcgtaatgactgctgatgctgttaagcaagttgaggagatgctggcatga

SEQ ID NO: 39525 - DNA, 303 bp, Salmonella typhi
atgattcgtgaagaacgtctgctgaaggtgctgcgcgcaccgcacgtttctgaaaaagcgtctactgcgatggaaaaaaccaacaccatcgttctcaaagttgctaaagacgcgaccaaagcagaaatcaaagctgctgtgcagaaactgtttgaagtcgaagtcgaagtcgttaacaccctggtcgttaaagggaaagttaaacgtcacggacagcgtatcggtcgtcgtagcgactggaaaaaagcttacgtcaccctgaaagaaggccagaatctggacttcgtcggcggcgctgagtaa

SEQ ID NO: 39526 - DNA, 822 bp, Salmonella typhi
atggcagttgttaaatgtaaaccgacatctccgggtcgtcgccacgtcgttaaagtggtcaacccagagctgcacaagggcaaaccttttgctccgctggttgaaaaaaacagcaaatccggtggtcgtaacaacaatggccgtatcaccactcgtcatatcggtggtggtcacaaacaggcttatcgtattgttgacttcaaacgcaacaaagacggtatcccggcagttgttgaacgtcttgagtacgatccgaaccgttccgcgaacatcgcgctggttctgtacaaagacggcgaacgccgttacatcctggccccgaaaggcctgaaagctggcgaccagattcagtctggcgttgatgctgcaatcaaagcaggcaacaccctgccgatgcgcaatatcccggttggttctaccgttcataacgtagaaatgaaaccaggtaaaggcggtcagctggcgcgttccgctggtacttacgttcagatcgttgctcgcgatggcgcttatgtcaccctgcgtctgcgttctggtgaaatgcgtaaagtcgaagcagactgccgtgcaaccctgggcgaagttggcaatgctgagcatatgctgcgcgttctgggtaaagcaggtgctgcacgctggcgtggcgttcgtcctaccgttcgcggtactgcgatgaacccagtagaccacccacatggtggtggtgaaggtcgtaactttggtaagcacccggtaactccgtggggcgttcagaccaaaggtaagaagacccgcagcaacaagcgtactgataaattcatcgtacgtcgccgtagcaaataa

SEQ ID NO: 39527 - DNA, 936 bp, Salmonella typhi
atggcactgcccattattattgattgcgatccgggtcatgatgacgcgatcgccctcgttctcgccctcgcctcccctgaactggaagtgaaagcgatcacctcttccgccggcaaccagacgccggagaagacgctgcgcaacgtgctgcggatgctgacactgctcaaacgcccggatattcctgtggcgggcggcgcggtgaaaccgctcatgcgcgaactgattatcgctgataacgttcacggcgaaagcggtcttgacggcccggcgctgcccgagccgtcattcgccccgcaaagcggcactgccgttgagctgatggcaaaaacactgcgcgagagcgcacagccggtcaccatcgtctccactggcccacagaccaacgtggcgctgctgctgaatagccatccggaactgcatacgaaaatcgcccgcattgtgatcatgggcggcgcgatggcgctgggtaactggacgcccgctgcggaatttaatatttacgtcgatccggaagcggcagaaattgtcttccagtcaggcattccggtggtgatggccgggctggacgtcacccataaggcgcagattcacgccgccgatatcgagcgtttccgcgacatcggcaatccaatttcgacgatcgtggctgaactactcgacttcttctttgaataccacaaagacgaaaaatggggatttgtcggcgcgccgctgcacgacccttgcactatcgcctggctgctgaaacctgagattttcaccaccgttgagcgttgggttggcgtggaaactcaggggaaatatacccaggggatgacggtggtggattattatttcctgacggggaataagccgaatgcgacggtgatggtcgatgtagaccgtcagggatttgtcgatttgctggcggaacggctgcaatactacgcataa

SEQ ID NO: 39528 - DNA, 927 bp, Salmonella typhi
atgataaaggagttggatatgcaattacgtaagctaaccacagcaatgctggtcatgggactgtctgcgggccttgcgcacgcagaagatggcgcgcctgccgctggtagcaccctggacaagatcgctaaaaatggcgtgatcgtcgtcgggcatcgcgaatcttctgtgcccttttcttattacgacaaccagcagaaagtggtcggctattcccaggactactccaacgccattgtggaagtggtaaaaaagaaacttaacaagcccgatctgcaggtgaagctgatcccgatcacctcgcaaaaccgtattccgctgttgcaaaacggaaccttcgattttgaatgtggttcaacgactaacaaccttgagcgccagaaacaggccgccttctccgatacgattttcgtcgtcgggacgcgactgctgactaaaaaaggcggcgatattaaagatttcccggatctgaaaggcaaagcggtcgtcgtcacctccgggacgacctctgaaattctgctgcataagcttaacgaagagcaaaagatggggatgcgtattattagcgcgaaagaccacggtgactcgttccgcaccctggaaagcggtcgcgccgtcgcctttatgatggatgacgcgctgctggccggcgagcgcgccaaagccaagaaaccggataactgggagattgtcggtaaaccgcagtcccaggaagcctacggctgtatgctgcgtaaaaacgaccctgagtttaaaaagctgatggacgataccatcgctcaggcgcaaacctccggcgaagcggaaaagtggtttgataagtggtttaaaaatccgatcccaccgaaaaacctgaacatgaatttcgagttgtctgacgagatgaaagccctgttcaaagcaccgaatgataaagcgcttaactaa

SEQ ID NO: 39529 - DNA, 1539 bp, Salmonella typhi
atggcatttgcctcgttaattgaacgccagcgtattcgcctgctgctggcgttattattcggcgcctgcggaacactggctttctctccgtatgacgtctggcccgcagcgatagtgtcgcttatcgggctgcaggccttaacgtttaatcgccgcccgctccagtctgccgccatcggctattgctggggactcggacttttcggcagcgggattaactgggtttatgtcagtatcgcgcagtttggcggcatgccgggcccggttaacgtttttctggtggtgctgcttgcagcttatctctcgctgtataccggactgtttgccgggattttgtcgcgcctgtggccaaaaaccaactggctgcgcgtcgctatcgccgcgcctgcaatatggcaaatcaccgaatttttacgcggctgggtgctgaccggcttcccctggctgcaatttggctatagtcaggtcgacggcccgctaaaaggcctggcgccggtaatgggcgtcgaagcgatcaacttcctgctgatgatggtcagcggcctgttagcgctggcactggcgacgcggaactggcgtccgctggctgtcgccgtgattctgtttgctttgccctttccgctacgttatatccagtggtttacgctggaacctaccaaagcgacccaggtatcgctggtgcagggcgatattccgcagtcgctgaagtgggacgaaaaccagctactgaatacgctaaacatttatctcaacgaaactcgcccagagttaggcaaatcacagattattatctggcctgagtcggcgattccggatctcgaaatcaatcagcagcctttccttcgttcgctggacgagatgttacgcgaaaaaaatagcacgctgatcaccggtattgtcgatgcgcgtctcaataaacagaatcgatacgacacctacaatacgattattacgttgggcaaggataatccatacagttatgactcgcccaatcgctacaataaaaatcaccttgtaccctttggcgagttcgttccgctggagtctatcctgcgtccgctggcgccgttcttcgatctgcccatgtcctcctttagccgcggcccttatatccagccgcagttacatgcgcacgactataagctgacggcggcaatctgttatgaaattattcttggcgaacaggtgcgggataacttccgcccggacaccgactatctgctgacgatttctaacgacgcctggtttggtaagtccattggcccgtggcaacatttccagatggcgcggatgcgttcgctggagctggcgcgtccgttgctgcgcagtactaataacggtattacggcggtgattggcccgcagggcgaaattcaggcgatgatcccgcagttcacacgccaggtgctaactaccaaagtcacgccgaccaccggcctgacgccgtacgcacgaaccggcgactggacggtgtggttgattaccgtactgttcggctttggcgcgctggtgatgagcctgcgtcaacgccgcaaataa

SEQ ID NO: 39530 - DNA, 879 bp, Salmonella typhi
atgagcgacgacaattcacacagtagtgacacagtaaacagtaaaaagggatttttttccctgctactcagccagcttttccacggtgaacctaaaaaccgtgatgagttgctggcgctgatccgtgattccgggcagaacgagcttatcgatgaagatacgcgcgatatgctcgaaggcgtaatggacatcgccgaccagcgcgttcgcgatattatgatcccgcgctcccagatgattaccctgaaacgcaaccagacgctggacgaatgtctcgatgttatcatcgagtccgcccactcgcgttttccggtgatcagcgaagataaagatcacattgaagggattctgatggccaaagatttgctgccgtttatgcgcagcgatgccgaagccttcagcatggacaaagtgttacgtaccgcggttgtcgtaccggaaagcaaacgggttgaccgtatgctcaaggaattccgctcccagcgctaccatatggccatcgttatcgatgagtttggcggcgtttccggccttgtgactatcgaagacatcctcgaactgattgtcggtgaaattgaagatgagtatgacgaagaagacgatatcgacttccgtcagcttagccgccatacctggacgattcgcgcgctggcgtcgattgaagacttcaatgacgctttcggcacccacttcagcgatgaagaagtcgataccatcggcgggctggtgatgcaggcgttcggccatttaccggcccgcggcgaaaccattgacattgatggttaccagttcaaagtggcaatggccgatagtcgtcgtattattcaggtgcatgtcaggatcccggatgactcgccccagccaaaactggacgaataa

SEQ ID NO: 39531 - DNA, 279 bp, Salmonella typhi; identical to SEQ ID NO: 7551

SEQ ID NO: 39532 - DNA, 333 bp, Salmonella typhi; identical to SEQ ID NO: 7550

SEQ ID NO: 39533 - DNA, 702 bp, Salmonella typhi
atgggtcagaaagtacatcctaatggtattcgcctgggtattgtaaaaccatggaactctacctggtttgcgaacaccaaagaattcgctgacaacctggacagcgattttaaagtacgtcagtacctgacgaaggaactggctaaagcgtctgtatctcgtatcgttatcgagcgtccggctaagagcatccgtgtgactattcacaccgctcgcccgggtatcgttatcggtaaaaaaggtgaagacgtagaaaaactgcgtaaggtcgtagcggatatcgctggcgttcctgcacagatcaacatcgccgaagttcgtaaacctgaactggacgctaaactggttgctgacagcatcacttctcagctggaacgtcgcgttatgttccgtcgtgcgatgaagcgtgctgtacagaacgccatgcgtctgggcgctaaaggtatcaaagttgaagttagcggccgtctgggcggcgcggaaatcgcacgtaccgaatggtaccgcgaaggtcgcgtaccgctgcacactctgcgtgctgacatcgactacaacacctctgaagcgcacaccacttatggtgtaatcggcgttaaagtgtggatcttcaaaggcgagatcctgggtggtatggctgctgttgaacaaccggaaaaaccggctgctcaaccgaaaaagcagcagcgtaaaggccgtaaataa

SEQ ID NO: 39534 - DNA, 411 bp, Salmonella typhi
atgttacaaccaaagcgtacaaaattccgtaaaatgcacaaaggccgcaaccgtggtctggctgcaggcgcggatgttagcttcggcagcttcggcctgaaagctgttggccgtggtcgtctgactgcccgtcagatcgaagcagcacgtcgtgctatgacccgtgcagttaagcgtcaaggtaagatctggatccgtgtattcccggacaaaccgatcactgaaaagccgctggcagtgcgtatgggtaaaggtaaaggtaacgtggagtattgggttgccttgattcagccgggtaaagtcctgtatgaaatggacggcgtaccggaagagctggcccgtgaagcattcaagctggcagcagcgaaactgccgattaaaaccacctttgtaactaagacggtgatgtaa

SEQ ID NO: 39535 - DNA, 255 bp, Salmonella typhi
atgaccgataaaatccgtactctgcaaggtcgcgtggttagcgacaaaatggagaaatccattgttgttgctatcgaacgttttgtgaaacacccgatctacggtaaattcatcaagcgtacgaccaaaatgcacgtacatgacgagaacaacgaatgcggtatcggcgacgtggttgaaatccgcgaatgccgtccgctgtccaagaccaaatcctggactctggttcgcgttgtagagaaagcggttctgtaa

SEQ ID NO: 39536 - DNA, 372 bp, Salmonella typhi
atgatccaagaacagactatgctgaacgtcgccgacaactccggtgcacgtcgcgtaatgtgtatcaaggttctgggtggctcgcaccgtcgctacgcaggcgtaggcgacatcattaagatcaccatcaaagaagcgattccgcgtggtaaggtcaaaaaaggtgatgtgctgaaggcggtagtggtgcgcaccaagaagggtgttcgtcgcccggacggttctgtcattcgcttcgatggtaatgcatgcgttattttaaacaataacagcgagcagcctatcggtacgcgtatttttgggccggtaactcgtgaacttcgtaacgagaagttcatgaaaattatctctctggcaccagaagtactctaa

SEQ ID NO: 39537 - DNA, 315 bp, Salmonella typhi
atggcagcgaaaatccgtcgtgatgacgaagttatcgtgttaaccggtaaagataaaggtaaacgcggtaaagttaagaatgtcctgtcttccggcaaggtcattgttgaaggtatcaacctggttaagaaacaccagaagccggttccggctctgaaccaaccgggcggcatcgttgaaaaagaagctgcaattcaggtttctaacgttgcaatcttcaatacggcaaccggcaaggctgaccgtgtaggctttagattcgaagacggcaaaaaagtccgtttcttcaagtctaacagcgaaactatcaagtaa

SEQ ID NO: 39538 - DNA, 540 bp, Salmonella typhi; identical to SEQ ID NO: 7564

SEQ ID NO: 39539 - DNA, 306 bp, Salmonella typhi
atggctaagcaatcaatgaaagcacgcgaagtaaaacgcgtagctttagctgataaatacttcgcgaaacgcgctgaactgaaagcgatcatctctgatgtgaacgcaaccgacgaagatcgttggaatgcggttcttaagctgcagactctgccgcgtgattccagcccgtcacgtcagcgtaaccgctgccgtcaaactggtcgtccgcacgctttcctgcggaagttcgggttgagccgtattaaggtccgtgaagccgctatgcgcggtgaaattccgggtctgaaaaaggctagctggtaa

SEQ ID NO: 39540 - DNA, 393 bp, Salmonella typhi
atgagcatgcaagatccgatcgcggatatgctgacccgtatccgtaacggtcaggccgcgaacaaagctgcggtcaccatgccttcctctaagctgaaagtggcaattgccaacgtgctgaaggaagaaggttttattgaagattttaaagttgaaggcgacaccaagccggaactggaactgactcttaagtatttccagggtaaagctgttgtagaaagcattcagcgtgtcagccgcccaggcctgcgcatctacaaacgtaaagatgagctgccgaaagttatggccggtctgggtatcgcagttgtttctacctctaaaggtgttatgacagatcgtgcagcgcgccaggctggtcttggtggcgaaattatctgctacgtagcctaa

SEQ ID NO: 39541 - DNA, 1176 bp, Salmonella typhi
atgacaaatcaaccaacggaaattgccattgtcggcgggggaatggtcggcggcgcgctggcgctgggtctggcgcagcaagggtttacggtgatggtaatagaacatgccgcgcctgcgccgtttgtggctgacagccagcctgacgtgcggatttcggccattagcgcggcatccgtggcgctgctcaaggggctgggcgtttgggaggcggtgcaggggatgcgtagccatccttatcggcgactggagacctgggagtgggaaaacgcccatgtggtgttcgacgccgctgaactcaagctgccgctgttaggctatatggtagagaacaacgtcctgcaacaggcgctgtggcaggcgctggaagcgcaccccggcgtgacgctgcgcgttccggcttcactggcggcattgcaccgccgccacgatggttatgcgctggaactggccgacggcgaatgggtaacgccgaagttagtgattggcgccgacggcgcgaattcgcaggttcggcaaatggcgggaattggcattcatgcctggcaatatgcgcagtcgtgtatgcttatcaccgtcaagtgtgaaaatgcgccaggcgacagcacctggcagcagtttacgccaacggggccgcgcgcctttttgccgctgttcgacgattgggcgtcgctggtgtggtatgacgctccggcacgtattcgccagctacagagtttatcgatgacgcaattgcaggtggaaattaaccagcactttccggcgcgtctgggggcggtgatgcctgtcgcggcgggcgcgtttccgctaacccgtcgtcacgcgttgcagtatgcgcaaccggggctggcgctggtaggcgacgcggcgcataccattcatccgctggccgggcagggcgtcaacctggggtatcgggatgttgatgcgttgattgatgtgctggcgagtgcccgtagctatggcgagtcctgggccagccattcggtgttgaaacgctatcagacgcggcgcatggcagataattttatgatgcaaagtggaatggatctgttttatgccgggttcagcaatgaactgccgccactgcgtattttacgcaatatggggctaatggcggcgcagcgcgcaggcgtgctaaaacgtcaggcgctgaagtatgcgttggggttgtag

SEQ ID NO: 39542 - DNA, 1665 bp, Salmonella typhi
atgtgttctattttcggcgtattcgatatcaaaacagatgcagcggaactgcgtaaaaaagcccttgaattgtcacgcctgatgcgccatcgcggcccggactggtccggcatctacgcttgcgataacgcgattctcgcacatgaacgcttgtcgattgttgatgttaacgccggcgcccagcccctgtataacgctaagaaaactcacgtgctggcggtgaacggtgaaatttataaccatcagacgttacgcgcggagtatggcgatcgttacgcgttccagactggctccgactgcgaagttattctcgcgctatatcaggaaaaagggccggatttccttgacgatttacaggggatgttcgccttcgccctgtatgacagcgaaaaagacgcttatctgattggtcgtgaccatatcggtattattccgctctacatgggctatgacgaattcggcaacttctacgtagcgtcagaaatgaaagcgctgactccggtctgccgcaccattaaagagttcccggcgggcagctacctgtggagcaaagacggcgaaattcgtcagtactatcagcgcgactggttcgattacgatgcggtaaaagataacgtcaccgacaaaaacgcgctgcgtcaggcgctggaagaatccgtgaaaagccacctgatgtccgacgtgccctacggcgtactgctctccggcggcctggactcgtcggttatctcggcaatcaccaaaaaattcgccgcccgtcgcgtcgaagatcaggagcgctccgaagcctggtggccacagttgcactcttttgcggtaggtctggaaggttcgcctgacctgaaggcggcccaggaagtggctaaccacctcggcaccgtgcatcatgaaattcacttcaccgtccaggagggtctggatgcgattcgcgacgtgatttaccacattgaaacctatgacgtaaccactatccgcgcctcaacgccaatgtatctgatgtcgcgtaagatcaaagcgatgggcatcaaaatggtgctctccggcgaaggttctgatgaggtgtttggcggctacctgtacttccataaagcgccgaacgccaaagagttacatgaagagacggtccgtaagctacaggcgctgcatatgtatgactgcacccgcgccaacaaagcgatgtccgcctggggcgtggaagcgcgcgtaccgttcctggataaaaaattcctcgacgtggcgatgcgtatcaacccacaggataaaatgtgcggcaacggcaagatggaaaaacacgtgctgcgcgagtgcttcgagtcttatctgccagcaagcgtggcgtggcgtcagaaagagcagttctctgacggcgtaggctacagctggattgatacgctgaaagaggtggcggcgaaacagatttccgatcaacaactggaaacagcccgcttccgctttccatacaacacgccgtcgtctaaagaggcgtacttgtaccgggaaatttttgaagaattgttcccggtgccgagcgccgcggaatgcgtacccggcggcccgtccgtggcctgttcttccgccaaagccattgagtgggatgaagcattcaaaacgatggatgacccgtcaggccgcgcggtcggcgtgcatcagtcggcgtaccagtaa

SEQ ID NO: 39543 - DNA, 1221 bp, Salmonella typhi
atgacaccaggcggacaagctcagataggtaacgttgatctcgtaaaacagcttaacagcgcggccgtttaccgcctgattgaccagcatggtcctatctcgcgcatacaaattgccgagcaaagccagcttgctcccgccagcgtaacgaaaattacgcgtcaactcattgaacgcgggctgatcaaagaagtcgatcagcaggcctctaccggaggccgccgcgctatctctatcgtcacggaaacccgtaacttccacgccattggcgttcgcctggggcgtcatgacaccactttaacgctctacgatctgagcagtaaagtggtcgctgaggagcattatccgctgccggagcgcacccaggagacgctggaacatgcgctgctcaacactatcgccgtctttattgatagttgtcagcgtaaaattcgtgaattgatcgctatctcggtgatcctgccagggcttgtcgatccggaaagcggcgtgattcgttacatgccgcacattcaggttgaaaactggggactggtcgaagcgctggaaaaacggtttcacgttacctgtttcgtgggtcacgatattcgtagcctggcactggcggaacactacttcggcgccagtcaggattgcgaggactcgattctggtgcgcgtccatcgtggtacaggtgccgggattatctccaacggacgcatcttcattggccgtaacggcaacgtcggcgaaattgggcatattcaggtggagccgttgggcgagcgctgccactgcggtaatttcggctgtctggaaaccattgccgccaatgcggcgattgaacaacgggtgctgaatttgcttaaacaagggtatcaaagccgtgttccgcttgacgactgcacgattaaaaccatctgtaaggcggcaaaccggggcgacagcctggcctcggaagtcattgagcatgttggccgccatttgggcaaaacgatcgccattgctatcaacctgtttaatccgcaaaaaatcgtcattgccggcgagatcattgaagccgataaagtcctgttgcccgctatcgaaagctgtatcaatacgcaggcgttaaaggcctttcgcaaaaatttgccggtggtacgctccacgctggatcaccgttctgctatcggcgcatttgccttagttaaacgcgccatgctcaacggaacattgctgcaacgtttgctggaaagctga

SEQ ID NO: 39544 - DNA, 534 bp, Salmonella typhi
atgtctcgtgttgctaaagcaccggtcgttgttcctgccggcgttgatgtcaaaatcaacggtcaggttattacgatcaaaggtaaaaacggcgagctgactcgtactctcaacgatgctgttgaagttaaacatgcagataatgcactgaccttcggtccgcgtgatggttacgcagacggttgggcacaggctggtaccgcgcgtgccctgctgaactcaatggttatcggtgttaccgaaggcttcactaagaagctgcagctggttggtgtaggttatcgtgcagcggttaaagggaatgtagtaaacctgtctttaggtttctctcacccggttgaccatcagctgccggcaggtatcactgctgaatgtccgactcaaactgaaatcgtgctgaaaggcgctgataagcaggtgatcggccaggttgcagcagatctgcgcgcctaccgtcgtcctgagccttacaaaggcaagggtgttcgttacgccgacgaagtcgtgcgtaccaaagaggctaagaagaagtaa

SEQ ID NO: 39545 - DNA, 354 bp, Salmonella typhi
atggataagaaatctgctcgtatccgtcgtgcgacccgcgcacgccgcaagctcaaagagctgggcgcaactcgcctggtggtacatcgtaccccgcgtcatatttacgcacaggtaattgcaccgaacggttctgaagttctggtagctgcttctactgtagaaaaagctatcgctgaacaactgaagtacaccggtaacaaagatgcggctgcagctgtgggtaaagctgtcgctgaacgcgctctggaaaaaggcatcaaagatgtgtcctttgaccgttccgggttccaatatcatggtcgtgtccaggcactggcagatgctgcccgtgaagctggccttcagttctaa

SEQ ID NO: 39546 - DNA, 504 bp, Salmonella typhi
atggctcacatcgaaaaacaagctggcgaactgcaggaaaagctgatcgcggtaaaccgcgtatctaaaaccgttaaaggtggtcgtattttctccttcacagctctgactgtagtaggcgatggtaacggtcgcgtaggttttggttacggtaaagcgcgtgaagttccagcagcgatccagaaagcgatggaaaaagcccgtcgcaatatgattaacgtcgcgctgaacaacggcaccctgcagcacccggttaaaggtgttcacacggggtctcgtgtattcatgcagccagcttccgaaggtaccggtatcatcgccggtggtgcaatgcgcgccgttctggaagttgctggggttcataacgttctggctaaagcatacggttccaccaacccgatcaacgtggttcgtgcaactattgatggcctggaaaatatgaattctccagaaatggtcgctgccaagcgtggtaaatccgttgaagaaattctggggaaataa

SEQ ID NO: 39547 - DNA, 435 bp, Salmonella typhi
atgcgtttaaatactctgtctccggccgaaggctccaaaaaggcgggtaaacgcctgggtcgtggtatcggttctggcctcggtaaaaccggtggtcgtggtcacaaaggtcagaagtctcgttctggcggtggcgtacgtcgcggtttcgagggtggtcagatgcctctgtaccgtcgtctgccgaaattcggcttcacttctcgcaaagcagcgattacagccgaagttcgtctgtctgacctggcgaaagtagaaggcggcgttgtagacctgaacacgctgaaagcggcaaacattatcggtatccagatcgagttcgcgaaagtgatcctggctggcgaagtcactactccggtaactgttcgtggcctgcgtgttactaaaggcgctcgtgctgctatcgaagctgctggcggtaaaatcgaggaataa

SEQ ID NO: 39548 - DNA, 1332 bp, Salmonella typhi
atggctaaacaaccgggattagattttcaaagtgccaaaggtggcttaggtgagctgaaacgcagactgctgtttgttatcggcgcgctgattgtgttccgtattggctcttttattccgatccctggtattgatgccgctgtacttgccaaactgcttgagcaacagcgaggcaccatcattgaaatgtttaacatgttctctggtggtgctctcagccgtgcttctatctttgccctggggatcatgccgtatatttcggcgtcgatcattatccagctgttgacggtggttcatccaacgctcgcagaaattaagaaagaaggggagtctggtcgtcgtaagatcagccagtacacccgttacggtactctggtgctggcgatattccagtcgatcggtattgctaccggtttgccgaatatgcctggtatgcagggcctggtgatgaatccaggctttgcattctatttcaccgctgttgtaagtctggttacagggaccatgttcctgatgtggctcggcgaacagattactgagcgcggtatcggtaacggtatctcaatcatcatcttcgctggtatcgttgcgggactcccgccagccattgcccatactatcgagcaagcgcgtcaaggcgacctgcacttcctcgtgttgctgttggttgcagtattagtatttgcagtgacgttctttgtagtattcgttgaacgtggtcaacgccgtattgtggtaaactacgccaaacgtcagcaaggtcgtcgtgtctatgctgcacagagcacacatttaccgctgaaagtgaatatggcgggggtaatcccggcaatcttcgcttccagtattattctgttcccggcgaccatagcgtcatggttcgggggcggtactggttggaactggctgacaacaatttcgctgtatttgcagcctgggcaaccgctttatgtgttactctatgcgtctgcaatcatcttcttctgtttcttctacacggcgttggttttcaacccgcgtgaaacagcagataacctgaagaagtccggtgcatttgtaccaggaattcgtccgggagagcaaacggcgaagtatatcgataaagtaatgacccacctgaccctggttggtgcgctgtatattacctttatctgcctgatcccggagttcatgcgtgatgcaatgaaagtgccgttctacttcggtgggacctcactgcttatcgttgttgtcgtgattatggactttatggctcaagtgcaaactctgatgatgtccagtcagtatgagtctgcattgaagaaggcgaacctgaaaggctacggccgttaa

SEQ ID NO: 39549 - DNA, 357 bp, Salmonella typhi
gtggcccgtatagcaggcattaacattcctgatcagaaacacgccgtgatcgcgttaacttcgatctacggtgtcggcaagacccgttctaaagccatcctggctgcagcgggtatcgctgaaaatgttaagatcagtgagctgtctgaagaacaaatcgacacgctgcgtgacgaagttgccaaatttgtcgttgaaggtgatctgcgccgtgaaatcagcatgagcatcaagcgcctgatggatcttggttgctatcgcggtttgcgtcatcgtcgtggtctcccggttcgcggtcagcgtaccaagaccaacgctcgtacccgtaagggtccgtgcaaaccgatcaagaaataa

SEQ ID NO: 39550 - DNA, 390 bp, Salmonella typhi
atggcaaaggcaccagtttgcgcacgtaaacgtgtaagaaaacaagtctctgacggcgtggctcatatccatgcttctttcaacaacaccatcgtgactattaccgatcgtcagggtaatgcgctgggttgggcaacagccggtggttccggtttccgtggttctcgcaaatccactccgtttgcagctcaggttgcagcagagcgttgcgctgacgccgtgaaagaatacggtatcaagaatctggaagttatggttaaaggtccgggtccaggccgcgaatctactattcgtgctctgaacgccgctggtttccgcatcactaatattactgatgtgactccgatccctcataacggttgtcgtccgccgaaaaaacgtcgcgtataa

SEQ ID NO: 39551 - DNA, 621 bp, Salmonella typhi
atggcaagatatttgggtcctaagctcaagctgagccgtcgtgagggcaccgacttattccttaagtctggcgttcgcgcgatcgataccaagtgtaaaattggacaagctcctggccagcacggtgcgcgtaagccgcgtctgtctgactatggtgtgcagttgcgtgaaaagcaaaaagttcgccgcatttacggtgtgctggagcgtcagttccgtaactactacaaagaagcagcacgtctgaaaggcaacaccggtgaaaacctgttggctctgctggaaggtcgtctggacaacgttgtataccgtatgggcttcggcgccactcgtgcagaagcacgtcagctggttagccataaagcaattatggtaaacggtcgtgttgttaacatcgcttcttatcaggttagtccgaatgacgttgttagcattcgtgagaaagcgaagaagcagtctcgcgtgaaagccgctctggagctggctgagcagcgtgaaaagccaacctggctggaagttgatgctggcaagatggaaggtacgtacaagcgtaagcctgagcgttctgatctgtctgcggacattaacgaacacctgatcgtcgagctttactccaagtaa

SEQ ID NO: 39552 - DNA, 990 bp, Salmonella typhi
atgcagggttctgtgacagagtttctaaaaccgcgcctggtagatatcgagcaagtgagttcgacgcacgccaaggtgacccttgagcctttagagcgtggcttcggccatactctgggtaacgcactgcgccgtattctgctctcatcgatgccgggttgcgcggtgaccgaggttgagattgatggtgtactacatgagtacagcaccaaagaaggcgttcaggaagacatcctggaaatcctgctcaacctgaaagggctggcggtgagagttcagggtaaagatgaagttattcttaccttgaataaatctggcattggccctgtgactgcagccgatatcacccatgatggggatgtcgaaatcgtcaagccgcagcacgtgatctgccacctgaccgatgaaaacgcgtctattagtatgcgtatcaaagttcagcgcggtcgtggttatgtgccggcttctacccgaattcattcggaagaagatgagcgcccaatcggccgtctgctggtcgacgcctgctacagccctgtagagcgtattgcctacaatgttgaagcagcgcgtgtagaacagcgtaccgacctggacaagctggtcatcgaaatggaaaccaacggcacaatcgatcctgaagaggcgattcgtcgtgcggcaaccatcctggctgaacaactggaagctttcgttgatttacgtgatgtacgtcaaccggaagtgaaagaagagaaaccagaattcgatccgatcctgctgcgccctgttgacgatctggaattgactgtccgctctgctaactgcctcaaggcagaagctatccactatatcggtgatctggtacagcgtaccgaggttgagcttcttaagacgcctaacctgggtaaaaaatctcttaccgagattaaagacgtgctggcttcccgtggactgtctctgggtatgcgcctggaaaactggccaccggcaagcatcgctgacgagtaa

SEQ ID NO: 39553 - DNA, 384 bp, Salmonella typhi
atgcgccatcgtaagagtggtcgtcaactgaaccgcaacagcagccatcgccaggctatgttccgcaacatggcaggttcactggttcgtcatgaaatcatcaagacgaccctgcctaaagcgaaagagctgcgtcgcgtagttgagccgctgattactcttgccaagactgatagcgttgctaatcgtcgtctggcattcgcccgtactcgtgataacgagatcgtggcaaaactgtttaacgagctgggcccgcgtttcgcgagccgcgccggtggttacactcgcattctgaagtgtggcttccgtgcaggcgacaacgcgccgatggcatacatcgagctggttgatcgttcagagaaaacagaagctgctgcagagtaa

SEQ ID NO: 39554 - DNA, 1155 bp, Salmonella typhi
atgtatgctttaacccagggccggatctttaccggtcacgaaattcttgatgaccatgcgcttgttgtcgctaatggcctgattgaccgcgtttgtccgatggccgagctgccgccgggaatagaacaacgctcattgaatggggccattctctcccccggttttattgatgtgcagctaaacggctgcggcggagtgcagtttaacgataccgcagaagccgtcagcgttgaaacgctggaaattatgcagaaagccaatgaaaaatcgggctgtactaactttctgccaacgcttatcactaccagcgacgaattgatgaaacagggtattcgcgtcatgcgcgagtatctggaaaaacatccgcaccaggcgctgggtctccacctggaaggcccctggcttaatctggtaaaaaaaggcacccataatcctgatttcgtgcgtaaaccagacgctgcgctggtcgatttcttatgcgataatgccgacgtcatcaccaaagtcactctcgcgccggaaatggtgcctgctgacgtaatcgctaaactggcgaatgcgggcattgtggtttccgcaggtcactccaacgcgacgttaaaagaggcaaaagcgggcttccgcgccgggattacctttgcgactcacctgtttaacgcgatgccgtacattacagggcgtgagccgggccttgctggcgctgttctggacgaagcggatatttattgcggcgttatcgccgatggtctgcatgtcgactacgccaacattcgcaatgccaaacgcctgaaaggcgacaaactttgtctggtgacagacgccaccgcaccggcgggggccaatattgagcagttcattttcgcaggtaaaacaatatactaccgcaatggactgtgtgtggatgaaaacggtacgttgagcggttcgtccttaaccatgattgaaggcgtacgcaacctggtcgcgcattgcggcatcgcgctggatgaagtgctgcgcatggcaacgctctatccggcacgcgctatcggcgttgataagcatctcggtagcattgcgccgagtaaagtcgccaacctgaccgcgttcacccacgattttaaaattatcaagaccatcgttaatggtgacgaggtcgttgacttgagtaagtga

SEQ ID NO: 39555 - DNA, 801 bp, Salmonella typhi
atgagactgatccccctgagtaccgcagaacaggttggcaaatgggccgctcgccatatcgttaaccgtattaatgcgttcaaaccgaccaccgatcgtccgtttgttcttggactgcctaccggcggcacgccgctaacggcgtacaaagcgctggttgagatgcacaaagcgggcgaggtcagctttaagcatgtggtcacctttaatatggacgaatatgttggcctgccgaaagagcacccggaaagctaccacagctttatgcatcgtaactttttcgatcacgttgatattccagcagaaaacatcaatcttctcaacggtaacgcaccggatatcgatgcagaatgccgtcaatatgaagaaaaaattcgttcttacggtaaaatccatctgtttatgggcggcgtcggcaacgacggtcacatcgcctttaacgaaccggcgtcttccctggcttcccgtacccgtatcaaaacgttaacccatgatactcgcgtagcgaactcccgcttctttgacggcgacgtaaaccaggtgccgaaatacgcgctgacggtaggcgtgggtacgctgctggatgcggaagaagtgatgattctggtgctgggccatcagaaagcccaggcgctgcaggcggcggttgaaggcaacgtcaaccacatgtggaccattagctgcctgcaactccatccgaaagcggttgtggtatgcgatgagccgtccacaatggaacttaaagttaaaacattgaaatatttcaatgaattagaagcagaaaatattaaaggtctgtaa

SEQ ID NO: 39556 - DNA, 1953 bp, Salmonella typhi
atgaatattttaggttttttccagcggctgggtagggcgttgcagctccctatcgtcgtgttgccggtggcagcgttgttgctgcgattcggccaaccagatttgctgaatatgccgtttatcgcgcaagcgggcgggtctattttcgataacctggcgctggttttcgctatcggcgtggcctccagttggtctaaagatagcgcaggcgcggcagcactggcgggagccgtgggttacttcgtcatgaccaaagcgatggtgacgattaacccggaaatcaacatgggcgtgctggcggggattattaccggtctggtcggcggcgcggtttataatcgctggtctggtatcaaactgcctgattttctcagtttcttcggtggaaaacgttttgtgccgatcgcaacgggctttttctgtctggtgctggccgctattttcggttacgtctggccgccggtacagcatggcatccatgcgggcggtgaatggatcgtttccgcaggcgcgttgggttccggtatctttggcttcatcaaccgtctgctgatccccaccggtctgcatcaggtactgaacaccatcgcctggttccagattggcgaattcaccaatgccgcaggcactgtattccacggcgacatcaaccgcttctatgctggcgacggcacggcggggatgtttatgtccggcttcttcccgatcatgatgtttggtctgccgggcgccgctctggcgatgtatttcgccgcgccgaaagaacgtcgtccgatggtgggcggtatgctgctgtctgtcgcgatcaccgcgtttctgaccggcgtaaccgagccgctggaattcctgtttatgttcctggcgccgctgctgtacctcctgcacgccattttgactggtatcagcctgttcgtcgcgacgttgctgggtatccatgcgggcttctctttctcggcaggcgcgatcgactatgttctgatgtataacctgcctgcggccagcaataacgtctggatgttgctggtgatgggcgttgtattctttatcatctacttcctgctgttcagcgcggttattcgtatgtttaacctgaaaacgccgggccgcgaagataaagttgatgagatggtaacggaagaagccaacagcaacaccgaagaagggttaacgcaactggcgaccagctatattgctgcggttggcggtacggacaacctgaaagcggtcgatgcgtgcattacccgtctgcgcctgaccgtgaacgactctgctcgcgtcaacgatgcggcctgcaaacgcctcggcgcttccggcgtggtgaaactgaacaaacagaccattcaggttattgtcggcgcgaaagcggaatcgattggcgatgaaatgaagaaagtggtggcgcgggggccggtcgcggcagcgtctgctgatgcggctcacgttgcgacacctgctccggcggccaaaccccaggcggtgccgaatgcggtgactatcgctgaactggtctctccgattaccggtgaggtagtggcgctggatcaggtaccggatgaagctttcgccagcaaagcggtcggcgacggcgtggcggtgaaacccaccgataaaaccgtggtttctccggcggcgggtactatcgtgaaaatcttcaacactaaccacgcgttctgtctggaaaccgaaaaaggcgcggagatcgttgtccatatgggtatcgataccgtcgcgctgaacggtcagggcttcaagcgtctggtagaagagggtgcggaagtcacggcgggtcagccggttctggaactggatctggacttcctgaatgccaatgcgcgttccaagataagcccggttgtttgcagcaacagcgatgacttcagcgctctggtcatcaaagcggatggtcacgtggtagcgggtcaaacgccgctgtacgagatcaagagcaaataa

SEQ ID NO: 39557 - DNA, 1668 bp, Salmonella typhi
atgagtgaggctgaagcccgcccgactaactttattcgtcagattattgatgaagatctggcgagtggtaaacataccactgtccatacccgttttccgccggagccgaatggctatctgcacatcggccacgcgaaatctatctgcctgaactttggcatcgcgcaagattatcagggccagtgcaacctgcgtttcgatgacaccaacccggtaaaagaagatatcgagtacgttgattcgatcaaaaacgacgtcgagtggttaggctttcactggtctggcgatattcgctactcctccgattactttgaccaactgcacgcctatgcggtcgagctcatcaataaaggcctggcctacgttgatgagctgacgccggagcagatccgcgaataccgtggtacgctgaccgcgccgggtaaaaacagcccgttccgcgatcgcagcgtggaagaaaacctcgcgctatttgaaaaaatgcgtaccggcggttttgaagagggtaaagcctgtctgcgcgctaaaatcgacatggcgtcgccgtttatcgtgatgcgcgatccggtgctgtatcgcattaaattcgccgagcatcatcagaccggcacgaagtggtgcatctatccgatgtacgactttactcactgcatcagcgatgcgctggaaggcattactcattctctgtgtacgctggagttccaggacaaccgtcgtctgtacgactgggtgctggacaacatcaccattccggttcacccgcgccagtacgaattctcgcgcctgaatctggaatacaccgtgatgtccaagcgtaagctgaacctgctggtgaccgacaaacacgtcgaaggttgggatgatccgcgtatgccgactatttccggtctgcgccgtcgcggctataccgcggcttctattcgtgagttctgcaaacgcatcggcgtcaccaagcaggacaacactattgagatggcgtcgctggaatcctgcattcgcgaagatctgaacgaaaacgcgccgcgcgcgatggcggtaatcgatccggtaaaactggttatcgaaaactacccgcagggcgagagcgaaatggttaccatgcctaaccatccgaataaaccggagatgggcagccgtgaagtgccgtttagcggtgagatctggatcgatcgcgcggatttccgcgaagaagcgaacaaacagtacaaacgtctggtgatgggcaaagaagtgcgtctgcgtaatgcctacgtcattaaagcggagcgcgtagagaaggatgccgaagggaatatcaccaccatcttctgtacctatgatgctgatacgctgagtaaagatccggctgacgggcgtaaagtgaaaggcgtaatccactgggttagcgtagcacatgcgctgccgattgaaattcgtctctacgaccgtctgttcagcgtgccgaacccgggcgccgcggaggacttcctgtctgttatcaaccccgaatcattagtgattaagcaggggtatggcgagccgtcgctgaaagcggcggtagcagggaaagctttccagtttgaacgtgaaggttacttctgccttgacagccgctatgcaacggccgataagctggtctttaaccgcaccgtgggcctgcgtgatacctgggcgaaagcgggcgaataa

SEQ ID NO: 39558 - DNA, 369 bp, Salmonella typhi
atgtggttacttgaccagtgggcagagcgtcatattatcgaggcacagcgtaaaggcgagtttgataatctgcctggccgcggcgaaccgcttattctggatgatgattctcatgtgccagcggaacttcgtgcgggttatcgcttactgaagaatgcgggctgtcttccccctgaactggagcagcgcagagacgctattcagttacttgatatcctcaacagtatccgggaagatgaccctcaataccatcaggttagtcgccagctctcgctgcttgaactaaaacttcggcaggctgggttgagtaccgattttttacacggtgagtatgcagaaaaactgctgcataaaatcaacgataattaa

SEQ ID NO: 39559 - DNA, 1377 bp, Salmonella typhi
atgaaaattatcatactgggcgcagggcaagttggtggaacactggcggaaaacctggtcggcgaaaacaacgacatcacggtggttgataccaacggcgaacgattacgcagtttgcaagataagttcgatctacgcgtagttcaggggcatggttcgcatccccgcgtgttgcgcgaagcgggcgctgacgatgcggatatgctggtcgctgtcaccagttcagatgaaactaatatggttgcctgtcaggtagcctattcactcttcaacaccccaaaccgtatcgcccgcattcgctccccggactatgttcgcgatgcggataaactctttcattctgaagcggttccgattgatcatctgatcgcgccggagcagttggttatcgataatatttatcgtctgatcgagtatccgggagcattacaggttgtaaactttgccgaagggaaagtcagtctggcagtagtaaaagcctactatggcggtccactaataggtaacgcgctctcgacaatgcgagagcatatgccgcatatcgatacccgcgttgccgcaattttccgtcatgacagaccaatccgtcctcagggctcgactatcgtggaagcaggggatgaagtcttctttattgcggcttcacagcatatccgtgcagtaatgagcgaattacagcgtctggaaaaaccctacaagcgcatcatgctggtgggcggcggcaatatcggcgccgggctggcaaggcgtctggaaaaagactatagcgttaaattgatcgaacgcgatcaacaacgcgccgcagaactggctgagaagctgcaaaacacgatcgtcttttttggcgacgcttccgatcaggaattgctggcggaggagcatattgatcaggtcgatctctttatcgcagtcactaacgatgacgaagccaatatcatgtccgcgatgttggctaagcggatgggcgccaaaaaagtgatggtgctgattcagcgtcgagcttatgtcgatcttgtgcagggtagcgttatagatattgcgatttctccgcagcaggccaccatctctgcattactgagccatgtgcgtaaagcagatatcgtcggcgtttcctcactacgtcgcggggttgccgaagccatcgaagccgtcgcgcacggcgatgaaagcacttcccgcgtggttggccgcgtcattgacgaaataaaactgccgccaggcaccattattggcgcggtcgttcgcggtaatgatgtcatgattgctaatgacaatttgcgcattgaacaaggcgatcacgtcattatgtttttgaccgataaaaagtttattaccgacgtcgaacgtctgttccagccaagtcctttcttcctctaa

SEQ ID NO: 39560 - DNA, 1290 bp, Salmonella typhi
atgaaaaaacaaaacaatttacgtagtctggcagcacaggccgttgaactggtcgtcgaacagggacaatcattaagtaatgtgctcccgccgctgcaacaaaaagtcgccgataaagacaaagcgctacttcaggagctgtgctttggcgtcctgcgcaccctttcacagctggaatggctgatcaataagctgatgtctcgtccaatgaccggcaagcagcgtacagtgcattacttaattatggtcggcttttatcagttgctgtacacccgcgtccctccccatgcggcgctggctgaaaccgttgaaggcgcggtctccatcaaacgtccgcagttgaaagggttaattaacggcgtcctgcgccagttccagcgccagcaggaaacgttgcttaatgagtttgcgaccagcgatgcgcgctttttacatcccggttggctggtaaagcgtttgcaaaatgcttaccccacacagtggcaacgcattattgaagcgaataaccagcgtccacctatgtggctacgtgtaaatcgtacacaccacacccgcgacggttggcttggcttacttgaagacgcaggcatgaagggatatccccatcccgattatcccgacgctgtgcgtctggaaacgccagctccggtacatgctttacccggttttgctgagggttgggtaactgtccaggatgcctctgcgcagggatgtgcggtttttctcgctcctcagaacggtgagcacattttagacttgtgcgccgcgcccggcggtaaaaccacgcatattctcgaagtggcccccgaagcagacgtgttggcggttgatattgatgaacaacggctctcccgcgtttacgacaacctaaagcgccttgggatgaaagcgacagttaaacaaggggatggacgttatcccgcccaatggtgcggcgagcagcagtttgaccgtattctgctggatgcgccctgctccgcaaccggcgtcattcgccgtcatccagatatcaaatggctgcgtcgcgatcgcgatatcgcggaactggcgcaattacaggcggaaattcttgatgccgtctggccgcgcctgaagcccggcgggacgctggtttatgccacctgttccgtactgccggaagaaaaccgcgatcagatcaaagcctttttgcaacgcactcccgatgccgcgctcagcgaaacgggaacacctgatcagccaggacagcaaaatctgccgggcggcgaagaaggtgatgggttcttttacgctaagctaatcaagaagtga

SEQ ID NO: 39561 - DNA, 294 bp, Salmonella typhi
atggccaaagaacaaacggaccgtacgacattagatctgttcgcgcacgagcgtcgcccgggacgacctaaaacgaatccgctttcgcgcgatgaacagttacgcatcaacaagcgcaaccagttaaaacgcgacaaagttcgtggcctcaagcgtgtcgaattaaaactcaacgcacaagcggttgacgcgctgaatgagctggccgaagcgcgcaacattagccgcagcgagctcattgaagaaatattaatgaagcagcttatggcgctgcgcggccagggtttagtctga

SEQ ID NO: 39562 - DNA, 771 bp, Salmonella typhi
atgaaattaaacatccgagcgcaatctgcacaaaacctgcacaataattcccccatcgttctcgttcatggcctgtttggcagcctggacaacctcggcgtactggcgcgcgatctggtgaccgatcacgacattattcaggtcgatatgcgcaatcatggtttatcgccgcgcgatccggtcatggattatccggcaatggcccaggatcttctggatacgcttgacgcgcagcagattgaaaaagcgacgtttattggtcattccatgggtggaaaagcggtaatggcgctgacggcgctggcgcccgatcgcatcgatcgtctggtcgcgattgatatcgcccccgtggattatcacgttcgccgccacgatcgcattttcgcggccattaacgccgtcagcgaatccgacgcgacatcccgccaacaggcggcagggattatgcgccagcacctcaacaaagaaggcgtgatccagtttctgttaaaatcctgggctgaaggcgaatggcgttttaatgttccggtattatgggagcagtatccgcatatcgtcggctgggaaaccattccgccctgggaacatccggcgctgtttattccaggcggtaactcgccgtacgtgaccgaagcgtaccgcgacgcgctgctggcgcaattccctttggcgcgcgcgcatgtgatcgccggcgcgggccactgggtacatgccgaaaaaccagaggcggttctgcgcgccatccgccgttatctgcacgataaacgctaa

SEQ ID NO: 39563 - DNA, 486 bp, Salmonella typhi
atgagtaatccagaacgggaagtcactgatatagcagaaatactggctattctcagtaaacacgaagtgtgtcggatagggtttaacgacaatctctgtccgtatgttgtccccgtaaattttggctacgagtatcagaacggacgctggatattttattttcacggcgcacgcaccgggaaaaagatgcgtctgttacgtaagaacccggcagtatgcattgaaatggacggcgaccatgcattactacgtgccgatgacccctgtgattatagctacgcctacaccagcgttttcgccaccggactggcatcgatattgcaaacgcgcgaggagatgcgccacggcctggacgtcattatgcgccagaccgatccgggaaaaaccttcagttatcgggaagatatgatgaaagcggtttgcgtggtgcgtatcgaatgcgacgccctcacctgccgccgacatctggcgactcagagcgaataa

SEQ ID NO: 39564 - DNA, 819 bp, Salmonella typhi
atggaagcctatgctgtttttggaaatccgattgcgcacagcaaatcgccatttattcatcagcaatttgctcagcagctagatattgttcacccctatggtcgcgtgctggcccccattaataatttcattaatacgcttgatgcctttttcgcggcagggggaaaaggcgcaaacatcacagtaccttttaaagaggaggcgtttgcgcgttcggatgagttaacggaacgagcatcgctggcgggagccgtcaatacattaaaacggctggaagatggtcgtttgcttggcgacaatactgacggtatcggtttattaagcgatctcgaacgtttaaattttatccgcccaggattgcgtattttgctgattggcgcgggcggcgcatcccggggcgtgctgttacccctgctttctttggattgtgcggtcactatcactaaccgtacagcttcacgtgccgaagcgttggcgaaaatctttgctcataccggcagcgttcatgctatggatatggacaagctggatggttgtgagtttgacctgattattaatgcgacctccagcggcatacggggcgaaatcccggcgattccggcgtcacttattcatccttccctctgttgctatgacatgttctatcaaaaagggaatacgccatttctctcctggtgtgtacaacagggcgcgaaacgctacgcagatgggctgggaatgctggtggggcaggctgcacatgccgttttgctttggcacggtgtattaccgcaggtcgagccagtgattaagctgctacagcaggaattattagcgtga

SEQ ID NO: 39565 - DNA, 2709 bp, Salmonella typhi
atgaacgacgaacccttgcgtcctgatccggatcgcttgttggaacaaacgcccccgccccaccgggggaagttaaaaattttcttcggcgcctgcgcaggcgtcggaaaaacctgggcgatgctggcgcaagcgcagcggctgcgagcgcaggggctggatgtggtgatcggcgtggtagagacgcacggccgtaaagagaccgccgcgctacttgacgggctgaccattctgccgccaaaacgtcactcgcaccgggggcggcaaattcgcgaatttgacctggatgccgccctcgcccggcgtccggcgctgattttaatggatgagctggcgcacagtaacgcgcctggctcacgccatcctaagcgctggcaggatattgaagagctgctggaagcgggaatcgacgttttcaccaccgtgaacgtacaacatctggaaagtctgaatgatgtggtgagcggcgtcacggggattcaggtgcgcgagaccgtccccgatcccttttttgatgccgctgatgaagtcgtactggtcgatctgccgcccgacgatctgcgccaacggctcaacgaaggtaaagtgtatatcgccggtcaggcggaacgcgctattgaacattttttccgcaagggcaatctgatcgccctccgcgagctggcgctacgccggacagccgatcgcgtggacgatcagatgcgcgcctggcgcgcgcatccgggcgaagaaaaagtatggcatacccgcgatgcgattttactgtgtatcgggcataacactggcagcgaaaaactggtgcgtaccgcggcgcgtctggcctcccggctcggcagcgtctggcacgccgtctatgtcgaaacgccaacgttacaccgcttaccggaaaaacaacggcgggctattttaagcgcgctgcgcctggcgcaggagcttggcgcggaaaccgccaccctgtccgatcccgccgaagagaaagcggtcgtgcgctatgcccgcgagcataatctggggaaaatcgtcatgggccgcccggcgtcgcgacgctggtggcgacgtgacgctttcgccgaccgtcttgccaggcgcgcgccggatctcgatcaggtaatcgtcgcgctggaagagccgccagcgcgcgcgttggcgcaaacgcctgataaccgaccttttaaagagaaatggcgtggacagattcagggctgtctggtcgccgtggcgctttgcgccataaccacgtttatcgctatgcagtggcttgtcaccttcgacgccgccaatctggtgatgctctatttgctgggcgtagtggtgattgcgctgctttacggacgctggccgtcggtggtggcgacggtgattaacgtggcgagtttcgatctcttttttatcgcaccacgcggtacgctcgccgtttcggacgtgcagtatttgctgacctttgccgtgatgctgacggttggtctggtgattggcaatcttactgccggggtgcgctatcaggcgcgcgtcgcccgttatcgggaacagcgtacccgccatttatatgaaatgtctaaagcgctggccgtcgggcgtagcgaacatgatatcgccgcgaccagcgagcggtttatcgcctcgacgtgtcaggcgcgcagccaaattttattacctgatactaacggtaagttgctgcctctcacccaccagcaaggcatgacgccgtgggacgacgcaattgcgcgctggagttttgataaaggccagcctgccggcgcaggcaccgatacccttcctggcgtgccttatcaaatcctgccgctgaaaagcgccgataaaacgtacggtctggctatcgtcgaaccgggtaatttgcgtcagttaatggtgccggagcagcaacgcctgctggaaacattcactctgcttgtcgccaacgcgctggaacgactgacgctgaccgccagcgaagaacaggcgcgtctcgccagcgaagaacaggcgcgtctcgccagcgagcgcgaaagtattcgcaacgctctgctggcggctctgtcgcatgatttacgcacgccgctgacggtattgttcggccaggcggaaattttgacgctggatttagccagcgcaggatcgccccacgcgcgtcaggccagtgaaatccgccagcatattctcaacaccacccggctggtgaataatttgctggatatggcgcgtattcagtccggcgggtttaatcttaaaaaagagtggctgacgctggaagaggtcgtcggtagcgcgttacagatgttagagccgggtttattgcatccgattacattgtcgctgccgcaacagttaacgcttatccatgtcgatggccccttatttgagcgtgtcctgatcaacttgctggaaaacgccgttaagtacgccgggccgcaggccagtatcggcattgatgctgcggttaaggacaatcgtttacaactggatgtctgggataatgggccgggtattcctgcggggcaagaacagaagattttcgataagttcgcccgcggcaacaaagagtccgccgtccccggcgtggggctggggctggcgatttgccatgctatcgtagaggtacacggcggcacgcttaccgcctataatcgaccgcagggcggcgcctgtttccgtgtgacgctgccgcaaggaaagccacctgaacttgacgattttcatgaggatatgtga

SEQ ID NO: 39566 - DNA, 588 bp, Salmonella typhi
atgatgatcggtttacgtcctgctttttcgacaatgttatttctgctgttattgaccggcggcgtgtatccgcttctgaccacggcgctggggcagtggtggtttccctggcaggctaatggctcgctgattcataaagacaatctgatacgcggctcagcgcttatcggacaatcgtttaccgccgcgggctattttcatggccggccctccgccaccgccgatacgccttataatccactggcgtcgggcggaagcaacctggccgccagcaatcccgaactggatgcgcaaattcaggcccgcgtcgccgcgctacgcgccgctaacccccaggcgagttccgcggttccggttgagctgacgacggcgtcggcaagcgggctggataataatctgacgcccggcgccgcggcatggcaaatcccccgcgtggcggcggctcgccagcttcccgttgaacaggtcgcgcaactggttgcagaatatacgcacaggccgctggcgagctttcttgggcaaccagtggtgaatattgttgagcttaatctggcgctggatgcgctacagggacacagagcgaaatga

SEQ ID NO: 39567 - DNA, 1710 bp, Salmonella typhi
atgagtcgcaagcaactggcgctgtttgaacctgttttactcgtacaggcgctaacggatgccgtaaaaaaattaagcccacgcgcccagtggcgtaacccggtgatgtttgtggtctgggccggcagcgtgctagccactctgttaacgctcgctatggtaacaggacaaatagcgggaagcgccttgtttacaggggtgatcagcctgtggttatggttcaccgtactgttcgccaattttgccgaagcactggcggaaggccgcagcaaagcccaggcaaacagtctgaaaggggtgaaaaagaccgcgttcgctcgccgtctgcgcgccccgcgccatgatgcgcaggccgataacgtgcccgccgctgaactgcggaaaggcgacattgtcctggtcaaagcgggcgatattattccctgcgacggcgaggtcatcgaaggcggcgcctcggtggatgaaagtgcgattaccggcgaatccgcgcccgtgatccgcgagtccggcggcgatttcgcctctgtcaccggcggccgcgccgtagaagccgcgggcgatgtcgacgtgttactgctggataaaaccggcactatcacgctcggcaaccgccaggcgtccgattttatacccgcccgaggggtggacgaacgcacgctggctgacgccgcgcagctcgcttcgctggccgacgaaacgccggaaggccgcagcattgtgatcctcgccaaacagcgctttaacctgcgtgaacgcgatgtgcagtcgcttcatgccacctttgttccgtttaccgcgcaaagccgcatgagcgggattaatatcgataaccggatgatccgtaaaggctcggtggacgcgattcggcgtcatgtcgagagcaatggcggccattttcccgccgatgtcgagcaaaacgtcgagaacgtggcgcgtctgggcgcgacgccgctggtggtcgtggaaggcgcgcgcgtactgggtgttatcgccctcaaggatatcgttaaaggcggcattaaagaacgtttcgcccagctacgaaagatgggcattaaaacggtgatgatcactggcgataaccgcctgacggcggcagcgattgccgccgaagccggtgtggacgattttcttgccgaagccacgccggaagccaagctggcgttgatccgtcaatatcaggcggaaggacggctggtcgccatgaccggcgacggcactaacgatgccccggcgctggcgcaggctgacgtcgcggtggcgatgaactccggcacccaggcggcgaaagaagccggtaatatggtggatctggactctaacccgaccaagttgattgaagtggtgcatatcggtaagcagatgctgatgacgcgcggctcgctcaccaccttcagtatcgcgaatgatgtagcgaaatatttcgccattattcccgccgcgtttgccgctacctatccgcagctaaacgcgctcaacgtgatggggctgcattcgccgaactccgccattctgagcgcggtgatctttaacgccctgattatcatatttctgatcccgctggcattaaaaggcgtgagttataagccgctttccgcatcggccatgctgcgccgtaatttatggatctatggtctgggtggtctggtggtgccgtttattggcatcaaagtgattgatgtgctgctgaccctgctggatctggcgtga

SEQ ID NO: 39568 - DNA, 1305 bp, Salmonella typhi
atgaaaacccgtactcaacaaatcgaagaattacagaaagagtggacacaaccgcgctgggaaggcatcacccgcccgtacagcgcggaggaggtggtgaaattacgcggctcggttaacccggaatgcacgctggcgcagctcggcgccgcgaaaatgtggcggctgttgcacggtgaagcgaaaaaaggctatatcaacagcctgggcgcgctgactggcggtcaggcgctgcagcaggcgaaagccggtattgaggcgatttatctttcaggctggcaggtggtggcagatgccaacctggcatccagcatgtatccggatcaatcgttgtacccggcaaactctgttccggcggtagtggatcggatcaacaacactttccgtcgtgcagatcagatccagtgggcatccggtattgaacccaacgatccgcgctatgtggattacttcctgccgatcgttgctgatgcggaagccggttttggcggcgttctgaatgccttcgaactgatgaaatcgatgattgaagccggtgcagcggccgttcacttcgaagatcagctggcgtcggtgaagaaatgcggccatatgggcggcaaggtgctggtccccacgcaggaggcgattcagaaactggttgctgcgcgtctggccgctgatgtgatgggcgtcccgacgctggtgattgcgcgtaccgatgcggatgcggcagatctgatcacctccgactgcgatccctatgacagcggttttattaccggcgaacgcaccagcgaaggtttttaccgcacccatgcgggcattgagcaggcgatcagccgcggtctggcgtatgccccgtatgccgatctggtatggtgcgaaacttctacgccggatctcgaactggcgcgtcgttttgccgatgctatccacgcgaagtatccgggcaaactgctggcctataactgttcgccatccttcaactggcagaagaatctggacgacaagaccattgccagcttccagcagcagttgtcggacatgggttacaaataccagtttattaccctggcgggcatccacagcatgtggttcaacatgttcgacctggcgcatgcatacgctcagggtgagggcatgaaacactatgttgagaaggttcaacaacccgagttcgccgcagcgaaagacggttacacctttgtttcccaccagcaggaagtgggtactggttacttcgacaaagtcaccaccattattcagggcggcgcgtcatccgttaccgcgttaacgggttccaccgaagaatcgcagttttga

SEQ ID NO: 39569 - DNA, 825 bp, Salmonella typhi
atggttgcccctgttcccgcaaaacgcgggagaaaacctgccgctaccactgcacccgtaaccgggcaggttcagtctttaactcgcggtctgaagctgctggagtggattgccgagtccaacggcagcgtcgcgctgaccgaactggcgcaacaggcgggtttgcctaattccacgactcaccgtctactcaccaccatgcagcaacagggttttgtccgccaggttggtgagctgggccactgggccgtaggcgcacacgcgtttatcgtcggtagcagcttcttacagagccgtaatctgctggcgattgtccatccgattttgcgcaagctgatggaggactccggcgaaacggtaaaccttgccgtactcgaccagagcgaccatcaggctattattatcgaccaggtgcagtgcacacaattgatgcgcatgtccgcccctattggcggcaagctgcccatgcacgcctctggcgcgggcaaggcgtttttatcacagctcagtgaggaacaggttaccagtctgctgcaccgcaaggggttgcacgcttatacccatgcgacgctggtgtcgccgctgcatctgaaagatgacctcgcccaaacacgcaagcgcggctattcctttgacgacgaagaacatgcgctcggtctgcgctgcgtggcctcgtgtatttatgacgaacaccgcgaaccgtttgcggccctctctatttccggcccctgctcacgcattaccgacgatcgcgtcaccgaacttggcgccatggtgattaaagcggcgaaagaggtgacgctggcctatggtgggtttagataa

SEQ ID NO: 39570 - DNA, 3684 bp, Salmonella typhi
gtgagcagcaaagttgaacaactgcgtgcgcagttaaatgaacgtattctggtgctggacggcggtatgggcaccatgatccagagctatcgtctacatgaagaagatttccgcggggagcgctttgccgactggccctgcgacctgaaaggcaacaatgacctgctggtcctcagcaagccggaggtgatcgccgctatccacaacgcctactttgaggctggcgcggatatcatcgaaaccaacacctttaactcgacaaccattgcgatggcggattaccggatggaatccctgtcggcggaaattaactatgcggcggccaaactggcgcgcgcctgcgccgatgaatggacggcgcgaacaccagaaaaaccacgctttgttgcgggcgtgcttggtccaactaaccgcacggcctccatttcgccggacgtcaacgacccggcgtttcgtaatatcaccttcgatcagctggtggcggcctaccgtgaatccaccaaagcgctggtggaaggcggggcggacctgatcctgattgaaactgtcttcgacaccctcaacgccaaagcggcggtgtttgcggtgaaagaagagtttgaagcgctgggcgttgatctgccgatcatgatttccggcaccatcaccgacgcctctggccgtacgctttccggccagacgaccgaagccttttataactcgctgcgccacgccgaggcgctcacttttggccttaactgcgcgctggggccagatgaactgcgccagtacgtccaggaactgtcgcggattgccgaatgctacgtcaccgcgcacccgaacgccggcctgccgaacgctttcggcgagtacgacctcgacgccgacaccatggcgaaacagattcgcgaatgggcggaagcgggcttcctgaatatcgttggcggctgctgcggcaccacgccggagcatattgcggcgatgagccgcgccgttgccggtttgtcgccgcgccagctgccggatatcccggtggcctgccgcctttccggcctggagccgctgaacattggtgacgatagcctgtttgtcaacgtcggcgaacgtactaacgtcaccggctcggccaaatttaaacgcttgatcaaagaagagaaatacagcgaagcgctggatgtcgcccgtcagcaggtcgaaagcggcgcgcagattattgatatcaatatggatgaggggatgctcgacgccgaagcggcgatggtgcgtttcctcagcctgattgccggtgagccggacattgcccgtgtaccaatcatgattgactcctccaaatgggaggttatcgaaaaagggctgaagtgcattcagggtaaaggcatcgtcaactctatttcgatgaaagagggcgtggaagcctttattcatcatgcgaagttgctacgtcgctacggcgccgcagtggtggtgatggcttttgatgagcaggggcaggccgacacccgcgaacgtaaaatcgagatttgccgccgcgcttacaaaattttgctcgaagaggtaggctttccgccggaagacatcatcttcgacccgaatatcttcgccgtcgccaccggtattgaagagcacaacaactacgcgcaggactttatcggcgcttgtgaagacatcaaacgcgagctgccgcacgcgctgatctccggcggcgtgtctaacgtgtccttctcgtttcgcggcaacgacccggtacgtgaggctatccacgcggtattcctctactacgccatccgcaacggcatggacatgggcatcgtcaacgccgggcaactggcgatttatgacaacctgcctgccgaactgcgcgatgcagttgaagatgtcattcttaaccgtcgcgatgacggcaccgagcgtttgctggatttggcggagaaatatcgcggcagcaaaaccgacgaggctgccagtgcccagcaggcggaatggcgtagctgggacgtgaaaaagcgtctcgaatactcgctggtgaaaggcattaccgagtttatcgaacaggataccgaagaagcccgtcagcaggccgcccgcccgattgaggtgattgaagggccgctgatggacggcatgaacgtggtcggcgacctgttcggcgaagggaaaatgttcctgccgcaggtggtgaaatccgctcgcgtgatgaaacaagcggtggcctacctggagccgtttattgaagccagcaaagaaaaaggctccagcaacggcaagatggtgattgccaccgtgaagggcgatgtgcacgacattggcaagaacattgtcggcgtggtgctgcaatgcaacaactacgaaatcgtcgatcttggcgtgatggtgccagcggagaaaatcctcagaacggcgcgtgaagtgaatgccgatctgattggtctttccgggcttatcaccccgtcgctggacgaaatggtcaacgtggcgaaagagatggagcgtcagggctttactatcccgctactgatcggcggcgcaaccacttcgaaagcgcatacggcggtgaaaatcgagcagaactacagcggtccgacggtctacgtgcagaatgcttcgcgtaccgtgggcgtggtggcggcgctactctccgacacccagcgtgatgactttgtcgcccgtacccgcaaagagtacgaaaccgtgcgtattcagcacgcccgcaaaaaaccgcgcacgccgccggtcacgctggaagcggcgcgcgataatgatctggcatttgattgggaacgctacaccccgccggtagcccaccgtctgggcgtgcaggaggtggaagccagcatcgaaacgctgcgcaactacatcgactggacgccgttctttatgacctggtcgctggccggcaaatacccgcgcattctggaagatgaggtggtgggcgttgaggcgcagcgtctgtttaaagacgccaatgatatgctggataaactgagcgccgagaaactgttgaatccgcgtggcgtggtgggcctgttcccggcgaaccgtgtgggtgacgacatcgaaatctatcgcgacgaaacccgtactcatgttctgacggtcagccaccacctgcgccagcagaccgagaaagttggttttgctaactactgtctggcggattttgtcgcgccgaaactgagcggcaaagcggactacatcggtgctttcgcggtgaccggcggtctgaaggaggatgcgctggcggacgccttcgaagcgcaacacgacgactataacaagatcatggtgaaagcgattgccgaccgtctggcggaagcgtttgccgagtatctgcatgagcgtgtacgtaaggtttactggggatatgcgccgaacgagagcctgagtaacgacgaattaatccgcgaaaactaccaggggattcgcccggcgccgggttatcctgcctgcccggaacataccgaaaaaggcactatctggcagctactggatgtcgaaaaacacaccgggatgaagctcaccgaatctttcgccatgtggcctggcgcgtcggtctccggctggtacttcagccatcctgagagcaaatacttcgcggtagcgcagatccaacgcgatcaggtgacagattatgctttccgtaaaggaatgagcgttgaggacgttgagcggtggctcgcgccgaacctgggttacgatgcggactga

SEQ ID NO: 39571 - DNA, 1632 bp, Salmonella typhi
gtgttaactttgctccatctactttctgccgttgcgctgttggtatggggaacacatatcgttcgtactggcgtaatgcgcgtgtttggcgcgcgtctacgcactgtcctcagccgcagcgtggaaaagaaaccgctcgccttttgtgcgggtatcggtgttaccgcgctggtacaaagcagtaacgccaccactttattggtaacgtcgtttgtcgcccaggatcttgtcgccctgacgccagctctggtgattgtgctgggcgccgatgtgggtactgcgctaatggcgcgtattctcacctttgatttgtcgtggctatcgccgctgctgatttttattggcgtgattttctttttgggacgtaagcagtcccgcgccgggcagctgggtcgcgtcggtatcgggcttggcctgattctactggcgctggagctgattgtgcaggcagtgacgccgatcactcaagctaatggcgtgcaggtcattttcgcgtcgctgacgggcgacattatgctggatgcgctgattggcgcgatgttcgctattatcagttattccagcctggcggcggtgttgctgacggcgaccctgacggcggcggggattatatcgttcccggtggcgttgtgcctggtcatcggcgccaatctgggatcgggcctgttggcgatgctcaacaacagcgccgccaatgctgccgcgcgtcgcgtagcgctcggcagcctattgttcaaattgatcggcagcctggtcatcctgccgtttgtccatccgctggcgaatttgatggatgagctaccgctaccgaaatcagagctggtgatctatttccacgttttctataacctggtgcgctgcctggcgatggtgccatttgccgagctgatggcgcgtttttgtaaacgaattattcgtgatgagcctgaactggatacccatctgaagccgaaacatctggatgtcagcgcgctggatacgccaacgctggcgctggctaatgctgcccgtgaggtgttgcgcattggcgatgcgatggaacagatgatggaagggctaaaaaaggtcatgcacggcgaaccgcgtgaagagaaagcgctgcgcaagctggcggatgacgttaacgtgctctacaccgcgattaagctttatctggcgcgaatgccgaaagacgagctggcggcggaggagtcccgccggtgggcggagattattgagatggccctgaacctcgaacaggcgtcggatattatcgagcgaatgggcagtgagattgccgacaagtcgctggcggcgcgtcgggcattttcagaagaaggattgaaagagctggatgcgctttacgatcaactgctcagtaatctgcaactggcgatgtcggtctttttctccggcgatgtcaccagcgcccgtcggttgcgccgcagtaaacatcgcttccgtatacttaatcgccgatgctcacatgcgcatgtcgaccgcctgcaccagcagaacgtgcaaagtattgaaaccagctcgctccatttagggctgctgggcgatatgaagcgtcttaactcactgttctgttcggtcgcctatagcgtactggaacagccggatcaggacgaggaacggggcgagtattaa

SEQ ID NO: 39572 - DNA, 735 bp, Salmonella typhi
atgaacattgatttaaatgcggatttgggcgaaggttgcgccagcgacagcgaattattaacgctggtctcctccgctaatatcgcctgtggttttcacgccggtgatgcgcaaaccatgctgacctgcgtgcgcgaggcgctgaaaaacggcgtggcgatcggcgcgcatcccagctttccggatcgggataattttgggcggacggcgatggttttgccgccggaaacggtatacgcccagacgctgtaccaaatcggcgcgctgggggcgattgtccaggcgcaaggcggcgtgatgcgccatgtcaaaccgcacggtatgctctataaccaggcggcgaaagatccccatctggcacaggcgattgcgaaagcggtacacgactatgatccgtcactgatactggttggactggcgggaagtgagctgatccgggccggtgaacgccatcgcctggtgacgcggcaggaggtgtttgccgatcgcggctatcaggccgacggtagcctggtgccgcgcatgcaacctggcgcgctgattcacgacgaagagcaggcgctggcgcaaacgctggatatggtacaagccgggagagtgaaaagcgttactggcgtgtggacgactgtcacggcgcaaacggtgtgcattcatggcgacggcgagtatgcgcttgcattcgcacgcaggctacgcgccgcgttcaatgcgcgtaatgtacacgttattgcctga

SEQ ID NO: 39573 - DNA, 1095 bp, Salmonella typhi
gtgtctgcgaacagagtgacaaaaataatgcaacgtaaaaagatactaattgtaggtgcgggcctttcaggcgcagtaatagcacgccagttagccgagcagggacatgtagtcaatattattgatcaacgttcgcatatcggtagtaacgcttatgatgcccgagatgagcacacgggtattatggtgtacgtttatggtcctcatatttttcatactgataatgaaactgtatggaattatgtaaataaatacgctgagatgatgccttatatcaataaggttaaggccacagtaaatggtcaggtattttctctacctatcaatcttcataccatcaatcaattttttggtgtcgcctgctcacctgatgacgccaggaaattactgcttcaaaaatgtgatagcaccattctggaaccacaaaattttgagcaacaggccttgcgtttcattggtaaagagttatatgaagccttttttaaaggttataccattaaacaatgggggcttcatccttccgcgttacccgcttctgtattgaaacgtatccctgttcgttttaattatgatgataactatttcaatcataagtttcagggaataccaaaatttggttatacacaaatggtcaagtccattgtcgaacacgaaaatatcgctgttgaactatgtcgctccttcactcaagaaatgcggacaaattatgatcatgtttttttcagtggcgcgctggatgccttttactcctgtcaatatggccgactggaatatcgtacattagactttaaaaaaataatttgccagagtgattatcaaggatgcgcagtaatgaattattgttcaatagatactccttatactcggattactgagcacaaatatttttctccgtgggagagacatgaagcttcaatatgttatcaagaatatagtcgggaatgtgaagctggtgatataccctactatcctgttcgcagggcagataaaatggatttactgaataaatatctgtcgcgggctaaaaaagaaaaaatattactttcattggtcgtcttggcacttatcgttatctcgatatggacatcacgatag

SEQ ID NO: 39574 - DNA, 1650 bp, Salmonella typhi
atgaaaaacatcaatccaacgcagacttctgcctggcaggcgctccagaaacactacgacgaaatgaaagacgttacgatcgctgagcttttcgcgaacgatagcgaccgtttcgctaaattttccgcgacgtttgacgatctgatgctggtggacttctccaaaaaccgcatcaccgaagagacgctggcaaaattacaggatctggcgaaagagaccgatctggccggcgcgattaaatccatgttctccggcgagaagatcaaccgcaccgaagaccgcgccgtgctgcacgtggcgctgcgtaaccgtagcaatacgccgatcattgtggacggcaaagatgtgatgccggaagtgaacgccgtgcttgagaaaatgaaaactttctcgcaagcgattatctccggtcagtggaaaggctacaccggtaaggccatcaccgacgtggtgaacatcggtatcggcggttccgacctcggcccgttcatggtgaccgaagcgctgcgtccgtataaaaatcatctgactatgcacttcgtctctaacgttgatggtacccacatcgctgaagtgctgaaaaaagtgaacccggaaacgactctgttcctggtggcgtcgaaaaccttcaccacgcaggaaaccatgaccaacgcccacagcgcgcgcgactggttcctgaaaagtgcaggcgatgaaaaacacgtggcgaaacactttgctgcgctctccaccaacgccaaagcggtcggcgaatttggtatcgacacggccaatatgttcgagttctgggactgggtcggcggtcgttactcgctgtggtctgccatcggactgtccattattctgtccgtcggtttcgacaactttgtcgagctgctttccggcgcgcacgcgatggacaagcatttctccaccactccggcggagaaaaacctacccattctgctggcgttgattggcatctggtacaacaatttcttcggcgcggaaaccgaagccattctgccgtacgaccagtatatgcaccgtttcgccgcctacttccagcagggcaacatggaatccaacggtaaatacgttgaccgtaacggcaacgccgtggattaccagacaggcccaattatctggggcgaaccaggcaccaacggtcagcacgcgttttatcaattgattcaccagggtactaaaatggtgccgtgtgactttatcgccccggctatcacccataacccgctatccgatcatcatcagaagctgctgtctaacttcttcgcgcagaccgaagcgctggcgtttggtaaatcccgcgaggtggttgagcaggaatatcgcgatcagggtaaagatccggcgcagcttgaacacgttgtgccattcaaagtgtttgaaggcaaccgcccgaccaactctatactgctgcgcgaaattacgccgttcagcctgggcgcgctgattgcgttgtatgagcataaaatctttacgcagggcgtcatcctgaacatctttactttcgaccagtggggcgttgagttgggtaaacagttggctaaccgtattctgccggagctgggcgatgataaagctatttcgtcccatgatagctctactaacggtctgattaaccgttataaagcctggcgcgcctga

SEQ ID NO: 39575 - DNA, 711 bp, Salmonella typhi
atgaaaatctcttgcaaaaacgttggcgtaatactccctatatttaactccagccaccgttcatttaaaaaaacttttttacaggctgcttcaggtggacgaattggctcatcgaataccgggattattgaagtagaggcattaaaaaaaattgattttacgcttaccgaaggtaaccgtcttgcgcttatcggacacaatggttcgggcaaaacaactcttctgagagtacttgcaggggcctataaaccaacttcagggaagtatgaatgtattggtcgagtcaccagcctcattgatcccatgatgggaatggatggtgagcttaccggcctggaaaatataaaactgaggggactatttctcggtctgtcaaaaaatgaaataaaaaatattacagaagatgtcatcgagttcagcgagttaggtgattttattaaaatccccgttagaacgtattctagtggtatggttctgaggcttggtttttctatttctactgcaattaatcctgaaattttactgatggatgaatggatgagcgtgggtgatagtgattttaaaagaaaagcagagatgagattaaatagctttatctctaaagcgggcattatggtaatggccactcatgatgatgaactggctaaatctgtatgtaataagttcatcaggcttgagcacagtgagatagttagcaaaggtggattttaa

SEQ ID NO: 39576 - DNA, 1284 bp, Salmonella typhi
atggctgatacaaaggcaaaaatcacccttactggtgacactgctattgaactggatgtgctaaaaggcacactcggtcaagatgttattgatattcgtagtctcggttcaaaaggagtttttacttttgaccctggtttcacctctaccgcatcctgcgaatctaaaatcaccttcatcgacggcgacgaaggcattttgttgcatcgcggtttcccgattgaccagcttgctaccgattccaactatctggaagtctgttacatcctgctgtacggcgaaaaaccgacgcaggaagagtatgacgagttcagaacgacagtcacccgccatacgatgatccatgagcaaatcactcgcctgttccatgctttccgtcgcgactcacatccgatggcggtaatgtgcgggatcactggcgcgctggcggcgttctaccacgactcgctggatgtgaacaatccgcgccaccgtgaaatcgcggcgttccgcctgctgtccaaaatgccgaccatggcggcgatgtgttacaaatattcaatcggtcagccgtttgtttatccgcgcaacgacctttcctacgccggtaacttcctgaacatgatgttctccacgccgtgtgaaacctatgaagtgaatccggtactggagcgcgcgatggaccgtattctgatcctgcacgctgaccatgagcagaacgcctctacgtcaacggtacgtaccgcaggttcaagcggcgccaacccgttcgcctgcattgccgccgggatcgcctccctgtggggacccgcgcacggcggcgccaacgaagccgcgctgaaaatgctggaagaaatcagctctgttaaacacattccggaatttgttcgccgtgcgaaagacaagaatgattctttccgcctgatgggcttcggtcaccgtgtttacaaaaactacgatccgcgcgccaccgtgatgcgtgaaacctgccacgaagtgctgaaagagctgggcaccaaagacgatctgctggaagtggcgatggggcttgagcacattgcgctcaacgacccgtacttcatcgagaagaaactgtacccgaacgtagacttctactccggcatcattctgaaagcgatgggcattccgtcctctatgttcaccgtgatcttcgccatggcgcgtaccgttggctggattgcacactggaatgaaatgcacactgacggcatgaaaatcgcccgtcctcgtcagctgtataccggctacgataaacgcgattttaaatcggcgctgaagcgttaa

SEQ ID NO: 39577 - DNA, 1767 bp, Salmonella typhi
atgaaactgccagtcagagaatttgatgctgttgtgattggtgccggtggcgcaggtatgcgcgcggcgctgcaaatttcccagagcggccaaacctgtgcgctgctctcgaaagtcttcccgacccgttcccataccgtttccgcgcagggcggtatcaccgtggcgctcggcaatacccatgaagataactgggaatggcacatgtacgacaccgtaaaagggtcggactacattggtgaccaggatgccatcgaatatatgtgtaagaccggaccggaagcgattctggaactggagcacatggggctaccgttctcccgtcttgatgatggacgtatctatcagcgcccgttcggcggccagtcgaaaaactttggcggcgagcaggcggcacgtaccgcggcggcggctgaccgtaccggtcacgccttgctacatacgctgtatcaacagaatttgaaaaaccacaccacgattttctccgaatggtatgcgctggatctggtgaaaaaccaggatggcgcggtggtggggtgtaccgcactgtgcatcgaaacctgtgaagtggtgtacttcaaagctcgcgcgacggtgctggcgaccggcggcgcaggccgtatctaccagtccaccaccaacgctcatatcaataccggtgacggtgtcggtatggcgctgcgtgccggtgtcccggtgcaggatatggaaatgtggcagttccacccgaccggcatcgccggggcgggcgtgctggtgacagaaggctgccgcggcgaaggcggttacctgctgaacaaacacggcgagcgctttatggagtgttatgcgccgaacgccaaagaccttgcgggtcgtgacgtggtggcgcgttccatcatgatcgaaatccgtgaaggtcgcggctgtgatggtccgtgggggccgcacgctaaactgaaactggatcatctgggtaaagaggtgctggaatctcgcctgccgggtatcctggagctgtcccgcactttcgctcacgtcgatccggtgaaagagccgattccggttatcccgacctgccactacatgatgggcggtattccgactaaagtgaccggtcaggcgctgaccgtgaacgagcagggcgaagacgtggtgattccggggctgtttgcggtaggcgaaatcgcctgtgtatcggttcacggcgccaaccgtctgggcggtaactcactgctggatctggtggtctttggccgcgcggcggggctgcatttacaggaatccatcgccgagcagggcgtgctgcgcgacgccagcgagtctgacgttgaaggttctctggatcgcctgaatcgctggaacaataaccgcaatggcgaagatccggtggctatccgcaaagcattgcaggagtgtatgcagcataacttctccgtattccgtgaaggcgacgcgatggcgaaagggcttgagcagttgaaagtgatccgcgagcgtctgaaaaacgcccgtctggatgacacgtccagcgagtttaatacccagcgtgttgagtgtctggagctggataacctgatggaaaccgcctacgccactgccgtatcagccaacttccggacggaaagccgcggcgcgcatagccgcttcgatttcccggagcgtgatgatgccaactggttgtgtcataccctgtatcagccgcaaacggaatccatgacgcgccgaagcgtcaatatggaaccgaaactgcgtccggcgttcccgccgaagattcgtacttattaa

SEQ ID NO: 39578 - DNA, 1191 bp, Salmonella typhi
atgaagattaaaactggcgtaggcatcctcgcattatccgcacttacgacgatgatgatttccgccccggctctcgccaaaattgaagaaggtaaactggttatctggatcaacggcgacaagggctataacggtctggccgaggtcggtaaaaaatttgagcaagacaccggcattaaagtgaccgttgagcacccggataagctggaagagaaattcccgcaggtggctgccaccggcgacggtcctgacattatcttctgggcgcacgaccgttttggcggctacgcgcagtctggtctgctggcggaggttactccggataaagcgtttcaggacaaactctatccgtttacctgggatgcggtacgttataacggcaagctgatcgcctaccccatcgccgttgaagccctctccctgatttataacaaagacctcgtcccgaacccgccgaaaacctgggaagagatcccggcgctggataaagagctaaaagcgaaagggaagtcggcgataatgttcaacctgcaagagccgtatttcacctggcctttgatcgccgctgacggcggttacgcgttcaaatttgaaaacggcaagtatgacgtgaaagacgttggcgtcgacaacgccggcgcgaaagcaggtctgactttcctgatcgatatgatcaagaacaaaaatatgagcgccgataccgattactccatcgccgaagcagccttcaataaaggcgaaacggcaatgaccatcaacggtccgtgggcatggtcgaacatcgacaagagcaaagtcaactacggtgtcaccctgctgccgaccttcaaaggtaaaccctcgaaaccgttcgtcggcgtgctgagcgcggggattaacgctgccagcccgaataaagagctggcgaaagagttcctcgaaaactacctgctgaccgatcagggtctggaggcggtgaacaaagacaaaccgctgggcgccgtggcgctgaaatctttccaggagcagttagcgaaagacccccgtatcgccgccaccatggataacgcccagaaaggcgagatcatgccgaatattccgcagatgtccgccttctggtatgcggtacgtacggctgtgattaacgccgccagcggccgtcaaaccgtggatgccgcgctgaaagatgcacaaagccgtatcaccaagtaa

SEQ ID NO: 39579 - DNA, 1110 bp, Salmonella typhi
atggcgagcgtacagctacgaaatgtaacgaaagcctggggtgacgtggtggtatcgaaagatattaacctcgatatccatgacggggagttcgtggtgtttgtcggaccgtcaggctgtggtaaatcgaccttgctgcgtatgatcgccgggcttgaaactatcaccagtggcgacctgtttatcggggaaacccgtatgaatgatattccgcctgccgagcgcggcgtgggcatggtattccagtcttatgcgctctatccccatctctccgttgcagaaaacatgtctttcggcctcaagctggcgggcgccaaaaaagaggtaatgaatcaacgcgtcaatcaggtggcggaagtactgcaactggcgcatctgctggaacgtaagccaaaagcgctttccggcggtcagcgtcagcgcgtagcgattggccgcacgctggtggcggagccgcgtgtgtttttgctggatgaaccgctctctaacctggatgccgcgctacgcgtgcagatgcgcattgaaatttctcgcctgcataaacgtctgggccgcacgatgatttacgtcacccacgatcaggtcgaggcgatgacgctggccgacaaaatcgtggtgctggacgctggtcgcgtcgcgcaggtcggtaagccgctggagctgtaccactatccggcggaccgctttgtcgcgggctttatcggctcgccgaagatgaacttcctgccggtgaaagtgaccgccaccgcaattgaacaagtccaggtcgaactgccgaatcgccagcaaatctggctgccggtcgaaagtcgcggcgtgcaggtcggcgccaatatgtctttaggcattcggccggaacacctgctgccgagcgatatcgccgatgtcaccctggaaggtgaagtccaggtggtcgagcagttagggcacgaaacacaaatttatatccagatccccgccatccgtcaaaacctggtttatcgccagaatgacgtggtgctggtagaagagggcgccacattcgctatcggcctgccgccagagcgctgtcatctgttccgcgaggatggcagcgcatgtcgtcgtctgcatcaagagccgggtgtttaa

SEQ ID NO: 39580 - DNA, 1359 bp, Salmonella typhi
atgatgattactctgcgcaaactccctctggcggttgctgtcgcagcgggcgtaatgtccgctcaggcaatggctgtcgatttccacggttacgcccgttccggtattggctggacgggaagcggcggcgaacaacaatgtttccaggtgaccggtgcacaaagtaaataccgtctcggtaacgaatgtgaaacctatgcggaactgaaactgggccaggaagtgtggaaagagggcgataagagcttctatttcgacaccaacgtcgcctattcggttaaccagcagaacgactgggaatcgaccgatcccgccttccgcgaagcgaacgtgcagggtaaaaacctgattgaatggctgccgggctctaccatctgggccggtaagcgcttctatcagcgtcatgacgtacacatgatcgacttctactactgggatatttcaggtcctggcgcaggtatcgaaaatatcgatctgggcttcggtaagctttcgctggcggcgacccggtctactgaagcgggcggctcttacaccttcagcagccagaatatttatgatgaagtaaaagataccgctaacgacgtctttgacgtacgtctggctggtctgcaaacgaacccggacggcgtactggagttgggcgttgactacggtcgcgccaatacgaccgatggttataagctggctgatggggcatcgaaagacggctggatgttcaccgccgaacacacgcaaagcatgttgaaaggctataacaagtttgtcgtgcaatatgccaccgatgccatgaccacgcagggtaaaggccaggcgcgcggttccgacggttcttcatctttcactgaagaattgcctgatggaaccaaaattaattatgccaataaggtcatcaataataatggcgatatgtggcgtattttggatcatggcgccatctcgcttggtgataaatgggatttgatgtacgtcggtatgtaccagaatatcgattgggataataacctgggtactgagtggtggaccgtgggcgtacgtccaatgtacaagtggacgccaatcatgagtaccctgctggaagtcggctacgacaacgtgaaatctcagcagaccggcgatcgtaacaatcaatataaaatcaccctggcgcaacagtggcaggcgggcgacagcatctggtcgcgtccggctatccgtattttcgccacctacgcgaaatgggatgagaaatggggctatatcaaagacggcgataacatttcccgttatgccgcagcgactaactccggcatttccaccaacagccgtggcgatagcgatgagtggaccttcggcgcccagatggaaatctggtggtaa

SEQ ID NO: 39581 - DNA, 2802 bp, Salmonella typhi
atgcagaacagcgctttgaaagcctggttggactcttcttacctctctggttcgaatcagagctggatagaacagctctatgaagacttcttaaccgatcctgactcggtagacgctaactggcgtttgacgttccagcagttacctggtaccggagtcaaaccggatcaactccattcaaaaacacgtgaatatttccggcggcaggcgttggctggctcacgtcactcttctacgatttccgaccctgacaccaatgtgaagcaggttaaagtcctgcagcttatcaacgcttatcgtttccgtggccatcagcatgcaaacctcgatccgctgggactgtggaaacaagaacgcgtggcggatctggacccttctttccatgatttgaccgaggccgatttccaggaaaccttcaatgtcggctcctttgccagcggcaaagagacgatgaagctgggggagctgctcgacgcgctcaaacagacctactgcggcccgattggcgctgagtatatgcacatcaccagcaccgaagagaaacgctggatccaacagcgcatcgaatccggtcgtgcggcctttagcgctgacgagaaaaaacgcttcctgaacgaactgaccgccgctgaagggctggaacgttatctgggcgccaaattcccgggtgcgaaacgtttctcgctcgaggggggagatgcgctgatacctatgctgaaagagatggttcgccatgcgggtaacagcggcactcgcgaagtggtgctggggatggcgcaccgcggtcgtctgaacgtgctgatcaacgtactgggtaaaaaaccgcaggatctgttcgacgagtttgccggtaaacataaagaacatctgggtaccggcgacgtgaagtatcacatgggcttctcgtcagatatcgaaactgaaggcggtctggttcacctggcgctggcgtttaacccatcgcatctggaaattgtgagcccggtggtgatgggctccgtgcgcgcccgtctggaccgactggacgaaccgagcagtaataaagtgctgccgatcactattcacggcgacgccgcggtgaccggccagggcgtggttcaggaaaccctgaacatgtcgaaagcgcgcggttacgaagtgggcggtacggtacgtatcgttatcaacaaccaggtgggcttcactacctctaacccactggatgcgcgttcaacgccttactgcaccgatatcggtaaaatggtccaggcgccgattttccacgtcaatgcggacgatccggaagccgtcgcttttgtgacccgtctggcgctggacttccgtaatacctttaaacgcgatgtgttcatcgatctggtgtgctaccgccgtcacggccacaacgaagccgacgagccaagcgcaacccagccgctgatgtaccagaaaatcaaaaagcatccgacgccgcgtaaaatctacgccgacaagctggaagctgataaggtcgcaacgctggaagatgccaccgaaatggtcaacctctatcgcgatgcgctggatgcaggcgaatgcgtggtgaaagagtggcgtccgatgaatatgcactcgttcacctggtcgccgtatctaaaccacgaatgggatgaagcatacccgaacaaggtagaaatgaagcgtctgcaggagctggcaaaacgtatcagcaccgtgccggaagccattgaaatgcagtctcgcgtggcgaaaatttatggcgaccgtcaggcaatggcggcaggcgagaaattgtttgactggggcggcgcggaaaatctggcttacgccacgctggtcgatgaaggcattccggtgcgcctgtccggggaagactccggtcgcggcaccttcttccatcgtcatgcggtgatccacaaccagacgaacggctcaacgtatacgccgttgcagcatattcacagcggtcagggacagtttaaagtctgggactccgtgctgtctgaagaagcggtactggcttttgaatacggttatgccacggcggaaccacgtaccctgactatctgggaagcgcagtttggcgattttgccaacggcgcgcaggtagtgattgaccagttcatctcctctggcgagcagaaatggggccggatgtgcggtctggtgatgctgttgccgcacggctatgaagggcaggggccggagcactcctccgcgcgtctggaacgttatctgcaactttgcgccgagcagaatatgcaggtttgcgtaccgtccactccggcgcaggtctaccatatgctgcgccgtcaggcgctgcgcgggatgcgtcgtccgctggtggtgatgtcgccgaaatcgctgctgcgtcacccgctggcggtttccacgcttgatgaactggcgaacggttccttccagccggccattggcgaaattgacgagctggaccctaaagccgtaaaacgcgtggtaatgtgttctggtaaggtttattacgacctgctggaacaacgtcgcaaaaacgaccagaaagatgtcgctatcgtgcgcatcgaacagctctatccgttcccgcataaagcggtgcaggaagcgctgcaaccatacgctcacgtccatgattttgtctggtgccaggaagagccgctcaaccagggcgcatggtactgcagtcagcatcatttccgtgaagtgattccgtttggggccgctctgcgttatgcaggtcgcccggcctccgcctctccggcggtagggtatatgtccgttcaccagaaacagcaacaagatctggttaatgacgcgctgaacgtcgattaa

SEQ ID NO: 39582 - DNA, 870 bp, Salmonella typhi
atgtccgttttaattaataaagataccaacgttatctgccagggcttcaccggtagccaggggactttccactccgaacaggcgattgcttacggtacgcaaatggtcggcggcgtaacgccgggcaaaggcggcaccacgcatctgggtctgccggtgttcaacaccgtgcgcgaagcggtagaagctaccggtgcgaccgcatccgttatctacgtcccggcgccgttctgcaaagactccattctggaagcgatcgacgcaggcatcaaactgattatcaccatcaccgaaggtattccgacgctggatatgctgaccgtgaaagtgaagctggacgaagcgggcgtacgcatgatcggcccgaactgcccaggtgtgatcaccccgggcgaatgcaaaatcggcatcatgccgggtcacattcataagccgggtaaagtgggtatcgtttcccgttccggcacgctgacctatgaagcggttaagcagaccaccgactacggtttcggccagtccacctgcgtgggtatcggcggcgacccgattccgggctctaacttcatcgacattctgaaactgttccaggaagatccgcagactgaagcgatcgtgatgatcggcgagatcggcggcagcgcggaagaagaagcggcggcttatattaaagaccacgtgaccaagccggttgttggctatatcgcgggcgttaccgcgccgaaaggcaaacgtatgggccacgctggcgccatcattgccggtggtaaaggtaccgctgatgagaaattcgctgctctggaagcggctggcgtgaagacggttcgcagcctggccgatatcggcgaagcgctgaaagcaattataaaataa

SEQ ID NO: 39583 - DNA, 1569 bp, Salmonella typhi
atgttagatatagtcgaactgtcgcgcttacagtttgccttgaccgcgatgtaccacttcctgtttgtgccgctaacgctcggtatggcgttcctgctggccattatggaaacggtatacgtcctttccggcaaacagatttataaagatatgaccaagttctggggcaagttgtttggtatcaactttgctctgggtgtggctaccggtttgaccatggagttccagttcgggacaaactggtcgtactactcccactatgttggggacatcttcggtgcgccgctggccatcgaaggtttgatggccttcttcctcgaatccacctttgtaggtctgttcttcttcggctgggatcgtctaagtaaagttcagcatatgtgcgtcacctggctggtggctctggggtccaacctctccgcgttgtggattctggtagcgaacggctggatgcaaaacccaatcgctgcggatttcaatttcgaaaccatgcgtatggaaatggtgagcttctctgaactggtgctgaacccggtagcacaggtgaaatttgttcacactgtggcgtccggctatgtcaccggcgcgatgttcatcctcggtatcagcgcttactacatgctgaaaggtcgtgacttcgcctttgctaaacgctcctttgctattgccgccagcttcggtatggctgccgtactgtccgttatcgtactcggtgacgaatccggttacgaaatgggcgacgtgcagaaaaccaagctcgctgcgattgaagctgaatgggaaacgcaacctgctccggcctcctttaccctgttcggcattcctgaccaggacaaacaggaaaaccatctggcgattcagatcccttatgcgctcggcattatcgctacgcgttccgtggacacgccggttattggcctgaaagatctcatggttcagcatgaagagcgtatccgtaacgggatgaaagcttatgagctgctggagcagctgcgcgccggttctaccgaccaggccgttcgcgaccagtttaacagcatgaagaaagatctcggttacggcctgctgctgaaacgctatacgcctaatgtgactgacgcgaccgaagcgcagatccagcaagcgacgaaagattctattcctcgcgttgcgccgctgtacttcgctttccgtatcatggtggcgtgcggcttcctgctgctggcgattatcgcactttccttctggagcgtgattcgtaaccgcatcggtgagaaaaaatggctgttgcgtgcggcgctgtacggtattccactgccgtggattgcggttgaagcaggttggttcgtcgccgagtatggtcgtcagccgtgggcgatcggcaaagtgttgccgacagccgtggcgaactcatcgctgaccgtgggcgatctgctgttctccatgttcctgatttgcggcctgtataccctgttcctggtggcagaattgttcctgatgttcaaatttgcacgccttggcccaagcagcctgaaaaccggtcgctatcactttgagcagtccaccgtgacttctcagccggcacgctaa

SEQ ID NO: 39584 - DNA, 369 bp, Salmonella typhi
atggccaataataccactggattcaccagaattatcaaagcggcaggatattcctggaaaggatttcgcgccgcatggactcacgaagcggcgtttcgccaggaaagcctcgcggtattgctgggcgtcatcatcgcctgctggctggatgtggatgcgattacccgtgtgttattgataggttccgttttacttatcatgattgttgaaatcctcaacagcgctattgaagcggtcgttgaccgcatcggttctgaataccatgagctttccggccgtgcgaaagatatgggatcggctgcggtgctactgtctattttcgttgccctgatgacctggggcatcctgttatggtcacattttcgataa

SEQ ID NO: 39585 - DNA, 213 bp, Salmonella typhi; identical to SEQ ID NO: 38983

SEQ ID NO: 39586 - DNA, 999 bp, Salmonella typhi
atgcagcctgaaacccagtcctccgctttacctgcttatcgcttctccatcgcgcctatgctcgactggacggacagacattgccgctatttcctgcgtttgctgtctcgccagacgctgctctacaccgaaatggtgaccacgggcgcgattattcacggtaagggtgactatctggcttatagcgaagaagagcatccggtcgctctacagcttggtggaagcgatccggctcagcttgcgcattgtgcaaagctggcggaagcgcgtggctacgatgaaattaacctcaacgtggggtgcccttccgatcgcgtgcaaaatggtatgtttggcgcctgtttgatgggcaatgcgcaactggtcgccgattgtgttaaagccatgcgtgatgtcgtctcgattccggtgacggtaaaaacccgcattggtattgacgatcaggacagttatgcgttcctgtgtgatttcattaatacggtttccggtcagggcgaatgcgagatgtttattatccatgcgcgcaaagcctggctttctggcttaagcccgaaagaaaatcgtgagatcccgccgctggattacccgcgcgtctatcagctaaagcgggattttccgcacctgaccatgtccattaacggcggcatcaaatcgttggaagaggcgaaggaacacttgcgccatatggatggcgtcatggttggccgcgaagcttatcagaatccgggtatactggccgcggtggatcgggagatctttggcgccgataccaccgataccgacccggttgcggtggttcgcgcgatgtatccctatattgagcgtgaattgagccagggagcgtatctggggcatatcactcgccatatgctggggttgttccagggtatccccggcgcgcgacagtggcgtcgctatctgagcgaaaacgcccataaagctggcgcggatgctgctgtactggagcaggcgctaaaactgatagcagacaagcgttaa

SEQ ID NO: 39587 - DNA, 1416 bp, Salmonella typhi
atggcaggaaataaacccttcaacaaaccacagactgatgcccgcgaccgcgatccgcaggttgccgggataaaagtgccgccgcactcgattgaagcggaacagtcggtgttgggcggtttaatgctggataacgagcgctgggacgatgtggccgagcgcgtggtggcggaagatttctatacccgcccgcatcgccatatctttacggagatggggcgcttgcaggaaagcggcagtcctatcgacctgattacgctcgcggaatcgctggagcggcagggccaactggacagcgtcggcggtttcgcctatctggcggagctgtctaaaaacacgccaagcgcggcgaatatcagtgcttatgcggacattgtgcgcgaacgcgccgtggtccgcgatatgatcgcggtggcgcatgaaattgcggacgccggttacgatccacaggggcgcaatagcgacgaactgctggatctggcggagtcgcgcgtcttccagatcgcggaaaaccgggccaacaaagacgaaggtccgaaaagcatcgaccagattctcgacgccaccgtggcgcgtattgagcagttgttccagcaaccgcacgatggcgttacaggcgtggataccggctatcaggatctcaataaaaagacggcaggattacagcgttcggatttgattatcgtcgcggcgcgtccctccatgggtaaaaccacttttgcgatgaacctctgcgaaaatgcggcgatgttgcaggataaaccagtactgatcttcagcctggagatgcccggcgaacagatcatgatgcgtatgctggcctcgctgtcccgcgtcgatcagacacgtattcgtaccggtcaactcgatgatgaagactgggcgcgaatctccggcacgatgggcattctgctggagaaacgcaatatgtatattgacgactcctcaggtcttacgccgacagaagtccgttcgcgcgcgcggcgtattttccgcgaacatggcgggttaagtctgattatgatcgactacctgcaattgatgcgtgtgccgtcgctttctgataaccgtactctggaaatcgccgaaatttctcgctcgttgaaagcgctggcgaaggaactccaggtgccggtcgtggcgctatcgcagcttaaccgctccctggaacaacgcgcggataaacgtccggtgaactccgacctgcgtgaatccggctctattgaacaggatgccgacttaattatgtttatctaccgtgatgaggtttatcacgagaacagcgacttaaaaggcattgctgaaattattattggtaagcagcgtaacggtcctatcggtacggttcgtctgacgttcaatggtcagtggtcgcgcttcgataactatgcgggaccgcaatacgatgatgagtaa

SEQ ID NO: 39588 - DNA, 1131 bp, Salmonella typhi
gtgtcaaaggcaaccgaacaaaacgacaagctcaaacgggcgataattatttcagccgtgctgcatatcatcttatttgcagtgctgatctggagttcgtttgatgagcatatagaggcttctgccggcggcggcggcggttccgctatcgacgcggtgatggtcgatcctggcgccgttgtgcagcagtacaaccgtcagcaggatcaacaggccagtgccagaggcgcggaagaagagcgtaaaaagctgcaacagcagcaagcagaggagctgcagcagaagcaggctgctgaacaggagcggttgaaacaacttgagaaagaacgtttagcggctcaggagcagcaaaagcaggctgaagaagcggcaaaactggcgcaacagcagcaacaggccgaagaagcggcgaaagcggcggcggacgcgaagaagaaagcggaggccgaggcggcgaaagcggcggcggacgcgaagaagaaagcagaggccgaggcggcgaaagcggcggcggacgcgaagaagaaagcagaggccgaagcggcgaaagcagcggcggaggcgaagaagaaagcggaggccgaagcggcgaaggcagcggcggacgctaagaagaaagcggatgccgaggcggcgaaagcggcggcggaggcgaagaagaaagcggatgccgcggcggcgaaagcagcggcggacgctaagaagaaagcggctgccgaaaaagcggccgccgcagaaggcgtcgacgatctgcttggcgatctcagctcgggtaagaatgcgccgaaaaccggcggcggcgcgaaagggaatggtcagccatcgaaagatagcggtacatcgggcgctaacggtgggacgacaggcgctgatatcagcgcctacgcgaaacagattcaggtcgccattcagagccgtctgtatgatgcgagcctgtatcagggcaaacaatgtgtcttgcatattagcctggcgccggatggctcattaaaaagcattacgtctgagggcggcgatccggcgctttgtcaggcggcgttaatggcgacaaaaaccgcgaaaattcctaaaccgccaagccaggctgtttatgagaaaataaaggatgccaaactagactttaaactgtag

SEQ ID NO: 39589 - DNA, 789 bp, Salmonella typhi
atgagcagtaacttcagacatcacctgttgagtctgtcgttactggttggcatagcggccccctgggccgcttttgctcaggcgccaatcagtagtgtcggctcaggctcggtcgaagaccgcgtcactcaacttgagcgtatctctaacgctcacagccagcttttaacccaacttcagcagcagctctccgataatcagtctgatatcgattctttgcgcggccaaatccaggaaaatcagtatcaactgaatcaggtgatggagcgccagaagcaaattatgctgcagctggggagtttaaataatggcggcgcagcgcagccagcagctggcgaccagagcggggcggcaaccgctgcgacccccgctccggatgccggtacggcaacctcaggggcgccggtacaaagtggcgatgcgaataccgattacaatgcggcaattgcgctggtgcaggataagtctcgccaggatgatgcgattgtggcgtttcagaacttcatcaagaaataccctgattctacttatcagccgaacgccaattattggctgggccagttgaattacaacaagggtaaaaaagatgacgccgcctattatttcgcctcggtagtaaaaaactatcctaagtcgccgaaggctgcggacgcgatgtacaaagttggcgttatcatgcaggacaaaggtgatacggcaaaagcgaaagcggtttatcagcaggtgattaacaaatatcctggcactgatggcgcgaaacaggcgcagaagcgtcttaacgcgatgtaa

SEQ ID NO: 39590 - DNA, 774 bp, Salmonella typhi
atggcgcattcctggttacgcctggtcgcaggggcgacattatctttcgtcatcgctggtcatgcgctggcggatgaaggcaagatcaccgtattcgccgccgcgtcgctaacgaacgcgatgcaagacattgcggcagaatataaaaaagagaaaaatgtggatgtggtctcctcattcgcctcctcttcaacgctggcgcgccagatagaagcgggcgcgccggcggacctgttcatctctgctgatcagaaatggatggattacgcagccgataaaaaagcggtggataccacgacgcgcgaaacattgcttggcaatagcctggtagtggtagcgccgaaagccagcgagcagaaaccgtttaccatcgacaacaaaacggactggattcatctgctgaacggcgggcgtctggcggtgggcgatccgcaacacgtaccggcgggaatttatgccaaagaagcgctgcaaaagctgggcgcatggcaaacgcttgaaccgaaactggcgccgggcgaggatgtgcgcggtgcgttggcgttggtcgaacgtaacgaagcgcctttaggcattgtatacggttctgatgcggtcgccagcaagggggtcaacgtggtggcgacgttcccggaagattcacataaaaaagtggaataccccatcgctatcgtggaggggcataaaaatgcggccgtcagcgcgttctatgattacctgaaaggaccgcaggcctcggcaatctttaaacgttatggatttacgacgaagtaa

SEQ ID NO: 39591 - DNA, 1164 bp, Salmonella typhi
atggaacaggttgtcattgtcgatgccattcgcaccccgatgggccgttcgaagggcggcgcgtttcgcaacgtgcgggcagaagatctctccgcccacttaatgcgtagcctgctggcgcgtaatccgtcgcttacagcggcgaccctcgatgatatttactggggctgcgtacaacaaacgctggagcaaggcttcaacattgcccgtaacgccgcgctgctggcagaaattccccattcggtaccggcggtcaccgtcaaccgtctgtgtggttcctcgatgcaggcgttacacgatgcagcgcgaatgatcatgaccggcgatgcgcaggtttgtctggttggcggcgtggagcatatggggcacgtgccgatgagccacggcgtggattttcacccgggtctgagccgcaacgtcgccaaagcagcagggatgatggggctaacggcggaaatgctctcccgcctgcacggcattagccgggaaatgcaggaccagttcgccgcgcgttctcacgctcgcgcctgggccgccacccagtctggcgcattcaaaacggagattatcccgactggcggtcatgatgcagacggcgtgttgaagcagtttaactacgatgaagtgatccgcccggaaaccacggtcgaagcgctatcaacgctgcgtccggcatttgatccggttagtggcacggtcacggcgggcacctcatccgcgctttccgatggcgcagccgccatgctggtaatgagcgaaagtcgtgcccgtgagctgggtctgaaacctcgcgcccgtattcgctcaatggcagtggtgggttgtgatccgtcaattatgggttacgggccggttccggcgtcaaaactggcgttgaaaaaagcgggactgtcggccagcgatatcgatgtgtttgagatgaacgaagcgtttgccgcacagatcctgccatgcattaaggatctgggattgatggagcagatagacgagaagatcaacctcaacggcggcgcgatcgcgcttggccatccgctcggctgctccggagcacgtatcagcaccacgcttatcaacctgatggagcgcaaagacgcgcagtttggtctggcgacgatgtgtattggtctgggtcagggcatcgccacggtgtttgagcgggtttaa

SEQ ID NO: 39592 - DNA, 702 bp, Salmonella typhi
atgacaaccttaagctgtaaagtgacctcggtagaagctatcaccgataccgtatatcgggttcgtttagtgccggacgcggcgttttcattccgcgctggtcagtatttgatggtcgtaatggacgagcgtgacaaacgcccgttttcgatggcctcaacgccggacgagaaagggtttattgaattacacattggcgcttccgagctcaatctgtatgcgatggcggtcatggatcgaattctgaaagaccgggaaatcgtcgtcgatattccgcatggcgacgcctggctacgtgacgatgaagagcgtccgttgattctgatcgcgggcggtacgggcttttcttatgcacgctccatcctgttgacggcgttagcgcgcaacccggcccgcgatgttaccatttactggggcggtcgcgaagaaaagcacctctatgatctctctgagctggaagcactctctgttaaccatcctaatttgcgtattgaacctgttgtcgagcagccggaagaaggctggcgtggacgtacaggaacggtacttacggcggtattgcaggattatggtacgctggcggggcacgatatttatattgccggacgttttgagatggcgaaaatcgcccgcgatctgttctgtcatgagcgtaatgcgcgggaagatcgtctgtttggcgatgcgttcgcatttatttaa

SEQ ID NO: 39593 - DNA, 756 bp, Salmonella typhi
atggtggaagattcacaagaaacgacgcactttggctttcagaccgtcgctaaagagcagaaagctgacatggtggcccacgtttttcattctgtggcgtcaaagtacgatgtgatgaatgatttaatgtcatttggcattcatcgtttgtggaagcgcttcaccattgattgcagtggcgtgcgtcgtggacaaaccgttctcgatttagcgggcgggacgggcgatcttaccgcgaaattttcacgtatggtcggggaaactggcaaagttatcctggcggatattaatgattctatgctcaaaatggggcgtgagaagctgcgtaatatcggcgtgatcggcaacgtagagtatgtgcaggcgaatgccgaagctctgcctttccctgataatacgtttgattgcattaccatttcgtttggtttgcgcaatgtaacggaaaaagaaaaagcgctgcggtcaatgttccgtgtgttgaaacccggcggacgtttactggtgcttgaattttccaagcctatcattgagccgctgagtaaagcgtatgacgcctattcttttcatattttaccgcgtattggctcgatggtcgcgaacgatgcggatagctatcggtatctcgcggaatccatccgtatgcatcccgatcaggataccttaaaagccatgatgcaggacgccggatttgagagcgtggattattacaatctgacggcgggcgttgtggcattgcaccgtggttataaattctag

SEQ ID NO: 39594 - DNA, 2316 bp, Salmonella typhi
atgaacggttggcgtggtaaacgtggccgctggctgtggctggcgggcgcgccgctttttattttcctggcgttatgggcagcggataaactctggccgctgccgctcaatgaggtccatcctgcgcgggtcgtggtcgcccatgacggtacgccgctgtggcgctttgccgacgccggggggatctggcgttatccggtgacgattgaagaggtctctccccgttacctggaggccttaatcaattacgaagatcgctggttctggcagcaccctggcgttaaccctttttccgtcgcgcgcgcggcatggcaggatcttaccgccgggcgcgttatttccggcggcagtacgctgactatgcaggtggcgagacttctggacccgcattcgcgcacgttcggcggtaaaatccgccagctttggcgcgccctccagcttgaatggcatttgtccaagcgcgatatcctgacgttgtacctgaaccgcgcgccgttcggcggcacgctacagggtattggcgctgcaagctgggcctacttcggcaagccgcccgcgcgcctgagctacgctgacgcggcgctgctggccgtattgccgcaggcgccgagccggttacgccccgaccgatggcctacgagagccgaagcggcacggaataaagtgctggatcggatggcggagcagggcgtctggcctgccgaaacggtacgcgagtcgcgtgaagagccggtctggctggcgccgcgtcaaatgccgcaactggcgccgctttttgcccgaatgatgttgagtaaaagccggagcgacaaaattgtgaccacgctggacgccgggttgcagcggcaactggaagatctggcgcgggcatggaaagggcggctgcctgcacgcagttcattggcgatgatcgtcgtcgatcataccgatatgagcgtgcgcggctgggtaggatcggtagaccttaatgacgacagccgttttggtcatgtcgacatggtaacggcgatccgatcgccgggatcggtactcaaaccctttgtgtatggtctggcgctggatgacggcttgatccatcccgcatcactattacaggacgttccgcgccgcaccggagattaccgcccgggaaacttcgatagcggatttcacggcccggttagcatgagcgacgcgctggtacgctcgctgaatctgcctgccgttcaggtgcttgaagcctatgggccgaaacgatttgcggcaaaactgcgtaacgtcggcctgccgctatatttgcctgctggcgcggcgcccaatctttcgctgattctgggcggcgcgggcgcgcggcttgacgagatggcggcggcatacagcgcgttcgctcgtcatgggaaagcggcgaaactacggttacagccggacgatccgctgtcggaaagaccattaatgtcgccgggagcggcgtggatcattcgacggattatggcggatgaagcgcaacccttgccggataacgcgctgccgcgcattgtgccgttggcgtggaaaaccggcaccagctacggctatcgcgatgcgtgggctattggcgttaacgcgcgctatatcatcggcatctggacaggcagacccgacggcacgcctgtggtggggcaatttggttttgccagcgcggtgccattgcttaaccaggtcaataatctgttactggcgcatacgggacgcctgccggaagatccgcgtccgcagacggtaagccgcggcgtcatttgctggccgggcggacagactctgcctgccgggaacagcaactgtcgccgccgactggcgacatggctgcttgacgacagccagccgcccacgctgctgttacctgagcaggaagacatcaacggtattcgtttcccggtctggctggatgatacggggcggcgtgtcgctgccgactgtccgcaggcgcgtgcgcatacgtttatcgtctggccgcggccgctggagccgtggctgccgcctgcggaaagacgtagcgcccgcttgcccgcggcgtccgaccactgtccgccgctacagggcaatgatgccgcgccgttaatgctgtcaggagtgagggatggcgcggtgatcaggcaattgccaggccaggaaaacgtcacgctgcccgtctcgactaccggcggcaaagggcgtcgctggtggtttttaaatggcgaacctgttaatggcgaaaataatcgcctttctttattactcaatatcgctggacgttatcaacttgtcgtaatggatgagtccggtcaggttgcagcggttaattttgaattaatacgttaa

SEQ ID NO: 39595 - DNA, 786 bp, Salmonella typhi
gtgattcctatgtccgaaactaaaaatgaattagaaattttgctggagaaagcggcgactgagcccgcgcatcgttcggcatttttccgtaccttactggagtccaccgtctgggtgccgggcagcgctgccgaaggcgaggcgattgtggaagacagcgctctggatttgcagcactgggaaaaagaagacggcacgaccgtcattcccttctttacttctctggaggcgctgcagcaggccgtggaagacgaacaggcgtttgtggtgatgccggcgcgcacgctgtttgaaatgacgcttggcgaaacgttattcctcaacgctaaattgccgaccggcaaagagtttatgccgcgtgaaatcagcctgcttctcgctgaggaaggcagtccgttaagtacgcaggaagtgctggaaggcggcgagtcgcttattttatccgaagtggccgagccgccgtcgcagatgattgattccctcactacgctgtttaaaaccatcaaaccggtgaaacgcgcatttctctgcgcgattaaagaacatgcggacgcccaacctaatctgctgattggcattgaggctgacggcgaaattgaagagatcattcacgcagcgggcaatgtggcgaccgacacgttaccgggtgacgaaccgatcgatatttgtcaggtgaggaagggcgcgcagggtatcagccactttatcaccgagcatatcgcgccgttctacgagcgtcgttggggtgggttcctgcgcgattttaaacagaaccgcatcatctga

SEQ ID NO: 39596 - DNA, 801 bp, Salmonella typhi
atgtatcaggttgttgcgtctgatttagatggcacgctgctctcccccgaccatacgttgtccccttatgccaaagagactctgaagctgttgaccgcacgcggcatccattttgtctttgccactggtcgtcatcatgtcgatgtagggcaaatccgcgataatcttgaaatcaagtcttacatgatcacctccaacggcgcgcgagtgcacgataccgacgggaatttggtttttacgcataatctggacagcgacattgccagcgacctgttcggcgtggtgaatgcgaacccggacatcgtgactaacgtttatcgcgacgacgaatggtttatgaatcgtcatcgccccgatgaaatgcgttttttcaaagaggcggtatttaactattcgctgtttgagcctgcgctgctggagccggagggcgtcagcaaagtgtttttcaccagcgacactcatgaaaagttgttgccgctggagcaggcgattaacgcgcgctggggcgatcgggtaaacgtgagcttctctacgctaacctgtctggaagtgatggcgggcggagtgtcgaaaggtcatgcgctggaagcggtcgctcaggcgatggggtacagcctgaaagagtgtatcgcctttggcgacggaatgaacgacgctgaaatgctcacgatggcgggcaaaggctgcatcatgggcaatgcgcaccagcgtctgaaagacctgtatcccgaacttgaggtgatcggcatcaacgcggataacgccgtgccgcattacctgcgcgatcttttcttacgctga

SEQ ID NO: 39597 - DNA, 1017 bp, Salmonella typhi
atgtttcagcagcaaaatgactgggaaacaagagaaaatgcgtttgccgcttttgctatggggccgctgaccgatttttggcgtcagcgggaagaggcggagtttatcggcgtggataacattccggtgcgctttgtccgttttcggaatgactccaacgatcggacgatcgtcatttgtcctggccgcattgagagttatgtaaaatacgctgaactggcgtatgacctttttcatctcggttttgatatcttcatcatcgaccaccgtggtcaagggcgctccgggcggatgttatcggacccgcatcggggtcatgtcgatcattttaacgattatgttgaggacttagcggcgttctggcagcaggaaattgagccggggtcgtggcgtaagcgttatatcctggcgcactcaatggggggcgcgatagccaccctgttcctgcaacgccatcgtgtgcggtgcgacgctattgcgctcaccgcgccgatgtttggtattgtgatacgcttgccttcctttatggtgcgccatattctcgactgggccgaagggcatcagcgtatccgtgaagattacgctattggtaccggtcagtggcgggcgttgccgtttgggatgaatgcgctgacccacagccgccagcgttatcagcgcaacttacgattttatgccgacgagccgcagctgcgcgttggcggccccacctggcattgggtacgcgaaggcattctggcgggtgagcaggtactggctggggcgagcgatgacacgacgcctacgctactgattcaggcggaagaagagcgggtagtggataaccgcacccacgatcgtttttgtgaaattcgcgccgcggcgggatacccttgtgaagggggaaaaccgctggttatcaaaggcgcgtaccatgagatcctttttgaaaaggacgccatgcgctcagtcgcgcttaacgccattgttgaatttttcaacaagcctaatttatccagcggaaatcgctttgcttag

SEQ ID NO: 39598 - DNA, 621 bp, Salmonella typhi
atgacctttgaatggtggttcgcctatctactgacctcaactctgttgagtctttctccgggttcaggcgccatcaataccatgacgacgtctatcaaccatggatatcgtggcgcagcggcttctatcgccgggctccagaccgggctggggatacatatcgtactggtgggcgtcggactgggtacgctcttttcgcgctcgctcatcgcttttgaaattctgaaatgggctggcgcggcttatcttatctggctgggtatccagcaatggcgcgccgcaggcgctatcgatctgcatactctcgcccagacgcaatcgcggggtcggctgttcaaacgggcgatatttgtcaatctaaccaatcccaaaagtattgtctttcttgccgccctgtttccgcaattcatcatgccgcagcaaccgcaactggcgcagtacctcattctcggcgtcaccacgattgtggtggatatgattgtgatgaccggttacgccacgctggcgcagcgcattgccgcctggattaaaggaccaaagcagatgaaggcgctgaataaagcgtttggttcgttgtttatgctggtaggcgcgctcctggcgtcggcaagacacgcgtga

SEQ ID NO: 39599 - DNA, 1830 bp, Salmonella typhi
gtggcgcaggcggaagtgttgaatctggaatcaggggccaaacaggttttgcaggaaacctttggctaccaacagtttcgcccgggccaggaagcgattattgatactgcgctctccggtcgcgactgtctggtcgtcatgcccaccggcggcggcaaatctctgtgctatcaaatccccgcgttgttgctggacggattgaccgtcgtcgtttcgcccctgatctcgttgatgaaagaccaggtcgatcagctactggcgaacggggtggcggcggcctgtctgaactccactcaaagccgcgagcagcagcttgaggtgatggcggggtgccgtaccggacagattcgtctgctgtatattgcgccggaacgcctgatgctggacaactttcttgatcatctggcgcactggaatccggtattgctggcggtggatgaagcgcactgtatctcgcaatggggacatgatttccgtccggaatatgcggctctcggtcagcttcgccagcgttttcccgctttgccgtttatggcattgaccgccaccgccgacgacaccacgcgccaggatattattcgtctgcttgggcttaacgatccgttaatccagatcagtagctttgaccgaccgaatatccgctacatgctgatggagaagtttaagccgctcgaccagctaatgcgctatgttcaggagcaacgcggcaaatcgggtatcatctactgcaacagtcgggcgaaagtggaagataccgccgcgcgcttgcaaagtcgcggcattagcgcggcggcctatcatgcggggctggaaaacgctattcgcgccgatgtgcaggaaaaatttcagcgcgacgatctgcaaatcgtggtggcgaccgtcgcttttggaatgggcataaacaaacctaacgtacgtttcgtcgtgcatttcgatatcccgcgtaatattgaatcctactatcaggaaacgggccgcgccgggcgcgacggactgcctgcggaagccatgctattttacgatccggctgatatggcctggctacgtcgttgtctggaagagaaaccagccggacagcttcaggatattgaacggcataagctgaatgcgatgggcgcttttgccgaagcgcaaacctgccgccgcctggtattgcttaattactttggcgaaggccgacaagaaccgtgcggcaactgcgatatctgtctcgatccgcccaaacaatatgatggcttaaacgatgcccagattgcgctttctaccattggtcgggttaaccagcgttttggcatgggctacgttgtcgaggtgatccgcggcgcgaataaccaacgcatccgcgatttcggtcatgacaaactcaaggtttatggcatgggacgcgaaaagagccatgagcactgggtgagcgtgattcgccagctcattcatctggggctggtaatgcaaaatattgcgcagcactccgcattacagttgacggatgccgcgcgtccggtactccgtggagacgttccgctaaagcttgcggtgccgcgcattgtcgccctcaaaccccgcgtgatgcagaaatcgttcggcggtaattacgatcgcaaattgttcgctaagttgcgcaagctgcgtaaagctatcgctgatgaagagaatatcccgccgtatgtggtctttaacgacgccacgttgatagaaatggcggaacagatgccggtttccgccagcgagatgttaagcgttaacggggttgggatgcgcaaactggagcgcttcgggaaagaattcatggcgctcatccgcgcgcatgtcgatggtgatgacgaagagtag

SEQ ID NO: 39600 - DNA, 819 bp, Salmonella typhi
atgtcacattgttcctgtcatgataaaccgcagcacagtttgctgcctgcggcgtaccgcatcctcagtattactcgccacacgccgctggagtggaatttccgcgtggccgtcgattttcccgcgcactgggggcaatttgttgaggtgtcgctgccgcgcgtcggcgaagcgcccatctccgtttccgactacggcgatggctggatagatctgctgattcgtaatgtcggaaaagtgaccagcgccctctttacgctgaaagaaggcgacaacgtgtggctacgcggctgctatggcaatggctatccggtcgatactctgcgccataaacccttactggttgtcgcaggcggcacgggcgtcgcgccggtgaaaggcttaatgcgctatttcgttgagaatccccaggaaattggtcaactggatatgattctcggctataaaaatcgcgattgcgtgctgtacaaagaagaaatggcgacgtggcacggcaaacataatctggtgctcacgctggatgaaggcgaggctgatgaccgttaccagattggtcgggtgaccgatcggcttgccgacatgacgcttagcgatatcgacaccatgcaggccatcgtcgttgggccgccaataatgattacctttaccgtaaaaatgctgctgcaaaaagggctcaagccggagcaaatttgggtggactacgaacgccggatggcctgctccgtcgggaagtgcggccactgccgtatgggcgaagtgtatgtctgcaccgacggcccgatatttaactacgccgtcgcgcaacgttttgccgattaa

SEQ ID NO: 39601 - DNA, 2163 bp, Salmonella typhi
atggacgtttcttacctgctcgacagccttaatgataaacagcgcgaagcggtggccgcgccacgtagcaacatgctggtgctggcgggcgcgggaagcgggaaaacccgcgtgctggtgcaccgtatcgcctggttactgagcgtagaaaacaactcgccatactccatcatggcggtgacctttaccaacaaagcggcggcggaaatgcgccatcgtattggccagttgatggggaccagccagggcggaatgtgggtagggacgttccacggtctggcgcaccgcctgctgcgcgcgcatcatatggacgctaatttgccgcaggatttccagattctcgacagcgaagatcagatgcgtttgcttaaacgcctgattaaggcgatgaatcttgatgagaagcagtggccgccgcgtcaggcgatgtggtacatcaatagccagaaagacgaagggctacgcccgcaccatatccaaagctatggcaatccggtggaacagacctggcagaaggtgtatcaggcctatcaggaagcgtgcgatcgcgctggtctggtggatttcgccgagctactgctgcgcgctcatgaactatggctgaacaagccgcacatcctgcaacactatcgcgagcggtttactaacattctggtggacgaattccaggataccaacaacattcagtacgcctgggttcgtctgctggcgggcgataccggtaaagtgatgattgtcggcgacgatgaccagtcgatctacggctggcgcggggcccaggtagagaacatccagcgcttcctcaatgatttccccggcgcgcagaccattcgtctggagcagaattaccgctcgaccagcaacattcttagcgtggcgaacgccctgattgaaaacaacaacgggcgtctgggcaaaaagctgtggactgacggcgttgacggcgaaccgatatcgctgtactgcgctttcaacgaactggatgaagctcgctttgtggttaatcgtatcaaaacctggcaggacaacggcggcgcgcttgcgcaatgcgccatcctttatcgcagcaacgcccagtcgcgcgtgctggaagaagcgttattacaggccagtatgccgtaccgcatttacggcggtatgcgcttcttcgaacgccaggagatcaaagatgcgctctcttatctgcgtttgattgccaatcgcaacgatgatgccgcctttgaacgcgtggtgaataccccaacgcgcggtatcggcgaccgcacgctggacgtggtgcgccagacctcgcgcgatcgccagctaacattgtggcaggcgtgccgtgaattgttacaggaaaaagccctggccgggcgtgcggccagcgcgctgcaacgctttatggaactgatcgacgccctggcgcaggaaaccgccgacatgccgctgcatgtgcagactgaccgggtgatcaaagattccggcctgcgcaccatgtatgagcaagaaaaaggcgagaaaggccagacgcgcatcgaaaacttagaggaactggtgacggcaacgcggcagttcagctacaacgacgaagatgaagatttaatgccattgcaggccttcctctctcacgcggcgctggaagcgggcgaggggcaggcggatacctggcaggatgcggtacagctgatgacgctgcactcggccaaagggctggagttcccgcaggtgtttatcgtcgggatggaagaggggatgttccccagccagatgtcgctggatgagggctggcgtttggaagaggagcgtcgtctggcctacgtcggcgttacccgtgccatgcagaaactgacgctaacctatgccgaaactcgccgtctgtatggtaaagaggtttatcatcgcccgtcgcgtttcatcggcgagttgccggaggagtgcgtggaagaggtccgtctgcgcgccaccgtcagtcgtccggtgagccatcaacgaatgggaacgccgctggcggaaaacgacacaggctacaaactcggccaacgcgtgcgccatgcgaagttcggcgagggaactattgtcaacctggagggcagcggcgaacatagccggttgcaggtggcttttcaggggcaagggatcaaatggctggttgccgcgtatgcgaagctggaaacggtttga

SEQ ID NO: 39602 - DNA, 717 bp, Salmonella typhi
atgcgtttttaccggcctttggggcgtattgccgcgctcacctttgacctggatgataccctttatgataaccgtccggtgattttgcgtactgagcaggaagcgctcgcttttatgcaaaattatcacccgtcgctacgttcgtttcaaaacgtcgatttacagcggatacggcaggcggtgcgtgaagcggagccggaaatctatcatgacgttacccgctggcgccatcgcgcgatagagcaggccatgcgggatgcgggattatcggcgcaggagtccattgccggtgcgaatgcggcgatgatgcattttgccaaatggcgcagccagattgaggttccgcaggctacccatgagacgttacagcagcttgcgaaaaaatggccgctggtggcgatcactaacggcaatgcccagccggaactgtttggcctcggcgattactttaagtttgtactgcgcgccggcccggatggacgttccaaaccgtttagcgacatgtatttcctggcggcggaaaaactgcatgtgccgatcggcgagatcctgcatgtcggcgacgatctgactaccgatgtggctggcgctattcgctgtgggatgcaggcctgctggattaaacctgaaaatgccgacctgatgcggacgcaggacagccgtttactgccgcatatcgaaatttcgcggttggcatctctcacctcgctgatataa

SEQ ID NO: 39603 - DNA, 903 bp, Salmonella typhi
atgacggaggtcgcgctttctctggatgtctcgcggttcctgcgctatttaggcgtggagcgccagcttagccccattaccctgcagaactaccagcgtcagcttgatgccattatcgctttagccggagaaaccgggctgaaaagctggcaacaatgtgacgctgcgattgtgcgcagttttgcggtgcgcagtcggcgtaaagggcttggccctgccagtctggcgctacgtctctcggcattgcgaagcttttttgactggttagtcagtcagggcgaattgaaagctaacccggcgaagggcgtctccgcaccgaaagcgccgcgtcatctgccgaaaaatattgatgtcgacgacgttaaccgcctgctggacatcgatcttaacgatccgctcgccgtacgtgaccgggcgatgctggaggtcatgtacggcgcggggctgcgtttatccgaactggttggcctggatataaagcacctcgatctcgataccggagaagtgtgggtaatgggtaaaggcagcaaagagcgacgcctgccgattggccgtaacgcggtgacgtggattgagcactggctggatctgcgcggcctgttcgccagcgatgaagaggcgttattcctgtcgaagctcggcaagcgtatctccgcgcgcaatgtccaaaaacggttcgccgaatggggcataaagcaggggctaaacagccacgtgcatccacataagctgcgccattcgttcgcgacccatatgctggaatcgagcggcgatctgcgcggcgtgcaagagctgctgggtcatgccaacctttccaccacccaaatttatactcatcttgattttcaacatcttgcttcagtgtacgacgcggcgcatccgcgcgctaaacgggggaaataa

SEQ ID NO: 39604 - DNA, 1254 bp, Salmonella typhi
atgttaaagcgtgaaatgaacattgccgattatgatgccgaattgtggcaggctatggagcaggaaaaagtacgtcaggaagagcacatcgaactgatcgcctccgaaaactacaccagcccgcgcgtgatgcaggcgcaggggtctcagctgaccaacaaatacgctgaaggatatccgggcaagcgctactacggcggttgcgaatacgttgatgtcgtagagcagctggctatcgaccgcgcgaaagaactgttcggcgccgactacgctaacgtgcagccgcactccggttctcaggctaacttcgctgtttacaccgcgctgctgcagccgggcgataccgttctgggtatgaacctggcgcagggcggccacctgactcacggctccccggttaacttctccggtaaactgtacaacatcgtaccttacggtatcgatgagtccggtaaaattgactatgacgagatggcgaagctggccaaagagcacaagccgaagatgattatcggtggcttctctgcctactccggtgtggttgactgggcaaaaatgcgtgaaatcgctgacagcatcggcgcatacctgtttgtcgacatggcgcacgtggcgggcctgattgccgcaggcgtttacccgaacccggttccgcacgctcacgttgtcaccaccaccacccacaaaaccctggcgggtccgcgcggcggcctgatcctggcgaaaggcggcgacgaagagctgtacaaaaaactgaactccgccgtcttcccaagcgcgcagggcggcccgctgatgcacgtgatcgcgggtaaagcggtagcgctgaaagaagcgatggagccggagttcaaagtttaccagcagcaggtggcgaaaaacgccaaagcgatggtggaagtgttcctgaaccgcggctacaaagtggtgtctggcggcactgagaaccacctgttcctgctggacctggtggataaaaacctgaccggtaaagaagctgacgccgcgctgggccgtgctaacatcaccgtgaacaaaaacagcgtgccgaacgatccgaagagcccgttcgtgacctccggtatccgtattggttctccggcggttactcgtcgcggcttcaaagaagcggaagtgaaagagctggctggctggatgtgtgacgtgctggacaacatcaatgatgaagccaccattgaacgcgtgaaagcgaaagtgctggatatctgcgcccgcttcccggtttacgcgtaa

SEQ ID NO: 39605 - DNA, 1332 bp, Salmonella typhi
atgagttctgtcaaaaagatcgggctatttgcctgtactggcgtcgttgccggtaatatgatggggagcgggattgcattattacccgccaaccttgccagtattggtggcattgccatctggggctgggtaatttctattattggggcaatgtcgctggcttatgtttatgcgaggctggcaaccaaaaacccgcaacagggtggccctatcgcttatgctggggaaatatctccggcgtttggtttccagaccggcgttctttattatcacgcaaactggattggtaacttagccatcggtattaccgcggtttcttatctttctacgttcttcccggcattaaataatccaataccggcaggtattgcctgtattgctatcgtctggctgttcacctttattaatatgctgggcggggcctgggtcagccgcttgacaacgattggcctgtttctggtgctgatcccggtagtcttgaccgcagtcgccggctggcattggttcgctatcgcgacctatcacgcgaactggaacacgtctacgacgaccgactctcacgccattgttaaaagtattctgctctgcctgtgggcgttcgttggcgttgagtctgccgccgtcagcaccggcatggtgaaaaacccgaaacgcaccgtaccgctggcaaccatgctgggtaccgcgctggcaggcatcatctatatcgccgcgactcaggttatcgccgggatgttcccagcttccgttatggcctcttccggcgcgccgttcgctatcagtacctccacgattctgggtggctgggctgcgccgctggtttccgcctttaccgctttcgcctgcctgacgtctctgggctcctggatgatgctggtcggccaggctggggttcgcgccgccaacgacggcaacttcccgaaaatttacggtgaaatggataaaaacggtattccgaaaaaaggtctgctgttggctgcggtgaaaatgacggcgctgatgattctgatcaccatcatgaactccagcggcggtaaagcgtccgacctgttcggcgaactgaccgggattgccgtactgcttaccatgctgccgtacttctactcttgtgttgacctgattcgtttcgaagggttcaacatccgtaactcggtaagcctgatttgttctgtactgggctgcgcattttgcttcatcgcactgatgggcgccagctccttcgaactctccggcacctttatcgtcagtctgatcatcctgatgttctacggtcgcaaaatgcaccagcgccagaacaacgacagcgacaacaatacggctgaagcgctttaa

SEQ ID NO: 39606 - DNA, 942 bp, Salmonella typhi
atgttagacaatgttttaagaattgccacacgccaaagtccccttgcgctttggcaggcacattatgtcaaagacgcattgatggcaacccatccgggactgacggtagaactggtgccgatggtcacacgcggcgacgtgattctcgatactcccctggcgaaagtgggcggtaagggactgtttgttaaagagcttgaaatcgcgctgctggaaaaacgcgctgatatcgccgtgcactctatgaaagacgttccggtggccttcccggacggtctcggtctggtgaccatttgcgagcgcgaagatccgcgcgacgcgtttgtctcgaataaatatcacagtctggacgatctgcccgcgggtagtatcgtcgggacgtccagtttgcgtcgtcagtgtcaactggcggaacgccgtccggatctcattatccgttcgttgcgcggcaacgtcggcacacgtctcggcaagctggataacggcgactatgacgccattatcctggccgtggccggtctgaaacgcttaggtctggagtcgcgcattcgcacagccttgccgcctgacgtttcgcttcctgccgtaggccagggcgctgtcgggattgagtgtcgtcttgacgacgcgcgaacacaggcgctgctcgcaccgttgaatcactcgcaaaccgcgctgcgcgtaacggcggaacgtgctatgaacacccgcctggaaggcggttgtcaggtgccgattggcagctatgcagaaatcatcaacggtgaaatttggctacgcgcgctggttggcgcgccggacggttcggtgatggtgcgcggcgaacgtcgtggttctcccgagcaggcggagcaaatgggcatctcgcttgcagaggaactgctggaaaacggcgcgcgcgcgattctgacggaagtttataacggcgagacgcccgcatga

SEQ ID NO: 39607 - DNA, 1386 bp, Salmonella typhi
atgctggcctttttgctgatcctgctgccgttgctggttctggcctggcaggcgtggcaaagccttaacgcgttaagcgatcaggctgcggtgactaaccgcagcacgcttattgacgcccggcgcagcgaggcgatgaccaacgtcgcgctggagatggagcgaagctaccgacagtattgcgtgcttgacgatccgacgctggcaaaagtgtatcaaagccagcgtaagcgctatagcgatatgctggatgcccatgccggcgtcttgccggatgataagttgtatcaggcgttacgccaggatttaaacgcgctggcgcaattgcagtgtaaagatagcggcccggaagcggcagcggccgcgcgtctggaggcctttgccaacgcgaatacggaaatggtgcaggcgacgcgtactgtggtttactcgcgcgggcagcagttacaacaagaaatcgccgagcgcggacaatttttcggctggcaggcgctggtgctatttctggtgagcctggcgatggtgctactttttacccgcatgattatcgggccggtgaaaggaattgaacggatgattaatcgcctgggcgaaggccgttctttggggaataccgtcacctttaccggtccgcgtgaattacgatcggtggggcagcgcattatctggctgagtgagcgtctggcgtggctggaatcccaacgccatcagtttctacgtcacttgtcccatgagctgaaaactccgctggccagtatgcgcgaggggacagagctgctggccgatcaggtggttgggccgctgacgccggagcaaaaagaggtggtcgatattctggatgacagcagtcgtaatttacaaaaattgattgagcaattgcttgattacaaccggaaactggtagacagtgccacagagctggaagcggtcgatatcgcgccgcttgtggatatggtggtttccgcccacagtttgcctgcccgcgctaaaatgatgcataccgatgtcgacctggaggccgaacgctgcatagcagagcccatgttgctgatgagcgtgctggataatctctattccaacgctgtgcactatggcgctgaatccggtaacatttgtatccgtagtcgctctcagggctccacggtttatatcgatgtggttaatagcggcgaaccgattccgcaaaccgaaagagaaatgatttttgagccttttttccagggaagccaccagcgaaaaggggcggtaaaaggcagtgggttagggctgagtatcgccagagattgtattcgtcgaatgcagggagagatccagctggtggatgacaaagcgcaggaagtttgttttcgcatctcgctgccattgcctgcatctgacaaacactaa

SEQ ID NO: 39608 - DNA, 3888 bp, Salmonella typhi
atgatggaaattctgcgtggttcgcctgcactgtctgcattccgtatcaataaactgctggcgcgctttcaggctgccaacctccaggtccacaatatatacgctgagtatgtccattttgctgacctgaacgccccgttaaatgatagcgagcaggcgcagcttacccgtctgctgcaatacggcccggcgcttagcagccatacgctggcgggtaaactcctgttggtcacaccgcgtcctggtaccatctccccctggtcttcaaaagcaacggatatcgcccacaactgcggcctgcaacagattgaccgtctggagcgcggcgtagcgtactatatcgaggcttcgacgttgacggcggaacagtggcgacaagtggccgcagagctgcacgaccgtatgatggagacggtgttctcttctttaaccgatgcggaaaaactgtttatccaccatcagcctgcgccggtttccagtgtcgatctgctgggagaaggccgtcaggcgttaattgacgctaacctgcgtctcggtctggcgctggcggaagatgaaatcgactatttgcaggaggcgtttaccaaactgggacgcaacccgaacgatatcgaactgtacatgttcgcccaggcgaactccgagcactgccgccacaagatttttaacgccgactggattatcgacggtaaaccgcagccgaagtcgctgtttaaaatgattaaaaacaccttcgaaaccacgccggactatgtgctctctgcctataaagacaatgccgcggtgatggaaggatctgcggtggggcgctacttcgccgaccacaataccggccgttacgattttcatcaggagcccgcgcacattctgatgaaggtcgaaacgcataaccacccaaccgccatctctccgtggccgggggcggcgaccggttccggcggcgaaattcgtgatgaaggcgccaccgggcgtggcgcgaaaccaaaagccgggctggtaggcttctccgtttccaacctgcgtattccgggctttgaacagccgtgggaagaggattttggcaagccggaacgtattgtcaccgcgctggatatcatgaccgaaggtccgctgggcggcgcggcgtttaacaacgaatttggtcgcccggcgctgaccggttacttccgtacttatgaagagaaagtgaacagccacaatggcgaagagctgcgtggctatcacaagccgatcatgctggcgggcgggatcggtaatatccgcgccgatcacgtgcagaaaggcgagatcgtcgtaggcgcgaagctgatcgtccttggcggcccggcgatgaatatcggcctcggcggcggcgcggcatcgtcaatggcttccggccagtctgatgcggatctcgattttgcctctgttcagcgcgacaacccggaaatggaacgccgctgccaggaagtgatcgaccgctgctggcagttgggcgacgctaacccaatcctgtttatccatgatgtgggcgcgggcggtctctccaacgccatgccggagctggtaagcgacggcgggcgcggcgggaaattcgaactgcgcgacattcttagcgacgagccgggcatgagcccgctggaaatctggtgtaacgaatcccaggagcgctatgtgctggcggtcgcggctgaccagttaccgctgttcgatgaactgtgtaagcgcgaacgcgcgccgtatgcggtcattggcgacgctaccgaagaacagcatctctcgttgcatgataaccatttcgacaatcagccgatcgatctaccgctggatgtcctgctgggcaaaacaccgaaaatgacccgcgatgtgcaaacattgaaggcgaaaggcgatgcgctgaaccgcgcggatatcacgattgccgacgcggtaaatcgtgttctgcatctgccgaccgtggcggaaaaaaccttccttgtcactattggcgaccgtaccgtcaccggtatggtggcgcgtgaccagatggttggcccgtggcaggtcccggtagctgactgcgcggtcactaccgctagcctcgacagctactacggcgaagcgatgtcgattggcgagcgcgcgccggtggcgctgctggactttgccgcctccgcccgtctggccgtcggtgaagcgttgactaacattgccgcgacgcagattggcgatatcaagcgcattaagctttccgctaactggatggcggcagccggtcatcctggcgaagatgccggtttgtatgacgcggttaaagcggtgggagaggaactctgtccgcagcttggcctgacgattccggtgggtaaagattcgatgtcgatgaaaacccgctggcaggaaggcaacgaacagcgcgaaatgacctcgccgctgtcgctggtgatttccgcgtttgcccgcgtggaagacgtgcgtcacacccttacgccgcagctgtcaacggaagataacgccttgctgctgatcgatcttggcaagggccacaacgcgctgggcgcaacggcgttggcgcaggtctatcgtcagcttggcgacaaacccgcggacgtgcgtgacgttgcgcaactgaaaggcttctatgacgccatgcaggtgctggttgctgcgcgtaaattactggcatggcacgaccgttccgacggcggtctgctggtgacgctggccgagatggcctttgccggccactgcggcgtgcaggtcgatatcgccgcgctgggcgatgaccatctggccgcactgttcaacgaggagctgggcggcgtgattcaggtacgcgctgaagacagagacgcggtcgaaacgctgttggcgcagtacggtcttgctgactgcgtccactaccttggtcaggccctggctggcgatcgctttgtgattaccgctaatgatcggacggtattcagcgaaagccgtactacgctgcgtgtctggtgggcggaaaccacctggcagatgcagcgtctgcgcgacaatccgcaatgtgctgaccaggaacacgaggcgaaagcgaatgatgccgatccgggcctcaacgtgaagctgtcgtttgatattaatgaagatatcgccgcgccgtacattgcgacaggcgcacgaccgaaagtcgctgtactgcgcgagcagggggtgaactctcacgtggagatggcggcggcgttccatcgtgcgggctttgacgcgattgacgtccatatgagcgacctgctgggcggtcgtatcggtctgggcaacttccatgcgctggtggcttgcggcggcttttcctacggcgacgtgctgggggcgggcgaaggctgggcgaaatccattctgtttaaccatcgggtgcgcgacgaattcgaaaccttcttccatcgtccgcagacgctggcgctgggcgtgtgcaacggttgccagatgatgtcgaatctgcgcgagctgatcccgggcagcgaactgtggccgcgttttgtacgtaaccattctgaccgcttcgaagcccgcttcagcctggtggaagtgacgcaaagcccatcgctgctgctgcaaggaatggtaggctcacagatgccgattgcggtttcccatggggaagggcgcgttgaggtgcgtgacgatgcgcatcttgccgcgcttgagagcaaaggcctggtcgctctgcgctacgttgataactttggtaaggtgaccgaaacctatccggctaacccgaacggttcgccgaacggcatcacggcggtgacgaccgaaaacggtcgggtgacgattatgatgccgcatccggaacgcgtattccgcaccgtcgccaactcctggcacccggaaaactggggcgaggatagcccgtggatgcgtatcttccgtaatgcgcgtaagcagcttggttaa

SEQ ID NO: 39609 - DNA, 687 bp, Salmonella typhi
atggaaaatcaacctaagttgaatagcagtaaagaagttatcgcgtttctggccgagcgttttcctcactgttttagtgcggaaggcgaagctcgcccgctgaaaattggtatttttcaggatctggtagagcgagttgggggcgaaatgaacctcagcaaaacgcaacttcgttccgctttacgtctttatacttcaagctggcgttacctgtacggcgttaagccgggcgcaacgcgcgtcgaccttgatggcaatccgtgcggcgagctggaagaacagcatgtcgaacatgcgcgtaagcagcttgaagaagccaaagcccgtgttcaggcgcagcgcgcagagcagcaagcgaaaaaacgcgaagctgccgcggcggctggcgaaaaagaagacgcgccgcgacgcgagcgtaaacctcgcccggtagcgcgtcgtaaagaaggcgctgaacgtaaacctcgcgctgataaaccgacgacgaaagcgccgcgtgcgcctcgcgaagagaagcacacgccggtttctgatatttcagtattgaccgtagggcagtccctcaaggtgaaagcgggtaataatgcgatggatgccaccgtattagaaattaccaaagatggtgtccgtgtacagctgaattcgggtatgtctttgattgtacgcgcagaacacctggtgttctga

SEQ ID NO: 39610 - DNA, 741 bp, Salmonella typhi
atgaccaataatgccgctgcgcccctttactcgctgcgtggattacctctgattggctggcgcgacatgtcacatgcgctgaattatctgtttgccgatggtcaactgaagcaaggcacgttggtggcgatcaacgccgaaaagctgctgacggcggaagataatccggaagtccgcgcgttgatagcagcggcggaatttaaatatgccgatggcatcagcgtggtgcgttcaatacgtaaaaaatttccgcaggcgcaggtttctcgcgtggctggcgccgacctttgggaagcgttaatggcgcgcgcggggaaagaaggcacgccggtattttttgtcggcggcaagcctgaggtgctggcgcagacggaagcaaaactgcggacgcagtggaacgtcaatattgtgggtagccaggacggttactttacgccggagcagcgtcaggcgctatttgcgcgtatccatgccagcggcgcgaaaattgtcaccgtcgcgatgggatcgccaaaacaggaattactcatgcgcgattgtcgggaagtgcatccccatgcgctatatatgggggtgggcggtacctatgatgtgtttaccggtcacgtcaaacgcgccccaaaaatatggcagaacctggggctggagtggttgtatcgtctgctttcgcaaccgaagcgtattacccgccagatgcgtctgctgcgctatcttcgctggcactatactggcgatctctga

SEQ ID NO: 39611 - DNA, 1428 bp, Salmonella typhi
ttgaaaaaattaaagattaattatctgttcatcggcatattgacgctgctgctggcagcagccctttggccctcaatcccctggttcggtaaaaccgaaaaccatatcgccgcgattcaagcccggggggtactgcgcgtcagtacgatcgactcgccattaacctattccgttatcaacggtaaaaaatatggtctggactatgaactggcgcagcagttcgccaactatctcggcgtgaagctgaaagtgacggtgcgccagaatatcagccagttgtttgacgatctggataacggcaatgccgacctgctcgcggcagggctggtctacgacagcgcgcgcgttaaaaactatcagcccggccccatgtattattcggtttcgcaacagctcgtttaccgggtcggacaatatcgcccacgttcgctggcgaccgttaacgagaatcagcttaccattgcgccagggcacgtcgtggtcaatgatttacagcgtttaaaagagacaaagtttcccgacctgagctggaaggtggatgataaaaaaggctcgacgacgctgctggaagaggtcatcagcggcaaactggattacaccattgccgattcagtggcgatcagtctgtttcagcgcgtccatcccgaactggccgtggcgctggatgtcacggatgaacagcccgtgacctggtttagccgactggacgacgataatacgctctccgccgcgctgctcgattttttcaattcgatcaatgaagacgggtcgttggcgcggatcgaagagaaatatctggggcatggcgatgatttcgactacgttgatacccgctctttcctgcgagcggtggataacgtcctgccggagctggaaccgttatttaaaaaatatgccaaagagatagactggcgcctgctggcggcgatttcttatcaggaatcacactgggacccgctggcgacctcgccaaccggcgtgcgcggcctgatgatgctgactaaaaataccgcccaaagtctggggctgaccgaccgtaccgatgcggagcaaagcatcagcggcggtgctcgctatcttgaagatatgatggctaaagttcccgaaaccgttccggaagacgagcgtatctggtttgccttagccgcctacaatatgggttatgcgcacatgctcgatgccagatcgctgacggtaaaaaccaaaggcaatccggatagctggaccgatgtgaagcagcgtttgcctctgttaagccaaaaaccgtattacagtaagctaacctacggttacgcgcgtggacatgaggcttatgcttatgtggaaaatatccgtaaataccagataagtttggtggggtatttgcaggaaaaagaaaagcaggaagcggaagctatgaaactggcgcaggattacccggcggtgtag

SEQ ID NO: 39612 - DNA, 1362 bp, Salmonella typhi
atggataagacggcagcgctcgccagcgacattttacgtggtatcggcggagagcaaaatattctgcgcctggaaaactgtatgacgcgagtcagagtggaggtacaggacgacagccaactggatattccgcgcttaaaagcgttgcctggcgtcagtggatacgtaaagcaaggggagcaacatcagctgatcgttgggccggggaaggctgcacaggtggttgatgcgatgcgcgtgcagattgccgcaggtggtgtaaagccggacgatgctatggcgcgtaccaaatccgaggcgaaagcgaagtataaagcgccgatgagcgatgcgttgcgtaagctggcgaatgtttttattccgcttattcccgcctttatcgcatccggcttgattaccggcattatcaatattcttaaacgcccggatatcgtcggcgatgttgccgtccactatcctaacctgctgggcctgatggggatatttggtagcgcggtgttctctatcatgaacattctggttggcgtcaataccgcgaaagtctttggcggatcgcaggcgttaggcggcgtgatggcggggatcctttccagcccgcaactggcgcagattacgctctttggcgaggcgcttcagccgggacggggcggcgttatcgccgtcctgctggtggtggcgttaatgtgctggattgagcgccagttccgtaagctgctgccggggtcgctggagttaattcttaaccctttattgacgactgttatcaccggcgcggtagcgattgtcgctctgcaaccgcttggcggctggatttcagacgctatcgctcacggcgcgtcctgggctatcgatcgcggcggttttctggtgggcgcggtgttagccggaaccttcctgccgttggtactgatcgggctgcatcaggggctggtgcctattcatgtggagctggtgcaagcgcacggctataacgcgctgtttcccatcctggcgatggcgggggttggtcagataggcgcggccattgccgtactgatgaaaacccgcaatgcgcggctcaaaaaggtgattaaaggcgcgcttccggtcggactgctggggattggcgagccgctgatttttggcgtcacgctgccattgggtaagccatttattggcgcttgcctcggcggcgcggtaggcggggcgttgatcagctactggaaagtggcgacggtaattacctttggtatttccggtttgccgctggcattaacaattgttgccggaaaagtcctgttctatctgttaggctatttaatagcggtaattgccgggtttatttttacctggctgctggggttcaatgatccagaggagtaa

SEQ ID NO: 39613 - DNA, 894 bp, Salmonella typhi
atgaatcttggtaccttagtgtctgaaacccgtaacccgcaaacgatggatctggatgcgttgtctactcctgaattagttaagcgttttaatgaacaggatacgctggtagcggaagcagtaaaagccactctgcctgacgttgcgcgtgcggtggatgctgctgcggcggcgctgaagtctggcggacgtatcatctatatgggggcgggcaccagtggtcggcttggcgtactggatgcctcagaatgccccccgacgtttggcgttccgcacggtctggtcgtcgggctgattgccggcgggccgggcgcgttgctgaaggcggtcgaaggcgcggaagacagccaacaggcaggcgaagacgatcttgtcgcgctaaatctgcaagaacaggatctggtcgtggggctcgcggcgtcgggtcgtacaccctatgtgattggtggcctgcgctatgcgcgacagtccggttgtaccactgttgccgtctcctgtaatccagattcgcctattgcgcgggaggctaatatcgctatttcgcccgttgtcgggccggaagcgcttaccggctccacgcggctgaaatccggcaccgcgcagaaaatggtgctcaatatgatttctaccggcgcgatggtgaagttcggtaaggtctatcagaacctgatggtggatatgaaagccaccaacgtcaaactggtcgatcgcgcgtgtcggatggtcgttgaagcgaccgggataggtcgtgaagaggcggaaacgttgctgaaacagaccgattttgaggttaagcccgccattttgatggcgcttacggggctggatgctgcagccgccagggaaaaactcgccgctcatcagggctttttaagggcggcgttagaacactaa

SEQ ID NO: 39614 - DNA, 849 bp, Salmonella typhi
atgaactgtttgattcgtattcgccagcgttatccggatctcgcgcaaagcgacaggaaactggcggattatctgctcgcgcaaccggatacggcgcgacatctgagctcgcagcaactggcggccgaagcgggcgtcagccaatccagcgtagtcaagttcgcgcaaaaactggggtttaaagggtttccggcgttgaaactggctatcagcgaagcgttggccagcaatcctaatccgcattccgttcccgttcataaccagattcgcggcgacgatccgatgcgcctggtcggggaaaaattaattaaagagaatgtggcggcgatgcacgccacgctggacgttaacagtgaagaaaagctgttagaaagcgtcacgatgctgcgccacgcccgccgtattgtgatcaccggaattggcgcctctgggctggtggcgcaaaattttgcctggaagctactgaagattggcattaacgcggtggttgagcgcgatatgcacgccctgctggcgacggtgcaggcgctggcgccggaggatctgctgctggcgatctcttattccggggagcggcgcgagctgaacctggcggcggacgaaacattacgcgcaggcgcgaaaatcctggccattaccggtttttctcccaacgccttgcagcagcgcgccacccgctgtctgtatacgattgccgaagagcaggcgacgcgtagcgccgctatctcctcgacacatgcgcaaatgatgttgaccgacttactgtttatggcgctggtacaacaggatttagagcgggcgccggagcgtattcgccatagcgaggcgctggtaaaaaaactggtttga

SEQ ID NO: 39615 - DNA, 396 bp, Salmonella typhi
atggaattacagcttatgcttaaccactttttcgagcgtgtcagaaaggatgcaaatttcaacgcatttctaatcgatctggaatataataatatcgcttattacatctattttgttgctaccggtaatgtgaaaattatcactcatgcaggccatttcatttctattaaaagcaatagaaagctgattaaagtcaattcaacaccaaatacgcaattaataaaattgacttcagctaaacacttttcgggcgagcattcctatgaaaaatactgtaccgatctggcaacggcaggcgtttttaaatggattgtggaattaaacaaaaaaactcgacaatactggtcgaaagacaaccaattattatatatagaaaatgtggtcatgccgctttaa

SEQ ID NO: 39616 - DNA, 261 bp, Salmonella typhi
atggcgctgttaatcaccaaaaaatgtatcaattgcgatatgtgcgagccggagtgcccgaatgaggcgatttcaatgggcgacagcatttatgagattaacagcgacaaatgcaccgagtgtgtaggccattacgaaacgccgacctgtcagaaagtctgcccgatccccaatacgattttgcaggatcccgcccatgtcgaaaccgaagaacagttgtgggataagtttgttctgatgcatcacgcagataaattgtaa

SEQ ID NO: 39617 - DNA, 1104 bp, Salmonella typhi
gtgaagttactcaccgctttatctgagctaatcagtatttttttattcacgaccatttttatttttcttgcgcgaaaagtagccataaaaattggtttagtggataaaccaaactttcgtaaacgacatcagggcgttatcccattagtcggcgggatttctgtgtttgcaggaatctgctttatgtttggcctctcggattactacataccgcacttatcgctatatcttatttgcgctggtgtattggtttttgttggtgcgatggatgaccgttttgatatcagtgtaaaaattcgtgctgtggttcaggctgttattgcggttgtaatgatggttatcgcaaaacttcacttaggtagccttggttacatctttgggccttgggagttagtgcttggcccctttggctatttccttactctgtttgccgtatgggcggcgatcaacgctttcaatatggtggacggtattgacggactgctgggtgggttatccagcgtctcatttgcggcgatggggctgattttatggtttgatggtcagactagtctggcaatgtggtgctttgccatgatcgccgcgattctgccttacattatgcttaatctcggtattttggggcggcgttataaagtctttatgggtgatgccggtagtacactgattggctttaccgtcatctggctcttactggaaacgacgcaggggaaaactcactctatcagcccggttaccgcgctatggattatcgctattccattgatggatatggtggcgattatgtatcgccgtctgcgtaaagggatgagccccttttcccctgatcgccaacatattcatcatttggttatgcgagcagggtttacttcccgccaggcatttgttcttattacgctcgcagcggcgattctggcgggagtaggcgtaacggcagaatactctcattttgttcctgaatgggttatgttggtgctctttttgctagcattcttcctctatggctactgcattaagcgggcctggaaggtggcgagatttattaagcgtgtgaagcgtcgcctgcgcaggcaacgtaagaaccggccaaacttaaccaagtaa

SEQ ID NO: 39618 - DNA, 381 bp, Salmonella typhi
atggcgattctcggcctgggaacggatattgtagagattgcccgcattgaggcagtgatctcccgttccggcgaacgtctggcaaggcgtgtgctcagtgacaacgagtgggctatctgggagacgcatcagcagccggtgcgttttctcgccaagcgttttgcggtcaaagaggcggcagcgaaagcttttggcaccggcatccgcaacggtctggcgtttaatcagttcgaagtgtttaacgatgagctgggaaaaccacgtttgcggctgtggggcgaggcgttaacgctggcggaaaaactcggtgtggcgcacatgcatgtcacgttggccgatgaacgccattacgcctgcgctacggtcattctggaaagttag

SEQ ID NO: 39619 - DNA, 1260 bp, Salmonella typhi
atgaatcttaccgaattaaagaatacgccggtttctgagctgatcactctcggcgaaagtatggggctggaaaacctggcccgtatgcgcaagcaggacattatttttgccatcctgaagcagcacgcaaagagtggcgaagatatctttggcgacggtgtgctggagatattgcaggatggatttggtttcctccgttctgcagacagctcctacctcgccggtcctgatgatatctacgtttcccccagccaaatccgccgtttcaacctccgcactggtgataccatttctggtaagattcgcccgccgaaagaaggtgaacgctattttgcgctgttgaaagttaacgaagttaactacgacaaaccggaaaacgcccgtaacaaaatcctctttgagaacttaaccccgctgcacgcaaactctcgtctgcgtatggagcgtggtaacggttctaccgaagacttaacggcgcgcgttctggatctggcttcgccgatcggtcgcggccagcgcggtctgattgtcgcgccgccgaaggcgggtaaaaccatgctgctgcagaacatcgcgcagagcatcgcgtataaccacccagactgcgtgctgatggtgctgctgattgacgaacgtccggaagaagtaaccgagatgcagcgtctggtgaaaggcgaagtggttgcctctacctttgacgaaccggcatcccgccacgttcaggttgccgaaatggttatcgagaaggcgaaacgtctggttgaacacaagaaagacgtcatcatcctgctcgactccatcacccgtctggcgcgtgcctacaacaccgtggtgccggcttccggtaaagtactgaccggtggtgtggatgctaacgccctgcatcgtccgaagcgcttcttcggcgcggcgcgtaacgtggaagagggcggtagcctgactatcatcgcgacggcgctaatcgataccggttccaagatggacgaagttatctacgaagagtttaaaggcaccggtaacatggagctgcatctctcgcgtaagatcgctgaaaaacgtgtcttcccggctatcgactacaaccgttccggtacccgtaaagaagagctgctcaccactcaggaagagctgcagaaaatgtggatcctgcgtaaaatcatccatccgatgggtgagattgacgcgatggaattcctcattaacaaactggcgatgaccaaaactaatgacgactttttcgagatgatgaagcgctcataa

SEQ ID NO: 39620 - DNA, 906 bp, Salmonella typhi
atgagcaccgacaaaacttactgcggatttattgccatcgtcggacgtccgaacgttggcaaatccaccttgctgaacaaactgctcgggcagaagatttcgatcacttcccgtaaagcgcagaccacgcgccaccgcattgtcggtattcataccgaaggcccgtatcaggcaatctatgtcgataccccgggactgcatatggaagaaaagcgcgccattaaccgtttgatgaataaggcggcgagcagttcgattggcgacgttgagctggtgattttcgttgtagaaggcacccgttggacgccggacgacgaaatggtcctgaacaaactgcgcgatggcaaagcgccggttattctcgccgttaacaaggtggataacgtgcaggaaaaagccgatttgctgccgcacctccagttcctggcaagccagatgaactttcttgatatcgtccccatctctgctgaaacgggtatgaacgtcgataccattgccagtatcgtgcgtaaacatttaccggaagcgattcaccacttcccggaagattatatcaccgatcgctctcagcgctttatggcgtctgaaatcattcgtgaaaagctgatgcgttttctcggcgccgagctgccgtattccgttaccgttgagattgaacgttttgttaccaacgaacgcggcggctatgatatcaacgggctgatcctcgtcgagcgcgaagggcagaagaagatggtgattggcaacaaaggcgccaaaatcaaaaccattggtattgaagcgcgtaaagacatgcaggagatgtttgaagcgccggtacacctggaactgtgggtgaaagtgaaatccggctgggccgatgacgaacgcgctctgcgcagtctcggttacgtagacgatctgtga

SEQ ID NO: 39621 - DNA, 915 bp, Salmonella typhi
atgcgcaaggtgtcgatatctatattattcatgctagtttcactgacctgggggactacatggttggctatgcgaattgccgttgaaactatccctccagtgtttgcaaccggaatgaggtttatgtttgcagcaccttttttaatcatcattgcatggttaagaaaaaaaaacctgttgtttcctcccggacaacgattattccagtttgtgatttgcatcttttatttttctattcctttctcactaatgatttatggtgaaacctatgtcaactctgggcttgccgccattatctttgcgaatatgcctgtggccgttttgatagcatcggttttgtttctaaatgaaaaagcgaaactaatgcagatcgcgggcttaactatcgcaatcactgcattgacggggatacttcttgaagaaacgaatacaagtacagagagtcactggcagggtatcactgcgcttatttctgctgtgttaatccatgccataatatatacacaatgtaagaaaagaagttgtactgtctctgttatcacatttaatgcgctcccgtgccttttagctgggttgatactttctgcgacaggatggttttttgaaagaccacaagtatcaaccttctcagtacactcaatattagctaccctgtatctcggggcttttgccggagtttttggtatcctgtgctactttgcgcttcagcaaaaggctaacgccttccaggcttcgcttgtatttcttatctttccgctgattgcggtaagtctggaagactatatttatggatatgctatttcaacacactcaatgctgcttattataccattagctatcgggatatttcttactcttgtcgccagaaatatccctgtaaccagcagatgtcgggataattcatcacagaaataa

SEQ ID NO: 39622 - DNA, 2025 bp, Salmonella typhi
atgcgtttaaatcctggccaacaacacgctgtcgaattcgtcaccggaccctgcctggtgctggcaggagcgggttctggtaaaactcgcgtaattaccaataaaatcgcccacctgatccgcggatgcggctatcaggcccggcatattgcggcggtgacgtttaccaacaaggcagcgcgtgagatgaaagaacgtgtcgggcagacgctcggccgtaaggaagcgcgcggtttgatgatctccacctttcatacgctagggctggatattattaagcgcgagtacgctgcgctggggatgaaatcgaacttttcattgtttgacgataccgaccaggtcgccttgctcaaagagctgaccgaaggcctgatcgaagacgacaaggttctgttgcaacagctgatctccacgatctccaactggaaaaacgatctcaaaacgcctgcacaggcagcggcgggggcgaaaggtgaacgcgatcgtatttttgcccactgctacgggctttacgacgcccatatgaaggcatgtaacgttctcgattttgatgatttgattttgctgccgacgctgctgctgcaacgcaatgacgaggtgcgcgagcgctggcagaataaaattcgttatctgctggtggatgaatatcaggatactaacaccagccagtatgagttggttaagctgctggttgggcaacgcgcgcgctttacggtcgtaggcgatgacgatcagtctatctactcctggcgcggggcgcgtccgcaaaacctggtgttactgagccaggattttccggcgctgcaggtgattaagctggagcaaaactatcgttcttcgggccgcatcctgaaagcggcaaatattctcatcgccaacaatccgcacgtctttgaaaagcgcctcttttccgaactcggttacggcgcggaactcaaagtgttaagcgcaaacaatgaagagcatgaagctgagcgcgttaccggcgaactgattgcccatcactttgtgaacaagacccagtacaaggattacgccattctgtatcgcgggaatcatcagtcgcgggtatttgaaaaattcctcatgcagaaccgcattccgtacaaaatttccggcggcacctcatttttctcccgtccggagattaaagacttgctggcctatctgcgggtgttgaccaacccggatgatgacagcgctttcctgcgcatcgtgaatacgccaaaacgcgaaatcggtccggccactctgcaaaagctgggtgaatgggcaatgacgcgtaataaaagcctgtttaccgccagctttgatatggggcttagccagaagctgaccggacgtggttacgattcattgacgcgttttacccactggctgggggaaatccagcgtctggccgaacgtgagcctgtcgccgccgtgcgcgatctcatccacggtattgactatgaatcctggttgtacgaaacctcgccgagccccaaagcggcggaaatgcgtatgaaaaacgttaaccagctctttagctggatgactgagatgctggaaggcaacgaactcgatgagccgatgacgctcacccaggtggttacacgctttacgctgcgcgatatgatggagcgcggcgagagcgaagaagagctggatcaggtacagttgatgacgcttcatgcgtcgaaaggactggaattcctgtatgtctatatggtgggaatggaagaaggatttttgccgcatcaaagcagcattgacgaagacaatattgaggaagagcgtcggctggcctatgtcgggatcactcgtgcgcagaaagagctcacctttacattatgtaaagagcgccgtcagtatggggaactggtgcgcccggaacccagtcgcttcctgttagaactgccgcaggatgatttaatctgggagcaggagcgcaaagtggtaagcgctgaggagcgaatgcaaaaagggcaaagtcacctggctaatctgaaagccatgatggcggcaaagcgagcgaaatcgtag

SEQ ID NO: 39623 - DNA, 975 bp, Salmonella typhi
atggcgaacatgtttgccctgattctggtgatagccacactggtgacgggcattttatggtgcgttgataagtttgttttcgcgccaaaacgtcgggcgcgccaggctgccgcgcaaacggcgtcgggagatgcgctggataacgctacgctcaataaagtggcgcctaagccgggctggctggagaccggggcgtcggttttcccggttctggcgatcgttctgatcgttcgttcatttctttatgaaccctttcagatcccgtcaggctcaatgatgccgacactgcttatcggcgattttattctggtggaaaaatttgcctacggcattaaagatccgatctaccagaaaaccctgattgaaaccggtcatccaaagcgcggggatattgtggtatttaaatatccggaagatcctaagttagattacatcaaacgcgccgtcggtttgccgggcgataaaatcacttatgatccggttgcgaaagaggtgacgattcagcctggctgtagctccggtcaggcgtgcgaaaatgcgctgccggttacctactctaacgttgagccgagcgattttgtacagacctttgcccgccgtaacggcggagaagcgaccagcggtttctttgaggttccgctaaacgagacaaaagaaaacggcattcgcctgaccgaacgtaaagagacgttaggcgatgtgacccaccgcatcctgatggtgccgatagcccaggatcagttgggcatgtattaccaacagccaggacaaccgctggcgacctgggttgtaccgccggggcaatatttcatgatgggcgacaaccgcgataacagcgcggatagtcgttactggggatttgttccggaagcgaatctggtcggtaaagcggtcgctatctggatgagctttgacaagcaggaaggggagtggccgacaggcgtacgcctgagtcgtatcggcggtattcactaa

SEQ ID NO: 39624 - DNA, 1476 bp, Salmonella typhi
atggctaactactttaatacactgaatctgcgccagcagctggcgcagctgggtaaatgtcgctttatgggccgcgacgaattcgccgacggcgcgagctacctgcagggtaaaaaagtggtcatcgtcggctgtggcgctcagggtctgaaccagggcctgaacatgcgtgactccggtctggatatttcctacgccctgcgtaaagaagctattgctgagaagcgcgcctcctggcgtaaagcgaccgaaaacggcttcaaagtaggcacctacgaagagctgatcccgcaggctgacctggtggttaaccttacgccggacaaacagcactccgacgttgtacgttctgtacagccgctgatgaaagacggcgcagcgctgggttactcccacggcttcaacatcgtcgaagtgggcgagcagatccgtaaagacatcaccgtggtgatggtggcaccgaagtgtccgggcaccgaagtacgtgaagaatacaagcgtggcttcggtgtgccaacgctgatcgccgttcacccggaaaacgatccgaaaggcgaaggtatggcgattgctaaagcctgggctgcggccaccggcggtcaccgtgcgggcgtactggaatcttctttcgtggcggaagtgaaatctgacctgatgggcgagcagaccattctgtgcggtatgctgcaggccggttctctgctgtgcttcgacaagctggtggcagaaggcaccgacccggcatacgccgaaaaactgattcagttcggctgggaaaccatcaccgaagcgctgaagcagggcggcatcaccctgatgatggaccgtctgtctaacccggcgaaactgcgtgcttacgcgctgtccgaacagctgaaagagattatggcgccgctgttccagaaacacatggatgacatcatctccggcgaattctcttccggcatgatggctgactgggcgaacgacgataagaaactgctgacctggcgtgaagagaccggtaaaaccgcgttcgaaaccgcgccgcagtttgaaggtaaaatcggcgagcaggagtacttcgataaaggcgttctgatgatcgcgatggtgaaagcgggcgttgagctagcgttcgaaaccatggtcgattccggcatcatcgaagaatccgcttactacgaatcactgcacgagttgccgctgattgccaacaccatcgcccgtaagcgcctgtacgaaatgaacgtggttatctccgataccgcagaatacggtaactacctgttctcttacgcttgcgtaccgctactgaaaccgtttatggcggaattgcaaccgggcgatctgggtagtgctatcccggaaggcgcggtagacaacgcacagcttcgcgacgtgaacgacgcgattcgtagtcatgcgattgagcaggtaggtaagaaactgcgcggctatatgacggatatgaagcgtattgcggtagcgggttga

SEQ ID NO: 39625 - DNA, 1851 bp, Salmonella typhi
atgcctaagtaccgttccgccaccaccactcatggtcgtaatatggcgggtgcccgcgcgctgtggcgcgccaccggaatgaccgacagtgattttggcaaaccgattatcaccgtggtgaactcattcactcagtttgtgccgggtcacgttcatctgcgcgatctcggtaagctggtcgccgaacagattgaagcttccggcggtgtggcgaaagagttcaacactattgccgtggatgacgggatcgccatggggcacgggggtatgctctattcactgccgtcgcgcgagctgatcgccgactccgtggagtacatggtgaacgctcactgcgctgacgcgatggtgtgtatctccaactgcgacaaaatcaccccagggatgctcatggcctcgctgcgcctgaatattccggtgatctttgtctccggcggcccgatggaagccgggaaaaccaaactgtccgatcagatcatcaagctcgatctggttgatgccatgattcagggagcggacccgaaagtctctgacgatcaaagtaaccaggttgaacgctccgcctgtccaacctgcggctcctgctccggcatgtttaccgctaactccatgaattgcctgatcgaagcgctgggcctgtcgcagccgggcaacggctcgctgctggcgacccatgctgaccggaagcagttgttcctcaatgctggtaagcggattgttgaactgactaaacgctattacgagcaggatgacgaaagcgcactgccgcgtaacatcgccaacaaggcggcgtttgagaatgcgatgacgctggatattgcgatgggcggttcgaccaataccgttctgcatctactggcggcggcgcaggaagcggaaatcgacttcaccatgagtgatatcgacaagctgtcccgcaaggtgccgcagctgtgtaaagtggcgccaagtacccagaaataccatatggaagatgttcaccgtgccggcggtgtgctgggtattttaggcgagctggatcgcgccgggctgctgaaccgcaacgtgaaaaacgtattaggcctgacgctgccgcaaacgctggaacagtacgacatcacggttacgcaggacgaagcggttaaaaaaatgttccgtgctggccctgccggtatccgtactacccaggcgttctctcaggattgtcgctgggattcgctggatgacgaccgcgcagcgggttgcatccgctcgctggaatatgcctatagcaaagacggcggtctggcggtgctgtatggcaacttcgccgaaaacggctgcatcgtaaaaaccgcgggcgtggatgacagcatccttaaatttaccggtcctgtcaaagtttacgaaagccaggacgatgcggtagaggcgattctcggcggcaaagtagtggaaggcgatgtggtcgtaatccgctacgaagggccgaaaggcgggccgggaatgcaggaaatgctctatccgaccagtttcctgaagtcgatggggctgggcaaagcctgcgcgctcatcaccgatgggcgtttctccggcggtacttcgggtctttccatcggccacgtctcgccggaagcggccagcggcggcactattgcgctgattgaagatggcgacaccattgcgattgatatcccgaaccgcagcattcagttgcagttgagcgaggctgaaatcgccgcacgccgcgaggcgcaggaagctcgcggcgataaagcctggacgccgaaaaatcgtcagcgtcaggtttcgtttgccctgcgtgcctacgccagcctggcgaccagcgccgataaaggcgcggtgcgcgataaatcgaaactgggaggttga

SEQ ID NO: 39626 - DNA, 930 bp, Salmonella typhi
atgacgacgaaaaaagctgattacatttggttcaatggcgagatggtgcgctgggaagacgcgaaggttcacgtaatgtctcacgcgctgcactacggtacgtcggtatttgaagggattcggtgctacgactctcacaaaggcccggtagtgtttcgtcatcgtgaacatatgcagcgcctgcgcgactcagcaaaaatttatcgttttccggtttcccagagcattgatgagctgatggaagcctgccgcgacgtaattcgtaaaaataatctgaccagcgcctatatccgtccgttggtatttgtaggcgatgtcggtatgggcgttaacccgcccccgggatacaccactgacgtcatcatcgccgcgttcccgtggggggcatacctgggcgccgaagcgctggatcaggggatcgatgcgatggtttcttcctggaaccgcgctgcgccgaacaccattccgaccgccgccaaagcgggcgggaactatctttcctcactgctggtgggtagcgaagcgcgccgccacggctatcaggaaggcatcgccctggatgtaaacggctatatatccgaaggcgcaggcgaaaacctgtttgaggtaaaagatggcgtgctgtttactccgccgtttacctcttccgcgctgccaggcattactcgcgacgcgatcatcaaactggcgaaagagctgggtattgaagtgcgtgagcaggtgctgtcccgtgaatcgctgtatctggccgacgaagtgtttatgtccggaactgcggcagaaattactccggtacgcagcgttgatggtatccaggtaggcgaaggccgttgcggccctgttaccaagcgtatccaacaagccttctttggtctcttcactggagaaaccgaggataaatggggctggttggatccggtaaattcataa

SEQ ID NO: 39627 - DNA, 1647 bp, Salmonella typhi
atgaacggggcacagtgggtggtacatgctttgcgagcgcagggggtgaaaaccgtatttggttatcctggcggcgcaattatgccggtttacgacgcgttgtatgacggtggtgtggagcatttgttgtgccgacacgagcagggtgccgcaatggcggcaatcggttatgcccgttctaccggcaaaaccggtgtttgtatcgccacctcgggccctggcgccactaacctgatcactggcctggcggatgcgttgttagattcggtccccgttgtcgcgatcacgggtcaggtttccgccccgttcatcggcaccgatgcgttccaggaggtggatgtgttagggctgtcgctggcctgtaccaaacacagcttcctggtgcagtcgctggcagagttgccgcgcatcatggcggaggcttttgaagtcgccaacgctggccgtcccggaccagttctggtggatatcccgaaagatatccagttggccagcggtgagctagaaccctggtttactaccgtcgataacgaagcgactttcccgcaggctgatgtggaacaggcgcgccagatgctggaacaggcgaaaaaacccatgctgtacgtcggcggtggtgttggtatggcgaaggcggttccggcgctgcgtaaatttatcgcggtaacgcaaatgccagttacctgcacgctgaaaggtctgggggctgttgaagctgattatccgtactatctgggcatgctgggaatgcacggtactaaagcggctaatttcgcggtgcaagagtgtgatttactgatcgcagtgggtgcacgttttgatgaccgggtgaccggtaagctgaatacgtttgcgcctaacgccagcgtaatccatatggatatcgacccggcggaaatgaacaaactgcgtcaggcacacgtcgcgttgcagggcgatttaaattcgctgttgccggcattacagcaaccgctgaagatcgacgcatggcgtcagtcttgtgcagagctgcgcgcagaacacgcctggcgctatgaccatcctggcgagactatctatgcgccgttgttgttgaagcaattgtcggaacgcaaacccgcagacagtgtggtgacgacggatgtggggcagcatcagatgtggtcagcccagcatatgacttacacccgcccggagaacttcatcacttccagcggtctggggacgatgggattcggcttaccggcggccgttggcgcgcaggtagcgcgaccgaatgataccgttatctgtatctccggtgacggctccttcatgatgaatgttcaggagttgggcaccgtaaaacgcaagcagttaccgttgaagatagtcttactcgacaaccagcggttagggatggttcgacaatggcagcaactgtttttccaggagcgatatagcgaaaccaccctgaccgataaccccgatttcctcatgctggccagcgccttcggcattccaggccagcacattactcgtaaagaccaggttgaagcggcactcgacacgatgttggcaagcgaagggccgtacctgcttcacgtctcaatcgacgaacttgaaaatgtctggccgttggtgccgcctggcgccagtaactctgaaatgctggagaaattatcatga

SEQ ID NO: 39628 - DNA, 2574 bp, Salmonella typhi
atgcgtctggatcgtcttactaacaaattccagcttgctcttgccgatgcccagtcgctcgcgctggggcacgacaaccaattcatcgaacctcttcatttaatgagcgccttgctgaaccaggaagggggatcgatacgtcctttattaacctccgccggcattaatgctggccagttgcgcactgctatcgatcaggcgctgagccgtttaccgcaggtggaaggcaccggcggcgacgtacagccttcttcggaactggtacgcgtactgaacctttgcgacaagctggcgcaaaaacggggggacaattttatttcgtcagagctgtttgttctggcggcgcttgagtctcgcggcacgttaaccgatctgctgaaatcagccggtgcgactacggccaatatcactcaggcaattgaacagatgcgcggaggtgaaagcgtgaacgatcaaggggctgaagaccaacgtcaggccttgaaaaaatataccgtcgatctgaccgagcgggctgaacaaggtaagcttgacccggtaattggtcgtgatgaagaaattcgccgtaccattcaggtattgcaacgtcgtactaaaaacaacccggtgttaatcggtgagccaggcgtaggtaaaaccgccattgttgaagggctggcgcaacgtattatcaacggtgaagtaccggaaggcctgaaaggccgtcgcgtgctggcgctggatatgggcgcgctggtggccggggcgaaatatcgcggcgaatttgaagagcgtctgaaaggcgtgctgaacgacctcgcaaaacaggaaggcaacgtcatcctgtttatcgacgagctgcacaccatggttggcgcaggtaaagctgatggcgccatggatgccggtaacatgctgaaaccggcgctggcacgtggggaactgcactgtgtgggcgccaccacgctggacgaatatcgtcagtacatcgaaaaagacgcggcgctggaacgtcgattccagaaagtgttcgtggcagagccgtcggtggaagacaccattgcgattttgcgtggtctgaaagagcgttatgaactgcatcaccatgtgcagatcactgacccggcgattgtggcggcggcaacattatctcaccgctatatcgccgaccgtcagttaccggataaagctatcgacctcatcgatgaagcggcatccagcattcgtatgcagattgactcgaagccggaggagctggacaggctcgaccgccgcattattcagctcaaactggaacagcaggcgttgatgaaagagtctgacgaggcgagtaaaaaacgtctcgatatgctgaatgaagaactggacgataaagagcgtcagtactctgagttagaagaagagtggaaagcggaaaaagcgtcgctctctggtacgcaaactattaaagcggagctggagcaggcgaagatcgccatcgagcaggcgcgtcgcgttggcgacctcgcgcgaatgtctgaactgcagtacggcaaaattccggagctggaaaaacagctggaagccgcgacccagtcggaaggtaaaaccatgcgtctgttacgtaacaaagtaacggatgcggaaattgccgaagtgctggcgcgctggaccggtattccggtttccagaatgctggaaggcgaacgtgaaaaactgttgcgtatggaacaagagttacacagccgtgtgatcgggcagaatgaagccgttgaagcagtatcgaacgccatacgccgtagccgcgcggggctgtccgatccgaaccgtccgattggttccttcctgttccttgggccgaccggggtcggtaaaaccgaactgtgtaaagcgctggctaactttatgttcgacagcgacgacgcgatggtgcgtatcgacatgtctgagtttatggagaaacactccgtgtctcgtttggtcggggcgcctccaggatatgtcggctatgaagaaggcggttatttgacggaagcggtgcgccgtcgcccttattccgtcatcttgttggatgaagtggaaaaagcgcatccggatgtattcaacattctgttgcaggtgctggacgacggtcgactgactgacgggcaggggagaacggtcgacttccgtaatacggtggtcattatgacttctaacctcggttccgatctcattcaggagcgctttggcgaactggattacggtcgaatgaaagagatggtgctgggtgtggttagccaaaacttccgtccggaatttatcaaccgtattgatgaagttgtggtattccatccgttaggtgagcaacacatcgcttctattgctcagatccagctgcagcgtctgtacaaacgtctggaagaacgtggttatgaaatccatatctccgacgaggcgctgaaactgttgagcgccaacggttacgatccggtctacggggcgcgtccgttaaaacgtgctattcaacagcagatcgaaaacccactggcgcagcaaatcctgtctggtgaactggttcctggcaaagtgattcgccttgaagccaatgatgatcgtattgtggcagtgcagtaa

SEQ ID NO: 39629 - DNA, 423 bp, Salmonella typhi
atgaaaatcaggcatgagcacatcgaatcagtgttgttagccctggcagccgaaaaagggcaggcgtgggtcgctaacgcaattactgaagaatatctgcgccaggggggcggcgaattgccccttgtaccaggcaaggactggaacaatcagcagaatatctatcaccgttggttgaaaggtgaaacgaaagcgcaaagggaaaaaattcagaaactgatccctgcggttctggcaattcttccgcgcgagctgcgtcaccgactctgcatcttcgataccctggaacgccgtgcattactggcggcgcaggaagcgttgagtacggcaattgatgcgcatgatgatgcagtccaggccgtttaccggaaagcacatttcagcggtggtgggtcgcccggcgattctgtcgtagtgcattga

SEQ ID NO: 39630 - DNA, 348 bp, Salmonella typhi
atgagcaacattattaagcaacttgaacaagagcagatgaagcagaacgtaccttccttccgtccgggcgataccgtggaagtgaaagtatgggttgttgaaggtaccaagaaacgtctgcaggcattcgagggcgtggttatcgctattcgtaaccgcggtctgcactctgcattcactgttcgtaaaatttccaacggcgaaggcgttgagcgtgtcttccagactcactctccggtagttgacagcattgctgttaaacgtcgtggtgctgttcgtaaagctaaactgtactacctgcgtgagcgtactggtaaagcagctcgtatcaaagagcgtcttaactaa

SEQ ID NO: 39631 - DNA, 768 bp, Salmonella typhi
gtgtttattggcatcgttagcctgtttcctgaaatgttccgcgcaattaccgattacggggtaactggccgggcagtaaaaaaaggcctgctgaacatccaaagctggagtcctcgcgacttcgcgcatgaccggcaccgtaccgtggacgaccgtccttacggcggcggaccggggatgttaatgatggtgcaacccttgcgggacgccattcatgcagcaaaagccgcggcaggtgaaggcgctaaagtgatttatctgtcgcctcagggacgcaagcttgatcaagcgggcgttagcgagctggccacgaatcagaaactcattctggtgtgtggtcgctacgaaggcgtagatgagcgcgtaattcaggccgaaattgacgaagaatggtcaattggcgattacgttctcagcggtggcgaactaccggcaatgacgctgattgactccgtcgcccggtttataccgggggttctggggcatgaggcatcagcaatcgaagattcgtttgctgatgggttgctggattgtccgcactatacgcgccctgaagtgttagaggggatggaagtaccgccagtattgctgtcgggaaaccatgctgagatacgtcgctggcgtttgaaacagtcactgggccgaacctggcttagaagacctgaacttctggaaaacctggctctgactgaagagcaagcaaggttgctggcggagttcaaaacagaacacgcacaacagcagcataaacatgatgggatggcatag

SEQ ID NO: 39632 - DNA, 549 bp, Salmonella typhi
atgagcaagcaactcgccgcacaagtacccgctgaaccggttgtactggggaaaatgggttcttcatacggtatccgtggttggctcagagtgttttcctccactgaagacgccgaaagcatttttgactatcagccctggtttatccagaaggcgggtcagtggcagcaggtacagctggaaagctggaagcaccacaatcaggatctgatcatcaagctgaaaggcgttgacgatcgagatgccgcgaatcttctgaccaattgcgaaattgtcgtggattcctcgcaacttcctgcgcttgaggagggagactactactggaaagacctgatgggttgccaggtagtcaccgctgaaggctacgatctcggtaaagttatcgacatgatggaaaccgggtcgaatgacgttctcgtcattaaggcgaacctgaaagatgcatttggtatcaaggaacgactagtaccgttcctcgatgggcaggttatcaagaaagtcgatctcgctactcgtactatcgaagtagactgggatcctggtttttaa

SEQ ID NO: 39633 - DNA, 249 bp, Salmonella typhi
atggtaactattcgtttagctcgtcacggcgctaaaaagcgtccgttctaccaggttgttgtcaccgacagccgtaatgcacgcaacggtcgcttcattgagcgcgttggtttcttcaacccaatcgctagcgaaaaagaagaaggcacccgcctggatctggatcgcatcgctcactgggttggccagggcgcaaccatttccgatcgcgttgcggcgctgatcaaagaagtaaaaaaagcagcttaa

SEQ ID NO: 39634 - DNA, 1362 bp, Salmonella typhi
atgtttgataatttaaccgatcgtttgtcgcgcacgctgcgcaatatcagtggccgtgggcgccttactgaagacaacgttaaagagacgctgcgcgaagtgcgcatggcgctgctggaggctgacgttgcgctgccggtagtgcgtgagttcatcaatcgcgtaaaagagaaagcggttggtcatgaagttaacaaaagcctgaccccagggcaggagttcgtcaagattgtccgtagcgaactggttgcggcaatgggcgaagaaaaccagaccctgaatctggctgcgcagccgccagccgtagtattgatggcgggtctgcagggggcgggtaaaaccaccagcgtcggtaagttgggtaaattcttgcgcgagaagcacaagaagaaagtgctggtcgtctctgccgacgtctatcgcccggcggcgatcaaacagctcgaaacgctggctgagcaggttggcgtggatttcttcccgtctgatgtcggccagaaaccggttgatatcgtcaacgccgcgctgaaagaagcgaagctcaaattctacgacgtgctgctggtggataccgccggtcgtctgcacgttgacgaagcgatgatggacgaaatcaaacaggtccacgcttctatcaagccagtagaaacgctgtttgtcgtcgatgcgatgaccggtcaggatgcggcgaataccgcaaaagcctttaacgaagcgctgccgttaaccggtgtggtgctgaccaaagttgatggtgatgcgcgtggcggtgcggcgctctctattcgtcatatcaccggcaagccgattaaattcctcggtgtcggcgagaaaaccgacgcgctggagccgttccacccggatcgtatcgcctcgcgtattctcggcatgggcgacgtactgtctcttatcgaagatatcgaaagcaaagttgaccgcgcacaggctgagaagctggcgaccaaactgaagaaaggcgacggtttcgacctgaacgacttcctggagcagctcaaacagatgaaaaacatgggcggtatggccagtctgatgggcaaattaccgggcatggggcagattccggacaacgttaaatcgcagatggatgataaggtgctggtgcgtatggaggcgatcatcaattcgatgacgctgaaagaacgcgcgaagccggaaatcattaaaggttcccgcaagcgtcgtatcgcgcagggctgtgggatgcaggtgcaggacgttaaccgccttctgaaacagttcgacgacatgcagcgcatgatgaagaaaatgaagaagggcgggatggcgaagatgatgcggagtatgaaggggatgatgccgcctggttttccaggccgctaa

SEQ ID NO: 39635 - DNA, 792 bp, Salmonella typhi
atgcccgtttttgctttacttgcccttgtcgcctactccttcagcctcgcgctgatcgttcccggactgttgcaaaaaaacagcggctggcggcgtatggctattctttctgcggtcatcgcgctggtgtgccatgctgtcgcgctggaatcgcgtattctgcccggcggcgacagtggacaaaacctgagcctgctgaatgtcggttcgctggtcagcctgatgatctgcacggtgatgaccattgtcgcgtcgcgtaatcgcggctggctacttctgcccattgtctatgcttttgcgctgattaacctggccttcgccacgttcatgcctaatgaatatattacgcatctggaagcgaccccaggcatgatggtgcacatcggtctgtcgcttttctcttacgcgacgctgataatcgccgcgctgtatgcgctacaactggcgtggatcgactatcagttgaagaacaaaaagctggcgtttagtaatgaaatgccgccattgatgagcattgagcgcaaaatgtttcatatcacgcagattggcgtcgtactgctgacccttactctgtgtaccggcctgttttacatgcataacctgttcagtactgaaaatattgataaagccgtgctctctatcgtggcatggtttgtctatatcgttctgctgtgggggcattaccatgaaggctggcggggtcgtcgggtcgtgtggtttaacgtcgcaggcgcgggtattctgacgctggcctattttggtagccgcatattacagcaatttgtaagctaa

SEQ ID NO: 39636 - DNA, 879 bp, Salmonella typhi
atgaataatcatttcaagtgtatcggcattgtggggcatccgcgtcatcccaccgcactcacgacacatgaaatgctctaccgttggctatgcgatcagggttatgaggtcattgtggagcaacaaatcgcccacgaattacagctaaaaaatgtgccaaccggcacgctggcggaaattggtcaacaggcggatctggcggtagttgtgggcggcgacggcaatatgcttggcgcagcgcgtacgctggcgcgttatgacatcaatgtgattggcattaaccgcggtaatcttggcttcctgaccgatctcgatccggacaacgccctgcaacaattatcggatgtgctggaaggacgctatatctccgaaaaacgttttctgctggaagcgcaggtctgccaacaggaccgccagaagcgtatcagcacagccattaatgaagtggtgctgcatccgggaaaagtggcgcatatgatcgaattcgaggtttatattgatgaaaccttcgctttttcacagcgatctgatggtctgatcatttctacgccgaccggctccaccgcctattcgctctccgcaggcggccctattctgaccccttcactggatgccatcaccctggtgccgatgttcccgcataccttgtcggcgcgcccgttagtcattaacagcagtagcacgattcgtctgcgtttttcgcatcgccgtagcgatctggaaattagctgcgacagtcagatagcgctgcctattcaggaaggagaagatgtgctgattcgccgctgcgactaccatctcaacctgatacatcccaaagactatagctatttcaatacattaagcacaaaactcggctggtcaaaaaaattattctaa

SEQ ID NO: 39637 - DNA, 699 bp, Salmonella typhi
atgttgcggattatagacacggaaacctgcgggctgcagggcgggatcgtagagatagcctctgtagatgtcattgatggcaacattgtcaatcccatgagtcacctgatacgccccgatcgccctattacgccgcaggcgatggcgatacaccgtattaccgaagccatggtcgccgataagccgtggattgaagatgtcataccgctttattacggtagtgagtggtatgtcgctcacaatgccagtttcgacagacgcgtattacctgaattgccgggtgagtggatctgtaccatgaagttgtcgcgacgcctgtggccgggaataaaatacagcaatatggcgctctataaatcgcgcaaactaagcgtacaaacgccgccggggctgcaccatcaccgggcgctttatgattgctatatcaccgccgccttgctgattgatattatgcgaaccaccggctggaccgcggaagagatggtcaatatcacgggccgtcctgcgctgttaaccactttcccgttcggtaaataccgcggtaaggcggtatctgaagtcgcaaaacgcgatccgggctatttacgctggctttttaataaccttgataatatgagcccggaacttcgcctgacgcttaaacactacctggaagatgttcaggctggcgagcaacgcagcaatggaacaccacaataa

SEQ ID NO: 39638 - DNA, 1476 bp, Salmonella typhi
atggcggtaacgcaaacagcccaggcatgtgacctggtcattttcggcgcgaaaggcgacctggcgcgccggaaactgctgccttccctgtatcagcttgagaaagccggccagatccatccggatacccggatcattggggtggggcgcgcggactgggataaagaagcttatacccacgttgtgcgtgaggcgctggaaaccttcatgaaggaaaaaattgatgaaggcttgtgggatacgctgagcggccgtctggatttttgtaatcttgacgttaacgatacgcctgcgttcagtcgcctgggcgatatgctggatcaaaaaaaccgcaccaccattaactattttgcgatgccgcccagcacgtttggcgctatttgcaaagggttaggggaggctaaactcaacgccaaaccggcgcgtgtcgtgatggagaaaccgttgggtacttcgctggcgacctcgcgtgagattaacgatcgggtcggcgaatactttgaagagtgccaagtatatcgtatcgaccactatctgggcaaagaaacggttctcaacctgctggcgctgcgttttgccaactcgttattcgttaataactgggataaccgcactatcgatcacgttgagattaccgtagcggaagaggtggggattgaagggcgctggggatattttgaccaggccggtcagatgcgcgatatgatccagaaccacttgctgcaaattctctgcatgattgccatgtcaccgccgtctgacctgagcgccgacagtattcgcgatgaaaaagtaaaagtgttgaaatcgttgcgccgtattgatcgctccaacgtgcgtgaaaaaacggttcgtggtcaatacaccgcgggctttgcgcagggtcaaaaggtgccgggctatctggaagaagagggcgcgaataaaagcagcaacaccgaaactttcgtcgcgatccgcgtcgacatcgataactggcgttgggcgggcgtgccattctatctgcgcaccggcaagcgtctgccaactaagtgctctgaagtcgtggtttatttcaagacgcctgaactgaatctctttaaagagtcctggcaagacctgccgcagaacaaattgacgattcgcctgcagccggatgaaggcgtagatattcaggtacttaacaaagtaccgaggctggatcataagcataatctgcaaatcacgaagcttgatctgagctactccgagacctttaatcagacgcacctggcggatgcatatgagcgcctgctgctggaaacgatgcgtggcattcaggcgctgtttgtccgccgtgacgaagtggaagaagcctggaagtgggtggactccattaccgaagcatgggcgatggacaacgacgcgccgaagccgtatcaggcgggcacctggggaccggtagcgtccgtggcgatgattacccgtgacggtcgttcgtggaatgagtttgagtaa

SEQ ID NO: 39639 - DNA, 1443 bp, Salmonella typhi
atgtccagaaggcttcgcagaaccaaaatcgttaccacgttaggcccggcaactgaccgcgataacaaccttgagaaggttatcgccgcgggcgcaaacgtagtacgtatgaacttctctcacggctcgccggaagatcataaaatgcgtgctgataaagtccgtgagattgccgccaaattggggcgtcatgtggctattttaggcgacctgcaagggccaaaaattcgcgtttccacttttaaagaaggcaaagtgttcctcaatatcggggacaaatttctgttagacgctaacctgggtaaaggcgaaggcgataaagaaaaagtcggcattgattacaaagggttgccggcagacgtcgttcctggcgatatcctgctgcttgacgatggtcgagtgcagttgaaagtgcttgaagtccagggcatgaaagtctttaccgaggtcaccgtcggcggcccgctgtctaacaataaaggcattaacaagctcggcggcgggctttctgctgaagcgctgaccgaaaaagataaagccgatattcaaaccgctgcgctgataggcgttgactatctggcagtctccttcccgcgctgcggcgaagatctgaactatgcacgccgcctggcgcgcgacgccggctgtgacgcgaaaattgtggctaaagtcgaacgcgccgaagcggtatgcgatcaaaacgctatggacgatatcattctggcctctgacgttgtgatggtcgcacgtggcaacctgggcgttgaaatcggcgatccggagctggttggtatccagaaggcgctgattcgccgtgcgcgtcagctaaaccgcgcagtcatcaccgcaacgcagatgatggagtcgatgatcaccaacccgatgccgacccgtgcggaagtgatggacgtggcgaacgccgtcctggatggcacggatgcagttatgctgtctgccgaaaccgcagccggtcagtatccttctgaaaccgttgccgcaatggcgcgcgtctgtctgggcgcagaaaaaatccccagcatcaatgtgtctaaacaccgtctcgacgtgcagttcgacaatgttgaagaagccattgccatgtctgcgatgtatgcggcaaaccatctgaaaggcgttaccgcgatcatcaccatgacggaatccggtcgtaccgcgctaatgacttcccgtatcagctccggcctgccgattttcgccatgtcgcgccatgaacgcacgctgaacctgaccgcgctctaccgcggagtaacgccggtgcattttgatagcgcggctgatggcgttgtcgcggcgcatgaagctgttaatctgctgcgcgataaagggtatctggtttccggtgacctggttatcgtgacccagggcgatgtcatgagcaccgtcggttcaaccaataccacgcgtattttgaccgttgagtaa

SEQ ID NO: 39640 - DNA, 1320 bp, Salmonella typhi
gtgcaacagatagccggctctgtcgccctggcatttaataatctgccccgaccccaccgcgttatgctggggtcacttaccgttctgacactggccgtcgccgtatggcggccctatgtttaccacccagaatccgcaccaatcgttaaaactattgaactggagaaaagcgagattcgttccctcttaccggaggccagcgaacccatcgatcaggccgcgcaggaagatgaagctattcctcaggatgagctggacgataaaaccgcaggcgaagtcggcgtccatgaatacgtcgtctccacaggcgatacgttaagcagtattctgaatcagtacggcatcgatatgagcgatattagccgacttgccgcttctgataaggagctgcgcaatctgaaaattggccaacagctttcctggacactgaccgccgatggcgatttacagcgtctgacatgggaagtctcccgccgtgaaacgcgtacctacgatcgcactgccaacggttttaaaatgagcagtgaaatgcagcagggggactgggtcaacagtctgctgaaaggcacggtagggggcagctttgtcgccagcgcgaaagaggctggtttaaccagcagcgaaatcagcgcagtgataaaagcaatgcagtggcagatggattttcggaagctgaaaaagggcgatgaattttcggttctgatgtcgcgtgagatgctggatggcaagcgtgaacagagtcagttgttgggcgtgcgtatgcgttccgatggtaaagattactacgccattcgcgccgctgacggtaaattctatgaccgtaacggtgttggcctggcgaaaggctttttacgcttcccgaccgccaaacagttccgcatctcctccaacttcaatccgcgtcgtctgaacccggttaccggacgcgttgcgccgcatcgtggcgttgactttgcgatgccgcagggtacgccggtgctgtcggtgggggatggcgaggtcgtggttgctaaacgtagcggcgctgccggttactacattgcgattcgtcatggacgcacctacaccacacgttacatgcacttgcgtaagctgctggtgaaaccggggcaaaaagtgaaacgtggcgatcgtattgcgctttctggtaacaccgggcgttccacagggccgcatctgcattatgaggtatggatcaaccagcaagccgttaaccctctgacagcaaaattgccgcgcacggaaggtctgacggggtcagatcgtcgtgaatacctggcacaggtgaaagagattctgccgcaactgcgcttcgattaa

SEQ ID NO: 39641 - DNA, 600 bp, Salmonella typhi
atgaaaaaacattatcctgtccaatatgaaaccggggatatcgtctttacctgtataggtgccgcgcttttcggccagatatccaccgcttcacagtgctggagcaaccatgttgggattattattggtcataatggtgatgactatctggtggcggaaagtcgcgtccccctctcaaccgtcaccacgctgtcactgtttatacaacgttcagccggacaacgttacgcggttcgtcgcctgtgcggcggcctgacggtcgagcagaaactcgccatcatggagcaggttcccgcccggctgaataagttttatcacacggggtttaaatacgagtcatcgcgccagttctgctcgaaatttgtgtttgatatctataaagaagcattgtgtattccggtaggcgatattgagacattcgaagaattacttcacagcaatcctgatgcgaaactcaccttctggaaattctggtttttaggttcaatcccgtgggatcgtaagacggtgacgcccgccagcctgtggcaacatcccaatttagaattaattagcgcctgtggaattgaaaaccctcaacgcgaggctgagggagaataa

SEQ ID NO: 39642 - DNA, 1773 bp, Salmonella typhi
atgcgtacagaatattgcggacagctacgtctgtcccacgtggggcagcaggtgactctgtgtggttgggtcaaccgtcgtcgtgatcttggcagcctgatctttatcgatatgcgcgaccgcgaaggtattgtgcaggtgttcttcgatccggatcgtgcggacgcgttaaagctggcctctgaactgcgtaatgagttctgcattcaggttacgggcaccgtgcgtgcgcgtgacgcgaaaaacgtcaatgcggatatggcgaccggcgaaattgaagtgctggcgtcctctctcactatcatcaaccgcgcagactcactgccgcttgacgctaaccacgttaataccgaagaggcgcgtctcaagtaccgctatctggatttgcgtcgtccggaaatggcgcagcgcctgaaaactcgcgccaaaattaccagcctggtgcgtcgttttatggacgatcacggtttccttgatattgaaaccccgatgctgaccaaagcgaccccggaaggcgcgcgcgattacctggtaccgtcccgcgtacacaaaggtaaattctatgcgttgccgcagtcgccgcagctgttcaaacagctcctgatgatgtccggtttcgaccgttactatcagatagtcaaatgcttccgtgatgaagacttacgtgctgaccgtcagccggagtttactcagatcgacgtcgagacctccttcatgaccgcgccacaggtgcgcgaagtgatggaagcgctggtgcgccatttgtggctggaagtgaaaggcgtggatctgggggatttcccggtcatgacgtttgccgaagcggaacgtcgctacggttccgacaagccagacctgcgtaacccgatggagctggtagatgtcgctgacctgctgaaatcggtagagttcgcggtcttcgcgggcccggctaacgatccgaaaggccgcgtggcagcgctgcgtgtgcctggcggcgcacagcttagccgtaagcagatcgacgattacggtaactttgttaagatctacggcgcgaaaggactggcatatatcaaagttaacgagcgcgcgaaaggtctggacgggattaacagtccggtggccaagttcctgaccgccgacatcgtcgaggctatccttgaacgtaccggcgcgcaggacggcgacatgatcttcttcggcgcagataacaaaaaagtggttgccgatgcgctgggcgcgctgcgtctgaaactgggcaaagacctgagcctgaccgacgaagacaaatgggcgccgctgtgggtgattgacttcccgatgttcgaagacgacggcgaaggcggtctgaccgcgatgcaccatccgttcaccgccccgcgtgacatgacggcgtctgaactgaaaactgccccggaagaagccgtcgctaacgcttacgatatggtgattaacggctatgaagtgggtggcggttcggtgcgtattcacaacggtgaaatgcagcaaaccgtatttggtattctcggtatcaatgagcaggagcagcgcgagaagttcggcttcctgttggatgcgttgaaatacggtacgccgccgcacgtgggcctggcgtttggtctggaccgtctgaccatgctgttgaccggcaccgacaatattcgtgatgttatcgccttcccgaaaacgaccgccgccgcgtgtctgatgactgaagcgccgagtttcgccaaccaggcagcgttgacggagttggggattcaggttgtgaagaaagccgagaataactga

SEQ ID NO: 39643 - DNA, 567 bp, Salmonella typhi
atgctgaaactcaacgcgaccacaaccgccctggtggttattgatttacaggaaggaattcttccgtttgccggcggcccgtatacggcaaatgaggtggtcgcccgcgccgcgcggctggcggaaaagtgtcgcgccaacggctcgcccgtggttatggtacgcgttggatggtctgatgattatgccgaagcgttaaaacagccggtggatgccgcaacgcctgcgcacgcgttgccggaaaactggtggacctggcctacggcattgggtaaaaaggacagcgatctggaagtgactaaacgccagtggggcgcgttttacggcaccgacctggaattacagcttcgccgccggggtatcgacaccatcatattgtgcggaatctcaaccaatatcggcgtcgaatccacagcgcgtaacgcctgggagttgggatttaaccttattattgccgaagatgcctgtagcgccgccagcagtgagcagcatcagagcagtatgacgcatattttcccgcgcattggccgggtacgcagcgtagaggatattttaaacgccttatga

SEQ ID NO: 39644 - DNA, 1080 bp, Salmonella typhi
atgcaagcggcaacagtcgtcattaaccgccgcgctctgcgacacaacctgcaacgtctgcgtgaactggcgcctgccagtaagctggttgcggtggtgaaagcgaacgcttatggacacggtcttctggagaccgcgcgaacgctccctgatgctgatgcttttggcgtggcgcgtcttgaagaggctctacgtctgcgagcgggcgggattacgcagcctatcctgctgctggagggttttttcgacgccgccgatttgcctaccatttccgcgcaatgtctgcataccgccgtacataatcaggagcagcttgccgccctggaggcggtggagctggcggagccggtaacggtctggatgaagctggataccggtatgcatcgtctcggcgtgcgtcccgaagaggcggaggcgttctaccagcgtctgacgcactgtaaaaatgtacgccagccggtgaatatcgtcagccattttgcccgtgcggatgagccggaatgcggcgctaccgaacatcagctcgacatttttaatgccttctgtcagggtaaacccggtcagcgctctattgccgcgtctggcggtatcctgctgtggccgcagtctcactttgactgggcgcgtccgggcatcattttgtatggcgtatcgccgctggagcacaaaccttgggggccggattttggttttcagccggtgatgtccttaacttccagtttgatcgcggtgcgtgaccacaaagcgggcgaaccggtgggctacggcgggacatgggtgagtgagcgcgacacgcgcctgggcgtggtggcgatgggttatggcgatggctacccacgagcggcgccttccggtacgccagtactggtcaatggtcgtgaagtcccgattgtcgggcgggtggcgatggatatgatttgcgtggatttggggccaaacgcgcaggataacgcgggcgatccggtggtcttatggggtgaaggtctgccggttgaacgtatcgctgaaatgacaaaagtaagtgcttacgaacttattacgcgcctgacctcaagggtggcaatgaagtatattgattaa

SEQ ID NO: 39645 - DNA, 2826 bp, Salmonella typhi
atggataagatcgaagttcggggcgcccgcacccataatctcaaaaatattaacctcgtcatcccccgcgacaaactgattgtcgtgaccgggctttcgggttcaggcaaatcctcactggctttcgacactctgtatgccgaagggcagcgtcgttacgttgaatcgctctccgcttacgcgcggcagtttttgtcgctcatggaaaaaccggatgtcgaccatattgaggggctatcgcccgcgatctcaattgaacagaaatcgacatcgcacaacccgcgctctacggtgggtactattaccgagatccacgactacctgcgcctgctgtttgcccgcgtgggcgagccgcgttgtccggaccatgacgtgccgctggcggcgcaaaccgttagccagatggtcgataacgtgctgtcgcagccggaaggcaaacgcctgatgctgctggcgccgattattaaagagcgtaaaggcgaacacaccaaaacgctggaaaatctggcaagccagggttacattcgcgcccgtattgacggcgaagtctgcgatctctccgatccgccgaagctggagctacaaaagaaacataccattgaggtggtgatcgatcgcttcaaagttcgtaacgatctttcccaacgcctggcggagtcgttcgaaacggcgctggaattatccggcggcacggcggttgttgccgatatggacgatgagaaagcggaggagcttctgttctccgccaattttgcctgcccgatttgcggctacagtatgcgcgagctggaaccgcgtctgttctcgttcaacaacccggcaggcgcctgtccgacctgtgacgggctcggcgttcagcaatatttcgatccggaccgcgtgatccagaatcccgacctgtcgctggcaggcggcgcgattcgtggttgggatcgtcgcaatttttactactttcaaatgctcaagtcgctggcggaacactataagttcgacgtggatgcgccgtgggcaagcctcagcgccaacgtacacaaagtcgtgctgtacggttccggcaaagagaacatcgaatttaaatatatgaacgatcgcggcgatacctccgtgcgccgccatccgttcgaaggcgtgctgcataatatggagcgccgttataaagagacggaatccagcgcggtgcgcgaagagctggcgaaattcatcagtaatcgcccctgcgccagctgtgaaggaacgcgactgaatcgcgaagcgcgccatgtatttgtggaaaatacgccgctgcctgctatttccgatatgagcattggccatgcgatggattttttcactaatctcaagctttccgggcaacgggcgaaaatcgccgaaaaagtgctaaaagagatcggcgatcgcctcaagtttctggtgaacgtcggcctgaactatctcacgctctcccgctcggcagagacgctttccggcggcgaagcccagcgtattcgtctggcgagccagataggcgccgggttagtcggcgtgatgtatgtgctggatgaaccgtccatcggtctgcaccagcgcgataacgaacggctgctgggtacgctgattcatctgcgcaatcttggcaataccgtgattgtggtggaacacgatgaagacgccatccgcgccgccgaccatgtgattgatattggccccggcgcgggcgttcacggcggcgaggtggtggcggaaggcccgctggaagccattatggcggtaccggaatcgctgaccggccagtacatgagcggtaaacgcaaaattgaagtgccgaaacaacgcgtgccggcaaatccagaaaaagtgctcaaactcaccggcgcgcgcggcaacaacctgaaagatgtgacccttacgctaccggtagggctgtttacctgtatcaccggcgtctcgggttccggtaaatcgacgctgattaacgatacgctgttccccatcgcccagcgtcagttaaacggggcgactatcgccgaaccggcgccgtatcgggatattcaggggctggaacatttcgataaagtgatcgatatcgaccagagcccgatcgggcgcaccccgcgttccaacccggcgacctatacgggcgtctttaccccggttcgtgagctttttgctggcgtgccggagtctcgctcgcgcggctacacgccagggcgattcagcttcaacgtgcgcggcggtcgctgcgaagcgtgccagggcgatggcgtcattaaagtcgaaatgcactttctgccggatatttacgtgccgtgcgaccagtgcaaaggcaagcgctataaccgggaaacgctggagattaagtacaaaggcaagaccatccacgaagtgctggatatgaccattgaagaagcgcgtgagttctttgatgcggttccggcgctggcgcgtaagctgcagacgctgatggacgtggggctgacctatatccgtcttggtcagtcggcgacgacgctttccggcggcgaggcccagcgcgtgaagctggcgcgcgaactgtcgaaacgtggcaccgggcagacgctgtatattctcgacgagccgaccaccggcctgcactttgccgatattcagcagttgcttgacgtgctgcatcagttgcgcgatcagggcaacaccatcgtggtgatcgaacacaacctggacgtcattaaaacggcggactggattgtcgacctcggcccggaaggcggcagcggcggcggcgaaattctcgtcgccggtacgccggaaaccgtggcggagtgcgaggcgtcgcataccgcccgcttccttaaacctatgctcaaataa

SEQ ID NO: 39646 - DNA, 531 bp, Salmonella typhi
atggccagcagaggcgtaaacaaggtgattctcgttggtaatctgggccaggacccggaagtacgctatatgccgagtggcggtgctgtcgccaacttaacgctggctacttctgaatcctggcgcgataagcagaccggcgaaatgaaagagcagactgaatggcaccgggtggtgatgttcggcaaactggcggaagtggccggcgaatatctgcgtaaaggttctcaggtgtatatcgaaggtcaattgcgtacccgcaagtggaccgatcagagtggccaggaacgctatacgactgaaattaacgttccgcagatcggcggcgtgatgcagatgctgggtggtcgccagggcggcggcgcaccggcaggcggtcagcagcaggggggttggggtcagccgcaacaacctcagcagccgcagggcggtaaccagttcagcggcggcgcgcagtcgcgtccacagcaatccgcgccagcgccgtctaacgaaccgccaatggattttgacgacgacattccgttctga

SEQ ID NO: 39647 - DNA, 1059 bp, Salmonella typhi
atgctggagcttaatttttcccagacgctgggaacgcactgtttaaccctcaacgaaacgctgccagccagtgggatcacggctatctttggcgtctccggcgcgggaaaaacctcgctgattaatgccatcagcggtttgactcgcccgcgaaaaggacgcatcgtgctgaatggccgggtgttgcatgacgcggaaaacggtatctgtttaacgccggaaaagcgccgcatcggttatgttttccaggatgcgcgcctgttcccccattacaaagtacgcggcaatttgcgctatggcatggcgaaaagcatgaccggtcagtttgataagctggtgtcgctgctgggaattgaagcgttgcttgatcgcctgccggggagcctgtccggcggagaaaaacagcgcgtagcgataggccgggcattgctcaccgccccggagttgctgctgttggacgaaccgttggcctcgctggatatcccgcgtaaacgcgaattactgccgtacctgcaacggctggcgcgagaaatcaatattcccatgctgtatgtcagccattctctcgatgaaattctccacctggcggataaagtcatggtgctggaggatggacaggttaaagcgtttggcccgctggaagaagtctggggaagcagcgttatgcacccgtggctgccgaaagagcaacagagcagtattctgaaagtcagcgtgctggagcatcacccgcattatgccatgaccgctctggcgcttggcgaccagcacctgtgggtaaataaactcaatcagccgctgcaatccacactgcgtattcgtatacaggcgtcggatgtctcgctggtactacagccgccgcagcagaccagtatccgcaacgtattacgggcaaaagtggcgaattgttatgacgataacgggcaggtggaagtccagcttgaaataggcggcagaacgctgtgggcgcgaataagcccgtgggccagggatgagctgaatatcaagcctggcctgtggctttacgcgcaggtgaaaagcgtttctatcaccgcctga

SEQ ID NO: 39648 - DNA, 1284 bp, Salmonella typhi
gtgaatacattatcggtttcccgtctggcgctggcactggcttttggcgtgacgctgagcgcctgtagctctacgccacccgatcagatcccttccgatcaaaccgcgcctggcaccgcctcgcgccccattctgtcggcaaatgaagcgaaaaacttcgttgctgcgcgctattttgcctccctgacgccgaataccgccccgtggtcgccgtcgccgattaccctgcccgcacagcctgactttgtggtggggccggcaggtacgccaggcgttacgcacacctcgattcaggccgcgatcgatgcggcaatggttaaacgcacgaacaaacgccagtacattgctattatgccgggcgactatcaggggaccgtgtatgttcccgccgcgccgggaagtctgaccctgtacgggaccggtgaaaaaccgatcgatgtaaaaattgggatggcgattgatggtgaaatgagtgtcgctgactggcgccgcgcagtgaatcccggcgggaaatatatgcctggtaaacccgcctggtatatgttcgataactgccaaagcaaacacgccgcgacgatcggtgtaatgtgttctgccgcgttctggtcgcagaataacggtctgcagctacaaaatctgaccatcgagaacacgctgggcgacagtgtcgatgccggaaaccatccggcggtggcgctgcgtaccgatggcgacaaagtccagattaacaaggtcaatatccttggccgccagaacaccttctttgtgaccaacagcggcgtgcagaaccgtctgcaaaccgatcgccagccgcgtacgctggtgacgaacagctatattgaaggcgatgtggatatggtttccggacgcggcgccgtggtgttcgataacaccaacttccaggtcgtcaactcccgcacacagcaggaagcctacgtcttcgccccggcgacgctgtccaatatttactatggctttttggcgatcaacagccgctttaacgcctccggcgatggcgttgcgcagcttggccgctcgctggatgtcgacgccaacaccaacggtcaggtcgtgatccgcgacagcgtgattaacgagggcttcaacgttgccaaaccgtgggccgacgcggtcatctcgaaacgtccgtttgctggaaatacgggaaccgtggatgacaaagacgaggtgcagcgtaatctgaacgacacgaactacaaccgcatgtgggaatacaacaaccgcggtgtaggcagtaaagtagtgacggaacctaagcagtaa

SEQ ID NO: 39649 - DNA, 1686 bp, Salmonella typhi
atgcctgaaagcaagtatcgtcagcagactatccgcgcgccccgaggcacggtattaacggcgaaaagctggctgacagaagccccgctgcggatgttaatgaataatctcgatcctgacgtggcggaaaatccgcatgagctggtggtctacggcgggattggtcgcgccgcgcgcaactgggaatgctatgacgctattgttgatgcgctcacccggctggaggcggacgaaacgttgctgattcagtctggcaaaccggtcggcgtatttaaaacgcacgacaacgcgccgcgggtattaatcgccaactccaacctggttccccactgggcgacatgggaacactttaacgaactggatgcgaaagggctggcgatgtacggtcaaatgacggccggaagctggatctatatcggtagtcagggaatcgtgcagggaacatacgaaacctttgtcgaggcggggcgtcagcactataacggcacgctggcgggacgctgggcgctgaccgccgggctgggcggcatgggcggcgcgcaaccgctagccgcgacgctggccggagcgtgttcgctgacgattgaatgccagcaaagccgtatcgattttcgtctgcgtactcgctacgtggatgagcaggccgccacgctggatgacgcgctggcccgcattacgcgctacacccgcgaggggaaagccgtgtccgtcgccctgtgcgcgaacgcggcggatatcctgccggaactggttaatcgcggcgtgcgcccggacctggtgaccgatcagaccagcgcccacgatccgctacatggctatttgccctccggctggtgctgggaggagtatcagaaaaacgcgcaatccgatccccgggggacgatgcaggcagcgaaacgttccatggcggcgcatgttcgggcgatgctggcgttcagtaaaatgggcgtgccgacctttgactatggcaacaatattcgccagatggcgaaagagatgggggtggaaaacgcctttgattttccgggatttgtgccagcctatattcgtccgctgttctgtcgtggcatcgggccgtttcgctgggtggcgctgtccggcgatccgcaggatatctataaaaccgatgccaaagtcaaagagatagtggctgaggataaacatctgcatcactggctggatatggcgcgtgagcgcattcattttcaggggctaccggcgcgtatctgctgggtaggcttggagtggcggcaaaaactggggctggcgttcaacgaaatggtgcgttgcggcgaggtatccgcgcccattgtgattggccgcgatcacctggattccggttctgtcgccagccctaaccgtgaaaccgaagcgatgcgcgacggttccgacgcggtttccgactggccgctgttaaatgcgttgctgaataccgccagcggggcgacatgggtatcgctccatcatggcggcggggtggggatgggtttttcgcaacacgccggtatggtgattgtctgtgatggcactgacgaggccgccgcgcgtattcgccgcgtgttacacaacgatccggcgacgggcgtcatgcgtcatgccgatgccggatatgatctcgcggtggaatgcgctgttgagcaaggtctgaatttaccgatggttgcggcgacgcaggggaaaggctga

SEQ ID NO: 39650 - DNA, 1521 bp, Salmonella typhi
atgaacaccatgacactcactccggggcagttaagcctctctcaactgtacgatgtctggcgtcatccggtacagcttcggctggacgccagcgccattgacggcattaacgccagtgttgcgtgcgtcaatgatattgttgccgaagggcgtaccgcctacggcatcaacaccggtttcggcctgctggcgcagacgcgcatcgctgatgaagacttgcaaaatctacagcgatcgttggtgctgtctcacgccgcgggcgtaggcgacccactggatgacgcgatggtgcgtctgatcatggtattgaaaatcaatagcctggcgcgcgggttttccgggattcggttgagcgtgatagaggcgctcatcgctctggtgaatgccggcgtgtatccgctgattccggcaaaagggtcggttggcgcgtcgggcgacttagcgcctctggcgcatctgtcgctgacgctacttggcgaaggaaaagcgcgctggcagggcgaatggcttccggcgcaggcggcgctaaaaaaggccggactggaacctgtcgcgctggcggccaaagaggggctggcgctgcttaacggcacccaggcgtcgacggccttcgcgctgcgcggtttgtttgaggcacaggaattatttgcctccgccgtcgtctgcggcgcgctgactaccgaagccgtactgggatcgtgccgtccttttgatgcgcgcattcatgccgcgcgcggacaacaggggcaaattgacgtcgcgcggttgttccggcatctgctgaccgataccagcgccattgctgaatcacatcaccactgtcataaagttcaggacccgtattccctccgctgccagccgcaggtaatgggcgcttgtctgacccagttacgtcagacgaaagaggtactgctggctgaggccaatgcggtgtccgataatccgctggtctttgccgaggcgggggaggtgatctccggcggtaacttccatgctgaaccggttgccatggcggcggataatctggcgctggcgatagcggaaatcggcgcgctatcggagcggcgcatcacgctgatgatggataaacatatgtcgcagttaccgccgttcctggtgaaaaatggcggcgttaattccggttttatgattgcccaggtcaccgccgcggcgcttgccagcgagaataaagcgctggcgcacccgcacagcgtggatagcctgccgacctcggcgaatcaggaagatcatgtctcaatggccccggcggcgggacggcgactctgggaaatggcggcgaatacccgcggcgtcattgccgtggagtggctggctgcctgtcaggggatagatttacgggaagggttaacctccagcccgttactggaacaggcgcggcagacactgcgcgagcgggtggcgcactatacgcaggatcgttttttcgcgcccgatattgagtgtgcgacgacgctgctggcgcaaggcgcgttacagcgtctggtgccggactttatgtga

SEQ ID NO: 39651 - DNA, 1290 bp, Salmonella typhi
atgacaacggacgatctggccttcgataaacgccatatttggcatccttacacttccatgacctcgccgctgccggtatatcccgttgagcgggccgaaggctgcgagctggttctcgcctcgggcgaacgcctgattgaggggatgtcctcctggtgggcggccattcatggttataaccacccgcaattgaacgcggcgatgaaagcgcaaattgacgccatgtcgcatgtcatgttcggcggcataacccatcaacctgcggtgaatctgtgccgtaagctggtcgcgataacgcctgagccgctggagtgtgtctttctggccgactctggttcggtgtcggtagaagtggccatgaagatggcgctgcaatactggcaggctcgtggcgaatcgcgtcagcgttttctgacgtttcgccacggttatcatggcgacacgttcggcgcgatgtcggtgtgcgatccggataactccatgcacagcttgtggaaaggctatctgcctgaaaatctgttcgcgccggcgccgcaaagccggatggatggcgaatgggatgaaagcgacatcgcgccatttgcccgcctgatggccgcgcatcgccatgaaatagccgccgtgattctggaacctatcgttcagggcgcgggcgggatgcgcatatatcatccacaatggctcaggcgtattcgtaacatgtgcgatcgcgaaggcattctgctgattgccgatgaaatagccaccgggtttggccgtaccggcaaactgttcgcctgtgagcacgccgggatcgcgccggatattctgtgtctcggcaaagccttaaccggcggtaccatgaccctctcggcaacgctcacgacacgccaggttgcagagactattagcaacggcgaggcggggtgttttatgcatggcccgacgtttatggggaatccgctggcctgcgccgtcgcttgcgccagcctgacgctgctggaaagcggcgaatggcgtcagcaggtggcgtctatcgagtctcagttacgcgctgagttagcccccgcgcaaagttcgccctgggtggcggatgtgcgggtgttgggcgcgattggggtggttgaaactacgcatccggtcaatatggcggcgcttcaacgcttcttcgtcgggcaaggcgtctggatcaggccgttcggcaagctaatctacctgatgccgccctacattattcgtccggatcaactgcgccgtttgacccaggcggtcaatgacgcggtacacaatgaaacattttttagccattaa

SEQ ID NO: 39652 - DNA, 1041 bp, Salmonella typhi
atggctcgccacccacgctggacactgtcgcaagtaaccgaattatttgaaaaaccactgctggaattgctgtttgaagcgcagcaaattcatcgccagcatttcgatccgcagcaggtacaggttagtacgctgttgtcgatcaaaaccggcgcctgcccggaggattgtaaatactgcccgcagagctcgcgctataaaaccgggctggaagccgagcgtttaatggaggtagagcaggtactggactccgcccgtaaagcgaaaaacgccggttcgacccgcttctgtatgggggcggcctggaagaatccgcatgaacgcgatatgccttatctggagaagattgtacagggcgtcaaagcgatggggctggaaacctgtatgacgctcggcatgttgaacgagagccaggcgcagcgtctggctaacgccgggctggattactacaaccacaacctcgatacctcgccggagttttacggcaatatcatcactacccgtacctatcaggagcgcctcgacacgctggaaaaagtccgtgaagcagggattaaagtgtgctccggcggcattgtgggtctgggcgaaacggttaccgatcgcgccggactgttgttgcagttggcgaacctgcctacgccgccggaaagcgtgccaatcaacatgctggtgaaggtaaaaggcacgccgcttgcggataacgatgacgtggatgcgtttgattttattcgtactatcgccgtagcgcgcatcatgatgccgacctcatacgtgcgtctttccgcaggacgtgaacagatgaacgagcagacccaggcgatgtgctttatggccggggcgaactcgattttctatggctgcaaattgttaactacgccaaatccggcagaggacaaggatctgcagttattccgtaagctggggctgaatccgcagcagaccagggtgctggcgggcgataacgagcagcagcaacgtctggagcagacgctgatgacgcctgacaccgatgattattacaacgcggcagccttatga

SEQ ID NO: 39653 - DNA, 909 bp, Salmonella typhi
atgcgcaatcgtacgctggctgaccttgatcgtgtcgttgccctcggcggagggcatggattaggacgcgtcctctcctcgctttcttcattaggttcgcgcctgaccggcattgtgactaccacagataacggggggtcaactggccgtattcgccgctcggaaggcgggatcgcctggggcgatatgcgcaactgtctgaatcagttaattaccgaacccagcgtcgcatccgctatgtttgagtaccgttttggcggtaatggcgaactttctggtcataacctcggaaatttgatgttaaaggcgttagatcacctgagcgtgcggcctctggaagcgattaatttaattcgtaatctgcttaaagtggacgcgcagctgatcccgatgtcggagctaccggtagatctgatggcgattgacgatcaggggcatgagatttatggcgaggtgaatatcgatcagttagcgacgccgccgcaggagatcatgttaacgccaaacgttccggcgacgcgggaagcggtacaggccattaatgacgcggatctgattctgattggccctggcagtttttataccagcctgatgccttgcctgctgctggatgaactggcgcaggcgctgcggcgcaccccagcgccaatggtgtatatcggcaatctgggtcgcgaactgagtctgcccgccgccagtttaacgctggtcgataagctggcgatgatggagcaatatattggcaaaaaagtcattgacacagtagtggttgggccgcgagttgacgtcagtgcggtgaacgatcggctggtgattcaggaagtgctggaggccagcgatatcccctatcgccacgatcgtcagttattacacaatgcgctggaaaaagcgctacaggcgttgggttaa

SEQ ID NO: 39654 - DNA, 1692 bp, Salmonella typhi
atgatgcctttctccatcataaaaaacatcgcaaacagggaacgcatggaaattttcttcacaatactcatcatgacccttgtggtctcgctgtcgggggtatttacgcgtgtattacccttccagcttcctttaccccttatgcagatcgccattggcgcgctgttggcgtggccgacgtttggtttgcatgtggaattcgacccggaactcttcctggtgctgtttattccgccgctgctgtttgcggatggctggaaaacgccgacccgtgaatttcttgagcatggacgagagattttcgggctggcgctggcgctggtcctggtaacggttgtgggaatcggcttcctgatttattggctggtgcccggcattccgctgatccccgcatttgcgctggccgccgtgctgtcgccgaccgatgcggtagcgctctccggaattgtgggcgaggggcgtatcccgaaaaaaatcatgggcattctgcagggagaggcgttaatgaacgacgcctccggtctggtatcgctgaaattcgccgtcgcggtggcgatggggacgatggtctttaccgtcggcggcgcgacgctggaattttttaaggtcgctatcggcggtattctggcgggttttgtagtcagttggctgtatggccgctcgctgcgttttttgagccgctggggcggcgatgagcccgcgacgcaaatcgtcctgctgtttctgctgcccttcgcgtcttacctgattgccgaacatattggcgtctcaggcatcctggccgcggttgccgccgggatgaccatcacccgttctggcgtaatgcgccgcgcgccgctggcaatgcgtttgcgcgcgaacagtacctgggcgatgctggaatttgtctttaacggtatggtctttctgctgttgggactgcaattgccagggattctggaatcttcgctggcggcggcggaagctgacccgaatgtcgaaacctggatgctctttaccgatatcgtgctgatttatgcggcattgatgctggttcgcttcggctggctgtggaccatgaaaaagttcagcctgcgctttttgaagaagaaaccgatggagttcgccagctggacgtcgcgtgaaattctgattgcttccttcgctggcgttcgtggggcgatcaccctggctggtgtgctctctataccgttacttttgccggatggcagcggatttccggcgcgttatgaactggtattcctggcggctggcgtcattctgttctcgttgtttgtcggcgtgatcatgctgccgctgctgttgcaacatctggaagtcgccgatcatgcgcaacagttgaaagaggagcgtatcgcccgcgcggcgacggcggaagtggcgattgttgccattcagaaaatggaagagcgtctggcggcggataccgaagaaaacatcgataatcagttgcttactgaagtaagctcgcgtgtcattggtaacttgcgtcgccgtgccgatgggcgaaacgatgtcgaaagctccatacaggaagaaaacctggagcgacgtttccgtctggcggcgctgcgttccgaacgcgccgagttgtatcatctgcgcgccacgcgagaaatcagcaatgaaacattgcaaaagctgctgcacgacctggatttgatggaagctctactgatagaaaatcagtag

SEQ ID NO: 39655 - DNA, 1959 bp, Salmonella typhi
atgagccaaacacataaacacgccattcccgccaacattgcggatcgttgcctgataaatccagagcagtatgagactaaatataaacagtctattaacgaccccgatacgttttggggcgaacagggaaaaattctcgattggatcacgccgtaccaaaaagtgaaaaacacctcctttgcgccaggcaatgtgtcgattaaatggtacgaggacggcacgctgaatctggcggcgaactgtcttgaccgccatttgcaggaaaatggcgatcgcaccgccattatctgggaaggcgatgacgcgtcgcagagtaaacatatctcttatcgcgaactgcatcgcgatgtctgccgtttcgcgaatacactgctggatctgggcattaaaaaaggcgatgtggtagcgatttatatgccgatggtgccggaagcggcggtggcaatgttggcctgcgcccgcatcggtgcggtgcattcggtgatcttcgggggcttctcgccggaagccatcgccggacgcattatcgactccagctcgcggctggtgatcaccgctgacgaaggtgtacgtgccggacgcagtatcccgctgaaaaagaatgtcgatgacgcgctgaaaaacccgaatgtcactagcgttgagcatgtgatcgtcctgaagcgcaccggcaacgacattgactggcaagaaggccgcgacctgtggtggcgcgatttgattgaaaaagccagccctgagcaccagcctgaagcgatgaatgccgaagatccgctgtttatcctttatacctccggctccaccggcaagccgaaaggcgtgctgcacaccaccggcggctatctggtctacgccgcgaccacctttaagtatgtctttgattatcaccctggcgatatttactggtgtaccgccgatgtgggttgggtgacggggcacagctatctgttgtatggcccgctggcctgcggcgcgaccaccttaatgtttgaaggcgtgccgaattggccaacgcccgctcgcatgtgccaggtggtcgacaaacaccaggtcaacattctctataccgccccgacggccatccgcgcgctgatggcggaaggcgataaagccattgaaggcaccgaccgttcttcactacgcattctgggttccgtcggcgagccgatcaatcccgaagcgtgggaatggtactggaagaagatcggcaaggaaaaatgtccggtcgtcgacacctggtggcagactgaaacaggcggttttatgatcacgccgctaccaggcgctatcgaactgaaagccggttccgccacccgtcctttctttggcgtacagcctgcgctggtggataacgaaggccatccgcaagaaggcgcgacggaaggcaatctggtcatcaccgattcctggccgggccaggcgcgcactctgttcggcgatcatgaacgttttgagcagacctatttctctacctttaagaatatgtatttcagcggcgacggcgcgcgtcgcgatgaggacggctattactggatcaccggtcgcgtggatgacgtgttaaacgtctccggccaccgtctgggtacggcggaaatcgagtcagcgctggtggcgcatccgaagatcgccgaagcggcggtggtgggtattccacacgctatcaaaggccaggcgatttacgcttatgtgacgctcaaccacggcgaggagccgtcgccagaactgtacgcggaggtgcgcaactgggtacgtaaagagattggcccactggcgacgccggacgtgctgcactggaccgactcactgccaaaaacccgttccggcaaaattatgcgccgcattttgcgcaaaatcgcggcgggcgataccagcaatctgggcgatacctcgactctcgccgatcctggcgtggtggagaaactgctcgaagagaagcaggccatcgcgatgccgtcataa

SEQ ID NO: 39656 - DNA, 990 bp, Salmonella typhi
atggcttcacaacttaccgatgctttcgcgcgtaagttttactacttgcgtttgtcgattaccgatgtgtgtaactttcgttgcacctactgtctgccggatggctacaaacctggcggcgtcactaacaacggtttccttaccgtcgatgaaattcgtcgcgttacgcgcgcttttgccagtcttggcacggaaaaggtgcgtcttaccggcggcgagccttcattacgccgcgattttaccgacatcattgccgccgtgggtgaaaatgatgctattcgccagatcgcggtgaccactaacggttatcgactggcgcgcgatgccgcgaactggcgcgaagcggggctgacgggcgtcaatgttagcgtggatagtctggatgcgcgtcagttccatgcgattaccggtcaggacaaattccgccaggtgatggcgggcatcgatgccgcctttgacgccggtttcgaaaaggtgaaagtcaacaccgtgctgatgcgcgacgtgaatcaccatcagttggataccttccttgcctggattcagcctcgccccattcagctacgcttcattgaacttatggagacgggcgaggggagcgatctcttccgcaaacatcatatttcgggtcaggtattacgtgacgagctgattaagcgcggttggatccaccagctccgccagcgtagcgatggtccggcgcaggttttttgtcaccccgattacgccggtgagatcggtctcattatgccgtacgaaaaagatttctgcgccacctgtaaccgcctgcgtgtttcgtccgtcggtaagctgcatttatgtctgtttggcgacggcggcgtgagtttacgcgacctgttacaggatgatgcgcagcaatacgcgcttgaggaacgtatttccgacgcgttgcgggagaaaaagcagacccatttccttcaccagagcaatactggtattacgcaaaatttatcttacattggcggttaa

SEQ ID NO: 39657 - DNA, 513 bp, Salmonella typhi
atgagtcaggtcagcgctgaatttatcccgacccgcatcgctattcttactgtttccagccgacgcggcgaagaagacgacacctccggtcattatctgcgtgattcggcgcaggaggccgggcatgaagtggtggcgaaagccatcgttaaagagaaccgttacgcgattcgcgcccaggtttccgcctggatcgccagtgatgaggtgcaggtcgtattgataactggcgggaccggtttgaccgaaggcgatcaggcgccggaagcgctgttgccgctgttcgatcgtgaagtggaaggatttggcgaagtgtttcgcatgctctcgtttgaagagatcggcaccgcaactctgcagtcgcgcgcggtagctggcgtggcgaataacaccttgattttcgccatgccgggctccacaaaagcgtgcagaaccgcatgggagaatatcattgcgccgcagctggatgcccgtacacgcccatgtaattttcaccctcatttaaagaaataa

SEQ ID NO: 39658 - DNA, 690 bp, Salmonella typhi
atgaaaccacttattgcattgatgttgtttatgacattctttgcccatgccgcagatcctgagccgggtagccagtatttgcaggcagcagaggcaggtgacagacgcgcgcaatattttctggccgacagttggttgagctatggcgatttgaacaaagctgaatactgggcgcaaaaagccgccgacaatggcgacgccgacgcctgcgcgctactggcgcaaatcaaaatcactaatccggtaagcctggattatcccgacgcgaaaaagctggctgaaaaggcggctaacgcgggcagtaaagcgggagaaattacgctggcgcggatcctggtcaacacccaggccgggcgtccggactacccaaaagccatctcgctgctgcaaaaggcctctgaagatctggataacgactccgcggtggatgcgcaaatgttgcttggcctgatttacgccaacggcgtgggcattgccgccgatgatgaaaaagccgcctggtatttcaaacgcagttccgctatttcccgtaccggctattcagaatactgggcgggaatgatgtttttaaacggtgaaccgggctttattgaaaagaacaagcagaaggcgttgcattggttgaatctaagctgtctggaagggtttgataccggttgcgaagagttcgaaacgctaacaaatggctga

SEQ ID NO: 39659 - DNA, 2148 bp, Salmonella typhi
atgaaaaaagtcgtcacggtttgcccgtattgcgcatcaggttgcaaaatcaatctggtggtcgataacggcaaaatcgtccgggctgaggcggcgcaggggaaaaccaaccagggtaccctgtgtctgaagggctactatggctgggattttattaatgatacccagatcctgaccccgcgtctgaaaaccccaatgatccgtcgccagcgtggcggcaaactggaatctgtttcctgggatgaagcgctcaattacgtcgctgaacgtttgagcgccatcaaagcgaagtacggtccggatgcaatccagacaaccggctcctctcgcggtaccggaaatgaaaccaactatgtaatgcaaaaattcgcacgcgccgttattggtaccaataacgttgactgctgcgctcgcgtctgacacggcccatcggttgcaggtctgcaccaatcggtcggtaacggcgcaatgagtaatgcgattaacgaaattgataacactgatttagtgttcgtcttcgggtataacccggcggattcccaccctatcgtggcgaatcatgtgattaacgctaaacgcaacggggcgaaaattatcgtctgcgatccgcgcaaaattgaaactgcgcgcatcgctgacatgcatatcgcgttgaaaaacggctcgaatatcgcgctgctcaacgccatgggacatgtcattattgaagaaaacctgtacgacaaagcgtttgtcgccagccgtaccgaaggttttgaagagtacagtaagattgtcgaaggctatacgccggagtccgttgaagagatcactggcgtgagcgcacaggagattcgtcaggcggcgcggatgtatgccagcgcgaaaagcgcggcgatcttgtggggtatgggcgtcacccagttctatcagggtgtggaaaccgtgcgttcactgaccagcctcgcgatgctgaccggtaacctcggcaagccaagcgcgggcgttaacccggttcgcggccagaacaacgttcagggcgcgtgcgatatgggcgcgctgccggatacttatccgggctaccagtacgttaaattcccggaaaaccgcgagaagttcgctaaagcctggggcgtagaaagtctgcctgcacataccggctatcgcatcagcgagctgccgcaccgtgcggcgcatggcgaagtgcgcgcggcgtacattatgggtgaagatccgctgcaaaccgatgcggagctctctgcggtacgtaaagcgtttgaggacctggaactggtcatcgtgcagggcatcttcatgaccaaaaccgcgtcggcggcggatgtgattttaccctccacctcctggggcgagcatgaaggcgtcttctctgcggctgaccgtggcttccagcgcttctttaaagccgttgagccgaagtgggacctgaaaaccgactggcagattatcagtgaaatcgccacccggatgggctatccgatgcactacaacaacacccaggagatctgggatgagttgcgtcatctgtgcccggatttctacggcgccacttacgagaaaatgggcgaactgggctatatccagtggccatgccgcgacacgtcggatgccgatcagggaacctcgtacctctttaaagagaagttcgatacccccaacggtctggcgcagttcttcacctgcgactgggtagcgcctatcgataaactcaccgaagagtacccgatggtactgtcgacggtgcgcgaagtcggccactactcctgccgctcaatgaccggtaactgtgcggcgctggccgcgctggccgatgaaccgggctatgcgcaaatcaataccgccgacgccgcgcgtctgggcattgaagatgaagcgctggtgtgggttcattcgcgtaaaggcaaaatcatcacccgcgcgcaggtcagcgatcgcccgaacaaaggggcgatttacatgacctaccagtggtggattggcgcctgtaacgagctggtgactgaaaacctcagcccgattaccaaaacgccggagtacaaatactgcgccgtacgcgttgagccgatcgccgatcagcgagccgccgagcagtatgtgattgatgagtacaacaagctgaaaacccgcctgcgcgaaagcgcaatgggttga

SEQ ID NO: 39660 - DNA, 909 bp, Salmonella typhi
atgttcgcagcaatcattatcggtatttttattatcagcgtcatttatgcgcattcacgcggggtggaaaaacaaaaactttcccgtcagctctttgaccactcgacgtttatggcgccgatcaatatgttcatgactcgcttctcaacgttaccggcaaagcagccgtactttgataccacggcatttccagagctgcagaagctgacggaaaactggcaggtgattcgtgaagaggcgctacggcttcagcatcacataaaagccgcgcaggccaataacgacgccggattcaacacctttttcaagcgcggctggaaacggttttatcttaaatggtattccgatgcccacccgtcggcagaaacgttatgcccgataacgacaaagctggtcaacagcatcccctctatcaaagcggcgatgttcgccgagttgcctcccggggcctatctgggaaaacatcgcgacccctatgccggttcagtacgttaccatcttggattaagcacaccgaatgatgaccgctgttttattgaagttgatcgacagcgccatagctggcgcgacggcgaagccgtcatcttcgacgaaacctacgttcattgggcggaaaataaaactgagcagacgcgtattatcctcttttgcgatattgagcgcccaatgaaatggcgctgggcgcagagcgtaaaccactgggtcggcgcatcgttgatgtccgccgccagttcgccaaacgacgagaacgatcgcaccggtgcgattaatcgcatctttaaatacgttcacgcagcacgcgatgccgggcaacggctgaaaaagaaaaaccgtactctctattacgcgctgaaatatctcgttattgccgctatttttgccgcgataatccttttcagcctcctctga

SEQ ID NO: 39661 - DNA, 1107 bp, Salmonella typhi
atgtttcatcgtttatggacgttaattcgcaaagaactgcaatcgcttttacgcgaaccgcaaacgcgcgcgatcctgattctgccggtgctgattcaggtcatcctgtttccgttcgccgcgacgcttgaagtcactaacgcgactatcgccatctataacgaagataacggcaaacattcggtagaacttacccagcgttttgcccgcgcgaaagcgtttacccatgtgctattgctgaacagtccgcaggagatccagccgactatcgatacgcaaaaagcgctgctgctggtgcgcttcccggcggatttctcgcggaatctggataccttccagcctgcgccgatgcaactcattcttgatggacgtaactccaacagcgcgcaaattgccgccaattatctgcaacagatcgtcaaggagtatcagcagacattgatggacggcaagccaaagcccaacaatagcgaactggtggtacgcaactggtataacccgaatctggactacaagtggtttgtggtgccctcgctgatcgccatgatcaccactatcggcgtgatgatcgtcacttcgctgtccgtcgcccgcgagcgtgaacaaggcactctggatcagctgctggtctctccgctcaccacctggcagattttcgtcggcaaagcggtgccggcgctgattgtcgcgaccttccaggccacgatcgtgctggctatcggcatttgggcataccaaattcccttcgccggttcgttagcgctgttttatttcacgatggtgatttacgggctgtcgctggtaggctttggcttgctgatatcagcactttgcgccacgcaacagcaggcgtttatcggcgtctttgtctttatgatgccggcgattttgctctcgggttatgtctcgccggtggaaaatatgccggtctggctgcaaaacctgacgtggataaatcctatccgccactttactgatattactaagcaaatttatcttaaggacgcgagtctggggattgtctggggaagtttgtggccgctactggtgatagcggccaccacgggttcagcggcgtatgcgatgtttagacgcaaagtgatgtag

SEQ ID NO: 39662 - DNA, 762 bp, Salmonella typhi
atgaggatttgcagcaacgagccttgcatagtgttattaaccgaaaaagatacatggttacgagtaaatggtaaggagccaatcagtttaaaagcgaatcatatggccattctggcttgtgaaaataacgttattgacatttcatcattaaatagcgtgctagtaatacaagtgagtcgcaataatattaaagactatttacaattcctgaataaagatctctcacaccttcccgtctggcaacgcaacgccgatcccttattgaccgccacctgtctgacgccggatatcttcagggtcgccgcccgctacagcgcgatggaaacaccggatgaaattgttagtgaacgcacccgtgcgctccttttcaccgttttatcccgctttcttgaccacaaaaaatttatttctttgttaatgcacatgctgcgcagccgcatcagtgacagcgtttaccacatcattcagagcgatattcataaagactggaatctgagcgccgttgccagctgcctgtgcctgagtccaagcttgttaaagaaaaagctcaaaaacgagaataccagttatagccaaataatcacgacctgccgaatgcgttatgccgtaaaccaattattaatggacggaaagaatatctcgcaagtctcacagctttgtgggtataacagcacgtcgtactttatttccgtgtttaaagagttttatggtatgacccccctgcattatgttagccaacatcgggaacgatcggctgcctaa

SEQ ID NO: 39663 - DNA, 2223 bp, Salmonella typhi
atgcggtggaccctgttcatccttttttgtctactgggcgcgcctgcccatgcggtcgccatacccggcgtgaccacggggacatcaaccagccagcaagcagcgccagagcccagtcctgaacaaaaaaaagcggcctatgcggccctggctgacgtactggagaacgaggcttcacgtaacgaattgatagcgcaactccgcgaagcctcaaccacgccgccgaccgagccagcgccagcgcttgccccgcctgcggccaaagatgagaaaacggtactggagaacgtcaccaccgttacccgtcagtacggcgatgctttcgctacccgtttcgcccagctttatcgcaacatcaccgatgcgccgtacaagccgtttaactcgcaaaccttcaccaacgcgttaacccactttttatttctggccgtcgcggtatttggtttttatagcgtgatacggctttgcgccctgccgttatatcgaaaaatgggcctgtgggcgcgcaagaaaaaccgtgaacgcagcaactggttacagctcccggcgatgatcgccggcgcgtttattatcgacctgctgctactggcgctcaccttatttatcggtcagatgctcagtgataatttccatgccggaagtcgaactatcgcttttcagcaaagcctgttcctgaatgccttcgcgctgatagagttctttaaagcgattctgcggcttattttttgccctaatgtaccggaattacgcccattcgcgattcaggatgcgacagcgcgttactggaatcgccgtatgagttcccttagcagtttgattggctacgggctgattgttgccgttccgattatttccaaccaggtgaatgttcaggtcggggcgatggcgaacgtggcgatcatgctctgcatcaccatctgggcgctgtacctgatctttaaaaacaaagcggagattacgcaacatttattaagtctggcggaacgatcattagccttttttagcctgtttatccgcgcctttgcgctggtgtggcactggctggccagcgcttactttatcgtgctgtttttcttctcgttattcgacccaggcaatagcctgaagtttatgatgggcgcgaccgtgcgcagtctggcgattattggcatcgccgcgtttatctccggtatgtttacccgctggatagcgaaaaccatcaccctgtcgccccatacgcagcgcaattacccggaattacaaaagcggcttaacggctggctctcctcggcgctaaaagtcgcacgctttttgaccgtctgcgtcgccgttatgctgttgctcaacgcctgggggctattcgatttctggcactggctacattatggcgcgggggaaaagatggtcgatatcctcatccgtatcgcgttaatcttattcttctccgccgtgggatggacgattctcgccagtctgattgagaatcgcctggcctccgatattcatagtcgcccgctacccagcgcccgcacgcgcacgctgctgacgctgttccgcaatgcgctggcagtgattatcagtaccataaccatcatgatcgtgttatcggaaatcggcgtcaatatcgcgccgttgctggctggcgcgggggcgttaggtctggctatctctttcggttcgcaaaccctggtgaaagatattattaccggcgtttttattcagtttgaaaacgggatgaataccggcgacttagtcaccataggcccgctgatggggacggtcgaaagaatgtcgattcgttccgtcggcgtgcggcaggataccggggcataccatattatcccgtggtcctcgatcaccactttcgccaactttgtgcgcggtatcggctctgttgtcgccaactatgacgtggatcgccatgaggatgcggataaagcgaatcaggcgctgaaagacgcggtaacggcgctgatggagacggaggatattcgcgggctgattatcggcgaacccacgttcgccggtattgtcggtttaacgaacacggcgtttactttacgcgtgtcgttcaccacgctaccgctcaagcagtggacggtgcgttttgcccttgatagccaggtgaaaaagcattttgatctggccaatgttcgcgcgccggtgcaaacgtatcaggttctgcccgcccccgccggcggcccgccgcctgattcactgccgccgcgcgaaccgacgatttag

SEQ ID NO: 39664 - DNA, 723 bp, Salmonella typhi
gtgattgaatttaaaaacgtctccaagcactttggccccacccaggtgctgcataacattgatttaaacatccgtcagggcgaagtggttgtgattatcggcccttccggttcgggtaaatccacgttattacgctgtatcaataaactggaagagatcacctccggcgatctgattgtcgatggtctgaaagtcaacgatccgaaagtagacgaacggctgattcgccaggaagccggcatggtgtttcaacagttttatctgttcccgcatctgaccgcgctcgaaaacgtgatgttcggtcctctgcgcgtgcgcggcgtaaagaaagaagaagcggaaaaacaggcgaaagctctgttagcgaaagttggactggcggaacgggcgcaccactacccctccgagctttccggaggtcaacaacagcgcgtcgccattgcccgagcgctggccgtgaagccgaaaatgatgctctttgacgagccaacctccgctctggaccctgaactgcgccatgaagtgctgaaagtcatgcaggatctggcggaagaaggcatgaccatggtcattgtcactcacgaaatcggctttgccgaaaaagtcgcctcacggctgattttcatcgataaaggccgtattgccgaagatggcagtccgcaggcgttgatcgaaaacccgccaagcccacgtttacaggaatttttacagcacgtctcctga

SEQ ID NO: 39665 - DNA, 660 bp, Salmonella typhi
atgcagtttgactggagcgccatctggcccgccattccgcttttgcttgagggcgctaaaatgaccctgtggatctcggtcctcggtctggctggcggcctggttattggactggcggcaggttttgcccgtacgtttggcggctggttcgctaaccacatcgccctggttttcattgaaattattcgcggcacgcctatcgttgtccaggtcatgtttatctactttgccctgccgatggcatttaatgatttgcgtattgatccgttcagcgcagcggtcgtgacaattatgattaactccggcgcttatatcgcggaaattactcgtggcgcagtactatccattcacaaaggttttcgcgaagcaggtctggcgctgggcctttctcgccgggaaaccatccgccatgttattttaccgcttgctctgcgccgtatgctgccgccgctgggcaaccagtggatcattagcatcaaagacacctcgttgtttattgttatcggcgtagccgagctgacccgtcagggccaggaaattattgccggtaactttcgcgccctggaaatctggagcgccgtggccgtcttctatttgatcattacgctggtgctgagctttattttgcgtcgtcttgaaagaaggatgaaaatcctgtga

SEQ ID NO: 39666 - DNA, 504 bp, Salmonella typhi
atgagtaccgctaaactggtaaaaacaaaagcgtctaatctgctttatacccgtaacgatgtatcagagagcgataaaaaagcgacggttgagttgcttaatcgtcaggtgatccagttcattgacctgtcgctgatcacgaaacaggcccactggaacatgcgcggtgctaactttattgccgttcatgagatgctggatggcttccgtaccgcactgaccgatcatctggatactatggccgagcgcgccgtacagcttggcggtgtggcgttaggcaccacgcaagttatcaacagcaaaactccactgaaaagctatccgctcgacatccataacgtgcaggatcacttaaaagaactggccgatcgctacgctgttgtcgctaatgatgttcgcaaagctatcggtgaagccaaagatgaagacactgccgatatctttaccgccgcatcacgcgacctcgataaattcctgtggtttatcgaatccaacatcgaataa

SEQ ID NO: 39667 - DNA, 888 bp, Salmonella typhi
atgccggggtcaacacgtaaactaccagtctggttgcccattttggttttgctcattgccatgtcctctattcagagtggcgcttcactggcaaaatcgttatttcctcttgttggcgcgccgggtgtaacggcgcttcgtctggcgttgggaacgcttatccttatcgcctttttcaaaccctggcgtttgcgttttgccaaagagcagcggctgcctttactgttttatggtctgtcgctgggcgggatgaactatctattctatctgtcgattcagacggtgccgttgggtattgcggtcgcgctggaatttaccggccctctggcggtcgcgctgttttcatcccggcgtccggtagattttatttgggtcgtactggctgtgcttggactctggttcctgctgccattaggacaagatatgtctcacgtcgatcttaccggggccgcgttagcgctcggcgctggcgcctgttgggctgtctatattcttaccggccagcgagcaggcgcggaacatggtccggccacggtggcggtaggctcgctgattaccgccatcattttcgtgccgattggcgcagttcaggctggcgatgcgctatggcactggtcgattcttcccttagggttagcggtcgctgtgctttctacggcgctgccttattcactggaaatgattgcgctgacgcgcctgccaactcgcaccttcggtacgctgatgagcatggaacccgtgctggccgccatttccgggatgatttttctgggcgaaacgcttacgggcatacaaatcctggccctgtgcgccatcattgccgcctcaatgggttctaccctaacgattcgccgcgaaccgcaaattaaacaagttgacgtaaaatag

SEQ ID NO: 39668 - DNA, 1647 bp, Salmonella typhi
atgtcgaaaaaagagtttatctatcaggcgcctttcccgatgggagaggacaaaacagagtattatctgctcacctccgattatgtcagcgtcagtgaattcaatggagaatctatcctcaacgttgagccgcaggcgttaacgttgctggctcagcaggctttccatgatgcgtcttttatgctccgtcctgaacaccagcagcaagtcgccgccattctccatgaccccgaagccagcgaaaacgacaaatatgtggcgttgcaattcctgagaaactccgagatcgccgccaaaggcattctgccgacctgccaggataccggcacggcgattatcatgggtaaaaaaggccaacgcgtctggacgggcggcggcgatgaagccgcgctctccaaaggcgtgtttaatacctatatcgaagataacctgcgctactcgcagaacgcgccgctggatatgtacaaagaggtcaataccggcagcaacctgccagcgcaaatcgatctctatgccgtcgatggcgacgagtacaagttcctttgcgtggcgaaaggcggcggttcagcaaacaaaacgtatctctatcaggagaccaaagcgctgctcaccccaggcaagctgaaaaacttcctcgttgagaaaatgcgcacgctgggcaccgcggcctgtccgccataccatatcgcctttgtcattggtggcacctcggcggaaagcacgctgaaaaccgttaaactcgccagcacccactattacgacgcgctgccgacggaaggtaacgagcacggccaggcattccgcgatctccacctggaacaggaactgctggaagaagcgcaaaaacttggcctcggcgcccagttcggcgggaaatatttcgcccacgatattcgcgtaattcgcctgccgcgtcacggcgcttcctgtccggtggggatgggcgtctcctgctcggcagaccgtaacatcaaagcgaaaatcaaccgcgaaggcatctggatcgaaaaactggaacacaatccgggccagtatattccgccagcgctgcgtcaggcgggcgaaggcgacgcggtgaaagtcgatcttaaccgtccgatgaaagagatcctcgcccagctatcgcagtacccggtctcgactcgcctgtcgctgacgggcaccattatcgtaggtcgcgatatcgcccacgcgaagctaaaagagcgtattgaatccggcgaagacctgccgcagtatattaaagaccaccccatctattacgcaggtccggccaaaaccccggcaggttatccatctggctcattaggccccaccaccgcaggccgaatggactcttatgtcgatctactgcaatcccacggcggcagtatgatcatgctggcgaaaggcaaccgtagtcagcaggtcacggatgcctgtaaaaaacacggcggcttttatttgggcagtatcggcggcccggcggcggtactggcacagcagagcattaagcatctggagtgcgtcgagtatccggaactcggcatggaagctatctggaaaattgaagtagaagatttcccggcctttattctggtggatgacaaaggcaacgatttcttccagcagattgtcagcaaacagtgcgctaactgcgcgaaataa

SEQ ID NO: 39669 - DNA, 1632 bp, Salmonella typhi
atgaaacactccctgccatgccgggcgttacgcaaacgccccatgaaactcggcactaccgtcattctgatggtcagcgccgttttgttttcggtgctcgttgtggtccatctgatctatttttcgcaaatcagcagcatgacgcgcgacgcgctggcagataaagcgctggcggtggctcgctcgctggcggactctccggcaattcgcgaggggctgaaaaaaccgcctgcggaaagcggcattcagccgctctccgaagcggtgagccagcataatggctttttgtttattgtggtgaccaatatgcagggcatccgttattcgcacccagaaacgcagcgaatcggtcaaccgttcaaaggcgatgacattctgctcgcactgcagggaaaggaaaacgttgccattaatcgcggctttcttgccaaagcgctgcgcgttttcacaccggtttatgatgaacaccaccgacagatcggcgtggtagcgattggcctggaactcagtcacgttacgcagcagatcaacaatagccgcggcagtattatctggtccattctgttcggcgctctggtgggattattaggcacctatgcgctggtcaaggtgctaaaacgtatcctgtttggcctcgaaccctatgagatctcaaccctgtttgaacaacgccaggcgatgctgcagtcaatcaaagagggcgtaatcgccgtagatggtagcggcgaagtcacgttgattaaccacgcggcgcaggcgctgctcgattatcgaaaaacacaggatgacgccagattatccaccctgagtcatgcctggccgcaggtggtggacattagcgaagtgttgcgtgacggtacgccgcgccgcgatgaagagattatcgtcaaaggccgcctgctgctggtgaataccgttccggtgcgcagcaacggcgaaattatcggcgcgatatccaccttcagggataaaacagaagttcgccaactgatgcagcggttagacgggatggtgaactacgcggatgcgctccgtgaacgatcccacgaattcatgaacaaattacatgtgattctgggattattgcacctgaagagttataagcagcttgaagcgtatattatcaagacggccaataactatcaggaagagatcggtttgctgctgggtaaaataaagtcgccgattatcgctggctttttgctcagtaagattacccgcgcctctgatttcgggcacagcctggtgataagcagcgacagccagttaccggataataacaatgaagatcaggttacggtgctgattacggcgctgggtaatttgattgaaaacgcgctggaagcgttgagccaggaatccggcggcgaaatcagcgtctcgttacactaccgtcatggctggctgcattgcgaagtgagcgatgacggtccgggtatcgaacctgagcgcatcgaggcgatttttgaaaaaggcgtctcgtcgaaaggcgccgaacgcggcgtcggtttagcgctggttaaacagcaggttgaagcgcttggcggcgtaatttccgtggagtccgagcctgggatcttcacacaattttttgtacagttaccctgggatggaaaaaggaccagcctatga

SEQ ID NO: 39670 - DNA, 1581 bp, Salmonella typhi
atgaattcaacccttatcgattcacttctggcccgtcgtcgggctgtaagcccatgggcgggcctctactttttacagtcgctgctgattaacctcgcgctcggctacccctttagcctgctttataccgcggcgtttacctgcctgttgctgctgctctggcgctacctgcctcgcggacaaaaagcgctgctcggcatctgttcgctggtagccgcttgctattttccctttggccaggcttacggcgcgccgaactttaatacgctgctggcgctgcactccaccaatatggaagagtcgagcgaaatcctgaccatcttcccgtggtatagctacctgaccggactttttatttttgcgctgggtattattgcgcttcgccgccgaaaagaagaggtcaggccgcgctggaatagcctcgacagcctgtgcctgctgattagcgtcgcggcatttttcgtcgcgccggtacaaaatctggcctggggcggcgtttttaaggttattgataccggctatccggtttttcgcttcgccaaagacgttatcgtcaataacaacgaagtcattgaagagcagcaccgtatggcgcagctatccggcataaaagatagctggacggttactgcggtgaaacccagatatcacatctatgtcgtggtgattggtgaaagcgcgcgacgggatgccatgggcgctttcggcggccactgggataatacccccttcgccagccatgtgaatggcgacttctttatggattacatcgccgccagcggctcaacgcaaaaatcgctcggtttaacgctcaatcgcgtggtggataacaaaccgcagtatcaggataacttcgtcacgctggctaaccgcgccggttttcagacatggtggttttccaatcaggggcaaatcggcgaatacgacacggccatcgccagtatcgccaaacgcgccgatgaagcgcatttcctgaaaaacggcgattttgaagcggataaaaatactcgcgacgacgcgctgttaaccatgacggcgcaggtattggcgacagaacgcacgcaaccgcagttgattgtgttgcatttaatgggatcgcatccccaggcctgcgaccgtactcatggaaaatacgcgacgtttgtccagtcgaaagagacgtcttgttatttatacaccatgacgcaaaccgacgatttgctccgtcagctctatactcagcttcgtcatagcggcgacagtttttcgctcgtctatttctccgatcacaggctggcgtttaaagagcgcggcaaagcggtacagtacctggcgcatgacgacaaattccagcaaaacttccaggtgccgtttatggtgctatccagcgacagtaaagcgcatcggatcattaaagctcgccgttccgcgaacgatttcctgagttttttctcgcaatggacaggaattagcgctaaagagatcaaaaatcgctatcgatttatttcggaacagaaagccgggcccgtttatatcaccaatttcaaattacagaaagtggactataaccatctgggcagcgatattttttcactaaaataa

SEQ ID NO: 39671 - DNA, 1596 bp, Salmonella typhi
gtgttagtttccagcaacgttaccatgcagttcggcagtaagccgctgttcgaaaatatttccgtcaaatttggcggcggcaaccgttacggcctgatcggcgccaacggtagcggaaagtccacttttatgaaaatcctcggcggcgacttggagccgacgctgggcaatgtttccctcgatccgaatgagcgcatcggtaagctgcgtcaggaccagttcgcttttgaaacattcaccgtacttgatactgtcattatggggcatggcgaactgtgggaagtcaagcaggagcgcgaccgtatctatgccttgccggaaatgagcgaagaagacggctataaagtcgccgatctggaagtaaaatacggcgagatggacggttattccgctgaggcgcgtgcgggcgaactgctgttgggggtgggcatcccgctggagcagcattacggtctgatgagtgaagtcgcgccaggctggaaattgcgtgtgctactggcgcaggcgttattctctaatccggacatcctgttgctcgacgaaccgaccaacaacctggatattgatactatccgttggctggagcaggtgctgaacgagcgcgatagcacgatgatcatcatttcgcacgaccgtcacttcctgaacatggtttgtacgcatatggcggatctggattacggtgacttgcgcgtctatccgggtaactatgatgagtatatgacggcggcgacccaggcgcgtgaacgtctgttggccgataatgcgaagaaaaaagcgcaaattgccgagctgcaatcttttgttagccgttttagcgccaatgcctctaaatcgcgtcaggcaacgtcgcgcgcgcggcagattgataaaatcaagctggaagaggtgaaagcctccagccgtcagaacccgttcatccgttttgagcaggataaaaaactgttccgtaacgctctggaagtggaggcgctgacgaaaggttttgataacggtccgctgtttaaaaatgtcaatttgctgctcgaagtcggcgagaagctggcggtactcggcaccaatggcgtgggtaaatctacgctgctgaagacgctggttggcgatctggacgccgatcacggcaccgttaaatggtcggaaaacgcgcgtattggttactacgcgcaggaccacgaatatgaattcgaaaatgacctgacggtgtttgaatggatgagtcagtggaaacaggaaggcgacgacgagcaggcagtgcgcagtattctgggccgcctgttatttagccaggatgatatcaaaaagcctgcgaaagtcctctccggtggcgagaagggccgtatgctgttcggcaaactgatgatgcaaaagccgaatatcctgatcatggacgaaccgactaaccacctggatatggagtcgatcgaatcgctgaatatggcgctggagctgtatcagggcacgctgatctttgtttcgcacgaccgtgagttcgtcagctcgctggcaacccgcgtcattgaaattacgccggagcgcgtggtggacttcagcggtaactacgacgattatttgcgtagtaaagggattgaaagctaa

SEQ ID NO: 39672 - DNA, 810 bp, Salmonella typhi
atgaccgttaacgttgtcgttaccgatatggacggcacttttctcgacgatgccaagcagtacgatcgtgtacgcttcatggcgcaataccaggaactgaaaaaacgtaatatcgaatttgtggtcgccagcggtaatcagtactatcagttgatctccttcttccccgagctgaaagacgaaatttccttcgtcgcagaaaatggcgcgctggtgtatgaacatggcaagcagttgtttcacggagagctaacccggcatgaatcgcgtattgtgattggcgaactgctgaaggataagcagcttaacttcgtcgcctgcggtctgaaaagcgcttatgtcagcaaaaacgctcccgagactttcgtggcgctgatggccaaacattatcaccgcctgcagccggtaaacgattatcacgacattgacgatatcctgtttaagttctccctgaatttgcccgatgaacaaattccgctggttatcgacaaactgcacgtatctctggatggcatcatgaagcctgtcaccagcggcttcggttttatcgacctgattatcccgggactgcataaagcgaatggcatcagtcgtctgttaaagcgctggaacaggtcgccacagaatgtcgtcgccattggcgacagcggtaatgatgcggaaatgttgaaaatggcgcattactcttttgccatgggcaatgccgcagacaatatcaaagcgctttcacgttatcacactgatgataataaccatcaaggcgcgctcaacgtcattcaggccgtgcttgacggcaccgatcccttctga

SEQ ID NO: 39673 - DNA, 2433 bp, Salmonella typhi
atgacccaactgaaactggacacgctcagtgaccgcattaaggcgcacaaaaccgcgctggtacatatcgtgaaaccgccggtctgtaccgagcgcgcgcagcattataccgaaatgtatcagcaacatctggataaaccgattccggtacgccgcgcgctggcgctggcccatcacctggcggaacgcactatctggataaaacacgatgaactgatcgtcggcaaccaggcaagtgaagtccgcgccgcgccgattttcccggaatataccgtctcgtggattgaaaaagagatcgacgacctggcagaccggcccggcgcaggtttttccgtaagtgaagaaaacaaacgtattctgcacgacgtctgtccgtggtggcgcggtcaaaccgtccaggatcgctgctacggcatgtttaccgatgaacaaaaagggcttctggcgactggcattatcaaagccgaaggtaatatgacttccggtgacgcgcacctggcggtgaacttcccgctgctgctggaaaaagggcttgatgacctgcgcgataaagtcgccgagcgccgctcacgcatcaacctgaccgtgctggaagatctgcatggcgagcagttcctgaaggcgattgatattgtgctggacgcggtaagccagcatatcacgcgctttgccgcgctggcgcgccagatggcgggcgaagagtcccgtgaaagccgtcgtaaagagctacttaccatcgcggaaaactgcgaggtgatcgcccaccaaccgccgcagaccttctggcaagcactgcaattgtgctacttcatccaactgattctacaaattgagtctaacggtcactcggtgtcatttggtcgtatggaccagtatctttacccctattatcgtcgcgatgtcgaactaaaccagacgctggatcgtgagcacgccattgaactgctgcacagctgctggctgaaactgctggaagtaaacaagatccgctccggttcgcactctaaagcttccgcgggcagcccgctgtatcaaaacgtcaccattggcggtcagaatcttatcaacggtcagccaatggacgcagtgaatccgctgtcttacgctattctggagtcctgcggacgtttgcgttctacccagcccaacctcagtgtgcgttatcacgccggaatgagtaacgatttccttgacgcctgcgtccaggtcatccgctgcggctttgggatgccggcgtttaacaatgatgaaatcgtcatcccggaatttatcaagttggggatcgaaccacaggacgcttacgattacgcggcgatcggctgtatcgaaaccgccgtcggcgggaaatggggttatcgctgcaccggcatgagctttattaacttcgcccgcgtcatgctggcggcgctggaaggcggtcgcgacgccaccagcggcaaggtatttctgccgcaggaaaaggcgctctccgcaggcaactttaacaattttgacgaagtgatggccgcctgggatacccaaattcgctactacacgcgcaaatcgatcgaaattgagtatgtggtcgacaccatgctggaagagaacgtccacgatattctgtgctcagcgctggtagacgactgtattgaacgcgcgaagagtatcaagcaaggcggcgcaaaatatgactgggtatccggtctgcaggtcggtatcgccaacctgggcaacagcctcgccgccgtgaaaaaactggtcttcgaacagggcgttatcggtcaacagcagcttgccgccgcgctggccgatgactttgacgggctgccccatgagcagctgcgccagcgtctgattaacggcgcgccgaaatacggtaacgacgatgacagtgtcgataccctgctggcgcgcgcttatcagacctatattgatgagctgaagcaataccataacccgcgctatggtcgtggccctgtgggcggcaactattacgccggtacgtcctctatctcagcaaacgtgccatttggcgccgcaactatggctaccccggatggtcgcaaagcgcatacaccgctggcggaaggcgcaagccctgcatcgggtacggatcatctcggcccgacggcggtgattggttccgtaggcaaattacctaccggttccattctcggcggcgtgctgctcaatcagaaactgaacccaacgacgctggaaaacgaatccgacaaacagaaactgatggttctgctacggacgttctttgaggtgcataaaggctggcatattcagtacaacatcgtgtcacgcgaaacgctgctggatgcgaaaaaacatccggaccagtaccgcgatctggtcgtgcgtgtggcaggctactccgccttcttcaccgcgctgtcgccggacgcgcaggacgatatcatcgcccgtaccgaacatatgctgtaa

SEQ ID NO: 39674 - DNA, 906 bp, Salmonella typhi
atgcgttacgacatcagtcgtgacgcgatctgctatggattttttatgagattactaaaacgcgttattgtggttgtactcttgggcgtgattttatttatggtcagggacgatatacgctatgtttatcaactgatcctcaaatatggtgataaaccctcggcgctagcactgagtagctataaagcggttattcagcaaaaaccagtcgcaggagttaagagtaacctttcaggtttgacctactccgccgaagacaggatgcttttcgccgttattaataatccccctgaactggtctggttaacgacagaagggcagctggtagggcggatgccgctgcagggcatccacgacccggagtctattgcatggagtgggggcaaccagttccagataggcagtgagaaagatggcgcggtctataaaacacaggtggatattcagcgcggcgctatgcagataatctccatggtgaagcttgagggctatgacaaagcaaaaaataaagggctggaaggtacggcatgggatgcgaaaaatgagagattatatgccgcaaaagaaagaaaacccattatgatcaaagaagtagagatgagcaaaaatggtatcaccagagcgttgccttctgccatcactgcgagtgtgagcgatgtctccggacttgaataccatgccccaacggattcgctgctggtgttgtcggacgagtcaaaaatgattctggaggtcagttccgagtggcgggtgcgcgatcgattgttcctgacggcggagtggtcagggctcagagacgatataccccaaccagaagggattgccatggataatgaaaataatttgtatattgtgagtgaaccaaatctgttttataaattttcgtgtgatatacagaatgactaa

SEQ ID NO: 39675 - DNA, 876 bp, Salmonella typhi
atgctaaaggtgtttaatccctcacctgtccaggtggggagcattgaatgtttacaatcagcgcaaaactggcagaggaaatccttatcacttcagggattaaatttactgcagtccgtactcatcaagctcaccacgggtaaaatttcaattacgacatcgtccggggagtatattacggcatcagggccaatgttaatatttttagctaaagatcaaaccattcatatcactatggaagagactcatgaacagttaaattataatttaattgaattagattcagcgtcaataaaaaatgcttataatttttttctgtatgaacatgcagacttttcggccccattaacaaaaccgacgacaaaacatctgttagcgccaatagaaacaggcgtagcaagagtattcaacctcttacactcttcaaataaaagccagaaattatcccaagataaaaaggaatatttaataagatttctgctttcagagttcatctatgaacctgaagcatttgctctcttcagagaactatcgcaaaatacattagccgaaaacatctataatattattataagcgacataagtcgaaaatgggcgctcaaggatatttctgactcactctatatgagttgttccacattaaaaaggaaattgaaacaagagcacacctcattcagtgaagtttaccttaatgcgcgaatgaataaagcgacaaaacttctacgcaatagtgaatataatattactcgagtggcttatatgtgtggttatgatagtgcttcttattttacatgcgtttttaaaaaacatttcaaaactacaccatcggaatttttagcgtttttatcctcctctcgtcatcaatatgttaattga

SEQ ID NO: 39676 - DNA, 1365 bp, Salmonella typhi
atgagccataaatctgtttctgcagtatccatgctgtttaatgtcggagctgaaaccggtgttctgggcggactgatgctcgataacgaccgctgggatgaaattgcgccgcttctgaattccggagatttttattatggccagcatcagatcatttttcgggagatagaacggttggtcagtgctggcctgcccattgacctgataaccctgtccgaatccatggagcgaaaagatctgctggagcggtgcgggggggtcgcttatctggctgaactgtcaaaaaacacgcccagcgccgccaatatcgttgcttatgccgaaattgtgcgcgagtacagtcgtaagcgacggctggttaagctggggcatgagctacatcaactggcctcagtcggcgatgcggatatacccggtctgattgaaaaggccgaaaagcagttatttagtctggctcagcaggcctgtgaccccgacatttgtctgagcgtaacgactcaggtcgctgacacggtcagctggctggaatcggtcagtgggggaagcggtgtgaccggtacagcgacaggttttgctgaactggatgagaaaacctgtggctggcaggacggtgacctgattttactgggtgcccggccatcaatggggaaaacggcagaagcactgaaacatgccgttgctgcgctggaaggcagtcccggcaagaccgttcagttctacagcatagagatgccaacccagcagctgataatgcgtctgctttcaatgctggccagagtgcccttcgataacctgcgcaaaggtctgctgagcgaagggcagtggagtttacttgcggatgccgtagcaaaactgacctcctgggaaggacgtttgctgatagacgataccagttatcagacgccttccacgttacgtatcagcgcgcggcgtaatgtgcgtaaatacggtcagccctcacttattcttgttgattatcttcagttaatgagttgtcctggccgggagaaccgcactcaggaaattcaggagatttcccgttcgctcaagtcactggccaaagagataaggtgccctgtggcagctttatcccagctcaatcgcagcgttgaacagcgtcaggataaacgtccgatggtcagtgaccttcgggattccggctcactggagcaggatgcggatgtcatcatgttcctgtaccgcgatgaagtttataacgagcactccccggatagaggcatagctgaaatcattctgggtaagcaacgtcaggggccgctgggcactgtcaaagttcgctttgagggggagtatatgcgcttctcggagtatcaccttggttatggggaggtgagctatggctaa

SEQ ID NO: 39677 - DNA, 1242 bp, Salmonella typhi
atgttcatggaattttccgccggattgatgccgcttgaaacggcgctgacccagatgctttcacgtattaccccgctcaccgccgtagaaacgttgccgctgatgaactgctttggccgcatcctggcgaccgatatcgtatctccccttgatgtccccggctttgataattcagctatggatggttatgcggtacgtgtggcggatttgtccgccgataagccgctgcccgtcgccggcaaagcatttgccggtcagccttaccaaggagaatggcctgcgggaacctgtattcgcattatgaccggcgccccggtgccggcaggttgcgaggcggtcgtcatgcaagagcagacggaacaaactgatgacggcgtgcgttttaccaccgatgttcgttgcggacaaaacatccgccgccgcggcgaggatattcgccaggatgcggtggtctttccagccggtacgcgcctgactactgccgaactgccggtgctggcgtcgctgggaattgccgatgcgcaggtagtacgtaaagtgcgcgtagcgctgttctcgaccggcgacgagctccagcttccgggccagctgctggaggcgggacaaatttatgacactaaccgtctaactatacatttgatgctgcaacagcttggctgcgaagtgatcaatttaggcattattcctgacgatcccggtaagcttcgcgccgcgtttgtcgacgccgacagccaggccgatgtagtgataagctccggcggcgtctcggttggtgaagcggactataccaaaaccatccttgaggagctgggcgaaatcgccttctggaagctggctatcaagccaggcaaaccgtttgccttcggcaagctcagtaatagctggttctgtggcctgccggggaatccagtctctgcggcgctcacgttttatcaactggttcagcccttactggcgaagcttggcggcaatacggcaagcgctgtaccgccgcgccagcgtgtacgcacaacatctcgcctgaagaaaacgccggggcgtctcgatttccagcgcggcatcctgcaacgtagcgccaacggcgaactggaggtcacgaccaccggacaccagggctcacatattttcagctcgtttaatctgggcaactgctttattgtgctggagcgtgaacgcggcaatgttgagccgggagaatgggtggaagtcgagccgtttaatgctctgttcggaggcctgtaa

SEQ ID NO: 39678 - DNA, 1872 bp, Salmonella typhi
gtgccgcacagcgatgaactggatagccgcgatgttctgtccgtcagtggcctgaatatcgcgtttcaccacgaagggcaacaggtagacgccgtgcgtaatgtgtcattacgcctgaagcgtggagagactctgacgattgtcggcgagtcgggctcgggaaaatcggtgacggcgctggcgttaatgcggctgattgagcagtcgggcgcgaacgtgcgctgcggcgaaatgctgttgcgtcggcgtaatcgccaggtgattgagctgtctgagcagagtgacgcgcagatgcggcgtgtgcgcggcgcggatatcgccatgattttccaggagccaatgacctcgctcaacccggtatttaccgttggcgagcaaattgccgaatctattcgtttgcatcagggggccagccacgaagaggcgctggcggaagcgaaacgtatgctcgatcaggtacggatcccggagtcgcaggcgattttatcgcgttatccgcatcagctttccggcgggatgcgccagcgagtcatgattgcgatggcgctatcctgccgtccggcggtattgattgccgatgaacccaccacggcgctggatgtcactatccaggcgcaaattctgcaacttatcaaagtgttgcagcaagagatgtcgatgggcgtgatttttatcactcacgacatgggcgtcgtggcggatattgccgatcgcgtgctggtgatgtatcagggcgaggccgtggaaaccggcagcgtagagcagattttccatgcgccgacgcatccttatacccaaacgttactggccgccgtccctcagcttggcgcgatgcgaggccactcgctgccacgccgtttcccgttgatttccgctgacgaaccggccctttatgaatcgcagattgagcaagacacggtggtggaaggcgaacctattctccaggttcgggggctggtgacgcgattcccgctgcgtagcggtctctttaaccgcgttacgcgtgaagttcatgccgttgagaatatcagtttcgatctctggcccggcgaaacgctatcgctggtgggcgagtccggtagcggaaaatcgacgaccggacgcgcgctgctgcggttggttgaatcccggcagggggagattatctttaacggccagcgcattgacacgctgtctgcgggtaaactccagccgttgcgccgcgatattcagtgtattttccaggacccttacgcctcgctcgacccgcgccagaccgtggggtattccattatggaacctttacggattcatggtctggggcagggggacgctgcggcaaagcgcgtggcctggttgcttgagcgtgtcggattacgtcctgaacatgcctggcgttatccgcacgagttttccggcggtcaacgtcagcgcatctgcattgctcgcgcgctggcattgaatcctaaagtgattattgctgatgaggcggtctccgcgctggatgtttccgttcgcggacagatcattaatttactgctcgatttacaacgggaaatggggatcgcctacctgtttatttcgcatgatatggcggtcgtggagcgaattagccatcgcgtggcggtgatgtatcttggtcaaattgttgagatggggccgcggcgcgccgtttttgaaaatccgcagcatccttatacgcgtaaattgatggcggcggtgccggttgccgatccctccagacaccggccgcggcgcgttctgctatcagatgatatacccagcaatattcataaacgtggcgaagagacgcccgccgtttcattacagttggtcgggccgggacattatgttgcgcggccgctgcaggataatgcgctctcgcgcttataa

SEQ ID NO: 39679 - DNA, 912 bp, Salmonella typhi
atgcgattatttaactggcgccgtcaggcgattttacatgctatgccggtggtaaaacccgaccagatacgcacgccgtggcgggagttctggcgtcgttttcgccgccagcatgtcgcgttggtcgccgggggattcgtactggcgttaattctggtggcgatttttgcccgttggctaacgccctacgatgcggaaaactattttgactacgatagcctgaacaatggcccctctttgcagcattggtttggcgttgactcgctgggaagagacatctttagccgggttctcgttggcgcgcagatctcactggcggcgggcgtgttcgcggtatttatcggcgcgataatcggcacggtgttgggattgctggcgggatattatgaaggctggtgggatcgtttcattatgcgcatttgcgatgtgttgttcgccttccccggcattttgctggcgattgccgttgtggcggtgttaggcagcggtattgctaatgtgatcgttgcggtggcgattttctctattccggcgtttgctcgtctggtgcgcggaaataccctggtcttaaaacagcagacgtttattgagtctgcccgcagtatcggcgccagcgacacgacgattttgtttagccacatcttgccgggaacggtctcgtcaattgtggttttctttacgatgcgtatcggtacgtcaattatttccgcggcaagcctgtcatttctcgggttaggcgcgcagccgccaacgccggagtggggagcgatgcttaatgaagcgcgggcggatatggtcatcgcgccgcacgtggcgctcttcccggcggtggcgattttcctgactgtgctggcgtttaatctgttaggcgacgggttgcgcgatgcgctggacccgaagattaaggggtaa

SEQ ID NO: 39680 - DNA, 1326 bp, Salmonella typhi
atgagtaatgtaacccaccagccaaagatcggcttcgtttccctgggctgtccgaaaaacctcgttgattcggaacgaatcctgactgagctgcgtaccgaaggctatgacgttgtgccacactatgacgatgcggatatggttatcgttaatacctgtggctttattgacagcgcggtacaagagtcactggaagccattggcgaagcgctgaacgaaaacggtaaggtaatcgtcaccggctgcctgggcgcaaaagaagatcagatccgcgaagtgcatccgaaagtactggaaatcaccgggccgcatagctatgagcaagttctgcagcacgtacatcattacgtaccgaagccgaagcacaatccatttttaagcctcgtaccggaacagggtgtaaaactgacgccgcgccattatgcgtatctgaaaatttctgaaggctgtaatcaccgctgcacgttctgcatcatcccgtcgatgcgcggggatctggtcagccgtccgattggcgacgtattaagcgaagcgaaacgtctggttgatgccggggtcaaagagattctggtgatttcgcaagatacctccgcctacggcgtagatgtgaagcaccgcaccggattccataatggcgaaccgatgaaaaccagtatggtgagcctgtgcgagcagttatcaaaactgggcgtctggacacgtctgcactacgtctacccctacccacacgttgatgatgtgattccgctaatggcggaaggcaaaatcctgccttatctggacattccgctgcaacatgccagcccgcggattcttaaactgatgaaacgtcctggttccgttgaccgccagctggcgcgcattaagcagtggcgcgaaatctgcccggaactgaccctacgctccacctttattgtcggcttccccggcgaaacggaagaagacttccagatgctgctcgacttcctgaaagaggcgcgcctcgatcgtgtaggctgcttcaagtacagcccggtggaaggcgcaggcgcgaatgagctgccggatcaggtgccggaagaggtgaaagaagagcgctggaaccgctttatgcaactgcaacagcaaatctccgctgagcgcttgcaggaaaaagtgggccgcgaaattctggtgatcgtcgatgaggttgacgaagaaggcgctatcgggcgtagcatggcggatgcgccggaaattgacggcgcggtctatttgaacggcgaaaccaacgtcaagccgggcgatatcgtgcgcgtgaaagtggaaaacgccgacgaatatgatttgtggggcagtcgggtttaa

SEQ ID NO: 39681 - DNA, 1995 bp, Salmonella typhi
atgcgtctggtgttgtgtgaaaaaccttctcagggcagagatattgcgaagtttcttggcgccactcaaagaggcgaaggattcctgaatggtccgggagttacagtcacctgggctcgcggccatctgctggagacagctgaaccggaagtatatggcgaacagtatggtaagccatggcgcaccgatgtgcttcctttattaccacagcagtggaaactggtagtcaaagcggatgcaaaagcccaattcgcggtaattaaccgtctgcttaaacaggtagatgaggtggtaattgccacggatgctgaccgggaaggtgaagtaatcgcccgtgagttgctggattactgcaagtttcaggggcgtgtattccggttgtggatgtcagctctggatgatgccagtatccggtcagcgttagctgatttgtggccgtcttcccgaactgaatcgctttattatgctggcgtgggcaggagcagggctgactggctgatcggtatgaatctgactcgcctgtttacactcctggggcgtgaagcgggtatcggtaacgtactttcagttggccgggtacaaacgccaacgctggcgatagtggtaaagcgtgatcgtgaaattgataacttcgtgtcgaaaccgtacttcgaagttattgccacgatggccgtgaatggcgtgttgtttccatccaaatgggtaccggctgcacagtattgcgatgaagagaagcgttgtatccagtcgggggtagcggcacaggtggttcagttgtgtcggcaaacgccaacggctgcgataatcaattgccagatcgagaggaaaaaacaatcagcgccgctggctttcagcctgagcacactacaacaggcctgctcccgacactgggggatgccagcccagacggtacttgatatcgcccagaagttatatgaaacccacaaactgacgacctatcccagaactgactgtggttatctgccgttatcgatgcgagaagaaatcccacaggtactgtctgctgtggtcggaactgatccggcgctacagccggtggtcgcgagtctggacactcagtttgtgtcacgtatctggaatgataaaaaaattaccgctcatcacggtatcattccgacaaaacatactggtgatctgagcaaactcagtgatgctgagcgcaatgtctatcagctggtcaggttgcactacctggcccagttcctgccccagatggaaattgacgtgactgaggccacatttaatattggcggtcagcttttccgtacccgtggtaacgttttggtgaaacccggctggaaatctctgtttggcaaaatgtccgaagatgatgaggataatactggtgaaaccacactgcccgccatgcaggcgggccaggtctgccaggtgcagggcgctgagcagaaggtactgcagacaaaaccgcctgctccgtacaacgatggaactcttattgccgcgatgaccaatgcggcggcgttcgttactgacgccgcgctgaaaaaggtgctcaaagagaatgcggggataggaactgaagcaacacgggccgggataatcgacacgctgttgaagcgtgggtttctggtgcgtgagaaaaagacgcttaagtcaacacctcttggacgtaacctggtggatgtgttgccaggaacgttaacgaatcccggacttacggcactgtgggaacagatgctggatgaggtagctgcaggcagggtgagcctggatgactttatggcaaagcaaagtcagtgggtcagtcagctggtcgctcaggggagatcacagccactgactatgcaggcgccaccttcaccaccctgtcctgtatgtggcggcaagacgttgcagcgcaatggaaagagtggcttgttctggggctgcctgaaatatccggagtgcaaaggtatcgtgaacaatggtaacaagggccccagaggacgcagacgaaaaccttcgccagcctag

SEQ ID NO: 39682 - DNA, 537 bp, Salmonella typhi
atggcttctaaaggtgtaaacaaagttattctggtgggaaatctgggacaggatcctgaggtgcgttatatgccaaatggcggtgccgtggtaaacctcagtctggcaacctcagatacctggacagataaacagaccggtgacaaaaaagagcgcactgaatggcacagggtggttctttacggcaagctggccgaaattgccagtgagtatctgcgtaagggctcccaggtatacatcgaaggtgcattacgcacccgcaaatggacggatcagtctggcgttgaaaagtacactacagaagtggtcgtcagccagtcaggtacgatgcagatgttgggcggacgaaatagtgcgggaagtgggcagcaacagggcggctggggtcagcctcagcaaccagcagcgccttctcacagcgggatgccacctcaacagcatcctgcaaatgagccgccaatggacttcgacgatgatatcccgttcgcgccgttcgggcacagtgtggccagacatgcgctttatgtgctgtcctga

SEQ ID NO: 39683 - DNA, 609 bp, Salmonella typhi
atgctggaaaaccttaacaactcgctgttttattttattaacgccacgcctgattccgcgcagtggataatttcgctcgctatctttatcgccaaagatgtcatcaacatcgtcccgctcttagccgtggtactctggctgtgggggccccgcgatcgggtctgcgcccagcgccagctgatcgttaaaatcggcatcgcgctgattatcagtctggcggtctcctggacaatgggacaccttttcccgcacgaccgtccgtttgtcgatcatatcggctataacttcctgcatcatgccgccgatgactcgttccccagcgatcacggtacggtgatttttacctttgcgctggcgtttttgttctggcaccgcctctggtcaggcatcgtgatgatggcgatagccatgaccatcgcctggtcgcgcgtctatctcggcgtacactggccgttagatatgattggcgcgctgctggtagcgatgcttggctgcctgagcgcacagctgatctggcaatggtacggcgcgccgctctaccaggcgctgcaacgttgttaccgtttctgtttcgcattgcccattcgaaaaggctgggtacgtgactaa

SEQ ID NO: 39684 - DNA, 561 bp, Salmonella typhi
gtgagacaaaaggggggggttatgacatcacgtcttcaggtcatacagggtgatatcactcaacttagcgtcgatgcgattgtgaatgccgctaacgcatcattaatgggcggcggtggcgtagacggcgcaattcatcgcgcggcggggccggcattgctggacgcctgtaaactcatccgtcagcaacagggcgaatgtcagacgggacatgcggttatcacgcctgctggcaagctttcggcaaaggcggttattcacacagtggggcccgtctggcgaggcggcgaacaccaggaagctgagctactcgaagaggcataccggaattgtttgctgcttgccgaggcgaatcactttcgttccatcgcttttccggcaatcagtaccggcgtttatggctatccacgcgcccaggccgctgaagtcgccgtcaggacggtttcagattttattacccgttacgctctgcctgaacaggtatactttgtctgttatgatgaagaaactgcccggctttacgcaagattacttactcagcaaggcgacgaccctgcctga

SEQ ID NO: 39685 - DNA, 2544 bp, Salmonella typhi
atgaataaaacaactgagtatattgacgcactgctgctttctgaacgtgagaaagcggcattgccgaaaactgacatccgcgccgtgcatcaggcgctggatgccgagcatcggacttactcgcgagaagacgattcaccgcagggttccgtaaaagcccgccttgaacacgcctggccggattcattggcgaaggggcagttaattaaagatgatgaagggcgcgatcagttgcaggctatgccaaaagcgacgcgctcttcgatgtttcctgatccctggcgaaccaacccggttggccgtttctgggatcgcctgcgtgggcgggatgtaacgccgcgctatgtttctcgtctgacaaaagaagagcaggcgagtgagcaaaaatggcgtaccgtcggcactatacgccgctatattttgttaattttgactctggcgcaaaccgtcgtcgcgacctggtatatgaagaccattctgccctatcagggatgggcgctcatcaatcctatggatatggtggggcaggatatttgggtctcctttatgcagctcctgccctacatgctgcaaaccggtatcctgattttgtttgccgtgctgttctgctgggtgtctgccggattctggacggcgctgatgggcttcctgcaactgcttatcgggcgcgataagtacagtatctccgcgtctacggttggcgatgagcccctcaatccggaacaccagacggcgctgatcatgcctatctgtaatgaagacgttagccgcgttttcgccggtctgcgcgcgacctgggagtccgttaaagccacaggcaacgccgcgcattttgacgtctatatccttagcgatagttataacccggatatctgcgtggcggagcaaaaggcgtggatggagctcatcgcggaagtgcagggcgaaggccaaattttttaccgtcgccgccgccgccgtatgaaacgcaaaagcggcaatattgacgatttttgccgccgctggggcaatcagtacagctatatggtggtgctggacgcggactcagtgatgagcggcgagtgtctgagcgggctggtgcgcctgatggaagcgaaccctaacgccgggattatccagtcttcgccgaaagcgtcggggatggatactctgtatgcccgctgccaacagttcgcgacccgtgtttatggaccgctgtttaccgccgggctgcacttctggcagttgggggagtcgcactactgggggcacaatgccattatccgcgtgaagccgtttatcgagcactgcgctctggcgccgctgccgggagaaggttcgttcgccggatcgattctttcccacgactttgtggaggcggcgctaatgcgtcgggcagggtggggcgtctggattgcctacgatctccccggctcctatgaagagctgccgccaaacctgctggatgagcttaaacgcgaccgccgctggtgtcacggcaacctgatgaactttcgtctgttcctggtgaaaggaatgcacccggtgcatcgcgccgtgttcctgaccggggtaatgtcatacctgtccgcgccgttatggtttatgttcctcgcgctttctaccgcgctgcaggtcgttcatgcgttaacagagccgcaatatttccttcagccgcgccagctttttccggtctggccgcagtggcgtccggaactggcaatcgcgctgtttgcgtcaacgatggtgctgctgttcctgccgaagctgctcagtattatgctgatctggtgtaaaggcaccaaagagtatggcggtttctggcgcgttacgctgtcgctattgctggaagtgctgttctccgtgttgctggcgccggtgcgtatgctgtttcataccgtgtttgtggtcagcgcgttcctcggctgggaagtggtctggaactcaccgcaacgcgacgatgattctacgccgtggggagaagcctttatgcgtcacggctctcaactgctgctggggctggtctgggcggtgggtatggcgtggctggatttacgctttctgttctggctggcgccgattgtcttttcgctgattctgtcgccatttgtttcggtgatctccagtcgttcaacggtaggattacgcaccaaacgctggaagctgttcctgatcccggaagagtattcgccgcctcaggtgttggtcgataccgataaatatctggagatgaatcgccgccgtattctggacgatggctttatgcatgcggtatttaacccgtcgcttaatgcgctggcgaccgcgatggccaccgcgcgtcaccgcgccagtaaggtgctggaaatagcccgcgatcgtcatgtggagcaggcgctaaacgaaacgccggagaaactgaaccgcgatcggcgtctggttttgctcagcgatccggtgacgatggcgcgtttacactatcgggtctggaatgcgccagagagatactcttcctgggtaaaccattatcagtctctcgtcctgaatccgcaggcgttgcagggacgaacatcgtcagcgggataa

SEQ ID NO: 39686 - DNA, 1215 bp, Salmonella typhi
atgtcaccctctgatgtccccataaactggaaacgcaatctaaccgttacctggctgggctgttttttaaccggcgcggcattcagtctggtcatgccttttctccctctctacgttgagcaactcggcgtaacaggccatagcgcgctcaacatgtggtccgggctggtctttagtattacgttcctcttttcagctatcgcttcccctttttggggcggtctggcggatcgtaaagggcgtaagatcatactgttgcgttccgctctcggcatggccattgtgatgctgttaatgggcatggcgcaaaatatctggcaatttctgatcctccgcgcgttattaggcctgctgggcggatttattcccaacgccaatgcgctcatcgccactcaggtgccgcgccacaaaagcggctgggcgttagggacgctctctactggcggcgtcagcggcgctctgcttggcccacttgcgggcggtctgctcgccgaccattacggccttcgcccggtcttttttattaccgccagcgttttgtttatctgttttctgctcaccttcttttttattcgcgagaatttcctgccggtgagcaaaaaagagatgcttcacgttcgggaagtggtcgcctcgttaaaaaatccccgcctggtgttaagcctgtttgtcaccacgctgattattcaggtggcgacggggtctattgcgcccatcctgacgctctatgtgcgcgaactcgcgggaaatgtcagtaatattgcgttcattagcgggatgatagcgtccgttcccggcgtggcggcattacttagcgccccccggctcggcaagctcggcgacagaattggcccggaaaagatccttatcgtcgcgctgattatttccgtactgctgctgattccaatgtcttttgtgcaaacgccgtggcagctcgcgctattgcggtttctgcttggcgcggcggatggcgcgctgctgccagccgttcaaactctgctggtttacaactctaccaaccagatagccgggcgcatattcagttacaaccaatctttccgcgatatcggcaacgtcaccggccctctcatgggtgccgcaatttccgcgagctatggcttccgcgccgtattctgcgtcacggcaggcgtggtgttgttcaatgctatctattcatggaacagcttacgacggcgcagactggcaatagaatga

SEQ ID NO: 39687 - DNA, 846 bp, Salmonella typhi
atgaataacttaccggtcgttcgctcgccctggcgcattctgattctggtgctggggtttacttttctctatgcgccgatgttaatgttggtgatttactcgtttaacagttcgaagctggtgacggtgtgggcgggatggtcgacgcgctggtatggcgagctctttcgggataccgccatgatgagcgcagtgggactaagcctgacaattgccgcctgcgcggcgacgatggcggtggtgctcggtactatcgccgcggtggtgatggtgcgatttggacgatttcgcggcgcaaacggctttgcgtttatgatcaccgcgccgctggtgatgccggatgtgattaccgggctgtcgctgctgctgctgtttgtcgcgctcggtcatactatcggctggccctccgatcgcggaatgctgaccatctggttggcgcacgtcactttctgtaccgcctatgtggcagtggtgatcgcttcgagattacgcgaactggatcgttcgattgaagaggcggcgatggatcttggcgcggcgccgttgaaggtcttttttgtcattacgttaccgatgatcatgccagcggtgatctcgggctggctgttggcctttacgctctcccttgacgatctggtgattgccagcttcgtttccggtcccggcgccaccacgctaccgatgctggttttctccagcgtgcgcatgggtgtgaacccggaaatcaacgcgctggcgacgttaatcctcggcgtggtaggaatcatcggatttattgcctggtacctgatggcgcgagcggaaaaacagcggattcgcgatatccagcgtgcaagacgcggctga

SEQ ID NO: 39688 - DNA, 1053 bp, Salmonella typhi
atgccagtgttacacaaccgcatctctaatgacgagctgaaagccaaaatgctggcggaaagcgagccgcgtacgacaatttctttttataaatatttcactatcgcctcgccgcaacagacgcgggacgcgttgtatcaggtgtttacggcgttggacgtttttggtcgcgtttacctggcgcatgagggcatcaatgcgcaaatcagcgtgccgcaaagcaaggttgagacctttcgtcaacagctttatacgttcgaccccgcgctggacggggtgcgtttaaatatcgcgctggaggatgacggaaagtcattttgggtgctgcgtatgaaagttcgcgaccgtatcgtcgctgacggtattgacgatccgagttttgacgccagtaatgtcggcgattatctgaaggcggcagatgtgaatgcgatgctggacgatcctgacgcggtctttattgatatgcgcaaccactatgagtatgaagtcggccatttcgaaaatgctctggaaatcccggcggatacgtttcgtgaacagttgccaaaagcggttgaaatgctgcgggaacatgcagataaaaagatagtgatgtactgtaccggcggtattcgttgtgagaaagccagcgcctggatgaaacacaacggtttcaataaagtctggcatattgagggtggcatcattgagtacgcccgtcgcgcgcgcgagcaggggcttcccgttcgctttatcggcaaaaactttgtatttgatgagcgaatgggcgagcgcatctcggatgaggttatcgcgcattgccatcagtgcggcgtgtcctgcgatagccataccaactgcaaaaacgacggttgccatctgctgtttatccagtgtccgcagtgcgccagtaaatttaacggctgctgtagtgaacaatgctgtgaagagttggccttgccggaggaagaacagcgccgacgtcgcgcgggtcgtgagaacggcaacaaaatttttaataaatcgcggggtcggcttaatagcaaactgagcattcccgatccggctgagtaa

SEQ ID NO: 39689 - DNA, 474 bp, Salmonella typhi
ttgggatttataaagcaatcaacctcatcacatgcccgtttaaatgtgcctacgctggtgcaggttgcggctatggcgattattttgattcgcggtctcgatgtgctgatgattatgaataccctcggcatacgcgggatgggcgagtttattcatcgcagcgtgcagacgtggagcttaaccctggtctttctggccagcttagtgctggtctttattgaaatttattgtgcgttttcgctggtgaaaggccgtagctgggcgcgctgggtgtacctggcggcacaaattattgtgagtgggtatctgtgggcggcgtcgttaggctacgggtatccggagttgtttagcatcgcgggagaatcgaagcgtgatatcctgcattccctggtcatgcaaaaactccccgatcttttaattctgtttctgctgtttattcccgctcccagccgtcggttcttccggctgcaataa

SEQ ID NO: 39690 - DNA, 576 bp, Salmonella typhi
atgaaaaaaaacctgctgggattcaccctcgcatccttgttattcacgaccggttccgccgtggcggcggagtataaaattgataaagaaggccaacatgcgttcgtcaatttccgcatccagcatctgggctacagctggctatacggcacctttaaagatttcgacggcacgttcacttttgacgaaaaaaatccgtcagcagacaaagtgaatgtgaccattaacaccaatagcgtcgacactaaccatgccgaacgtgacaaacacctgcgtagcgcggagtttcttaatgttgcgaaattcccgcaggcaaccttcacctctaccagcgtgaaaaaagagggcgatgaactggatattaccggcaatctgacgctcaatggcgtgactaaaccggtgacgctggaagcgaagctgatgggccagggcgacgatccgtggggcggtaagcgcgcgggctttgaggccgaaggaaaaattaagctgaaagatttcaatataactaccgatctcggcccagcctcacaagaggtggagcttatcatctcagtagaaggcgttcagcagaagtaa

SEQ ID NO: 39691 - DNA, 114 bp, Salmonella typhi
atgcgtcgtctctttcattttctgatgaataatattcgcgaacatttcatgctttacgttattctttggtcgctgctggcggtgatggatattgtttatctccttttcttctga

SEQ ID NO: 39692 - DNA, 1119 bp, Salmonella typhi
atgaaatacgaccttattattatcggcagcggttcggttggcgccgccgctggttattacgccacccgcgccgggctaaaggtcctgatgaccgatgcgcatatgccgccttatcaacagggcagccaccacggcgatacccgtcttatccgccacgcttatggtgaaggcgaaaaatatgtcccgctggtgcttcgcgcccagacgctttgggatgagctctccacacacaatgaagagcctatttttgtccgctccggcgtcgtcaacctcggcccggccgattccgctttcttagccaacgtcgcacgaagcgcgcaacagtggcaattgaacgtcgagcgcctggacgcgacggccctcatgacgcgctggccggaaattcgcgtgcccgataattatatcgggctgtttgaagctgactccggtttcctgcgcagcgaattagccattaccacatggcttcgtctggcccgagaggcaggctgcgcacagctattcaacagcccggtaagccatattcaccatgatgataacggtgtgacgatagagacgagtgaaggctgctaccacgccagcaaagcgctgattagcgcgggcacctgggtcaaaacgctggtaccggagctgcccgttcagcccgtacgtaaagtttttgcctggtttaaggcggatggacgttacagcactaaaaaccgctttccggcctttaccggcgaaatgcccaacggcgatcactattacggtttcccggcggagaacgacgagttaaaaatcggcaaacacaatggcgggcagcgaatacaggcaccggaagagcgcaagccctttgccgccgttgccagcgatggcgcggaagcatttcctttcctgcgtaacgtactgccgggtatcggcggttgtttacatggggcggcatgtacctatgataattcgccggacgaggattttattatcgatacgctgcctggccatgagaatacgcttgtcatcactggactcagcggacatggttttaaattcgccccggtgttaggagaaatcgctgcggattttgcgttgggaaaaacgccctcctttgatctgacgccgttccggctttcccgttttagccaataa

SEQ ID NO: 39693 - DNA, 246 bp, Salmonella typhi
atgcgtattgaagtcactatagccaaaacgtcacctctgcctgccggtgcgattggtgcgctggcgggcgaactctcccgccgtattagccatcattttcctgagaatttgggtaacgtcaccgtgcgttacgctaccgccaacaacttgtccgtcattggcgcgtcaaaagaggataaagaacgcattagcgagattctccaggagacctgggagagcgctgatgactggttcatcaatgaataa

SEQ ID NO: 39694 - DNA, 1047 bp, Salmonella typhi
atgactgcaccatcccaggttttaaagatccgccgcccggacgactggcacgttcaccttcgcgatggcgacatgttaaaaacggtcgtaccctataccagcgaaatttatggtcgcgctatcgtgatgccgaacctggcgtcccccattacgaccgttgatgcagcgatcgcctaccgccagcgtattctcgatgcggtgcccgccgggcatgatttcacgccgttaatgacctgctatttaacggattcgctcgatgccgatgaactggagcgtggtttccatgaaggcgtgtttactgcggccaagctttacccggccaatgccaccactaactccagtcatggcgtaacgtcagtcgacgctatcatgccggtactggagcggatggaaaaactcggaatgccattgctggtccacggtgaggtgacccatgcggatgttgatatcttcgatcgcgaagcgcgttttatcgacaccgtaatggaaccgctacgccagcgtctgaccgcgcttaaagtggtctttgaacacatcacaaccaaagatgccgcgcagtatgtacgtgacggcagctacaacctggcggcgaccattacgcctcaacatttaatgtttaaccgtaatgatatgctggttggcggcattcgtcctcacctgtactgtctgccgattctgaaacgcaatattcaccagcaggcgttacgcgacctggtcgccagtggttttacgcgcgccttcctggggacggattcagcgccgcattcacgtcatcgtaaagagacccgttgcggctgcgccggttgtttcaacgccccctccgctcttggcagttatgccgccgtgtttgaggaaatgaacgcgctggcgcactttgaagcgttctgttcactgaatggcccgcaattctatggcctgccggtgaatacggggtgggtggaactggttcgcgatgaacaacagataccggaaaatatcgcgctggctgatgattcgctggtgccttttttagcgggtgaaacagtacgctggtcagtaaaaaaataa

SEQ ID NO: 39695 - DNA, 732 bp, Salmonella typhi
atgaaaaagttagttctggctgcattactcgcctctttcgccactggcagcatcgccgctgaaaaaatcaatttcggggtttccgccacctatcccccgtttgaatccctggatgcgagtaataaaattgtgggcttcgatatcgatctggcaaccgcattatgcaagcaaatgcaggcagaatgtacttttaccaatcatgctttcgatagtcttatcccggcgctgaaattcagaaaatatgatgccgtcatttccggaatggacattaccccggagcgcagtaagcaggtcgcctttagcaatccctattatgcgaactccgcgctggtgattgccaaaaaagacacctataaaacctttaccgatctaaaaggtaagcgtatcggtatggaaaatggcaccacgcatcaaaaatatctccaggataaacatccggaggtcaaaaccgtggcctacgacagctaccagaatgcgattatcgacctgaaaaatggccgtattgacggcgtctttggcgataccgcagtggtcaatgagtggctgaaaacgaatccgcaactgggtccggcaacagagaaagtgaccgatccgcaatacttcggtaccggacttggcatcgcggtgcgcccggacaataaggcgttgctggaaaaactgaataatgcgctggccgccattaaagcggacggcacttatcagaaaatcagcgatcagtggttcccgcagtaa

SEQ ID NO: 39696 - DNA, 717 bp, Salmonella typhi
atgaacgaattttttcctttagcaagcgccgccgggatgaccgtcggccttgccgtctgtgcgctgatcattggcctcgcgttagccatgttctttgccgtctgggagtccgtaaaatggcgcccgattgcctggataggctccgcgctggtcactattttgcgcggcctgccggaaattctggtggtgctgtttatctatttcggctcctcgcaactcctgcttacgctgtctgacgggtttaccctccatctcggttttacgcagatcccggtgcaaatggagattgagaactttgacgtcagtccgttcctgtgcggcgtgattgcgttgtccctgctgtatgcggcctatgcgtcgcagacgctacgcggcgcgctgaaagccgttccgtctggtcagtgggagtcgggtcaggcactgggattatcaaagacggcgatttttttccgtctggtgatgccgcagatgtggcgtcacgccctgccagggctgggtaatcagtggctggtgttgctaaaagatacggctctggtcagccttatcagcgttaacgatctgatgttgcagaccaaaagtattgccacacgcacccaggaaccgtttaactggtacattattgcggcggctatttacctggtcattacgctgatcagtcagtacattctcaaacgcatagacctgcgcgcaacacgttttgagcggaggccggactaa

SEQ ID NO: 39697 - DNA, 627 bp, Salmonella typhi
atgtccgctggcgcgacatgctgctttgtgtcaagattagggcacaggcaacatgctaaggaacgccatgaaaaagttttttttgccgctgcgctggtagttagcggcctgttagtgggttgtaatcaacttacgcaatacaccattagcgaacaagaaatcaatcaagcgcttgaaaaacggaataatttctcaaaagatattggtctgcctggcattgccgacgcgcatatcgtattgactaaccttgccagccagattggtcgggaagagcctaataaagtcacccttactggcgatgccaggctggatatgaattccctgtttggcagtcaaaaagcgacgatgaaactcaagctaaaagccctgccggtctttgataaagaaaaaggcgccatctatcttcaggagatggaagtagtagacgccaccgtgacgccggagaaaatgcaatcagtgctacaaacgctcctgccctatttaaatcagtctttacgtagctactttaaccagcggcccgcttacgtgttgcgtgaggacagtagtaaaggcgaagcgttagcgaagaaactcgcgaaaggcattgaagttaaacctggtgaaatcgttattcctttcaccaattga

SEQ ID NO: 39698 - DNA, 1014 bp, Salmonella typhi
atgaaggtactggttaccggcgccaccagcggcttaggtcgaaacgcggttgaatttttgcgcaataaaggcatcagcgtcagagcgacgggtcgcaatgaagcgatgggcaagctgcttgaaaaaatgggcgcggaattcgtccatgcggatttaaccgaactggtctcctcgcaggctaaagtgatgcttgccgggatcgacacgttgtggcactgctccagctttacctcgccctggggaacccaacaggctttcgatctggcgaatgttcgcgccacccgccgtctgggagaatgggcggtcgcctggggcgtgcgcaattttattcatatctcctctccctcgctctattttgattaccaccatcaccgtgatatcaaagaagatttccgcccgcatcggtttgccaatgagttcgcccgcagtaaagccgccggcgaagaggtgattaatctgttggcgcaggccaatccgcaaacacgttttacggtattgcgtccacaaagcctgtttggcccgcacgataaagtatttatcccacgtctggcgcatatgatgcaccattacggtagcgtcttattaccgcacgggggcagcgcgctggtcgatatgacctactatgaaaatgcgatccacgccatgtggctggccagccagccgggctgcgatcatctgccttctggccgcgcttataacatcactaacggcgaaaaccgcaccttacgcagcatcgtacaaaagttaattgatgaattgactatcgactgccgcattcgctctgtgccttacccgatgctggatatgatcgcccgcagtatggagcgcttcggcaaaaaatccgccaaagagcccccgctaacgcattacggcgtgtcaaaactgaattttgattttacgctcgatacgactcgcgcgcaggacgagctgggctaccagcccatcgtcacgctggacgaaggcattgagcgcaccgccgcctggctgcgcgatcacggaaatttaccgcgttaa

SEQ ID NO: 39699 - DNA, 924 bp, Salmonella typhi
gtgagaacattacggattggcattgtcgtgttaggtggtattgcgcagaaggcctggctgccggtattaaccaacaccgccggatggacgttacagggcgcctggtctccttcgcgggataaagccttacgtatttgcgaaagctggcgcataccgtatgtggattcgctggcgaatttagcgtccggctgcgatgcggtcttcgtccactccagtaccgcaagccattatgccgtggtcagcgaacttctcaacgctggcgtccatgtctgcgtggataaaccgctggcggaaaatctacgtgatgccgaacggctggtggcgctggcggcgcaaaaaaaattgacgctgatggttggctttaatcgccgtttcgcgccgctgtaccgcgaactgaagacgcgcctcggcactgcggcgtcactgcgtatggataaacatcgtaccgatagcatcgggccgcatgacttacgttttactttgctcgatgactatctgcatgtcgtggataccgttctgtggctggcgggcggcgaggcgcgccttgccagcggcacgttgctcaccagcgagtccggcgaaatgtgctatgcggaacatcatttttccgccgacaaattacaaattaccaccagtatgcaccggcgcgccggaagtcagcgtgaatcggtccaggccgtcaccgatggcgggctgtatgacgtgacggatatgcgtgaatggcgcgaagagcgcgggcagggtattctcatcaaacccattccgggttggcaaacaacgcttgagcagcgtggttttgtcggatgcgcgcggcatttcattgactgcgtacaaaatcagacggttccggaaacggcgggggagcaggcgattttggcccagcgcgtcgtggaggcgctgtggcgggacgccatcagcgaataa

SEQ ID NO: 39700 - DNA, 1494 bp, Salmonella typhi
atgttttcacgcgtgttgggctttgcccgtgatgcgattgtcgccagaatttttggcgcagggatggcgaccgacgccttttttgtggcgtttaaacttcccaatctactacgccggatctttgccgaaggcgctttttctcaggcctttgtgcctatcctggcggaatataagagcaagcagggtgaagaagcgacgcggatctttgtcgcttacgtttccggcctgttgacgctggcattggccgtcgtgacggtggccggtatgctggccgccccgtgggtgattatggtaaccgcgccgggttttgccgatactgcggataaatttgcgctgacgacgcaactgctgcggattacgtttccctatattctgctgatctcgctggcttcactggttggcgccattctcaacacctggaatcgcttctctattcccgcttttgcgccgacatttcttaatatcagtatgatcggttttgcattattcgccgcgccatactttaatccgccggtgctggcgttagcctgggcagtcaccgtcggcggcgtgctgcaactggtgtatcaacttccgtatttgaaaaagatcggtatgctggtgctgccgcgcattaactttcacgacaccggggcgatgcgggtggtcaaacagatggggccggcgattttgggcgtttccgtcagtcagatctcccttatcatcaataccattttcgcctcgtttctggcctccggctcggtctcatggttgtactatgccgatcggttgatggagttcccgtccggcgtgctgggcgtggcgttggggaccatcctgttgccgtcattgtcgaaaagctttgccagcggcaatcatgatgagtactgccgcctgatggactgggggctgcgtttgtgctttttactggcgttgccgagcgcggtagcgctaggcattctggcgaagccgctgacggtctcgctgtttcagtacggtaaattcaccgcctttgatgcggcgatgacgcagcgggcgttaatcgcctattcggtggggctgattggcttgatcgtcgtaaaagtgctggccccgggcttctattctcgccaggatattaaaacgccggtgaaaatcgccatcgtgacgttaatcatgacgcagttaatgaacctggcgtttattggaccgctgaaacacgccgggctgtcgctctctattggtctggcggcatgtctcaatgcgtcgctgctgtactggcaactgcgcaaacagaatatctttacgccacaaccggggtggatgtggttcctgatgcgtctgatcatttccgtactggtaatggccgccgtgttgttcggcgtgttgcatattatgccggagtggtcgcaagggtcgatgctatggcgtttgctgcgtttgatggcggtagtgatcgcgggtatcgcggcctatttcgccgcgcttgccgtgctgggctttaaagtgaaagagtttgttcgccggacggcgtaa

SEQ ID NO: 39701 - DNA, 699 bp, Salmonella typhi
atgtctattgccgtaaatatgaatgacccgaccaacacgggcgtcaaaacgacgaccggcagcgggtcgatgaccggaagcaacgctgccgatctgcaaagcagtttcctgaccttactggtcgcgcaattgaagaaccaggacccgactaacccattacaaaataatgagttaacgacacagttggcgcaaatcagtaccgtgagcggcattgaaaaactgaatacgacgctgggggctatttccgggcaaatcgataatagtcagtccctacaggcgaccacgctgattggacatggcgttatggtgcctggcaccacaattctggcgggtaaaggcgcggaagaaggggccgtgacgtccacgacgccgtttggcgtggaattgcaacagcctgcggacaaagtgacggcaaccattaccgataaagatggccgggtggtacggacgctggagatcggtgagttgcgagccggggtacacacctttacctgggatggtaagcaaacggacggaacaacggtaccgaatggttcttacaacattgcgattaccgccagcaatggcgggacgcaactggtggcgcagccgctgcaattcgctctggtacagggcgtgacgaagggcagtaacggcaacctgttggatctgggtacctacggcaccaccacactcgacgaagttcggcaaataatctaa

SEQ ID NO: 39702 - DNA, 585 bp, Salmonella typhi
atgccccgtctcatccttgcgtctacctctccctggcgtcgcgcgctgctggaaaagctgacgattcctttcgaatgcgccgcgccggatgttgatgaaacccccatgccgggcgaagcgccgcgtcagttggtgctgcggctggcgcaggctaaggcgcaatcgctcgccgcgcgtttcccgaatcatttgattattggctccgaccaaatttgtgttctggacggcgaaatcaccggcaaaccgctgacggaagaaaaagcgcgtcagcaattagccaaagccagcggaagtattgtgacgttttataccggactggcactgtataactccgcctccgggcacttacaaaccgaagtggagccttttgacgttcactttcgccatttaagcgaagcggaaatagacgactatgtccgtaaagagcatccgctgcactgcgcgggaagttttaaaagcgaaggtttaggcattgcattatttgagcgcttagagggccgcgatccgaacacgctgatcggcttgccgcttattgccctgtgccagatgctgcgacgggaagagatgaacccgctgaatgcctga

SEQ ID NO: 39703 - DNA, 954 bp, Salmonella typhi
atgtatacgaagattattggtactggcagctatctgcccgaacaagtgcggactaacgccgatttggaaaaaatggttgagacctctgacgagtggattgtcactcgtacaggtattcgtgaacgccatatcgccgcgccgaatgaaactgtcgcgacgatgggctttaccgctgcgaatcgcgcgattgagatggcggggatcgataaagaccaaattggcttgattgtggtagcgaccacatcagcaacgcatgcatttccaagcgcggcatgtcagattcaaagtatgctcggtattaaaggttgcccggcgtttgatgtcgcggcagcgtgcgcaggtttcacctacgcgttaagtatcgccgaccagtacgttaaatccggcgtggttaaacacgcgctggtggtcggttccgatgtattagcccgcacttgcgatcctggcgatcgcggtacgatcattattttcggcgatggcgcaggcgcggccgtactgagcgcttctgaagaaccgggtattatctccactcatcttcatgccgatggccgttacggtgaattactgaccctgccgaatgccgatcgtgtaaatccggataacccgatttacctgacgatggcgggtaatgaagtctttaaagtggcggtcactgaactggcgcatattgtcgatgagacgctggcggctaataacctggatcgctcagaactcgattggctggtgccgcatcaggctaacctgcgtatcattagcgcgacagcgaaaaaactcggcatgtcgatggacaatgtcgtcgtcacgctggacaggcacggcaatacctccgcggcttctgtgccgtgcgcgctggatgaagccgtgcgtgacgggcgaattaaagccggtcagctggtattgcttgaagccttcgggggtggattcacctggggctccgcgctgattcgtttctag

SEQ ID NO: 39704 - DNA, 930 bp, Salmonella typhi
atgacgcaatttgcatttgtgttccccggtcagggttctcagagcgttgggatgttggccgagatggcggcaaattaccctatcgtagaagaaacgtttgctgaagcttctgcggctctgggatatgatctgtgggcgctcacccagcaaggtccagcggaagaactgaataaaacttggcagacgcagccggcgctattaaccgcttccgtcgcgctttggcgcgtttggcagcagcagggcggtaaaatgcctgcgttaatggcaggtcacagcctgggcgaatattccgcgctggtttgcgctggcgtcatcaactttgctgatgccgttcgtctggtggaaatgcgcggtaaattcatgcaggaagcggttccggaaggtactggcggcatgtctgcgatcatcggtctggatgatgcctctattgctaaagcctgtgaagaatctgccgaagggcaggttgtttcgccggttaactttaactcgccgggacaggtggttatcgccgggcataaagaggcggtagaacgcgcgggcgcagcctgtaaagccgctggcgcgaaacgcgcgctgccgctgccggtgagcgtgccgtcgcactgcgcgctgatgaaaccaacggcagataagctggcggttgaattagccaaaattacctttagcgcgccaacggtgccggtagtaaacaacgttgacgtgaaatgtgaaaccgatgccgccgctatccgcgatgcgctggttcgccagttgtacaatccggtacagtggacgaagagcgtggaatttatcgcggcgcagggcgttgaacatctttatgaagtgggtccaggtaaagtcctcactggtctgacgaaacgtattgtcgacaccctgacagcgtcggcgctgaacgagccggcggcgctgtctgcggcacttacgcaataa

SEQ ID NO: 39705 - DNA, 735 bp, Salmonella typhi
atgagctttgaaggaaagattgcgctggtgactggtgcaagccgtggcataggccgcgcaattgcagagactctcgttgcccgcggcgcgaaagttatcgggactgcgaccagtgaaaatggtgcgaagaacattagcgactatttaggtgctaacgggaaaggtttgatgttgaatgtgaccgatcctgcatctattgaatctgttctggaaaatattcgcgcagaatttggtgaagtggatatcctggttaataatgccggtatcactcgtgataatctgttgatgcgaatgaaagatgatgagtggaacgatattatcgaaaccaatttatcatccgttttccgcctgtcaaaagcggtaatgcgcgctatgatgaaaaagcgttgtggtcgcattatcactattggttctgtggttggtaccatgggaaatgcaggtcaggcaaactacgctgcggcgaaagcgggcctgatcggtttcagtaaatcactggcgcgtgaagttgcgtcccgtggtattactgtcaatgttgtggctccgggttttattgaaacggacatgacgcgtgcgctgtctgacgatcagcgtgcgggtatcctggcgcaggtgcctgcgggtcgcctcggcggcgctcaggaaatcgccagtgcggttgcatttttagcctctgacgaagcgagttacatcactggtgagactctgcacgtcaacggcggaatgtacatggtttaa

SEQ ID NO: 39706 - DNA, 1242 bp, Salmonella typhi
gtgtctaagcgtcgtgtagttgtgaccggacttggcatgttgtctcctgtcggcaataccgtagagtctacctggaaagctctccttgccggtcagagtggcatcagcctgatcgaccatttcgatactagcgcctatgcaacgaaatttgctggcttagtaaaggattttaactgtgatgacattatctcgcgcaaagaacagcgcaagatggatgccttcattcaatatggaattgtcgctggcgtacaggccatgcaggattctggccttgaagtgacggaagagaacgcaagccgtattggcgccgctatcggctccggtatcggtggtctcggtctgatcgaagaaaaccacagttcgctggtaaaaggcggaccgcgtaagattagcccgttctttgtcccgtcgacgattgttaacatggtagcaggccatctgactatcatgtatggcctgcgtgggccaagcatctctattgcgactgcctgtacttcaggcgtgcataacatcggccatgccgcgcgtatcatcgcctatggtgatgcggacgcgatggtggcaggtggcgcagaaaaagccagtacgccgctgggcgtaggtggttttggcgcagcgcgcgcgctgtcgacccgcaacgataacccacaggcggcgagccgtccgtgggataaagaacgcgatggttttgtactgggcgacggtgccggtatgttggtgcttgaagagtacgaacatgcaaaagcgcgtagtgcgaaaatctatgctgaaatcgtcggctttggtatgagcagcgatgcttaccatatgacgtcgccgccggaaaatggcgcaggcgctgcgctggcgatggttaacgcgttgcgtgatgccgcgattgagcctgctcagattggctacgtcaacgcgcacggcacgtcgacgcctgccggcgacaaagctgagacgcaggcggttaagtcagtctttggcgatgctgcaagccgagtgatggtgagctcgaccaaatcgatgaccggccatctgttgggcgccgcaggcgcagtagagtctattttctctattctggcgctacgcgatcaggccattccgccaaccattaatctggataacccggatgaaggttgcgatctggacttcgtgccgcatgaagcgcgccaggtcagcgatctggagtacgcgctgtgtaactcctttggctttggcggaactaacggttccttgatctttaaaaagatctaa

SEQ ID NO: 39707 - DNA, 810 bp, Salmonella typhi; identical to SEQ ID NO: 38971

SEQ ID NO: 39708 - DNA, 642 bp, Salmonella typhi
atgggcagtaattatatcgtcatcgagggcctggaaggcgccggaaaaaccactgcgcgcgacgtggtggtggagacccttgagcaactgggtattcgtaacatgatttttacccgtgagccgggcggtacgcagcttgccgaaaaactaagaagtctggtgctggatatccgatcggtaggcgacgaagtgattaccgataaagcggaagtgctgatgttttatgccgctcgcgtacagctcgtcgaaacggtaatcaaacccgcgctggcgcaaggcgtatgggtgatcggcgatcgccacgatctctcgacccaggcgtatcaggggggagggcgcggcattgatcaaaccatgctggcgacactacgcgatgccgtgctgggcgattttcgtcctgacctgacgctgtatctggatgtcacgccggaagtcgggctaaaacgcgccagagcgcgcggcgatttggatcgcattgagcaggaatcttttgatttctttaaccggactcgcgcgcgctatctggaactggcggcgcaagactcgcgtatccgcaccattgacgcgacccagccgctggatgccgtcatgcgcgacattcgcgccacggtgacgaagtgggtgcaggagcaagcggcatga

SEQ ID NO: 39709 - DNA, 798 bp, Salmonella typhi
atgtttttagtcgactcacactgccatcttgatggtctggattatcaatctttgcataaggacgtggacgatgtgctggcgaaagccgccgcgcgcgatgtgaagttctgtttagcggtggcgacgacgttgccggggtatcgccatatgcgcgagctggtgggcaagcgcgataatgtggtcttttcctgcggcgtgcatccgttaaatcaggatgaagtatatgacgtagaagaactgcgcctccttgctgcagaagacgatgtggtggcgatgggcgagaccgggcttgattacttttacacgcctgagaccaaaatccgccagcaggcgtcttttattcatcatatccagattggccgcgaattgcataaaccggtgattgtccatactcgcgacgcgcgtgccgatacgctggctatcctgcgcgaagaaaaagtgacggattgcggcggcgtactacactgttttacagaagacagagaaacggccggcaaattgctggatctggggttttatatctctttttccggcatcgtaacgttccgtaacgctgaacagttgcgtgatgcggcgcgctatgtgccgctggatcggttattagtcgagaccgattctccttatctggcgccggtgccgcatcgcggtaaagagaaccagcctgcgatggtacgcgacgtcgcagaatatatggcggtattgaaaggggttgccgttgaagaactggcgcagatcaccaccgataactttgctcgcctgttccatattgacgcgtctcgcctgtcatcaatccgttaa

SEQ ID NO: 39710 - DNA, 1026 bp, Salmonella typhi
gtgggcccagtaatgttgaatgtcgaaggatgtgagctggatgcggaggagcgcgagatactggcgcatccgctggttggcgggcttattctgttcacgcgtaattaccatgacccggaacagctgcgcgaattagtgcgccagattcgggcggcatcgcgtaaccatctggtggtggccgtcgatcaggaaggcgggcgcgtacagcgtttccgtgaagggtttacccgcctgcccgcggcgcaatctttttttgcgctgcatgggctggaagagggggggcgactggcgcaggaggcagggtggctgatggccagcgaaatgatcgcgatggatattgatatcagttttgcgccagtgctggacgttgggcatatcagcgcggcaattggcgagcgttcttatcatgccgatcccgcaaaagcgttggcaatggcaacacgctttattgacggcatgcatgacgccgggatgaaaacgaccggtaagcatttccccggccacggcgcggtcacggcggactcccacaaagagacgccgtgcgatccacgtcctgaaacggacatccgtggcaaagatatgtcggtgttccgcgcgctgattagtgagaataaactggatgcgattatgcctgcccacgtgatctaccgcgctatcgatccgcgtccggcaagcggttcgccgtactggctgaaaacggtgctgcgtcaggagctaggctttgacggcgtcattttctccgacgatctgtctatggagggcgcggcgattatgggcagctatgctgagcgcgctcaggcgtcgctggatgcgggttgcgatatgattctggtctgcaataatcgtaaaggcgcagtcagcgtgctggataatctgtcgccgatcaaagcagaacgtgttacacgtttgtatcataaaggttcattttcacgccgggagctcatggactcagcacgctggaaaacagccagcgcccagctcaaccagttacatgaacgctggcaggaagaaaaagcaggtcattaa

SEQ ID NO: 39711 - DNA, 1305 bp, Salmonella typhi
ttgactacaccattaaaaaagatcgtgattgtcggcggcggcgctggcgggctggaaatggcgacgcagttaggccataaactggggcgcaagaaaaaagcgaaaatcacgctggtagacagaaatcacagccatctgtggaaaccattgctgcacgaagtggcgactggctctctggacgaaggcgtggatgcgctgagctatctggctcatgcgcgtaatcatggtttccagttccagctggggtcggtgatggatatcgatcgcgaagcgaagaccatcaccattgccgagttgcgtgatgaaaagggcgaactgctggtgccggagcgcaaaatcgcgtatgacacgctggtgatggcgctgggcagcacctctaatgatttcaacacgccgggcgtgaaagagcactgtatcttcctcgataacccgcatcaggcgcgccgttttcaccaggagatgctgaacctgttcctcaagtattcggctaacctgggcgcgaacggtaaggtcaatatcgccatcgttggcggcggtgcgacgggggttgagctgtcggctgaactgcataatgcggtaaaacagctgcatagctatggttataaggggctgaccaacgacgcgttgaacgtgacgttggttgaggctggcgagcgtattctgcctgcgttgccgccgcgtatctccagcgccgcgcataatgaactgaccaaactgggcgttcgcgtactgacgcaaactatggtcaccagcgccgacgaaggcggtctgcatacgaaagaaggtgaatatattcaggccgatctgatggtgtgggcggcgggtatcaaagcgccagattttatgaaagaaattggtggtctggaaacgaaccgcattaaccaactggtggtggaaccgacgctgcaaaccacgcgtgatcctgatatttatgcgattggcgactgcgcttcctgcgcacgtccggagggaggttttgtgccgcctcgcgctcaggcggcgcatcagatggctacctgcgcgatgaataacattctggcgcagatgaatggcaagccgctgaaagcttaccagtataaagatcatggatcgctggtctctctgtccaacttctctaccgtgggtagtctgatggggaacctgacccgcggttcaatgatgattgaaggacgtatcgcccgcttcgtgtatatctcgctataccgtatgcaccagatagcgctgcatggatactttaaaaccggcctgatgatgctggtgggcagtattaaccgcgtcattcgtccgcgcctgaaactgcattaa

SEQ ID NO: 39712 - DNA, 636 bp, Salmonella typhi
atgacaacggataccacgagttgcgcgaagaaaagccgtggccgaccaaaagtgttcgacagggaagccgcgcttgataaggccatgactctcttctggcagcacggctatgaagcaacttcgcttgccgatctcgtagaggctaccggggcgaaagcgcctactctctatgcggaattcactaacaaagaaggattatttcgcgctgtcctggatcgctacatcactcgctttgcctcaaaacacgaagcccagctcttttgtgaagagaaaagcgtagaatcggcgctggaagattacttcacagaaattgccgcctgctttaccagtacagacacgccggctggctgctttatgattaatacgtccgccaccctggccgcctcctcgcgcgatatcgcccgcacggtaaaatcacgccacgccatgcaggaacagacgctcatccagtttctgcgccaacatcaggagcgcggtgaaattccggcgcactgtaacccgcaggcgctcgcggaatatataaactgtattttacagggaatgtcgatcagcgcccgtgaaggtgccaccttcgaacaactgatgcaaattacgcgtacgactctgcgcatctggcctgaactgctcaagtcctga

SEQ ID NO: 39713 - DNA, 792 bp, Salmonella typhi
atgttcaacaatacgcgactctctcgctggtgggcgttgcttgcgcttaccgcgaccatcatgcttgcccttcccgcgcaggcgaatacgtggcctcttccgccccccggcagtcgactggtgggagaaaataaattccatgtcgttgaagacgacggcggctcgctggaggcgatcgccaaaaaatataacgtgggctttttagccctgttacaggccaaccccggcattgatccttacgtgccacgcgcaggcagcgtgctgacgattccgctgcaaacgctgctaccggacgcgccacgtgaaggtatcgtcattaacctcgctgaattacggctttactattatcaaccggggaaaaatacggtcacggtctaccctatcggcattggccaactgggcggcgataccctgacgccaacgatggtgacgaccatttcggataaacgcgccaatccaacctggacgccgaccaccaatattcgcgcccgttataaagcgcaaggcatcgatctccccgccgtggtgcctgccggtcccgataacccaatggggcatcacgcgattcgtttagcggcctacggcggcgtctatctgttacatggcacgaatgccggttttggcattggtatgcgcgtcagttccggctgtatccgtctgcgcgacggtgatatagagacattgttccgtcaagtcacgccgggaaccaaagtgaatattatcaatacgccgattaaagcctcggtggagccaggcggcgtgcgactggtggaagttcatcagtcgctgtaa

SEQ ID NO: 39714 - DNA, 3447 bp, Salmonella typhi
atgcctgaaaaacaacgttacacgctgccgacaaaagcgggcgatcagcgccagttgggcgaacttaccggtgccgcctgcgctacgctggtggcggagatagctgaacgccatgccggtccggtggtactcatagcgcctgacatgcaaaatgctctgcgattgcatgatgaaatccgccagtttaccgatcagatggtcatgaacctggcggactgggaaacgctaccgtatgacagcttctccccgcatcaggaaattatctcttcgcgcctgtccacgctctaccagttgccgtcaatgcagcgcggcgtcttgattgtaccggtaaacaccctgatgcagcgcgtttgtcagcatagctatctgcatggtcatgcgctggtgatgaaaaaaggccagcggctgtcccgcgacgctctgcgcgcgcagcttgacagcgccggttatcggcatgtcgatcaggtgatggagcatggcgaatacgcgacgcgcggcgcgctgttggatctctttccgatgggcagcgaacagccttatcgcctcgacttttttgatgatgaaattgacagcctgcgtctgtttgacgcggatacccagcgtacgctggaggaggttgaggccatcaatttgttgcccgcgcacgaatttcctaccgacaaagccgctattgagcttttccgtagccagtggcgcgatacctttgaggtaaaacgcgacgccgagcacatctatcagcaggttagcaaaggcactctgcccgccgggatcgaatactggcagccgctctttttcagcgaaccgttaccgccattatttagctatttccccgccaatactctggtggtgaataccggctcgctggaaaccagcgccgaacgctttcaggccgatacgctggcgcgttttgaaaatcgtggcgtcgatcctatgcgcccgcttttgccgccggaagccctctggctacgggtggatgggctcttttccgagcttaaacgctggcctcgcctccagcttaaaaccgaccatctgccggaaaaagccgccaataccaatctcggtttccagaaattaccggatttggctatccaggcacagcagaaagcgccgctggacgcgctgcgtaagttcctcgaatctttcagcggtccggtgattttttcggtggaaagcgaaggacgccgcgaagctctgggagagctcctggctcgcataaaaatcgcgccgaagcgaatattacgcctggacgaggcgcaggatgcgggacgctatctgatgattggcgccgcagaacatggctttatcgacacccaacgcaatctggcgctgatttgtgaaagcgatcttttgggtgagcgggtggcgcgtcgccgcctggattcccgccgcacgatcaacccggatacgttgattcgtaacctggcggagctccacgtcggtcaaccggtagtgcatctggagcacggcgtcggacgctatgccggcatgaccactctggaggctggcggcatcaagggtgaatatctgatgctcacttacgccaatgacgccaaactgtatgtgccggtctcctcattgcatctgattagccgctatgccggcggcgcggaagaaagtgcgccgctgcataaactgggcggcgacgcctggtcgcgcgcccggcagaaagcggcggaaaaagtgcgcgatgtcgcagcggaactgttggatatttatgcgcaacgagcggcaaaagagggttttgcctttaagcatgatcgtgagcagtatcagttattctgcgacagcttcccgtttgaaacgacgcccgatcaggcacaggcgattaacgccgtattgagcgatatgtgccaaccgctggcgatggacaggctggtgtgcggcgacgtcggcttcggcaaaaccgaagtggcgatgcgcgccgcgttcctggcggtggaaaaccataaacaggtggcggtactggtgccgactacgctgctggcgcagcaacactatgacaacttccgcgaccgtttcgccaactggccggtacgcattgagatgctgtcccgctttcgcagcgccaaagagcagacgcaaatcctggcggaagccgccgaaggtaagatcgatattctgatcggtacgcataaactgctacaaagcgatgtgaagctacgcgacctcggcctgctgattgtcgatgaagagcaccgtttcggcgtgcgccacaaagagcgaattaaggcgatgcgcgccgatgtcgatattctgacgctcacggcgacgccgatcccgcggacgctgaatatggcgatgagcggtatgcgcgatctctccattatcgccactccccctgcccgtcgtctggcggtaaaaacctttgtccgcgagtatgatagcctggtggtaagggaagcgattctgcgtgaaatcctgcgcggcggtcaggtttactatttgtacaatgacgtcgaaaatattcagaaagccgcagagcggctggcggaactggtgccggaagcgcgaatcgctataggccacgggcagatgcgcgaacgtgagctggaacgggtcatgaacgatttccaccatcaacgttttaacgtgctggtgtgtactaccattatcgaaacggggatcgacattcccaccgctaacacgatcatcattgaacgcgcggatcatttcggcctcgcgcagttgcaccagctgcgtggccgcgtagggcgctcgcaccaccaggcctacgcctggctgttgacgccacatcctaaggccatgaccgccgatgcgcaaaaacggctggaggcgattgcgtcgctggaggatttaggcgccgggtttgcgctggcgacccacgatctggagatccgcggcgcgggcgagctgcttggcgaagagcaaagcggctcaatggaaaccattggcttctcactctacatggaattgctggaaaacgccgttgatgcgctgaaagcaggccgcgaaccctcgctggaagatctcaccagtcagcaaacggaagtcgagctgcgaatgccgtcgttactgccggatgattttattccggatgttaatacccggctgtcattctataaacgcattgccagcgcgaagaacgaaaacgagctggaagagatcaaagtggaattgatcgaccgcttcggcctgctgcccgatccggcgcgtaatctgctggatatcgcccgcctgcgccaacaggcgcaaaagctcggcatccgaaaactggagggtaacgagaaaggtggaacgattgagttcgccgagaaaaaccacgttgaccccgcctggcttatcgggttactgcaaaaacagccgcagcatttccgtctggatggcccgacgcgcctcaagtttattcaggatttaagcgaacgtaaaacgcgtatagactgggtacgccagttcatgcagcaactggaagaaaacgctattgcataa

SEQ ID NO: 39715 - DNA, 1311 bp, Salmonella typhi
ttgtcggcctttttcagaataacgctgacgaactcttacggttcagacatttacgcattccgctttcgcttatatactcgggactttgctaacagcaaccagacggattacatgtatcaacctgtcgctttattcatcggcctgcgttacatgcgcgggcgtgcagcagatcgcttcggtcgcttcgtttcctggctttccactatcggcattaccctgggggtgatggcgctggtcacggtattgtcggtgatgaacggttttgagcgcgaactgcaaaataacattcttggtttgatgcctcaggccatcctctctgctgaacatggttctcttaacccgaatcagatgccggaaaaagcggtgaatctgcaaggcgttaaccgtattgcgccgctgacgacgggcgatgtcgtactgcaaagcgcgcgtagcgttgcggttggcgtgatgttgggtatcgatccggcgcaaaaagatccgttaacgccgtatctggtcaatgtgaagcaaagcgaattacagccgggtaagtataatgtcatcctcggcgagcagctcgccggacagttaggggtcaaccgcggcgatcagattcggctaatggtgccatctgccagccagtttacgccaatgggacgcctgcccagccagcgtctgtttacggtgattggcacatttgccgccaatagcgaggtcgatggctatgaaatgctggtcaatattcaggacgcgtcgcgtttaatgcgctatccggcaggcaatattaccggctggcgtctgtggctggatgaaccgctgcaagtcgatactctcagccaacagacgctgccgcaaggcacgaagtggcaggactggcgcgaacgtaaaggcgagttgttccaggctgtgcgcatggaaaagaacatgatgggattgttgctgagcctcatcgtggcggtcgcggcttttaacattattacttcgttgggtctgatggtcatggagaagcagggcgaagtggcgattttacaaactcaagggctgacgccgcgacaaattatgatggtctttatggtgcagggcgccagcgccgggattatcggcgcgctgttgggcgccgcgctgggcgcattgcttgccagccaactgaataacctgatgccgatcatcggcgcgtttctggatggcgctgcgttgcccgtggcgatagagccgttacaggtgatcgttatcgcgctggtggcaatggccatcgcgctgctttctacgctttatccttcctggcgcgctgccgccactcaacccgctgaggctttacgttatgaataa

SEQ ID NO: 39716 - DNA, 1047 bp, Salmonella typhi
atgaaaaaatggtcacgccacctgctcgcggcaggcgccctggcgctgggtatgagtgccgctcatgcctccgacaacgacacgctctatttctataactggactgagtatgtaccgccgggcctgctggaacagttcactaaagagacaggcattaaggtgatttattcgacctacgagtcgaacgaaaccatgtatgccaaactcaaaacctataaagatggcgcgtatgacctggttgttccttctacatactatgtcgacaaaatgcgcaaagaaggcatgatccagaagatcgataagtcgaaattaaccaatttccacaacctcgatccggaaatgctcaacaaaccgtttgaccccaacaacgattattctgttccgtatatctggggcgcaacggcgattggcgtgaacagcgatgctatcgatccaaaaaccattaccagctgggctgatttgtggaaaccggaatataaaaacagcctgcttttaaccgacgatgcgcgagaagtcttccagatggcgctgcgcaagctaggttattccggtaacactaccgatcctaaagagatcgaagcggcatatgaagagttgaaaaaactgatgccgaacgtagcggccttcaactccgataatccggcgaatccgtatatggaaggggaagtcaatctggggatggtgtggaacggttcggccttcgttgctcgtcaggctggcacgccgctggaggtcgtctggccgaaagaaggcggtattttctggatggatagcctggctattccggcaaacgcgaaaaataaagagggtgcgctgaagctaatcaacttcctgctgcgtcctgacgtcgcgaaagaggtggcagaaaccatcggctaccctacccccaacctggcggcgcgtaagctgttaagcccggaggtcgccaatgataagtcgctctatccggatgcgcaaaccatcagcaaaggcgagtggcaaaacgatgtcggcgacgccagcgccatttatgaagagtattatcagaagctaaaagcaggacgctaa

SEQ ID NO: 39717 - DNA, 1230 bp, Salmonella typhi
atggataaactacttgagcgttttttacactacgtatcgctggatacccaatcaaagtcgggtgttcggcaggttcccagcactgaggggcagtggaagttactacgtttgctcaaacagcagctcgaagagatggggctggttaacattacattaagtgaaaaagggacgttgatggcgacgctcccggccaatgttgagggggatattcccgccattggttttatctcccatgtggatacctctccggatttcagcggtaaaaacgttaacccgcagattgtcgagaattatcgcggcggcgatatagcattagggattggcgatgaggtgttgtcacccgtgatgttcccggtactgcatcaattactgggacagacgctgattactaccgatggtaagacattgctgggcgcggacgataaagccggtgttgcggagatcatgaccgcgctggcggtgctgaaaggtaatcctattccccacggcgaaattaaagtggcgtttacgcctgacgaagaggtagggaaaggcgcgaagcacttcgatgttgaggaatttggcgcgcagtgggcctatacggtcgacggcggcggcgtgggagaactggagtttgaaaacttcaatgccgcctcggtgaatatcaaaatcgtcggcaataacgtgcatcctggtacggcgaaaggcgtgatggtcaatgcgctgtcgttggcggcgaggattcacgcggaagtgccggcggatgaagcgcctgaaaccactgaaggttacgaagggttttatcatctggccagcatgaaaggcaccgttgaccgggccgaaatgcactacatcattcacgatttcgaccgtaagcagtttgaagcgcgtaaacgcaaaatgatggagattgccaaaaaagtcggcaaggggctgcatccggactgctatatcgaactggtgattgaagacagttattacaatatgcgcgaaaaagtggttgagcatccgcatattctcgatatcgcccagcaggccatgcgcgactgtcatattacgccggagatgaaaccaattcgcggcggtacagacggggcgcaactgtcgtttatgggcctgccgtgtcctaatctctttaccggcggatataactatcatggtaaacatgagtttgtgacgctggaggggatggaaaaagcggtacaggtgattgtacgtatcgcggagctgacgggtaagcgcggccagtag

SEQ ID NO: 39718 - DNA, 1464 bp, Salmonella typhi
atgaataaatttgctcgccattttctgccgctgtcgctgcgggttcgttttttgctggcgacagccggcgtcgtgctggtgctttctctggcatatggcatagtggcgctggtcggctatagcgtaagttttgataaaaccacgtttcgtctgctgcgcggcgaaagcaacctgttttataccctcgccaaatgggaaaataataaaatcagcgttgagctgcctgaaaatctggacatgcaaagcccgaccatgacgctgatttacgatgaaacgggcaaattattatggacgcagcgcaacatcccctggctgattaaaagcattcaaccggaatggttaaaaacgaacggcttccatgaaattgaaaccaacgtagacgccaccagcacgctgttgagcgaggaccattccgcgcaggaaaaactcaaagaagtacgtgaagatgacgatgatgcggagatgacccactcggtagcggtaaatatttatcctgccacgacgcggatgccgcagttaaccatcgtggtggtcgataccattccgatagagctaaaacgctcctatatggtgtggagctggttcgtatacgtgctggccgccaatttactgttagtcattcctttactgtggatcgccgcctggtggagcttacgccctatcgaggcgctggcgcgggaagtccgcgaacttgaagatcatcaccgcgaaatgctcaatccggagacgacgcgtgagctgaccagccttgtgcgcaaccttaatcaactgctcaaaagcgagcgcgaacgttataacaaataccgcacgaccctaaccgacctgacgcacagtttaaaaacgccgctcgcggttttgcagagtacgttacgctctttacgcaacgaaaagatgagcgtcagcaaagctgaaccggtgatgctggaacagatcagtcggatttcccagcagatcggctattatctgcatcgcgccagtatgcgcggtagcggcgtgttgttaagccgcgaactgcatcccgtcgcgccgttgttagataacctgatctccgcgctcaataaagtttatcagcgtaaaggggtgaatatcagtatggatatttcaccagagatcagttttgtcggcgagcaaaacgactttgtcgaagtaatgggcaacgtactggacaacgcttgtaaatattgtctggagtttgtcgagatttcggctcgccagaccgacgatcatttgcatattttcgtcgaagatgacggcccaggcataccccacagcaaacgttccctggtgtttgatcgcggtcagcgcgccgataccctacgaccaggacaaggcgtggggctggctgtcgcgcgcgagattacggaacaatacgccgggcagatcattgccagcgacagtctgctcggtggcgcccgtatggaggtcgtttttggccgacagcatcccacacagaaagaggaataa

SEQ ID NO: 39719 - DNA, 1371 bp, Salmonella typhi
atggaattatcctcactgaccgccgtttcccctgtcgatggacgctacggcgataaagtcagcgcgctgcgcggaatttttagcgaatacggtttgctgaaatttcgtgtacaagtcgaagtacgttggctgcagaaattagccgcgcacgcagcgatcaaggaagttcctgcttttgctgccgacgcaaacggttacctggatacgcttgtggcaaacttcaatgaagaagatgccgcgcgcattaaaaccattgagcgcaccacgaatcacgatgtgaaagcggttgagtattttctgaaagaaaaagccgccgcgatcccggcgctacatgacgtttccgaatttatccactttgcctgcacctctgaggatattaacaacctgtcgcacgcgttaatgctcaaaactgcgcgcgatgaagtgatcctgccttactggcgtcaggtgattaacgcggttaaagatctcgccacgcagtatcgcgatattcctctgctctcccgcacccacggccagccggcaacaccttccactctgggtaaagagatggcgaacgtggcgtatcggatggagcgtcagttccgccagctcaatcaggtggagatcctcggtaaaattaacggcgccgtaggcaactataacgcgcatatcgccgcctatccggaagttgactggcatcagttcagcgaagagttcgtcacctcgctgggcatccagtggaacccttacaccacccagattgaaccgcatgattatattgcggaactgtttgactgtatcgcgcgctttaacaccatcctgatcgatttcgatcgcgatgtctggggctatattgcgttgaaccatttcaaacagaaaaccatcgccggagagatcggttcttctaccatgccgcataaagttaaccccattgactttgaaaactcagaaggcaacctcggtctgtctaatgcagtgttgcaccatctggcaaacaaactgccggtttcccgctggcagcgcgatctgaccgactcaaccgtcctgcgtaacctgggtgtcggcatcggctatgcgcttatcgcttatcagtcgaccctgaagggcgtcagcaagctggaagtgaaccgcgatcatctgcttgacgaactggatcacaactgggaagtattagccgaaccgatccagaccgtcatgcgccgctatggcattgaaaaaccatatgaaaaactgaaagagttgacccgtggcaagcgtgtcgatgccgaaggaatgaaacagcttattgatagtctggccctgccggaagcagaaaaaacgcgccttaaagccatgacgccggcaaattatatcggtcgcgctgtgaatctggtcgacgaacttaaataa

SEQ ID NO: 39720 - DNA, 1107 bp, Salmonella typhi
atgtcagaaagcccaaaaaaagtgatcgtcggcatgtccggcggtgtcgattcctccgtttccgcctggctgttgcaacaacagggttatcaggtagaaggcctgttcatgaagaactgggaagaggacgatggtgaggaatactgcaccgcggcagccgatctggctgacgcgcaggccgtgtgcgacaagcttggcattgaactgcataccgttaattttgccgcagaatattgggataacgtctttgaactgttccttgaagagtacaaagcgggccgtacgccgaatccggatattctgtgcaataaagagatcaaatttaaagccttccttgaatttgccgcagaagatttaggcgccgactatatcgccaccggtcactacgttcgccgcgcggatgtaaacggcaaaagccggttgttgcgcgggctcgacggtaacaaagatcagagctacttcctctatacgcttggccatgagcagattgcgcaaagtctgttcccggttggcgagctggaaaaaccgcaggtgcgtaaaatcgccgaagatttggggctggtaaccgccaagaaaaaagattctaccggtatctgctttatcggcgagcgcaaattccgcgactttttagggcgctatctgcctgcgcagccggggaaaatcattactgttgacggcgatgaaatcggcgagcatcagggtctgatgtatcatacgctcggtcagcgtaaagggctgggaattggcggcaccaaagacggtagcgaagacccctggtatgtggtggataaagacgttgaaaacaatgtgttaattgtcgcccaggggcatgagcacccacgcctgatgtcggtaggcctcatcgcccagcagctacattgggtcgatcgcgaaccgttcaccggcaccctgcgctgtacggtaaaaacccgctaccgccagaccgatattccgtgcacgattaacgcgctggatgacgatcgtatcgaggtcatttttgacgagccggttgccgccgttacgccgggccagtccgctgtcttttacagcggagaagtctgcctgggcggcggcattatcgagcagcgactgccgctgacggtctga

SEQ ID NO: 39721 - DNA, 594 bp, Salmonella typhi
atgaaacctgtttttgatgaaaatgggctggctacagtgccgggtgatatgcgttgttattattatgatgcagtaacgtctgaatatacgggctggtctgatgaatatattaatactggcgtaagtatgcccgcttgttccactggtattgacccgggcgaatacattccgggaagagtggcagtatttacgggtaagggatggagccatgaagaagaccatcgcaatgagaccgtttactcaactgaaaatggcgcagctgttacagtggattatatcggtgccatcaaagacggttatgtcacgctttcaccgttaacgccatacgataaatgggatggtgagaaatgggtgacggataccgaggcacagcatagcgccgcagtagaagctgcagaagcacagcgccagtcgctgattgatgctgcaatggcttccatcagtctgattcaactgaaattacaggccgggcggaagctgacgcagccagaaaacacccgacttaacgctgtgctggattatattgacgcggtaacggcaacagataccagcacagcgccggacgtcatctggcctgaactgccggaggcgtag

SEQ ID NO: 39722 - DNA, 441 bp, Salmonella typhi
atgcagaaatatattttcagcgccgataaaaatgcgtttttccctgtggagcttaaaatcgcttatcaggaatccggcgaatggcccgatgatggaatcgaaattgacgacactgttgccgccgaatttatgaaggaagcaccagaaggaaaatacagaggtgtcatcgacggaatgcctgcatggattgatattccaccgccaactcatgaggaacaaattgccgcagccgaactggaaaagcagcaattgattaatcaggtcaacgaatacataaacagtaagcaatggcctggtaaagcggcgattggtcgcctgaaaggtgaggaactggcgcaatataatttgtggctggattatctggacgcactggaactggtcgatacttccggtgcgccagatattgaatggcctacgcctccggcagttcaggccagatga

SEQ ID NO: 39723 - DNA, 483 bp, Salmonella typhi
atgacgaagaaaaaagcacataaaccgggctcagccaccatcgcgctgaataagcgcgcccggcacgaatactttatcgaagaagagttcgaggctggtctcgccctgcaaggctgggaagtaaaatctctgcgcgcaggaaaagccaatatcggcgacagttacgttatcctcaaagatggcgaggcctggctgtttggcgcaaactttacgccgatggcggtcgcctcgacacatgtcgtatgcgacccaacccgaacccgcaaactgttgttaaatcagcgtgagcttgattcgctgtatggccgtattaatcgtgaaggttatactgtcgtcgcgctttctctgtactggaaaaatgcctggtgcaaagtgaagatcggcgtggcgaaaggtaaaaaacaacatgataaacgttccgatcttaaagaacgtgagtggcaactggataaagcacgcattatgaaaaatgcaggccgataa

SEQ ID NO: 39724 - DNA, 219 bp, Salmonella typhi
atgatgatttgcccactgtgtggaagtgccgcccatactcgcagcagttttcaggtatcttcattgaccaaagagcgttacaaccagtgccagaacattaactgcagccatacttttgttacccatgaaacttttgttcgttcgattgcaacgccaaaagagtcaaatccggttcagccgcatccaatgaaatcaggacaggtggcgctctctctttga

SEQ ID NO: 39725 - DNA, 2157 bp, Salmonella typhi
atgacccgcgccgcccccgatgtagaagaggtactcagtgagcgcgcgctaagccaatgggcgcaggccatcagccatgtcgccggtcattatcgcgttgcctgttctcccggttcaattcaggccaacgccccgtggtttaggggtaaaagcagaacgaccgccttaacgcagctcgcgcggcaggcgggtttatcctttcatgcgccggacatagacaaaacggcatttagtcagtggcgattgccgttggttgtcgagctccgggacgggcagttattggtcatcgaacatgttaatggcgaagatgcggtagacgtttttgtgattgaagaagagggtcagcgtaaccgcctgacgctcagcgagttattgccggagatcctctatgttgccgcgctacgcccgctatcggcgctcaaggatagccgcgtcgaccgctatatctcccgctttaaacccgactggatgcgcgagctggttctgcaggatattcgcccttatttaccggtaatggtcgccgcctttctgattaacgtgctgtctctggccgggattgtgttctctatgcaggtttacgatcgggtgatccccgctcagtcatatcctaccctgtacgtgctctccttcggcgtgctggtagcggtgctgttcggttttctgctgcgtgaagcgcgtacgcacattatggacgtgctcggtaaacgcgccgatatgcgcatttccgatcgggtattcggtcatgcgttaaggctgcgcaacagcgctatcccccgttccaccggcagttttatctcgcagttacgtgaactggagcagatccgcgagatgattacctcttcaacgctggcgaccattgtcgatctgcctttctttttcctgtttatgatagtcttggcgattattgccccaccgctggcatggatagcgcccgtggcggctctgctgatgatcctgccgggcgtcgcactgcaaaaaaaactggctgtcctcgccaaccaggccgcccacgaagcgacgctacgcaatgcggtcttggtcgaaagcgttcaggggctggaagatattaaactgatgcaggcggagaaccgctttcttcagcagtggaatagctatatccgtattaccggcgagtcgggtctacgcacccgcaaactcacgcaaaggcttatcagttgggggatgtcggtacaaagtctggtgtatgccgcagtgattatgttcggcgcgccgatggtcattgaaggcagtatgactaccggcgccgtggtcgccgcgtcgatgctcggctcacggatgatcgcgccaatggctaacctgtgcggcgtgctggcgcgctggcagcaggtgaaagcggcgaagatgggtctcgacaacattatgcaactgcccactgagacacagcatgacgatagcctgatacaccgcgacatcctccacgggcattacctctttgaaaacgctcagtttcgttaccataacgacgatcaacgcataccgctgcgcctcgtgcgtctggagatcatgccaggcgagcggattgcgatactggggcgtaacggtgcgggtaaatccacacttttacaggcgatggcgggcggcctggagatgattcagggagatgcccggcttgataatctcagcttgtcgcacatcgatatggcggatttacgccgcaacatcggctttcttagccagaacgcgcggcttttcttcggcaccctacgagagaacctgacgctcggcgcgccgcacgccaacgatgaacagatttttgacgcgctcgaagtcagcggcggcgccgtcttcgtcaggcggctggcaaaagggttggatcatcccattatggagggtggtaacggcctgtccggcgggcagcgtcagtccctgttgctggcgagaatgctgctgcgctcccccaatattgtgctacttgacgaacccagcgcctcgctggacgagcatacggaacgagagtttattcagcggttacatcagtggcttggcaaccgtaccctggtcgtcgcaacgcaccgggtaccaatactggagctggttgagcgtgtcgttgtcctgaaagaaggacaactggtgatggacgcgccaaaagcgcaggcgcttaacgcggatcggatgcaaagtcaccgtcgggagtag

SEQ ID NO: 39726 - DNA, 219 bp, Salmonella typhi
atgatgatttgcccactgtgtggaagtgccgcccatactcgcagcagttttcaggtatcttcattgaccaaagagcgttacaaccagtgccagaacattaactgcagccatacttttgttacccatgaaacttttgttcgttcgattgcaacgccaaaagagtcaaatccggttcagccgcatcctcataaatttaaacaggtgggtttgccgatttaa

SEQ ID NO: 39727 - DNA, 1053 bp, Salmonella typhi
atgcagcgttcactcgatagtctggctggtatggctacatctgcttttggcgcggggacttctgctgctatgcggcaagctacctcgcccaaaaccattctgcaacatatcattaacttttttacctgtggtgggatacgtcggagaaatgaaacacaatatcaggaattgatagagactatggctgaaacattgaaaagttcaatgtctgacagaggtgctccgttgccagaaaacatcatcctggatgatgtggatgggtgtcgtgtcgaatttaatcttcctggtgagaataacgaagctggacaagttattgtacgagtcagtaaaggcgacaattctgagacaagagaaattccgcttgcctcttttgaaaaaatatgtcgagctttactattcagatgcgaattttctcttcctcaggattctgtaatattaactgcccagggaggcatgaatcttaaaggcgctgtccttaccggagcaaatctgacggcagaaaatttatgtgacgcagacttaagcggcgcagatttagagggggcaatactgtttatggcggattgtgacggtgcaaattttaagggcgcaaatctatcgggagcatcattaggcgacagtaacttaacgaacgcctgtctggaagatagtattatgtgtggcgctaccctcgatcgcgctaatcttactggcgccaatttacaacacacaagtctgttaggctgtagcatggtagaatgtaattgttccggtgcgaatatggatcacgctaatgtttcaggctcaacccttatacgtgccgatatgagcggtgcgacattaaagggtgctactataatggctgctattatggaaggcgctgtcttaactcgggcaaacctgcaaaaggctagttttactgctacgaacctggacggggctgatttgtctgaggctaatttaagaaataccagttttaaagattgtacactaaccgatttgcgtaccgaagacgccacaatgtctacaagtacacaaacactttttaacgtattttatagtgaaaatatttag

SEQ ID NO: 39728 - DNA, 636 bp, Salmonella typhi
atgtatcagcctgatttcccaaccgtgccgttccgcctcgggctttacccggtggtggacagcgttgcatggattgaacgcctgctggaggcgggcgtgcgcaccatccagttgcgtatcaaagataagcgcgatgaagaggtggaagccgacgttatcgccgccatcgcgctggggcgttgttatgacgcccgcctgttcatcaatgattactggcgtctggcaattaagcacaacgcctacggtgtacatttgggccaggaagatctcgaaaccactgacctgaaggcgattcaggcggcggggttacgcctgggcgtatcgacccacgatgatatggagatagacatcgcactcgccgctaagccttcttatatcgcgctgggtcatgtattccccacgcaaaccaagcagatgccttccgccccacaggggctggcgcagctggcgcggcatattgaacgactggcggattatcccaccgtcgctatcggcggcatcagccttgaacgcgctccggcggtactagcgaccggcgtcggcagtattgccgtggtcagcgccattactcaggctgccgactggcgcgccgctaccgcgcagttactggcaatcgcgggagtgggcgatgaatga

SEQ ID NO: 39729 - DNA, 759 bp, Salmonella typhi
atgaatgaccgcgattttatgcgctacagtcggcaaatcctgctcggcgatatcgcgattgaaggccagcaaaagctgctcaatagccatgtattgattgtcggcttaggcggattgggttcgcctgccgcgctgtatctggcgggagcaggcatcggcacactgacgctggcggatgatgacgatgttcacttgagcaatctccagcggcaaattctgttcaccaccgacgatatcgcgcgttcgaaatcccaggttgcccagcagcacctgacacggctcaacccggatatcgaactggtatcactccagcagcgactaaaaggcgatgcgctccggcatgcggtagcgcgtgccgacgtggtgctcgactgtaccgacaacatggcgacccgtcaggaaattaacgccgcctgcgtggcactcaacactccgttaattaccgccagcgccgttggttttggcggccaagtgatggtcctcacgccgccgtgggaacaaggctgttaccgctgcctgtggccagatgatgtggagcctgaacgcaactgccgtaccgccggtatcgtcggaccggttgttggcgtgatgggcaccttacaggcgctggaagcgattaaattactcagcggtattgagacgcccagtggagagctacgcctgtttgacggtaaaaccagccagtggcgcagcctggcgctgcgtcgtgccagcggctgtccggtatgcggagggcgacatgcaaattcaattcaatga

SEQ ID NO: 39730 - DNA, 1734 bp, Salmonella typhi
gtgaatattcaggctcttctctcagaaaaagttagtcaggccatgattgctgcaggcgcgcctgcagattgcgagccccaggttcgtcagtcagccaaagttcagttcggcgactatcaggccaacggcatgatggcagttgcgaaaaaactgggtatggccccccgacaacttgcagagcaggtgctgactcatctggatctcagcggcatcgccagcaaggttgaaatcgccggccctggctttatcaatattttcctcgaaccggcttttctcgctgaacaggtgcaacaggcgctgacctccgatcgtctgggcgtttctcagccgactcgccagacgattgtcgtcgactactccgcgcccaacgtcgcgaaagagatgcacgttggtcatctacgctccacgatcattggcgatgcggcagtgcgcacgctggagtttctgggccatcatgttattcgcgctaaccacgtcggcgactggggcacccagttcggtatgcttatcgcttggctggaaaaacagcagcaggaaaacgcgggcgacatggcgctggcggatctcgaaggattttaccgcgatgcgaaaaaacattatgacgaagatgaaacgtttgccgagcgcgcgcgtaactacgtcgtcaaattgcagagcggtgatacctatttccgtgagatgtggcgtaagctggttgatatcacgatgacgcaaaaccagatcacctatgatcgtctgaacgtcactctgacgcgtgacgatgtgatgggcgaaagtctgtataatccgatgctgccgggcatcgtcgccgatctgaaagccaaaggcctggcggttgaaagcgaaggcgcaacggtggttttccttgatgagtttaaaaacaaggaaggcgacccgatgggcgtcattattcagaagaaagatggcggttatctgtataccactaccgatatcgcctgcgccaaataccgttacgaaacgctgcacgccgaccgcgtgctctactacattgactcccgtcagcaccagcacctgatgcaggcctggaccattgtgcgtaaagccggttatgtgccggattccgttccgctggaacaccacatgttcggcatgatgttgggtaaagacggtaaaccgtttaaaactcgcacgggcggtacggtgaaactggcggacctgctggatgaggcgctggagcgcgcgcgtcgtctggtggcggagaagaacccggatatgccggctgacgagctggaaaaactggctaacgccgtcggtattggcgcggtgaaatacgccgatctgtcaaaaaaccgcaccactgactatatcttcgactgggataatatgttggctttcgaaggcaataccgcaccttatatgcagtatgcctatacgcgtgtgctgtctgttttccgtaaagcggacatcgacgagcaggcgctggcgagcgcgccggttatcattagcgaagatcgcgaagcgcagctcgctgcccgtctgctgcagtttgaagaaaccctgacggtggtcgcgcgtgaaggtacgccgcacgtcatgtgcgcgtatctgtatgacgtcgccgggctgttctccggcttctacgagcactgccctattctcagcgccgagaatgacgcggttcgcaatagccgcctaaaactggcgcaactgacggcgaagacgctgaaactgggtctggatacgttgggtatcgaaaccgtagaacgcatgtaa

SEQ ID NO: 39731 - DNA, 4224 bp, Salmonella typhi
gtgaaagatttattaaagtttctgaaagcgcagactaaaaccgaagagtttgatgcgatcaaaattgctctggcttcgccagacatgatccgttcatggtctttcggtgaagttaaaaagccggaaaccatcaactaccgtacgttcaaacctgagcgtgacggccttttctgcgcccgtatctttgggccggtaaaagactacgagtgcctgtgcggtaagtacaagcgcctgaaacaccgtggtgttatttgtgagaagtgcggcgttgaagtgacccagaccaaagtacgccgtgagcgtatgggccacatcgagctggcgtctccgactgctcacatctggttcctgaaatcgctgccgtcccgtatcggtctgctgctcgatatgccgttgcgtgatatcgaacgcgtactgtacttcgaatcttatgtggttatcgaaggcggtatgaccaacctggaacgtcaacagatcctgactgaagagcagtatctggacgcgctggaagagttcggtgacgaattcgacgcgaagatgggtgcggaagctatccaggccctgctgaagagcatggatctggagcaagagtgtgaaactctgcgcgaagagctgaacgaaaccaactccgaaactaagcgtaaaaagctgaccaagcgtatcaaactgctggaagccttcgtacagtctggcaacaagccagagtggatgatcctgaccgttctgccggttctgccgccagatctgcgtccgctggttccgctggatggtggtcgtttcgccacgtcagatctgaacgatctgtatcgtcgcgtgatcaaccgtaacaaccgtctgaaacgtctgctggatctggctgcgccggacatcatcgtacgcaacgaaaaacgtatgctgcaggaagcggtcgacgccctgctggataacggtcgtcgcggtcgtgcgatcaccggttctaacaaacgtcctctgaaatctttggccgacatgatcaaaggtaagcagggtcgtttccgtcagaacctgctcggtaagcgtgttgactactccggtcgttctgtaatcaccgtaggtccatacctgcgtctgcatcagtgcggtctgccgaagaaaatggcgctggagctgttcaaaccgttcatctacggcaaactggaactgcgaggactcgccaccactatcaaagccgcgaagaaaatggttgagcgcgaagaagctgtcgtttgggatatcctggacgaagtgatccgcgaacacccggtactgctgaaccgtgcaccaacactgcaccgtttgggtatccaggcatttgaaccggtactgatcgaaggtaaagctatccagctgcacccgctggtttgtgcggcatataacgccgacttcgatggtgaccagatggctgttcacgtaccgctgacgctggaagcccagctcgaagcgcgtgcgctgatgatgtctaccaacaacatcctgtctccggcgaacggcgaacctatcatcgttccgtctcaggacgtggtattgggtctgtactacatgacccgtgactgtgttaacgccaaaggcgaaggcatggtgctgactggcccgaaagaagctgagcgtatctatcgcgcaggtctggcctctctgcatgcgcgcgttaaagtgcgtatcactgaatatgaaaaagatgaaaacggcgaattcgttgcgcacaccagcctgaaagacacgaccgttggtcgcgccattctgtggatgatcgtaccgaaaggtctgcctttctccatcgtcaaccaggcgctgggcaagaaagcgatctccaaaatgctgaacacttgctaccgtattctgggcctgaaaccgaccgttatttttgcggaccagacgatgtacaccggctttgcttatgcagcgcgttcaggtgcgtccgttggtattgatgacatggtcatcccggagaaaaaacacgagatcatctctgaagcggaagccgaagttgctgagatccaggagcagttccagtctggtctggtaaccgctggcgaacgctataacaaagttatcgatatctgggctgcggcgaacgatcgtgtatccaaagcgatgatggataacctgcaaaccgaaaccgtgattaaccgtgacggccaggaagagcagcaggtttccttcaacagcatctacatgatggccgactccggtgcgcgtggttctgcggcacagattcgtcagctggcaggtatgcgtggtctgatggcgaagccagatggctccatcatcgaaacgccaatcaccgcgaacttccgtgaaggtctgaacgtactccagtacttcatctccacgcacggtgcgcgtaaaggtctggcggataccgcactgaaaaccgcgaactccggttatctgacccgtcgtctggttgacgtcgcgcaggatctggtggtgaccgaagatgactgtggtacgcacgaaggtatcctgatgaccccggttatcgagggtggcgacgtgaaagagccgctgcgtgaccgcgttctgggtcgtgtgacggcggaagatgtgctgaagccgggtacggcggacattctggttccacgcaacacgctgctgcacgaacagtggtgtgacctgctggaagcaaactccgttgacgccgttaaagtgcgttccgttgtatcctgcgataccgattttggtgtatgtgcgcactgctatggtcgtgacctggcgcgtggccacatcatcaacaaaggtgaagctatcggcgttatcgcggcacagtccatcggtgaaccgggtacacagctgacgatgcgtacgttccacatcggtggtgcggcatcgcgtgcggctgctgaatccagcatccaggttaagaacaaaggtagcatcaagctcagcaacgtgaagtcggttgtgaactccagcggtaaactggttatcacttcccgtaacaccgaactgaagctgatcgacgaattcggtcgtaccaaagagagctataaagtgccttatggcgcagtcatggcgaaaggtgatggcgagcaggttgccggcggcgaaaccgtggcaaactgggacccgcacaccatgccggttatcaccgaagtgagtggtttcatccgcttcactgacatgatcgacggtcagaccattacgcgtcagaccgacgaactgaccggtttgtcttcgctggtggttctggattcggctgaacgtactaccggtggtaaagatctgcgtccggcgctgaaaatcgttgatgctcagggtaatgacgttctgatcccgggtaccgatatgcctgcgcagtacttcctgccgggtaaagcgattgtacagctggaagatggcgtacagatcagttctggtgacaccctggcgcgtattccgcaggaatccggcggtaccaaggatatcaccggtggtctgccgcgcgttgccgatctgttcgaagcgcgtcgtccgaaagagccggccattctggcggaaatcgcaggtatcgtttccttcggtaaagaaaccaaaggcaaacgtcgcctagtgattacgccggttgatggtagtgacccgtacgaagagatgattccgaaatggcgtcagctcaacgtgttcgaaggggaacgtgtagaacgtggtgatgtgatttccgatggtccggaagcgccgcacgacattctgcgtctgcgtggcgttcatgctgtgacgcgttatattgttaacgaagttcaggatgtataccgtctgcagggcgttaagattaacgataaacacatcgaagttatcgttcgtcagatgctgcgtaaagcgaccatcgaaagcgccggtagttccgacttcctggaaggcgaacaggttgaatactctcgcgtcaagatcgctaaccgcgagctggaagcgaacggcaaagtgggggctaccttctcccgcgatctgctgggtattaccaaagcgtctctggcaaccgagtcgttcatctctgccgcatcgttccaggagaccacgcgtgtcctgaccgaagcagccgttgcgggtaaacgcgacgaactgcgcggcctgaaagagaacgttatcgtgggtcgtctgattccggccggtaccggttatgcgtaccaccaggatcgtatgcgccgtcgcgccgcgggcgagcagccagcaacaccgcaggtcactgcggaagatgcatctgcaagcctggcagagctgctgaacgcaggtctgggcggttctgataacgagtaa

SEQ ID NO: 39732 - DNA, 4029 bp, Salmonella typhi
atggtttactcctataccgagaaaaaacgtattcgtaaggattttggtaaacgtccacaagttctggatgtaccttatctcctttctatccagcttgactcgtttcagaagtttatcgagcaagatcctgaagggcagtacggcctggaagcagccttccgttccgtgttcccgattcagagctacagcggtaattccgagctgcagtacgtcagctaccgccttggcgaaccggtgtttgacgttcaggaatgtcagatccgtggcgtgacctattccgcaccgctgcgcgtaaaactgcgtctggtgatctacgagcgcgaagcgccggaaggcaccgttaaagacattaaagaacaagaagtctacatgggcgaaattccgctcatgaccgacaacggtacctttgttatcaacggtactgagcgtgttatcgtttctcagctgcaccgtagtccgggcgtcttctttgactccgacaaaggtaaaactcactcttcgggtaaagtgctgtataacgcgcgcatcattccttaccgtggttcctggctggacttcgaattcgatccgaaggacaacctgttcgtgcgtatcgaccgtcgccgtaaactgcctgcgaccatcatcctgcgtgcgctgaactacaccactgagcagatccttgacctgttctttgagaaagtcgtcttcgaaattcgcgacaacaagctgcagatggagctgattccagaacgtctgcgcggcgaaaccgcgtcgttcgatatcgaagctaacggcaaggtgtacgttgaaaaaggccgtcgcattaccgcgcgtcatatccgtcagctggaaaaagacgatatcaagcatatcgaagttccggttgagtacatcgcaggtaaagtcgtctctaaagactacgttgacgaatctactggcgagctgatctgcgcggcgaacatggagctgagcctggatctgctggctaagctgagccagtccggccacaagcgtatcgaaacgctgtttaccaacgatctggaccacggcccgtacatttctgaaacggtacgcgtcgatccaactaacgatcgtctgagcgcgctggtagaaatctaccgcatgatgcgccctggtgagccgccgacacgcgaagcggctgaaagcctgtttgagaacctgttcttctccgaagaccgctatgacctgtctgcggtgggtcgtatgaagttcaaccgttctctgctgcgcgacgaaatcgaaggttccggtatcctgagcaaagacgacatcattgatgtcatgaagaagctcatcgatatccgtaacggtaaaggcgaagtggatgatatcgaccacctcggcaaccgtcgtatccgttccgtcggcgaaatggcggaaaaccagttccgcgttggcctggtgcgtgtagagcgtgcggtgaaagagcgtctgtctctgggcgatctggataccctgatgcctcaggatatgatcaacgccaagccgatttccgccgcagtgaaagagttctttggttccagccagctgtctcagtttatggaccagaacaacccgctgtctgagattacgcacaaacgtcgtatctccgcactcggcccaggcggtctgacccgcgaacgcgcaggcttcgaagttcgagacgtacacccgacgcactacggtcgcgtatgtcctatcgaaacgccggaaggtccgaacatcggtctgatcaactccctgtccgtgtacgcacagactaacgaatatggcttccttgagacgccgtaccgtcgtgtggttgatggcgtggttactgacgaaattcattacctgtctgctatcgaagaaggcaactacgttatcgctcaggcgaactccaacctggatgacgaaggccactttgtagaagatctggtaacctgccgtagcaaaggcgaatccagcttgttcagccgcgaccaggttgactacatggacgtttccacccagcaggtggtctccgtcggtgcgtccctgatcccgttcctggaacacgatgacgccaaccgtgcattgatgggtgcgaacatgcaacgtcaggcggttccgactctgcgtgctgataagccgctggtgggtaccggtatggaacgtgctgtcgccgtcgactccggtgttactgcagtagctaaacgtggcggtactgttcagtacgtggatgcatcccgtatcgttatcaaagttaacgaagacgagatgtacccgggtgaagcaggtatcgacatctataacctgaccaaatacacccgctctaaccagaacacctgtatcaaccagatgccatgtgtgtctctgggcgagccggttgaacgcggcgacgtgctggcagacggtccgtccaccgacctcggtgaactggcgctcggtcagaacatgcgcgtggcgttcatgccgtggaacggctacaacttcgaagactccatcctcgtttccgagcgtgttgtccaggaagaccgtttcaccaccatccacattcaggaactggcgtgcgtgtcccgtgacaccaagctggggccggaagagatcaccgctgacatcccgaacgtgggtgaagctgcgctctccaaactggatgaatccggtatcgtttacatcggcgcggaagtgactggcggcgacattctggtcggtaaggtaacgccgaaaggtgaaacccagctgacgccggaagagaaactgctgcgtgcgatcttcggtgagaaagcgtctgacgttaaagactcttttctgcgcgtacctaacggtgtctccggtacggttatcgacgttcaggtctttactcgcgatggcgtagaaaaagacaaacgtgctctggaaatcgaagagatgcagctcaagcaggcgaaaaaagacctgtctgaagaactgcagatcctcgaagcgggcctgtttagccgtatccgtgcggtgttggtgtccggcggcgttgaagctgagaagctcgacaaactgccgcgcgaccgctggctggaactcggtctgaccgacgaagagaaacaaaatcagctggaacaactggctgagcagtatgacgaactgaaacacgagttcgagaaaaaacttgaagcgaagcgccgtaaaatcacccagggcgacgatctggcgccgggcgtgctgaagatcgtgaaggtctatctggccgttaaacgccgtatccagccgggtgataagatggcaggtcgtcacggtaacaagggtgttatctctaagatcaacccgatcgaagacatgccttacgatgaaaacggcacgccggtagacatcgtactgaacccgctgggcgtaccgtctcgtatgaacatcggtcagattctggaaacccacctgggtatggctgcgaaaggtattggcgacaagattaacgccatgctgaaacagcagcaggaagtcgcgaaactgcgcgaattcatccagcgtgcctacgatctgggcgccgacgttcgtcagaaagtcgacctgagcaccttcagcgatgatgaagtgctgcgtctggcagaaaacctgcgcaaaggtatgccgattgccacaccagtgttcgacggtgcgaaagaagcggaaatcaaagagctgctgaaactgggcgacctgccgacctccggtcagatcaccttgttcgatggccgtacgggtgaacagttcgaacgtccggtaaccgtcggttacatgtacatgctgaaactgaaccacctggttgatgacaagatgcatgcgcgttctaccggttcttacagcctggttactcagcagccgctgggtggtaaggcgcagttcggtggtcagcgcttcggggagatggaagtgtgggcgctggaagcttacggcgccgcctacaccctgcaggaaatgctcaccgttaagtctgatgacgtgaacggtcgtaccaagatgtataagaacatcgtggacggcaaccatcagatggaaccgggtatgccggaatccttcaacgttctgttgaaagagatccgctcgctgggcatcaacatcgaactggaagacgagtaa

SEQ ID NO: 39733 - DNA, 987 bp, Salmonella typhi
atgattctgatgaatgcactgactgccgtaaaagcgaacacagatgatttagcccaacgccatactggtttcatccttgccccttcggcgcagtcgccgcgcctgctggcgttaacgtttacggcggataccacaagacaatttctccatcaggttgcgcagtggccggtgcaggcgctggaatacaaatctttcttacgtttcaaaatcggcaagatcctcgacgatctgtgcggcaatcagctacaaccgctgttgatcaaaacgctcctcaaccgtgcacaaggcgcgctgttgatcagcgccgaagggatcgatgatgtcgcacaggcagaagagatggtcaaactggcgacggcggtggcgcatcttattggtcgctccaactacgatgcgatgagcggccagtattacgcgcgtttcgtggtcaaaaacgtcgacaactccgacagttatctgcgccagccccaccgcgtaatggaactgcacaatgacggtacctatgttgaggaggtgaccgactacgtgctgatgatgaaaatcgacgaacaaaatatggaaggcggtaattcgctgctgctgcaccttgatgactgggaacatctggagtcgttttttacccatccgctggcgcgtcgcgtcatgcgctgggcggcgccgccaagcaagaatgttagccatgacgtctggcacccggtgtttgatgtcgaccaacaaggccgcccggtcatgcgttatatcgaccagttcgtccagccaaaagactttgaagaaggcgtctggctcagcgagctttcagacgcgctggaaaccagtcaaaacatcctctccgtgccggtaccggtcggcaaattcctgctgattaacaatctgttctggctacatggacgcgatcgttttacgccgcatcctgacttgcgtcgcgagctgatgcgccagcgcggttacttcgcctacgccgccagccattatcaaactcaccaataa

SEQ ID NO: 39734 - DNA, 366 bp, Salmonella typhi
atgtctatcactaaagatcaaatcattgaagcagtatccgctatgtccgtaatggacgttgtagaactgatttctgcaatggaagaaaaattcggtgtctccgctgctgctgctgtagctgtagctgctggcccggctgaagctgctgaagaaaaaactgaattcgacgtaattctgaaagctgctggcgctaacaaagttgctgttatcaaagcagtacgtggcgcaactggcctgggtctgaaagaagctaaagacctggtagaatctgctccggccgctctgaaagaaggcgtgagcaaagatgacgctgaagcactgaaaaaatctctggaagaagctggcgctgaagttgaagttaaataa

SEQ ID NO: 39735 - DNA, 498 bp, Salmonella typhi; identical to SEQ ID NO: 38903

SEQ ID NO: 39736 - DNA, 1449 bp, Salmonella typhi
atgcaacttaacgactctaccctgttccgccagcaggcctttatcgatggcgactggcgcgacgcgcgcggcggcgatgtcatccccgtgagcaaccccgccaacgggaaaccgcttggcaatgtgcccaaaatgggggcggaagagacgcgcgacgccatcaacgccgccaatcgcgccctgcccgcctggcgcgcgctcaccgccaaagagcgagccaatatcctgcgtcgctggttcaatctgatgatggaacatcaggacgatttggcgcgtctgatgacgctggaacagggcaaaccgctggcggaagcgaaaggcgaaattagctacgccgcctcgtttattgaatggttcgccgaagaggggaagcgtatctatggcgacacgattccaggtcatcagaccgataaacggctgctggtgattaaacagcccatcggcgtcaccgccgcgattaccccgtggaactttccctcggcaatgatcacccgtaaagccggccccgcgctggccgcaggctgcacaatggtactcaaacccgccagccagacgccgttttccgcgctggcgctggcggaactggcccagcgcgccggaattctcgcaggcgtatttaacgtcgttaccggttcggcaggcgatatcggcggcgagctgaccagcaacccgctggtacgcaaactgtcgtttaccggctcgacggagattggccgccagctaatggaacaatgcgccaaagacattaaaaaagtatcgctggagttgggcggcaatgcgccgtttatcgtctttgacgatgccgatctggataaagccgtcgagggcgcgctggcttcgaagtttcgcaacgccgggcagacctgtgtctgcgccaatagattgtatgttcaggacggcgtttacgatcgttttgcggaaaaactcaaccaggcggtaaataagctcgcggtcggcgacggcctgcaagccgacgtcgctatcgggccgctgattgatgaaaaagccgtggctaaagtccaggagcatatcgccgacgcgctggaaaaaggcgcccgcgtaattacgggcggtgaagcgcacaaattaggcggcaacttctttcaaccgaccattctggcggatgttcctgataacgcgaaagtcgccaaagaagagacattcgggccgctcgcgcctctgttccgcttcagcgacgaggcggatgtcatcaggcaggctaacgataccgagttcggcctggcagcctatttttatgcacgcgatttaagccgcgttttccgcgtcggcgaagcgctggaatacggcatcgtcggtattaataccggcattatctccaacgaagtcgcgcctttcggcggtattaaggcctccggattaggccgtgaaggttccaaatacggcatcgaagattatttagaaatcaaatatatgtgcatcggcctttaa

SEQ ID NO: 39737 - DNA, 705 bp, Salmonella typhi
atggctaaactgaccaagcgtatgcgcgtgatccgtgaaaaagttgatgcgaccaaacagtacgacatcaacgaagctattgccctgttgaaagagctggccactgctaaattcaacgaaagcgttgacgttgccgttaacctcggcatcgacgctcgtaaatctgaccagaacgttcgtggcgcgactgtactgccgcacggtactggccgttctgttcgcgttgccgtatttacccagggcccgaacgctgaagcagctaaagctgctggcgctgagctggtaggtatggaagatctggctgaccagatcaagaaaggcgaaatgaacttcgacgttgttatcgcatccccggatgcaatgcgcgttgttggccagctgggccaggttctgggtccgcgcggcctgatgccaaacccgaaagtcggtaccgtaacgccgaacgttgctgaagcggttaagaacgctaaagcaggtcaggttcgttaccgtaacgacaaaaacggcatcatccacaccaccatcggtaaagtggactttgacgctgacaaactgaaagaaaacctggaagctctgctggttgcgctgaaaaaagcaaaaccgagccaggcgaaaggcgtgtacatcaagaaagttagcatctccaccaccatgggtgctggcgttgccgttgatcaggctggtctgagcgcatctgcgaactaa

SEQ ID NO: 39738 - DNA, 1152 bp, Salmonella typhi
gtggcagaagagagcgacgacgacaaaacagaagcccccacaccccaccgacttgaaaaagcgcgggaagaagggcagatcccccgttccagagaactgacctcactgctgatattgctggtgggcgtttgtattatttggttcggcggcgagtcgttagcgcggcagctggcgggaatgctctcagcaggcctgcacttcgatcaccgtatggtgaacgatcctaacctgatcctggggcagataattttgctgattaaagcggcgatgatggcactgctaccgctcatcgcgggcgtggtgctggtggcgcttatctcgccggttatgcttggcggcctgatttttagcggtaagtcgctacagccaaaattttctaaattaaacccgctgccgggaattaagcgcatgttttcggcgcagaccggcgcggaactgctaaaagcggtgttgaaatccacgctggtcggctgcgttaccggcttttatctctggaatcactggccgcaaatgatgcgcctgatggcggagtcgccgatcgtcgcaatggggaatgcgctggatctggttggactctgcgcgttactggtggtactgggcgtgatcccgatggtgggatttgacgtttttttccagatctttagccacctgaaaaaattacgcatgtcgcggcaggacattcgcgacgaatttaaagagagcgaaggcgatccgcatgttaagggcaaaattcgccagatgcaacgcgccgccgcgcagcgccgcatgatggaagatgtgccgaaagcggacgtcattgtcactaacccgacgcactattccgtggcgctgcagtatgacgaaaacaaaatgagcgcgccgaaagtggtcgcgaagggggctggattaatagcgctgcgcattcgcgagatcggcgctgaacatcgggttcccactttagaagcgccgccgctggcgcgggcattatatcgccacgccgaaatcggtcagcaaattcccgggcagttatatgctgccgttgcggaagtgttggcctgggtctggcagcttaaacgctggcggcttgcgggcgggcaacgtcctccacaacctgagaaccttccggtgccagaagcgctggattttatgaacgagaagaatactgatggctaa

SEQ ID NO: 39739 - DNA, 429 bp, Salmonella typhi
atggctaagaaagtacaagcctatgtcaagctgcaggttgcagctggtatggcgaacccgagtccgccggttggtccagcactgggtcagcagggtgtgaacatcatggaattctgcaaagcgttcaacgcaaaaacggattccatcgaaaaaggtctgccgattccggttgttattaccgtttacgctgaccgttctttcaccttcgttaccaaaacgcctccggcagctgttctgctgaaaaaagcggctggtatcaagtctggttccggcaagccgaacaaagacaaagtaggtaaaatttcccgcgctcagctgcaggaaatcgcgcagaccaaagctgccgacatgaccggtgccgacattgaagcgatgactcgctccatcgaaggtactgcacgttccatgggcctggtagtggaggactaa

SEQ ID NO: 39740 - DNA, 645 bp, Salmonella typhi
atgatgcaaccatctatcaagcctgctgatgaaggctcagcaggagacatcattgcgcgcatcggtagtctgacccgaatgctgcgcgacagcctgcgtgaactggggctggaccaggcgattgccgaagcggcggaggcgatccctgatgcgcgcgaccgtctggattatgtcgtccagatgacggcgcaggcggcggaacgcgcgctaaacagtgtcgaagcctcgcagccgcatcaggatgcgatggaaaaagaggcgaaagcgctaacccaacgttgggacgagtggtttgacaatccgatcgagctttccgacgcccgtgaactggtgacggatacgcgccagtttctcagggatgtcccgggccataccagctttactaacgcgcaactgctggacatcatgatggcgcaggatttccaggatctgacgggtcaggtgatcaaacgcatgatggacgtgattcaggagattgagcgccagttgttaatggtgctgctggaaaacatcccggaacagagcgcgcgaccaaaacgcgagaacgaaagcttgctcaacggcccgcaggtggatacctcgaaagctggcgtcgtcgccagtcaggagcaggtggacgacctgctggacagtcttggcttttaa

SEQ ID NO: 39741 - DNA, 1401 bp, Salmonella typhi
atggggcaattgtcagaatcacatgcattagggggcgggctgaaatcacgccacgtcaccatgttatcgatcgccggcgtcatcggcgccagcctgtttgtcggttccagcgtggcgattgcggaggccggccctgcggtactgctggcctatctgttcgcaggacttttagtcgtcatgattatgcgaatgctggctgaaatggccgtcgccacaccggataccggttctttttccacctatgcggataaagcgatcggcccctgggccgggtataccatcggctggttatactggtggttttgggtgctggttattccgctggaggccaatattgccgccattattctgaattcatggataccgggtattccggtgtggctattttcattagtgattacgcttgccttaaccggaagcaatttattgagcgtcaaaaattacggtgaattcgaattctggctggcgctatctaaagtaattgccattctggcgtttatcgcgctgggcgcggcggcgattagcggtttttatccgtatgccgaggtaagcggtatttcccggctctgggatcacggcggttttatgcctaacggcttcggtgcggtgttaagcgccatgttgatcaccatgttctcttttatgggcgcggaaatcgtcactattgctgccgcggaatccgatacgccggataaacatatcgtacgcgccaccaattctgttatctggcgaatttccatcttttacctgtgttccatttttgtggtagtggcgctgatcccgtggaatatgccgggtctgaaaagcgtaggttcgtaccgttcggtactggagctgcttcatattccgcacgcaaaattcattatggactgcgtgattttattgtcggtgaccagttgtctgaactccgcattatataccgcctcccggatgctctattcccttagccgccgcggcgatgcgcctgcgataatgggaaaaactaaccgtagcaaaacgccctgggtggcggttctcctctctaccggcgcggcctttttaaccgttatcgtcaattattacgccccggcaaaagtgtttaaatttcttatcgacagttccggcgccatcgcgctgctggtctatctggtgattgcgatttcgcaattgcggatgcgtaaaattctgctggcgcagggcggagaaattaagttgaaaatgtggctttatccgtggctcacctggctggttatcggctttatctgctttgttctggtggtgatgctatttcgaccggcacagcaactagaagtcatttcaacggggctgttagggctgggcataataggtactgtccctattatgtctcgctggaaaaaactgataaggtggcaaaaagcccccctgcaaaacctacgttag

SEQ ID NO: 39742 - DNA, 546 bp, Salmonella typhi
atgtctgaagcacctaaaaagcgctggtacgtcgttcaggcgttttccggttttgaaggccgcgtagccacatcgctgcgcgagcatatcaaattacacaatatggaagagctgtttggcgaagtcatggtgccgactgaagaagtcgttgagatccgtggcggccagcgtcgcaaaagcgaacgcaaattcttcccgggttacgttctggtccagatggtcatgaacgacgcaagctggcacctggtgcgcagcgtgccgcgtgtgatgggctttatcggcggtacctctgaccgtccggcgccgatcagcgacaaagaagtcgatgcgatcatgaaccgcctgcagcaggttggcgataagccgcggccgaaaacgttgtttgaaccgggtgaaatggttcgtgttaacgacggtccgttcgcagactttaacggcgttgtcgaagaagtcgattatgagaagtctcgcctgaaagtgtctgtttctatcttcggtcgtgcgaccccggtagagctggacttcagccaggttgagaaagcgtaa

SEQ ID NO: 39743 - DNA, 1185 bp, Salmonella typhi
atgtctaaagaaaagtttgaacgtacaaaaccgcacgttaacgtcggtactatcggccacgttgaccatggtaaaacaacgctgaccgctgccattactaccgtactggctaaaacctacggcggtgccgcccgcgcattcgaccagatcgataacgcgccggaagaaaaagcgcgtggtatcaccatcaacacttctcacgttgaatacgataccccgacccgccactacgcacacgtagactgcccggggcacgccgactatgttaaaaacatgatcaccggtgctgctcagatggacggcgcgatcctggttgttgctgcgactgacggcccgatgccgcagacccgtgagcacatcctgctgggtcgtcaggtaggcgttccgtacatcatcgtgttcctgaacaaatgcgacatggttgatgacgaagagctgctggaactggttgaaatggaagttcgtgaacttctgtctcagtacgacttcccgggcgacgacacgccgatcgttcgtggttctgctctgaaagcgctggaaggcgacgcagagtgggaagcgaaaatcatcgaactggctggcttcctggattcttacatcccggaaccagagcgtgcgattgacaagccgttcctgctgccgatcgaagacgtattctccatctccggtcgtggtaccgttgttaccggtcgtgtagaacgcggtatcatcaaagtgggcgaagaagttgaaatcgttggtatcaaagagactcagaagtctacctgtactggcgttgaaatgttccgcaaactgctggacgaaggccgtgccggtgagaacgtaggtgttctgctgcgtggtatcaaacgtgaagaaatcgaacgtggtcaggtactggctaagccgggcaccatcaagccgcacactaagttcgaatctgaagtgtacattctgtccaaagatgaaggcggccgtcatactccgttcttcaaaggctaccgtccgcagttctacttccgtactactgacgtgactggtaccatcgaactgccggaaggcgtagagatggtaatgccgggcgacaatatcaaaatggttgttaccctgatccacccgatcgcaatggacgacggtctgcgtttcgcaatccgtgaaggcggccgtactgttggcgcgggcgttgttgctaaagttctcggctaa

SEQ ID NO: 39744 - DNA, 390 bp, Salmonella typhi
atggcggataaagagcttaaatttttggttgtggatgacttttcgaccatgcgtcgtatcgtgcgcaacctcttaaaagagcttggatttaacaatgtggaagaggccgaagacggcgtcgatgcgctgaacaagctccaggcaggcggctttggttttattatctctgactggaacatgccgaacatggatggcctggagctgctgaaaaccattcgcgccgatagcgccatgtcggcgttacccgtgttgatggtcacggcggaagccaagaaagagaatattatcgccgccgcacaggctggcgccagcggttatgtcgtaaaaccgttcaccgcagcgactctggaagagaagctcaacaaaatctttgagaaactgggcatgtga

SEQ ID NO: 39745 - DNA, 504 bp, Salmonella typhi
atgaccggtatgagtaatgtaagcaaactggccggcgagccgtcaggtcaggaattcctggtgtttacactgggaaatgaagagtacggcatcgatatcctgaaagtgcaggagatccgtggctatgaccaggtgacgcgcatcgccaatacaccggcctttataaaaggggtgactaacctgcgcggcgtgattgtccccattgtcgatctgcgcgtgaaattctgcgaaggcgacgttgagtatgatgacaatacggtagtgatcgtactgaatctggggcaacgtgtcgtcgggatagtggtaggcggcgtgtctgacgtactgtcgttaacggcggaacagatccgtccggcgccagaatttgccgtgaccttgtcaacagaatatttgacgggattgggcgcgctcggcgagcgtatgctgattctggtgaatatcgaaaaactgcttaacagcgaagagatggcgctgctggatatcgcagcatcacacgtcgcgtaa

SEQ ID NO: 39746 - DNA, 1029 bp, Salmonella typhi
atgacccattccctaaaaccctggaataccttcggcattgatcattgtgcaaagcacatcgtatgcgctgaaaacgaacaacaactactgagcgcctggcagcaagcaactcgtgagggactgccggttatgatcctgggtgaaggaagcaacgtcctgtttctggaaaattacgccggcaccgtgatccttaaccgcctgaaaggcattgaggtgaatgaaaccgcggacgcctggcacctacacgtcggcgcaggcgaaaactggcatcagctggttcgctatgcgctggacaacaacatgcccggcctggagaatctggcgctcatccctggctgcgttggttcctcgcctatacagaatattggcgcgtatggcgtagaactacatcgcgtctgcgactacgttgactgcgttgaactggaaacgggaaaacgtctgcgtttgtccgcggcggaatgccgtttcggctatcgtgacagtatcttcaaaaatgaatatcaggatcgcgttgcgatcgtcgcggtgggtctgcgtttgtcaaagcaatggcagccggtgttgacctatggcgatcttactcgtctggacccgaaaacggtcaccgcgcaacaggtgtttgatgctgtatgccatatgcgcaccacaaaattgccggatcctaaagtgaatggcaatgcgggcagcttttttaaaaatcccgttgtcgcagccgatatcgctatggaactgttagaacgatttcccaacgcgccgcattaccctcaggcagacggctcagtgaagctggcggcaggctggctgatagatcaatgtcagttgaaaggcgtcaccattggcggcgctgcggtgcatcgccaacaggcgctggtattgattaatgcgaatgatgcgacaagtaaagatgtggtggcgctggcgcatcatgtccggcaaaaagtgggtgaaaaatttaatgtctggctggagcctgaggttcgctttattggtcagttcggagaggtgaacgctgtggagagcattgcatga

SEQ ID NO: 39747 - DNA, 411 bp, Salmonella typhi
atgagcgcgctcgtctacttctccagcagctctgaaaatacgcaccgttttatgcagcgtctggggctgcccgccacgcgtattccgctcaatgaacgggagcgaattcaggtagacgaaccgtacattctggttgtgccgtcatacggcggcggcgggatggccggtgcggtgccgcgacaggtgatccgctttttaaatgatgaacacaaccgggcgcgcattcgcggcgtcatcgcctccggtaaccgcaatttcggcgatgcctggggatgcgctggcgatgtgatagcacaaaaatgcggcgtcccctggctgtaccgctttgagctcatgggcacacaacgcgacatcgataacgtccgaaaaggagtaaatgaattttggcaacaatcaccccggagcgcgtaa

SEQ ID NO: 39748 - DNA, 783 bp, Salmonella typhi
gtgctggtatttgattccggcgtcggtggattgtcggtctatgatgagattcggcggctcctgccggatctccactatatatatgctttcgataacgtggctttcccctacggggaaaagagcgaaacgtttatcgttgagcgcgttgtcgagattgtgactgcggtacagcagcgctatcccctttcactggcggtgattgcctgtaataccgccagtacggtctcacttcccgcattacgtgaaaagtttgccttcccggtggtgggcgttgtgcctgcgattaaaccagcggcgcggcttaccgccaatggcgtcgtcgggctactggcgacgagagccacggtcaaacgtccttatactcacgagctgattgcgcgcttcgccaatgaatgtcagatagcgatgttggggtcggcagaactggtggaactggcggaagctaaattacatggcgattcggtatcgctggaagaactgcgccgtatattacgcccatggctacgaatgccggagccgcctgacacggtcgttctggggtgtacgcatttccctctattacgggacgagcttttgcaagtcctgcccgaagggacgcggttagtggattccggcgcggcgatagcgcgtcgtacagcctggctgttggaacatgaagcgccggatgcgaaatcaaccgatgccaatattgcttattgcatggcaatgacgccaggagctgaacaattattacccgttttacagcgttatggctttgaaacgctcgaaaaactggcggtttaa

SEQ ID NO: 39749 - DNA, 2145 bp, Salmonella typhi
ttggcaacaatcaccccggagcgcgtaatgcaggaaaccatggattaccacgccctgaacgcgatgctgaatctttacgataaagcaggccatattcagttcgacaaggaccagcaggcgatcgacgccttctttgccgcccacgtccgcccgcattccgtgaagtttgccagccagcatgaacgtctggagacgctggttcgggaagggtattacgatgacgccgtcctcgcgcgttacgaccgcgccttcgtcttccgcctgttcgagcacgcccacgccagcggctttcgcttccagacgtttcttggcgcctggaagttctataccagttacacgctgaaaaccttcgacggcaaacgttatctggaacactttgaagatcgggtgacaatggtggcgttgacgctggcgcagggtgacgaaacgctggccacccaactgaccgatgaaatgctttctggtcgctttcagcccgctaccccgacttttttaaattgcggtaaacagcagcgtggggaactggtctcctgcttcctgctccgtatcgaagacaatatggaatcgatcgggcgagcggtgaattcggcgctgcaactctccaaacgcggcggcggcgtcgcatttttactctccaatctgcgcgaggcgggcgcgccgatcaaacgcattgagaatcagtcttccggcgtgatcccggtgatgaaaatgctggaagacgcgttttcgtatgccaaccagcttggcgcgcgccaaggggccggcgcggtttatctccatgcgcaccatccggatattctgcgttttctggataccaaacgggaaaatgccgacgaaaaaatccggatcaaaacgctctctctcggcgtggtgatcccggacatcaccttccggctggcgaaagaaaacgcgcaaatggcgctcttttcgccctatgacatacaacgacgctacggcaaaccgtttggcgatatcgccattagcgaacggtacgatgaattaattgccgatccgcacgtgcgcaaaacctatattaacgcccgtgacttttttcaaacactggcggaaattcagttcgaatccgggtatctctacatcatgtttgaagatacggtaaaccgcgcgaatcctattgctggtcgcattaatatgagcaacctgtgctcggaaattttacaggtcaatagcgcctctcgttacgacgataaccttgactatacccacatcgggcatgacatctcctgcaatctcggctcgctgaatatcgctcacgtcatggattcaccggacattggccgtaccgtagaaaccgctattcgcggcctgacggcggtgtcggacatgagccatatacgcagcgtgccctcaatagccgccggtaatgccgcctctcatgccatcggtctgggccagatgaatctgcatggctatctggcgagggaaggtattgcctacggttcgccggaggcgttggatttcaccaatttctatttttacaccattacctggcatgccgtgcatacttcaatgcggctggcccgcgaacgcggcaaaaccttcgccggatttgcgcagtcgcgctatgccagcggcgactattttacgcagtatttacaggacgactggcaaccgaaaacggcgaaagtcagggcgctatttgcccgcagcggcattacgctgcccacacgcgaaatgtggctaaagctgcgcgacgatgtgatgcgctatggcatctataaccaaaatttgcaggcggtgccgccgaccggttcgatttcttacattaatcatgcgacctccagcattcatccgattgtggccaaaattgagattcgcaaagagggcaaaaccgggcgtgtgtattaccccgcgccgtttatgactaatgaaaacctggacatgtatcaggatgcttacgatatcggtccggaaaaaattattgatacctatgccgaggccacgcgccacgtcgatcaaggactgtcgctcaccctgtttttccccgataccgccacgacccgcgatatcaacaaagcgcagatctatgcctggcgaaaaggtattaagtcactgtattacatccgacttcgccagttggcgctggaaagtactgaaattgaaggctgcgtatcctgcgcgctataa

SEQ ID NO: 39750 - DNA, 960 bp, Salmonella typhi
atgaaattatctcgtattagcgccatcaactggaacaagatccaggacgacaaagatctggaggtgtggaaccggctgaccagtaacttctggctgccggaaaaagtgccgttatcgaatgatattccggcctggcagacgctgagcgccgccgaacagcagctcaccattcgcgtgtttacgggtcttacgctgctcgacactatccagaacatcgcaggcgcgccgtcgttaatggcagatgccatcacgccgcatgaagaggccgtactgtcgaacatcagctttatggaagcggtacacgcccgctcttacagttctattttctccacgctgtgccagacgaaagaggttgatgccgcctacgcctggagcgaagaaaacccaccgcttcagcgtaaggcgcagattattttagctcattacgtcagcgatgaaccgctaaagaaaaagattgccagcgtctttttagagtcttttctgttctattccggcttctggttgccgatgtatttctccagccgcggtaagctcacgaacactgccgacctgattcgtttaatcattcgcgatgaagcggttcacggttattatattggctataagcatcagatagcgctacaaaaactatcggcaatcgagcgtgaagagttaaagcttttcgcgctggatttattgatggaactgtacgacaacgaaatctgctacacagaagcgttatatgcggaaaccggctgggttaacgacgtcaaagccttcttgtgctacaacgccaataaagccttaatgaacctgggttatgaggcgttatttccgccggagatggcagacgtgaatcccgcaatccttgccgcgctctcgccgaatgccgacgaaaaccatgatttcttttccggctcaggttcatcttatgtgatggggaaaacggtcgaaaccgaagacgaagactggaatttttaa

SEQ ID NO: 39751 - DNA, 504 bp, Salmonella typhi
atggcagctgtaggaatggttcaaaagctcaacacgccaatgaatcttgagttttacgcatcaaatctttacctccatctaagcgaatggtgttctgaacacagtttaacaggtacagccacctttcttcgtacccaagcgcaaggcaacgtgacgcaaatgatgcgcatgtttaattttatgaaaaacgccggcgccacccctatcgttaaagccattgacgttccgggtgaagagctctgctctctggaagaattgttccagaaaaccctggaggattatcagcaacgcgccagcacgctgtcgcgtctggcagatgaagcgaaagcgctgaatgatgcctcaacgctcgattttctccataccctggaaaaagagcagcagcaggatggcgtacttttacaaactattctcgaagaagttcgcagcgctaaacgagcagggctatgcctggcgcaaaccgatcagcatctccttaacgtcgtgacctatcagcatcactga

SEQ ID NO: 39752 - DNA, 1401 bp, Salmonella typhi
atgccacattcctgggattatgatgcagtcgtcatagggtcaggccccggcggtgaaggcgctgcaatgggtctggttaagcaaggagcacgcgtcgcggtgattgagcgttatcataacgttggcggcggatgtacccactggggcaccattccatccaaagcccttcgccacgccgtcagccgcattattgaatttaatcaaaacccgctctatagcgaccactcccgtctccttcgttcttctttcgccgatatccttaatcatgccgataacgtgattaatcaacaaacgcgtatgcgtcaggggttttatgagcgtaaccactgtgaaatcttgcagggcaacgcccattttattgacgaacataccctggcgctggaatgccatgacggcacggttgaaaccctgacggcagaaaaatttgttattgcctgtggttcgcgtccttaccatcccaatgatgtggatttctcgcatccgcgcatttatgacagcgactcaatcctgagtctccaccatgaaccgcgccacgttattatttacggcgcaggcgttatcggctgcgaatatgcgtccatattccgcggtatggatgtgaaagtggatctgatcaacacccgcgatcgcctgctggcctttctcgatcaggagatgtccgactctctctcttaccatttctggaatagcggcgtggttattcgccacaatgaagagtatgagaaaatcgaaggctgcgatgatggcgtcatcatgcacctgaaatccggcaaaaaactgaaggctgactgcctgctctatgctaatggccgtaccggtaacaccgattcgctggcgctggagaatattggtctggaaacagacagccgtggacagctcaaagtcaacagtatgtaccagaccgccctgccgcacgtctatgcggtgggcgacgtgattggctatcccagtctggcctccgccgcctacgatcaggggcgtattgcagcgcaggcgctggtgaaaggcgaagcgaccgcgcatcttatcgaagatatccccaccgggatttataccattccggaaatcagttctgtcggcaaaaccgagcagcagttaacggcaatgaaagtgccttacgaagtgggccgcgcgcagtttaagcatctggcgcgagcgcaaatcgtcggcatgaacgtcggcacgctaaaaattctctttcaccgcgaaaccaaagaaattctggggattcactgctttggcgaacgcgccgccgaaattattcatatcggccaggcgatcatggagcagaaaggtggcggtaacaccatcgaatacttcgttaacaccacctttaactacccaaccatggcggaagcttatcgggttgcggcgttgaacggcttaaaccgcctgttttaa

SEQ ID NO: 39753 - DNA, 336 bp, Salmonella typhi
atgaagcctcttatttttactctttcactgctagccctgacgggatgcaccattactcgacaagcgcaggtcagcgaagccagcccgataagcggcatcgtgcgcctgacgtataaccagccgctattttttacttcacggacagatgactatgtatctcacggaaccgcaacacgcgaatgccagcagatgggctatgccgatgccgtttcgtttggtcagccggtaggaacctgtagcatttatgcgggctcgttgtgtctgaacacccgatttaccctctcctggcagtgccggggcgtttccgtcccgcaaatcatgccgctttattattaa

SEQ ID NO: 39754 - DNA, 531 bp, Salmonella typhi
atggatagttcgtttacgcccattgaacaaatgctaaaatttcgcgccagccgtcacgaagactttccttaccaggaaattcttttgactcgtctttgtatgcacatgcaaggcaagctcctggaaaaccgcaataaaatgctgaaggctcaagggattaacgagacgttgtttatggcgttgattacgctggagtctcaggaaaaccacagtattcagccgtctgaattaagctgcgcgctgggttcatctcgcaccaatgcgacacgcattgcagatgagctggaaaaacgcggctggattgagcgtcgtgagagcgataacgaccgccgttgcctgcatctgcaattaacggagaaaggccaggcatttttgcaagaagtgcttccgcctcagcatcattgtctgcatcaactctggtcatcacttagcacagccgaaaaagatcaacttgagcacatcactcgtaaactcctgacgcgtcttgatcaaatggagcaggaaggcactgttcttgaggcgctgcgctaa

SEQ ID NO: 39755 - DNA, 1377 bp, Salmonella typhi
atggcactttggggtgggcgttttacacaggcggcagaccaacggtttaaacaattcaatgattcgttgcgcttcgattaccgtctggcggagcaggatattgtcggttctgtggcctggtccaaagcattggtcacggtaggcgtactgactgccgatgagcaacgacagttggaagaagcgctgaacgtgctgctggaagaggttcgcgcgaatccgcagcaaatcctgcaaagcgatgcggaagatatccatagctgggtggaaggtaagctcatcgacaaagtgggtcagttgggtaaaaagctgcacaccgggcgcagccgtaacgatcaggtggcgacggacctgaaactgtggtgcaaagagacggtgatggaactgctcaccgctaaccgccagctacagagcgcgctggtggaaaccgcgcaggcgaaccaggacgcggtaatgccgggatatacccatctgcaacgcgcgcagccagtgactttcgcccactggtgtctcgcgtatgtcgaaatgctggcgcgcgatgaaagccgcctgcaggacacgcttaaacgtctggacgtgagtccgctaggctgcggcgcgttggcgggaacggcctatgaaattgaccgtgaacaattggcaggctggctgggcttcacgtctgcgacccgcaacagcctggacagcgtgtccgatcgtgaccacgtactggaactgctttctgatgcggctatcggcatggtgcatctgtcacgtttcgcggaagatctgattttctttaattctggtgaagcgggctttgtagagctttctgaccgcgtgacttccggttcatcgttaatgccgcagaagaaaaacccggacgcgctggagctgattcgcggtaagtgcggtcgcgtacaaggggcgctaaccggcatgatgatgactttaaaaggtctgccgctggcgtataacaaagatatgcaggaagacaaagaagggctgttcgatgcgctcgatatctggcttgactgcctgcatatggcggcgttggtgctggacggtattcaggtgaaacgcccacgttgtcaggacgcggcgcaacaggggtatgccaacgccaccgagctggcggattacctggtcgcgaaaggcgtgccgttccgcgaagcgcaccatattgtcggcgaagctgtggtagaagctattcgccagggtaagccgctggaagcgttgccgctggccgatttacagaaattcagccgcgtgattggcgacgatgtgtatccgatattgtctttgcagtcgtgtctggataaacgggcggcaaaaggcggcgtttctccgcagcaggtggcgcaggccatcgacgatgcgaaggtgcgcctcgcgttgtag

SEQ ID NO: 39756 - DNA, 549 bp, Salmonella typhi
atgcaatttaatatccctacgttgctcacgctgtttcgcgtcatcctgattccattctttgtcgtggtgttttatttgccgttcgcctgggcgccgatggtcagcgcgctgattttctgtattgccgcgattaccgactggtttgacggctttctggcgcgacgctggaaccagagtacgcgtttcggcgctttcctcgaccccgtcgccgacaaggtgctggtggcgatcgccatggtgctggtcaccgagcattatcatagctggtgggtgacgttacctgcggcgacgatgatcgcccgcgaaattattatctctgctctgcgtgaatggatggcggagctgggcaaacgcagtagtgtagcggtctcctggatcggtaaagtcaaaactaccgcgcagatggtggcgctggcgtggctcttgtggcgtccgaatatctgggtagagtatgccgggatcgcgcttttctttgtcgcagcggtgctaacattgtggtccatgttgcaatatttgagcgctgcacgcggagatttgcttgatcagtga

SEQ ID NO: 39757 - DNA, 663 bp, Salmonella typhi
atggaactctatctggataccgctaacgtggcggaagttgaacgtctggcgcgcattttcccgattgccggcgtcaccaccaatccaagcattgtggcagccagcaaagaatctatctgggatgtgctgcccaggctgcaaaacgccatcggcgaagaaggcactttatttgcgcagaccatgagccgcgacgcgaaagggatggtggaagaagccaaacggctgaataacgccatccccggcattgtggttaaaattccggtaaccgccgaaggccttgcagcgattaaattgctgaaaaaagaaggcatcgtgacgctgggcaccgccgtctacagcgcgtcgcagggcctgctggcggcgctggcgggcgcaaaatatgtcgctccctacgtcaaccgcgttgatgcgcagggcggcgatggcattcgtatggttctggagctgcaaacgctactggaacatcacgcgcccgacagcatggtactggcggccagctttaaaacgccgcggcaggcgctggattgcttactggcaggttgccaggcgattacccttcctttagatgtagcgcaacaaatgctcaatacgcctgcggtagagtcagcaatagagaagtttgagcaagactggaaaaacgcttttggtaatctgaacctgtag

SEQ ID NO: 39758 - DNA, 723 bp, Salmonella typhi
atgcaggaaaatgatttcttcacctggcgacgcgcaatgttgttacgctttcaggagatggcggcagcagaggatgtttatactgaattgcaatatcagacacagcggctggaatttgattattatgccctgtgtgttcgtcatcccgttccctttacccggcctaaaatatcgcttcgtaccacttatcctcaggcgtgggtaacgcattatcagtccgaaaactatttcgcgattgatccggtattaaagccggaaaatttcaggcagggtcatttacattgggatgacgtgctatttcatgaagcgcaggcgatgtgggatgccgcccagcgtttcggattacgcagaggcgtaacccagtgtgtgatgttgccgaaccgggcgctgggctttttatctttctcccgtagcagtttacgctgctcctcgtttacctacgatgaagtggagctgaggttgcaactgctggcgcgggagagtctttcggcgctgacaagacttgaagacgacatggtgatggcgcctgagatgcgtttcagtaaacgtgagaaagagattctgaagtggacggcggaagggaagacctcatcggagatcgccattattctgtcgatttctgaaaataccgttaacttccatcagaaaaacatgcagaagaaattcaatgcgccaaataaaacacagattgcctgctacgctgcggcgacaggtctgatatga

SEQ ID NO: 39759 - DNA, 186 bp, Salmonella typhi
atgctgattctgactcgtcgagttggtgagaccctcatgattggcgatgaggtcaccgtgacagttttaggggtgaagggcaaccaggtgcgtattggcgtgaacgccccgaaagaagtttctgtccatcgtgaagagatctaccagcgtatccaggctgaaaaatcccagcagtccagttactaa

SEQ ID NO: 39760 - DNA, 753 bp, Salmonella typhi
atgagtgctatcgaagtcaccaacctggtcaaaaaatttcatggtcaaacggtgctgcacggtatcgaccttgaggtgaagcccggagaagtcgtcgccattatcggcccgagcggctcagggaagacaacgttattacgctgtattaacctgctggaacaaccggaagcgggcaccattaaagtaggcgatattatcatcgataccgcccgcccattcagccagcaaaaagggttgattcgccagctacgtcagcatgtcggctttgtctttcagagttttaacctgttcccgcatcgtaccgtgctggaaaatatcattgaaggtccggtgattgtaaagggagagccgaaagctgaggcgacggcgctggcgcgggaactgttagccaaagtcgggttggccggtaaagagacccgttatccgcgccgcctgtcgggcgggcaacagcagcgcgtggcgattgcgcgcgcgctggcgatgcgcccggaagtgattctgtttgatgagccgacgtcggcgcttgatcctgaattagtcggcgaggtgcttaatacgattcgccagctggcgcaggaaaagcgcacgatggtgatcgtcactcacgaaatgggctttgcgcgtgacgtggctgaccgggcaatatttatggatcaggggcaaatcgtcgaacaggggccggcgaaaaccttgttcgccgatcctcagcatccgcgtactcgccagttccttgagaaatttttagtgaaataa

SEQ ID NO: 39761 - DNA, 2631 bp, Salmonella typhi
atgagcaagagcaccgctgagatccgtcaggcgtttctcgactttttccatagtaaagggcatcaggtagttgccagcagttccctggtgcctaacaatgaccccactctgttgtttaccaatgccgggatgaaccagttcaaggatgttttccttgggctcgataaacgtaattattcccgtgcaaccacttcccagcgttgcgtacgcgcggggggtaaacacaacgatctggaaaacgtcggatacactgcacgtcaccatactttcttcgaaatgctgggcaacttcagcttcggcgattatttcaaacacgacgccattcagttcgcatgggaattactgaccggcgaaaactggtttgctctgccaaaagagcgcttatgggtcaccgtctatgaaaccgacgacgaagcctatgagatctgggaaaaagaagtcggcatcccgcgcgagcgtatcatccgtatcggtgacaataaaggcgcgccatacgcatcggataacttctggcagatgggcgacaccggtccctgcggtccgtgcaccgaaatcttctacgatcatggcgaccacatctggggcggccctccgggaagcccggaagaagacggcgatcgctatattgaaatctggaacatcgtctttatgcagttcaaccgtcaggctgacgggacgatggaaccattgccgaaaccgtctgtagataccggtatggggctggagcgtattgccgcggtactgcaacacgttaactctaactatgacatcgacctgttccgcacgttgattgaagcggtagcgaaagtcaccggctccaccgatttgggtaataaatcgctgcgcgttatcgccgaccacatccgttcttgcgcattcctggttgccgatggcgtgctgccgtcgaatgaaaaccgtggctatgtgctgcgtcgcattattcgtcgcgcggttcgtcacggcaacatgctgggcgcaaaagagaccttcttctacaagctggttgggccgctgattgaggtaatgggctccgcaggcgaagagttgaaacgtcagcaggcgcaggtcgagcaggttctgaaaacggaagaagagcagttcgctcgtacgctggagcgcggtctggcgctgctggatgaagaactggcgaaattgcagggcgacaccctggacggcgaaaccgctttccgtctgtatgatacttatggtttcccggtcgatctaacggcggacgtctgccgtgagcgcaacatcaaagtcgacgaagccggttttgaagccgccatggaagagcaacgccgtcgcgcgcgcgaagctagcggttttggcgcggactacaacgcgatgatccgcgttgacagcgcttctgaatttaaaggttatgaccatctggaactgaacggcaaagtgactgcgctgtttgtcgatggtaaagcggttgaagcgattaacgcgggacaggaagctgttgtcgtgctggatcagaccccattctatgcggaatcaggcggtcaggttggcgataaaggcgagctgaaaggcgctggatttactttcgctgtggacgacacgcaaaaatatggtcaggcgattggtcacctcggcaaattgtctgcgggcgctctgaaagtgggcgatgcggtacaggctgacgtagatgaagcgcgccgcgcacgtatccgtctgaaccactccgccacgcacctgatgcacgcggcgttgcgccaggtgcttgggacacacgttgcgcagaaaggttcgctggttagcgataaagtgctgcgcttcgacttctcgcacaatgaagcgatgaagccgtcggagattcgtgaggttgaagatttggtgaatgcgcaaattcgccgcaacctgccgattgaaacgaacatcatggatctcgacgcggcgaaggcgaaaggggccatggcgctgtttggcgagaaatacgacgaacgtgtacgcgttctgagcatgggcgatttctctaccgaactgtgcggcggtactcacgccagtcgtaccggtgatatcggtctattccgtattatctctgagtccggcaccgcagcgggcattcgtcgtattgaggcggtaaccggtgaaggcgctatggccaccgttcacgcgcaaagcgatcgcttaaacgatattgcgcatctgctgaagggcgacagccagaatctgggcgacaaagtgcgtgccgtgctggaacgtacgcgtcagctggaaaaagagttgcagcagttgaaggaccaggccgcagcgcaggagagtgcaaatctttccagtaaagcggtcgatctcaacggcgtgaagctcctggtcagcgagcttgctggtattgagccgaaaatgctgcgaaccatggttgatgatctgaaaaatcaactggggtctaccgttatcgtactggcaacggttgttgaaggtaaggtttctctgattgcgggcgtgtcgaaggatgtgaccgaccgggttaaagcaggggaattgattggtatggtcgctcagcaggtgggcggtaagggtggcggtcgtccggacatggcgcaagccggtggtacggatgcggcagctctgcctgcagcgttagccagtgtacaaggctgggtcagcgcaaaattgcaataa

SEQ ID NO: 39762 - DNA, 501 bp, Salmonella typhi
atgagtgaacccacatcgcgccgtcccgcttatgctcgtctccttgatcgtgcggtacgtattcttgctgtccgcgatcacagcgagcaggaactacggcgtaaactctccgcgccggtgatgggcaaaaatgggccggaagagattgatgcgacggcagacgattatgaacgcgtgatcgcctggtgccacgaacaccactatcttgatgacgagcgcttcgtgatgcgctttatcgccagtcgtagccgcaaaggctatggcccggcgcgtattcgccaggagttgaatcagaaaggcatttcccgtgaatcgactgaaaaagcgatgcgagaatgtgaaattgactggagtgaaatggcacgtgaacaggccgttcgcaaatatggcgagccgctcccttcaaacttttcagaaaaggttaaggtacagcgctttttgctctatcgcgggtatctgatggacgatatccagcaaatatggcgaaattttgcagattga

SEQ ID NO: 39763 - DNA, 2181 bp, Salmonella typhi
atgagcacgaccgacgatacccataacacgttatccactggaaaatgtcctttccatcagggggggcatgaccgaagcgcaggcgcagggactgccagccgcgactggtggccgaaccagcttcgtgtggatcttttgaatcaacattccaaccgttctaacccgctgggcgaagactttgactaccgcaaagagtttagcaagttagactactccgccctgaaaggggatctcaaggcgctgctgaccgattcacaaccgtggtggcccgccgactggggcagctatgtcggtttgtttattcgtatggcctggcatggcgctggcacctaccgttctattgatggtcgtggcggcgcgggtcgtggtcaacagcgttttgcgccgcttaactcctggccggataacgtcagcctggataaggcgcgtcgtttgttgtggccgattaagcagaaatatggccagaaaatttcctgggccgacctgtttattctggcgggtaacgtggcgctggaaaactccggcttccgtaccttcggtttcggcgccgggcgtgaagatgtctgggaaccggatctggatgtgaactggggcgatgaaaaagcctggttgactcaccgacaccctgaagcgctggcaaaagcgccgctgggcgcgaccgagatgggccttatctacgttaacccggaggggccggatcacagcggcgaaccactttctgccgccgccgctattcgcgctacctttggcaatatggggatgaacgacgaagagaccgtggcgttgatcgctggcgggcataccctcggtaaaacccacggcgcggcagcagcatcccatgtaggggccgatccggaagccgcgccgattgaagcgcagggcttaggttgggccagcagctatggtagcggcgttggcgcggatgctattacctccgggctggaagtggtctggacgcagacgccgacccagtggagcaactatttcttcgagaacctgttcaaatatgagtgggtacaaacccgtagtccggctggcgctatccagtttgaagcggtagacgcgccggatatcatcccggacccgttcgatccgtcgaaaaaacgtaagccaaccatgctggtcaccgacctgacgctgcgttttgatccggagttcgagaagatttcccgtcgtttccttaacgatccacaggcctttaatgaagcctttgctcgtgcctggttcaaactgacgcacagagatatgggaccaaaagcgcgttacatcggaccggaagtgccgaaagaagatctgatctggcaggacccgttgccgcaaccgctctaccagccaacgcaggaagacattatcaacctgaaagcggcgatcgctgcatccgggctttctattagcgagatggtttcggttgcctgggcatccgcgtctactttccgcggcggcgataagcgtggcggcgctaacggcgcgcgtctggcattagcgcctcagcgcgactgggaggtcaacgccgttgcggctcgcgttctgccggtattagaagcgctccagaaaacgacgaataaagcctcgctggccgatattattgtgctggcgggcgtggtcggtatcgagcaggcggccgctgctgcgggtgtcagcatcagcgtaccttttgcgccgggccgggtggatgcgcgtcaggatcagaccgacatcgagatgttctcgctgcttgaaccgattgccgatggattccgtaactatcgtgcgcgtctggatgtgtcgacgaccgaatcgctgttgattgataaagcgcagcagttaacgttgaccgcgccggaaatgacggtactggttggcgggatgcgtgtgctgggaaccaactttgacggcagccagaacggtgtctttaccgacagaccgggcgtgctcagcactgacttcttcgctaatctgctggatatgcgttacgagtggaagcccaccgacgacgctaatgagctgttcgaaggccgggatcgcctgactggcgaggtaaaatacacggcaacccgcgccgatctggtgtttggttccaactccgtactgcgcgcgctggcggaagtttacgcgtgtagcgatgcgcacgagaagtttgtgaaggacttcgtcgcggcatgggtgaaagtgatgaacctggaccgtttcgatctgttgtaa

SEQ ID NO: 39764 - DNA, 1062 bp, Salmonella typhi
atggctatcgacgaaaacaaacagaaagcgttggcggcagcactgggccaaattgaaaagcaatttggtaaaggctccatcatgcgtctgggtgaagaccgttctatggatgtggaaactatctccaccggttcgctttcactggatatcgcactcggtgcgggcggtctgccgatggggcgtatcgtcgaaatttacgggccggaatcttccggtaaaacgaccctgacgctgcaggtgattgccgctgcgcagcgtgaaggtaaaacctgtgcgtttatcgatgcggaacacgcgcttgaccctgtttacgcacgcaagctgggcgtcgatatcgataacctgctctgttctcagccggataccggcgagcaggcgctggaaatctgtgacgcgctggcgcgttcaggcgcggtggacgtcattgtggtcgactccgtagcggcgctaacgccgaaagcggaaatcgaaggcgaaatcggcgactctcacatgggcctcgcggcgcgtatgatgagccaggcgatgcgtaagctggcggggaacctgaaacagtccaatacgctgctgatcttcatcaaccagatccgtatgaaaattggcgtgatgtttggtaacccggaaaccaccaccggcggtaacgcgctgaaattctacgcctccgttcgtcttgatatccgtcgtattggcgcggtgaaagaaggcgataatgtcgtgggtagcgaaacgcgtgtgaaagtggtgaaaaacaaaatcgccgcgccgtttaagcaggccgagttccagatcctctacggcgaaggcatcaacttctatggcgaactggttgacctgggcgtgaaagagaagctgatcgagaaagcgggcgcatggtacagctacaacggcgagaagattggccagggtaaagcgaacgcgactacctggctgaaagagaacccggcaacagcgaaagagatcgagaaaagagtgcgtgaattactgttgagtaatcagaatgccacgcccgatttcgccgttgacgatagcgaaggcgttgcagaaaccaacgaagatttttaa

SEQ ID NO: 39765 - DNA, 1080 bp, Salmonella typhi
atgttcaagcgtcgttatgtagcgttacttccactttgcgtattgcttgctgcctgtagcagcacgccaaaatcttccgagactcaagcgacgacgggcacgccttccggcggcttcctgcttgagccgcagcataacgtcatgcaaatgggcggcgacttcgccaacaaccctaatgcgcagcagttcattgataaaatggtcagtaaacacggtttcgaccgtcagcagctgcaagagatcctctcgcagtctaaaagactggattacgttctgcgtctgatggacagacaagcgccgaccactcagccgcccgccggaccaaatggcgcctggttgcgctaccgcaaacaatttattacgccggataacgtgcaaaacggcgtcgcgttctggaatcagtatgaagacgcgctgaaccgcgcctggcaggtatacggcgtaccgccggaaatcattgtgggcatcatcggcgtggaaacccgctggggacgtatcatggggaaaacacggattctggacgcgctggcgacgctgtcatttaactatccgcgccgggcggaatatttctccggcgagctggaaaccttcctgctcatggcgcgcgatgagcaagacgatccgctcaatctgaaaggttcctttgccggcgcgatgggctacggccagtttatgccgtcttcctataaagaatatgcggtcgatttcaatggcgatgggcacattaacttgtgggatccggtagatgccatcggcagcgtggcgaactatttcaaggcgcatggttgggtgaaaggcgatatggttgcggtgccggcgagtggtcaggcgcctgggttggcgaatggtttcaaaacaaaatacagcatctctcagcttgccgccgcaggcttaacgccgcagcaatcgttgggcaatcatcaggaagccagcctgctgcgtctggatatcggtacgggataccagtactggtacggcctgccgaacttctacaccattacccgatataaccacagcacgcattatgcgatggcggtttggcaactggggcaggcggtagcgctggcgcgggtgcgctaa

SEQ ID NO: 39766 - DNA, 780 bp, Salmonella typhi
atgaatcaagttgccgttgtcattggcggaggccagaccctgggggcattcctttgccgtgggcttgcagaagaaggataccgcgtggcggtcgttgatattcaaagcgataaagccgcgaatgtcgcccaggaaattaacgccgattttggcgaaggtatggcctacggttttggcgccgacgccaccagcgagcagagcgtgctggcgctgtcccgcggcgtagacgagattttcgggcgcgtcgatctgctggtttacagcgcgggtatcgccaaagcggcgtttatcagcgatttccagttgggcgattttgaccgctcgctacaggtgaatctggtgggctatttcctctgcgcccgtgagttttcccgcctgatgatccgcgacggcattcaggggcgcattattcagattaactctaaatccggcaaagtgggcagtaaacacaactccggctacagcgcggcgaaattcggcggcgtggggttaacccagtctctggcgctggacctggcggaatacggcattaccgtacactcgctgatgctcggcaacctgttgaaatcgccgatgttccagtcattgctgccgcaatacgccactaaactgtgcattaagcccgacgaggtggaacagtattacattgataaagtaccgctcaaacgcgggtgtgattatcaggatgtgctgaacatgctgctattttatgccagcccgaaagcgtcttattgcaccgggcagtcgatcaacgtaaccggcggtcaagtgatgttctga

SEQ ID NO: 39767 - DNA, 360 bp, Salmonella typhi
atggtttccactctgattaccgtcgccgttatcgcctggtgtgcacaactggcgctgggcggctggcagatttcccgctttaatcgggctttcgataaacttagccaacagggacgggtcggcgtcgggcgctccggcgggcgttttaagccccgggtggtggttgccgtggcgctggacgaacagcagcgggtgacggacactttattgatgaaaggccttacggtattcgccagaccggttaaaattgccgcaatgcaaggaaaacatttgcatgaattacagcctgatgtgatctttccccatgattcgctcgcgcagaatgcactatcattggcgcttaaactgaaacatgggtaa

SEQ ID NO: 39768 - DNA, 996 bp, Salmonella typhi
atgagtaatcttagcggtaccgataaaagcgtcattttgttgatgaccattggcgaagaccgggcggcagaggtgtttaaacacctctccacccgcgaagtacaggcgttaagtacggcgatggctaacgtgcgtcagatctccaacaaacaactgacggacgtactatcagagtttgagcaagaagcggagcagttcgccgcgctgaatatcaacgccaacgaatacctgcgctccgtactggttaaagcgctgggcgaagaacgcgcctccagcctgctggaagatattctggaaacgcgcgataccaccagcggtatcgaaacgctcaactttatggaaccgcagagcgccgccgacctgattcgcgacgaacacccgcagattatcgccaccattctggtccacctcaaacgcagtcaggccgccgatattctggcactgtttgacgaacgactgcgtcatgatgtgatgctgcgtatcgcgacatttggcggcgtacagccggcggcgctggcggagttgaccgaagtgctgaatggcctgctcgacggtcagaacctgaaacgcagcaaaatgggcggcgtaagaaccgcggcagaaattatcaacctgatgaaaacgcagcaggaagaagcggttattaccgctgtgcgcgaattcgacggcgaactggcgcagaaaatcatcgacgagatgttcctgttcgaaaatctggtggatgtggacgatcgcagtatccaacgtctgctgcaggaagtggattccgagtcgctgctgatcgctctgaaaggcgccgaaccgccattacgcgagaagttcctgcgcaatatgtcccagcgcgccgccgatatcctgcgcgacgaccttgccaaccgtggcccggttcgtctgtctcaggtggaaaacgagcagaaagcgattctgcttattgtgcgtcgtctggcggaaaccggcgaaatggtgattggcagcggcgaggatacctatgtctaa

SEQ ID NO: 39769 - DNA, 873 bp, Salmonella typhi
atgtgtacgacttgcggttgcgctgaaggcaacctttatatagaaggcgatgaacataatccgcactcagcgtttcgtagcgcgccctttgccccagcggctcgcccggcgctgaatattaccggcattaaaacgcctgactttaccccaagtcagaccgcagaaggcgatctgcattacggccacggcgaagccggaacccacgcgcctggtatgagtcagcggcggatgctggaggttgaaatcgacgtgctggacaaaaataatcgtctggctgagcgcaaccgcgcccgtttcgccgcccgccagcaactggtgctcaacctggtgtccagccccgggtccggtaaaaccactctgctgaccgaaacgctgatgaaattgaaagaccgtgtaccgtgcgcggtgattgaaggcgaccagcagacagtgaacgacgccgcccgcatccgcgctaccggcacgcccgccattcaggtcaacaccggtaaaggctgccatcttgacgcgcaaatgatcgccgacgccgcgccgcgcctgccgctggatgaccacggtattctgtttatcgaaaacgtcggaaatcttgtctgcccggccagcttcgatctgggcgaaaagcataaagtcgcagtgctttccgtgaccgaaggtgaagataagccgctgaagtatccccatatgtttgccgcggcgtcgctcatgctgctcaataaagtcgatctgctgccctacctcaattttgacgttgagaagtgcatcgccagcgcgcgtgaagtgaacccggagattgaaattatcctgatttccgccaccagcggcgaaggcatggatcagtggctggcctggctggaggcgcagcgatgtgcatag

SEQ ID NO: 39770 - DNA, 1122 bp, Salmonella typhi
atgcgttttgttgacgagtaccgtgcgccggaacaggtaatgcagctcattgaacacctgcgtgaacgcgccgcccttcttccttacactgctgaacgaccgctgcgcattatggaagtctgcgggggtcatacccacgcgatttttaaatttggtctcgatcagttactgcccgaaaacgtggagtttattcacggccccggttgtccggtctgcgtgctgccaatgggacgcatcgacagttgcgtggaaatcgccagccatccggaggtgattttctgcacctttggcgatgccatgcgcgtgccggggaaacagggttctctgttgcaggctaaagcgcgcggcgcggatgtgcgtattgtttattctccgatggacgcgctgaagctggcgcaggataacccgacccgcaaagtggtatttttcgggctgggctttgaaaccaccatgccgaccaccgccatcacgctacagcaggcaaaacagcgtgacgtgcgaaacttctactttttctgccagcacattacactgatcccgacgctgcgtagcctactggagcagccggacaacggcattgacgcctttcttgcgccaggccacgtcagcatggtcatcggcaccgaggcgtaccagtttatcgccgccgattttcatcgcccgctggtggtggctggattcgaaccgcttgatctactgcaaggcgtggtcatgctggttgagcagaaaatagcggccctaagccaggttgaaaaccaataccgtcgcgtggtgccggatgccggaaacatgctggcgcagcaggccatcgccgatgtgttctgcgttaatggcgacagcgagtggcgcggcctgggcgtgattgaatcctccggcgtccacctgacgccggagtatcagcgctttgacgccgaagcgcatttccgcccagcgccacagcaggtctatgacgatccgcgcgcccgctgcggcgaagtgctgaccggcagatgcaagccgcatcagtgcccgctatttggtaaaacatgtaatccagagaccgcgttcggcgcgctgatggtctcttccgaaggcgcatgcgccgcctggtatcagtatcgtcagcaggagtgtgaagtttga

SEQ ID NO: 39771 - DNA, 2079 bp, Salmonella typhi
atgtcgtatacacccatgagcgatcttggacagcaaggcttgttcgatatcactcgtaccttattgcagcagcccgatttggcgtcgctcagtgaagcgctttcgcaactggtaaagcgttcagcgctcgccgacagcgccggcattgtgctatggcaggcgcagtcgcaacgcgcacaatattatgcgacgcgagaaaatggccgtcctgttgaatatgaagatgaaaccgtactggcgcacggcccggtacgtcgcatcctttctcgccccgatgcattgcactgtaatttccatgagtttaccgaaacctggccgcagcttgccgcgagcggcctctaccctgaatttggtcattactgtctgcttcctttagccgcggagggccgtattttcggcggctgcgaattcatccgtcaggaagatcgcccctggagtgaaaaggaatatgaccgtctgcatacgtttacccaaattgtcggcgtggtcgccgagcaaattcaaaaccgggtaaacaataatgtcgattatgatctgttgtgccgcgaacgcgataacttccgtattctggttgcgattaccaacgccgtcctgtcgcgtctggatattaatgagctggtaagcgaagtcgcaaaagagatccaccactatttcaatatcgacgcgatcagcatcgtgttgcgcagccatcgcaaaaataagctgaatatctactccactcactaccttgatgagcatcatccggcgcacgaacagagcgaagtcgacgaagccggcacgctcacggagcgcgtctttaaaagtaaagagatgctgcttatcaacctcaacgaacgcgatccgcttgccccctacgaacgaatgctgttcgatacctggggcaatcagatccagacgctttgcctgctgccgttgatgtccggcaagacgatgcttggcgtgctcaaactggcccagtgcgaagaaaaagtgtttaccaccgccaacctcaagctgctacgtcagattgccgaacgggtagccattgccgtggataatgcgctggcctatcaggaaatccaccgtctgaaggaacgcctggtcgacgaaaatctggcgctcacggagcagcttaataacgtcgacagcgagtttggcgagatcatcgggcgcagcgaagcgatgtacaacgtgctaaagcaggttgagatggtggcgcagagcgacagtaccgtgctgattctgggcgaaacgggaaccagtaaagagttgattgcccgcgccattcacaacctgagcggacgtagcgggcgcagaatggtaaagatgaactgcgccgcgatgccggcggggctgctggaaagcgatctgtttggtcatgagcgcggcgcgtttaccggcgccagcgcgcagcggattggccgtttcgagctggcggataaaagctcgctgtttctggatgaagtgggcgacatgccgctggagctacagcctaagctgctgcgcgtccttcaggagcaagagtttgaacgtctcggcagcaataaactgatccagaccgacgtgcggctgatcgccgcgactaaccgcgatctgaaaaaaatggtcgccgatcgcgaattccataacgatctctactatcggctgaatgtttttccgattcagcttcctccgttacgcgaacgtccggaagatattccactgctggtcaaagcgtttaccttcaaaatcgcccgccgaatggggcgtaatatcgacagcattcccgccgaaacgctgcgcacgctcagcggtatggaatggccggggaacgttcgcgaactggagaatgtcgtcgagcgcgccgtgctgctgacgcgcggcaatgtgctacaactgtcgctgccggatatgactgccgtaacgcccgatacctcgcctgttgcgactgaaagcgccaaagaaggcgaagatgaatatcagcttattatacgcgtgctgaaagagaccaatggcgtagtggctggaccaaaaggcgcggcgcagcgtctggggcttaaacgaacccccctgctgtcgcgtatgaagcgattgggtattgataaagacgcgttagcgtaa

SEQ ID NO: 39772 - DNA, 624 bp, Salmonella typhi
atgtcaacgattattatggatttatgcagttacacccggctagggttaagcgggtatctggtcagcagaggggtgaaaaaaagggaaatcaacgacatcgaaaccgttgacgaactcgctatcgcttgtggcgcacatcagccttcggtggtgtttattaatgaggactgtttcattcatacgccttcagacagtcaacaaataaagcaaatcattaatcagcatcctgacacgttatttattgtttttatggcaattgctaatgtgcattttgatgaatatttattagtaagaaaaaacttattgattagctctaaatcgattaaacctgactcgctggatacccttcttggcgatattctgaaaaaagagtcgggtatttcaggaaccataaatttaccaacattatcgttaagtcgaactgaatccagcatgttacgaatgtggatggaaggtcagggaaccattcagatttctgacagaatgaatattaaagcaaaaacagtatcctcccataaggggaatataaaaagaaagataaaaacgcataataaacaagtgatctatcacgtagtgcggctgacagataacgtcactaacggcatttttgctaacatgcgctga

SEQ ID NO: 39773 - DNA, 798 bp, Salmonella typhi
atgattaagtggccctggaaagcacaagaaataacccagaacgaagactggccgtgggatgatgcgctggctatacctcttctggtaaacctcaccgcgcaagaacaggctcggcttattgcgctagccgaacgttttttgcagcagaaaagactggtagcgctacagggatttgagctcgactcgttaaaaagtgcacgtattgcgttaattttttgcttaccgatcctggagctcggtattgagtggcttgatggttttcatgaagtgctcatttatcccgcgccctttgtggtagatgatgaatgggaagatgacataggtctggtgcacagccagcgtgtcgtacagtcggggcaaagctggcaacaagggcccatcattctgaactggctggatacccaggactcgttcgatgcttcgggtttcaacctcattattcatgaagttgcgcacaaactggatatgcgtaatggcgatcgcgccagcggcatccctttcatcccgttacgcgatgtggctggctgggaacacgatctccacgcggcaatgaataatattcaggatgaaatcgatcttgttggcgaaagcgctgccagtatagatgcctatgccgccaccgaccctgcagaatgttttgccgtgttgtcagagtattttttcagcgcgccagaactgtttgctccacgtttcccggcgctatggcagcgtttttgccagttctatcgccaggatccttctcagcgcttacgggtaagcgctgccgaaggcgactacggcgaggaatccgaacattaa

SEQ ID NO: 39774 - DNA, 1455 bp, Salmonella typhi
atggaaaataaaggcacaaacctgacacccgagcaggcgctggatcgcctggaggagctgtacgagcagtcggttaacgcgctccgtgaagccatcgctgactatgttgataacggcacgctgcccgatccccatgccaggcttaacggactgtttgtttatccttcgctgtctgtaagctgggatggcgcgacaccgaacccgcctaaaacacgcgcttttggacgctttactcatcccggctgttataccactaccgttacgcggcctgcgctatttcgcgcttatcttctggaacagcttaacctcgtttaccatgattatggcgcgcatattgcgatagaggcctcgcaccatgagatcccgtatccttatgtgatcgatggctcggctctgacgctggatcgttctatgagcgccgggctaacgcgccattttcctaccacagaactggcgcagattggcgatgagacggcagacggtctgttccaccccggcgaattctatccgttatcgcacttcgacgcgcgtcgtgttgacttctcgttggcccggttacggcactataccggtacgccggttgaacattttcagcccttcgttttgtttaccaactacacccgctatgtcgatgagtttgtgcgctggggatgcagccaaattcttgatcctgacagtccctatatcgcgctttcctgtgccggcggaatttggatcacggcagaaacggaagcgccggaagaggctatttccgatctggcctggaagaagcatcagatgcctgcctggcacctggtaacggcagatgggcaggggattacgctggtaaatatcggtgtcggcccttcaaatgctaaaacgatttgcgaccatttggccgtgctgcggcctgacgtctggcttatgattgggcactgtggagggttacgagaaagtcaggcgattggtgattatgtgctggcccatgcctacttacgcgatgatcatgtgctggatgctgttctgccgcctgatattccgattccaagcattgcggaagtacagcgtgcgctgtacgacgctaccaaagcggttagcggaatgcccggcgaagaggtgaaacagcgactgcgcacgggaacggtcgtcaccacggatgaccgtaactgggagcttcgttattccgcatctgcgctgcgattcaaccttagccgtgcggtcgcgattgatatggagagcgcgacgattgcagcccagggctatcgcttccgcgtgccttacggcacgctgctttgtgtttctgacaaacctttacacggtgaaattaaactgcccgggcaggcaaaccggttttatgagggggctatttcagaacatttgcaaattggtattcgtgctattgatttactacgcgcagaaggtgatcgtttgcactcacgtaaattacgcacgtttaatgagccgccgtttcgctaa

SEQ ID NO: 39775 - DNA, 1521 bp, Salmonella typhi
atgacgcaggcagttatgttgcaggggacggcatccgacgtcggcaaaagtgtgctggtggccggtttatgccgcattttttatcaggatggtctgcgtaccgcgccgtttaaatcgcaaaatatggcgcttaattctggtattacgccggatggtaaagagatggggcgggcgcagatttttcaggcggaagccgcggggatcacgccagatgtgcgtatgaatccggtgctgctcaaaccgaccagcgatcgccaggcgcaggtcgtgctgatggggaaagtggcgaccaatatggatgcggtgagttaccatgactataaaccgcgtttgcgtgagcaaatccttgcggtctataacagcctggcgcaggaatatgacgttattgtgctggaaggcgccggaagcccggcggaaatcaatctgcgcgatcgcgatatcgtcaatatgggaatggcggaaatggcccagtgtccggttattctggtggcggatatcgaccggggcggcgtattcgccgctatttatggcacgctggcgctactgcacaaacaggagcgtgacagagtaaagggcgtcattatcaacaaattccgcggcgacgtggcgctactctattccggtatcgaacaaatcgaatcgcttaccggcgtcccggttctgggagtgatgccatggctggatgtggatctggaagatgaagatggcgtcgcgctgcaaaacgataaatatcgcggtaacgccccccgtgatatcactattgccattgtgcaactgccacatatttctaactttacggattttaacgctctggcggcgcagccggatgtgcgcatacgctatattcgccgcccggaagcgttgactgacgctgatctggtgatcctgccgggcagtaagaatacgctgagcgacctcgcctggctgcgcgaaagcgggatggcggatgcggtattgcagacacatcggcagggcgtgccggtgatgggaatttgcggtggctaccagatgctgggcgacactattgtggatgaggtggagtcggggctgggtacgcagccgggcctgggactgcttaatacgatcactcgctttgcacaggataaaaccacgacgcaggttaacgcgacaatgtcaggcgagctgcccggctggctggctgccgcggcggggctaccggtacgcggttatgaaatccacatgggggaaacggtgctgcaggaaggatgctgtacggccatgacgttacagaaaaatggatgctctgtggcggatggcgcggtcaccgccgacggactggcgtttggcacttaccttcacggtctgtttgacagcgatgcctttacccgtgcggtggtcaatgggttacgggcgcgaaaagggcttgcgccgtgggaaacgactttttgttatgcggagcataaagcgcggcaatttgatctgctggcggaagcgatgcggcaacatattgatattgataaaatttacaccatcatgcaacagcatcaggagccggtatga

SEQ ID NO: 39776 - DNA, 1719 bp, Salmonella typhi
atgaaacaaaccgttgctgcttttatcgccaaaacgctggaacaggctggcgtaaaacaaatctggggcgtcactggcgactccctgaacggcctgagcgatagtcttaatcgtatgggaaccattgaatggatgccaacccgccacgaagaggtcgccgctttcgccgccggcgcacaagcgcagcttaccggcgagctggcagtgtgcgccggttcatgtggaccgggcaacctgcacctgatcaatggcctgtttgattgccaccgtaaccacgtccctgttctggcgatcgccgcccatattccgtccagtgaaatcggcagcggttatttccaggagacccacccgcaggagttgttccgtgaatgcagccactattgcgagttggtttccagcccggagcagatcccgcaggtactcgccatcgccatgcgcaaagcggtgctaaatcgcggcgtctccgtggtcgtacttccgggtgacgtggcgctgaaacccgcgcctgaaaacgccgtcacccattggtaccatgccccgcaccccgtcgttacgccggcggaggaagagctgaaaaaactggcgcaactgctgcgctactccagcaatatcgcattgatgtgcggtagcggctgcgcgggcgcgcatgaggagttggtcgcgttggcggcaaaactaaaagcgccaatcgttcatgccctgcgcggcaaagagcacgttgagtacgataacccttatgatgtgggaatgaccggcctgattggcttctcttctggcttccacaccatgatgaacgccgatacgctgatcctgctcggcacccagttcccctatcgcgccttttatccgagcgatgccaaaatcattcagattgacatcaacccgggcagtattggcgcgcacagcaaagtcgacatggcgctggtgggcgatattaaagccacgcttcgcgccctgctgccgctggtggaagaaaaaagcaatcgtaaattcctcgataaagctctggaacactatcgggacgcccgtaaagggcttgatgacttagccaaactcagcgataaagccatccacccacaatatctggcgcaacaaattagtcatttcgccgctgacgacgctatttttacctgcgatgtcggcacgccgaccgtctgggcggcccgctatctaaaaatgaacggcaagcgccgcctgctgggctcgtttaaccacgggtcaatggccaacgccatgccgcaggcgctcggcgctcaggccaccgcgccgggtcgtcaggttatcgcgatgtgcggtgatggcggcttcagtatgctgatgggcgattttctctcggtggtacagatgaagctgccgataaaaatcgtcgtctttaataacagcgtgctgggctttgtggcgatggaaatgaaagctggcggttaccttaccgacggtaccgaactgcacgacaccaatttcgcgcgtatcgccgaagcctgcggcattaccggtattcgcgtggaaaaagccgcagacgtggacggagcgctacagcgcgcgttttccatcgatggcccggtactggttgacgtggtcgtggcaaaagaagagctggcgatcccgccgcagatcaaactggaacaagcgaaaggctttagcctgtacatgctgcgcgccattattagcggccgcggcgatgaagtgatcgaactggcgaaaacaaactggctaaggtaa

SEQ ID NO: 39777 - DNA, 972 bp, Salmonella typhi
atgatgacgatgccaacctcacaatgtccctggcgaatgcaggtgcatcacatccgtcaggagacgccggatgtatggacaattgcgctattatgccatgactactacccttaccgcgccgggcagtatgcgctggtgagcgtgcgcaattcagcggaaacgctgcgcgcctacaccctttcgtctacgccgggcgtcagtgaatatatcacgctgaccgttcgtcggattgaagatggcacgggttcacagtggttgacccatgacatcaagcgcggcgattacatctggctgtctgatgcaatgggcgattttacctgtgacgataaaacagaagataagtttctgctgctcgccgccggttgtggcgtaacgccaatcatgtcgatgcgtcgctggctggcgaaataccgcccgcaggccgacgtgcaggtcatctttaacgtccgttcgccggatgatgtgatttttgccgacgagtggcgacagtatccggtcacgctagtggcggaaaatcatgccacggaaggttttatcgcgggccgtctgaccacggaattgttacagcgcgtaccggatttggcatcgcgcactatcatgacctgcggcccggcgccctatatggatttcgttgaacagggagtgaaagcgcttggcgtaacgcacttctttaaagagaagttcttcacgccggtggcggaaacggcaaccagcggcctgaaattcaccaaactacagccagcgcaggaattttatgccccaatcggtacgacgctgctggaggcgctggagagtaataaagtaccggttgccgctgcctgtcgggcaggtgtttgcggctgctgtaaaaccaaagtcgtttccggcgactatacggtgagcagcaccatgacgctgagcgaggcggagattgccgaaggttacgtactggcctgctcctgccatccgcagggcgatcttgttctcgcataa

SEQ ID NO: 39778 - DNA, 900 bp, Salmonella typhi
atgttttcaggacttttaatcattctggttccactgattgtgggctatctcattccactgcgacataaagccgcattacaactcattaaccggctactgagctggatcgtgtaccttattctcttttttatgggaataagcctggcgtttttggataacctcgccagtaatctggtggcgatttttcattattccgccgtcagtattacgattattttattgtgtaatatcgccgccttattgtggctggaacgtatcctcccgtggcgtcaccatcatcagcaggaaaaactgccttcgcgtattgccatggcgctggagtcgctgcaactgtgcggcgtagtggtattggggtttatcatcggcctgagcggactctctgttttacagcacgccaccgaagccagtgaatatacgctgatctttttattgttcctggtggggattcagctacgaaatagcggcatgaccttaaagcaaattgtgcttaaccgccggggaatgatggtcgcggtcgttgtcgtggcaagctcattactgggcggcgtgattaatgcgtttatcctggacttaccgctaaaaaccgccatggcgatggcgtcaggtttcggctggtactctctttccggtattttgctgacggagtcgtttggaccggttatcggcagcgcggcattttttaacgatctggcccgcgaacttttggccattatgcttattcccggtctggttcgccgcagccgttcaacggcgttgggcctgtgcggagcgacctcaatggactttacgttgccggtattacagcgctccggtggcgtagagattgttccggcggctatcgtacatggctttatcctcagcctgctggtacctctcttaatggcgttcttctcggcctga

SEQ ID NO: 39779 - DNA, 1659 bp, Salmonella typhi
atgattctcgaacgcgttgaaatagtaggatttcgcggtatcaaccgactatcgttgatgctggagcaaaacaacgtgctgattggggaaaacgcctggggcaaatccagcctgctggatgcgctgactctgttattgtcgccggaactcgatctctaccattttgtccgtgaggatttctggtttccgcctggcgacataaaaggacgcgagcatcacctgcatattattctgacttttcgcgaaacgcagccagggcggcatcgggtacgtcgttatcgggcgctggaagcatgctggtcgccttgcgaggatgattttcaccgtattttttatcgtctagagggcgaatgtggcgccgatggcagcgtgatgacgctgcgcagttttctcaatagcgatgggcagccattgccggtggaaaatattaacgatcaggtgcgccacctggttcgtctgatgccagtgctacgtttgcgcgatgcgcgctttatgcgacgtattcgcaacggcacggtgcccaatgtgccggatgttgaagtcacggcccggcaactggattttctggcgcgtgagctggcgacccggccgcaaaatttaaccgacgggcagattcgtcagggactgtccgcgatggtgcaactgcttgaacactatttctcagagcagggcgcaggacaggcgcgtcaccgactcatgcgccggcgttcgcaaaatgagcagcgtagctggcgctatctggatattattaatcggatgatcgacaaaccgggcagccggtcgcatcgggtgatcctgctggggcttttctccacgctgttacaggcgaaagggacgctgcggttacataaagacgcgcgaccattactgctggtggaagatccggaaacccgtttacatcccattatgctttcagtcgcctggcaattgctcaatctgttaccgctacagcggatagcgacaaccaactcaggcgaactgctctcgctaacgccggtggagcatgtcgtacggctggtgcgcgaatcttcccgcgtcgccgcctggcgtctgggcacgggcgggttaagcgcggaagatggacggcgcatcgcctttcatatccgctttaatcgcgcgtcgtcgctgtttgcgcgttgctggctactggtggaaggcgagacggaaacctgggttattaatgagctggcgcgtcagtgtggacatcattttgatgcggagggaattaaagtcattgaatttgctcagtctggcctgaaaccgctggtgaagttcgcccgccgtatgggaatcgagtggcatgtcctggtggatggcgacgaagcggggaaaaaatatgccgcgacggtccgcagcctgcttaataacgatcgggaagaagaacgcgaacatctcacggcgctgcctacgctggatatggaacattttatgtatcgtcagggctttgccgatgtttttcaccgggttgcgcaacttccgcttaatgtgccgatgaatacccggaaaattatcactaaagctatccaccgctcgtcaaagccggatttggcgattgaagtcgcgatggaagccgggcggcgcggaattgacgccgtgccgccgctgttcagaaagatgttctcgcgcgtggtttggctggcgcggggccgggcggattag

SEQ ID NO: 39780 - DNA, 219 bp, Salmonella typhi
atggccaaagaagacaatattgaaatgcaaggtaccgttctcgaaacgttacctaataccatgttccgcgtagagttagaaaacggtcacgtggttactgcacacatctccggtaaaatgcgtaagaactacatccgcatcctgacgggcgacaaagtgaccgttgagctgaccccgtacgacctgagcaaaggccgcattgtcttccgtagtcgctaa

SEQ ID NO: 39781 - DNA, 4032 bp, Salmonella typhi
ttgagccaggaatatactgaagacaaagacgtcacattgacgaagttaagcagcgggcgccgacttctggaagcgttgttgatacttattgccctttttgccgtctggttgatggcggccttgttgagctttaacccttcggaccccagttggtcgcaaaccgcctggcatgaacccatccataatttaggcggcgcgccgggcgcgtggctggccgatacactgttctttatttttggcgtaatggcctacactatccctgtcattattgtcggcgggtgttggtttgcgtggcgtcatcagtctacggatgattacatcgactattttgctgtgtcgctacgccttattggcgtgctggcgctgattctcacttcctgcggtctggcggccattaatgccgacgatatctggtatttcgcctccggcggcgtaattggcagcctgttaagcaccacgctgcagccgttgttgcatagtagcggcggaacgataatgcttctctgtatttgggctgccgggctgacgctctttaccggctggtcctgggttagtatcgccgaaaaattaggcggctggctgcttaatatactgaccttcgccagcaaccgtacccggcgtgatgatacgtgggttgacgacgaagagtatgatgacgaatacgatgaagaaaccgatggcgtgcagcgtgaatctcgccgggcgcgtattttgcgcggcgcgttggcgcgtcgtaagcgactggctgaaaaattcagcaatccacggggccgtcagaccgatgccgcgctcttttccggcaaacggatggatgatgacgaggacattcagtatagcgcgcgcggcgtcgctgccgatcccgacgacgttctgttttcgggcaaccgtgcgacgcagtcggaatatgatgaatatgatccgctgttaaacggccattctgtcaccgaaccggtcgccgccgctgcggccgcaactgccgtcacccagacgtgggcagcgtccgccgatcccataatgcaaacgccgcccatgccgggggctgagccggttgtcgcgcaaccgaccgtggagtggcagcccgtaccggggccgcaaaccggcgaaccggttatcgcgcctgcgccggaggggtatcagccgcatccgcaatatgctcaaccgcaggaggcgcaaagtgcgccgtggcagcaacctgtgcctgtcgcttccgcgccgcaatacgccgcgacgccagcgaccgcagcagaatatgactctcttgcgccgcaggaaacacagccgcaatggcaggcgccggatgccgaacaacactggcagccggagccgatagcggctgaaccttcccacatgccgccgccggttatcgaacagccggttgccaccgagcctgaacctggcatagaagagaccaggcccgctcgccctccgctttactattttgaagaggtggaagagaaacgcgcccgtgagcgcgaacaactggcggcatggtatcaaccgattccggagccggtaaaagagaacgtgccggtcaaacctacggtatctgtcgcgccgtccataccgccagtggaagcggtagccgccgccgcgtcgcttgacacaggtattaagagtggcgccctggcagcaggcgccgcggccgctgcgcctgcatttagtctggctaccggcggcgcgccgcgtccgcaggtgaaagaggggattggtccgcaactgccgcgtccgaaccgcgttcgcgtgccgacccgacgggaactggcatcgtacggtattaagctgccgtcacagaggattgctgaagaaaaagcccgcgaggcggagcgcaatcagtacgagacgggcgcgcagctaaccgatgaagaaatagatgcaatgcatcaggacgagttagcccgtcagtttgcgcagtcgcagcagcatcgttatggtgagacgtatcagcatgatactcaacaggcagaagatgacgataccgctgcggaagctgaattagcccgccagtttgccgcttcgcaacagcagcgctattccggcgagcaacccgctggcgcgcagccgttctcactggacgatctggatttctcgccaatgaaagtattggttgatgaaggtccgcacgaaccgctgttcacgccgggtgtcatgcccgagtcaacgcctgttcagcaacctgtagcgccgcagccgcagtatcagcagccggtagcgccgcagccacagtatcagcagccgcagcagccggtagcgtcgcagccacagtatcagcagccgcaacagccggtagcgcctcagccgcagtatcagcagccgcagcagccggtagcgccgcagccgcagtatcagcagccgcaacagccggtagcgccgcagccgcagtatcagcaaccgcaacagccggtagcgccgcagccacagtatcagcagccgcaacagccggtagcgcctcagccgcagtaccagcagccgcagcaaccgacagcgccgcaagacagtctgatccacccgctgttgatgcgtaacggcgacagtcgtccattgcagcgtccgacgacgccgctgccttcattagatcttctgacgccgccgccgagcgaagttgaaccggtagatacctttgcgctggaacaaatggcgcgtctggttgaagcgcgtctggcggatttccgcattaaagctgatgtggtgaactattcgccaggcccggtcattactcgctttgaactgaatctggccccgggcgttaaagcagcgcgtatctccaacctttcccgggatctggcgcgctccttgtcaacggtagccgtacgcgttgtggaagtcattccaggcaaaccttacgtagggttggaattgccgaacaagaaacggcaaaccgtttatctgcgcgaagtgttggataacgccaaattccgcgagaatccgtcgccgcttaccgtggtgttaggtaaggatatcgcgggcgatccggtagtggcggatctggcgaaaatgcctcacctgctggtggccggtacgaccggttccggtaagtcggtcggggttaacgccatgatcctcagtatgctgtataaagcgcagccggaagacgttcgctttatcatgatcgacccgaaaatgttagaactctcggtctatgaaggtataccgcatctgctgacggaagttgttaccgatatgaaagacgcagctaacgcgttacgctggagcgtcaatgagatggagcgtcgctataagctgatgtccgcgctcggcgtgcgtaatctggctggttataacgagaaaatcgccgaagcggcccgcatgggacgtccgattccggacccgtactggaagccgggcgacagtatggatgttcagcatccggttctggaaaaactgccgtatatcgtggtactggttgatgaatttgccgacctgatgatgaccgtcggtaaaaaagttgaagagctgatcgcgcgtttggcgcagaaagcgcgcgctgcggggattcacctggtactggcgacgcagcgtccgtcggtcgatgtgattactggtttaattaaagccaacattccaacccgtatcgcttttacagtatccagcaagatcgactcccgcaccattcttgatcagggtggcgctgagtcgttattgggaatgggggacatgctctattccggaccaaactccaccatgccggtacgtgtccatggggcgtttgtgcgtgaccaggaagtccatgcggtggtgcaggactggaaagcgcgcggtcgtccgcaatatgtggatggcattacctccgacagcgaaagcgaaggtggcggtggcggttttgacggcggcgaagaattagatgcgctattcgatcaggccgttaatttcgtcactcagaagcgaaaagcgtccatttccggcgttcagcgtcagttccgtatcggctataaccgtgcggcgcgtattatcgaacagatggaagcgcagggtattgtcagcgctcaggggcataacggtaatcgcgaagtgttggctccgccgccttttgagtaa

SEQ ID NO: 39782 - DNA, 1344 bp, Salmonella typhi
gtgagcaatctgtcgctcgatttttctgataatacgtttcaaccgctggccgcgcgaatgcggccggaaaatttagcacagtatatcggccagcagcatttgctggccgcaggtaagccgttgcctcgcgctattgaggccgggcatctgcactccatgattttatgggggccgccagggacggggaaaaccacgctcgctgaagtgatcgcccgctacgccagcgccgatgtcgagcgtatttccgccgtcacttctggggtaaaagagattcgcgaagctatcgagcgcgcccgccagaatcgtaatgccggtcgccgtaccatcctgtttgtcgatgaagtgcatcgctttaacaaaagccagcaggacgcctttttaccgcatatcgaagatggcactatcacctttatcggcgcgaccacggaaaatccctcttttgagctgaactcggcgctattgtcgcgagcgcgagtctatctgctgaaatcgttgactactgacgatattgagcaagtactggaccaggcgatgcaggacaaaacgcgtggttacggcgatcaggatatcgtgttaccggatgagacacggcgagcgattgctgagctggtcaatggcgacgcgcggcgcgccttaaatacgctggaaatgatggctgatatggcggaggcggatgacagcggcaaacgcgttttattgcccgccttgttgaccgagatcgccggcgagcgcagcgcgcgttttgataacaaaggcgatcgcttctacgatcttatttccgccttacataaatcagtgcgcggcagcgcgccggatgccgccctctattggtatgcccgtatcattaccgcgggaggcgatccgctgtacgtggcgcgtcgctgcctggcgattgcctcggaagatgtgggtaatgccgatcctcgcgcgatgcaggtcgccattgccgcgtgggattgtttcacccgcgtcggcccggctgaaggcgaaagggcgatcgcgcaggctatcgtttatctcgcctgcgcgccgaagagcaacgccgtctataccgcctttaaggctgcgctggccgacgcgcgcgaacgtcctgattatgacgttcctgtccatctgcgtaatgcgccaaccaaactgatgaaagagatgggctatggccaggaataccgctatgcccacgatgagcccaatgcctatgctgcgggtgaagtgtacttcccgccggaaatcgcgcaaacgcgctattatcatccgacaaatcgtggtctggaaggtaagattggcgaaaagctcgcctggctggctgaacaggatcaaaatagccccacaaaacgctaccgctag

SEQ ID NO: 39783 - DNA, 1293 bp, Salmonella typhi
atgctcgatcccaatctgctgcgtaatgagccagacgcagtcgctgaaaaactggcacgccggggctttaagctggatgtagataagctgcgcgctcttgaagagcgtcgtaaagttttgcaggtcaacacggaaaacctgcaggcggagcgtaattctcgatcgaaatccatcggccaggcgaaagcgcgcggggaagatatcgagcctttacgcctggaagtgaataaactgggcgaagagttggatgcggcgaaagccgagctggataccttgctggcggagatccgcgatatcgcgctgaccatcccaaacctgcctgcggatgaagtgccggtaggtaaagatgaaaacgacaacgttgaagtcagccgctggggtaccccgcgtgagtttgattttgaaatccgcgatcacgtcaccttaggggaaatgcactccggcctcgactttgccgctgcggttaagctgaccggctcccgctttgtggtgatgaaaggacagattgcgcgtatgcatcgcgcattgtcgcagttcatgttggatctgcatacggaacagcacggctatagcgaaaactacgtgccgtatctggttaaccacgacacgctgtatggcaccggtcaactgccgaaattcgcaggcgacttgttccatacccgtccgctggaagaagaagcagacagcagtaactatgctttgatcccgacggcggaggttccgctgaccaatctggtacgcgatgaaatcatcgacgaagatcagctgccgattaaaatgacggcgcatacgccttgtttccgttctgaagcaggttcttatggtcgtgatacccgcggcctgattcgtatgcatcagtttgacaaagttgagatggtgcagatcgttcgcccggaagattctatggctgcgttggaagagatgaccggccacgcggaaaaagtgctccagctactgggactgccgtaccgtaaaatcattctgtgcactggcgatatgggcttcggcgcctgcaaaacttatgacctcgaagtctgggttccggcgcagaatacctaccgcgagatctcttcctgctctaacgtctgggacttccaggcgcgtcgtatgcaggcacgctgtcgcagcaagtccgacaaaaagacccgtctggtccataccctgaatggttctggtctggcggtaggtcgtaccctggtggctgtgatggaaaactatcagcaggctgatggtcgtattgaagtgccggaagtattacgtccgtacatgaacggactggaatatatcggctaa

SEQ ID NO: 39784 - DNA, 2445 bp, Salmonella typhi
atgaaaactaagatccctgatgccgtgctggcagccgaggtgagccgtcgtggtttagtcaaaaccaccgcgataggcggcctggcgatggccagtagcgcatttaccctgccatttacccgcatcgctaacgccgcagaggcgataagcccgacgaaaaccgacgagaaagtcgtctggagcgcctgtacggtaaactgtggcagccgttgtccgctacgtatgcatgttgtggatggcgaaatcaaatatgtagaaacggataataccggaaacgatgattacgatggcctgcaccaggttcgcgcctgcctgcgcggtcgttctatgcgtcgtcgcgtctataacccggatcgtctcaagtatccgatgaagcgcgtcggcgcgcgcggcgaaggtaaatttgagcgtattagctgggacgaagcctacgatatcattgccaccaatatgcagcgtcttatcaaagagtatggcaacgagtccatttatctgaactatggcacgggaacgctgggcggcactttgacacgttcatggccgccgggaaaaacgctggtcgctcgtctgatgaactgctgcggcggttatcttaatcactacggtgattactcttccgcgcaaatcgcagcgggtctgaattacacctatggcggctgggcggatggcaatagtccatccgacattgaaaacagtaagctggtggtgttgtttggtaataaccctggcgaaacccgcatgagcgggggcggtggaacgtattatcttgaacaggcgcggcagaaatcaaacgcgcggatgatcattatcgatcctcgttacaccgacaccggcgccggtcgcgaagatgagtggattccgattcgtccaggtaccgatgcggcgctggtcaatggtctggcatatgtcttaatcaccgagaacatggtcgatcagccgttcctggataaatattgcgtcggttatgacgaaaaaaccttgcctgccagcgcgccgaaaaacggtcactacaaagcctatattctgggcttgggtaaagacggtatcgcaaagacgccggagtgggcggcgcaaattaccggtattccggcagatcgcattattaaactggcgcgagaaatcggcagcgctaaacccgcctatatttgccaggggtgggggccacaacgtcatgctaatggagaaatcgccacgcgcgccatctcgatgctggcgatcctgacgggtaatgttgggattaacggcggtaacagcggcgcgcgcgaagggtcttatgccctgccatttgaacgtatgcccacgttggaaaatccggttgaaaccagcatctccatgtttatgtggaccgatgccattgaacgcggcccggaaatgacagcgctgcgtgatggcgtgcgggggaaagataagctggacgtgccgatcaaaatgatctggaactatgctggcaactgtttgattaaccagcactctgagattaaccgcacccacgaaatcctgcaggatgacagtaaatgtgaaatgatcgtcgttatcgactgtcatatgacctcgtcggcaaaatacgccgatattctgttgcctgattgcactgcttctgagcagatggactttgcgctggatgcctcctgcgggaacatgtcttacgttatcttcactgaccaggcgattaaaccgcgcttcgagtgtaagacgatttatgagatgaccagcgaactggcgaaacgtcttggcgtggaacaacagtttaccgaaggccggacgcaagaagagtggatgcgtcatctgtacgaacagtcgcgtaaatccattccgaatctgcccacctttgaggagttccgtaagcaaggcatcttcaaacagcgcgaccccgaaggccaccatgtcgcctataaagacttccgcgaagatccgcaagcgaatccacttacaacgccatcgggcaagattgaaatctattcacaggcgttggcggatatcgccgccacctgggagctgccggaaggcgacgtgatcgatccattaccgatctacacgctaggttttgaaaactataacgatccgctaacggataaattcccgctgcagttgacgggtttccactataaagcgcgtgtgcattccacttatggcaacgtagacgtactgaaagccgcctgtcgccaggaaatgtggattaacccaatggatgcgcagaaacgcggtatcaacaatggcgataaagtccgcatcttcaacgatcgcggcgaagttcatatcgaggctaaagtgacgccgcgcatgatgccgggcgtggtcgctctgggagaaggcgcatggtatgacccggatgcaaaacgcgtggatcagggcggatgtattaacgtactgaccagtcaacgtccttctccgctggcgaaggggaacccgtcacatacgaacctcgttcaggttgaaaaggcgtaa

SEQ ID NO: 39785 - DNA, 858 bp, Salmonella typhi
gtgaaagctgacaacccttttgaccttttactccctgcagcaatggccaaagtggctgaagaagcaggcgtctataaagcaacgaaacatccgcttaagactttctatctggcgattaccgccggcgtattcatttcaattgcctttgttttttatattactgcgacaaccggtactggcgcgatgccttatggcatggcgaaacttatcgggggtatctgtttctctttgggactgattctctgtgttatttgcggcgctgatcttttcacctctactgttctgatcgttgtagctaaagctagcggtcgcatcacctggggacaactggctaaaaactggttaaacgtctattttggtaacctgattggcgctctgcttttcgtgttactgatgtggctttccggcgagtatatgactgccaacggtcaatggggacttaacgtcctgcaaaccgccgaccacaaaatgcaccacacttttattgaagctgtctgcctcggtattctggcgaacctgatggtttgtctggccgtgtggatgagctactcaggtcgtagcctgatggacaaagcgttcatcatggtactgcccgtcgccatgtttgtcgccagcggttttgagcacagtatcgcaaacatgtttatgattcctatgggtattgtaatacgcgatttcgctacaccggagttttggaccgcggttggttcgtctccggaaagtttttctcacctgaccgtgatgagcttcatcactgataacctgattccggtcacgatcggtaatattatcggcggcggtttgttggtcgggttgacatactgggtcatttacctgcgtggtaacgagcatcattaa

SEQ ID NO: 39786 - DNA, 684 bp, Salmonella typhi
atgacggcaattgccccggtaataaccattgatggcccaagcggtgcaggtaaaggcaccttgtgcaaagcaatggcggaagcattgcaatggcatctgctggattccggcgcgatataccgcgtactggcgctggcggcattgcaccaccatgtcgatctcgcctctgaagatgcgctggtgccgctggcgtcccatctggacgtgcgtttcgtctcaacggacggcaacctggaagttatcctggaaggcgaggacgttagcggcgaaattcgtacgcaggaagtcgcgaacgcggcatcccaggtggcggcattcccacgcgtgcgtgaagcgcttcttcgccgccaacgcgcattccgcgaagcgcctggtttaatcgccgatggacgcgatatggggaccgtggtcttcccggatgcgccggtaaaaattttccttgacgcctcctcggaggaacgtgcgcatcgacgtatgctacagttgcaggagaatggctttagtgttaactttgaacgccttttggccgagatcaaggaacgcgacgatcgcgatcgtaatcgcgctgtagcgccgttagttcctgctgctgatgcattagttttggattctacccgattaagcattgagcaagtgattgaaaaagcgttacaatatgcgcgccaaaaattggctctcgcttaa

SEQ ID NO: 39787 - DNA, 1674 bp, Salmonella typhi
atgactgaatcttttgctcaactctttgaagaatccttaaaagaaatcgaaacccgcccgggttccatcgttcgtggtgttgttgttgctatcgacaaagacgtagtactggttgacgccggtctgaaatctgagtctgccattccggctgagcagttcaaaaacgcccagggcgaactggaaatccaggttggtgacgaagttgacgttgctctggatgcagtagaagacggcttcggtgaaactctgctctctcgtgagaaagctaaacgtcacgaagcatggatcacgctggaaaaagcttacgaagatgctgaaactgttaccggtgttatcaacggcaaagttaagggtggcttcactgttgagctgaacggtattcgcgcgttcctgccaggttctctggtagacgttcgtccggtgcgtgacactctgcacctggaaggcaaagagcttgaattcaaagtaatcaagctggaccagaaacgtaacaacgttgtggtttctcgtcgtgccgttatcgaatccgaaaacagcgcagaacgcgatcagctgctggaaaacctgcaggaaggcatggaagttaaaggtatcgttaagaacctcactgactacggtgcattcgttgatctgggcggcgttgacggcctgctgcacatcactgatatggcctggaaacgcgttaagcatccgagcgaaatcgtgaacgttggcgacgaaatcaacgtgaaagtgctgaaattcgaccgcgagcgtacccgtgtatccctgggcctgaaacagctgggcgaagatccgtgggttgctatcgctaaacgttatccggaaggtaccaaactgaccggtcgcgtgaccaacctgaccgactacggctgcttcgttgaaatcgaagaaggcgttgaaggcctggttcacgtttccgaaatggactggaccaacaaaaacatccacccgtccaaagtggttaacgttggcgacgtagtggaagtgatggttctggatatcgacgaagaacgtcgtcgtatctccttagggttgaagcagtgcaaatctaacccgtggcagcagttcgcagaaacccacaacaagggcgaccgcgttgaaggtaaaatcaagtctatcactgacttcggtatcttcatcggcctggacggcggcatcgacggcctggttcacctgtctgacatctcctggaacgttgcaggcgaagaagcagttcgtgaatacaaaaaaggcgacgaaatcgctgcagttgttctgcaggttgacgcagaacgtgaacgtatctccctgggcgttaaacagctcgcagaagatccgttcaacaactgggttgctctgaacaagaaaggcgctatcgtaaccggtaaagtcactgcagttgacgctaaaggcgcaaccgtagaactggctgacggcgttgaaggttacctgcgtgcttctgaagcatcccgtgaccgcgttgaagatgcgactctggttctgagcgttggcgacgacgttgaagctaaattcaccggcgttgatcgtaaaaaccgcgcaatcagcctgtctgttcgtgcgaaagacgaagctgacgagaaagatgccatcgcaactgttaacaagcaggaagatgcaaacttctctaacaacgcaatggctgaagcattcaaagcagctaaaggcgagtaa

SEQ ID NO: 39788 - DNA, 1749 bp, Salmonella typhi
atgcataacgataaagatctctctacgtggcagaccttccgccgactgtggccaaccatagcgccttttaaagcaggtctgatcgtggcgggcatagcgttaattctcaacgcagccagcgataccttcatgctatcgctcctcaagccattactggatgatggtttcggtaaaacggatcgctcagtgttgctgtggatgccgctggtggttattgggctgatgatattacgaggcatcactagctatatctccagctactgtatttcatgggtgtcaggcaaggtggtaatgaccatgcgccgtcgcctgtttggccatatgatgggaatgcccgtcgccttctttgataaacagtctaccggtacgctgctgtcgcgtattacatacgattcagaacaggttgcctcttcttcatctggcgcgctgattaccgtggtgcgtgaaggggcatcgatcatcggattgtttattatgatgttctattacagctggcagctgtcgatcatcctggttgttttagcgccgattgtgtcgattgcgattcgcgttgtctcaaagcggttccgcagcatcagtaaaaatatgcagaacacgatgggacaagtgactaccagcgctgaacaaatgctgaaaggacacaaagaggtactgattttcggcggtcaggaagtcgaaactaaacgctttgataaagtcagcaataagatgcgactgcaaggcatgaaaatggtctctgcctcgtcaatttccgatcctatcattcagctcattgcctcgctggcgctggcgtttgttctctatgctgcgagcttcccaagcgtaatggatagcctgacggcagggaccatcacggtggtgttctcctccatgatcgcgctgatgcgtccattaaaatcgctgacaaacgttaacgcgcagttccagcgtgggatggcggcttgtcagacgttgtttgcgattctggacagcgaacaggagaaagatgaaggtaaacgtgtcattgaccgcgcgaccggcgatctcgaattccgcaatgtgacgtttacttacccgggccgtgaagtgccggcattgcgtaacatcaatttgaaaattcctgccgggaaaaccgtggcgctggtggggcgttccggatcgggtaaatcaactatcgccagtctgatcacccgtttctacgatattgatgaaggacacatcctgatggatggtcacgatctacgcgaatacactctggcctctctacgtaatcaggtggcgctggtttcgcaaaacgtgcatctgtttaacgacacggtcgccaataacattgcttatgcccggacggaagaatacagccgcgagcagattgaagaggcggcgcgcatggcctatgccatggactttatcaacaagatggataatggtctggataccattatcggcgaaaacggcgtactgctttccggcggtcagcgccagcgtatcgcgattgcccgcgccttactgcgcgacagcccgattctgatccttgatgaagctacgtccgcgctggataccgagtccgaacgtgcgattcaggccgcgttggatgagctgcaaaaaaaccgtacctctctggtgattgcgcaccgtctctccaccatcgaacaggcggatgagatcgttgtagtcgaagacggtattatcgttgagcgcggcactcatagcgagctgctggcgcaacacggcgtttacgcccagctgcataagatgcaatttggccaatga

SEQ ID NO: 39789 - DNA, 1401 bp, Salmonella typhi
atgagcgttgtgcctgtagccgacgtactccagggccgcgtagccgttgaccaagaagtcaccgtgcgcggatgggtgcgtacccgccgagattcaaaagctggcatctccttcctcgccgtttatgacggctcctgctttgatcctgtacaggctgtcattaataattctctgcccaattataatgaagaagtattacacctgacgacaggctgctccgtggtagtaacaggtaaggttgtcgcgtcgccgggacaggggcaaagtttcgaaatccaggccacgaaagtagaggtcgcaggctgggtggaagatccggatacctacccgatggcggcaaaacgccatagcattgagtatctgcgtgaagtcgcgcatctgcgcccgcgcaccaacctgattggcgcggtagcgcgcgtccgccatactctggcgcaggcgctgcatcgcttcttcgatgagcagggtttcttttgggtctctaccccgctgattaccgcttccgataccgaaggcgctggcgaaatgttccgcgtctcaacgttggatctggaaaacctgccgcgtaacgaccagggcagagtagattttgacaaagacttttttggcaaagaatcattcctgaccgtctccggccagctcaatggtgaaacctatgcctgtgcgctgtccaaaatctatacttttgggccgaccttccgcgcggaaaattccaacaccagccgccacctggcggagttctggatgctggagccggaagtggcgttcgccgatctggaagacaacgcccgtctggcggaagccatgctgaaatatgtcttcaaggcggttctggaagagcgtgcggatgacatgaagttctttgccgaacgcgtggataaagacgctatcgctcgtctggagcgttttgtctccaccgactttgctcaggtggattacaccgatgcggtcgccattctggaacgctgtggtaagacatttgaaaacccggtgttctggggcgtcgacctttcttccgaacacgaacgttatctggcggaagagcatttcaaagcgccggtagtggtgaaaaactatccgaaagaaattaaagcgttttacatgcgccttaacgaagatggcaaaaccgtggcggccatggatgtgctggcgccgggaatcggcgaaatcatcggtggttcccagcgtgaagagcgtctggatgtgctggatgcccgtatggccgaaatggggctgaataaagaggattactggtggtatcgcgacttgcgtcgctacggtactgtaccgcattccggctttggcctgggctttgaacgccttatcgcttacgtcacgggtgtgcaaaacgtgcgcgatgttattccgttcccacggaccccacgcaacgccagcttctga

SEQ ID NO: 39790 - DNA, 1251 bp, Salmonella typhi
atggaaagcaaagtagttgttccggtggaaggtaagaagatcaccctgcaaaacggcaaactcaacgttcctgagaatccgattatcccgtttattgaaggcgatggtatcggtgttgatgtcactccagccatgcttaaagtggtcgatgccgccgtcgagaaagcctataaaggcgagcgtaaaatttcctggatggaaatttacaccggagaaaaatccacacaggtttacggccaggatgtctggcttcccgctgaaacccttgatttaattcgtgactaccgcgtagcgattaaaggtccattgaccacgccggttggcggcggtatccgctctctgaacgttgccctgcgtcaggagcttgacctgtacgtttgtctgcgtcccgttcgttactatcagggcacgccaagtccggtgaaacatccggagctgaccgatatggtcatcttccgtgaaaactctgaagacatctacgccggaattgaatggaaagctgactctgcagacgctgagaaagtgatcaagttcctgcgcgaagagatgggcgtgaagaaaattcgcttcccggagcactgcggtatcggtatcaaaccgtgttctgaagaaggcactaaacgtctggttcgcgcggcgattgaatacgctattaccaacgatcgcgattccgtcacgctggtacataaaggcaatatcatgaagttcaccgaaggcgcgtttaaagactggggctaccagttggcgcgcgacgagttcggcggtgagcttattgacggcggtccgtggctgaaaattaagaacccgaacacgggtaaagagatcgtggttaaagacgttatcgccgatgcgttcctgcaacaaatcctgttgcgtccggcggaatacgacgttatcgcctgtatgaacctgaacggtgactatatttccgatgccctggcggctcaggttggcggtatcggtattgcaccgggtgcgaatatcggcgacgaatgcgcgttgtttgaagcgactcacgggactgcgccgaaatatgcgggccaggataaagtcaacccaggctccattattctgtctgcggagatgatgctgcgccacatgcagtggttcgaagcggcggatctgattgttaaaggtatggaaggcgcgattgccgcgaagaccgtgacctatgactttgaacgcctgatggacggcgctaagctgctgaaatgtagtgagtttggcgacgcgattatcgcaaatatgtaa

SEQ ID NO: 39791 - DNA, 1203 bp, Salmonella typhi
atgacacaattcgcttctcctgttctgcactcgttgctggatacagatgcttataagttgcatatgcagcaagccgtttttcaccactactatgatgtgcaggtagcggctgagtttcgttgccgtggcgacgacctgctgggtatttatgccgatgctattcgcgagcaggtggacgcgatgcagcacctgcgcctccaggaggacgagttccagtggctctccggcctgcccttttttaaaccggattatctgaactggttacgcgagtttcgctataacccagctcaagtctgtgtcaccaacgataacggcaagctgaatattcgcttaaccggctcgtggcgtgaagtcattatgtgggaagtgccgctgctggccgtgatcagtgagctggttcatcactaccgctcgccaaacgcgggcgttgatcaggcgctcgacgcgctggaaagtaagctggttgatttcactgcgttaaccgccaatctcgatatgtcccgcttccacctgatggacttcggcacccgccgccgtttctctcgtgaagtgcagcaggcgatagttaaacgtctccagcaggagtcatggttcgtcggcaccagcaactatgatctcgcgcgtcgcctggcgctgacgccgatgggcactcaggcgcacgaatggttccaggcgcatcaacaaatcaatccggacctggcgaccagtcagcgtgccgcgttggccgcctggcttaacgaatatccggaccagcttggtatcgcattgacagattgcattacaatggatgcgtttttacgcgatttcggcattgaattcgccagccgttatcaggggttacgccacgactcaggagaccctgtcgcatggggcgaaaaggcgattgcccattatgaaaagctggggattgatccgctgacaaaaacgctggtcttttcagataaccttgatctgccaaaggcggtcgagctctatcgccatttcgcctctcgcgtgcagttaagcttcggcatcggtacccgactgacctgcgatatccctcaggtaaaaccgctcaatatcgtgattaagctcgtggaatgtaacggaaagccggtggctaaactttccgacagccccggtaaaacgatctgtcatgataaagcgtttgtgcgcgcgctgcgtaaagcgttcgatctcccgcaggtgcgtaaagcaagttaa

SEQ ID NO: 39792 - DNA, 1398 bp, Salmonella typhi
atgagtcactcatccgccccggaaagggcaactggcgctgttatcacggaatggcgtccggaagatccggcgttctggcagcagcgcggccatcgtgtcgctagccgtaatttgtggatttctgtcccgtgtttactgctggcgttttgcgtctggatgctattcagcgcagtggcggtgaacctgccgaaagtgggatttaattttacgaccgatcagctctttatgttgactgcgctgccatctgtttccggcgcgctgctacgggtgccttactcctttatggtgccgctatttggcggacgtcgctggacagcgttcagtaccggtatcctcatcgtgccttgcgtatggttaggctttgccgttcaggataccagtacgccatttagcactttcattattatttccttgctgtgtggttttgccggcgcgaactttgcctccagtatggcgaacatcagctttttctttcctaaacaaaagcagggcggcgcgctgggtctgaacggcggtctgggcaatatgggcgtgagcgtgatgcagctggttgcgccgctggtggtttcgctctctatctttgccgcctttggcagccacggtgtagagcagccggacggttctcagctctatctggcgaacgcagcctggatttgggtgcctttcctggccatttttacgctggcagcgtggttcggcatgaacgaactggcgacgtctaaggcctcgctaaaagagcaactgccggtgctcaaacgtggtcatctgtggatcatgagtctgctgtatctggcgaccttcggatcgtttatcggtttctccgcggggttcgctatgctgtctaaaacgcaattcccggatgtgcagatcctgcattatgcgtttttcggtccgtttatcggcgcgctggcgcgttcggcaggcggcgcaatttctgaccgtctgggggggactcgcgtcacgcttatcaactttgtcctgatggcgattttcagcggtctgctgttcctgacattacctactggcggcgttggcggtagctttatcgcattctacggggtatttctggcgctattcctgacggcggggctggggagtggttctaccttccagatgatctccgttatcttccgtaaactgacgatggaccgggtaaaagcggaaggcgggtcggacgaaagagccatgcgtgaagcggcgaccgatacggcggcggcgctgggctttatttccgcgattggcgcgattggcggcttttttattccgaaagcgtttggttcatctttagcattaaccggttcgccagtcggcgcgatgaaagtctttcttattttctatatcgcctgcgtcgttattacctgggcggtatatggacgtcattctaaaaataaaaagtaa

SEQ ID NO: 39793 - DNA, 3744 bp, Salmonella typhi
atgagtaaattcctggaccggtttcgctacttcaagcagaagggcgaaacctttgccgatgggcacggccagcttctcgaaacaaaccgggactgggaggacggataccgccaacgttggcagcatgacaaaattgtgcgctcaacccatggggtgaactgcaccggttcttgtagctggaaaatttatgtcaaaaatggtctggtgacctgggaaacacagcaaaccgattacccgcgcacccgtcctgatatgccaaaccatgaacctcgcggctgcccgcgcggggcaagttactcctggtatctctacagcgctaaccgactgaaatatccgctaatgcgcaaacgtctgatgaagatgtggcgcgaggcgaaaaaactgcatcgcgatccggtagaggcatgggcctccatcattgaagatgccgataaagccaaaagcttcaaacaggcgcgtggtcgtggcggctttgttcgctcctcatggcaggaagtgaacgagctgatcgccgcttccaacgtgtacaccgtgaaaacctatggccctgaccgcgtcgcgggcttctcacccattccggcgatgtcgatggtttcctacgcttccggcgcacgttatctttcgctgattggcggtacctgcctgagcttctacgactggtactgcgacctgccgccagcctccccgcaaacctggggcgagcagaccgacgtgccggaatccgctgactggtacaactccagctatattatcgcctggggctctaacgtgccgcaaacccgtacgccggatgcccacttctttaccgaagtacgttacaaaggcactaaaaccgtcgcggtgacgccggactatgccgaaatcgccaaactgtgcgatctgtggctggcgccgaagcaggggaccgatgcggcgatggcgctggcgatgggccacgtcatgctgcgcgagttccacctcgacaacccgcgccagtacttcaccgattatgtccgtcgctataccgacatgccaatgctggtgatgcttgaagagcgtgatggttattatgccgcaggtcgtatgctgcgcgctgccgatctcgttgattcgctggggcaggaaaataacccggaatggaaaaccgtcgctatcaacagcaacggtgaaatggtggcgccaaacggttcaattggtttccgctggggcgaaaaaggcaaatggaacctcgaacagcgcgacgggactaccggtgcagaaactgaattgcagctcagcttgctgggcagccaggatgagattgctgacgtgggcttcccgtatttcggcggcgagggttcagagtactttaatcatgtggcgctggataacgtcctgctgcataaactgccggcaaaacgtctgcaactggccgatggttcttcagcgttagtcactaccgtttacgatctgaccatggcgaactatggtctggaacgcggcctgaacgatgaaaattgtgccgccagttatgatgataccaaagcatatacgccagcatgggccgagcagatcaccggcgtgccgcgggcgcagatcatccgtatcgcacgggaattcgccgataacgcggacaaaacgcacgggcgttcaatgattatcgttggcgccggtctgaaccactggtatcacctcgatatgaactatcgcgggctgatcaatatgttggtgttctgtggttgcgttggtcagagcggcggcggctgggcgcactacgtcggccaggaaaaactgcgtccgcagaccggctggcagccgctggcgtttgcccttgactggcagcgtcccgcgcgtcacatgaacagcacctcttacttctataaccactccagccagtggcgctacgagacggtgaccgccgaggagttactgtcgccgatggcggacaaatcccgctatagcggccatctgattgacttcaatgtgcgcgccgaacgtatgggctggttgccgtcggcaccgcagttaggcaccaacccgctgtatattgcgcgtgaagcggaaaaagccggtatgacgccggtagattataccgtcaaatccctgaaagacggttcgattcgctttgccgccgagcagccggaaaacggtaaaaaccatccacgtaacctctttatctggcgttccaacctgcttgggtcttccggtaaaggtcacgagtatatgctgaaatatctgctgggtactgagcatggtattcaggggctggatctcggcaagcagggcggtgtgaagccggaagaagtggaatggcgtgacaatggcctggacggcaaactggatctggtggtgacgctggacttccgcctgtcgagcacctgcctgtactccgatatcgtactgccgaccgccacctggtatgaaaaagacgatatgaatacctcggatatgcatccgtttattcatccgctgtctgccgccgtagatccggcctgggaatcgaaaagcgactgggaaatctacaaaggcattgcgaagaaattctccgaagtctgtgtaggccacctgggtaaagagactgacgtcgtgacgctgccgatccagcacgactctgccgctgaactggcacagccgctggacgtgaaagactggaaaaaaggtgaatgcgatctgatcccagggaaaaccgcgccgcacatcatgaccgttgagcgcgattatccggccacctatgagcgctttacctctattggcccgctgatggagaaaatcggcaacggcgggaaagggattgcctggaacacgcagagcgaaatggacttgctgcgtaagctcaattacaccaaagcggacggtccggcgaaaggccagccgatgctcaacacggcgattgacgcggcagagatgatcctgacgttagcgccggaaaccaacggtcaggtggcagtgaaagcctgggcggcgctgagcgagtttaccggtcgcgaccatacgcatctggcaactaataaagaagaagagaaaatccgcttccgcgatattcaggcccagccgcgcaaaattatctccagcccgacctggtctggtctggaagatgagcatgtttcttataacgccggttataccaacgttcacgagctgatcccgtggcgtacgctgtctggtcgccaacagttgtatcaggatcaccagtggatgcgcgacttcggcgaaagtctgctggtgtatcgcccaccgatcgacacccgctcggtgaaagcggtgatggggcgtaaatccaacggtaatccggagaaggcgctcaacttcctgacgccgcaccagaaatggggtatccactcgacctacagcgataacctgttgatgctgaccttgtcgcgtggcggcccgattgtatggatgagtgaaaccgacgccaaagagctgggcattgaagataacgattggatcgaagtcttcaacagcaacggcgcattgaccgcacgcgcagtggtcagccagcgtgtaccggcgggcatgaccatgatgtaccacgcgcaggaacgtatcgtaaacctgccggggtcggaaattacccagcagcgcggcggtattcataactcggtgacgcgtattacgccgaaaccgacccatatgatcggcggctatgcgcagttagcctacggctttaactactacggtaccgtcggctccaaccgcgatgagtttgtggtggtacgtaagatgaagaacattaactggttggatggcgaaggcaatgaccaggtacaggagagcgtaaaatga

SEQ ID NO: 39794 - DNA, 843 bp, Salmonella typhi
atgcaatcactacaacgtaaagttctgcgtactatttgtcccgatcaaaaaggccttatcgcgcggattaccaacatttgctataagcacgagcttaatattgtgcaaaacaatgaatttgtggaccatcgcaccggacgcttttttatgcggaccgagctggaaggcatcttcaatgattccactcttctggccgatctggacagcgccttaccggaaggctctgttcgtgaactcaatcccgccggacgccgtcgggtagtgattctggttaccaaagaggcgcattgtctgggcgacctgctgatgaaagccaactatggcgggctggatgttgaaatcgccgcggtcattggcaaccatgaaacgttacgctcgctggttgaacgttttgagatccctttcgaactggtcagccatgagggattaacgcgtgaagagcatgacacgaagatggcggacgccattgatacccatcaaccggactatgtagtgctggccaagtatatgcgtgttttgacgccaggttttgtggcgcgcttcccgaacaaaattatcaatatccaccactcattcctgccggcgtttatcggcgcgcgtccttatcatcaggcctatgagcgcggcgtgaaaatcatcggcgctaccgcgcactatgtgaatgataatctagatgaaggcccaatcattatgcaggacgtgattcacgtcgatcacacctacaccgcagaagatatgatgcgtgccgggcgcgacgttgagaaaaacgtattaagccgcgcgctgtatcaggttctggcgcagcgggtctttgtttacggcaatcggacgattattctttaa

SEQ ID NO: 39795 - DNA, 909 bp, Salmonella typhi
atggctgcccttaattcgaaagtcaaaaaagccgttatcccggtcgcgggattgggaaccaggatgctgccagcgaccaaagctatcccgaaagagatgctgccgctggttgataagccattaattcagtacgtcgtgaacgaatgtatcgctgctggcattactgaaatcgtgcttgttacgcactcgtctaaaaactctattgaaaaccactttgataccagttttgagctggaagcgatgctggaaaaacgcgttaagcgtcagcttctggaggaggttcagtctatttgccctccgcatgtcactattatgcaggtacgtcaagggctggcaaaaggcctgggccatgccgtattgtgcgcgcatcccgttgtcggaaacgaacctgtcgctgttattctgccagacgttattcttgacgaatatgagtccgacctgtctcaggataacctggctgaaatgatccgccgtttcgacgaaaccggcaatagccagattatggttgagccagtagaagatgtgactgcatacggcgtggtcgattgcaaaggcgttgagctggcgccgggcgaaagtgtgccgatggttggcgtggttgaaaaaccaaaagcggatgtcgcgccgtctaaccttgcgattgtcgggcgttatgtgttgagcgcggatatctgggcgttgctggcgaaaacccctccgggcgccggggatgaaattcagttgaccgatgctatcgatatgctgatcgaaaaagaaacggttgaagcctaccacatgaagggtaaaagccatgactgtggtaataagttaggatatatgcaggcattcgttgaatatggcatccgtcataattcgctgggtgctgaatttaaagcctggcttgaagaagaaatgggtattaagaagtaa

SEQ ID NO: 39796 - DNA, 618 bp, Salmonella typhi
atggcacagctatatttctactattcggcaatgaatgcgggtaagtcgactgcactgctgcaatcttcatacaattatcaggaacgcgggatgcgtaccgtcgtatatacggcggaaatcgacgatcgtttcggcgcaggcaaagtcagctctcgtatcggtttgtcgtcgccggcaaaattgtttaaccaaaatacatccttgtttgaagagattcgtgccgagagcgcgcggcagacaatacattgcgtgttagtcgacgaaagccagtttttgactcgccagcaggtttatcaattatccgaggttgtcgacaaattagatattccagtactctgctatgggctacgaacagactttcgtggggagctctttgtcggcagccaatacttgctggcatggtcagataagctggtggaattaaaaactatctgtttctgcggtcgtaaagccagtatggttttgcgccttgatcaggacggcaggccttataacgaaggcgaacaggtggttattggcgggaatgaacgctacgtttcagtttgccgtaagcattataaggacgcgctggaggagggctcactgacggcgattcaggagcgccatcggcacatatga

SEQ ID NO: 39797 - DNA, 2679 bp, Salmonella typhi
atggctgttactaatgtcgctgaacttaacgcactcgtagagcgtgtaaaaaaagcccagcgtgaatatgccagtttcactcaagaacaggtcgacaaaatcttccgcgccgccgctctggcagccgctgatgcccgcattccgctggccaaaatggccgtcgccgaatcaggtatgggtatcgtggaagacaaagtgattaaaaaccacttcgcttctgaatatatttacaatgcctataaagatgaaaaaacctgcggcgtgctgtcagaagacgacaccttcgggaccatcaccattgctgaacctatcggcattatttgcggtatcgttccaaccactaacccgacctctactgcgatcttcaaatcgctgattagcctgaagacccgtaacgccatcatcttttctccgcatccgcgcgctaaagaagcaactaacaaagcggcagacatcgttctgcaagcggctatcgctgccggcgcaccgaaagatctgattggctggatcgatcaaccttccgtagaactgtctaatgcgctgatgcaccacccggatattaacctgatcctcgccactggcggtccaggcatggttaaagctgcatacagctccggtaaaccggcaatcggcgtaggcgcaggtaacaccccggttgtcattgatgaaaccgctgatatcaaacgcgctgtggcgtctgttctgatgtctaaaaccttcgataacggcgtaatctgtgcttctgaacagtctgttgtcgttgttgattccgtctatgatgccgttcgcgaacgtttcgccagccacggcggctacatgctgcagggccaggagctgaaagcggttcaaaacgttattctgaaaaatggcgctctgaacgccgctatcgtcggtcagccagcctacaaaatcgctgaactggcaggcttctccgtaccagaaaccaccaagattctgatcggtgaagttacggtcgttgacgaaagcgaaccgttcgcacacgaaaaactgtctccgactctagcgatgtaccgtgcgaaagatttcgaagaagcggtagaaaaagcagaaaaactggtcgctatgggcggtatcggtcacacctcctgcctgtacactgaccaggataaccagccagaacgcgttgcttacttcggtcagatgatgaaaaccgcgcgtatcctgatcaacaccccggcctctcagggtggtatcggtgacctgtacaacttcaaactcgcaccttccctgacgttgggttgtggttcctggggtggtaactccatctctgaaaacgttggtccgaaacacctgatcaacaagaaaaccgttgctaagcgagctgaaaacatgttgtggcacaaacttccgaaatctatctacttccgccgtggctctctgcccatcgcgctggatgaagtgattactgatggccacaaacgtgcgctcatcgtgactgaccgcttcctgttcaacaacggctatgcagaccagatcacctctgtgctgaaagcggctggcgttgaaaccgaagtcttcttcgaagttgaagcagacccgacgctttccgttgttcgcaaaggcgctgagctggctaactccttcaaaccggacgtgatcatcgcgctgggcggcggttccccgatggacgccgcgaaaatcatgtgggtcatgtacgaacatccggaaactcacttcgaagaactggcgctgcgctttatggacatccgtaaacgtatctacaagttcccgaaaatgggcgtgaaagcgaaaatgatcgccgtcaccaccacttccggtaccggttctgaagtcacaccgtttgcggttgtgaccgacaatgcaaccggtcagaaatatccgctggctgactatgccctgaccccggatatggcgattgtcgatgccaacctggtgatggatatgccgaagtccctgtgtgcgttcggtggtctggatgcggtaactcacgccctggaagcttacgtttccgtactggcttctgagttctctgacggtcaggctctgcaggctctgaaactgctgaaagaaaacctgccggcgtcttaccacgaagggtctaaaaacccggttgcgcgtgaacgtgttcacagtgcagcgactatcgccggtatcgcgtttgccaacgccttcctcggtgtatgtcactccatggcgcacaaactgggctctcagttccacattccgcacggtctggcgaacgccctgctgatttgtaacgttatccgctacaacgcgaatgacaacccgaccaagcagaccgctttcagccagtacgatcgtccgcaggcacgccgtcgttacgctgaaattgctgaccacctgggcctgagcgcgccgggcgaccgtaccgccgctaagattgaaaaactgctggcatggctggaaagcattaaagctgagctgggcattcctaagtctatacgtgaagcaggcgtgcaggaagctgacttcctggcacacgttgacaaactgtctgaagatgccttcgatgaccagtgcaccggcgctaacccgcgttatccgctgatctccgaactgaaacagattctgctggatacctactacggtcgtgatttcaccgaaggtgaagttgcagcgaagaaagacgtcgttgccgcaccgaaagcagagaaaaaagcgaaaaaatccgcttaa

SEQ ID NO: 39798 - DNA, 540 bp, Salmonella typhi
atgaatctgttatctgctcttctgaaaagatactggttgcagctggcgtttattttgctgatggctggtgcgtttatcgccggtaatgtctggagtgacaggggctggcaaaaaaaatgggcagatcgcgacagcgctgaatcctctcaggaagtcaacgcccagaccgccgcccgtattattgaacagggccgcattattgcccgtgatgaggctgtgaaagatgcacaagcgcaagccgctaaatctgctgccactgctgctggcctgtctgccactgttagccagctgcgtaccgaagcaaaaaaacttgccacccgcctggacgccgcaaagcacaccgcaaatcttgccgctgccgtcagaagcaaaacagccggagccgacgccacagtgctcgccgacatgttcggaagccttgcagaagaagctcaatattatgctgagcgatctgacgaaagctaccgcgcaggaatgacgtgtgagcgcatttacaactcggtgagagagtcaaccaacaatcccatagctccgcactag

SEQ ID NO: 39799 - DNA, 1008 bp, Salmonella typhi
atgagcttatcagaaaccgcaactcaggcgccgcaaccggcgaatgtactgctggaggtaaacgatcttcgtgttacgttcgctacgcctgatggcgatgtgacggcggtcaacgatctgaactttacgcttcgcgctggagaaacgttaggtattgttggcgagtctggatcggggaaatcgcaaacggcgttcgcattaatgggactgctggcgacgaatggtcgaatcggcggttccgcgacctttaacggacgtgaaattcttaatctacctgagcgcgaactgaatacgctgcgcgcagaacagatttcgatgatttttcaggacccgatgacctcgctaaatccttatatgcgcgttggggagcagttaatggaagtcctgatgctgcataaaggaatgagcaaagcggaagcttttgaagagtccgtcagaatgctggatgccgtaaaaataccggaagcgcgcaaacggatgaaaatgtacccgcacgaattttccggcggaatgcgtcaacgtgtgatgattgcgatggcgctgttgtgcaggccgaaactgcttattgccgatgagcctaccaccgcgcttgatgttaccgtgcaggcgcagattatgaccttgcttaatgagctaaagcgcgaatttaataccgccattatcatgattacccacgatctgggcgtggtcgcgggtatttgcgataaggtcctggtaatgtatgccgggcgtaccatggaatacggtaaggcgcgcgatgtcttttatcagcccgttcatccgtattcgataggcttgcttaatgcggtgccgcgtctggatagcgagggggcggaaatgctgacgattccgggcaatcctcccaatttattgcgtttgcctaaaggttgtccgttccagccgcgttgtcctcatgcgatggagatctgcaataatgcgccgccacttgaagcgttcagtcctggtcgcttgcgcgcctgttttaaaccggtggaggaactgctatga

SEQ ID NO: 39800 - DNA, 837 bp, Salmonella typhi
gtgtcactttctttgtcgtcggttcgccgtcgtctttatcataatctgttcgatttgactacgcgctcaagtcgccgttttgaagggttatgcgcgctgtttgcgctgcttagcgtactggtcatttttgttgaatcaggcgtaggaacggaatatcacctgacatttgatgaatggcatatttttgtctggctggagctgtgcgttaccctgatatttaccggtgaatacttgctcagactgtttagttggcccgaaccggcaaaatacgtttttagtttctggggatttattgatctggtgacgattttgccgctgtacgtcatgtggctatggccggaaattagcctgaactatatgtttgcctggcgcgctatgcgagcgattcgcgtgctgcgtattcttaaactgctacgttttatgccatccctgcgcgtattctggagcgccattattagcgcgcgtcatcagcttattctgttctattcatttattgcgatcgtgatgattattttcggtgccctgatgtatcttattgaaggaccgaaatatggcttcacgacgcttaatgcctcggtgtattgggcgatagtgacagtcacaaccgtggggtacggtgatattacgccgcatacgccgctgggacgtattgtcgcgtcggtgcttattttgattggttattcggtgattgcgattcctacaggactgattaccacgcacatgagcagcgcgtttcaaaaacgtcactggcagcgaaaatgtccgcagtgccagcaaagccagcatgaacatagcgcgcaatattgtaaccgatgcggcagtaagctaccggattaa

SEQ ID NO: 39801 - DNA, 402 bp, Salmonella typhi
atgacaacaatggataatactcctcagggcgagctggttttacgtacattggccatgcctgccgataccaatgcgaacggcgatatttttggcggctggctgatgtcgcaaatggatattggcggcgcgatactggccaaagagatcgcgcacggtcgggttgtaaccgtacgcgtggaaggaatgacatttctgcgccccgtcgcggttggcgatgtcgtatgctgctacgcgcgctgcgttaaacgcggtacgacgtctattagcatcaatattgaagtctgggtgaaaaaagtcgcgtcagaaccgattggacagcgctacaaggccaccgaggcgctgtttatttatgttgccgtcgatccggacggtaaacctcgcccgctcccggttcagggttaa

SEQ ID NO: 39802 - DNA, 540 bp, Salmonella typhi
atgaagcagtttctggattttttaccgctggttgtcttttttgcgttttataaactttatgacatctatgcggcgacctccgcactgattgtcgcaacggcaatcgtgctgatttatagctgggtgcgctatcggaaaatagagaagatggcgctgattacctttgttctggttgccgtcttcggcggtctgacgctcttcttccataacgatgaatttattaaatggaaggtgacggttatttatgcgctgttcgccggcgcgctgttaataagccagtgggtgatgaaaaaaccgttaatccaacgtatgttaggtaaagaactggcgttgccgcagcaggtctggtcaaagctgaacctggcgtgggcgctgttttttattgcgtgcggtctggctaacatttatatcgccttctggttgccgcaaaatatctgggttaactttaaggtcttcggactcacggcgctgacgctcatttttaccctgctgagcggcgtctatatctaccggcatctgccacaggaagataaatcataa

SEQ ID NO: 39803 - DNA, 639 bp, Salmonella typhi
atgaaaaaatttacagtggcggcactggcgttaacaactcttctctcaggcagcgcgttcgcgcacgaagccggagaattctttatgcgtgcaggtccggcaaccgtcagacctacagaaggggcgggtggtacgctggggcatttaaacgggtttgatgtgagtaataacacgcaactcggcctgacattcacttacatggcgacggacaatatcggggttgaattgctggcggccacgccgttccgccataaggtgggtacgggcgcgacgggtgatatcgccacggtccacctgttaccgccaacgttaatggcgcagtggtacttcggcgattccagcagcaaagtgcgtccttatgtcggcgtgggggtgaactacaccaccttcttcgataacgactttaacgataatggtaaaaagaccgggctgtccgatctgagctttaaggattcctggggcgcggcagggcaagttggggtagattacctgattaaccgcgactggttaattggcgcctctgtctggtacatggatattgatactacagccaattataaaatgggcggcgtgcagcagcatgacagcgtgcgtctggacccatgggtatttatgttctcggcaggctatcgtttctaa

SEQ ID NO: 39804 - DNA, 1194 bp, Salmonella typhi
atgacaacacttctcaacccctactttggtgaattcggcggcatgtatgtgccgcagatcctgatgcctgcgctgaaccagcttgaagaggccttcgtcagcgcgcaaaaagatcctgaatttcaggcgcaattcgccgatctgctaaaaaactacgcgggacgccccaccgcgctgacgaaatgccagaacattaccgccggtacgcgtaccacgttgtatttaaagcgcgaagatttactgcacggcggcgcacacaaaaccaatcaggtactgggtcaggcgctgctggccaaacggatgggtaaaagcgagattatcgctgaaaccggcgccggtcagcacggcgtcgcctctgcgctcgccagcgccctgctgggtctgaaatgccgtatctatatgggtgccaaagacgttgagcgccagtcgccgaacgtcttccgtatgcgtctgatgggcgctgaggtcatcccggttcatagcggctccgctacgctaaaagatgcctgtaacgaggcgctgcgcgactggtccggtagttacgaaaccgcgcactatatgctcggcacggcggcaggaccgcatccctatcctaccatcgttcgcgagttccaacgcatgattggcgaagagacgaaagcgcaaatcctcgacaaagagggccgtctgccagatgccgttatcgcttgcgtcggtggcggctcaaacgctatcgggatgtttgcggattttattaatgataccagcgtcgggctaataggcgttgaacctggcggtcacggtattgaaaccggcgagcatggtgcgccgcttaaacatggtcgcgttggcatctatttcgggatgaaagcgccgatgatgcaaacagcagacgggcaaattgaagagtcctattccatttccgccggactcgatttcccgtccgttgggccgcaacatgcgtacctgaacagcatcggacgcgcggattatgtctccattaccgatgatgaggcgctggaagccttcaaaacgttgtgccgccatgagggaattatcccggcgctggagtcctcccacgcgttggcgcacgctctgaaaatgatgcgcgagcagccggaaaaagagcaactgctggtggtcaatctctctggccgcggagataaagacatctttaccgtacacgatatcctgaaagcgcgaggggaaatctga

SEQ ID NO: 39805 - DNA, 1359 bp, Salmonella typhi
atgcaaaccgttttagcgaaaatcgtcgcagacaaggcgatttgagtagaagcccgcaaacagcaacagccgctggccagttttcaaaatgagatccagccaagtacacgccatttttatgatgcgctccagggcgcgcgtaccgcctttattctggagtgtaagaaagcatcgccatcaaaaggcgtgattcgcgacgatttcgatccggcgcgtattgccagtatttatcaacattacgcctcggcgatctcggtgctcaccgacgaaaaatattttcaggggagcttcgattttctgccggtcgttagccaaagcgcgccgcagccgattctgtgtaaggattttattatcgatccctatcagatctaccttgcccgttactatcaggccgatgcctgtttactgatgctctcggttctggatgacgaacagtatcgccaactctccgccgtcgcgcacagtctgaaaatgggcgtgctcacggagatcagtaatgacgaagaacgggagcgcgcgatagcgttaggcgcaaaagtggtaggtatcaacaatcgcgatctgcgcgatctgtcgattgatttgaatcgcacccgccagctggcgccaaaactgggccacggcgtgactgtcatcagcgagtccgggattaacacctatggtcaggtacgcgaactgagccacttcgccaacggttttttaattggctccgcgttaatggcgcatgacgatcttaacgccgccgtccgtcgcgtgctgcttggcgaaaataaagtctgcggcctgacccgcgcccaggacgctaaagcggcctgtgacgctggcgcaatatatggcgggttgatttttgtgccctcatctccgcgcgcggttagcgttgagcaggcgcgagaagtgataagcggcgcgccattgcagtatgtcggcgttttcaagaacgctgatatcgccgatgtttgccagaaagccgccgtcctgtcgctttctgccgtacagctacatggcagcgaagaccaggcgtatgtcaacgcgctgcgcgaggcgttgccgcgcaatgtgcaaatctggaaggcgctgagcgttagcaatgcccttcccgcacgcgattatcaccatgtcgataaatacattttcgacaatgggcaaggcggcagcgggcagcgcttcgactggtcactgctacaggggcaaccgctggatgatgtgttactggcgggcgggctggcggccgataactgcgtccaggcggcgcaagtcggctgtgccggtctcgattttaattcaggtgtggagtcacagccgggcatcaaagatgctcgtcttctggcctcggtttttcagacactgcgcgcatattaa

SEQ ID NO: 39806 - DNA, 1596 bp, Salmonella typhi
atggctgatattctgctgctcgataacatcgactcgtttacctggaacctggcagatcagctacggaccaacggtcataacgtggtgatttaccgtaaccatattccggcgcagacgcttatcgatcgcctggcgacaatgaaaaatccggtgctaatgctctcccccggtccgggcattcccagcgaggcaggctgtatgccggagctgctgacccgactacgcggcaagttaccgatcatcggcatttgtctggggcatcaggcgattgtcgaagcttacggcggttatgtcggtcaggcgggagaaatcctgcatggcaaagcctccagcattgaacatgacggtcaggcgatgttcgccggtctggcgaatccgctaccggtcgcgcgttatcattcgctggtcggcagtaatgttcctgccgggctaaccattaacgcccatttcaacggcatggtgatggcggtacgtcatgatgcggatcgcgtttgcggttttcaatttcatcctgagtccatcctgacgacacagggcgcgcgtctactggagcaaacattagcctgggcgcagcaaaagctggaaccgaccaacaccctacagccaattctggagaaactctatcaggcgcaaactctgacgcaacaagagagccatcagttgttttcggcggtcgtccgcggcgaacttaagcctgaacagctcgccgccgcgctggtgagcatgaaaattcgcggcgagcatcccaatgaaattgccggcgccgccactgcgttgctggaaaatgccgccccgttcccgcgcccggactatctgtttgcggatatcgttggtaccggcggcgatggcagtaacagtatcaatatctctaccgccagcgcctttgtcgcggcggcctgtggactgaaagtggcgaaacacggcaaccgcagcgtatccagcaaatcggggtcatccgatctgttggcggcgttcggtattaatctggatatgaacgccgataaatcacgtcaggcgttagatgaactgggcgtctgtttcctgttcgcgccgaaatatcacaccggattccgtcacgcgatgccggttcgccaacagttaaaaacgcgaaccctgttcaacgtactcggcccgctgatcaacccagcgcatccgccgctggcattgattggcgtctatagcccggaactggtgctgccgattgcggaaaccttacgggtactgggctatcagcgcgcggcggtggtacatagcggcggcatggatgaggtttcgctccatgcgccgacgattgtcgcggagctgcatgacggcgaaattaaaagctatcaacttacggcggaggattttggcctgacgccttaccatcaggatcagttggctggcggcacgccggaagaaaaccgtgacattctgacgcggttattacaaggtaaaggcgatgccgcgcatgaggccgccgtcgccgccaacgtggcgatgctgatgcgtctgcatggtcaggaagatctcaaggccaacgcgcaaaccgtgcttgatgttctgcgcaacggcaccgcatatgacagagtcaccgcactggcggcaagagggtaa

SEQ ID NO: 39807 - DNA, 882 bp, Salmonella typhi
atgggagccgccttgagcgacacgaattacgcagtgatttacgatctgcacagtcataccacggcgtccgatggactgttgacgccagaaacattagtacaccgtgcggtagagatgcgagtcggcacgctggcgattaccgatcatgacaccacagctgcgattcctgcggcaagagaagaaatttcacgttgcgggctggccctgaatctgattcccggcgtggagatttcaacggtctgggagaatcatgagattcacattgtgggtctgaatattgatattgcgcacccggcaatgcgcgattttctagcgcagcagacacatcggcgtcaggcgcgtggtcggctcattgcggagcgtctggaaaaagcccatattcccggcgcgtgggaaggggcattgagactggccaatggcggcgcggtgacgcgcggccacttcgcccgctttctggtggagtgcggcaaagccacgaccatggcggaggtttttaaaaaatatctcgcgcgtgggaaaaccggttacgttccgccgcagtggtgtacaatagaacaagctattgatgtcattcatcattctggcggtaaggcggtgttggcccacccgggacgctacgaccttagcgctaagtggctgaaaagattagtggcgcattttgccgaccatcacggcgacgcgatggaagtggcgcagtgccaacaatcacccaatgaacgcacccaactggcgacgcttgcgcgtcagcatcatttatgggcatcgcttggatctgatttccatcagccctgcccgtggattgagttggggcgtaaactctggctgcccgctggcgttgaaggcgtatggcaggcatgggaacagccgcaaatatcacagtga

SEQ ID NO: 39808 - DNA, 876 bp, Salmonella typhi
atgagcgaaaagttacaaaaagtgctggcgcgcgctggccacggctctcgccgtgaaatcgaatccattattgaagcgggacgtgtcagcgttgacggtaaaatcgccacgcttggcgatcgtgttgaagtcactcccggtttgaaaatccgtatcgacggtcacctgatttcggtgaaagagtcggcggaacaaatttgccgcgttctggcctattacaaaccagaaggtgaactgtgtacccgcaatgaccctgaagggcggccaaccgtttttgatcgcttaccgaaactgcgcggcgcgcggtggattgcggtaggacgtctggatgtcaacacctgcgggctattgttgtttaccaccgacggtgaactggcgaaccgcctgatgcatcctagtcgcgaagttgaacgtgaatatgccgtgcgcgtgttcggtcaggtggatgaatcgaaactgcgtgatttaagccgtggcgtacagttggaagatggtccggcggcatttaagaccattaaattcagcggcggcgaaggcattaaccagtggtataacgtgacgctgacggaagggcgcaaccgcgaagttcgccgactgtgggaagcggtaggcgttcaggtcagccgtctgatccgcgttcgttacggcgatatcccgctgccgaaaggcctgccgcgcggcggctggactgagctcgacttcgcgcaaacgaactatctgcgtggtctggtagagctcccgccggaaacctcgtcgaaggttgccgtcgaaaaagaccgtcgtcgtatgaaagcgaaccagatccgtcgggcggtaaaacgccacagccagatagctggcggacgccgctccggtgggcgtaataacaacgggtaa

SEQ ID NO: 39809 - DNA, 762 bp, Salmonella typhi
atgcattaccaaccgaaacaagatctattgcaaaaccgcattattctggtcactggtgccagcgatggcattgggcgggaagccgcgctcacgtatgcgcgttacggcgcaacggtgattctgctgggacgcaacgaagagaaactgcgtcgggtcgcgcagcacattgctgacgagcaacatgttcaaccacagtggtttacgctcgatctgctgacctgcaccgctgaagagtgccggcaagtggccgaccgcatcgccgcgcactatccccgcctggatggcgtcctgcacaatgccgggttactgggggaaatcggcccaatgagcgaacaagatccgcagatctggcaggatgtcatgcaggtaaacgttaacgccacctttatgctcacccaggcgctgttaccgttattattgaagtccgatgccggctcgctggtctttacgtcatcaagcgttggccgtcagggacgcgccaactggggcgcctatgccacctcgaagtttgctactgaaggaatgatgcaggtgctggcggacgaataccagaaccgttctctgcgtgttaactgcattaacccgggcggcacgcgcaccagtatgcgcgccagcgcctttccgacggaagatccacagaaattaaaaacgcctgccgatattatgccgctttacctgtggcttatgggcgacgacagtcgccgtaaaaccggtatgacctttgacgcccaaccgggccgtaaaccaggaatcgcccaatga

SEQ ID NO: 39810 - DNA, 2598 bp, Salmonella typhi
atgggtaaagctcttgtcatcgttgagtccccggcaaaagccaaaacgatcaacaagtatctgggtaatgactacgtggtgaaatccagcgtgggtcatatccgtgatttgccgaccagtggctcagcagctaaaaagagcgccgactctacctccaccaaaacggctaaaaagcccaaaaaggatgaacgtggcgctctcgtcaaccgtatgggggttgacccgtggcacaactgggatgcgcactatgaagtgctgcccggtaaagagaaggtcgtctctgaactgaaacagttggcggaaaaagccgaccacatctatctcgcaaccgaccttgaccgcgaaggggaagccattgcatggcacctgcgggaagtgatcggcggcgatgacgcgcgctacagtcgcgtagtctttaacgaaataaccaaaaatgccattcgccaggcgtttgaacagccgggcgagctgaacattaacagggtcaacgcccagcaagcgcgccgctttatggaccgcgtggtaggctatatggtctcgccgctgctgtggaaaaagatcgcccgtggtttgtcggcaggtcgcgttcagtctgtcgcggtccgtctggtcgttgagcgcgagcgcgagattaaagcgtttgttccggaagagttctgggagattgacgctaatacgacgacgccgtctggcgaggcactaccgctacaggtcacgcatcagaacgacaagccattccggccggtaaatcgcgagcagacgcttgccgccgtcagcttgttggaaaaagcgcgctatagcgtactggagcgtgaagacaaaccgaccagcagcaaacctggcgcgccgtttatcacctccacgctacaacaggcggccagcacccggctgggctttggcgtgaagaaaaccatgatgatggcgcagcgtctgtatgaggcgggctacatcacctatatgcgtaccgactccaccaacctgagtcaggatgcggtcaacatggtgcgcggctatattggcgataatttcggcaagaaatacctgccggataacccgaaccaatacgccagcaaagaaaactctcaggaagcgcacgaagcgatccgtccttccgacgttgctgtcatggcggagtcgctgaaagacatggaggctgacgcgcagaagttgtatcagctaatttggcgtcagtttgtcgcctgtcagatgacgccagcacaatatgactccactacgcttaccgttggcgcaggcgaattccgtctgaaagcgcgtgggcgtattttgcgctttgacggctggacaaaagtgatgccggcgctgcgtaaaggcgatgaagatcgcacattgcctgccgtgaataagggcgatgcgctgacgctacttgaattgacgcctgctcagcactttactaaaccgccagcccgtttcagcgaggcttctctggttaaagagcttgagaagcgcggtattggtcgtccgtctacctatgcgtcgattatctcgaccattcaggatcgcggctatgttcgcgttgaaaaccgtcgcttctatgcggaaaaaatgggtgaaatcgtcaccgaccggctggaagaaaacttccgcgaattgatgaactacgattttaccgcgcagatggaagatagtctggatcaggttgcgaatcaccaggccgagtggaaagcggtgctggataacttcttcagcgattttactcagcagctcgataaagccgagaaagatccggaagaaggggggatgcgtcctaaccagatggtgctgaccagcatcgactgtccaacctgtggccgtaaaatgggaattcgtactgccagtacgggggttttccttggttgttcaggttatgcgctttcgccgaaagagcgttgtaaaacgaccattaacctggtgccggaaaatgaagttctgaacgtgctggaaggcgacgacgccgaaaccaacgccctgcgcgccaaacgtcgctgtcagaagtgcggtacggcgatggacagctatctgatcgatccgaagcgtaaattgcatgtgtgtggtaataacccgacctgtgacggctacgagattgaagaaggcgagttccgcatcaaagggtatgacggcccgatcgttgagtgtgagaaatgtggttccgaaatgcacctgaaaatggggcgttttggtaagtacatggcctgtactaacgacgaatgtaaaaatacccgtaagatcttgcgtaacggcgaagttgcgccgccgaaggaagatcctgttccattgccggaactgccgtgtgaaaaatcggacgcgtactttgtgctgcgcgatggcgccgcagggatattcctggcggccaatacgttcccgaaatcacgtgaaacgcgcgcgccattagtcgaggagctttaccggttccgcgatcgcctgccggaaaaactgcgttatctggcggatgcgccgcagcaggatccagaaggcaataaaaccgttgttcgctttagccgcaaaacaaaacagcagtacgttgcggcggaaaaagacgggaaggcgacgggatggtcagcgttcttcgtcgacggcaagtgggttgaaggtaagaaataa

SEQ ID NO: 39811 - DNA, 765 bp, Salmonella typhi
atgctttcaattgcgaggcgcaccgcggcaggcgccgccctgttgcttatcatgccgcttgccgtatgggtatcaggctggcagtggcagccaggacatcaggtctggtggctaaaaacgctattctggataacggaaaccgtgaccaaaccctggggcgttatcacgcatgtgattctttgtggatggttcttatggtgcctgcgatttcgcctgcgcgccgccattatgctgtttgcgattctcggtggggcgattatcgtcgggcagggcgtgaagtcatgggtaaaggagcgcgtacaggagccgcggccatttgtggtctggcttgaaaaaacgcaccatattcccgtcgatgagttctacactttaaagcgtacagaacgcggacatttagtgaaagagcagttggccgggcaacagaacatccccgttttcctgcgtcagcactggcaaaaagagacgggctttgcgtttccctccggacacaccatgtttgcagcgagctgggcgcttttggccgtgggtctgttatggccgcgcagacggactttcaccatcgcgtttttgttagtctgggcgaccggcgtaatgggcagccgtttgcttctgggaatgcactggccgcgagatttagtggtcgccacgctcatctcctggctattagttaccctggcgacctggctggcgcagcgaatttgcgggccgcttatgccgcctcgcgaagaagcgcaagaaattgctgaacgcgagcaggaaagctga

SEQ ID NO: 39812 - DNA, 219 bp, Salmonella typhi
atgatgaattgtccaaagtgtggacactcagcgcacactaggagcagctttcaggttacggacagcacaaaagagcgttactgccagtgccagaacattaactgtggtagcacctttgtcacccatgaaacggtagtgcgctttatagttacgccagcattggtaaataacgctcctccacatccaacagtgagtgggcaagggcacatgaatttttaa

SEQ ID NO: 39813 - DNA, 1983 bp, Salmonella typhi
atgatgaaacagattcaggaacaaacggcgctaaatccccttcactctcactggcgtctggctgatgaccgcaacgtgctgtatctctccccgacaggtgaaacggatgcagaaaaaacggttgagctatcgccggagcaagccgggcgtatccgggaaataacggcgattacgtccagtctgctgataacgttgttgatagaaaaacaggttaccgctgtgcacctggtaggccgtaagattaataaccgtgaatgggctggcagcctggcaacctggcctgatacgcctgccgtcgcgccaacgcaggcgcaggaactctcttttgccgagcaaatcgtatcagaagccaactcagtcattgcgatactggatagtcggggaaaaatctgtcgatttaatcggttatgcgaagagtacacgggcttaaaagagcgagatgtaattggtcaaagcgtatttaaattatttatgagtcgccgggaggcggttgcctcccgacactacattgagaatttttttcgcaatggcaatgcctatgaaatcgaacgctggataaagactcgtaaaggccaacgtctgttcttatttcgtaataaattcgtccataacggtagcggaaaaaacgaaatctttctgatctgcgcaggcacggatatcaccgaagaaaggcgggctcaggagcgtttacgcatactggcgaatacagacaccgtcaccggcctgcccaatcgcaatgctattcatgaatttattaatcatgctattgcctcggctggcgagtcgcaggtgggtatcgtttatctcgatctggataacttcaagaaaattaatgacgcctatgggcatatgtttggcgatcagctcttacaggccgtttcactggcgctgttgagttgtctggaggaagatcaattgctggccagactggggggagatgaattcattgtcctcgttgcccatacgtctcaggccgcgctggaagcagtagcctcacgaatccttacccggctgcggcaaccgtttcgcattggactcattgaagtttacacgggatgcgccattggcatttcgttggccccccggcacggacaggacagcgaaagtctcattcgcactgccgacaccgcaatgtataacgccaaagaaggcggccgcggtcagttctgcgttttttcgccggaaatgaatcagcgcgtatttgactatcactggctggatacaaacctgcgaaaagcgctggaaaacgaccagttacttattcactatcagcccaaaattacctggcgcggcgaagtacgtagcctggaagcgctggtacgctggcaatcgccggaacgcggattaattccgccgctggagttcatctcatacgccgaagagtcaggactcatcgtcccgctgggccgctgggtgattctggatgtagttcgccagattgcgaaatggcgcgataaggggattaacttgcgcgtagccgttaacttttcggcgcgacaactggccgaccagacgctttttactgcgcttaaacaggctttgtacgatctgaattttgagtattgcccaatcgatgtcgagctaacggaaagctgcctgatcgaaaacgacacgctggcgctatcggttatccagcaatttagtcagctcggcgcccagattcatctggatgattttggcacagggtattcttcgctttctcaactcgcccggttccctattgatgccgttaaactggatcaggctttcgtcagagatatccataagcaaccgctgtcgcaatctctggctcgggcgattgtcgcggtggctcaggcgctaaatttacaagtgattgccgaaggcgtggaaaatgctaaagaagatgccttcctgacaaaaaacggcgtcaatgaacgacagggctttttattcgccaaacctatgcccgccgtttcttttgaacgctggtacaaacgttatcagacgaaaaaaatgcgttaa

SEQ ID NO: 39814 - DNA, 1935 bp, Salmonella typhi
atgtttcaggacaacccgctgctagcgcagcttaaacagcaactgcattcccagacgccgcgcgctgaaggggtcgtaaaagccacggaaaaaggctttggcttccttgaggttgacgcgcaaaaaagctacttcattcctccgccgcagatgaaaaaagtgatgcatggcgatcgtatcgtcgcggtcatccacacggaaaaagaacgtgagtctgccgagccggaagaactgatcgaaccgttcctgacgcgctttgtgggaaaagttcagggtaaaaatgaccgcctgtccatcgtgccagatcatccgttgctgaaagacgcgattccctgccgcgccgcgcgcggcgttcagcatgagttcaaagaaggtgactgggcggttgccgaaatgcgccgccatccgcttaaaggcgaccgttcgttttacgccgatttaacgcagtacatcacctttgccgacgatcactttgttccctggtgggttacgcttgcccgccataacctggaaaaagaagcgccgaacggcgtagcgacggagatgctggacgaagggctggagcgccaggatcttaccgcgctgaatttcgtcactatcgatagcgccagcactgaagatatggatgacgcgctttatgctgaggaattagcggacggcagactccagcttacggtggctatcgccgatcctaccgcctggattgccgaaggcagtaagctggataacgccgcgaaaattcgcgccttcaccaactacctgccgggcttcaatattcctatgctgccacgtgagctgtctgacgatctgtgttcgctgcgcgccaacgaagtgcgtccggcgctcgcctgtcgcatgatcatcgccgcggacggcaccattgacgatgatattgccttttttgcggccaccatcgaatcgaaggccaagctggtgtacgacaatgtctccgactggctggaaaataacagcacctggcagccggagaacgaaggcattgcccagcagattcgtctgttgcaccgtatttgtctaagccgcagtgagtggcgtcatcatcatgcgttagtctttaaagaccgcccggattaccgctttgtgcttggcgaaaaaggcgaagtactggatattgtggcggaaccgcgccgtatcgctaaccgtatcgtagaagagtcgatgatcgccgctaacctttgcgccgcgcgcgtactgcgcgataagctcggtttcggtatttacaacgtacatacgggcttcgatcccgcgaatgccgacgcgctggccgcgctgctgaaaacgcatggtctgcatgtcgatgccgaagaggtgctgacgctggaaggcttctgtaaactgcgtcgcgaactggatgcgcagccctccggtttccttgacagccgcattcgtcgcttccagtcttttgcggaaatcagcaccgagccggggccgcatttcggtcttggtcttgaggcttatgccacctggacctctcccatccgtaagtatggcgatatgattaaccatcgcctgctgaaagcggtcatcaagggggaagctattgcgcgtccgcaggaagatatcacccagcaaatggcggaacgccgtcgcctgaaccgcatggcggagcgcgatgtcggcgactggttatatgcacgcttccttaacgataaggcggggacaaatacccgtttcgcggcagaaattattgacgtcagccgcggtggtatgcgtgtgcgactggtcgataacggcgctatcgcctttatccctgccccgttcctgcacgccgttcgcgatgaactggtatgcagccaggaaaacggtacggtacagattaaaggtgagacggtttataaagtgacggatgtcattgatgtcactattgcggaagttcgcatggaaacccgcagcattattgcccgaccggcagcgtaa

SEQ ID NO: 39815 - DNA, 921 bp, Salmonella typhi
atggaacaatgccgaaaagcgggtaaaagccactggtatcatgaaacacaatccactatgtcgtcacaaactccgctttcgctgatgccggaagccgcgtatgttaacgatcgatttttactggatttagcggtagcagaaaccgcgttgacgccttttgagtcatggttaaagccagctcgccagttggcggatgtcttatttccccgcacggttctcaacgaccggcttcatacgtttagcgcctatgaacgtatgagcaccgcccttaccgccgctcaggtatttggggttcagcgtttgtgccgccattatgccgcacgtctggcgccgctacccggccctgacgcctcaagagaaagcaatcaacggctggcgcaaattacgcaatacgctcgtcagcttgccggctccccctccgttatcaatacgcgagcccgcgaacagcttgcagaggtgggattaaccgcccgggataccgtactcatcaatcagatcattgggtttatcggttttcaggcgcgagtagcggcgatatttcaggcgttttgccgtctgcccgtgcgcgagctgcccggccaggagatgcagcgctttgccagggccgcgcggtttcaaaacccccagacgacatggcggcccgccgccagtctggtagaatatcctctcgcccataccaaagttcggcggcaatattcgtcttcacaatgccaaataatggcgccggtactcatgcgcgatccgtcttcattcgcgttactcgaacgcatactgaccagcacattacacactgcgtcgcccccttctttacttccacttatcacgctcctcacatcacgtatcaacggcagcgccgcctgctttaacgaacaggcaacccaacctggcgcgtggcgccgtgctgtcatcacgttacgctag

SEQ ID NO: 39816 - DNA, 789 bp, Salmonella typhi
atgggttttctttccggtaagcgcattctggtcactggcgtggccagtaaactgtccatcgcctacggtatcgcacaggcgatgcaccgcgaaggagctgaactggcgttcacctaccagaacgacaaactgaaaggccgcgtagaagaatttgctgcccagctgggttccagcatcgttttaccgtgtgatgtcgctgaagatgccagcattgacgctatgtttgcggagctgggtaacgtttggccgaaatttgacggtttcgttcactcgatcggtttcgcgcctggcgatcagctggacggcgattatgttaatgcggttacccgcgaaggctttaaaatcgctcacgatattagctcttacagttttgttgccatggcgaaagcctgccgcaccatgctgaatccgggttctgcgctgttgaccttgtcttatctgggagcggagcgcgccatcccgaactacaatgtcatgggtctggcgaaagcctctctggaagccaacgtgcgttatatggcaaacgctatgggaccggaaggggttcgcgtcaacgccatctctgcgggcccgatccgcacgctggcggcgtccggtattaaagacttccgtaaaatgctggcgcattgtgaagccgttacgccaattcgtcgcaccgtgaccattgaagatgtgggtaactcagcggcgtttctgtgttccgatctctcggcaggcatttctggcgaagtcgtccatgttgacggcgggttcagcattgcggcaatgaatgaactggaactgaagtaa

SEQ ID NO: 39817 - DNA, 807 bp, Salmonella typhi
atggtggaaactctgcttgaagtgcgcaacctgagtaaaacctttcgctaccgaacaggatggtttcgccgccagaccgtcgacgccgtgaaaccattaagctttacgcttcgtgagcgtcagaccctggccattatcggcgaaaacggttccggcaaatccacgttggcaaagatgctggccggcatgattgaacccaccagcggcgagcttcttattgacgatcatcccctgcattacggcgactattcgtttcgaagccaacgtattcgaatgatttttcaggacccttcaacgtcactgaatccacgtcaacgtatttcacagattcttgacttccccctgcgccttaataccgttctggagccggaacagcggcgcaaacagattgtcgagacgatgcgtatggtggggctattgcccgatcacgtgagctactacccgcatatgctggcgccgggacagaaacaacgtctgggtctggcccgcgcgctgattttacgcccaaaagtcattatcgcggacgaagcgctggcttcgcttgatatgtccatgcgctcgcagctcatcaatctgatgcttgaattgcaggaaaaacaaggcatctcctatatctacgtcacgcagcatatcggcatgatgaaacatattagcgatcaggtattagtgatgcatcagggggtagtggttgaacgcggcagcaccgccgatgtgctcgcctctccgctacatgagcttacccgccgtttaatcgcaggccattttggcgaggcgctgaccgctgacgcatggcgaaaggatcgctaa

SEQ ID NO: 39818 - DNA, 1557 bp, Salmonella typhi
atgaaagtaaaactgcttgctgccggtattttgttcacgctgccgttctgggcctgcgccaaagatgtcaccattatttacaccaacgatctacacgcccatgtggagccttataaagtaccgtggattgctgacggtaaacgcgatattggcggttgggccaatatcactacgctggtgaagcaggaaaaagccaaaaataaggcgacgtggttttttgatgccggagattactttaccggaccgtatatcagcagcctgacgaagggtaaagcgattatcgatattttgaataccatgcagtatgacgctgccactatcggtaatcatgagttcgatcatggctgggacaatacattgttgcaactgagccgggcgaaattccctatcgtacagggcaatattttttatgaggacagcagtaaatccttctgggataagccgtacaccattgttgaaaaagatggcgtcaagattggcgtaatcggcttacacggtgtctttgcttttaatgatacggtttctgccgcgacgcgcgtgggcattgaggctcgcgatgaaattaagtggctgcaacgttacattgatgaacttaaaggtaaagtcgatctgaccgtcgcgctgatccacgaaggcaccccggcccgccagtccagcatggggaataccgatgtgcgacgcgcgctggataaagatattcagaccgcaagtcaggtaaaagggctggatattttgattaccggccacgcgcatgtcggtacgccggaaccgattaaagtcggtaatacgctgatcctctcaacggacagcggcggtattgatgtcggcaaactggtgctggactaccaggaaaagccgcatcagtttaccgtgaagaacttcgagctgaagaccatttttgctgatgagtggaagcccgatccgcaaacgaaacaggtgatcgacggctggaacaaaaagctcgataaagtcgtgcagcaaacggtggcgcagtcgccggttgagctgacccgcgcgtatggcgaatcgtcgtcgctggggaatctggcggcggatgcgctgctttttacggcggggaaagacacccagttagcgcttactaactctggcggtatccgcaacgaaatcccggctggtgcggtgacgatgggggcggtaatcagtaccttcccgttccctaatgaactggtcacgatggatttaaccggtaaacaattgcgcagcctgatggagcatggcgccggattaagcaacggcgtgttgcaggtgtctaaagggctggagatgaagtatgacagcagcaaacctatcggccagcgggttaccgtgctgacgctcaatggcaagccgattgatgatgcggcggtttatcacatcgctaccaacagcttccttgccgacggcggcgatggttttgcggcgttcacggaaggccaggcacggaacacctccggcggctactatgtgtcgaatgcgatagttgattactttaaggcgggcaacaccatcacggatgagcagctcaaaggaatgcgtgttgcggatgtgaagaagtaa

SEQ ID NO: 39819 - DNA, 318 bp, Salmonella typhi
atggctgaatggagcggcgaatatatcagcccatacgctgagcacggtaagaagagtgagcaagtcaaaaaaattacggtttccattcctctgaaggtgttaaaaatcctcaccgatgaacgtacgcgtcgtcaggtgaacaacctgcgccacgccaccaacagcgagctgttgtgtgaagcatttctgcacgcctttaccgggcaacccttgccggatgatgccgatctgcgaaaagagcgcagcgatgaaatcccggaagcggcaaaagagatcatgcgtgagatggggattgacccggaaacgtgggaatactga

SEQ ID NO: 39820 - DNA, 531 bp, Salmonella typhi
gtgacaacaatagtaagcgtacgccgtaacggccacgtggtaatcgccggtgatggtcaggccacactgggtaacacagtaatgaaaggcaacgtgaagaaagtccgccgcctctacaacgacaaggtcattgcgggctttgcgggcggtactgctgatgcattcacgctgttcgagctgtttgaacgtaaactggaaatgcatcaggggcacctggtcaaagccgccgttgaactggcgaaagactggcgtaccgaccgtatgctacgcaaactggaagcgttgctggccgtcgcggatgaaaccgcttcgctcatcatcacgggtaacggcgatgtcgtgcaacctgaaaacgatttaattgctatcggctccggcggtccttatgcccaggctgccgctcgcgctctgttggaaaataccgagctcggcgcgcgcgaaattgctgaaaaggcgttggatattgcaggcgatatctgcatttacaccaaccatttccacaccattgaagaattgaccgccaaagcgtaa

SEQ ID NO: 39821 - DNA, 846 bp, Salmonella typhi
atgagtcaaacatcaaccttaaaaggccagtgcattgctgaattcctcggtaccgggttgttgatttttttcggggtgggttgtgtcgctgcgcttaaagttgccggagctacttttggacagtgggaaatcagcgtcatctggggtctgggagtagcgatggctatctacctgacggcaggtgtttctggcgcacacctgaacccggcagtgaccatcgcactctggctatttgcctgtttcgacaaacgtaaagttgttccttttattatttctcaagttgccggcgccttttgcgcagcggcgttagtttacgggctttattacaatctttttgtggacttcgaacaaacccaccatatcgtccgtggcagcgttgaaagtctcgatctcgcaggcattttctcaacttacccgaatcctcatatcaattttgtgcaggccttcgcggttgaaatggtgattaccgctattctgatggggctgattctggcgctgaccgacgacggtaacggcgtacctcgcggtccgcttgcgccactgctcattggtttactgatcgccgttatcggtgcctctatggggccgttgaccgggtttgcgatgaatccggcgcgtgactttggccccaaaatgttcgccgggcttgccggctggggtgaaattgcgtttaccggcggtagagacattccttacttcctggtgccactgtttggccccatcgtcggcgccattctgggcgcgtttgcttatcgcaaatttattggccgtcatttgccgtgcgatatctgcgtcgtggaagagaaggactccaccgcggccacacaacaaaatgcttcgctgtaa

SEQ ID NO: 39822 - DNA, 1506 bp, Salmonella typhi
atgactgaaaaatatatcgttgcgctcgaccagggtaccaccagctcccgcgcggtcgttatggatcatgacgcgaatatcgtcagcgtatcacagcgtgaatttgagcaaatttatcctaagccaggctgggtagaacacgacccgatggaaatttgggcgtctcaaagctcaacgctggtagaagtgctggctaaggccgatatcagttccgatcagattgccgctatcggtatcaccaaccaacgtgaaaccgcgatcgtctgggaacgtgaaaccggcaaaccgatatacaacgctattgtctggcagtgccgtcgtaccgccaatatttgcgaacagcttaaacgcgacggcctggaagattacatccgcgacaataccggtctggtcgtcgacccgtacttctctggcactaaagtgaaatggatccttgaccatgtggaaggttcgcgcgaacgcgcgaagcgtggcgagctgctgttcggtacggtggatacctggcttatctggaagatgacgcagggccgcgtccacgttacggattacaccaacgcctcacgaaccatgctgttcaacatccatgatttggactgggacgataaaatgctggacgtgctggatatcccacgcgcgatgctgccccaggtacgtaaatcctccgaagtctacggccagaccaatattggcggtaaaggcggtacacgtattcctatcgccgggattgccggggatcagcaggccgcgctcttcggccaactgtgcgtaaaggaaggaatggcaaagaacacctacggcaccggctgctttatgctgatgaacaccggcgagaaagcggtaaaatcggaaaacggcctgctgaccaccatcgcctgcggcccaagcggcgaagtcaactatgcgctggaaggtgcggtgtttatggcgggagcgtccattcaatggctgcgtgatgaaatgaagctcatcagcgacgcattcgactccgaatatttcgccacgaaagtgaaagataccaacggtgtctacgtggttccggccttcaccggtctgggcgcgccgtactgggatccgtatgcccgcggcgccatttttggcctgacccgcggcgtgaactctaatcacattatccgcgcgacgctcgaatccatcgcttaccagacccgcgacgtactggaagcgatgcaggccgactccggtatccgcctgcacgctctgcgtgtggacggcggcgcagtggccaacaacttcctgatgcagttccagtcagatattctcggcacgcgggtggaacgcccggaagtgcgcgaagtgaccgcgctgggcgccgcctatctggctggcctggccgtcggttactggcagaacctggacgagctgcaggaaaaagccgtcattgagcgagaattccgccccggcattgaaaccaccgagcgtaactaccgttacagcggctggaagaaagcggttaaacgcgcaatggcgtgggaagagcacgacaagtaa

SEQ ID NO: 39823 - DNA, 1101 bp, Salmonella typhi
ttgtgcggaggcaactccgcacacacatcaattattccctccctcccctgtgctacactgcgcgccactcctttttgctacgagtttgttatgagacgagaacttgccatcgaattttcccgtgtgaccgaagcggcggcgctggctggctacaaatggctgggacgcggcgataaaaataccgcggacggcgcggcggtcaacgccatgcgtatcatgctcaaccaggtcaacattgacggcaccatcgtgattggcgaaggcgaaatcgacgaggccccgatgctctatatcggcgagaaagtcggtaccggccacggcgatgcggtagatatcgccgtcgatccgattgagggcacgcgcatgacagcgatgggtcaggcgaacgcgctggcggtactggcggtcggcgataaaggctgcttcctgaatgcgcccgatatgtatatggaaaaactgattgtcggtccgggcgccaaaggggcgatcgatctcaatctgccgctggcggataacctgcgcaacatcgcggatgcgctgggtaaaccgcttggcgatctgaccgtgaccattctggcaaaaccgcgtcatgacgaggttatcgcagagatggccaaactgggcgtacgcgtgtttgccattcctgacggcgacgtcgcggcctcaattctgacctgtatgccggatagcgaagtcgacgtgctgtacgggattggcggcgcgccagaaggcgtggtatccgcagcggtgatccgcgcgctggacggcgatatgcagggacgtctgctggcgcgccatgacgtgaaaggcgacagcgaagaaaaccgccgcattggcgaacaggaactggcgcgctgcaaagcaatggggattgaagcgggcaaggcgttatgcctgggcgacatggcgcgtagcgataacgttattttctctgcgaccggcatcacgaaaggcgatctgctggaaggaattagccgaaaaggccatatcgccacgacggaaacgctgctgatccgcggcaaatcacgcaccatccgccgcattcagtctatccactatcttgatcgtaaagatcctgatgtgcaggcgcatatcctctag

SEQ ID NO: 39824 - DNA, 1401 bp, Salmonella typhi
atggccaaaacgttatacgaaaaattatttgatgcccacgtggtctttgaggcgccaaacgaaacgccgctgctgtacatcgatcgccacctggtacacgaagtgacctcgccgcaggcgtttgacggtctgcgcgcgcaccatcgtccggtacgtcagccggggaaaaccttcgccacgatggatcacaacgtctcgacgcagactaaagacattaatgcttctggtgaaatggcgcgtatccagatgcaagagctgattaagaactgtaacgagttcggcgtcgagctgtatgacctgaatcacccatatcagggcatcgtccatgtgatggggccggaacagggcgttaccctgccgggtatgaccatcgtctgcggcgactcccacaccgctacccacggcgcgtttggcgcgttggccttcggcatcggcacttctgaggtagaacatgtactggcgacgcaaaccctgaaacaggggcgcgctaaaaccatgaagattgaagtcacgggcaacgccgcaccgggcattaccgccaaagacatcgtgctggcgatcatcggtaaaactggtagcgccggcggcaccggacacgtggttgaattttgcggcgacgctatccgcgcgctgagtatggaaggccgcatgacgctgtgcaatatggcgattgagatgggcgccaaagccggtctggtcgccccggatgaaaccactttcaactacgtaaaagggcgtttgcacgcgccgaagggccgcgattttgacgaagccgtcgagtactggaaaacgctgaaaaccgatgacggcgcgacctttgatactgtcgtcaccctgcgagcagaagagatcgcgccgcaggtgacctggggcactaatccgggccaggtgatttccgtcaccgacatcatccccgatcccgcctcttttagcgatccggttgagcgcgccagcgccgaaaaagcgctggcttatatgggcttacagccgggcgtaccgttaacagacgttgctattgataaagtctttatcggctcttgtaccaattcgcgtattgaagatttgcgcgcggcggcggaagtcgccaaagggcgcaaagttgcgcctggcgtgcaggcgctggtggtgccgggttcaggtccggtgaaagcgcaggcggaagcggaaggtctggacaagatctttatcgaagcaggatttgaatggcgcttaccaggctgttccatgtgcctggccatgaataatgaccgcctgaacccgggcgagcgctgcgcctccaccagcaaccgtaactttgaaggtcgtcagggccgcgggggtcgcacgcatttagtcagcccggcgatggccgccgctgccgccgttaccggccacttcgccgatattcgcagcatcaaataa

SEQ ID NO: 39825 - DNA, 495 bp, Salmonella typhi
atgatgcgccggattttatcggtattactggaaaacgaatctggggcgttatcgcgggttatcggcctcttttcgcaacgcggatataatattgaaagcctgaccgttgcgccgacagacgatccgacgttgtcgcgcatgactatccagacggtaggcgatgaaaaagtgcttgagcaaattgaaaagcaactgcacaagctggttgatgtgctgcgcgtcagcgagctgggacagggagcgcacgttgagcgggaaatcatgctggtgaaaatccaggccagcggctacggacgggaagaggtgaagcgtaatacggaaattttccgtggtcagattattgacgttacgccaacgttgtataccgttcaactggcgggcaccagcgataaactggatgcttttctggcctcgctgcgcgatgtggcgaaaattgttgaagtggcgcgttcaggcgtcgtcgggctttcgcgcggcgataaggttatgcgctga

SEQ ID NO: 39826 - DNA, 459 bp, Salmonella typhi
atgttccggggggcaacgttagtcaatctcgacagtaaagggcgcctgaccgtgccgacccgttatcgggagcaactgatcgagagcgctaccggtcaaatagtatgtaccattgacatccatcacccatgcctgctgctttaccccctgcctgaatgggaaattattgagcaaaagttatctcgtctgtcgagcatgaacccggtagaacgtcgcgtacagcgtttactgttgggccatgccagtgaatgtcagatggatggtgcaggtcgattactgatcgcgccagttctgcggcaacatgccggactgacgaaagaagtgatgctggttggacagttcaacaaatttgagctgtgggatgaaacgacctggtatcaacaggtcaaggaagatatcgacgctgaacagtcagctaccgaaacgttatcggagcggctgcaggacttgtctctataa

SEQ ID NO: 39827 - DNA, 942 bp, Salmonella typhi
atgatggaaaattttaaacacactacggtactgttggatgaagccgttaatgggctgaatattcgtccggatggtatctatattgatggcacatttggtcgcggcggccactcgcgcctgatcctctcgcaactgggcgaagaggggcgcttgctggcgatcgatcgcgatccgcaggcgatcgccgttgcgcagaccattaatgatcctcgcttctccatcattcatggacctttttccgcgctggctgattatgtcgccgagcgcgagcttaccggcaagattgacgggatccttctcgatcttggcgtctcttctccgcagcttgacgatgcggagcgcggtttttcatttatgcgcgacggtccgctggatatgcgaatggacccgacgcgcggccagtctgccgccgagtggttacaaacggcggaggaggcggatatcgcctgggtgctgaaaacattcggcgaggagcgttttgccaaacgtattgctcacgccattgttgagcgcaatcgcgaacagccgatgacccgcaccaaagagctggcggaagtggttgcggcggcgaccccggtaaaagacaaattcaaacatcccgcgacccgtaccttccaggcggtgcgcatctgggtaaacagtgaactggaggagatagagcaggcgctaaaaagctcgctcagcgtactggcctcaggcgggcggctttcaatcatcagtttccactcgctggaagaccgtattgtgaaacgctttatgcgtgagcaaagccgcggtccgcaggtaccggcgggattaccgatgacggaagcgcagctcaaaaaactgggcggtcgtgagttacgagcgttaggcaagttgatgccgggtgaaaaagaggtagctgaaaatcctcgggcccgtagttcagttctgcgtatcgcagagaggacgaacgcatga

SEQ ID NO: 39828 - DNA, 876 bp, Salmonella typhi
atggctgatttagatgatattaaagatggcaaagattttcacaccgataaaccacaaactaacactttgttctcattaaaaggctgtggcgcgctggattggggaatgcagtccagactggcgaggatttttaatcccaggaccaggaaaacggtcatgctggcctttgaccatggatatttccaggggccgacaaccggacttgagcgtattgatatcaatattgcgccgctctttgaatatgctgatgtcttaatgtgtactcgcggcatattacgcagtgtggtacctccggcaatcaataaaccagtcgttttacgcgcgtccggggcaaattctattctcactgaattaagcaatgaggcggttgcggtggcgatggatgacgctgtgcggttgaatagctgtgctgctgccgcacaggtttatattggtagtgaacatgaacatcagtcgattaaaaatattattcaactgattgatgccgggttacgcgtcgggatgccaataatggcagtgaccggggtgggtaaagatatggctcgcgaccagcgttatttttcactggcaacgcgtatcgctgcggaaatgggggcgcaaattatcaaaacgtattatgtcgataaaggttttgagcgtattgcggcaggttgtccggtgccgattgtcatcgccggcggtaaaaaactgcctgaacgtgaagcattggaaatgtgctatcaggcgattgaccagggggcttctggcgtagatatggggcgtaatatattccagtcagaagatccggtagccatgattaaagcggtacatgctgtcgttcatcataacgaaacagcagagcgtgcttatgagctgtttttgagtgagaaaggttaa

SEQ ID NO: 39829 - DNA, 1044 bp, Salmonella typhi
atgttgaaattcatccaaaataaccgggaagcgacggcactgctggcaatagtctgtttattcgtgtttcttggcgcgctggatagccagtatttgagcgtgcaaacgctgacaatggttttcagtagcgcgcaaattttgatgctgttggcgattggcgcgacgatggtaatgctcacccgcaatattgatgtatcggtgggctcgacgacaggaatgtgcgcggtattgctgggagtaatgttaaacgccggctatagcctgccggtcgcctgcctggccacactaatattaggaattgtcgccggattttttaatggcgtactggttgcctggttgaagatacccgccattgtcgccacgctgggaacgctgggcttgtatcgtgggatcatgctgctatggacagggggaaaatggattgaaggattacccgcaggcttaaagcaactctctgctccggtgtttctgggaatttccgcaatcggctggtttaccctggtgttagcgctgcttatggcctggctcctggcgaaaaccgcctttggccgcaatttttacgccaccggcgataacctgcagggcgcccggcaattgggtgtccgtaccgagatggtacgcatcatggcattttcacttaatggcggtatggcggcattggctggaatcgtgtttgcctcgcagattggcttcattcccaatcaaaccggcacggggctggaaatgaaagccatcgcggcctgcgtattggggggaattagcctgttaggcgggtcaggcacggtcatcggcgctattctcggcgcttattttcttacgcaaatcgatagtgtgttagtgctgctgcgcatccccgcctggtggaacgattttattgctggcctggtattgttgggcgtactggtattcgatgggcggctgcgttgcgcattacaacgcaatctgcgccgccagaaatatgcccgttttatatcaccacccactccactacaggcggaagcaaaaacgcacgcacaacagaataaaaacaaagaggtggcatga

SEQ ID NO: 39830 - DNA, 795 bp, Salmonella typhi
atgaatattttgaaaaataattcttattattttatgaaactcattaccgtctgtgagttaattattttattgatgtcacgcgatatcaaaacacgctataacggtaatttactaaactatatgatggtgctggccgtaccactggtatggatatccattaccgttatttcttttcaatatttaaatcgctcggtgccaatatccactgacgatatcagttttgttattgcagggatattaccgtatctgttatttcgttataccattaccgcaaccatgcgaacccattcattctctacatcgttagcggttgtctcgcaggttaagaaaagacatgtgattttttctcttgccgcaatcgaatttgttaatgcagttatcatttatattattatttcattaattaactttcttatattctcccgttgggaggcccaaaaaccgttcctgatttttgaagggatggttatcgcatggcttctggggttatcgtttggttacttttgtgacgcactgtctgaacggtttccgctggtctacaaagctgttcctgtgatgctaagaccgatgtttttgatttcggctgtcttttatacggcgaatgaattgccttattcattattaagcatattcagctggaaccctctactacatgctaatgagatagtcagagaaggtatgtttgaggggtatcactccttgtaccttgaacctttttaccctctggcattttccgcaacgttattcctcgcgggcctcatttttcacctgatttgtgacactgaaaatcactga

SEQ ID NO: 39831 - DNA, 960 bp, Salmonella typhi
atgagcgataatacgttggtatctgattatggaatgtgcgaagaagagcaggtggcgcgtattgcctggttctactatcacgatggattgacgcagagtgaaatcagcgagcgtctggggctaacccggctaaaggtttctcgtctgctggagaaagggcatcagtccggtattattcgcgtacaaatcaactcccgtttcgaagggtgtcttgagtatgaaaatgccttgcgtaaccacttcgcattgcagaatatccgcgtgctgccggcattacccgatgccgatattggtctgcgcttaggaatcggcgccgcccatatgttgatggagtcactgcggccacagcaactgctggccgtcggctttggcgaagccacgatgaccacattaaaacgcctcagcggatttatctcggcgcaacaaatccgactggtcacgttatccggcggcgtggggccgtatatgaccggaataggccagcttgatgccgcttgtagcgtaagtattatgcccgcgccgctgcgcgcatcatcgcaggaaattgcctgcacgctgcgcaatgaaaatagcgtgcgggatgtgatgctcacagcgcaagctgccgatgccgccatcgtggggattggggcaattaaccagaaagatcaagccagtatcttaaaatccggctatatcactcagggtgaacaactcatgattggccgcaaaggcgcagtaggcgatattctgggctatttttttgatgctcatggcgaaattattccagacatcaaaatccataacgaattaattggcctgaagttaaattcactttccacgatcccaactgtgattggcgtcgccggcggcgaacaaaaagcagaagctattattgccgctatgcgcggtaactatatcaatgcgctggttaccgatcagaaaaccgcagggaaaataattcaacttattgaaaaataa

SEQ ID NO: 39832 - DNA, 1488 bp, Salmonella typhi
gtggcagatcgtaatttgcgcgaccttcttgctccgtgggtggctggactacccgcgcgagaactgcgagagatgacgctcgacagccgtgtggctgcggcgggcgatctctttgtggcagtggtgggtcatcaggcggacgggcgtcgttatatcccgcaggcgatagcgcaaggcgtagctgccattattgcagaggcgaaagacgaggcgagtgacggtgagattcgcgaaatgcacggcgtaccagtcgtctatctcagccagctcaatgagcgtttatctgcgctggcgggccgcttttaccatgagccatctgaaaacatgcgtctggtggcggtgaccggcaccaatggcaagaccaccaccacccaactactggcgcagtggagccagttgctcggcgaaaccagcgcagtgatggggacggtaggtaacggactgttgggtaaagtgatcccgacggagaacacaaccggttccgcagtggatgttcagcatgtgctggccagtctggttgcgcagggcgcgaccttcggcgctatggaagtctcttctcacggcctggtgcagcatcgcgtggcggcgctgaaatttgccgcctccgtgtttactaatttgagccgcgaccatctcgactatcatggcgatatggcgcattacgaggcggcaaaatggatgctttattccacccaccatcacggtcaggcaatcgtcaacgccgatgatgaagttggacgccgctggctggcgtcgctacccgatgcggtcgcggtttcaatggaagggcatatcaaccctaactgtcacggtcgttggctgaaagcggaggcggtggagtaccacgaccgcggagtgacgattcgttttgcttcaagctggggtgaaggcgaaatcgaaagctgcctgatgggcgcgtttaacgtcagcaacttactgctggcattggcgacgctgctggcgctgggctatccgttaacggatttgctgaaaaccgccgcgcgtttgcagccggtttgcgggcgtatggaagtgttcactgcgccaggcaaaccgacggtggtggtggattacgcgcacacgccggatgcgctggaaaaagcattgcaggcggcgcgcctgcactgcgccggaaaattgtggtgcgtctttggctgtggcggggatcgtgacaaaggtaagcgcccactcatgggggccattgccgaagaattcgcggatatcgtcgtggtgactgacgataacccgcgtaccgaggagccgcgcgccattatcaacgatattctggccggaatgctggacgccgggcaggtcagggtaatggaaggccgcgctgaggcggtaaccaatgccattatgcaggcaaaagacaatgacgtcgtgctgattgcaggtaaagggcacgaggattaccagattgtcggcacgcagcgtcttgattattcagaccgcgtgaccgcagcgcgtttgctgggggtgatcgcatga

SEQ ID NO: 39833 - DNA, 1359 bp, Salmonella typhi
atgattagcgtaacgctcagcaaaattgccgatgtccttggcgccgaacaccgcggggcggatctcacgctcgatacggtcattaccgacacacggaaagtgacgccgggatgcctgttcgtggcgctgaaaggggaacgctttgatgcgcatgattttgctgataaagcaaaagcgaacggcgctggcgccctgctggtcagtcgtcctctggatatcgatcttccgcaggtgattgtaaaagacacgcgtcaggcatttggccaactggccgcctgggtacgtatgcaggtaccggcgcgggtggtggcgttaaccggttcgtccggcaaaacctcggtcaaagagatgaccgccgcgattcttagccagtgcggaaatactttgtataccgcaagcaattttaacaacgacatcggcgtgccgataacgctgctgcgcttaaaccatgattatgactatgcggtgatcgagttaggcgctaatcaccagggagaaatcgcctggaccgttagcctgacgcgcccggaagcggcgctggtcaataacctggcggcggcgcatctggaaggtttcggctcgctggccggcgtggcgaaagcgaaaggcgaaatctataccggtttgcctgagaacggtatcgcgattatgaatgccgataataatgactggctgaactggcaaagcattattggcgatcgtcaggtgtggcgcttttcgccgaatgcggcaaacagcgactttaccgctgcgaatatccacgtgacgtcacacggtaccgaatttaccctgcaaacgccgatgggcagcattgatgtgctgctgccgttgccggggcggcacaatattgccaacgcgctggcggccgctgctttatcaatggcggtgggggcgacgctggcggcggttaaagcagggctggcggcgttaaaagccgtacccgggcgtctgttcccgattcaactaagtgaaaaccaactggtactggatgacgcttataacgccaacgtcggttcgatgaccgccgcagtgcaggtcctttctgaaatgcccggctaccgcgtgctggtggtaggcgatatggccgagctgggcgcagaaagcgaagcgtgccacctccaggttggcgaggccgcaaaagcggcgggtattgatcgcgtgttaagcaccggaaaactcagtcaggttatcagccacgccagcggcgtcggcgaacattttgccgataaagccgcgctcattgcgcgtttacacgctctgcttcaggagcaaccgatgatgactattttagtgaaaggatcacgcagcgccgcgatggaagatgtggttcatgcgttacaggagaaaggttcatgttag

SEQ ID NO: 39834 - DNA, 1083 bp, Salmonella typhi
atgttagtttggctggccgagcatttggtcaaatattattccggctttaacgtcttttcttatctgacgtttcgcgccatcgtcagcctgttgaccgcgctgttcatctctttatggatgggcccgcgtatgatcgctcgtctgcaaaaactctcttttggccaggtggtacgtaacgatggcccggaatcgcacttcagtaaacgcggtacgccgacgatgggcggcatcatgatcctgacggcgattgtgatttccgttctgttatgggcttacccgtctaacccgtacgtctggtgcgtgctggtggtattgatcggctacggcattatcggttttgtcgatgactaccgcaaagtggtgcggaaagataccaaagggctgattgcgcgctggaaatatttctggatgtcggttatcgcgctcggcgtggcctttgcgctttatctcgtcgggaaagacacgcccgcgacccaactggtggtgccgttctttaaagatgttatgccgcaattggggctgttttacattctgctgtcctactttgtcatcgtcggtacgggtaacgccgtaaacctgaccgacgggcttgatggtctggcgattatgccgactgtcttcgttgccgccggctttgcgctggtggcttgggcgaccgggaacatgaacttcgccaattacctgcatattccgtatttacgccatgcgggcgagctggtgattgtctgtacggcgattgtcggcgcgggattaggattcttgtggtttaacacctatccggcgcaggtttttatgggcgatgtcggatcgctggcgttgggcggcgcgttgggcattatcgccgtgctgctgcgtcaggaatttctgctggtgatcatgggcggcgtctttgtggtggaaactctgtcggtcatcctgcaggtgggttcctttaaactacgcggacagcgtattttccgtatggcgcctatccatcaccactatgaactgaaaggctggccggaaccgcgcgtgattgtgcgcttctggattatttcgctgatgctggtgctgattggcctggcaacgctgaaggtacgttaa

SEQ ID NO: 39835 - DNA, 1317 bp, Salmonella typhi
atggctgattaccaggacaaaaacgtcgtcattatcggtctgggcttaaccggactctcttgcgtggacttttttctcgcccgcggcgtgacgccgcgggtgatggatactcgcgtgacgccgccgggtctggataagctgccgcaagaggttgagcgtcacgttggcggcctgaacgacgagtggctcttagcggcggatttaatcgtcgccagccctggtattgctctggcgcatccctctcttagcgctgccgccagcgctggagtggaaattgtcggcgatatcgaactgttttgccgcgaagcgcaagcgccgattgtggccatcaccggctcgaacggcaaaagcaccgtgaccaccttagtgggcgagatggcgaaggcggcgggcgtcaatgtcggcgttggcggcaatatcggtcttccggcgctgatgctgctggatgccgatcgcgaattgtacgtgctggaattatccagtttccaattggaaactacctcaagtttgcaagcggcggcggcaacggtgctcaacgtcactgaagatcatatggaccggtatccgtttggtttgcaacagtaccgggcggcgaaactgcgcgtctacgagaaggcgaaagtgtgcgtagtgaatgccgatgacgcgttgacgatgccggtacgcggggccgatgagcgctgcgtcagctttggcgtcaatatgggtgattatcaccttaatcgtcagcagggcgaaacctggctacgagtcaaaggtgagaaggtgctgaacgtgaaagagatgaagctttccggtcagcataactataccaatgcgttagcggcgctggcgctggcggatgccgtaggtctgccgcgcgccagcagtttgaaggcgttgacgacatttaccggtctggcgcatcgcttccagctggcgttggagcataacggcgttcgttggatcaacgactcgaaagcgaccaatgtcggcagtaccgaagcggcgctaaacggtttgcatgtggacggtacgctgcatctgctgctgggcggcgacggtaagtcggcagacttttctccgctggcgcgctatctgaccggcgatcgtatccgcctgtattgctttgggcgcgatggcgcgcagcttgccgcactgcgtccggaaatcgcccaacagactgagacgatggaagaggcgatgcgtttgctggcgccgcacgttcagccgggtgatatggtgctgttgtcgcccgcctgcgccagcctcgatcagtttaaaaattttgagcaacggggcgatgtctttacccgtctggcgaaggagttaggttga

SEQ ID NO: 39836 - DNA, 1245 bp, Salmonella typhi
atgcgtttatctctcccccgtctgagaatgccgcgcgtaccaggctttggcctcctggcctggctgtttgcggcgcttaaaggctgggtgatggcttcgcgcgataaagacgccgacagtctgatcatgtatgaccgcacgctgctatggctgaccttcgggctggcggcgattggttttgtcatggtgacgtcggcctccatgccagtcgggcagcgcctggcgaacgatccgtttttgtttgccaaacgtgatgcgctctatatcttcctggcattttgtctggcgatggtcacgctacgtttgcccatgaccttctggcaaaaatacagcacgacgatgctgattgcgtcgatcattatgctgcttatcgtgctggtcgtcgggagctcggttaacggggcgtcgcgctggattgcgctggggccgctgcgtattcagcctgcggagtttaccaagctgtcgctgttctgctacctcgcgaactatctggtgcgtaaggttgatgaagtgcgaaataacctgcgcggctttttaaaaccaatgggcgtgattctggtgctggcggtgttactgctggcacagcctgacctcgggacggtggtcgtactgtttgtcaccacgctggcgatgctgtttcttgccggggcgaaattatggcagttcatcgccattatcgggatgggcatctcggcggtgattctgttaatcctcgccgaaccgtatcgtattcgccgcgttacctcgttctggaacccctgggaagatccgttcggcagcggttatcagctgacgcagtcgctgatggcttttggtcgcggtgagatatgggggcaagggctggggaattcggtgcagaaactggagtatttgccggaggcgcacaccgatttcatcttcgccattattggggaagaactgggttatatcggtgtggtattggcgcttttaatggtatttttcgtcgcttttcgcgcgatgtcgattggccgtaaggcattggagattgaccaccgtttttccggatttttagcgtgttctatcggtatctggtttagttttcaggcgctggtaaacgttggcgcggccgcggggatgctgccgaccaaaggtcttacgctgccgctgatcagttatggcgggtcgagtctgttgattatgtcgacggccattatgtttttattacgtattgattatgaaacgcgtctggaaaaagcgcaggcgtttacacgaggttctcgatga

SEQ ID NO: 39837 - DNA, 1068 bp, Salmonella typhi
atgagtggtcaaccgaagcggttaatggtgatggcgggcggtaccggcgggcacgtgttccccggactggccgttgcgcatcatttaatggcccagggctggcaggttcgctggctgggtacctccgatcgtatggaagcggatttagtgccgaagcatggcatcgatattgactttattcggatctccggtctgcgcggtaaaggcgtaaaagcgcttctggcggcgccgctgcggatttttaacgcctggcggcaggcgcgggcgatcatgaagcggtttaagccggatgtcgtgctgggaatgggcggttatgtttccggccccggcggtcttgccgcctggtcattgggtattccggtcgttttgcatgagcaaaacggtatcgccgggctaaccaatcagtggctggccaaaatcgcgaccacggtgatgcaggcgtttcccggtgcgttcccgaacgcggaagtggtgggtaacccggtgcgtaccgacgtactggcgttgccgttgccgcaggtgcgtctggccggtcgtgacggcccgattcgcgtgttggtggtcggcggttctcagggggcgcgagtcctgaaccagacgatgccgcaggttgccgccagactgggcgatacggttacaatctggcatcaaagcggaaaaggcgcgcagctcacggtagagcaggcatatgccggggcgggacaaccgcagcataaggtaacggaatttatcgatggcatggccgccgcctatgcgtgggcggatgtggtggtatgtcgttccggcgctttaacggtgagcgagatcgccgccgccgggttaccggcgatattcgtgccgtttcagcataaagacaggcagcagtactggaatgcgctgccgttagaaaacgccggcgcagctaagatttttgagcagccgcagtttactgtagaggctgtcgccgacaccctggcggggtggtcgcgcgaggcgttgttaaccatggcggagcgtgcccgcgcggtatccattccggatgctaccgagcgcgtcgccagtgaagtcagccgggttgcccggacataa

SEQ ID NO: 39838 - DNA, 1476 bp, Salmonella typhi
atgaatacacaacaactggcaaaactgcgttccatcgtgcccgaaatgcgtcgcgttcggcacattcactttgtcggcatcggtggtgctggtatgggcggtattgccgaagttctggccaatgaagggtatcagatcagtggttccgatttagcgccgaatccggtgacccagcagttgacgagcctgggggcgacgattttctttaaccatcgtccggaaaatgtgcgtgatgccagcgtggtcgtcgtttccagcgcaatttccgcggataacccggaaattgtcgcggcgcatgaagcgcgtattccggttattcgccgtgcggaaatgctggcggaactgatgcgttttcgccacggcatcgccattgccgggacgcacggaaaaaccacaacgaccgcgatggtgtccagtatttatgccgaagcggggctggacccgactttcgtgaatggcggattggtgaaagccgcaggcgttcatgcgcgtctgggccatagtcgttacctgattgccgaggcagatgagagcgacgcatccttcctgcatttgcagccgatggttgcgatcgtcaccaacatcgaagccgaccatatggatacctatcatggcgactttgaaaatttaaagcagacgtttattaacttcctgcataacctgccgttctacggtcgcgcggtaatgtgcgtcgacgatccggtcatccgcgagttgctgccgcgggtggggcgtcagaccacgacgtatggctttagcgaggatgctgacgtccgcgtagaagattatcagcagatagggccgcaggggcactttacgctgttgcgccagggaatgccggatctgcatgtcacgttgaatgcgccgggtcgccacaatgccctgaatgccgccgcggcagtggcggtagcgaccgaagaaggcatcgacgatgacgctatcctgcgcgcgctggaaagcttccaggggaccgggcgtcgttttgacttcctcggcgagttcccgcttgagccggtgaatggtaaagccgggacggcgatgctggtggatgactatggacatcatccgaccgaagtggacgccaccattaaagctgcgcgagcagggtggccggataaaaacctggtgatgctgtttcagccgcatcgttacacgcgcacgcgcgatctgtatgacgatttcgccaatgtgctgacccaggtcgatgcgctgctgatgctggacgtttacccggcgggcgaagcgccgattccgggcgcggatagccgttctttatgtcgcacgattcgtaatcggggaaaaattgacccgattctggtttccgatccggctcaggttgcgacaatgttagcgccggtgctgacgggtaacgacttgatattagtgcaaggcgcaggaaatgttggcaaaattgcgcgttacttatctgaaatcaagctgaagccgcaaatccaggaggaagagcaacatggctga

SEQ ID NO: 39839 - DNA, 831 bp, Salmonella typhi
atgtcgcaggctgcgctgaacacgcgaaacagtgatgaagagacgccttcttcacgccgcaataatggaacgcgtcttgcaggaatattattcctgctgacggtactgtgcaccgtgtttgttagcgggtgggtcgtgttagggtggatggaagatgcgcagcgtttaccgttatcaaagctggtattaaccggcgagcgtcactacacgcgtaacgatgatatccgtcaggcgatactggctctgggcgcgccgggaaccttcatgacgcaggatgtgaacattatccagagccagattgagcgtttgccgtggattaaacaggccagcgtcagaaaacagtggcctgatgaattgaagattcatctggttgaatatgtgccgattgcgcgttggaatgatcaacatatggtcgatgctgaagggaacaccttcagcgtgccgtcagaccgcatcggcaaacaggttttacccatgttgtacggcccggaaggcagcgcgagtgaagtgttgcagggataccgcgagatggggcaggtgctggctaaggataaattcactctaaaggaagcggcgatgaccgcacgtcgctcctggcaattgacgcttaataacggcattaagctcaatctcggcaggggcgatacgatgaaaaggttggctcgctttgtagaactctatccggttttacagcagcaggcgcaaaccgatggcaaacggattagctacgttgatttgcgttatgactcaggtgcggcagttggctgggcgccgctcccccctgaggaatctaatcagcaacagaatcaggcacaggcagaacaacaatga

SEQ ID NO: 39840 - DNA, 1593 bp, Salmonella typhi
atggctcgactctgtacccatactgaatcaggacattacctgatggctcttgacgccggtaccggtagcgtcagagcagtaatttttgatctacaaggaaagcaaatagctgtcggtcaagcggaatggcagcatctggccgtgccggatgtgcctggttcgatggagtttgatcttgccaaaaactggcaactggcttgccagtgtatccgtcaggcactacagaaagccgccatccctgcaacggctatcgctgccgtatcggcctgttcgatgcgtgaaggcattgttatttatgacagtaacggcgaacccatttgggcctgcgctaatgttgacgcccgcgcggcgcacgaagtcagtgaattaaaagagctgcacgataacacctttgaggaggaagtttatcgttgctccgggcaaacgctggcgctcagcgctattccgcgtctgctctggcttgcccaccatcgtccggatatttatcatcgcgcgtcaaccgtcactatgatcagcgactggatggcctttatgctcagcggcgaactggcggtcgatccctccaacgcaggcacgacggggttattggatctggtgacccgcaactggaaacgtagtctgttacagatggcgggcctgcgttctgacattctctcgccggtaaaagaaaccgggacactgctcggtcacatttcacagaaagcggctgaacagtgcgacctgcaagcgggtacgccggtcatcgttggcggcggcgatgtgcagttaggctgtctggggctgggcgtcgtacgcccggcgcaaacggccgtgctgggcggaaccttctggcaacaggtcgtcaatcttcccgcgccggtcaccgacccaaacatgaacgttcgcatcaatcctcatgtgatccccggtatggtacaaaccgagtctattagcttttttactgggttaacgatgcgttggttccgcgacgccttttgcgccgaggaaaaactaatcgctgaaaggttaggtattgatgcgtattccctgctggaagatatggccagccgggtgcctcccggcgcgcacggtgtgatgcccatcttctctgacgttatgcgttttaaacgctggtaccatgccgcgccgtcgtttatcaatctgtctatcgatcctgaaaaatgtaataaagcgaccctatttcgcgcgctggaagagaatgccgccattgtttccgcctgcaatttacagcaaattgccgcgttttccggcgtacaggccgactcgctggtttttgccggcggaggatctaaaggcaaattatggagccaaatccttgccgacgttacgggactcaccgttcacgtacctgtcgtcaaagaagctaccgcgctagggtgcgctattgccgcaggcgttggcgtgggtatctggccatcgctggcggaaacgggagaaaagctagtgcgctgggatcgggagcataaacctaatcctgaaaatttcgctgtctatcagcaggccagagaaaaatggcaggccgtttatcaggatcaacgcgcgctggtcgatggtggcttaacgacatccctctggaaagcgccaggcctgtaa

SEQ ID NO: 39841 - DNA, 963 bp, Salmonella typhi
atgattaagaaaatcggtgtgttgacaagcggcggtgatgcgccgggcatgaacgcggcaatccgcggtgttgtgcgcgcagcgttgacggaagggctggaagtcatgggcatttatgacggctatctgggcctgtatgaagatcgtatggttcagcttgaccgttacagcgtatctgacatgatcaaccgtggcggtactttcctcggttccgcccgtttcccggaattccgtgacgaaaatattcgcgctgtcgcgatcgaaaacctgaaaaaacgcggtatcgatgcgctggtagttattggcggcgacggttcttatatgggtgcaaaacgtctgactgaaatgggcttcccgtgcatcggtctgccaggcactatcgataacgacatcaaaggcaccgactacactatcggctacttcactgctctcggcactgtagtggaagcgattgaccgtctgcgtgacacctcctcttctcaccagcgtatctctatcgttgaggtgatgggccgttattgcggcgacctgacgttggcggcggctattgctggcggctgtgagtttatcgtggtgccggaagttgaatttaatcgcgaagatctggtggccgaaatcaaagccgggatcgcgaaagggaaaaaacacgctatcgtcgctattactgagcatatgtgcgatgttgacgaactggcgcactttattgaaaaagaaacgggccgtgaaacgcgtgcgacggtgctcggccacattcagcgcggtggttccccggtaccttacgatcgcattctggcttcccgtatgggcgcgtatgctattgacctgctgctggaaggccatggcggtcgttgtgtcggtatccagaacgagcagcttgttcatcatgacatcatcgatgcgattgaaaacatgaagcgtccgttcaaaagcgactggatggagtgcgcgaaaaaactgtactga

SEQ ID NO: 39842 - DNA, 1263 bp, Salmonella typhi
atgatcaaggcgacggacagaaaactggtagtaggactggagattggcaccgcgaaggttgccgctttagtaggggaagttctgcccgacggtatggtcaatatcattggcgtgggcagttgcccatcgcggggtatggataaaggcggggtgaatgaccttgagtcagtggtgaaatgcgttcagcgcgccattgaccaggcggaattgatggctgattgccagatctcctcggtatatctggcgctttccggcaaacatattagctgtcagaatgaaattggtatggtgcccatttccgaagaggaagtgacgcaggaagatgtggaaaacgtcgtgcatactgcgaagtcagtgcgcgtgcgcgatgaacatcgcgtgctgcatgtgattcctcaggagtacgccattgactaccaggaaggcattaaaaatccggtcggtctttccggcgtgcgtatgcaggcgaaagtacatttgattacctgccacaacgatatggcaaaaaacattgtcaaagctgttgaacgttgtggtctgaaagttgaccaactgatatttgccggactggcggccagttattccgtgttaacggaagatgaacgtgaactgggcgtctgtgtcgtggatatcggcggtggtacaatggatatcgccgtttatactggcggcgcgctgcgtcataccaaagtgatcccttacgcggggaacgtggtgaccagcgatatcgcttatgcctttggtacgccgccgagcgatgctgaagccattaaagttcgccacggttgcgcgctgggttccattgtcggtaaagacgaaagcgttgaagtaccgagcgtaggcgggcgtccgccgcgcagcctgcaacgtcagacgctggcggaagtgattgagccgcgttacaccgagctgctcaatctggtcaacgaagagatattgcaattacaggaacagcttcgccaacaaggggtaaaacatcacctggcggcgggcattgtgttaaccggcggcgcggcgcaaatcgaagggcttgctgcttgcgctcagcgcgtgtttcatacgcaggtgcgtatcggcgcgccgctgaatatcaccggtctgacggattatgcccaggagccgtattactcaacggcggtgggattgcttcactacgggaaagagtcccacttaaacggtgaagcagaagtggaaaaacgtgttacggcatcagttggctcgtggatcaagcgacttaatagctggctgcgaaaagagttttaa

SEQ ID NO: 39843 - DNA, 1152 bp, Salmonella typhi
atgtttgaacctatggaactaaccaacgacgcggtgattacagtcatcggcgtcggtggtggcggcggtaacgctgttgaacacatggtgcgcgagcgcatcgaaggtgttgaattcttcgcggtgaataccgacgcgcaggcgttgcgtaagacggcggttggccagaccattcaaattggtagcggcattaccaaaggtctgggcgccggcgctaacccggaagtcggccgtaatgcggcggacgaagaccgtgaagcgctgcgtgcggcgcttgaaggcgcagacatggtatttatcgcggcaggcatgggcggcggtaccggaaccggcgcggcgccagtggttgctgaagtggcaaaagatttaggtattctgaccgttgccgtggtgactaagcctttcaattttgaaggcaaaaagcgcatggcatttgcggagcagggtatcaccgagctgtccaagcatgtggactcgttgatcaccatcccgaacgacaagctgctgaaagtgctgggccgtggcatctccctgctcgacgcgttcggcgcggctaacgacgtgctgaaaggcgcggttcagggtatcgcagagctgatcacccgcccgggcctgatgaacgtcgactttgctgacgtgcgtaccgtgatgtctgaaatgggctacgcaatgatgggctccggcgtggcgagcggtgaagaccgtgcggaagaagcggctgaaatggctatttcttctccgctgctggaagatatcgacctgtccggcgcgcgcggcgtgttggtcaacattacggcgggcttcgacctgcgtctggatgagttcgaaaccgtcggtaacaccatccgtgcctttgcgtcggataacgccaccgtggttatcggtacctctctggacccggatatgaacgacgaactgcgcgtgaccgttgttgccactggaattggtatggacaagcgtcctgaaatcactctggtcaccaataaacaggtgcagcagccggtgttggatcgttatcagcagcacggtatggcgccgctgacgcaggagcaaaaaacggtcgcgaaagtggttaacgacaatgcgccacaggcggcgaaagagccggattatctggatatccccgcattcctgcgtaagcaagctgattaa

SEQ ID NO: 39844 - DNA, 918 bp, Salmonella typhi
atgatcaaacaaaggacacttaaacgtatcgttcaggcgactggcgtcggtttacacaccggcaaaaaagtcaccctgacattacgccctgcgccggccaataccggggtcatctatcgtcgcaccgacttgaatccaccggtagatttcccggccgatgccaaatctgtgcgtgataccatgctctgtacgtgtctggtgaatgagcatgatgtacggatttcaaccgttgagcacctgaacgctgctctggcgggcttaggtatcgataacatcgttattgaggttaatgccccggaaatcccgatcatggatggcagtgccgctccgtttgtctacctgctgcttgatgccggtattgatgcactgaactgcgccaaaaaattcgtacgcatcaaagagactgttcgggttgaagatggcgataaatgggctgaattcagaccgtacaatggttttacgttggatttcaccatcgactttaaccatccggcgatcgattccagcagccagcgctacgcgatgaacttctctgcggatgcgttcatgcgccagatcagccgtgcgcgtaccttcggttttatgcgtgatatcgaatatctgcagtcccgcggcctgtgcctgggcggcagcttcgattgtgccatcgttgttgacgattatcgcgtattgaacgaagacggcctgcgttttgaagatgaattcgttcgtcacaaaatgctcgacgcgatcggtgacttgttcatgtgtggtcacaatattattggtgcgtttaccgcgtataaatccggtcacgcattgaataacaaattgttacaggcagtcctggcaaaacaggaagcctgggaatttgtgaccttccaggacgacgcagaactgccgttggctttcaaagcgccttcgacggtactggcataa

SEQ ID NO: 39845 - DNA, 2706 bp, Salmonella typhi
atgctaatcaaattattaaccaaagtattcggtagccgtaacgatcgtacgctgcgtcgtatgcgtaaggccgtcagccttattaatgcgatggaaccggagatggaaaaactctccgatgacgaactgaaagcgaaaaccaacgaatttcgcgcccgtattggaaaaggcgaaagcgtagagagcttgattccggaagcgttcgcggtggtgcgtgaagccagtaaacgcgtctttgggatgcgtcacttcgacgttcagctattgggtggcatggtgctcaacgatcgttgtattgccgaaatgcgtactggtgaaggtaagacgctgaccgcaaccctgccagcctacctgaacgcgctgtccggcaaaggcgttcatgtggtgaccgtgaacgactatctggcgcagcgtgacgccgaaaacaaccgtccgctattcgaattcctcggtatgtccgttggtatcaacctgccaggtatgcctgcgccagccaaacgtgaagcttacgctgccgacatcacttacggcactaacaacgaatacggttttgactacctgcgcgacaacatggcgttcagcccggaagagcgcgtgcagcgtaaactgcattatgcgctggtggatgaggttgactccatcctgatcgatgaagcgcgtacgccgctgattatttccggcccggcggaagatagctcggaaatgtacaaaaaagtgaacaaaatcattccgcacctgattcgtcaggagaaagaagattctgacactttccagggcgaaggccacttctccgttgatgagaaagcgcgccaggttaacctgaccgaacgcggtctggtgctgatcgaagagctactggtgcaagaaggcattatggatgaaggcgagtcgctctactcgcctggcaatattatgttgatgcatcacgtcaccgccgcgctgcgcgcgcacgcgctgtttacccgtgacgtggattacattgtgaaagacggcgaagtcatcattgttgatgaacataccggtcgtaccatgcaggggcgtcgctggtctgacggtctgcaccaggcggtagaagcgaaagaaggcgttgaaattcagaatgaaaaccagacgctggcgtctattaccttccagaactacttccgtctgtatgaaaagctggccggtatgaccggtacggcggatactgaagccttcgaatttagttctatctataagctggacaccgtcgttgttccgaccaaccgtccgatgatccgtaaagatttgccggatctggtctacataaccgaagcggaaaaaatccaggccattatcgaagatattaaagaacgtaccgcgaacggtcagccagtgctggtcgggacgatttctatcgagaaatctgaagtggtctccagagagctgaccaaagcgggcatcaaacataacgtactgaacgcaaaattccacgccaacgaagcaggcatcgttgcgcaggctggttatccagcggcggtcactatcgctaccaacatggcgggtcgtggtaccgatattatgctgggcggtagctggcaggcggaagtcgctgcgctggaagcgccgacggaagaacagattgcgcagattaaagcggactggcaggtacgccatgacgcggttctggctgccggcggcctgcatatcattggcaccgagcgccatgaatcccgccgtatcgacaaccagctgcgtggccgttccggtcgccagggcgatccgggttcttcccgtttctacctgtcgatggaagatgcgctgatgcgtattttcgcctccgatcgtgtctccggtatgatgcgtaaactgggaatgaagccgggcgaagcgattgagcacccgtgggtgacgaaagctatcgctaacgcgcagcgtaaagtagaaagccgtaacttcgatattcgtaagcaactgctggaatatgatgatgtggcgaacgatcagcgccgtgcaatttatacccagcgtaacgaactgctggatgtgtctgacgtgagcgacaccattaacagcattcgcgaagatgtctttaaggcgactatcgacgcctacattccgccgcagtcgctggaagagatgtgggatatcccgggtttgcaggaacgcctgaaaaacgacttcgacctggagatgccgattgccgaatggctggataaagagccggagctgcatgaggagacgctgcgtgagcgcatcctggcgcagtccatcgaggtgtatcagcgtaaagaagaggtggttggcgctgaaatgatgcgtcatttcgaaaaaggcgtgatgctgcaaacgctcgattccctgtggaaagagcatttggcggcgatggattacctgcgtcagggtattcatctgcgcggctatgcgcaaaaagatccgaagcaggaatacaagcgcgaatccttcgctatgttcgccgcgatgctggaatcgctgaaatatgaagtgatcagtaccctgagcaaagtccaggtacgtatgccggaagaggtcgaagcgatggaaatgcagcgtcgcgaagaggcggagcgcttggcgcagatgcagcagctaagccatcaggatgacgatgccgccgtggctgccgatctggccgcccaaaccggcgaacgtaagattggacgtaacgatccttgcccttgtggttccggtaagaaatacaaacagtgtcacggtcgcctgagctga

SEQ ID NO: 39846 - DNA, 990 bp, Salmonella typhi
atgcaatatcgtacattaggcgcaaacggaccgcgagtgtcagccatcggactgggatgtatgggcatgagcgcattttacggcgctcatgacgacagcacctcaattaagacgctacattatgcgttagatcagggggtaacactgctcgataccgcagatatgtatggcccttataccaatgaaaggttagtcggaagagccatcgccgatcgtcgcgatcgggtatttttagcgacgaaatttggtatcgttctcgaccctgctaaccctatggcgcgtggcgtcaatggcagaccggagtacgttcgccgtagttgtgagcaaagcctgcaacgcctgggggtcgatcatatcgatctgtactatcaacatcgcgttgatccatcagttcccatagaagagactgtcggtgcaatggcggacctggtgcgcgagggaaaagtgcgttatctcgggctatccgaagcatcaacgcaaacgctggaacgcgcccataacgttcaccctattaccgcgctgcaaagtgagtattcgctttggtcccgcgaagcggaaatttcagcactttccacctgtgaacggttgggtataggattcgtcgcttacagcccgctgggacgcggatttctgaccggtacgattaaaacgccagaagattttgctgcgaatgacttccgtcgcacaaatcccagattcatgggtgagaacttctcgcgcaatttacgtctggctgaagcaataaaacaaatggcacgcgaaaaagagtgtacccccgcacaattagcgctggcctggctgctggcccgcaacaggcacctcgttcccattcccggcacccgccactgcgccagggtggatgaaaacctcggcgcgttatcactgaccctaagcccgcaggagctggcggcaattgaggcggtttttcctcacgacgccgcagccggcccccgctactggccggaaattatgtcgacattaaatcgctaa

SEQ ID NO: 39847 - DNA, 942 bp, Salmonella typhi
atgaaggctggcttaataatgcgtcatgatgtgatgtccgtattgcatgctttttgcatgattgctgaaaaccatagcttcacgcgggcagcggcgcagttacatatttccacgtcggcgttaagtcagaatatgcgtcaactggaggatgaacttggcgtgaaattattgaaccgaaccacccggcgtgtcggtttgacagaagcaggacatgcctttcttgccagtatcagacccgcattgaaccatattgatgaggcgatggaacatgcctgccagagccgcgatatacccggagggacattacgcctgaccgtaccgcgcacggcggccacgcttctgttacaacctaatctcgccggcttcatgcgcgattatcccgatattcggctggatatcgatgtgaatgacggttttgtggatttaattaacgaacgctttgatgccggtattcgctttggcgatgcggtacaacttgatatgaatgtcgttccgctcggtgatgttttacgcccggcgatcgtagcatcccctgcataccttgcgcgttttggcacgccgctgcatcctcaggagctcatcaatcaccgctgcctttgccatcgttttacgcgtgagagcgggctatatcggtgggagtttgttcatggagcgcaacggctggaaattacgccggaagccgcgttaatggtgaatgataaagcgttgcgtctctccgccgcgcgtgatggggcagagctaacctacgtttttgaacaggatgtccacgaagacttacaggatgggcggttgtgttccgtacttgaggagtggctgcctgcggcggaccggttttatttgtattatcccggccgcgcgcatatggcgccaaaactacgcgtatttattgattatttttgtcataaggcgatattgccgtctcaacagagctatcaccgttag

SEQ ID NO: 39848 - DNA, 744 bp, Salmonella typhi
atgcacacccaggtcctatttgaacaccctctcaatgagaagatgcgtacgtggctgcgcatagagtttttgatccaacagctctccatcaacctgccaattgcagaccatgctggcgcactgcattttttccgtaatatcagcgatctactggatgtgttcgaacggggcgaagtccgtaccgaactgctgaaagaactggagcgccagcagcgtaaattacaggcctgggttgaggttcccggcgtcgatcaagaccgtattgaagccctgcgccagcagttaaaatcggcgggcagcgtgctgatctccgccccgaggattggccagcagctacgcgaagatcgcttgattgctcttgtgcgtcaacgcttaagtattcctggcggctgttgcagtttcgatttacccactctgcatatctggttgcacctacaacaggcgcagcgcgatgcccagattgaaagctggcttgccagcctgaatcccctcacccaggcgctgacgctggtgcttgatctgatccgtaattcagcgcctttccgtaagcaaaccagcctgaacggtttttatcaggataacggggacgacgccgatttgctgcgtcttatgctgacgctcgattcacaactttatccgcaaatttccggccataagagccgttttgccattcgctttatgccgctggatagtgaaaatggtctggtgccggagcgtcttgattttgaactggcctgttgctaa

SEQ ID NO: 39849 - DNA, 501 bp, Salmonella typhi
atgcgcaaagttaccgctgctgttatggcctcaacgctggcattcagttttttaagccacgcagctgaagttgttacaagcgataactggcaccccggtgacggggccacgcagcgtagcgcgcaaaatcatatgtttgacggcataagtttaaccgaacatcagcgtcagcagatgcgagatcttatgcagcaggcaaggcacgaacagcctcctgttaatgttagcgaaatggagacaatgcatcggcttgtcaccgcagaaaaatttgatgaaagcgttgtgcgcgctcaggcagaaaaaatggcgcaagagcaggttgcccgccaggtcgaaatggcccgcgtgcgtaaccagatgtatcgcctgttaacgccggagcagcaagcggttttgaatgaaaagcatcagcaacgaatggagcaactgcgcgacgtggcgcaatggcaaaaaagttcatcgttgaaattattgagtagtagcaactcacgttcccagtaa

SEQ ID NO: 39850 - DNA, 699 bp, Salmonella typhi
atgaataaaatcctgttagttgatgatgaccgagagctgacttccctgttaaaagagctcctcgaaatggaaggttttaatgtcctggtggcccacgacggcgagcaggcgcttgagcttttggatgacagcatcgatttacttttgcttgacgtcatgatgccgaagaaaaacggtatcgatacgttgaaagcgcttcgccagacacaccagacgcctgtcattatgctgaccgcgcgcggcaacgagctggatcgcgttctcggccttgagctgggcgcggacgactatttgcccaaaccgtttaacgaccgcgagctggtagcgcgcatcagggctattttgcgccgttcccactggagcgagcagcagcagagcagcgacaacggctcgccgacgctggaagttgatgcgctaagccttaatccgggtcgccaggaagccagtttcgatggccaaacgctggagctgaccggtacggaattcaccctgctctatttactggcgcaacacctcggccaggtggtttcccgtgaacatttaagtcaggaagtgctgggtaagcgcctgacgccgttcgatcgcgccattgatatgcatatttctaacctgcgccgcaaactgccggaacgcaaagacggtcacccgtggtttaaaacattgcgtggtcgcggctatctgatggtttccgcttcatga

SEQ ID NO: 39851 - DNA, 576 bp, Salmonella typhi
gtgcaacgtgaagatattctgggagaagccctgaaattactggagacgcaagggatagccgatactacgctggaaatggtggcggagcgcgtaaatcgcccactcgacacattacagcgtttctggccagataaagaagccattttatatgacgcgctacgttatctgagtcagcaggtagatatctggcgacgccagcttcttcttgatgagacgttttctgctgaacaaaagctactggcacgctacagcgcgctttcggaatgtgtcagtaataaccgttatcctggttgcttgttcattgccgcctgtacgttttatcccgacccaacccatcctattcaccaactggctaatcaacaaaaacgcgcggcacatgattttacccatgggctactgaccacgctggaaattgacgatccggcgatggttgcaaggcagatggaactggtgctggaaggttgtctcagccgaatgctggtcaaccgcagtcaggctgatgtagataccgctcagcggttggcggaagatattctgcgttttgcacagtgccgtcagggtggagcgctcacctga

SEQ ID NO: 39852 - DNA, 498 bp, Salmonella typhi
atggattatcaaaataatgtcagcgaagaacgtgttgcggaaatgatttgggatgccgttagtgaaggcgccacgctaaaagacgttcacgggatccctcaagatatgatggacggtttatatgctcatgcttatgagttttataaccagggacgactggatgaagctgagacattctttcgtttcttatgcatttatgatttttacaatcccgattacaccatgggactggcggcggtatgccaactgaaaaaacaatttcagaaagcatgtgacctttatgcagtagcgtttacgttacttaaaaatgattatcgccccgttttttttaccgggcagtgtcaattattaatgcgtaaggcggcaaaagccagacagtgttttgaacttgtcaatgaacgtactgaagatgagtctctgcgggcaaaagcgttggtctatctggaggcgctaaaaacggcggagacagagcagcacagtgaacaagaaaaggaataa

SEQ ID NO: 39853 - DNA, 1647 bp, Salmonella typhi
atggcagctaaagacgtaaaattcggtaacgacgctcgtgtgaaaatgctgcgcggcgtaaacgtactggcagatgcagtgaaagtaaccctcggtccgaaaggccgtaacgtggttctggataaatctttcggtgcgccgactatcactaaagatggtgtttccgtagcgcgtgaaatcgagctggaagacaagtttgaaaacatgggcgcgcagatggtgaaagaagttgcctctaaagcgaacgacgctgcaggcgacggcaccaccaccgcgaccgtactggcgcagtccatcattaccgaaggcctgaaagccgttgctgcgggcatgaacccgatggacctgaaacgtggtatcgacaaagcggttgctgctgcggttgaagagctgaaggcgctgtccgtaccgtgctccgactctaaagcgattgctcaggtaggtactatttccgctaactccgacgaaaccgtaggtaaactgatcgcggaagcgatggataaagtcggtaaagaaggcgtcatcactgttgaagacggtaccggtctgcaggacgaactggacgtggttgaaggtatgcagtttgaccgcggctacctgtctccttacttcatcaacaagccggaaactggcgcagtagaactggaaagcccgttcatcctgctggctgataagaaaatctccaacatccgcgaaatgctgccggttctggaagccgttgcaaaagcaggcaaaccgctgctgatcatcgctgaagatgttgaaggcgaagcgctggctaccctggtagtgaacaccatgcgtggcatcgtgaaagtggctgcggttaaagcaccgggcttcggcgatcgtcgtaaggcgatgctgcaggatatcgctaccctgaccggcggtaccgtaatctctgaagagatcggtatggagctggaaaaagcaaccctggaagacctgggtcaggcgaaacgtgttgtgatcaacaaagacaccaccaccatcattgatggcgtgggtgaagaagctgccatccagggccgtgttgctcagatccgtcagcagattgaagaagcgacctccgactacgatcgtgaaaaactgcaggagcgcgtagcgaaactggcaggcggcgttgcggtaatcaaagttggcgctgcgaccgaagttgaaatgaaagagaagaaagcccgcgttgaagatgccctgcacgcgacccgtgctgcggtagaagaaggcgtggttgctggtggtggcgttgcgctgatccgcgttgcttctaaaattgctgacctgaaaggccagaacgaagaccagaacgtgggtatcaaagttgcgctgcgcgcaatggaagctccgctgcgtcagatcgtgctgaactgcggcgaagagccgtctgttgtcgctaacaccgttaaaggcggcgacggtaactacggttacaacgcagcaactgaagaatacggcaacatgatcgatatgggtatcttggacccaaccaaagttacccgttctgcgctgcaatacgcggcttctgtggctggtctgatgatcactaccgagtgcatggtgaccgacctgccgaaaagcgatgctcctgatttaggcgctgctggcggcatgggtggtatgggtggtatgggcggcatgatgtaa

SEQ ID NO: 39854 - DNA, 372 bp, Salmonella typhi
ttgattatggggaataacatgcacgtgaaatatttagcagggatcgttggcgccgcgctgctgatggcgggttgtagctccagcaacgaactcaccgctgccggccaaaatgtacgctttgtcgaagataagccgggcgcggaatgccagcttattggtacggcaactggtaaacagagtaactggttttcaggccagcacggcgaagagggtggctcaatgcgtggcgcagcgaacgatctgcgtaatcaggcggccgcgatgggtggaaacgtgctgtatggcgtaagtagtccgtcgcagggcatgttgtccagttttgtcccgacggccagcgagatgaacggccaggtttataaatgtccgaattga

SEQ ID NO: 39855 - DNA, 1260 bp, Salmonella typhi
atgaccactcaactggaacaagcctgggaactggcaaaacaacgtttcgccgcagtaggtattgatgtcgaggaggcgctgcgccagctcgatcgcctgccggtttccatgcactgctggcagggcgacgatgttgccggattcgagaacccggaaggttcgctgacgggcggaattcaatcgaccggcaactatccgggcaaagcgcgtaacgccaccgaactgcgcgccgatctggaacaggcgctgcgtctgatcccaggccccaaacgtctgaacctgcatgcgatctatctggaatccgatacgccggttgcccgcgaccaaatcaaaccggagcattttaaaaactgggtggagtgggcgaaagcgaaccgactggggctggatttcaaccccacctgtttttctcatccactgagcgctgacggttttaccctctctcatccagacgcgaaaattcgccagttctggatcgatcactgcaaagccagccgccgcgtctcggcatactttggtgagcagctcggtacgccgtcggtgatgaacatctggattccggacggcatgaaagacattaccgtcgaccgtttagccccgcgccagcgcctgctggaagcgctggatgaggtcattagcgagaaattcgacccggcgcaccacatcgacgccgttgagagcaaactgtttggcatcggcgcggaaagctacaccgtcggctccaatgagttctacatgggctacgccaccagccgtcagaccgcgctgtgtctggatgcgggccacttccatcccactgaagtgatttccgacaaaatttccgccgccatgctctatgtgccacggctgctgctgcacgtcagccgcccggtacgctgggatagcgaccacgtggtgctcttggacgatgaaacccaggcaattgccagcgagatcgtccgtcataacctgttcgaccgtgtgcatatcggcctggatttcttcgacgcctctatcaaccgtgtcgccgcgtgggttatcggtacccgcaacatgaaaaaagcgctactgcgcgctctgctggaacccacagatcaactgcgtcagcttgaggccagcggcgattacaccgcgcgtctggcgatgctggaagagcaaaaatctctgccgtggcaggccgtctgggaaatgtattgccagcgtcacgacacgccggctggcagccagtggctggacagcgttcgcacctacgaaaaagagatcctgagcaaacgtagctga

SEQ ID NO: 39856 - DNA, 315 bp, Salmonella typhi
atgatccgcaaagcctttgtgatgcaggtaaatgccgacgcgcacgaggagtatcagcgtcgtcataacccaatctggccggagctggaagccgtattaaaatctcacggcgcgcatcactacgcgatttatctcgatcaggagcgcaatctgctgttcgccaccgttgagattgaatccgaggagcgctggaacgccgttgccagcaccgacgtttgccagcgttggtggaaacatatgcgtgacgttatgcccgcgaatccggataacagcccggtcagcgcagagctaaaagaggtgttctatctgcagtaa

SEQ ID NO: 39857 - DNA, 765 bp, Salmonella typhi
atggcctacagcaaaatccgccaaccaaaactctccgatgtgatcgagcagcagctggagtttttaatccttgagggaacattgcgtcccggagaaaaactcccaccggaacgtgaactggcaaaacagttcgacgtctcccgtccctccttgcgcgaggcgattcaacgtctcgaagcgaagggattgttgcttcgtcgccagggcggcggaaccttcgtgcagagcagcctgtggcagagctttagcgacccgctggtggaactgctctccgatcaccctgaatcccagtttgacctgctcgaaacgcgccatgcgctggaaggcattgcggcttattacgcggcgctgcgcagcaccgacgaagataaagaccgtattcgcgagctgcaccacgctattgagctggcgcaagagtccggcgatctggatgccgagtccgaagccgtgctccagtatcaaatcgccgtcaccgaagcggcgcacaacgtggtattgcttcatctgctaaggtgtatggagccgatgctggcgcaaaacgtgcggcagaacttcgaattgctgtatgcgcgtcgggagatgctgccgctggtgagcacgcatcgcacccgtatatttgaagccattatggccggaaaaccagaagaagcgcgtgaagcgtcacaccgacatctggcgtttatcgaagagattatgctggacagaagccgtgaggagagccgtcgtgaacgcgctttacgccgcctggaacagcgcaagaattag

SEQ ID NO: 39858 - DNA, 1890 bp, Salmonella typhi
atggctatcgaaatcaaagtaccggacatcgggacagatgaagttgaaatcaccgagattctggtcaaagtgggcgacaaagttgaagctgaacagtcgctgatcaccgtagaaggcgacaaagcctctatggaagtcccgtctccgcaggctggcgtcgtgaaagagatcaaagtctctgtcggcgacaaaactgagaccggtgcacttatcatgattttcgattccgccgacggtgcagctgacgctgcgcctgctcaggcagaagagaagaaagaagcggcgccggcagcagcacctgctgcggcagcggcgaaagacgttcacgttccggatatcggcagtgacgaagttgaagtgactgaagtgatggtgaaagtgggcgacaccgtagaagctgaacagtcgctgatcaccgtcgaaggcgacaaggcctctatggaagttcctgctccgtttgcaggcaccgtgaaagagatcaaagtgaacaccggtgataaagtgtctaccggctctctgattatggtcttcgaagtggcgggtgaagcgggcgcagcagcaccagcgaaagcggaagccgctccggctgcggctgctccagcagcagcgacgggcgtgaaagacgttaacgtaccggacatcggcggcgacgaagttgaagtcaccgaagtgatggtcaaagtcggcgataaagttaccgctgaacagtcgctgatcaccgtggaaggcgacaaagcctctatggaagtgcctgcgccgttcgcgggcaccgtgaaagaaatcaaaatcagcaccggcgataaagtgaaaaccggctcgctgattatggtcttcgaagtggaaggcgcagcgcctgcggccgctccggctaaacaggaagcagcggcgccggctccggcggcgaaagctgagaagcctgctgccccggctgccaaagccgaaggcaaatctgagttcgctgaaaacgacgcttacgttcacgctaccccactgattcgccgtctggcgcgcgagtttggcgtcaacctggcgaaagtgaaaggcactggtcgtaaaggccgtattctgcgcgaagacgttcaggcttacgtgaaagacgctatcaaacgcgcggaagctgcgccggctgctgcgggcggcggtatcccgggtatgctgccgtggccgaaagtggacttcagcaagtttggtgaagttgaagaagtggaactgggccgtatccagaaaatctctggcgcgaacctgagccgtaactgggtgatgatcccgcacgttacgcacttcgacaaaaccgatatcaccgatctggaagcgttccgtaaacagcagaacgccgaagctgagaagcgcaaactggatgtgaaatacacgccagtggtcttcatcatgaaagcggttgccgctgctctggaacagatgccgcgcttcaacagctctctatccgaagacggtcagcgtctgaccctgaaaaaatacatcaacatcggcgtggcggttgataccccgaatggcctggtggttccggtctttaaagacgtgaataagaagagcgtgaccgagctgtctcgtgaactgaccaccatctccaaaaaagcgcgtgatggtaagctgaccgctggcgaaatgcagggtggttgcttcactatctccagcatcggcggcctgggaactacccactttgcgccgattgtcaacgcgccggaagtggctatcctcggcgtttctaagtcggcgatggaaccggtgtggaatgggaaagagtttgtgccgcgtctgatgatgcctatctctctttctttcgaccaccgtgtgatcgatggtgctgatggtgcgcgtttcattaccattatcaacaatatgttgtctgacattcgccgtctggtgatgtaa

SEQ ID NO: 39859 - DNA, 1428 bp, Salmonella typhi
atgatgagtactgaaatcaaaactcaggtcgtggtacttggggcgggcccggcaggctattctgccgctttccgttgcgctgatttaggtctggaaaccgtaattgtagaacgctacaacacccttggcggtgtttgtctgaacgtcggctgtatcccttctaaagcgctgctgcacgtagcaaaagttatcgaagaagccaaagcgctggctgaacacggtatcgtcttcggcgagccgaaaaccgatatcgacaagattcgtacctggaaagagaaagtgatcacgcagctgaccggcggtctggctggtatggccaaaggccgtaaagtgaaagtggtcaatggtctgggtaaattcaccggggctaataccctggaagtggaaggcgaaaatggcaaaaccgtgatcaacttcgataacgcgatcatcgcggcgggttctcgtccgatccaattaccgtttattccgcatgaagacccgcgcgtatgggattctaccgacgctctggaactgaaagaagtgccgaagcgtatgctggtcatgggcggcggtatcatcggtctggaaatgggtaccgtataccacgcgctgggttcagagattgacgtggttgaaatgttcgaccaggttatcccggcggctgataaagacatcgttaaagtcttcaccaaacgcatcagcaagaaattcaacctgatgctggaaaccaaagtgactgccgttgaagcgaaagaagacggtatctacgtttcgatggaaggcaaaaaagccccggctgaagcgcagcgttatgatgcggttctggtggcgattggtcgtgtgccgaacggtaaaaacctcgacgcgggcaaagctggcgtggaagttgacgaccgtggctttatccgcgtcgacaaacagctgcgcaccaacgtgccgcacatcttcgctatcggcgatatcgtcggtcagccgatgctggcgcacaaaggcgttcacgaaggccacgttgccgctgaagttatcgccgggaagaaacactacttcgatccgaaagttatcccgtctatcgcgtacaccgagccagaagtggcatgggttggcctgaccgagaaagaagcgaaagaaaaaggcatcagctatgaaaccgccaccttcccgtgggcagcttctggccgtgctatcgcttctgactgcgcagacggtatgaccaaactgattttcgacaaagaatctcaccgcgtgatcggcggggcgattgtcggtaccaacggcggcgagctgctgggtgaaatcggtctggcgatcgaaatgggctgtgacgcggaagatatcgcgctgaccatccatgctcacccgactctgcatgagtccgtgggcctggcggcggaaatcttcgaaggtagcattaccgacctgccaaacccgaaagcgaagaagaaataa

SEQ ID NO: 39860 - DNA, 1623 bp, Salmonella typhi
atgacgttgccctttaaaccccatctcattgcccttgtgtgcagtgccgggttatttgccgcttcgggcgtactgtatgttaaaagccgcgctcccgaagcgcccgcgcaggcggcagctcccacctctgagccaacgcagaccgctgtgcccgcgcctgtcgcgaaaacgacctttaccactgcgcaaatcgatcaatgggtcgcgcctgtcgcgctttatcccgatgccctgctttcgcaggtgctcatggcctccacctacccggcgaacgtggttcaggccgtccagtggtcgcgggataaccccacgctgcagggcgatgccgctattcaagcggtggccagccaaccgtgggaccccagcgtcaaatcgctggtcgcctttcctcagttgatggcgcttatgggcgagaatccgcaatgggtgcaaaacctgggcgatgcgttcttagcccagccacaggatgtgatggatgcggtgcaaaggctgcgtctgctcgctcaacaaaccggttcgctaaaatccacgccacagcaaaccgtcaccagcgtgccgaagtccagcgcttctaccgccgtcacgacgacaaccaccacatccgccagtacgccagcaacaccgtcgaccgtcatcaaaattgaacctgcgaatccgcaggtggtgtacgtgccaaactataaccccacgacggtgtatggcgcctggcccaataccgcttatccgccggtgtatttaccgccccctccggggcagcagtttgccgacagttttgttaaaggttttggttatagtctgggcgtcgccaccacctatgcgttgttcagcagcatagactgggatgacgacgatcatcaccaccatgacgacgaccatcatgatgatgattaccatcatggtggtaacggttatcaacataatggcgataatatcaacatcaatgtcaataatttcaaccggatatccgggcaaaacctgccgggccaaacgatgggctggcagcataatcccgcctggcgcaatggcgtcccctatccgaataataccgttgcgcaacggttccatcccaccaatgttagcggcgggttaagcgcaacgcagcaagcgccagtgtctcgcgacagtcagcgccaggcagccatggcgcaattccaacagcgcagccatacatcacccgctaacgtgtcaggcgagacatcccgcgacagacagcgcaaagcggcatcgcagcagttaaatcaaattgcccagcgtaataattaccgtggctatgacggaacacaaaacagcagtcgtcgcgaggcggcgcagcagacactgaataaatccaccacgcagcagcatcgttccgagctgaaggctaaagcccagcagcaccctgtttcacaacagcagagagacaccgcccgccagcgtattgaatcctctacgccacagcagcgtcaggcatttcgccagaatatgcacgccaatgtgtttagcgggaacgacagtcgatcgccgtcatggcaatcgcaacagctacgcggcctagaaagccgtcgcggcagtcacttgaacaccgagcaacgcgccgccgcgcgggaacatttttctgaacatcatgaatttcatcgccgttaa

SEQ ID NO: 39861 - DNA, 2598 bp, Salmonella typhi
gtgctagaagaataccgtaagcacgtagctgagcgtgctgcccaggggattgtgccgaaacctttagacgcaacccaaatggctgcgcttgtcgagctgctgaagaccccgcctgtgggcgaagaagaattcctgttagacctgttgatcaaccgcgttcctcctggcgtcgatgaagccgcttatgttaaagccggttttctcgctgctgtcgcgaaaggcgacaccacctccccgctggtctccccagaaaaagccattgaactgctgggcaccatgcagggtggttacaacattcatccgctgattgacgcgctggacgatgcgaaactggcgccgattgcggccaaagcgctgtctcacaccctgctgatgttcgataacttctacgacgtagaagagaaagccaaagcgggcaatgaatatgccaaacaggtgatgcaatcttgggccgacgccgaatggttcctgagccgtccgccgctggcggaaaaaatcaccgtcaccgttttcaaagtgaccggcgaaacgaataccgacgatctctctccggcgccggatgcgtggtcgagaccggatatcccgttacatgcgcaggcgatgctgaaaaacgcccgtgaaggcattgagccggatcagccaggcgttgtcggcccgatcaaacaaatcgaagcattgcagaaaaaaggctacccgctggcctacgtgggtgacgtggtgggcaccggttcttcccgtaaatccgcgaccaactccgtgctgtggttcatgggcgatgacatcccgaacgtgccgaacaagcgcggcggcggtctgtgcctcggcggcaaaattgcgcctatcttctttaacaccatggaagatgcgggcgcgctgccgattgaagttgacgtttctaacctgaacatgggcgatgtaattgacgtctacccgtacaaaggcgaagtgcgcaatcatgaaaccgatgaactgctggcaaccttcgaactgaaaaccgacgtgctgatcgacgaagtacgcgccggtggccgtattccgctgattatcggacgtggcctgaccaccaaagcgcgtgaagcgctgggtctgccgcactctgacgttttccgtcaggcaaaagacgtggcagaaagcagccgtggcttctctctggcgcagaaaatggtcggtcgcgcctgcggcgtgaaaggcattcgtccgggcgcgtactgcgaaccgaaaatgacctccgtcggttctcaggatactactggcccgatgacccgtgatgagctgaaagacctggcctgtctgggattctccgccgatctggtcatgcagtcgttctgtcacaccgcagcctatccgaagcccgttgacgtcaccacgcaccacacgctgccggacttcattatgaaccgcggcggtgtctccctgcgtccgggcgacggcgtgatccactcctggctgaaccgtatgctgctgccggacaccgtcggtaccggcggtgactcccatacccgtttcccgattggtatctctttcccggcgggttctggtctggtggcgtttgccgccgcgaccggcgtgatgccgctggatatgccggaatcggtgctggtgcgcttcaaaggcaaaatgcagccgggcatcaccctgcgcgatctggtccatgccatcccgctgtacgccatcaaacagggcctgctgaccgttgagaagaaaggcaagaaaaacatcttctctggccgcatcctggaaatcgaaggtctgccggatctgaaagtcgagcaggcgtttgagctgaccgatgcttctgccgagcgttccgctgccggttgtaccatcaagctgaacaaagagccgatcgttgaatacctgacctccaacatcgtcctgctgaagtggatgatcgccgaaggctacggcgaccgtcgtacgctggaacgtcgtatccagggtatggaaaaatggctggcggacccgcagctgctggaagccgatgctgacgcggaatacgcagcggtgatcgacatcgatctggcggatatcaaagagccaatcctctgtgcgccgaacgatccggacgacgcgcgtctgctgtctgacgtgcagggcgagaagatcgacgaagtgttcatcggttcctgcatgaccaacatcggccacttccgcgcggctggtaagctgctggatagccacaaaggccagttgccaacccgcctgtgggtagcgccgccaacccgtatggacgctgcgcagctgaccgaagaaggttactacagcgtgtttggtaagagcggtgcgcgtatcgaaatcccgggttgttccctgtgtatgggtaaccaggcgcgtgtggctgacggcgcgacggtggtttccacttctacccgtaacttcccgaaccgtttaggtactggtgcgaacgtcttcctggcttctgcggagctggcggcggttgcagcgcttattggcaaactgccgacgccggaagagtaccagacctttgtggcgcaggtggataagacggcggtggatacctaccgttatctgaacttcgaccagctctctcagtacactgagaaagcggatggggtgattttccagactgcggtataa

SEQ ID NO: 39862 - DNA, 774 bp, Salmonella typhi
atgtcagagacatttgatccacgctgtgtatggttcgtcggcgccgggccgggcgatcgcgagctgatcacgcttaaaggctaccgcctgctgcaacaggcgcaggtagttatctatgccggttcgctgatcaataccgaactgctggattactgccccgcgcaggcagaacgctacgacagcgccgaactgcatcttgagcagattatcgagctgatggccgcgggcgtgaaagcgggaaaaacggtggtgcggttgcaaacgggcgatgtctcgctgtacggctccgtgcgtgagcaaggcgaagagttaacccgccgtggtatcgactggcaggtagtgcctggcgtcagcgcgtttctcggcgctgcggcggagctgggtgtggaatataccgtaccggaggtatcgcagagtctcattattacccgtctggaagggcgtacgccagtaccggcgcgcgaacaactggaggcgttcgccagtcaccagacgtcgatggcgatttatctctccgttcagcgtattcatcgggtggcggaacgtctcattgccggcggttatccggcaactacgcctgtcgcagtcatctataaggctacctggccggaaagccagaccgttcgcggcacgttagcggatattagcgacaaagtacgtgatgctggcatccgtaagacggcgctaatcctggtcgggaattttctgggtaaggagtatcactactcaagactttatgcagcggactttagccatgaataccgtaaagcctga

SEQ ID NO: 39863 - DNA, 978 bp, Salmonella typhi
atgagcgaaacggcaacctggcagccgagcgcgtccatccccaatttattaaaacgtgcggcgattatggcggaaatccgtcgtttctttgccgatcgtggagtgcttgaggttgagacgccctgcatgagtcaggcgacggtcacagacattcatctgttcccgttcgaaacgcgtttcgtcggacctggccattcccaggggatcaacctctatttaatgaccagtccggaataccatatgaaacgcctgctggcggcagggtgcggtccggttttccagctatgccgcagtttccgtaatgaagagatgggacgacatcataatccggaattcaccatgctggagtggtatcgcccgcattacgatatgtaccgcctgatgaatgaagtggatgatttgcttcagcaagtgctggattgtcaacctgcggaaagtctctcctatcaacaggcgtttctgcgccatctggagattgacccgttatcagcagataaaacgcagctgcgtgaggcggcggcaaagcttgatttaagcaatatcgccgatacggaagaagaccgtgatacgttgctgcaactgctgttcacgatgggggttgagccgcatataggtaaagaaaagccgacctttatttatcactttccggccagtcaggcatcgctggcacaaatcagtaccgaggatcatcgcgtcgccgagcgctttgaggtgtactacaaaggtattgagctggcgaatggtttccacgaactgacggacgcacgtgagcaacaacagcgctttgaacaggacaatcgtaagcgcgccgcgcgcggtctgccgcagcagccgattgaccaaaatctactggatgcgctggccgccggtctaccggattgttccggcgtggcgctgggtgttgatcgtctggtgatgctggcgctgggagcagaaagcctggcggacgtgattgcttttacggtcgatcgggcgtaa

SEQ ID NO: 39864 - DNA, 636 bp, Salmonella typhi
atgaaacgacgtgacaccatcgtgcgctatacggcgccggaacgcatcaaccactggatcgtcgccttctgcttcgtgctggcggcggtgagtgggctgggctttttattcccatccttcaactggttgatgcatatcctgggcaccccacaactggcgcgaattctgcacccgtttgtgggcgtggttatgtttgcctcgttcatcatcatgtttttccgttattggcaccacaatctaatcaatcgggatgatatcttttgggcaaagaatattcgtaagatcgtcgtcaacgaggaagtgggtgacaccgggcgttataacttcggtcagaaatgcgtattctgggcggcgattatcttcctggtgctgctgctggtgagcggggtaattatctggcgtccgtactttgcgcctgctttctcaatcccggtgatccgattcgcgttaatgttgcattcttttgccgcagtagcgttaattgtggttatcatggtgcatatctacgccgccctttgggtgaaaggcaccattaccgcgatggtggaaggctgggtaacccggtcgtgggcgaagaaacatcacccacgctggtaccgagaagtccgcaagacaacggaaaaagaaactgaatga

SEQ ID NO: 39865 - DNA, 1503 bp, Salmonella typhi
atgacccacacgataaaaaagatgagccttattgggcttatcctgatgatttttacttctgtttttggttttgcgaatagcccgtcggcgttttatttaatggggtatagcgcaatcccgtggtatatattttctgccttgctgttttttattccattcgccttaatgatggctgaaatgggttccgcttatcgcaaagaagagggcgggatctattcgtggatgaataatagcgtggggccacgttacgcgtttattggcacgtttatgtggttttcatcgtatgtcatatggatggtaagtacggcggcaaaaatttgggtaccgttttctacttttgtttttggcgccgatatgacgcagcactggcgtattgcagggcttgagcctacgcaggttgtcgggctgctcgccgtcggctggatgattctggtgacgtgtgtcgccgccagagggatcaataaaattgcgcgaattacggcggtcggaggtattgccgtaatgtgtcttaatttagttttattgttagtgagtgtcgctattttgttattaaatggtgggcattttgcacaagagattaattttacctcgtcaccgaatccgggttatcactccggcctggcaatgttgtcatttgtggtatttgctatttttgcttacggcggtattgaggctgtcggcggactggtggataaaaccgagaaaccggaaaagaattttgcgaaaggtattgttttcgcggccattgtgatttcaattggttattctttggcgatctttttatggggcgtcagtactaactggcaacagatattaagtaatagcgccgttaacttagggaatatcacctacattctgatgtcgagtttaggcacgacattaggtaacgcgttaaacctttctccggaagctgcgatgacggtgggcgtctggtttgcgcgtatcaccggcctttctatgtttctggcttataccggcgcgttttttacgttgagctattcaccgctgaaagccattattcaggggacgccaaaagcgttgtggcccgcgccgatgacgacactgaacgctaacggtatgccggcgaccgctatgtggctacagtgcgtgctggtgagtctgtttattttgctggtctcttttggcggtgacaccgcatcggcgttttataacaaactcacgctgatggcgaacgtctcaatgaccttgccatacctgttccttgcgctggcatttcccttctttaaagcgcgtcaggatctggagcggccatttgttctctttaaaaccaaagcctctaccctggtcgcgacgggtgttgtggtgctggtggtgacgtttgccaacgtctttaccatcatccagccagtgattgaagctggggactgggacagcgccttgtggatgatcggcggcccgatcttcttctcgctgctggcgatggcgatttatcagaattacagcagccgcatgagcgctgatccggagtgggcggcggagtaa

SEQ ID NO: 39866 - DNA, 930 bp, Salmonella typhi
atgagtattcgcataatcccgcaagatgagctggggtcgagcgagaaacgtacggcggatatgattccgccgttattgttcccccgactcaaaaacgtctacaaccgccgcgccgaacgtctgcgcgagctggctgaaaataacccgctgggcgattacctgcgctttgccgcgcttatcgcgcacgcgcaggaagtggtgctgtacgaccatccgctggagatggatctgaccgcacgcattaaagaagcgaacgaccagggcaagccgccgctggatatccacgtgctgccgcgtgataagcactggcaaaaactgctgcattcgttaattgccgagctaaaacccgagatgaacggccccgcgctggcggtgattgagaacctggagaaagcctcagagcaggagctagagcagatggccagcgcgctgtttgcctcggattttgcctccgtcagcagcgataaagccccgtttatctgggccgcgctctccctttactgggcgcaaatggccagcttgattccaggcaaagcccgcgcggaatacggtgaagcgcgccagtattgcccggtatgcggttcgatgccggtctccagcatggtgcaaatcggcaccacgcaggggctgcgttatctgcactgtaacctgtgcgaaaccgaatggcacgtcgtgcgcgtaaaatgcagtaactgcgaacagagccgcgacttacactactggtcgctggaaaatgagcaggctgcggtgaaagccgaaagctgcggcgattgcgggacttacctgaagattctctatcaggaaaaagacccgaaagtggaagcagtggccgacgacctcgcctcgctggtgctggacgcgcgcatggaacaggagggcttcgcccgaagctctatcaacccgttcctgttcccgggggaaggggaataa

SEQ ID NO: 39867 - DNA, 378 bp, Salmonella typhi
atgccggataaggccccacgggtcgcatccggcgtttattgccctatggagaacgtgatgaatgatagttcgagagacccgattatcacggaagatgagattagggcactcaattttactccggaagatatccttgaaatagaaaaggttattctttcttccgttcatgttgcacgtcgaaaggttgcgatggtagtaggaatgactattggcacgttaagggatcgcgatgaggataagtggaaacatgtgtcggatatttattgcgcgtatgttgtaagatgcctcgtatttcgcggagaactggtgggttacggcgatttattccgaatgcgctatagcgaaattaacctgcctgttgccgatctggacgcataa

SEQ ID NO: 39868 - DNA, 915 bp, Salmonella typhi
atgatttctgcgagcgctctgaactcagaactcattaataaaatcgcacaggattttgcacaagccaccaccggtctggcggttgtggttgtcaatattcatggtgatgaaatatctgagctattcaatttcacgccgttttgtcagttgatgcggcagcatccccagcatagtacacgttgtcgtatgagcgatcgctgcgggggactggaggcatcgaagtccgatcaaccctgtatttatcgttgtcatgccggtctaacggatttttctattccgctggtaatcgcagggcatttagttggctttgttttatgcgggcaggttcgtttaagtaatgacgtggagctggtaaacattcttaatgtcgacgatcgctggcaggctgaccctgagctcttgaatgaatttcggaatgtgccagagatggactattcacgcgttatcgcttccgccgatcttcttaaactgatagttgagaattgcctgaaaaaacagctcaatttcgtggttatcaaagacaatccgcagcaatcggaggcaaataaaaccactcgtggccccactccgcatgacagtaaaatgaaaaaagcgcttcgctatattgatgcgcatttgtccgacgatcttcgtcttgaggatgtcgcctcacatgtctatctcagcccctattacttcagtaagctattcaagaaatatcagggaatcggatttaatgcgtgggtgaaccgccagagaatggttagcgccagagaattgctttgccatagtgactggagtattgccagtattgcgcgtaatttaggcttttcgcaaaccagttatttttgcaaagtcttccgccagacctatcaggttacgccgcaggcttatcgtcagcagataaatgagaattctcatcctccatcgatataa

SEQ ID NO: 39869 - DNA, 2568 bp, Salmonella typhi
atgaatgagtcatttgataaggacttctccaaccacacccccatgatgcagcagtatctcaagctgaaagcccagcatccggagatcctgctcttttatcgtatgggagacttttacgagctgttttatgacgacgcaaagcgtgcgtcgcagttgctcgatatttcgctgaccaaacgcggcgcatcggctggcgaacctatccctatggcgggtatcccgcaccacgccgtagaaaactacctcgcgaaactggtcaatcagggcgaatccgtcgctatttgcgaacagattggcgatccggccaccagcaaaggtcccgttgaacgtaaagtcgtgcgtatcgttacgcctggcaccatcagcgatgaagccctgttacaggagcgtcaggataacctgctggcggctatctggcaggatggtaaaggctacggttacgccacgctggatatcagctccgggcgctttcgtctgagcgaacccgccgaccgtgaaacgatggccgcagagctgcagcgcaccaatcccgccgaactgttgtatgccgaagattttgctgaaatggcgttaatagagggacgccggggtctgcgccgtcgcccgttgtgggagtttgagattgataccgcccgccagcagttaaatctgcaattcggtacgcgggatctggtcggtttcggcgtcgaaaatgcctcgcgtggattatgtgcggcaggctgcctgttacagtacgtaaaagatacccagcgcacctccctgccgcatattcgttccattacgatggaacgccagcaggacagcatcattatggatgccgcgacccgccgcaatctggaaattacccagaacctggccggcggtgtcgaaaataccctcgccgcggtgcttgactgtaccgtgacgccaatgggtagccgaatgcttaaacgctggctgcatatgccggtacgaaataccgacatattacgtgaacgccagcagaccatcggcgccttgcaggataccgtcagcgaactgcaaccggtgctgcgtcaggtcggcgatctggagcgcatccttgcgcgtctggcgctgcgcaccgcgcgtccgcgcgatctcgcccgaatgcgtcacgccttccagcagctgccggaattgcacgctcagcttgaaaccgttgacagcgcgccggtacaggcgttgcgtaaaaaaatgggcgatttcgccgaactgcgcgacctcctggagcgcgccattattgacgcgccgccggtactggtccgcgacggcggcgttattgcgcccggctaccatgaagagctggatgaatggcgcgcgctggcggacggcgccaccgattatctcgatcgtctggaaattcgcgaacgcgagcgtaccgggctggatacgctgaaagtcggctataacgcggtacatggttattacattcagattagccgtggtcaaagccatctggcgcccatcaattatgtgcgtcgccagacgctgaaaaatgccgaacgctacattattcctgagcttaaagagtacgaagataaagttctgacctcgaaaggcaaagcactggcgctggaaaaacagctatatgacgaattgtttgatctgctgttgccgcatctggccgatttacagcagagcgccaacgctctggcggagctggatgtgctggttaacctggccgaacgcgcctggacgctgaattacacctgcccaacatttaccgataaacccggtatccgtattaccgaaggtcgccacccggtggttgaacaggtactgaatgagccgtttatcgctaacccgctcaatctgtcgccgcagcgccggatgttgatcattaccggccccaatatgggcggtaaaagtacctatatgcgacaaacggcattgatcgccctgctggcctatatcggcagttacgttccggcgcaaaacgtggaaatcggccccatcgaccgtatttttacccgcgtcggcgcagcggacgacctggcttccgggcgttcgacctttatggtggagatgaccgaaaccgcgaacattctgcataatgcgacggaaaacagtctggtattgatggatgaaatcgggcgcggtacctccacgtatgacgggctgtcattggcctgggcctgcgcggagaatctcgcgaataagattaaagcgttaacgctgttcgctacccactacttcgagctgacccaattaccggagaaaatggaaggcgtggcgaacgtccacctggatgcgctggaacacggcgatactatcgcgtttatgcacagcgtgcaggacggcgcggcaagtaagagctatggcctggcggtcgcggcgcttgcgggcgtccctaaagaagtcatcaaacgcgcgcgccaaaaactccgcgagctggaaagcatctcgcccaatgcggcggcaacgcaggtggacggcacgcaaatgtcgttgcttgccgccccggaggagacatcgcccgccgttgaagcgctggagaatctcgatccggactccctgacgccacgccaggcgctggagtggatctatcggctgaaaagtctggtgtaa

SEQ ID NO: 39870 - DNA, 879 bp, Salmonella typhi
atgaacaactacaccatcaaagacattacgcgagcgtccggcgggtttgccatgctggctgtcgatcagcgcgaggcgatgcgtttaatgtttgctgctgctggtgcgaaaacacccgttgccgatagcgtgctgacggatttcaaagtgaatgcggcgaaaattctttccccgtatgcctctgccgttctgctggatcagcagttctgttatcgccaggccgtagaacaaaacgcggtcgctaaaagctgcgccatgatcgtcgcggcggatgatttcatcccaggcaacggtattcccgttgataacgtggtcattgataaaaaaattaatgcgcaggcggtaaaacgggatggcgcgaaagccttaaaactgttggtgctgtggcgcagcgatgaagacgcgcagcagcgtctggatatggttaaagaattcaatgaattatgtcactccaatggtttgctgagcattatcgaaccggttgtacgtccgccgcgctgcggcgacaagttcgatcgcgagcaggcgattatcgatgcggccaaagagctgggcgacagcggcgccgatctttacaaagttgaaatgccgctctacggcaaaggcgcgcgttccgatcttcttaccgcctcacaacgcctgaatgggcatatcaatatgccgtgggtcatcctctcttccggtgtggacgaaaaactgttccctcgcgcagtcagggtcgccatggaagctggcgcatccgggttcctggcgggacgcgcggtctggtcatcagtgattggtttaccggataccgagctgatgctacgtgatgtttccgcgcctaaattgcaacgtctgggcgagatcgtcgatgaaatgatggcaaaacgtcgttaa

SEQ ID NO: 39871 - DNA, 795 bp, Salmonella typhi
atgagcaaacccactactatcgctgtgctgcagaaatgcaaacaagagaaaaagcgcttcgccaccattaccgcgtacgattacagcttcgccaaactcttcgccgatgaaggcatcaatgtgatgctggttggcgactcgctgggcatgacaattcaggggcacgactccaccctgcctgtcaccgtggaagatatcgcctaccacacccgcgcggtacgccgcggcgcgccgaactgcctgctgctctccgacctgccgtttatggcttacgccacgccggaacaggcgtttgaaaacgcggctatcgtgatgcgtgcgggggccaacatggtcaaaatcgaaggcggcgcatggttggttgatacggtgaaaatgctcaccgaacgcgccgtgccggtgtgtggccatctgggattaactccccagtcggtgaatatcttcggcggctataaaattcagggccgcggcgatgccgggcagatactgctggatgatgcgctggccttagaagcagcgggcgctcaactgctggtgctggagtgcgtgccggttgaactggcgaagcgcgtcacggaagcgctgtcgattccggtgatcggcatcggcgcgggcaacgtcaccgacggtcagatcctggtgatgcacgatgcgtttggcatcaccggcggtcatattccaaaattcgcgaaaaatttccttgccgaggcgggcgacatgcgcgccgccgtacggcagtatatggcagaagtggagtccggcgtttatccgggcgaagaacacagctttcactaa

SEQ ID NO: 39872 - DNA, 1176 bp, Salmonella typhi
atgcttttaaaaaacacaacatggtttgccgcctttttcctgatgatggctatcatgtccaactgttatgccataaatactaccctggccgttggcgactacgcctccagtgaacatgatggcccaagcggggattcggtattcactgataacagccacaattttgggcagaccatcgcgattcataaggaaacggcgctgcgccagattaccgtttttaactggtccggcatccagtacgttatggagatgttctgtaacggcagcggcaaccacacctaccttcaactgacccataattatatctctgctggcaaaagctataatggacatccgctgtataaaacctcaattcccggtttttatttcaccattgagatgaccttccttcagccagcagagaatatgacctcaagcaccttctggtttgataagacctcaacgccgatcaccagcgagttcacggaatttccgtcagcctgctccagaacaaatgtttatagcaaccttggcaaattaatgtatggcctgaaaatctatgcctatgtcgactctgacttcgcgccgacggaagcccagcttcaaagctttacgctgtctaaaaacggcgactccgatttctacattgataacccgggcagcggattatcaaactataaaatgaagtttaacctcgccgccacaggacttaaggccgtctggccaacctgctcggccagcaccattagcggcaccaatgtttcgggatcaacggttaagctgggtagcttttatccaaagcagattatggaagggctgtcgccgaccaagttccagatcaatctctcctcctgccagtacatcaataatattgaagttaaattggccagtaataatgtcgggacgaaaaacacctcgctactaaccaacaattcaaccagcaacacgaaagccagcggcattggcgttttaattgaaggtttgaaaagtagttcgagcgcccagatggtactcaaacctaacgactcaagctcaatttataaagataccaccaataacaccggagacggcagcccggtaggaagcgcgacaaaatcgttgtatttccaggcaaccttaaagcccgatggtgacaatccaacaatcaatccaggtgatttcaaagccaccgctcaattttcaatcacctatccgtaa

SEQ ID NO: 39873 - DNA, 405 bp, Salmonella typhi
atggagttacgaaacaccgcgtttcatctgttacgccaactttttcagcaacataccgcacgctggcagcatgaactaccggagctcaccaaacctcaatatgcggtgatgcgcgttattgctgaacatccgggtattgaacaggtcgatctgaccgaagcggcggtcagcactaaagcgacgctggcggagatgttaagccggatggaaaatcgtgggctggtaaagcgagaaaacgatccgctggataaacgtcggcgttttgtctatctcaccgttcagggccaaacgttgctcgccgccgcgataccactgggggatcgcgttgacgatgagtttttggggcgactgagcgctgaagaacgcgaacagtttacgcaactggttcgcaagatgatgacgtaa

SEQ ID NO: 39874 - DNA, 753 bp, Salmonella typhi
atgaggatggcagccatgcacagcggtggaaaaactattcagcttaatgcgggccattaccaggcgaaaatcgtcacggttggcgcaggtctggcggaactgactcatcatggacgtcatgtggtcatcccgcataaaccggaagaaatacccatggcgcatctggggaaggtattgattccctggccaaatcgcgtgacaaatggctgctactcctataacggcaaagttttccagcttgccgttaacgacccggtttcgcagaccgccattcacggtctgttagcctggcgagactggcagattaattatcagtcggcgacggaagcgtcgctaacgatttttctgccgccctcttacggctatccctttgcgttgatatcggaagtgatttatcggttagatgccgccagtgggctgcacgtattgattcgtacgcaaaacattggcgatgaatcagccccttatggcgcgggcgcacatccttatttgacttgtaatctgcaaagcatcgatagctgtgtattaacactgcctgcaagcgaagaattgcccgcaggcaggaatttttccgcatcatgcctgctcggcgaaacgcgccttgatcatgcggttaagaccgcgactgccccggcggagtgggaggtcagacttaccagcccaacgcagaacatgtctacatttttacgcagcaagcaaccctggctacagatctataccggcgaaaaactcagccgaaaggtctcgcggtag

SEQ ID NO: 39875 - DNA, 1824 bp, Salmonella typhi
gtgatcgaaaatttgcgtaacatcgccatcatcgcgcacgttgaccatggtaaaactaccctggttgataagctgctccagcaatccggtacgttcgacgcgcgtgccgaaactcaagagcgagtgatggactccaacgatttggagaaagagcgtggtattactatcctcgctaaaaacaccgctattaaatggaatgattatcgtatcaacatcgttgatactcccgggcacgctgacttcggtggtgaagtagagcgcgtcatgtccatggttgactctgtgctgctggtggttgacgcatttgacggcccgatgccgcaaacgcgcttcgtgaccaaaaaagcctttgctcatggcctgaaacccattgtggttatcaacaaggttgaccgtcctggcgcgcgccctgactgggttgtcgaccaggtattcgacctgtttgttaacctcgacgcgaccgacgaacagctggacttcccgatcatctacgcttcggcgctgaacggtatcgcgggtctggaccacgaagatatggcggaagacatgaccccgctgtatcaggcgatcgttgatcatgttccggcgccggacgttgacctcgatggtccgttgcagatgcagatctcccagctggactacaacaactacgttggcgttatcggcattggccgtatcaaacgcggcaaagtgaagccgaaccagcaggtcactatcatcgatagtgaagggaaaacccgtaacgcgaaagtaggtaaggtgctgacgcatctgggtctggagcgtatcgacagcgatatcgccgaagcgggcgatatcattgcgatcaccggtctgggcgagctgaacatttccgacaccatctgcgacccgcagaacgttgaagcgctgccggcgctgtccgttgatgagccgaccgtgtctatgttcttctgcgttaacacctcgccgttctgcggtaaagaaggtaagtttgtgacttctcgtcagattcttgaccgtctgaacaaagagctggtgcataacgtggcgctgcgcgttgaagaaaccgaagatgcggatgcgttccgtgtatccggtcgtggcgaactgcacctgtccgtgctgattgaaaacatgcgtcgtgaaggtttcgaactggcggtttcccgtccgaaagttatcttccgtgaaatcgacggtcgtaaacaagagccgtacgaaaacgtgacgctggacgtcgaagagcagcaccaggggtctgtcatgcaggcgctgggcgagcgtaaaggcgatctgaaaaacatgaatccggacggtaaaggccgcgtacgtctcgactacgtgatcccaagccgcgggctgattggtttccgttcagaattcatgaccatgacttccggtacgggtctgctgtactccaccttcagccattacgacgatattcgtccgggtgaagtgggccagcgtcagaacggcgtactgatctccaacggtcagggtaaagcggtggcgtttgcgctgttcggtttgcaggatcgcggtaagctgttcctgggtcacggcgcggaagtttacgaaggccagattattggtattcacagtcgctccaacgacctgacggtaaactgcctgaccggtaagaaactgaccaacatgcgtgcgtccggtacggatgaagcggtgattctggttccgccaattaaaatgagtcttgagcaagcgctggagttcattgatgacgacgaactggtagaagtcactccaacctctatccgtatccgtaaacgtcacctgacggaaaacgatcgccgccgtgcgaaccgtggtcagaaagaagagtaa

SEQ ID NO: 39876 - DNA, 1410 bp, Salmonella typhi
atgtccgctgaacacgttttgacgatgctgaacgaacacgaagtgaagtttgtcgatctgcgcttcaccgataccaaaggcaaagaacagcacgtcacgattcctgctcatcaggtaaatgccgaattctttgaagaaggcaaaatgtttgacggctcctctatcggcggctggaaaggcattaacgaatccgacatggtgctgatgcccgatgcgtccactgcggttatcgacccgttcttcgcggactctaccctgattatccgttgcgacatcctggagcctggcactctgcaaggttatgaccgtgacccacgttccatcgcaaaacgtgcggaagactacctgcgcgcgaccggtatcgccgataccgtcctgtttgggccggaacctgaattcttcctgttcgacgacatccgcttcggcgcatctatctccggctcacatgtggcgattgacgatattgaaggcgcctggaactcctctaccaaatacgaaggcggcaacaaaggccatcgcccgggcgtgaaaggcggttatttcccggttccgccagttgactccgcgcaggatatccgttctgaaatgtgtctggtcatggagcagatgggcctggttgttgaagcgcaccaccacgaagtagcgaccgcaggtcagaacgaagtggcgacccgctttaacaccatgaccaaaaaagccgacgaaattcagatttacaaatatgtcgtgcataacgtggctcaccgcttcggtaagaccgcgacctttatgccaaaaccgatgttcggcgataacggttccggtatgcactgccacatgtcgctggcgaagaacggcaccaacctgttctctggcgacaaatatgccggtctgtctgagcaggcgctgtactacatcggcggcgtcatcaaacacgccaaagccatcaacgccctggcgaacccgaccaccaactcctacaagcgtctggtcccgggttacgaagcgccggtgatgctggcctactccgcccgtaaccgttccgcctccatccgtattccggtggtggcgtctccgaaagcgcgccgtatcgaagttcgcttcccggacccggcggctaacccgtatctgtgctttgccgccctgctgatggccggtctggacgggattaagaataagattcacccgggcgaagccatggacaaaaacctgtatgacctgccgccggaagaagcgaaagagatcccacaggtagcaggttctctggaagaagcgctgaacgcgctggacctggaccgcgagttcctgaaagcaggcggcgtgttcacggatgaagcgatcgatgcgtatattgcgctgcgtcgcgaagaagatgaccgcgtgcgtatgaccccgcacccggtagagtttgagctgtactacagcgtttaa

SEQ ID NO: 39877 - DNA, 1050 bp, Salmonella typhi
atggcaagcggcatacagcccgatgctgggcagatcctcaattcgttaatcaacagcgtgctggtggtcgacgacgcgctggcaatccattacgccaaccctgccgcgcagcagttgctcgcgcaaagctcacgcaaactgttcgggacgccgttacctgaactgttgagctatttttcgttaaacattgacctgatgcgcgaaagtttagcggcaggacaaggctttaccgataacgaagtgacgctggtgattgatagtcgctcgcatattctctctttgaccgcccaacgtctgcccgacgattttatactgctcgaaatggcgccgatggataaccagcgtcgtctgagtcaggagcagttgcagcacgcgcagcaaatcgccgcccgcgatctggtgcgcggtctggcgcacgaaatcaaaaatccgctcggcggcctgcgcggcgcggcgcagctactcagcaaggcgctgcccgacccggcgctaacggaatataccaaagtcatcattgaacaggccgacaggctacgcaaccttgtcgatcgtttgctggggccgcagcacccgggaatgcacattaccgagagcatacataaagtcgcggagcgcgtggtggcgctggtgtcgatggaactgccggataatgtccggcttatccgcgattacgaccccagtctgccagaactgccgcacgacccggaacaaattgagcaagtactgctgaatattgtccgcaatgccttgcaggcgctggggccggaaggcggcgaaattacgctgcgtacccgtaccgccttccagttaacgctgcatggcgaacgctatcgcctggcggcgcgtatagacgttgaagacaatgggccgggcattcctccccatttacaggatacgctgttctacccgatggtcagcggtcgcgaaggcggcaccgggcttgggttatctatcgcccgcaatcttatcgatcaacacgccggcaaaattgaatttaccagttggccggggcataccgagttttcggtttacctgccgattcggaaatag

SEQ ID NO: 39878 - DNA, 597 bp, Salmonella typhi
atggtgataccaatgagacgtttgcgcgaacccacgctcgccacgttattttcagggctggcaacagccctgtttagcgcgacgctgtacgccgataccaatgtgaatttcaccgccagcgtgcagaaggacacctgccagataaagatagatggcaatggaacggtaaacttcgccaccatagcgcccgcctattttgccgatggcattaccgcggaaaccgattatgagggggggaaagagttcaccattaagcttatttcttgcccgatcagtgatggtaaaataaccaatgtcacctttaatttcgcaccactaaacgggcagttctcacctgagaatcaacaagtttttcctaatgacatcgctaccgatgctggtggcgtagacaatgtcggcgtggtgattttcaccaccgattcaccacgcaccaacgtgcttaatacggatggttcatcgcgggcgacttttgctgccagcacctacagcgacaccgtctggaccttttactccagaatgcaaaaaatacgcagtgccgaaaaagtgacgaccggtgaacttagcagccgtgtactggtgaatgtctcctatgaataa

SEQ ID NO: 39879 - DNA, 2592 bp, Salmonella typhi
atgctcgcagtttgctgtgcgctattttatagccagagcagtatttccgctgaaagcgttgaatacgacagttcctttttaatggggagtagcgcctccacaatcgatatcagcaaatactccgacggcaacccaacgcctgtcggaacgtatagcgtgaaagtttttgtcaacgaaaaccccgtatcaagcctgtccataccctttatcgatatcggcaaggtcagtgcagaagcctgcctgacacaaaaaaatctggcgcagttgcatatcaaacagccagaaatcaatgcgaccaatcaaattctgaaaaaaggggaggaagaagatcaagattgtctgaaccttcccgtcgccatcgcgcattcagaggtcaattttgatatgggcgaacagcgtctggatattaccgtacctcaggcgtggctcattgaaggttatgacggctatgttgagccttcgctgtgggaagatggtattccggcagcgcttctgtcctactcggctaacggctatcacagcaccaatggcagcgccgataatgacagtatgtatgcggcgtttaacaccggtattaacctcggcgcatggcgttttcgcgccaacggcaactataactggacgaaagactcaggaagctcctttgactatcagaatcgctacttgcagcgcgatctgccttcaatgcgctctcaacttgttgtcggtgaaacctataccacgggcgaaacatttgactccgtaagcattcgcggggctcgtctgtatagcgacaaccgaatgctaccttcgcagcttgccaactatgcgccgattattcgcggcgtagcaaacagtaacaccaaggtcagcataacccagggcggctacaaaatttatgagtccacggtaccgccaggcccctttgaaatcagcgacatcagtccttccggctacggtagcgacctcatcgtcaccgttgaggaggccgacggcagtaaacgcacctttagccagccattctcctcggttatgcagatgcagcgcccgggcgtcggacgttgggatttcagcgccggtgaagtgaatgacgatgagcttcatgacaagccctatatggcgcaaggttcatattactacggccttaataactttttgaccctctatacaggtgttcagggaacagataataactatcttgccgggttgctgggtgtcggcctcaacacccctcttggcgcatttgcacttgatgtcactcagtctcgtacagagatccctgaggataaaacctataagggccagagctaccgactgacgtggaacaagctgattgaaccgacggcaacctcctttaacgtagcggcatatcgttattcaacgcaggactacctgggcctgaatgatgcgctacagctgattgatgacgcgaaacataaagacgcggacgatcgcaacaccatgcttaactattcgcgcatgaaaaaccaggtcacggtcagcataaaccaaccgttgaggtttaaggaagtcgactacggttcctttttcctctcaggctcctggaccgactactgggctaccaatgaaagccgtaccgactatagcctcggttacggaagaggtttttcgtggggcagcctcagtatcaacctccagagatcctgggatgaagatggcgaaaaagatgattcgctctatatcaacttcaacgttccgctggagaatctgctgggcggcggtcgccgtaagtcgggtttcagctcactgacggcgcaaatgcgcactgattttgacggcgggtaccagttgagcatgaacagcaacggcagcagtgaagaccacacgctgaactacagcgttaacaccggctacaccatgcagaaaaatgaaaagaacatcaccgatgtcagcggctacgccagctatcagtccccctggggagatgttactgcttcagcctctgccaataatgacagcagccgacaatattcgctcgccacaaccggagactttgtcctgcatggcggtggagtgacgttcactaacgataacttcggtaatagcgatgccatcgtgctggtaaaagcccctggcgcgaaaggcgcgcgcatcaatggcggcaacagcaccatcgatcgctggggctacggcgcgacgaactcgctttccgcctacagagaaaaccaggtcaatattgatatcgacacgctggaaaacgatgtcgaactaaagagcaccagtacaaccctgataccgcgtgatggcgcggtagtcttagccagtttcgaaactgaccagggacgctcggtcattctcaacatgtcccgtaatgacggaaaagccctaccatttggcgcagaagtctacgagaacgatgtgcagatcgacaacatgggccagggcggtcaggcttttgttcgcggcatcagcgatgcaggcgaactctcagtacgctggtttgaagaaaaccagccagcaacttgtttagcaacctttgcgttgccggcaacgcaacaaacggtagggtccagccagaccttactgttagaccacataacctgtcgtgttaataaccttaaatcaaatggaatagacaatgaaaaggaataa

SEQ ID NO: 39880 - DNA, 735 bp, Salmonella typhi
atgttgtatgtaaaaaaaagcctgaccgccatcgtattagccagtgctgtatttagtacctttagctatgcggatattattatctcgggcaccagaatcgtttatgacgaaaataaaaaagacgtcagtatacgactggaaaataagggtacccgcccattattagtccaaaactggatagacctgggtaacgataacgacgatcccgggagtattaaagcgcctttcgtttctacccccccggtttcacgcgttgagcctaaacgtgggcaatcggtaaaaattatgtatacccaggccagcgcgctgccgaaagaccgggaaagcgtcttctggtttaacgtactggaagtaccgccaaaagcggataccagcaaagaagagaataaaagcttactgcaactggcttttcgtacccgtatcaaactgttctatcgcccaacaggactaaaaggccagcctgctgaagcggcaaaacaactgaagtggcaaatagcgagcgaacaaggctacgcggtactacgtgctgataactcaactccgtatttcgtctcatttaatgacgctacctacactgcaggcggtaaacgttatgacgttgaagccaccatggttgcgcctttcagtaaatcatccttcaccgtgaaaggcttgtcaggcgctagcgccggaaaactggagtatcacgccattaatgattttggcggtttgattgaaggttccgtatcgctgtaa

SEQ ID NO: 39881 - DNA, 480 bp, Salmonella typhi
atgacgatcgcgtatatcgcgcttggcagtaatctggcctctccgctggagcaggtcaatgccgccctgaaggctatcgccgacattcccgatagccgtatcgtcgcggtttcttcgttttaccgcacgccgccgcttggcccacaggatcagcccgattacctgaacgctgcggtggcgctggataccgctctcgcccccgaagaattgcttaaccatacccagcgcattgagctgcaacagggccgggtgcgcaaggccgaacgctgggggccgcgcacgctggatctcgacattatgctgtttggcgatgaagtcattaacaccgaccgtctgaccgtgccgcactacgacatgaaaaaccgcggttttatgctgtggccgttattcgaaatcgctccggagctggtgtttcccgacgataaaggtctgctgatcgagctgatgtcccaaatgtctccctgtcccgatcgttggtaa

SEQ ID NO: 39882 - DNA, 1419 bp, Salmonella typhi
atgacactaccgaggtgcgctatttttacccgagtcgctaatttttgccgtaaggtgttaagccgcgaggagagcgaggcagaacaagccgtcgcccgtccacatatgacgattatcccgcgtgaacagcacgctatctcccgcaaagatatcagtgaaaatgccctcaaggtactgtacaggctgaacaaagcgggctatgaagcctacctggtcggcggcggcgtccgcgatctcctgctcggtaaaaagccgaaggatttcgatgtgaccaccaacgcaacaccggatcaggtacggaaattattccgcaattgccgtctggtggggcgtcgtttccgcctggctcacgtgatgtttggcccggaaattatcgaagtggcaacgtttcgtggtcataatgaaggcagtgaaagcgaccgtacgacctcccagcgtgggcaaaacggtatgctgctgcgcgacaacatcttcggctctatcgaagaagatgcccagcgccgcgatttcaccatcaacagcctttactacagcgtggcggattttaccgtgcgcgattacgtcggcgggatgcaggatctgcaagaaggcgtgattcgcctgatcggcaatccggaaacgcgctaccgcgaagatccggttcgaatgctgcgcgccgtgcgtttcgctgcgaagctcaatatgcgtatcagccctgaaacggctgagccaatcccgcgtctggcaaccttgctaaacgacattcctcccgcgcgcctgttcgaagaatcgctgaagctgttgcaggcggggaacggttttgaaacctatcaacaactgcgggaataccacctcttccagccgttgtttcctaccattacgcgttatttcaccgaaaacggcgacagcgcaatggaacgcatcattgcgcaggtgttgaagaatacggataaccgcatccgtaacgagatgcgcgttaacccggcatttttgtttgccgccatgttctggtatccgctgctggagatggcgcaaaaaatcgctcaggagagcggccttgcctattacgatgctttcgcgctggccatgaatgacgtgctggatgaagcctgccgttcactggcgatcccgaaacgccttaccacgcttacccgtgatatttggcagcttcagttacgcatgtcgcgacgccagggcaaacgcgcctggaagctgatggaacatcccaaattccgcgccgcgtttgatttgctggagctgcgcgcccaagtggaaaataatactgaactgcaacgtctggcgcagtggtgggccgagtttcaggcttccgcgccgccggaacaaaaagggatgctcaacgagctggacgacgatcctgctccacgccgccgtcgttcacgtccgcgcaaacgcgcgccgcgccgcgagggcaccgtatga

SEQ ID NO: 39883 - DNA, 480 bp, Salmonella typhi
atgcgaattggacacggttttgacgtacacgcgtttggcggagaagggccgattattattggcggcgtgcgtatcccttatgaaaaagggctattggcgcattccgatggcgatgtggcgttacatgcgctgaccgatgcgctgctgggcgcggcggcgcttggcgatatcggcaagctcttcccggataccgatccggcatttaagggagcggatagccgcgaactactgcgtgaagcctggcgtcgtattcaggccaagggatacaccctcggcaacgtggatgtcaccattattgcgcaggcgccgaaaatgctgccgcatattccgcaaatgcgcgtctttatcgccgaagatctcggctgccatatggatgatgttaacgtgaaggcgacgacgacggaaaagctcggatttaccggacgcggagaaggcattgcctgcgaagcggtggcgttgctgatgaaggcggcgaaatga

SEQ ID NO: 39884 - DNA, 711 bp, Salmonella typhi
atggcagccactttattggacgtttgcgccgtggtgccggcggccggatttggccgccgaatgcaaacagaatgtcctaagcagtatctctcaatcggtaataaaaccattctggagcactcagttcatgcgctgctggcgcatcctcgggtgacacgcgttgttattgctatcagccctggcgatcatcgctttgcccaacttccgctggcgaatcatccgcaaatcaccgttgtggatggcggcaacgaacgcgctgattccgttttggccgggttacaggccgttgcaaaggcgcagtgggtgctggtgcacgacgcggcaagaccctgtttgcatcaggatgaccttgcgcggttactggccatcagcgaaaacagccgggtcggcggtattctcgccagtccggtgcgcgacaccatgaaacgcggcgaaccggggaaaaacgctattgcccataccgtagagcgcgccgatttatggcacgcgctcaccccgcagtttttcccccgcgaactcttgcacgattgtctgacgcgtgcgctgaatgaaggcgcgaccatcaccgacgaggcgtcagcgctggagtattgtggttttcatccggcgctggtagaaggtcgcgcggataacatcaaggtcacccgtccggaagatctggcgctggcggaattttatctgacccgaaccatccaccaggagaaagcataa

SEQ ID NO: 39885 - DNA, 606 bp, Salmonella typhi
atggcgctgcatgatgagaacgtggtctggcactctcatcccgttactgtcgccgctcgtgaacagctccacggccaccgtggcgtggtgctgtggtttaccggactctccggttcgggaaaatcaacggtggccggcgcgctggaagaggcgttacatcagcgtggcgtcagtacctacctgttggatggcgataatgtgcgccacggtttgtgccgtgatttaggctttagcgatgccgatcgccaggaaaatattcggcgggtaggcgaagtggccagtctgatggcggacgctggcctgattgttttgacggcatttatttctccgcaccgcgccgagcggcaactggtaaaagagcgcgtcggccacgatcgttttatcgagatttatgtcaatacgccgctggctatctgtgaacagcgcgatcctaaaggattgtataaaaaagcgcgcgcgggcgagttgcgtaactttaccggtatcgacgccatttacgaagcgcctgactcgccccaggttcatcttaatggtgaacaattagtaacaaatttggtttcccaattattagacctgctgagacggcgcgatattatcagatcctga

SEQ ID NO: 39886 - DNA, 2787 bp, Salmonella typhi
atggttcagatcccagaaaacccacttattctcgtagatggctcatcctatctctatcgcgcctatcatgcgtttccgccgttaaccaacagcgcgggagaacctacgggcgcaatgtatggtgtcctcaacatgttgcgcagcctgatcatgcagtatcagccgacgcatgctgcggtggtgtttgacgccaaaggaaaaaccttccgtgacgagctctttgaacactacaaatcgcatcgtcctccgatgccggatgatctgcgtgcgcaaatagagccgttacatgccatagttaaagccatggggttacctctgctggcggtctctggcgtagaagcggatgacgttatcggtacactggcgcgagaagcggagaaggtggggcgtccggtattaatcagcaccggcgataaagatatggcacagttggtgacgcagaatattacgctgatcaacaccatgactaacaccatcctcggcccggatgaagtcgttaataagtacggtgtgccgcctgagctgattattgactttctggcgctgatgggggactcctcggataatattccgggcgtaccaggcgtgggtgagaagacggcgcaagccttgcttcagggattgggcggcctggatacgctgtacgccgagccggaaaaaattgccggtctcactttccgcggcgccaaaacgatggccggtaaattagcgcagaataaagacgtagcgtacctgtcttataagctcgccaccattaaaacggatgttgagctggagctgacctgcgaacagcttgaagtgcagcagccgattgcggatgaactgctgggcctgtttaaaaaatatgagttcaagcgctggacggcggacgtcgaggcaggcaagtggctacaggcaaagggcgcgaaaccggcggccaaaccgcaggaaacggtcgttattgatgaatcgcccagcgaaccggcagcggcgctctcttatgaaaattatgtcacgattctggatgacgttacgctggaaagctggattgaaaagctgaaaaaagcgccagtttttgctttcgacacggagaccgacagcctggataatatcgccgccaacctggtgggcctctcgtttgccatcgaacctggcgttgccgcgtatgtacctgtcgcgcatgattatctggacgctccggatcaaatctcccgccagcgtgctctggaactgctgaagcctctgctggaagatgaaaaagtgcgcaaagtggggcaaaacctcaagtacgatcgcggcgtcttgcaaaattacggtattgagctgcgcggtatcgccttcgataccatgcttgagtcttacattctgaacagcgtcgccggacgccatgatatggacagcttgtccgatcgttggctgaagcacaaaactatcacctttgaagacattgccggtaaaggtaaaaaccagctcacctttaaccagatcgcactggaggaagcggggcgctatgcggcagaagatgcggatgtcacgttacagttgcatctcaaaatgtggcctgagctccagcagcacaaaggcccgctgaatgttttcgaaaacatcgaaatgccgctggtgccggtactgtcacgcgttgagcgcaatggcgtaaaaatcgatcctgccgtcctgcacaaacattcggaagaaatcacgctacgtctggcggaactggaaaagaaagcgcatgacattgcgggcgaggcgttcaacctgtcctcgacgaagcagttgcagaccatcctgtttgaaaagcagggtattaagccgttgaagaaaacgcctggcggcgcgccgtcaacgtcggaagaggtgctggaagagctggcgctggactatccgctgccgaaagtgattctggagtatcgtggtctggcgaagctaaaatccacctataccgataagctgccgctgatgattaacccgaaaaccgggcgcgtccatacgtcctatcatcaggcggtaacggcgacgggacgtttatcgtccaccgatccgaacctgcaaaatattccggtgcgcaatgaagaaggccgccgcattcgtcaggcatttattgcgcctgaggattatctcatcgtatctgcggactattcacagattgagctgcgtattatggcgcatctttcccgtgataaagggctgctcacggcgttcgccgaagggaaagatattcaccgcgcaacggcggcggaagtctttggcttgccgctggatagcgtgaccggggaacagcgccgaagtgcgaaagccattaactttggcctgatttacgggatgagcgccttcggtctttctcgccagcttaatattccgcgtaaagaggcgcagaagtatatggatctctacttcgaacgctaccctggcgtgctggaatatatggagcgcacccgcgctcaggcaaaagaacaaggctatgtggaaactctggaggggcgccgcctttacctgccggatattaaatccagcaacgcggcgcggcgcgcgggggcggaacgcgcggcgatcaatgctcccatgcaaggaacggctgccgatatcatcaagcgcgccatgattgccgtcgatgcctggctacaggccgagcagccacgcgtgcggatgattatgcaggtacacgatgaattagtgttcgaggtgcataaagacgacttagatgcggtagcaaaacgtatccatcagttgatggaaaactgcacgcgtattgatgtgccgttgctggtggaagtcggtagcggagaaaattgggatcaagcgcactaa

SEQ ID NO: 39887 - DNA, 987 bp, Salmonella typhi
atgaacgacaacgcttttactttccagacgctacacccggaaaccatcatggatgcgctgtttgaacaggggatcagggtggattccgggctgactccactaaacagttatgaaaaccgcgtctatcagtttcaggatgaagaccgtcgacgttttgtcgttaagttttatcgtcctgaacgctggtctgttgatcaaattcgggaagaacaccaattcgcgcttgaactggtgaaggatgaggttccggttgctgctccgctcgcgtttaatggccagacgctgttagcgcatcagggctatcattatgccattttccccagcgtaggcggtcgtcagtttgaagcagacaatatcgatcagatggaggcggtagggcgttatcttggccgattgcatcagacggggcgaaaacgtcctttcactttccggcctgacattgggcttgcagagtatctttttgaacctcgccaggtattcgaagatgccgcactgattccctccgggcaaaaagcggctttcctgaaagccactgatactctactgtctgcggttaccgaatgctggcgcaccgatttcgccacgctgcgattgcacggcgattgtcatgccggcaacattctatggcgtgatggaccgctgtttgtcgatttagatgatgcccgtaacggcccggcgatacaggatttatggatgctgctgaacggcaacaaagccgaacagcgaatgcagcttgaaaccattattgaagcttatgaagaagttagtgagttcgatacggctgaaattggtctcattgaacctttacgcgccatgcgtttagtttattatcttgcctggttgattcgtcgttggggcgatcctgcgtttccaaaaaactttccctggttaacaggggaagattactggcagcgacagacaacgacttttattgagcagactaaaattttgcacgaaccccctttacaattaacgccaatgtattaa

SEQ ID NO: 39888 - DNA, 897 bp, Salmonella typhi
atgactgactcacactatattggccgtttcgcgccgtcgccatccggcgaactgcatttcggctcgttaatcgccgccctcggcagctatctacaagcccgtgcgcaacgcggagtttggcgcgttcgcatagaggatatcgaccccccacgtgaagttcccggtgccgcagcgaccattctgcgccagctggaacattacggcctgcactgggatggcgaggtcttatggcaatcacagcgtcatgaggcttatcgcgaggcgctggcctggcttcacgagcagggactgagctactactgcacttgcccccgctcgcgcattcaacgtctgggcggtatttacgatggccattgccggacgttatgccacgggccggagaatgccgccgtcagaattaaacagcagcatccagtgatgcatttccatgatgccttgcgcggcgacatccaggctgacccacagctggctagcgaagattttattatccaccgccgcgacggactgtttgcttataacctggccgtggtggtcgacgatcattttcagggggtgacggagatcgtccgcggcgcagatttaatcgaacctactgtccgacaactttcgctgtataaacagtttggctggcgtgcgccaggttacgtgcaccttccgctggcgctcaacgaacaaggcgctaaactttccaagcaaaatcatgcccctgcgcttgcgacaggcgatccgcgcccggtactggtccaggcattgcgctttttaggccaacgcgacgtcgtagcgtggcaggagatgtctgttgaggagttgctgcgctttgcggtggcgcactggaggcttacagccgtacccacatcggctaatgtaaatccggcattctcaaatgcgtctcgctga

SEQ ID NO: 39889 - DNA, 456 bp, Salmonella typhi
atgcaagaagggcaaaaccgtaaaacatcgtccctgagtattctcgccatcgctggggtggagccgtaccaggagaaaccgggcgaagagtatatgaacgaagcccagctatcgcacttcaagcgtattcttgaagcatggcgtaatcaactccgggatgaagtcgatcgcactgtgacgcacatgcaggacgaagccgccaacttccccgatccggtcgatcgcgccgcgcaggaagaggagtttagcctggagttacgtaatcgtgaccgtgagcgcaaactgatcaaaaagatcgagaaaacgctgaagaaagtggaagatgaagacttcggttattgcgagtcctgcggagtggagattggtatccgccgcctggaagcgcgtccaacagccgatctgtgcatcgactgcaaaacgctggctgaaattcgcgaaaaacagatggcgggttaa

SEQ ID NO: 39890 - DNA, 2442 bp, Salmonella typhi
gtggagccgtttgtgacgtcattgcccgttgccgccgtattgcctgaattgttgacagccctaaaaaccgcgccgcaggttttgttgtccgcgcctaccggggcggggaaatccacctggctgccgttgcaactcctgcaacaggggccggttgctggaaaaattctcctgcttgaaccgcgtcgtctggcggcgcgtaatgtcgcccagcgtctggcggaagcgttgaatgaaaagcctggcgaaacggtaggttaccggatgcgcgcgcaaagctgcgtggggccgcgtacccggctggaagtggtgaccgaaggcgtattgaccagaatgattcagcgcgatcccgaattacgcggcgtggggctggtgatactggatgaatttcatgagcgcagtttacaggcggatttagcgttggcgctgttgctggatatccagcaagggctccgtgacgatctcaggctgttaatcatgtctgcgacgctggataacgacaggctttgtcagcgactgcctgatgcgccgacgatcgtctcggaggggcgcgcgtttcccgtggagcgacgttatcagccgcttgcggcgcatttgcgttttgatgaagccgtcgcgatggcgacagcggaactgctgcgcaatgaaaacggttcgctgctgctatttttacccggcgtaggcgaaatacagcgcgttcatgaacatctggcgtcgcgggtagggagcgatgtcctgctttgtccgctgtatggcgcattgtctctggaagcgcaacgcaaagcgattgttcccgcacccgccgggatgcgtaaagtggtattggcgactaacattgccgaaaccagtttgacgattgaagggattcgtctggtcgtcgatagcgctcaggagcgcgtggcgcgattcgacgcgcgaacgggactgacgcggctggttacgcagcgtatcagtcaggcgtcaatgacgcagcgcgcggggcgcgccggacgactggcgccgggtatctgtttacatctgctggcaaaagaacaggcggagcgggcggcggcgcaaagcgatccggaaatcttacacagcgacctctccggtttgttgatggaggtgttgcagtggggatgtcacgatccggcctcgcttttctggctggacaggccgccggaggtgaatcttcaggccgcccgccgtttattattgatgttaggcgcgctggagggcgagcgattaagcgcgcgggggcggaaaatggcggcaacaggtaacgatccgcgcctggcggcgatgttagtcaacgccgacgagggcgacagcgccgccactgccgccatgctcgcggccatccttgaggacccgccgcgaggcggcggtacggatttaagcgtgctattttcgcggcgacagccgggctggcagcagcgtagccagcagcttttaaaacggctgcaggtgcgtaatggcgagccggatagcgcgcttattatgccgctgttggccagagcgtttagcgaccgcatcgcgcggcgtcgcggtcaggaagggcgctatcagttagccaatggtatgggcgcgatgttagatgcggatgacgcgttgggacgtcatgaatggctgatcgcgccgctgttactgcaaggtagcgcctcgccggacgcccgaatattgttggcgcagccgctggatattgcctcgctgattcaggcgtgtcctgatttactgcgccagtccgacacggttgaatgggacgaggcgcagggaacgttgaaagcatggcgcagaatgcgtattggacagttgacggttagcgttcagccactggcgaagccgtctgaagaggagcttcatcaggcgatgctgaacggcatccgcgataaaggtctgtccgtccttaactggacgccggaagcggagcagttccgtctgcgtctgcactgtgcggcgaaatggctgccggaatatgactggcctgccgtggatgaggcgtcgctgctggcgactctggaaaattggttgctgccgcacatgacaggcgtacagtcgttacggagtctgaaatctctgaatgtgactcaggcgttacggggactgcttgactatgccatgctgcaacgtctggatagtgaactgcctgggcattacactgtgccgacgggaagccgaataacgattcgttatcatgaagataacccgcccgcgctggcggtcagaatgcaggaaatgttcggcgaggcaagtacgccgacacttgcgcaggggcgagtgccgctggtgctggaactgctttcgccagcgcagcgaccgctacagattacgcgcgatttaagcgctttctggcagggggcgtatcgcgaagtgcaaaaagagatgaaggggcgttaccccaaacatgtctggccggacgatccggcgaatacggctccaacgcggcgcacgaagaagtattcgtga

SEQ ID NO: 39891 - DNA, 2523 bp, Salmonella typhi
atggcggggaatgaccgcgagccgattggacgtaaggggaaaccgtcacgtcctgtgaaacaaaaggtgagccgtcgtcggcagcatgacgacgattatgatgatgactatgaggatgaagaaccgatgccgcgtaaaggtaagggcaaagggcgtaagcctcgtggcaagcgcggctggctgtggctattgctaaaactgtttatcgtttttgtggtgctgttcgccatttacggcgtctatctggatcaaaaaatccgcagccgtattgatggcaaggtctggcagcttccggcggcggtatatggccggatggtgaaccttgagccagacatgcctgtcagcaaaaacgagatggtgaaattgctggaagcgacgcagtatcgtctggtgacgaagatgacccgtcccggcgaatttaccgtgcaggccaatagcattgagatgatccgtcgtccgtttgacttcccggacagcaaagaagggcaggtgcgcgcgcggctgacgttcagtgacgggcgtctggaaaccatcgtcaatctggataacaaccgccagtttggcttcttccgcctcgatccgcggcttatcaccatgctttcttcgccaaatggcgagcagcgtttattcgtcccgcgcagcggtttcccggatctgctggtcgatacgctgttggcgacggaagaccgtcgtttctatgagcatgatggcattagtctttactctatcgggcgtgcggtgctggccaacctgacggcgggacgcacggtgcagggggccagtacgctgacccagcagctggtgaagaacctgttcctctccagcgaaagatcatactggcgtaaagcgaatgaagcctacatggcgctgatcatggatgcccgttacagtaaagatcgtattcttgagctgtacatgaacgaggtctacctcggtcaaagcggggataatgaaattcgcggttttccgctggcgagcctgtattactttggtcgtccggtagaggaactgagcctcgatcagcaggcgttactggtggggatggtaaaaggggcgtcgatttataacccgtggcgtaacccgaaactggcgctggagcgtcgtaacctagtgttacgcctgttacagcagcagaaaatcatcgatcaggaactctatgacatgctgagcgcgcgtccgcttggcgtacagccgcgcggcggcgttatttcaccgcagccagcgtttatgcagatggttcgtcaggaactgcaggcgaagctgggggataaaattaaagatctctccggcgtgaagatcttcaccacctttgactccgtggcgcaggatgccgcagaaaaagccgttgtcgaaggcattccggcgttgaagaagcagcgtaaattgagcgatctggaaactgcgatggtggtagtggatcgctttagcggcgaggtacgcgcgatggttggcggggcggagccgcagtatgctggctataaccgtgccatgcaggcacgccgttccatcgggtcgctggcgaaaccggcgacctatctgaccgcgttaagtcagccgaacttataccgtctgaacacctggattgccgatgcgccgatttctctgcgccagccgaatggtcaggtctggtcgccggagaacgacgatcgtcgctacagcgaaagcgggaaagtgatgctggtggatgcgttaactcgttcaatgaacgtaccgacggtcaatctggggatggcgttaggtttaccggcggtaaccgatacctggacgaagctcggcgtgccgaaagatcagctcaatccggttccggcgatgctgttaggggcgctgaacctgacgccgatcgaagtggcgcaagcgttccagactatcgccagcggcggaaatcgcgcgccgttatcagcgctgcgttcggttattgcggaagatggtaaagtgctgtaccaaagttatccgcaagctgaacgcgccgtaccggcacaggcggcttacctgacgctctggacaatgcagcaggtcgtccagcgtggtacggggcgtcagcttggcgcgaaatatccgggtctgcatctggtgggtaaaaccgggacgacaaacaacaatgtcgatacctggtttgccggtatcgacggcagccaggtgactatcacctgggtaggccgtgataacaaccagccaacgaaattgtacggtgccagcggcgcgatggcgatttaccagcgctatctggcgaaccagacgccgacgcctttagttctgacgccgccggaagatgtggtggatatgggcgttgattacgacggtaattttgtctgtaacggcggtatgcgcactctgccggtctggacggacgatccaaatacgctgtgccagcagggcgagatgatgcagcagcaacagcagccgtcaggcaatccgttcgatcagtcgtctcagccgcagcagcctgcgcagcaacagccgccgaaagaagagaagagcgacggcgttgccggctggattaaggagatgtttggcggcaattaa

SEQ ID NO: 39892 - DNA, 798 bp, Salmonella typhi
atgcaggaaaaccacattcattccgataccacctttgcgctgcgaagcgtcgcttttcgtgtgccgggccgcacgcttttacaccccctctcgttaacgtttcccgcaggtcgagtcaccggacttatcggccataatggttccggtaaatccacgctgttaaaaatgctgggccgccatcagctgccttccgaaggggatattctgctcgacaatcagccgctggcgagctggagcagcaaggcgtttgcccgcaaagttgcctatctgcctcaacaattgccgcaggcggaaggaatgacggtgcgcgaactggtggcgattggccgctatccgtggcacggcgcgttgggacgctttggcgtcgcggaccgggaaaaagtagacgaggcgattacgctggtcggcttaaaaccgctggcgcatcgtctggtcgatagcctgtccggcggtgaacgccagcgcgcgtggattgccatgctggtcgcgcaggacagccgttgtctgctgctggatgagccgacgtcagcgctggatatcgcccatcaggttgacgtgctggcgctggtgcatcgtttaagccaacagcgcgggctgacggtggttgcggtgctgcacgatatcaacatggcggcccgctactgtgattatttagtagcgctacgcggcggtgaaatgattgcgcaaggaacgcctgcggaactgatgcgcagtgacacgctggaacagatttacggtatcccgatgggtatccttccgcatccggcgggcgccgcgcctgtgagttttgtgtattaa

SEQ ID NO: 39893 - DNA, 1431 bp, Salmonella typhi
gtgacagttaaaaacgacagcatacagagcacattcctcttccacgattacgaaaccttcggtacgcatccggccctcgacagacctgcgcaattcgccgcgctccgtacggataacgacttcaacgttattggcgagccggaggtgttttattgcaaacccgccgatgattatctaccgcagcccggcgcagtgctgattaccggcatcacgccgcaggaagcgcgtgagaaaggagaaaacgaagccgctttcgccagacgcattcatgcgctgtttaccgttcctaaaacctgcgttgtgggctacaacaatgtacgttttgatgatgaagtcacgcgcaatattttttatcgcaacttttacgatccctacgcctggagctggcagcatgataattcacgttgggatctattggatgtcatgcgcgcctgttatgcgctgcgcccggagggaattaactggccggaaaacgacgacggcctgcccagctttcgtctggaacatttaacccaggcgaacgggatcgaacacagcaacgcgcatgatgcgatggcggatgtctacgccactattgcgatggcgcaactggtgaaaacacgccagccgcgactgtttgattatctttatagccaccgcagtaaacataaactggcggcgctgattgacgttccgcaaatgaagccgctggtgcatgtctccggcatgtttggcgcgtggcgcggtaatacaagctgggtcgcgccgctggcgtggcatcctgaaaaccgtaacgcggtgatcatggtcgatttagcaggcgatatttctcctcttcttgagctggacagcgacacccttcgcgagcggctttatacggccaaagccgatcttggcgatcacgccgcagtgccggtaaagctggtgcatatcaataaatgtccggtactggcgcaggcgaataccttgcgcccggaggatgccgaccggctgggaattaaccgccagcattgcctggataacctgaaagtgctgcgtgaaaacccgcaggtccgcgacaaagtggtggcgattttcgccgaagccgaaccttttgccacctcggataacgttgatgcccagctctatgatggttttttcagcgatgccgatcgcgcagccatgaaaatcgtactcgaaaccgagccgcgtaacctgcccgcgctggacattacctttgtcgataagcgcattgagaagctgctgtttaattaccgcgcacgcaattttcccggtacgctggatgacgcagagcagcagcgctggctggagcatcgccgtcaggtactgacgccagagtttttacaacagtatgccaatgaattgcagatgctttctcagcagtatgcggaagataaaacgaagctggggctgctgaaatcactgtggcagtacgcaactgagattgtgtaa

SEQ ID NO: 39894 - DNA, 900 bp, Salmonella typhi
atgttagacaacacccgcttacgcatagctattcagaaatcaggccgtttaagcgatgattcacgagaattgctggcccgctgcggcataaaaattaatttacacactcagcgcctgattgcgatggcggaaaacatgccgattgatatcctgcgcgtgcgtgatgatgacattccgggtctggtgatggatggcgtggtcgatctcggtattatcggcgaaaacgtgctggaagaagagctactcaaccgccgcgcgcagggcgaagatccacgctatttaaccctgcgccgtcttgacttcggcggctgccgtttatcgctggcaacgccggttgacgaagcctgggacggcccggccgcgctggacggtaaacgtatcgctacctcttatccgcacctcctcaaacgctacctcgaccagaaaggcgtctcttttaaatcgtgtctgttaaatggttctgtcgaagtcgcgccgcgcgcggggctggccgacgctatctgcgatttggtctctaccggcgcgacgcttgaagctaacggcctgcgtgaagtcgaagttatctaccgctctaaagcctgtctgattcagcgcgacggtgagatggcacagagcaagcaacagctgatcgataaattgctgacccgtattcagggcgtgattcaggcgcgcgaatcgaaatacatcatgatgcacgcgccaagtgaacgactggaagaggttatcgccctgctgccaggcgccgaaaggccgacaattctgccgctggcaggcgagcaacagcgcgtggcgatgcacatggtcagcagcgaaacgttgttctgggaaaccatggagaaactgaaagcgcttggcgccagctcgattctggtactgccgatcgagaagatgatggagtga

SEQ ID NO: 39895 - DNA, 891 bp, Salmonella typhi
atgcgtgagttatatcctcttactcgccgccgtttattaacggcgatggcgctctcgccgctgctgtggcaaatgaatacggcgcaggctgccgctatcgatccccgccggattgtggcgctggagtggctgccggttgagctgctgctggcgctcggtattacgccttatggtgtggcggacgtgccaaattataagctgtgggttagcgaaccgccgttgccggattcggtgattgatgtgggtcttcgcactgaacccaatctcgaactgctgacggagatgaagccgtcgtttatggtgtggtcggcaggttacggaccctcgccggagaaactggcgcggatcgcgccggggcgcgggttcgattttagcgacggcaaaaagccgctggcggtggcccgacgctcgctggttgaactggcgcagacgctgaatctggaagctgcggcagaaaaacatctggcgcaatacgatcgcttcatcgccagccagaagccacgttttatccgccgcgggggacgtccgttactgatgacgacgcttatcgatccgcggcatatgctggtgctcggcccgaattgcctgttccaggaggtgctggacgagtatggcatcgtcaatgcctggcagggtgaaaccaacttttggggcagtacggcggtcagcatcgatcggctggcgatgtataaagaagcggatgtgatctgcttcgatcacgggaatagcaccgatatgaacgcgctgatggcaacgccgctgtggcaggccatgtcgtttgtccgcgccgggcgttttcaccgggtgcccgccgtttggttctatggcgcgaccctctccacgatgcattttgtccgcatcctgaataacgtgttgggaggcaaagcgtga

SEQ ID NO: 39896 - DNA, 2058 bp, Salmonella typhi
gtgagcagaaaacgtgaaataccggatggcggtgcgaaaaacgccttaaccgacctacggttcgggcgctttgtaggccggataaggcgaagccgccatccggcgttgctgttattggcgctgttggttgccgcctgctggctgacatgggttaacttctccgttgcgctaccgcgcagtcagtggcaacaggctatctggtcaccagatatcgacatcattgagcagatgatttttcattacagccagctgccaagactggcgatttcgctgctggtgggcgcggggcttgggctggtaggcgtcctgttccagcaagtattacgtaacccgctggcggaaccgaccacgctgggcgtggcgaccggcgcgcaattggggatcacggtgactacgctttgggcgattcccggcgcgctgaccacgcagtttgccgccctgacgggagcctgcatcgtcggcgcgctggtgttcggcgtggcgtggggcaaacgtctgtcgccagtgaccctgatcctcgccgggctggtggtcagcctctattgtggcgcaatcaaccagttactggtgattttccaccacgatcagttgcaaagcatgtttttatggagcactggaacgctaacgcaaaccgactggagcggcgtgcagcgtctgtggccgcagttgctgggcggcgtgatgctcacgttattgttgttacgtccgatgacgctgatggggctggatgacggcgttgcgcgtaatctggggctggcgctgtcgttagcgcgtctggcggcgttgtcgctggcgattgtgttgagcgcgctgctggtcaacgcggtgggcattatcggttttatcggcctgtttgcgccgctgctggcgaaaatgcttggcgcaagacgtctgctggcgcgcctgatgctggcgccgctcattggggcgcttattttatggctatccgatcagattatcctttggctaacccgcgtatggatggaagtctccaccgggtcagtgacggcgttaatcggcgcgccgctgctcctatggctgctgccgcggcttaaaagcatgagcgcgccggatatgaacgccagcgatcgtgtggcggcggagcgtcgacatgtcctcacttttgccgttgccggtggcgcgctcctgctgctggcaacatgggtcgcgctctcttttggtcgcgacgcgcacggctggacgtgggcgagcggaacgctgcttgaagaactgatgccgtggcgctggccgcggatactggcggcgttaatggcgggcgtcatgctggcggtggcgggctgcattattcagcgtctgaccggtaacccaatggccagcccggaagtgctggggatcagttccggagccgcgtttggcgtggtgttgatgctgtttttggtgccggggaatgctttcggttggctactgcctgccggaagcctgggcgcggcggcgacactgctgattattatgatagccgccgggcgcggcggtttctcgccgcaacggatgttgctggcggggatggcgctcagcaccgcgtttaccatgctgctaatgatgctccaggcgagcggcgatccgcggatggcggatgtgttgacctggatctcaggatctacctataacgccactggcgggcaggttacgcgaaccgcgatcgtgatggtgattttgctggccgttgtgccgttgtgtcgccgctggttaacgattttgccactgggcggcgatgccgcgcgcgcggtgggcatagcgcttacgccgtcgcgtatcgcgctgctggcgttggcggcttgtttgacggcaaccgcgacgatgaccattgggccgctgagtttcgttggattgatggcgccgcatattgcgcggatgctcggttttcgccggacgatgccgcatatggtcatctcagcgctggcagggggcgttttattggtctttgccgactggtgcggcaggatggcgctatttccgtatcagatcccggcgggactgctttcaagctttattggcgcgccgtactttatctatttgctacgtaaacagagccgctga

SEQ ID NO: 39897 - DNA, 801 bp, Salmonella typhi
atggctaagcaaatgttcagggcgctgggcgccctgctgcttacgctcccggtgtggctttacgctgcgccgcgcgtaattacgctctctcccgccaatacggagcttgcttttgccgccgagattacgcccgttggcgtcagcagctattccgactacccgcccgaagcgcaaaaaatagaacaggtctctacctggcagggaatgaatctggagcgcattgtggcgctgaagccggatctggtcgtcgcctggcgcggcggtaatgcggaacgccaggtaaaccaactgacgtcattaggtattaaggtcatgtgggtggacgcggtaaccatcgaacagatcgccgacgcgctccgccaactggccgcctggagcccgcagccggaaaaggctcagcaggcagcgcagacattgctaaaagagtacgccgcgctcaaagtcgagtatgccggtaaagctaaaaagcgcgtctttcttcagtttggcatgaatcctctgtttaccagtggtaaagggtctattcaacatcaggttttgacgacctgcggcggagaaaacgtctttgctgacagccgcgtgccgtggccgcaagtcagccgtgagcaggtgctggcaaggcatccccaggccattatcgtggccggaaaagcgggcgaaattctcaaaattgaacaatactggggaaacctgttaaaaattccggttattccgcttaacagcgactggtttgaacgcgcaagcccgcgtattatcctcgccgcaaaacaactctgtaatgcgctttcacaggtgaattag

SEQ ID NO: 39898 - DNA, 699 bp, Salmonella typhi
atgaaaatcggcatcattggcgcaatggaagaagaagttacgctgctgcgtgacaaaattgacaaccgtcagacgattacgctgggcggctgcgaaatttacactggccagttgaacggcaccgaagtggcgttgctgaaatccggtatcggtaaagtcgcggcggcgctgggcgcaacgttgcttctggagcactgcaagccggacgtgatcatcaataccggttccgcaggcggtctggcgtccacgctgaaggtcggcgatatcgtcgtctctgacgaagcgcgttaccacgacgctgatgtgaccgctttcggctatgaatacgggcaattaccgggctgtccggccggatttaaggccgatgataagctgatcgccgccgcggaatcctgcatcagggagttgaatctgaacgcggtacgcggccttattgttagcggcgacgcgtttattaacggttccgtcgggctggcgaaaatccggcataacttccccgacgcggtcgccgtagagatggaagccaccgctatcgcccacgtctgccataacttcaacgtgccgttcgtggtggtacgcgctatctctgacgtggccgatcagcaatcgcacctcagctttgacgaattcctcgcggtggcggcgaaacagtcgactctgatggtcgaaacgctggtacagaaactggcgcatggctaa

SEQ ID NO: 39899 - DNA, 363 bp, Salmonella typhi
atgtccaccacgttgtataaagatttcacctttgaagccgctcaccgcctgcctcacgtgcctgaagggcataagtgcggccgcctgcacggacactcatttatggtgcgtctcgagattaccggtgaagtcgatccgcataccggttggattatggatttcgcggatctcaaagcggcgtttaaacctacttacgatcgtcttgatcactactatctgaatgatattccaggactgtccaatcccaccagcgaagtgctggcaaaatggatttgggatcaggttaagcccgtcgtgccgctactgagcgccgtgatggtgaaagagacctgtacagccggctgcgtctatcgcggcgaataa

SEQ ID NO: 39900 - DNA, 798 bp, Salmonella typhi
atggcgttaaggatcagggtattgctcgaaaatcataagggagctggaacggataaatcgttgaaggcccggccaggattaagcctgttggtcgaggatgagtctacgtcgatcttgttcgataccggccctgatggcagttttatgcaaaacgcgtcggcgatggggatcgacctgtccgatgtgtctgctgtggtgctttcgcatggtcattacgatcattgcggcggcgtgccgtggcttcctgataacagtcgaatcatctgccatcccaatattgcgcgcgaacgttatgcggcaataacttttctcggtattacccggaaaataaaaaaattgtcgtgtgaggtggactattcacgctaccgaatgatgtacacgtgtggccccctgccgattggcgaaaactttatctggtcaggggaaataccggtggtcgcgcctgaagcctacggcatttttggcggccacgatgcggagccggactctattttggatgagggcgtactgatttaccaatcgacaaaaggattagtcatcattatgggatgcgggcatcgggggatcgcaaatattgtccggcactgtcagaacattaccggtataaagcggatttacgcgcttatcggcggatttcatctccgctgcgcatcaccgttcacgctgtggcgagtcaggcgctttctgcaagaacaaaaacctgaaaaactatgcggttgtcactgtaccggggcctgggggcggttgtggctaccggaaataaccgcacctgcaaccggtgatgtgctgcgcttttaa

SEQ ID NO: 39901 - DNA, 984 bp, Salmonella typhi
atgacagtggatagtaatgcgtcttccgggcgtgggaacgatccggaacagattgatttgattgagttattgctacagttatggcgtgggaagatgaccattattgtagccgttattatcgccattttgctggccgtaggctacctgatgatagccaaagaaaaatggacatccacggcgattattacccaacctgatgccgcgcaggttgccacctataccaacgcgctcaacgtcttgtatggcgggaatgcccccaaaatctctgaagtgcaggcgaattttataagccgctttagttctgcgttttccgcattatcggaagcgctggataatcagaaagagcgggaaaagctcaccattgaacagtcggtaaaggggcagacgctgccgctctcggtttcttatgtgagcactaccgctgaaggggcgcagcgtcggctggcggaatatatccaacaggtggatgaagaggtcgctaaggaactggaagttgacctgaaagataacatcacgctgcaaaccaaaacgttgcaggagtcccttgagacgcaggaagttgtggcgcaggagcaaaaagatctgcgtattaagcaaatcgaagaagcgttgcgctatgcggatgaggccaaaatcacgcagccgcagattcagcaaacccaggatgttacccaggacacgatgttcctgttggggagcgatgcgctaaaatcgatgatacagaacgaagcgacgcgtccactggtcttttctccggcctattaccagacgaagcagacactgctggacattaaaaatctgaaagtgactgccgatacggtgcacgtctatcgttatgtgatgaagccgacgctgccggtccgtcgcgatagcccgaaaacagccattaccctcgtgctggctgtgttgctgggcgggatgatcggcgccgggattgtgctggggcgcaatgcgctacgtagctataagccaaaagccttgtaa

SEQ ID NO: 39902 - DNA, 1167 bp, Salmonella typhi
atgaaaatcacgatatccgggacgggttatgttggcttgtctaatggtttgcttattgcacaacaccatgatgtggtggcgttagacattgttcctgcccgtgttgaactgttaaatgatcggatatctccgattgttgataaagaaattcagcaatttttaaaggaagataacatcagattcagggcaacgctggataagtttgatgcataccagaatgcagattacgtcatcattgctacgcctacagattacgatccaaaaaccaactattttaatacgttcagtgtagaatcggtcattcaggatgtgatcagcatcaaccccgcagccgtgatgattattaagtctacggtgccggttggctttacggcggcaatgcgtcagaagtttgcgacagaaaatatcattttctctccggaatttttacgtgaaggtaaagccctttacgataacctttatccctcccgtatcgtgattggggaacagtctgagcgcgcccgagaatttgccgcattactccaggaaggcgctattaaacaggagattccgacgctgtttacggactccactgaagcggaagccattaaacttttcgccaatacttacctcgccatgcgagtcgcttattttaatgaattagacagttatgctgaaacgttaggattaaatacccgacaaattattgaaggggtgtgcctcgacccgcgtattggcaatcattacaataatccctcttttggttatggcggatattgtttgccaaaagataccaaacagttgctggctaattatcagtcagtgcctaataatattatctccgctatcgttgaagcaaaccgtacgcgtaaagattttattgccgattctatccttgccagaaagcctaaagtggtgggcatttatcgcctgattatgaagagtggctccgataacttccgcgcctcatcgattcaggggattatgaaacgtattaaagcgaaaggcgtagaggtcatcatctatgagccggtaatgcaagaagaaactttctttaactcacgtcttgaacgtgatttgcactgctttaaacagcaggcggatgtcattatttccaatcggatggcggcagagcttttggatgtcgctgaaaaagtgtatacccgcgatcttttcggtagtgattaa

SEQ ID NO: 39903 - DNA, 1299 bp, Salmonella typhi
atgtccaaaatcgttaaagtcatcggtcgtgaaatcatcgactcccgtggtaacccgactgttgaagctgaagtacacctggaaggtggtttcgtaggtatggcggcggctccgtcaggtgcttctactggttcccgcgaagcgctggaactgcgcgatggcgacaaatcccgtttcctgggtaaaggcgtaaccaaagctgttggcgcggttaacggcccgatcgctcaggctattcttggcaaagacgctaaagaccaggctggcatcgacaaaatcatgatcgacctggacggtactgaaaacaaatctaacttcggtgcaaacgccattctggctgtctctctggctaacgccaaagctgctgctgccgctaaaggtatgccgctgtacgagcacattgctgaactgaacggcacgccgggcaaatactccatgccggttccgatgatgaacatcatcaacggcggcgagcacgctgacaacaacgtcgacatccaggaattcatgatccagccggttggcgcgaaaacggttaaagaagccatccgtatgggttctgaagttttccatcacctggcaaaagtgctgaaaggcaaaggcatgaacaccgctgtgggtgacgaaggcggctatgcgccgaacctgggttccaacgctgaagcgctggctgttatcgctgaagcggttaaagcggctggttacgagctgggtaaagacatcaccctggcgatggactgcgcagcatctgaattctacaaagacggtaaatacgttctggctggcgaaggcaacaaagcattcacctccgaagaattcacccacttcctggaagaactgaccaaacagtacccgatcgtttccatcgaagatggtctggacgagtctgactgggacggttttgcataccagaccaaagtactgggcgacaaaatccagctggttggtgacgacctgttcgtaaccaacaccaaaatcctgaaagaaggcatcgagaaaggcatcgctaactccatcctgatcaaattcaaccagatcggttctctgaccgaaactctggctgcaatcaagatggcgaaagacgctggctacactgctgtcatctctcaccgttctggtgaaactgaagacgctaccattgctgacctggctgttggtaccgctgcaggccagatcaaaaccggttctatgagccgttctgaccgtgttgctaaatacaaccagctgattcgtatcgaagaagctctgggcgaaaaagcaccgtacaacggtcgtaaagagatcaaaggccaggcgtaa

SEQ ID NO: 39904 - DNA, 1407 bp, Salmonella typhi
atgtccaagcaacagatcggcgtcgtcggtatggcagtgatggggcgcaacctcgcgctcaacatcgaaagccgtggttataccgtctccgttttcaaccgctcccgtgaaaagaccgaagaagtgattgccgagaatcccggcaaaaagctggtgccttattacacggtgaaagagtttgttgaatccctcgaaacgcctcgtcgtatcctgttaatggtgaaagcgggtgcaggtactgatgcagctatcgattcgctgaaaccgtatctggaaaaaggcgatatcattattgatggcggtaacaccttcttccaggacacaatccgtcgcaatcgcgagctgtctgcggaaggttttaactttatcggtaccggtgtttccggtggtgaagagggcgcgctgaaagggccatctatcatgcctggcggtcagaaagatgcctatgaactggtggcgccgatcctgacgaagattgctgctgtggcagaagatggcgaaccgtgcgtgacctatatcggcgccgatggcgcgggtcactacgttaagatggtccacaatggtattgaatatggcgatatgcagcttatcgctgaagcttactccttgctgaaaggcggcctgaatctcagcaatgaagagttggcgaacacttttactgagtggaataacggcgagctgagcagttatctgatcgacatcactaaagacatcttcactaaaaaagatgaagacggtaattacttgatagatgttattcttgatgaagccgccaacaaagggaccggtaaatggaccagccagagcgcgctggatctgggcgaaccgctgtcgctgattaccgaatccgtctttgcgcgttacatctcttcgctgaaagcgcaacgtgttgccgcatctaaagtgctctccgggccgaaagcgcagccggcgggcgacaaagcggaatttatcgagaaagtgcgtcgcgcgctgtatcttggcaagatcgtctcctatgcgcagggcttctcgcagctacgcgccgcgtctgatgaatatcactgggagcttaactacggcgagattgctaagattttccgtgcgggctgtatcattcgcgctcagttcctgcagaagatcaccgatgcttacgcagaaaacgccggtatcgctaacttgctgttagcgccttacttcaagaaaattgctgatgagtaccagcaggcgctgcgtgatgttgtggcttacgcggtgcagaatggcattccggtgccgacattctctgcggcagtggcctactatgacagctatcgcgccgcagtactgccagctaacttaattcaggcgcagcgtgactactttggtgcgcacacctataaacgtactgataaagaaggcattttccataccgagtggttggaataa

SEQ ID NO: 39905 - DNA, 1638 bp, Salmonella typhi
atgacaacgaactatatttttgtgaccggcggggtcgtatcctctctgggtaaaggcattgccgcagcctccctcgcagccattctggaagcccgtggtctcaacgtgaccatcatgaaactggatccgtacatcaacgtcgatccgggtactatgagcccaatccaacacggggaagtgttcgttactgaagacggcgctgaaaccgacctggacctggggcactacgagcgtttcatccgcaccaagatgtctcgccgcaacaacttcacgactggccgtatctactccgacgttctgcgtaaagaacgccgtggcgactatctgggcgcaaccgtacaggtcatccctcacatcactaacgcgattaaagagcgcgtgctggaaggtggcgaaggccacgatgtggtgctggtggaaatcggcggtaccgtcggtgatatcgaatcgctgccgtttcttgaggcgattcgtcaattggcggtagatatcggtcgtgaacacgcgctgtttatgcacctgacgctggtaccttacctggcggctgcgggcgaagtgaaaactaaaccgactcagcactccgtgaaagagctgctgtctatcggtattcagcccgatattctgatttgtcgttccgaccgtgcggttcctgccaacgagcgtgcaaaaattgcattgttctgtaatgtgccggaaaaagccgttatttcaatgaaagatgtcgattccatttataaaattccaggcctgttgaaatctcaggggcttgatgattatatttgtaaacgattcagcttgaactgtccggaagctaacctgtctgaatgggaacaggtcatttacgaagaagcgaacccggcaggcgaagtgactatcggcatggtcggcaaatatattgaactgccggatgcctataagtcggtgatcgaagcgctgaaacacggtggtctgaaaaaccgcgttaccgtcaacatcaaattgatcgattcgcaagatgttgaaacgcgcggcgtcgaaattctgaaagatttggacgctatcctgatccccggcggcttcggctatcgtggcgttgaaggtaaaatcgccactgcgcgctatgcgcgtgaaaacaatattccttatctgggcatttgcctggggatgcaggttgcgttgattgagttcgctcgtaacgtggccggcatggacaacgccaactcaacggaatttgtgccagactgtaagtacccggttgtggcgttaattaccgagtggcgcgatgaagacggtaacgttgaagtccgtagcgagaaaagcgatctgggcggcaccatgcgcctgggcgcgcagcagtgccagcttagcgatgacagcctggtacgtcagttgtacggcgcgtcgacgattgttgaacgtcatcgccatcgttacgaagtcaacaatatgttgttgaaacaaattgaagcagcgggtctgcgtgtcgcaggccgttccggtgatgatcagttagtcgagatcattgaggtaccgaatcatccgtggttcgtggcctgtcagttccatccggaatttacttccacgccgcgtgatggacatccgttgttcgccggctttgttaaagccgccaacgagcatcagaaacgtcaggcgaagtaa

SEQ ID NO: 39906 - DNA, 801 bp, Salmonella typhi
atgacaactaaccatcaaattgaccgtcttctcaccctcatgcagcgcctgcgcgacccggaaaacggctgcccgtgggataaagagcagaccttcgccagcatcgcgccttatacactggaagaaacctatgaagtactggatgcgattgcgcgtgaggattttgacgatttgcgcggcgaactgggcgacctgttgttccaggtggtgttttacgcgcagatggcgcaggaagaaggccgcttcgattttaatgatatttgcgctgccatcagcgacaagctggagcgccgccatccgcatgtttttggcgagctttccgcggataatagcgaagaagcattagttcgctgggagcaaatcaaaacggaagagcgcgcgcaaaaagcgcagcattccgcgctggacgatattccgcgcagcttaccggccttaatgcgcgcgcaaaaaatccagaaacggtgttcaaacgtgggcttcgactggacgacgctggggccggtcgtcgataaggtctatgaagagatcgatgaggtgatgttcgaggcgcggcaggcggttgttgatcaggctaaactggaagaggaaatgggcgatttgctctttgccacggtcaacatggcgcgtcatttaggtacgaaagcggagatcgctttgcaaaaagcgaacgataaatttgaacgtcgttttcgcgaagttgaacgtattgtcgcagccagaggcctggaaatgaccggggtagacctggaaacaatggaagaagtttggcaggaagtaaaacgccaggaaattgatctctaa

SEQ ID NO: 39907 - DNA, 2700 bp, Salmonella typhi
ttgatgaataacacatggaaaagtgttctttgcccaatagcgtgtggagtgggaatgcttctaagcgcctccccttatagcgcgtcaggcaaagacatcgaatttaataccgatttcctcgatgtaaaaaatcgcgataacgtcaacattgcacagttttctcgtaagggttttatcctgccaggcgtctaccttttacaaattaaaattaacggacagactctgccgcaggaatttcctgttaactgggttattccagaacatgatccacaaggaagtgaggtttgcgcagaaccagaattagttacgcaattgggtataaagccggaactcgcggaaaaactcgtctggataacgcacggtgaacgacaatgtctggcgccagattcactgaaaggcatggattttcaggctgacctgggacactccacgctgctggtgaatttaccccaggcgtatatggaatacagcgatgtcgactgggacccacccgcccgctgggataatggtattcccggcatcattctggattacaacattaataatcagctccgccacgatcaagaaagcggcagcgaagagcaaagcatcagcggcaacgggacgttaggcgcgaacctgggcgcatggcgactacgggccgactggcaggccagctacgaccatcgtgacgatgacgagagcacttccaccctccacgatcagagctggagccgctactacgcctatcgcgcactaccgacgctcggggccaaacttacgctgggcgaaagctatctccagtccgatgttttcgacagctttaactatatcggtgccagcgtcgtttctgacgatcagatgctgccgccgaaactgcgcggctatgcgccggagatcgtgggcattgcgcgctctaatgcaaaagtcaaagtctcctggcaggggcgcgtactgtatgaaacgcaggtgcccgcaggaccgttccgtattcaggatctcaaccagtccgtttccggtacgttgcacgtcaccgtggaagagcagaacggtcagacccaggagtttgacgttaacaccgcatcggttcccttcctgacgcgccccggcatggtgcgctacaagatggcgctgggccgcccgcaggactgggatcatcaccctattaccggcacattcgcctcggcggaggcttcgtggggggtcaccaacggctggtcgctctatggcggcgcaattggagaaagcaactatcaggccgtggcgctgggaagcggtaaggatcttggcgtggtgggcgcggtggcggtggacattacgcactccatcgcccacatgccgcaagacgacgggtttgacggcgaaacgctgcagggtaactcatatcgcatcagctactcccgtgactttgatgaaatcgacagccgactaacctttgccggataccgcttctcagaaaagaactttatgagcatgagcgactatctggatgcgaaaacctatcatcatctcaatgccggtcacgaaaaagaacgctatacggtcacctataaccagaacttccgtgaacagggcatgagcgcctatttcagctactcacgcagtaccttctgggacagcccggatcagagtaactataacctgtctctttcctggtacttcgacttagggtcgataaaaaatctcagtgcgtcgctgaacggctatcgcagcgaatataacggtgataaagatgatggcgtctatatctcgctgtctgttccctggggcaatgattccatcagctacaacggtacgtttaacggtagtcaacaccgtaatcagctcggctattccggccacagccagaacggcgataactggcagcttcacgtcgggcaggatgaacaaagcgcgcaggcagacggttattacagccatcagggcgcgctgacggacatcgatctgagcgcggattatgaagaaggatcgtaccgttcgctgagtatgtcgctgcgcggcggcatgacgctgaccacccagggcggcgcgctacaccggggaagtttagcgggcagcacacgtttgctggttgataccgacggcattgcggacgtccccgttagcggtaacggctcgccaacctcaaccaacattttcggcaaggccgtgattgcggatgtcggaagctattcgcgcagcctggcgcgtatcgatctgaacaaattgccggagaaggcggaagctactaagtcggttgtgcagatcacgctcaccgaaggcgccatcggctaccgtcactttgacgtggtcagcggcgagaaaatgatggcggttttccggctagcagacggcgacttcccacctttcggcgccgaagtgaaaaacgagcgccagcagcagttgggcctggtggccgatgacggcaacgcctggctggcgggcgtaaaagccggggaaacattgaaagtcttctgggatggcgcggcgcagtgtgaagcatcactcccgcccacgtttacaccagagctattggccaacgcgctattgctgccgtgcaaaatgctggaaggtcagccccccaccgcaccgcagaaaagttctccgctgcctgcgcaaccgctaatccaggaacatacgcaaaccgatggccaaccggccgcgccggtggcgacaaccactcaaaccccgcccataccgctggctgacaaccatgcggtgaatcgcaaggatatggaataa

SEQ ID NO: 39908 - DNA, 774 bp, Salmonella typhi
atgaacaagaccaaccattttaatcgccaggcgcttattgccacggtattactggctgcgccgctggtgtcacacagcgcgattgtgccggatcgtacccgcgttatttttaacggcaatgaaaattcaatcaccgtcacgctgaaaaacggcaacgccactctgccctatctcgctcaggcgtggctggaagacgataagttcgccaaagatacccgctattttaccgccctgccgccgctgcagcgtattgagccaaaatccgacgggcaggttaaagtccagccgttaccagccgcggctggcctaccgcaggaccgggaaagtctgttttatttcaacgtgcgagaaattccgccgaaaagcgataagcctaatacgctccagctggcgctgcaaacgcgtattaagtttttctaccgcccggtagccgtagcccggcaggtggataagacgcacccgtggcagacgaagctcacgctgacctaccagggcgatggtgtgatcttcgacaaccccacaccgttttacctcgtcatcagcaatgccggtagcaaagagaacgagaccgcctccggctttaaaaacctgctgattgccccgcgtgaaaaagtgacctctcccatcaaaggtgcctcgctcggcagctcaccggtggtgggctacgtcgatgattacggcggccatcgcctgctggtttttacctgctcagggaatacctgcaaggtcaatgaggaaaaaacccgtgacgctgagaagaaagcgaataagtaa

SEQ ID NO: 39909 - DNA, 2235 bp, Salmonella typhi
atggtcgcggtaagaagtgcacatattaataaagctggtgaatttgatccgaagaagtggatcgcaagcctgggaatttccagccagcagtcgtgtgagcgcttagccgaaacctgggcgtattgcctgcaacagacacaaggacatccggatgcggatctgttgctgtggcgtggcgtggagatggtagaaattctttccacgctgagtatggatatcgacacgctgcgggcggcgctactgttccctctggccgacgccaacgtagtcagcgaagatgtactgcgcgaaagcgttggcaaatctatcgttaccctgattcatggcgtgcgcgatatggcggcgatccgccagttaaacgccactcataacgactctgtttcttcggagcaggttgataacgtccgtcgaatgttattggcgatggtggatgatttccgctgcgtggtcatcaaactggccgagcgaatcgctcatttgcgcgaagtgaaagaggcgccggaagatgagcgcgtgctggcggcgaaagaatgtaccaacatctatgcgccgctcgctaatcgtctgggcatcgggcaactgaagtgggaactggaagactactgtttccgctacctgcatccggcggaatacaaacgcatcgccaaactgctgcatgaacgccgcctcgatcgcgaacattacatcgaagagtttgttggacatctgcgcgccgaaatgaaaaacgaaggcgtgcaggcggaagtctacggacgaccaaaacatatttatagcatctggcgcaaaatgcagaaaaagcatctggcgtttgatgaactctttgacgtgcgcgccgtgcgtatcgtcgctgaacgtctgcaagactgctacgccgcgttggggatagtgcatacgcactatcgccacctgccggatgaattcgatgattatgtcgctaacccgaaaccgaacggttaccagtctatccacaccgtggtcttggggccgggcggtaaaaccgttgagatccagatccgtaccaaacagatgcatgaagacgccgaactgggtgtggcggcgcactggaagtataaagaaggcgccgcgtccggcggcgtgcgttccggccatgaagacagaattgcgtggctgcgtaagctgatcgcctggcaggaagagatggccgattccggcgaaatgctggatgaagtgcgcagccaggtgtttgacgatcgggtctacgtttttacgccaaaaggcgacgtggttgacttgcctgccggatctacgccgctcgattttgcttaccacatccacagcgatgtcgggcaccgctgcatcggcgcgaaaattggtgggcgcatcgtaccgtttacctaccagttacagatgggcgatcaggttgaaattatcactcagaagcagccgaatcccagccgcgactggctgaatccaaacctgggctatgtgacgaccagccgcggacgctcgaaaattcacgcctggttccgtaaacaggaccgtgacaaaaatatcctggctggacggcagatcctcgacgatgagctggcgcatttggggattagcctgaaagaggccgaaaaacatctgctgccgcgctacaactttaatgagctggaagagttgctggcggcgataggcggcggcgatatccgtcttaatcagatggtgaatttcctgcaatcgcagttcaataagccgagtgcagaggagcaggatgcagcggcgctgaaacagcttcagcaaaaaacatacgcgccgcaaaatcgtcgtaaagacgacgggcgcgtggtggtggaaggggttggtaacctgatgcaccacattgcccgctgctgccagccgattccgggggatgaaattgtcggcttcattactcaggggcgggggatttccgtgcaccgggccgactgcgaacagctggcggaactgcgctcccatgcgccggagcggatcgtagaggcggtatggggcgaaagctactcggcgggatattcgctggtggtgcgcgtccaggccaacgatcgcagcggtttattgcgtgatatcaccaccattctggctaacgaaaaagtcaacgtgctgggcgtcgccagccgcagcgacattaaacagcagatcgccaccattgatatgaccatcgagatctacaacctgcaggtgctgggccgcgtgctcggtaagctgaaccaggtgccggatgtgattgatgcacggcgactgcacggggggtaa

SEQ ID NO: 39910 - DNA, 1479 bp, Salmonella typhi
atgagtttacgacaaaaaacgatcagcggcgttaaatggtcggctatcgccacgatagtgattatcggtctggggttaattcagatgacggtgctggcgcggatcatcgacaaccaccagtttggcctgttgaccgtatcgctggtgattatcgcgctggccgacacgatttcggactttggcatcgcgaactcgattatccagcgtaaaacgattgggcatctggagctgaccacgctttactggctaaacgttgggcttgggattgtggtatttgcggtggtcttttggctgagcgatgcgattgcccatgttttgcataacccggatctcgcgccgttaatcaaaacgttgtcgctggcgttcatcgtgatccctcacgggcagcagttccgcgcgctgatgcaaaaagagctggagttcaataagatcggcatgatcgaaacgacctccgtgctggcggggttcacctttacggtgattagcgcccattactggccgctggcgttaaccgcgattctcggctatctggtgaacagcgcggtgcgaacgctgctgtttggttactttggccgcaagatttaccgtccggggctgcatttttcgctggcatcggtgtccacgaacctgcgttttggcgcgtggctgacggcggacagtatcgtcaattacatcaacacgaatttatcgacgctggtactggcgagaattctcggcgcaagcgtcgccgggggatataacctcgcgtacaacgtggctgttgtgccgccggcgaagcttaaccccatcattactcgcgtgctatttccggcattcgccaaaatccaggacgataccgagaagctgcgcgtcaacttctataagttgctttccgtggtgggaattatcaattttcccgcgctgttgggcctgatggtagtggcgaacaattttgtgccgttagtgtttggtgagaagtggaacagcattatcccgatcctgaaattgctgtgcgttgtggggctgctgcgctcagtcggcaacccgattggttcgctgctgatggcgaaagcgcgcgtggatatcagctttaagttcaacgtctttaaaacgtttctgtttatcccggcaattctcattggcggccatctggcgggggcgattggcgtgacgctggggttcctggtggtgcaaatcatcaacaccattctgagctatttcgtgatgattaagccggtactcggctccagctaccgtcagtatattctcagcctgtggctaccgttttatctctcattgcccacatttattaccagctacggcgcaggaaagctagtcgacggctatttaccgttgtcaggggtattcgcgctacaggttgtggtcggtattttgagttttattttaatgattattttttcacgcaatgcgctggtgatggaaattaaaaatcagcttgttggcagtgaaaaaatgaaaaagttattacgtgtcggatga

SEQ ID NO: 39911 - DNA, 1224 bp, Salmonella typhi
atgaagatcctggtctatggcattaactattcaccggaactgaccggtatcggcaaatataccggcgaaatggtggcgtggatggcgcgggaaggccatgaggtgcgggttattactgcgccgccgtactacccgcagtggaaggtcggtgagcgctattccgcctggcgctatcgccgggaagagggcgaggctaccgtctggcgctgcccgctgtatgtgccgaaacagccctccaccctaaaacgactgcttcatctggggagctttgcattgagcagttttttcccactgatggcgcagcgtcgctggaagccggatcggattatcggcgttgtaccgacgctcttttgtacgccgggaatgcgtctgctggcgacactctccggcgcgcgtaccgtactgcatattcaggattacgaagtggacgccatgctcggcttaggaatggcgggaaaaggcaagcgcggcagcgtagcgcggttagcgacggcctttgaacgcagcgcgctgcgtaacgttgataatgtttcgaccatctctcgctccatgatgaataaagcgcgggaaaagggcgtcgcggcggaaaaaatcctcttttttccaaactggtcggaagtggcgcgctttcaggacgttaatgacgctgacgtgacggctttgcgtcagcagcttggcttgccagagggcaaaaaaatcgtgctctattccggcaatatcggcgaaaaacaagggctggaaaaggtgattgacgccgcagaacgattacgcgatcgaccgttgatttttgcgattgtcggccaggggggcggcaaggcgcggctggagaacatggcccgcgaacgcggcctgctaaatattaaattcctcccgctgcagccttacgacgccttacccgcgctgctgaaaatgggcgactgccatctggtggtgcaaaagcgcggcgcagcggatgcggtactgccctccaagctgactaacattctggcggtcggcggtaatgcggtgattaccgctgagccgcacaccgaattaggacaactttgcgcgcgctatccgggcatcgccgtttgcgtggagccggagtcgaccgacgcgctggtcgacgggattagccaggcgctcgccatgccgaaaaacaacacgacggcacgtgaatacgccgaacgcacgctcaataaagagaacgtgctacgccaatttattgcagatattcggggatga

SEQ ID NO: 39912 - DNA, 489 bp, Salmonella typhi
atgctggaagacttacgcgcgaatagctggagcttacgcccctgttgcatggtgctggcctaccgtatcgctcatttttgttccgtctggcgcaaaaagaatgtgctgaataatctgtgggccgcgccggtgctggtgctgtatcgcgtgatcacggaatgcctgttcgggtatgaaatccaggccgccgcgaccattggtcggcggttcactatccatcatggttacgcggtagtgatcaacaaacatgtcgtcgccggcgacgattttaccattcgccacggcgtcaccattggcaatcgcggcgcggacagcctggcttgtccggtgattggtcacggcgttgagctgggggcgaacgtcatcctgcttggcgatattactatcggtaatcacgtcacgattggcgcgggtagcgtggtgcttgacagtattccggatcatgcgctggtggtgggagaaaaagcacgggtgaaggtcagcacatga

SEQ ID NO: 39913 - DNA, 2160 bp, Salmonella typhi
atgacagaaaaagtaaaacaatctgcggcggttacgggtagcgatgaaatcgatatcgggcgtctggtcggaacggtgattgaagcgcgttggtgggtgttggggacgacggccatatttgcgctgtgcgcggtaatttatacgttcttcgccacgcccatctatagcgccgatgcgctggtgcagattgaacaaaacgccggtaattcgctggtacaggatatcaacagcgcattagcgaataagccgccggcttccgatgcggaaattcagctcattcgatcgcgcctggtgctggggaagaccgttgacgatctggatctggatattgccgtcaccaaaaacacctttccgctgttcggcgccgggtgggagcggctgatgggacgtcacaatgaaatggtgaaagtcacgacattcacccgaccagagacgatgagcggacagatcttcaccctcaaagtgctgggcgacaaacgttatcagttggtcagcgacggcggatttagcgcgcagggcgttgtgggccagccactcaataaagacggcgtgacgatgcgggtagaggcgattgacgcccgtcctgatacggaatttacggtgagtaaattctcaacgcttggcatgattaataacctgcaaaataacctcaccgtaacggaaaccggcaaagataccggcgttctgaacctgacgttcacgggagaggatcgcgaccagatccgcgacattctcaacagtattacccgtaactatctgcaacaggatattgcgtggaaatctgaagaggcggggaagagcctggcgtttctggcaaaacaactgccggaagtccgcagccgtctggatgtggcggaaaacaagctaaacgctttccgccaggataaagactcggtggatttaccgctggaggcgaaggcggtgctcgattcgatggttaatatcgacgcccagttgaatgagttgacgtttaaagaagcggaaatttccaagctctttaccaaagcgcatccggcttaccgcaccctgctggaaaaacgtaaagggctggaagataaaaaagccaaactgaacgggcgggtgacggcgatgccgaaaacccagcaggagattgtgcgtttgacccgcgatgtggagtccggccagcaggtttatatgcaactgcttaataaacagcaggagctgaaaatcaccgaagccagcaccgttggcaacgtgcgcatcgttgacccggcgattacccagccgggcgtgctaaagccgaaaaaggcgttgattattctcggcagcattattctgggattaatgttatcgattgtcggcgtgctgctgcgctcgctgtttaatcgcggtatcgaaagcccgcaggcgctggaggagcacgggatcagcgtctatgccagtattccgctgtcggaatggcaaaaagcgcgcgatagcgtcaaaaccattaaagggattaagcgttacaagcagagccaactgctggcggtgggcaatccgaccgatctggcgattgaggcgattcgcagcctgcgcaccagcctccatttcgccatgatgcaggcgcaaaataatgtactcatgctcacaggcgtcagctcctctatcggtaaaacctttgtttgcgccaacctggcggccgtcatcagccagacgcataaacgggtattactgatcgactgcgatatgcgcaagggctacacccatgaactgctcggcaccaataacgtggacggcttatctgacattctggcgggcaaaggcgagatagcctcctgcgcgaaacccacggcgatcgctaattttgatcttattccgcgcggtcaggtaccgcctaatccatcggaattgctgatgagcgagcgcttcggcgagctgatcgcctgggcaagcagccgctacgacctggtattaatcgacacgccgccgattctggccgtgacggacgccgcgattgtgggtcgtcacgtcgggacgacgctgatggtggcgcgttatgccgtcaacaccttgaaagaagtggaaaccagtctgagccgttttgaccagaatggcattcaggtcaaaggcgtcattctcaactccattttccgccgggcgacgggctaccaggattatggctattacgagtatgaataccagtcagattccaaataa

SEQ ID NO: 39914 - DNA, 1857 bp, Salmonella typhi
atgagacgatttctgacgacgctgatgattctcttggtcgtgctggtggccggattctctgcgttggtattgttggtcaatccgaatgatttccgcgcctatatggtgcagcaggttgccgcgcgtagtgaatatcagttgcaactggacgggccgctgcgctggcacgtatggccgcaactcagtatcctttccgggcgaatgacgctaacggcgcgaggcgccagcgaaccgctggtgcgggctgacaatatgcgcctggatgtcgctttatggccgctgttgagtcatcagcttcatgttaagcaggtgatgctgaaaggcggggtgattcaactgacgccgcaaacggaagcggtacgcagtgatgatgcgccggtcgcgccgaaagataataccttgccggacgtagcggaagatcgcggctggtcgtttgatattcgtagcctgcgcgttgccggcagcgtgctggttttccagcatgaaaatgatgatcaggtcacggtgcgcgatattcgtctgaatatggaacaagatgccgagcatcgcggcacgtttgatttttcgggacgcgtgaaccgcgatcagcgggatcttgctttatcgttcagcggaacggtggatgcttccgattatccgcataatttaaccgcgggtattgagcaactgcgctggcaattgcagggcgcggatctaccggcgcaggggattgaggggcagggacaattgcaggcgcagtggcaggaggcgcaaaaacgtctttcatttaaccacttaaatttaacggcgaatgacagttctctgaccgggcatgttcaggtaacgctggcggagcagccggaatggcaaattgacctccggtccagcaagcttaatctggacaacctgttgccgcatcatagcgccgtggctcagacaggcggcgcggtgtcgcaggggcaaaatacgctccccctgaccaggccagttatcgcgtcgcgtgttggtgcgccgccttatcaggggctgcaaagctttacggcggagattgctttacaggcggattcagttcgctggcggggaatggactttacccaggtttcgacgaagatgtctaatcagaccggattgctggatattactgagttgcaggggaaactggccgacggagagatgtcgctgcccggcacgctggacgcccgcaccgccagtccgcgcatcgaattccaccctcgcctcaaccatgttgagattgggactatcctgaaagccttcaattatccgattagcctgaccggtaagatgtcgctggttggcgatttctccggggcggatattgacgcagaggcatttcgccatagttggaaaggaaaagcgcatgttgacatgagcaatacgcgccttgaaggaatgaatttccagcaactggtgcagcaggccgtagagcgaagcggcggcgacgcgcagcagtcgcaggaaaatatggacaacgcgacccgactggatcgcttcacgaccgatctgacgctaaataagggcacgctgacgctcgacgacatggtcgggcaatcttctatgctggcgttaaccggcagcggaacgctggatctggttaagcagagctgtgatacacaatttaatctgcgtgtgctgggcggctggaacggcgatagcaacctgatcaccttcctgaaagagacgccggtgccgttgcgcgtctatggcaagtggcaggagctgaactataccctgcaagtggagcagttattgcgtaagcatttacaggatgaggcgaagcgtcggctcaatgactgggcggatcgcaataaagatacccgcaacggtaaagatgtgaagaagctgctgaataagctgtag

SEQ ID NO: 39915 - DNA, 2613 bp, Salmonella typhi
atgacacaacagccacaagccaaataccgccatgactatcgcgcgccggattaccagattactgatattgaattgacctttgacctcgatgccgaaaaaaccgtggtcaccgcaataagccaggctgttcgtcatggcgcgcctgatgcgcctcttcgccttgatggggaagatttaacgctggtatctatccacgtcaacgatgcgccgtggacagcatataaggaagaagagggcgcgcttatcatcagcgacctgccagagcgttttacgttacgcattgtcaacgagataagtccggcggcgaatacggcgctggaaggattgtaccagtccggcgatgcgctctgtacccagtgtgaagcggagggcttccgccatattacctggtatcttgaccgcccggacgtactggcgcgatttaccaccaaaattattgccgataaaagcaaatatccgttcctgctttccaatggcaaccgtgttgcgcagggtgaactggagaatggccgtcactgggttcagtggcaagatccgttcccgaaaccgtgttatctgtttgcgctggtggccggtgattttgacgtgctgcgcgatacctttaccacccgctccgggcgtgaagtcgcattagaactgtacgttgaccgtggcaatctggatcgcgcgccgtgggcaatgacctcgctgaaaaattccatgaaatgggatgaaacgcgttttgggctcgaatatgacctcgacatctatatgattgtcgcggtggatttctttaatatgggcgcgatggagaataaaggtctcaatatctttaactccaaatacgtgctggcgcgaaccgataccgcgacggataaagattatctcgatattgagcgcgtgataggccatgagtatttccacaactggaccggcaaccgcgtcacctgccgcgactggttccagttgagcctgaaagaggggctcaccgtgttccgcgatcaggagtttagctctgatttggggtcacgcgcggtgaaccgcatcagtaacgtgcgtaccatgcgcggtttacaattcgcggaagacgccagcccgatggcgcatcctatccgcccggataaagtaatcgaaatgaataacttctacaccctcaccgtttatgaaaagggtgcggaagtcattcgcatgatccacacgttgctgggtgaggaaaatttccagaaggggatgcagctttattttgagcgccatgacggcagcgccgcgacgtgtgatgacttcgtacaggcgatggaagatgcttctaatgtcgatttgtcccatttccgccgctggtacagtcagtccggcacgccgattgtaacggtaaaagatgattataatccggaaaccgagcagtacacgttgaccatcagccagcgcactccggcgacggcggatcaggcggagaagcagccgctgcatattccattcgccatcgaactgtacgataacgaaggcaacgtcattccgttgcaaaaaggcggtcacccggtcaatgccgtgctgaacgtcacgcaggcggagcagacatttaccttcgataatgtctacttccagcctgttccggccttgctgtgcgagttttcagcgccggtgaagctggaatataaatggagcgatcagcagttgacgttcctgatgcgccatgcgcgcaatgatttctcccgttgggatgcggcgcaaagcctgctggccacatacattaaactgaatgtggcgcgtcatcagcaggggcaaccgctatcgcttccggtgcatgtcgctgatgcgttccgtgcagtactgttggatgagaaaatcgatccggcgttggccgcagaaattttaacgctgccttcggccaatgaaattgcggagctgtttgaggtcattgacccgatcgccattgcgcaagttcgtgaagcgctaacgcgtacgctggcggcagaactggcggatgagttcctggctatctataacgccaatcatctggatgagtatcgtgttgatcacggcgatatcggtaagcgcacgctgcgcaatgcttgcctgcgcttcctgacgttcggcgagacggagctggctaatacgctggtcagcaaacagtatcgcgacgccaataatatgaccgatgcgctggcggccctgtctgctgcagtggcggcgcagttgccgtgccgcgatacgctgatgcaggagtatgacgataagtggcatcaggacggcctggtaatggataaatggtttatcctgcaatccacaagcccggcggaaaatgtactggaaaccgtacgcagcctgctcaaacaccgttctttcagtatgagcaacccgaaccgcatccgttcattaattggcgcgtttgctggcagcaacccggcggcgttccatgcgcaagacggtagcggataccagttcctggtcgagatgctgaccgatctgaatagccgtaacccgcaggtagcatctcgcctcattgaaccgctgattcgtctgaaacgttatgatgataagcgtcaggagaaaatgcgcgcggcgctggagcagttaaaaggactggagaatctttccggcgatctgtacgagaagataactaaagcgttagcctga

SEQ ID NO: 39916 - DNA, 1761 bp, Salmonella typhi
ttgaccattacgaaacttgcatggcgtgatctggttccggatagcgaaagctatcaggagatatttgcacagccacacgcgactgacgaaaacgacaccttactcagtgatactcagccacgactgcaatttgcgcttgagcaacttatacagccgtgggcatcatcctcttttatgctgactaaagcgcctgaagagcaagagtatctcactttactttcagatgccgtccgcgctctgcaaaccgatgccggacaattaaccggcggacattatgacgtttccgggcatactgttcattaccgcgccgcgcagaatgcgcaagacaactttgccaccgtcacacaagtcgtcagcgctgactgggtcgaagccgaacagctctttggttgcctgcggcagtataacggcgacattaccctgcaaccgggactggttcatcaggcgaacggcggcgtgctgattatttccttacgaacccttctggcgcagccgttactatggatgcgtctgaaagccatcgttagccgcgagcgttttgactgggtggcctttgacgagtcgcgtccattaccggtctccgtgccatcaatgccgctcaaactgaaggtgattctggttggcgaacgtgaatcactggctgattttcaggagatggaaccggagctcgcggaacaggctatctacagtgaatttgaagacaatttacagatagcggacgcagaagctatgaccctgtggtgtcaatgggtgacgcgtatcgctttacgcgataatttgccccctccggcaccggacgcctggcccgtcctgatacgcgaggctgtgcgctataccggcgaacaggatacgctgcctctttgcccactgtggatagcccgccagtttaaggaggcgtcgcctttatgcgaaggcgatacctgcggcgcagaagcgctcagtctgatgcttgcccgacgcgaatggcgagaaggctttctggcggagcggatgcaaggcgagattctgcaagagcagatcctgattgaaaccgaaggcgaacgcgttggacaaatcaatgcgctttccgtcattgagtttcccggacatccgcgcgcctttggcgaaccgtcgcgaattagctgtgttgtgcatatcggcgatggcgaatttaacgatattgagcgcaaggccgaacttggcggaaatatccacgctaagggaatgatgattatgcaggccttcctgatgtcggagttgcagctggagcaacaaattcccttctctgcctcgttaacctttgagcagtcctacagcgaagtggatggcgatagcgcctcaatggcggaattatgtgcgctcatcagcgcgctggccaatgtgccagtgaatcaaaatattgcgattaccggctcggtcgatcagtttggtcgcgcgcaaccagtgggcgggctaaacgaaaaaattgaaggtttcttcgccatctgcgagcagcgggaattaaacggtaaacagggcgtgattatccctgccgccaatgtccgccatctcagtcttaaatctgaactgctgcaagcggttaaagaagagaagttcactatctgggcggtagacgacgtgaccgacgccttaccgctactgttaaatctggtgtgggatggcgaaggtcaaacgacgttgatgcagactatccaggagcgtatcgcgcaggcgacgcaacaggaaggccgtcatcgtttcccgtggccattacgttggctgaacgcttttattccgaactga

SEQ ID NO: 39917 - DNA, 2154 bp, Salmonella typhi
atgttaagtccgttgattcgccgttatacctggaacagtacctggctgtattacatccgcatttttatcgctctgtgcggcaccaccgccctgccctggtggctgggcgacgtcaaactgaccatcccgctcacgctcggtatggttgccgcggcgctaaccgatctcgacgaccgccttgccggacgcttgcgtaatttaatcattaccttaatttgcttttttatcgcgtcggcttctgtggagctgctctttccctggccgtggctatttgcgttgggcttaacgttatccaccagcggatttattctgttgggaggactagggcaacgctatgccaccatcgcgttcggcgcgttactcattgcgatttatacgatgctgggcgcttctttatacgatcactggtatcagcaaccactgctcctgctggcaggcgcagtatggtataacctactgacgctaaccgggcatctgctatttccgatccgtccgttgcaggataatctggcacgcagttacgaacagttggcgcactatctggaactgaaatcacgtctgtttgatcctgatattgaagatgaaagccaggcgccgctctatgatttagcgttagcgaacgggcagttaatggcgacgctgaaccaaacgaaagtgtcgttgttgactcgcctgcgcggcgatcgcggtcaacgcggtacgcgccgcactctccattactattttgtggcgcaggatattcatgaacgcgccagttcttcgcatattcaataccagacgctgcgcgattattttcgccatagcgacgtcatgttccgctttcaacgtctgatgtcgatgcaggcgcaggcctgtacgcagctggcgcgctgtatcttactgcgtacgccgtaccagcatgatccgcgctttgaacgcgtctttacccacattgacgccgcgcttgaacgtatgcgcgccagcggcgcttctttagagctgctgaatacgcttggattcttattaaccaacctacgcgctattgatgcgcaactggcgacgatcgagtcggagcaggcccaggcaatgccgcgcaatgagtcagaaaaccagttggctgacgatagcctgcacgggtttagcgacatctggctgcgtctgagccgtaattttaccccggagtccgctctctttcgccatgcggtacgcatgtcgctggtattgtgcatcggttatgctctcatccaaattaccgggatgcgccacgggtactggatattgctcaccagcctgttcgtttgtcagcctaactataacgcgacccgccatcgccttgcgctcaggattatcggtacgttggtaggcgttgcgatcggcctgccgattttatggtttgtcccttcgcttgaaggacagttagttctgctggtgattaccggcgtgcttttcttcgcattccgtaatgtgcagtatgcccatgcgacgatgttcatcaccctgctggtattactctgctttaacctcctgggcgaaggcttcgaggtagcgttaccgcgcgtcatcgacacgttaattggctgcgctatcgcctgggctgcggtcagctttatttggccggactggcgctttcgcaaccttccccgggtactccagcgcgccaccgatgctaattgccgctaccttgatgcgatccttgagcaatatcatcagggacgggataaccgcctggcctatcgcattgccagacgcgacgcgcacaaccgcgatgcagaactggcatccgtggtttctaatatgtcgagcgaacccgacgtcacggctgaaacccgggaggcggcgttcaggctgctttgcctcaatcacacttttaccagctatatctccgccctcggcgcgcaccgcgaaaagctcagcaatccggacgtgttggggcttctggatgacgcggtctgctacgttgatgatgcgcttcatcatcagccagaagacgaacagcgcgtacaccaggcgctggagggtttaaagcagcgagttcagtcgctggaaacacgtccggacagcaaagaacctctggttgttcaacaaattggtttgctcattgccttactgcccgagattggacgcttgcaacggcaaatttcaccgccgacttctacattaattacccagccgtaa

SEQ ID NO: 39918 - DNA, 1212 bp, Salmonella typhi
atgactgaatctacatttccgcaatatccccgtttagtcctcagcaaagggcgagaaaaatctttactccgccgccacccatgggtcttttccggcgccgtatcccgtctggaaggcaaagccaacctcggtgaaactatcgatatcgtcgaccatcagggaaagtggttagcacgcggcgcctggtcgccagcctcccagatccgcgcgcgcgtctggacatttgataaaacagaatccattgatattgcgtttttcacccgccgcctgcgccaggcgcagcagtggcgcgactggctggcgaaaaaagacggtctggatagctatcgtctgatcgccggtgaatccgatggcctgcctggcgtcactatcgatcgttttggtcattttttggtgctgcaactgctcagcgccggggccgaatatcaacgcgccgcattaattagcgctctgcaaacatgctatccggattgcgctatttacgatcgcagcgacgtcgccgtgcggaaaaaagaagggatggcgctgacgcaaggcccggtcactggcgaactgccgcctgcgcttttgccaattgaagaacacggtatgaaattgctggtcgatatacagggcggccacaaaaccggttattatcttgatcagcgcgacagtcgtctggtgacgcgccgctacgtagaaaatcagcgggtactgaactgcttctcttataccggcggttttgccgtgtcggcgttaatgggtggttgtcgccaggttgtcagcgtggatacctcacaggatgcgctggatatcgccaggcaaaacgttgaactgaaccaactggacttgagcaaagccgaattcgtgcgcgacgacgtgtttaagttgctgcgcgcttaccgtgaacacggcgaaaaattcgacgtcatcatcatggacccgcccaaattcgtcgaaaataaaagccagttaatgggcgcctgccggggctataaagacattaacatgttagcgattcaactgctcaatccgggcggcatactgctgacattctcttgctccggactgatgaccagcgatttatttcagaaaatcattgccgatgccgcaatagatgccggtcgtgatgtacaatttatagagcagttccgtcaggccgccgatcacccggtgatcgccacctacccggaagggctgtatctgaaagggtttgcctgtcgcgtcatgtaa

SEQ ID NO: 39919 - DNA, 1491 bp, Salmonella typhi
atgcatattcgacatcaggatcttacgacggcagaggtgcgttccagtcatctgcaccgtttgcatcgtgttacgcttttttccgccgcgatctgccatattacgcagggcagtaaagtcatcattcaggatgatagccgccttgtcgccgggcctggcgagttaattattattccggcgaacacgccgctggagattattgtctatggaaaacccccagctaggctgggggttccggaaagctttcagctttaagccagttattaaaaccccttttgatttgttaaaacatcttgcggtctggcaactgcaaaagttcaacaagaaatcaaaagggggtcccaatgggggacgaaaagagcttagcgcacacccgatggaactgtaaatatcacatagttttcgcgcccaaataccgaagacaagcgttctatggagagaagcgtagggcagtaggcagcatattaagaaaattgtgtgaatggaaaaacgtacgaattctggaagcggaatgttgtgcagatcatattcacatgcttctggagatcccgccgaagatgagtgtgtcgagtttcatgggatatctgaagggtaaaagtagtctgatgctttacgagcagtttggggatctaaaattcaaatacaggaacagggagttctggtgcagagggtactatgtcgatacggtgggtaagaatacggcgaagatacaggactacataaagcaccagcttgaagaggataaaatgggtgagcaattatcgatcccgtatccgggcagcctgtttacgggccgtaagtaacgaagtttgatgcaaatgtcagatcgtatgcgcctgttagggcgcggctggtaagagagccttacaggcgcatcagaaaaacctccggctatgccggaggatatttattaatcagcctgcgcagaacggttttcgctccgacctgttgttactttcaccggagattattgctcgctttaaaacgatgtatgttcaggattatccaccggcaaacctgacatcgctgtgtacgccgatgagccgtagcctgacatttatgtgggagaacgtgttggatgctgtgcgccaggggttgcccgttgggctacaggaacatcaggcgatggggttactgttagcgcttttacatgatggcgcggcgggaccgctgcttattgaacggcgttacaccctcacggagcaggtgcggcaactgattatgctctcacctgctaagctatggacagcccaggagatagcccgccgccttgctatgggaacatcgacgctgcgtcggcgtttgcagcgcgaatcgcagagttatcggcaaattattgaagaggtacgcatgtcctgcgcgctttctcaactgcaatcgacgacgctgccgatcggcgaaatagcgctacggtgcggctacctgtcggggtcgcgatttacggccagattccgccaacattatgggtgtctgcccagtcaggtacgttaa

SEQ ID NO: 39920 - DNA, 1365 bp, Salmonella typhi
atggttaagttatcaatgacgctgcgcctgacaatttcttttatcgccatacttatcctcgcctgtaccggcattagctggacgctctataacgcgctgagcaaagaattaacgtatcgggatgatatgacgctaataaatcgggcggcgcaaatgcagcaactgttactggatggcgccaggccggaaaatctgccgctctatttcaatcggatggtggatacgaagcaggatatcttattgatccactcagcaacaggccataatgttgcgattaatcatagcggcatccccgaccaacgctttaacgagattccgctggctaaaaacatcacccgcgaaaccttatttcgccaggcggtacaaggcacggagctgaccgcggtacgagtaaacgccagaagcggcgataacccgctgacccttactattgccaggctggcgacggaaaggcggcaaatgctggcgcaatatcgccgcaacagtttgctgattagccttatcgcgatcctcgtctgttcggcgctcagtccattagtcatcagaaacgggctgcgggccattacgtcgctcagccgactcaccgcggcgacagatagcggcacacttcgccagccgctggcggaacaggcgttacccgtcgagctcaggccgcttgggcaagcgctaaataccatgcgccagaagctttccgacgattttgaacgcctgaaccaatttgccgacgatctggcgcatgagctgcgcacgccggttaatattttactggggaagaatcaggttatgctgagtcaggaacgcagcgccgaagagtatcaacaagcccttgtcgataatattgaagagctggagggactgtcgcgactgacagaaaatattctctttctggcacgcgcggagcaccagaatatagcggtaaaaaaacagcctgtttcgctcaatgcgctggtcgaaaatatgctggattatcttagcccccttgccgaagagaagcacatctgttttataaatcaatgtcagggaacggtatgggctgacgaaatattattacaaagagtgctctcaaacctgctgacgaatgccatccgttattctgatgaaaacgccgtgatacgtattgaaagcgcttatgatgataacgttgcagaaattcgggtcgctaatccgggcagccccaccgccgatgcggataagcttttccggcgtttttggcgaggagataatgcccgccacactgccggtttcggcctggggttatcgttagttaacgcgattgccctattgcacggtggctcggcatcttaccgctatgccgatgaacataatatcttttcggttcgtctgcctgatagcggtgatagctaa

SEQ ID NO: 39921 - DNA, 1290 bp, Salmonella typhi
atgaagggtactgttttcgccgttgcgttaaaccatcgcagccagcttgatgcctggcaagaggctttctctcagcctccctataatgcgccgcctaaaaccgcagtgtggttcatcaagccgcgtaatacggtgattcgtcacggcgaacccattccttatccgcagggagaaaaggtactgagcggcgcgacagtggcgctcattgtggggaaaaccgccagccggatacgccctgaagcggcggcggactatatcgccgggtatgcgctggctaacgaggtcagcctgccggaagagagcttttatcgcccggcgattaaagcgaaatgtcgcgatggcttttgcccgctgggtgaaatggcgccgctgagtgatgtggataatctcaccattatcactgaaatcaacggacgagaagcggaccactggaatactgccgatttacagcgtagcgccgcacaactgcttagcgcgttaagtgagttcgctacacttaaccctggcgatgcgatcttacttggtacgccgcagaatcgcgttgcgctgcgtcccggcgatcgggtgcgtattctggcgaaaggtttacccgcgctggaaaatccggttgtcgcagaagatgaattcgcccgccaccagacgtttacgtggccgctgtcagcgacgggaacgttatttgcgctggggttgaactacgccgatcacgccagcgagctggcatttacgccgccgaaagagccgctggtatttatcaaagcgccaaacacctttaccgaacatcaccaaacgtcggtgcgcccgaacaacgtcgaatatatgcactacgaagccgagctggtcgtggtgattggcaaaacggcgcgtaaggtgagcgaagccgaagccatggagtatgtggccggttacaccgtctgtaacgactacgcgatccgcgactatctggaaaactactaccgtccgaatctgcgggtaaaaagccgcgacggcctgacgccgataggcccgtggattgtggataaagaggcggtttctgatccgcacaacctgacgttacgcacctttgtcaacggtgagctgcggcaggaagggacgaccgccgatctgatcttcagcatcccgttcctgatttcttatctgagcgaatttatgacgttgcaaccgggcgacatgattgccaccggtacgccgaaagggctgtccgatgtggtgccgggggatgaagttgtcgttgaagtagaaggcgtgggtcgcctggttaaccgaatcgtcagtgaggagagcgcaaaatga

SEQ ID NO: 39922 - DNA, 852 bp, Salmonella typhi
atgggcaagttagcgttagcagcaaaaattacccacgtgccgtcgatgtatctttctgaactgccaggaaaaaatcacggttgtcgtcaggcagccattgatgggcatattgaaattggcaagcgttgccgcgaaatgggcgttgacaccattatcgtattcgacacccactggctggtgaatagcgcttaccacattaattgtgccgaccatttccagggcgtctataccagcaacgaattgccgcactttattcgcgacatgacctatgactatgacggtaatccggcgctcggccatctgatcgccgacgaggcggtcaaactgggcgtgcgcgccaaagcgcacaacatcccgagcctgaagctggagtatggcacgctggtgccgatgcgctacatgaacagcgacaagcacttcaaagtggtctccatctcggcgttctgcactgtgcatgattttgccgacagccgcaaactgggcgaagccattctcaaggcgattgagaaatatgacggtaccgtagcggtattcgccagtggttctctgtcgcaccgttttattgacgaccaacgggcggaagaggggatgaacagctacacccgcgagttcgatcatcaaatggacgagcgcgtggtcaagctgtggcgcgaaggcaaattcaaggagttttgcaccatgttgccggagtacgccgactactgctacggcgaaggcaacatgcacgacacggtcatgctactgggaatgctggggtgggacaaatacgacggcaaggtggagttcatcaccgacctgttcgccagctccggtaccggccaggtaaacgctgttttcccgctgcctgcgtaa

SEQ ID NO: 39923 - DNA, 381 bp, Salmonella typhi
atgccgcactttattgctgaatgtactgaaaatattcgcgagcaggctgatttaccaagcctgttcagcaaggtaaacgaggcgctggccgccaccgggattttccccatcggcggtatccgcagtcgcgcccactggctggatacctggcagatggctgacggtaagcatgattacgcgtttgtgcatatgacgctgaaaatcggcgccgggcgcagcctggagagccgtcaggaagtcggcgaaatgctgtttgggctgattaaagcccacttcgccgacctgatggagaaccgctatctggcgctgtcgtttgagattgccgagttacatccaacgctcaattacaaacaaaacaacgtacacgcgttatttaaatag

SEQ ID NO: 39924 - DNA, 870 bp, Salmonella typhi
gtggaatattcaatattaagtaacaaccttaaaatgcctatggtgggttttggcgtttttaaggtaaccgacaaagaagaatgtcagcagtcagtgttaagcgctattcgcagcggttatcgtcttatcgataccgctgcggtatacggcaatgaagatgccgttggtgacgctgttcgtgaagccatcgcgacaggtctgtgtacccgtgaggagttatttattacttctaaactgtgggtgcaagatatggctaactacgatctggccaaagcaggtattgaagcgtcgctgaaaaaatccgggttagattattttgatctctatttattgcatcaggcaatgggcgattattttagcgcgtggcgcgcgctggaagacgcttatgaagccggtaaactaaaagccattggcgtgtccaacttctatgcgcatgtgttagccaacttctgtgaaaccgtcagaattacgccaatggtaaaccaggtcgaattgcatccatactttgcacaacccgccgcgctggaaaccatgaagcattataacgttcagcctgaagcgtgggcaccgttaggcggcgggagacataaaccgtatgaaaatgtcatgcttcaaaggattgccgatgcccatcaaaaaaccatcgcgcaggttgtcctgcgttggaacgtgcagcgtggcgtcacggttattcctaaatccactcgacaggaacgtattgaagagaactttgccatctgggatttctcactaacggataacgaaatggctcaaatcaacgcccttgatttaggctacgttggcgaagcggtgaagcattttaatcctgaatttgttcgcggttgtcttggcgttaaaatccacgattga

SEQ ID NO: 39925 - DNA, 921 bp, Salmonella typhi
atggaacttaaggattattacgccattatgggcgtgaaaccgacggacgatctcaagacgattaagaccgcctatcgccgactggcccgcaagtaccatccagatgtcagcaaagaacccgatgccgaagcccgtttcaaagaggttgctgaagcatgggaagtgctgagtgatgagcaacggcgcgccgagtatgaccagttatggcaacaccgtaacgatccacaatttaatcgccagttccagcaacacgaaggccagccgtataacgccgaagattttgatgatattttctcgtctatttttggtcagcacggtcgtcattcgcaccaccgccacgccgcacgcggtcatgatatcgaaattgaagtggcggtattcctggaagaaacgctggaagagcaccagcgtacgattagctattccgtccccgtttataacgcgttcggcctggtggagcgggaaattcccaaaacattgaatgtgaaaatcccggctggcgtcagcaacgggcaacgaatcagactgaaaggccagggcacgccgggggaaaacggcggacctaatggcgatttatggctcgttatccatattgccccgcatccgctctttgatatcgtcaatcaggatctggaagtcgtccttccgcttgccccatgggaggcggcgctcggcgctaaggtgtctgtgccaacgcttaaagagcgtattttgctgaccattccccccggcagccaggcaggtcagcggctgcgtatcaaaggaaaaggattagccagtaaaaagcacactggcgatctctatgccatcatcaaaatcgttatgccgccgaaacctgacgagaaaacagctgccctgtggcaacaactggcggacgcgcagtcgtcctttgacccacgccagcaatgggggaaagcataa

SEQ ID NO: 39926 - DNA, 516 bp, Salmonella typhi
atgctgagattacttgaagagaagatagccacgccattaggtccgttatgggtggtttgcgatgagcagtttcgactgcgggccattgagtgggaacagtaccgcgatcgtatggagcaactgctaaatatccactaccgtcacgaaggctatgaacgcgtttctgcgactaaccccggtggactcagcgataagcttgcagattattttgcaggcaatctcgccgtaattgataccttggaaaccgccacggggggcacaccttttcaacgggaagtatggcaggcgttgcgcgctatcccctgcgggcaagtgatgcactatggccaactggcggcgcaactgggacgaccgggcgccgcacgcgcagtgggtgctgcgaatggcgctaaccccatcagtattgttgttccctgccatcgcgtcatcgggcgtaacggcactctgaccggatacgcaggcggcgtgcagcgaaaagagtggctattacgccatgaaggctatcttttattatga

SEQ ID NO: 39927 - DNA, 435 bp, Salmonella typhi
atgaacagaacgattcttgtacccatcgatatttcagattcagaattaactcaacgcgtgatttcacatgttgaagccgaagcaaagattgacgacgctaaagtgcactttttgactgtaatcccgtctttgccctattacgcttcactgggactggcttattcagcagagctccccgcaatggacgatttgaaagccgaagccaaatctcaactggaagcgattatcaagaaattcaaccttcccgcggaccgcgtgcaggcgcacgtggcagaaggctctcctaaagataagattctggaaatggcaaaaaaattaccggccgatatggtgattatcgcctcgcatcgtccggatattactacctatctgttgggttccaacgccgcagccgttgtgcgtcatgcggaatgctccgtactggtggtgcgctaa

SEQ ID NO: 39928 - DNA, 882 bp, Salmonella typhi
atggagcctcaacccccacgtcttaaacccggaaaaatccttgacactctgggtgctatgcaaaaaagcctgacacgtgcctcccagcgtattgcgcaatatattttagccttccccagacaggtgacacagtcatctattgccgatttgtcgcgcgacacacaggccggagaagccacggttattcgcttttgtcgcaccctgggctataaaggttttcaggattttaaaatggacctggccattgaacttgccactaccgagtctgatgacagtagtcctctactggatgccgaagttagcgaatccgacgatgcccacgccattggtttaaaattgcagaacaccattagtaatgtattatctgaaacgctaaatctgcttgatatgcaacaggttctcggtgtcgtggacgccctacgtcactgtcactcagtttatatctttggtgtgggctcatcggggatcacggcgctggatatgaaacacaagctaatgcgtattggtttacggggcgatgcggtaagcaataaccattttatgtacatgcaggctacgctattaaaagcaggcgatgtcgcgatgggtgtcagtcactcgggcacatcgccagaaacagtgcattcactccgattggcccgacaggctggcgccaccacagtcgccattacccataatctgggttctccattatgtgaagaggccgatttttgcctgatcaatggtaatcggcaaggaatgttgcagggtgactcgatcggtacgaaagccgcgcagcttttcgtctttgacctgctctatacccttcttgtacagtcctcgccggaacaggcccgagaaagcaaattacggacaatgaatgccctggacatgacaaaataa

SEQ ID NO: 39929 - DNA, 1281 bp, Salmonella typhi
gtgatagcaaaattcttcccgtggtatagcgagataacacgtccacaaaaaaatgctttattttcagcatggctgggttacgtttttgatggcttcgactttatgctgattttctacattatgtatctgatcaaggctgacttaggattgacagatatggagggcgcattccttgccacagcggcctttattgggcgaccatttggcggggcgctatttggtctgctggcagacaaatttggccgtaagccgttaatgatgtggtcgatagttgcctattctgtaggtacagggttaagtggcctggcttccggtgtaattatgctgacgcttagtcgttttattgtcggtatggggatggcggggaagtatgcttgcgcttctacttatgccgtggaaagttggccaaagcatttaaaatctaaagcgagcgcatttctggtttcaggtttcggtattggtaacatcatagcagcctattttatgccgtcatttgccgaagcgtatggttggcgtgctgctttttttgtcggtttgctacccgttcttttagtaatctacatccgggccagggctcctgaatctaaagagtgggaagaagccaaactcagtggtctcggaaagcattcacaaagtgcctggtcagttttctctttgtcaatgaaagggctatttaatcgagctcaatttccactgacattatgtgtatttattgttctgttctctattttcggcgcaaactggccgatctttggtctactgcctacatatttggcgggagagggctttgatacgggcgtggtctctaatttaatgacggcggcggcattcggcactgtattgggaaatatcgtttggggtctgtgcgcagatagaattggtttgaagaaaacgttcagcattggtcttctcatgtcctttttattcattttcccgttattcagaattccgcaagataattatttactgctgggcgcatgtttattcggtttaatggcgactaacgtaggtgttggcgggctggttcccaaatttctctacgactactttcctcttgaggttcgtggtttgggtaccgggcttatttataatcttgctgcgacatcaggcacattcaattcaatggcggcgacctggcttggaataacaatggggctaggcgctgcgctaacgttcattgttgctttctggaccgcaacaattctactcattattggcctatccattccggatagactaaaagcacgtcgtgaaaggtttcagtcaacaaaagaattttaa

SEQ ID NO: 39930 - DNA, 1014 bp, Salmonella typhi
atgtgtaatcacaagcagagcgatcgcgtgctcaatctgcctgcgggctattttggcatcgtccttggcactatcggtatgggattcgcctggcgttatgccagccagatatgggcaataagccactggcccggcgacatcatggtgatcctggcgatgattatttgggcactcttgaccctggcgttccttagccgtctggtgcgctttccccatagcgtgatggctgaagtgcgacatccggtaatgagcagttttgtcagcctgtttcccgccaccacgatgctggtcgcgatcggtttcgttccctggtatcgcccgttggccgttgcgctattcagcgtgggggtcgtcatacaactggcgtatgccgcctggcagacggcgggtctttggcgcggagcgcatccggaagaagcgacaaccccaggactttatctgcccacggtagcgaataattttatcagcgctatggcctgtggagcgctcggttacaatgatgccggactggtgtttttaggcgcaggcgtcttttcgtggttaagtctggaaccggttattttgcagcgactgcgtagctgcggcgaattaccggcggtgctgcgtatgtcgctgggtatccaactggcgcccgcgctggtcgcctgtagcgcctggctgagcgtcaatggcggggagggcgacacgctggcgaaaatgctattcggctacggtctgttacagcttttatttatgctgcgattaatgccctggtatttatcacaaccgtttaatgcttccttctggagtttttcgttcggcgtttccgcgctgacgaccacggggttacatcttggtcacggtagtgaatcagggtttttccatattctggccgtcccgctgtttattttcactaacgctattatcgccttattgctggttcgtacatttctattgctggtgcaggggacgttgcttattcgcactgagcgcgctgcactgttgaaaacggaggaaaaaaatgaccgttcgtga

SEQ ID NO: 39931 - DNA, 1965 bp, Salmonella typhi
atgcgccagcaacctcactatctcgaattgttaagcccggcccgtgacgccgcaattgctcgcgaagcgattttgcatggcgcagatgccgtctacatcggcggacccggttttggcgcacgtcataacgccagtaacagtctgcgcgatatcgccgatctggtcccgtttgctcaccgttacggcgccaggatttttgtcacgctgaatactatcctgcatgatgatgagctggagcccgcgcagcggttaatcaccgatttgtacaataccggggtggatgcgctgattgtgcaggatatgggcattctggaactggatatcccgccgattgagcttcacgccagtacacagtgtgatattcgcagcgtggaaaaagcgaagtttcttgccgatgtcggtttttcacagattgtactggcgcgcgagcttaatttgagtcagatagcggctattcatcaggctactgacgccacgattgagttcttcattcatggcgcgctgtgtgtcgcttattctggacagtgttatatctctcatgcgcaaaccgggcgcagcgccaatcggggcgactgttcgcaggcctgtcgcttaccgtatacgttaaaagacgatcaggggcgggtggtctcttacgaaaaacatttgctatcgatgaaagataacgatcaaacggctaaccttggcgcgttgatcgatgcaggcgtacgttccttcaagattgaagggcgctacaaagacatgagctatgtcaaaaacatcaccgcgcattatcgtcagatgctggacgcgattatcgagcaacgtggcgatctggcgcgtgcatcggttggtcggaccgagcacttttttgttccctccacggagaaaaccttccatcgcggcagcaccgactattttgttaacgcgcgtaaaggcgatattggcgcatttgattcaccaaaatttattggcttgccggtaggcgaggtgctgaatgtggcgaaggattatctcgacgtagaagcgacggagccgttggcgaatggcgatggtctgaacgtgttgattaagcgtgaagtggtgggttttcgcgccaatacggtggagaaaaccggtcataaccgctaccgcgtttggccaaatgatatgcctgccgacctgcataaagtccgtccgcatcatccgttgaatcgtaatctggaccataactggcagcaagcgctgacaaaaacctccagtgagcgccgtgtggcggttgatatcatgctgggcggctggcaggaacagcttattctgacactgaccagtgaagacggtgtctgcatcacgcatacgcttgacggggtatttgaggaagccaacaactctgaaaaagcgttgaataacctaacagccggactggcgaagctgggacaaacgctttactacgcgcgtgatatgcaggtgacattaccggcggcgttgttcgtgccaaatagcctgctcaatcagttccgtcgggaggcgattgatatgcttgacgcggcgcggctggcccattatcaacgaggtcgtcggaaacccgtggcgcagcctgcgcccgtctatccgcaaacgcatctcagctttctcgctaatgtctacaaccacaaagcgcgggaattttatcaccgttacggcgtacaattgattgatgcggcctatgaggcgcatcaggagaagggcgaggtaccggtcatgatcaccaaacactgcctgcgttttgcgttcaacctttgtccaaagcaggcgaaaggaaatattaagagctggaaagccacgccgatgcagttggtgcatggtgatgaggtactgacgctaaaattcgactgccgcccttgcgaaatgcatgtcattggcaaaattaaaaaccacatcttaaaaatgccccagcccggcagcgttgtcgcttcagtgagccctgaagcgctgatgaaaacgctgctgaagcgcaggggcgtttaa

SEQ ID NO: 39932 - DNA, 1857 bp, Salmonella typhi
atgccgattcaggttctgccgccgcagcttgcgaaccaaatcgccgctggcgaagtggtggaacgccctgcgtcggttgttaaagagctggtagagaatagtctggatgcaggcgccacccgcgttgatatcgacatcgagcgtggcggcgcgaagcttattcgtattcgcgacaatggctgcggcattaaaaaagaggagctggcgctggcgctggcccgtcatgccaccagtaaaatcgcctcgcttgacgatctggaagcgattatcagtctgggatttcgcggcgaagcgctggcgagtatcagttcggtctcgcgtttgacgctaacgtcgcgcacggcggagcaggcggaagcctggcaggcgtatgcggaagggcgcgacatggacgtgacggtaaaacccgccgcgcacccggtcggcaccaccctggaagttctggatctcttttataatacgcccgcccggcgcaaattcatgcgtaccgaaaaaacggaatttaatcacatcgatgagatcatccgtcgtattgcattggcccgttttgacgtcacgcttaacctgtcgcacaacggcaaattggtacggcagtatcgcgctgtcgcaaaggacgggcaaaaagagcgccggttaggcgccatctgcggcacgccgtttctcgaacaggcactggcgatcgagtggcagcatggcgatctgaccctgcgcggctgggtcgccgatccgaatcacaccaccacggcgttaacggagatccagtactgctatgtgaatggccgcatgatgcgcgaccgcttgatcaaccatgccattcgccaggcctgtgaagataaactgggcgcggaccaacagcctgcgtttgtgttgtatctggagattgacccgcatcaggtggatgtcaatgttcatcccgccaagcacgaagtgcgttttcatcaatcgcggctggtgcacgacttcatctatcaaggggtgctgagcgttctacaacagcagacggaaacgacgctgccgctggaggagattgcgccagcgccgcggcatgtcccggaaaaccgtatcgccgccgggcgcaaccattttgctgtacccgccgagccaactgcggcgcgcgagcccgcgacaccgcgttattccgacggcgcatcgggcggtaacggcgggcgtcagtccgcaggtggttggccgcacgcgcagccaggctatcagaagcagcagggcgaggtttatcgcacgcttttacagacgccgacgacgagccccgcgccggagccggttgcgcctgcgcttgacggacatagccagagttttggtcgcgtactgacgatagtcggcggtgactgcgcgttgctggaacacgcggggactatccagctcttgtcgctgccggttgcggagcgttggctgcgtcaggcgcagcttacaccgggtcaaagtccggtttgcgcgcagccgttgctgattccgctgcgtttaaaagtgagcgccgatgaaaaagccgcgctgcaaaaagcccaatctttgttgggagaattgggtattgaatttcagtcagatgcgcagcatgtgaccattcgggcggtgcctttacccttacgacaacaaaatttacaaatcttgattcctgaactgataggctacctggcgcaacagaccacatttgcaacggtcaatattgcacaatggatagcgcgtaatgtgcagagcgaacatccgcagtggtcgatggcgcaggccatatcgctgctggcggatgttgagcggctatgtccgcagctggtaaaagcgccgccgggtggcctgttacaacctgttgatttacattcggcgatgaacgccctgaagcatgaatga

SEQ ID NO: 39933 - DNA, 1260 bp, Salmonella typhi
atggcgtggaatcagcccggtaataacggacaggaccgcgacccgtggggaagcagcaaacctggcagcaactctgggggaaatggaaacaaaggtggccgcgatcagggacctcccgatctggatgatatcttccgtaagctgagtaaaaaactcggtggttttgggggcggtaaaggcaccggttccggcggcggtagctcatcgcaaggcccgcgtccgcaactgggaggccgtattgtcgccatcgccgcggcggcagtagtcattatctgggcggccagcggtttttataccattaaagaagccgagcgcggcgttgtgacgcgttttggtaaattcagccatctggtagagccaggtctgaactggaagccgacatttattgacgacgtcacgccggtgaacgtcgaagcggtgcgcgaactggcggcgtcaggcgtgatgctgacgtctgatgaaaacgtcgtgcgcgttgaaatgaacgtgcaataccgcgtcaccgatccgcagaaatatctgtttagcgtgaccagcccggacgatagcctgcgtcaggccaccgacagcgcgttgcgtggcgtcattggtaaatacacgatggatcgcattctgaccgaaggtcgtaccgttattcgtagcgatacccaacgcgagctggaagagactatcaaaccgtacaacatggggattaccctgctggacgtgaacttccaggctgcgcgtccgccggaagagatgaaagccgcctttgacgacgcgattgccgcacgtgaaaacgagcagcagtacattcgtgaagcggaagcgtataccaacgaagttcagccgcgcgccaacggtcaggcgcagcgtattctggaagaggcacgtgcctataaaacccagactatcctggaagcgcagggtgaagtcgcccggtttgcgaagattttgccagaatataaagccgcgccgcagattacgcgcgagcgtctgtatattgaaacgatggaaaaagtgctgagccatacccgtaaagtactggttaacgacaagagcggtaatttaatggtgctgccgttagatcagatgctgaaaggcgggaatgcgccggcggcaaagagcgacaatagcgccagcaacctgctgcgcctgccgccgtccacaaagtctaacgccagcggagcaagcaacacgtcgtcctcaaatcagggcgatattatggaccaacgccgcgcgaatgcgcagcgtaacgactaccagcgtcagggggaataa

SEQ ID NO: 39934 - DNA, 771 bp, Salmonella typhi
atggtaaaatgcgtatcttctttcctcctgttcagcctgttgtccgttcaggcaatatcagctgaaaaccatattgatctccaccagccaaaagactttgtcgatattactacggtcgcccccgacgtacaggtagacatgcgatacttcacttcccataactttattggtcgccccattaaaggctataacgcgcctgtttgcctgttaacacgaccagccgcgaacgcagtaaagcaggtcgccgatcgtttacgccccttcggacttaccttaaaaatatatgattgctaccgtccgcaaagcgcagtgaatgactttatcgcgtgggccaaagatccttctcaaaaccaaatgaaaaacgaattttatccgcaggtagagaaaaatcgtttgtttgaggaaggttatcttgccgccagatccggccacagtcggggaagtacgcttgatctaacgattgttccacttgacagtaaaataccgatataccatcccggacgaccactggtgaattgtactgcgtccgcggcgcaacgctcgccagataatagtctggattttggtacaggctttgactgttttagtccgttatcccatcccgataatgtcatgcttaccgctcagcaacgcgcaaataggttgttattacaaacattgatgcgtgatgcgggttttacgccactggatactgaatggtggcacttctcccttactcatgaaccatacccgaacacctggtttgactttcccgttaagcagagaccctga

SEQ ID NO: 39935 - DNA, 1425 bp, Salmonella typhi
atgaaaaaatatcaacgtctggcggagcaaattagagaacaaatcgcctctggcgtttggcaacccggcgatcgattaccctcgctgagggagcaggtcgccagtagcggcatgagttttatgactgtcggtcatgcgtaccagttgctggaaagtcagggacggattatcgcccgtccgcaatctggttattatgtcgcgccgcatccggtttgtcggtcagtcgcgacggcagcgcacgttattcgggatgaagccgtagatatcaatacctatatttttgagatgctgcaggcgagccgtgatacctctgtggtgccctttgcctcagcgtttcccgatccgcgtctgtttcccttgccgcaattgaaccgctctctggcgcaggtcagtaaaaccgagacggcaatgagcgtcatcgaaaacttgccgccaggtaatgcagaattgcgctatgcgatagcacgccgttacgcgcagcaggggattaccgtttctcctgacgagattgtcattaccgccggcgcgctggaagcgttgaatcttagtttacaggcggtgacggcaccgggagactgggtggtggtggagaacccctgtttctacggtgcgctacaggccctggagcgattgcgcctgaaagcgttgtcgatacctaccgatgttaaagaaggtatcgatcttatggcgctggaacaggcgttacaggaatatccggtgaaagcgtgctggttaatgaccaacagccagaatccgttagggttcacgctgagtgctgagaaaaaagcgcggctggttgcgttactcacgcaccataacgtgacgctaattgaagacgatgtttatagcgaactctactttggccgcgagaaacctcttcctgccaaagcatgggatcgcgacgataccgtgttgcattgttcgtctttttccaaatgtctggttcccggttttcgcattggctgggttgcgggaggaagccatgccagacaaattcagcgtttgcagttaatgagcacattatccaccagttctcccatgcaattggcgttagtagattatctctcgacacgtcgatatgacgcgcatctgcgccgattgcgaaggcagcttgccgaacgtaaacagcaagcctggcaaacccttttgcgccatctcccggcggaagtaaaaattcaccataacgatagcggttattttctttggctggagctacctgagcagcttgatgccggcgaacttagcgccaaagcgcttgaacaccttatcagtatcgcgccagggaaaatgttttcaacgtccggcgcctggacgcgtttctttcgttttaacaccgcatggcattggggagaacgggaagaacaggccgtaaaacagcttggaagcctgattcgcgagatgctgagcgctaaaagccttgtgtga

SEQ ID NO: 39936 - DNA, 1446 bp, Salmonella typhi
atgacgatatgggaaaatgctatgcaatatcaattactgattaatggcgtgctggtggacggcgagggagaaaggcagtccgtttataacccggcgacaggcgaggtcatacttgagattgcggaagcgtcgcccgtgcaggttgacgccgcagtgctggccgccgatagcgcgtttgccgaatgggggcagaccacacccaaagcacgggcggaatgtctgttaaaactggcggacagcatcgagcaaaacgcccttgagttcgcccggcttgaatcgcaaaactgcggtaagcctttgcactgcgtaattaatgatgaaattccggcaatcgtggatgtctttcgcttttttgccggcgcggcccgttgtttgagtgggctggcggcgggcgaatatctggaaggacatacgtcgatgatccgccgggatccgattggcgtggttgcctctatcgcgccgtggaattatccgctcatgatggcggcctggaagctggcgccagcgctggcggcaggtaactgcgtggtgattaagccttctgaaatcacgccgctgacggcgcttaaacttgccgcgctggcgaaggatatctttccgccgggggtgctcaatgtcctgttcggacgagggcaaactgttggtgatgtattgaccggccatgaaaaagtacgcatggtctctttaaccggttctatcgcgaccggggagcatattctgcgccatactgcgccagcgataaaacgtacgcatatggaactcggtggtaaagccccggtgattgtttttgatgacgccgatctggatgcggtggcgcagggtgtccggactttcggtttctataatgccggacaggattgtactgcggcgtgccgtatatacgcgcagcgcggtatctatgatgcgctggtcgaaaagctagggaacgcggtgagcagcctgaaaatgggcgcgccggaggataagtcgacagagctggggccgttaagttcgctggcgcacctgaagcgcgtcacagcggctgtagaggaggcgaaggccctcagccatatccgtgtgattactggtggaagtcaaacggaaggtaaaggttactatttcgctccgacgttgctggcagacgcaaaacaggaagatgccatcgtgcaacgcgaggtcttcggcccggtggtcagtataaccgtctttgatgatgaagatcaggttctgaggtgggccaacgattctcgctatggtctggcatcctccgtctggactcaggacgtcgggcgggcgcaccggcttagcgccagattgcagtatggctgtacctggattaatacccatttcatgttggttagcgaaatgccgcatggagggcaaaaacagtcgggatacggcaaagatatgtcattgtatggtctggaagactacacccttgtccgccacatcatggttaagcattaa

SEQ ID NO: 39937 - DNA, 2148 bp, Salmonella typhi
atgacaaaaccgttaaacgccactcaggctgttatcgagtgggttaacaacacgcgccgttacgcaacgcgactggatgacgaagccgacgctctgctggcgcaacttacgcttgccgcggcggatgagtcagcgctcaacgccgcctgcgcatcatcacatggctgcgttggtctgtacgggtatgcgcaatccgcaaaagcgcatctgttaacgacgctatgcggtaacgagaatggcaagctggaaattatcacgccggaccgtgactatgattatttcagccacatcaatccgggtcatgcgccagcgaatatggctattcgctttacgcgcgacattttttcaaacgagagcggctggccgttgcgcctgcgcttgatcagtgaagccgaactggtgcagatctttattgcctggaccagctcgtcccccgtttgtcgccaggtcgaaaaatccattatcacatcacgcctggagaaatggcaatcgcttcgccaaccgcagcccgtccccggcgttaccgctgaagaggtagcgaccatcgcgagtttctggcgctcttgcctcccgtccgccagacaacatattgatgatgcgacatggcaacactttgcctcgctcttgcctgcgctggatctcacgacacgggcgcacgcctgggcattactgtggggagagcaaccagagatcacccagcaatggctggcgctggcgcatatgttgcaacaaaccggccatgccggggaactggcggcgccgctcagcctgctggtcgatcattttggcttaccggcggaaaacttcctgacgcaaatggcgctaaccgccagcgatacgcaaagcgatgtggtggtgcatccggttaaggaaggccgactgctcaatgcggtcagcctttcgcttgattctctggcgctgcttacccgcgaactggtgctaaccgttgaaaatagcgtactggataacgttgatttactggatattccggtcgcgccagacagtcatcctcatccgttatggcgggcgaaattaggctggatgctggcccattaccgtcagcagatacagcccgatgttctggtgatttgcaatgctctggcatctcgctcgcaaacgtccactgccgcccgtcacttactggagtgggttaacgccacgcagccgcagcatgaatcagcgttacccggcgtcgtctgggctattactccacaggatgcccgttttgccacccagcaaaatctggatgaagccgtccagcagttgatgggtaaacctggcgtgcattggggaacgttgcaggcgctggataaacacagtatgcagcgtttggtggagtggttatcgcaggcgacatcggcaccacagcgacaggcgcgcttacaggcgttacgcgaacaactgcgaggccgcgtgcgcgatctgttaccgatgtgtgatgacgcgcggctaccggttgaaaccgtgatccggcgtcttcaggcccaggccgccagacatggcgacctgctggccgggctgttaccgccggtacagaatttcgaagcgttgctgcgcacccgacagtcgcgagaagaacaggtcagcggtttatttaatgacgcgatcgatctctttgccgacgaaccaacgcacgcttcagcgtcagaaggtcatgaaacaggctaccaggcgcacaaaatgtggatcaatcatctgcgccagtgggcccactgccgggataatgcgcagcgtctgggactggaaccgcagatgctcaacgccgtggcggagattttaattaccgccagctatcgcctcggtttacctcagcagttacagaaaaccatgcagcgcgaggaggtgagcggcgcgcagcttcatgccatcattggtaacttcatcgcctggctcggctacgccaatatcgaggaggcccaacgcccggccagccgcgttcagaaaggcgcagccattttcgccgcaacgccgcgttcgacaatgttgcgtctaacaaagcttgacgaacagcccgttcacgccgccagccgctatgtctatgactggcttgttgcgctgtataccctggccaatgagaacgcaggatatcggcatccgcaggacgttaccgacgtagacagagcgcaattaattgccctgatagcctga

SEQ ID NO: 39938 - DNA, 1299 bp, Salmonella typhi
atgggtaacaacgtcgtcgtactgggcacccaatggggtgacgaaggtaaaggaaagatcgtcgatcttctgactgaacgggctaaatatgttgtacgctaccagggcggtcacaacgcaggccatactctcgtaatcaacggtgaaaaaaccgttctccatcttattccatcaggtattcttcgcgagaatgtaaccagcatcatcggtaacggtgttgtgctgtctccgagcgcgctgatgaaagagatgaaagaactggaagaccgtggcatccccgttcgtgagcgtctgctgctgtctgaagcctgtccgctgatccttgattatcacgttgcgctggataacgcgcgtgagaaagcgcgtggcgcgaaagcgatcggcaccaccggtcgtggaatcgggcctgcttatgaagataaagtggcacgtcgcggtctgcgtgttggtgaccttttcgacaaagaaacctttgctgaaaaactgaaagaagtgatggaatatcacaacttccagttggttaactactacaaagctgaagcggttgattaccagaaagttctggatgatacgatggctgttgccgacatcctgacttctatggttgttgacgtttcagacctgctcgaccaggcgcgtcagcgtggcgatttcgtcatgtttgaaggtgcgcagggtaccctgctggatatcgaccacggtacttatccgtacgtaacttcttctaacaccactgcgggtggcgtggcgaccggttccggcctgggcccgcgttatgttgattacgttctgggtatcctcaaagcttactccactcgtgtaggtgcaggtccgttcccgaccgaactgtttgatgaaaccggcgagttcctctgcaagcagggtaacgaatacggcgccactaccggccgtcgtcgtcgtaccggctggctggacaccgttgccgttcgtcgtgcggtacagctgaactccctgtctggcttctgcctgaccaaactggacgtgctggatggcctgaaagaggtgaaactctgcgtggcttaccgtatgccggatggtcgcgaagtgactaccactccgctggcagctgacgactggaaaggtgtagagccgatttacgaaaccatgccgggctggtctgaatccaccttcggcgtgaaagatcgtagcggcctgccgcaggcggcgctgaactacatcaaacgtatcgaagaactgaccggcgtgccgattgatattatttctaccggccccgatcgtactgagacgatgattctgcgcgatccgttcgacgcgtaa

SEQ ID NO: 39939 - DNA, 1038 bp, Salmonella typhi
atgaagcaacagaccaaccgaaatcgtcgttgggttttggcctcgcgtccccacggcgcgccgcagatggataacttccgcctcgaagaagatgacgtcgcgacgcccggtgaagggcaggtgctattgcgtaccgtttttttatcactcgacccttatatgcgtggccgcatgagcgatgaaccctcttatgcgccgccagttgaacctggctgcgttatggttggcggtacggtcagtcgcgttgtcgcgtcgaatcatcctgattaccgaccagacgaatgggtgttgagttacaatggttggcaggattatgacatttcagatggcgaagggttggtaaagctgggtgataatccgcaacatccttcctggtcgttgggagttttagggatgccggggtttaccgcctatatggggttactggatatcggccagccgaaagagggcgaaacgctggttgtcgccgccgccaccggccccgtaggcgcaacggttgggcaaattggcaagctgaagggctgccgggtcgtgggtattgccggcggcgcggaaaaatgccgtcatgcgacagacgttttgggatttgatctgtgccttgatcatcacgctgataatttcccacaacagcttgcgcaggcctgcccgcagggtatcgatatctattatgagaatgtcggtggtaaagtctttgacgccgtcttaccgctactgaatacgtcggcgcggattccgctctgcggtctggtcagcggctacaatgcgacaacgttgccggacggtccagacagactgccactgctgatggcgacattacttaaaaagcgtattcgcctgcaaggttttatcatcaaccaggactatggtcaccggatacatgagtttcagcaagaaatggggcgttggatcaaagaagggaaaatacattaccgggagcagattactgatgggctggaaaatgcgccagaagcgtttatagggctgctggcggggaagaactttggcaaagtcgtgatacgtttagcggacgatgcgtaa

SEQ ID NO: 39940 - DNA, 666 bp, Salmonella typhi
atgccgggtacggaaaaaacacaacatataagcctgaccacacaggttgaaaatcggttaaagcatcaattgtctattggcgcattaaaaccaggcgcaaggcttatcactaaaaatatcgctcaagagttaggcgtcagtattacgccggtgcgtgaggccctgttaaggctggtctcttccagtgctttggcggtggcgccagcacaggcgtttatggtgccggagatctcgctggaaagtttgctggaaattaatacgattcgtactgccctggaggagatggcggtggtcgccgctgcgggtaagattaccccggatcgcgagcagacgctgaatgcgctattagatgaatttcaacaggcgctggaaagtggcgttatggagaaaattcttttggccaaccgcgcattccgctttgagatctaccactacgcggatatgccaacgctgtatgccatgatcgagcaattatgggtacgcctggggccaagtctgcattttttatatgataattttaaacttgatgattatcaaaacggcgttaatctgtacagaaaattgcttaatgcgttagtgactggtgataaagaagccagtcgccactgcctacagaacgttttgcaacaaaacgtagcgacgattaaaaatcagtacttcatgtaa

SEQ ID NO: 39941 - DNA, 1062 bp, Salmonella typhi
atgcacttacgtcatcttttttcgccgcgcctgcgtggttctttattgttaggttcgctcctcgtcgcatcctcatttagcacgctggcggcggaagacatgctgcgtaaagcggtaggcaaaggcgcttatgagatggcctggagtcagcaagaaaacgcgctctggctggctacatcgcaaagccgtaaactggataaaggcggcgtagtttatcgtctcgacccggtgacgctggaaatcacgcaagcgattcataacgatctcaagccgttcggcgccaccatcaatgccgcgacccaaacgctgtggtttggcaataccattaacagcgcagttaccgcgattgatgccaaaacgggtgatgtaaaaggtcgtctggtacttgatgcgcgcaaacgtactgaagaggttcgtccgttacagccccgtgagctggttgccgatgcggcgaccaacacgatctacattagcggtgttggtaaagagagtgctatttgggtagtggatggcgaaaccatcaaactgaaaacgacgatcgaaaataccggcaaaatgagtacgggtctggcgctcgacagtaaagcacaacgcctgtacaccaccaatgcggatggcgaatttatcaccatcgataccgccagcaataaaattctcagtcgtaagaagttgctggatgacggtaaagaacacttctttattaatctgagtctcgataccgcaggtcatcgcgcgtttatcaccgactcgaaggcaactgaggttctggttgtcgatacccgtaatggcaatattcttgccaaaatcgcggcgcctgcctctttggccgtcctgtataatccgacacgtaacgaggcgtatgtgacgcaccgtcaggcagggcaggtcagcgtgatcgatgcgaagacctataacgttgttaaaacgttcgatacgccgacgtacccgaatagcctggcgctatcggcagacggtaaaacgctctacgtcagcgtgaagcagaaatcgacacgtgaacaagaagcgacgcagccggatgatgttattcgcattgctctgtaa

SEQ ID NO: 39942 - DNA, 756 bp, Salmonella typhi
atgactgaagcacaaagacatcaaatactgctggatatgctggcacagttgggctttgttaccgtcgaaaacgtgattgagcgtctgggaatctccccggcgacggcgcgccgcgacatcaacaagctcgacgaaagcggaaaacttaaaaaagtgcgcaacggcgcagaggccattacccaacagcggccccgctggacgccgatgaatctgcaccaggcgcaaaaccacgatgaaaaagtacgcatcgcgaaagcggcgtcgcagctggtaaacccgggtgagagcgtagtgattaactgcggctccaccgctttcctgctggggcgcgaaatgtgcgggaagccggtacagatcattaccaactatctgccgctggcgaattatctgatcgatcaagagcatgacagcgtgattatcatggggggtcagtacaacaaaagccagtcgattaccctgagcccgcagggaagtgaaaacagtctctatgctggccactggatgtttaccagcggaaagggcttaactgcggatggcctgtacaagaccgatatgctaaccgccatggcggaacaaaaaatgctcagcgtcgtcgggaaactggtcgcgctggtcgatagcagtaaaattggcgagcgcgcgggaatgctgttcagccgagccgatcagatcgctatgctgattaccggcaaaaatgccaatccgcaggttttgcaacagcttgaagcccagggtgtaagcatactccgcgtttaa

SEQ ID NO: 39943 - DNA, 681 bp, Salmonella typhi
atgatacagtacctgaacgtctttttttacgacatctacccctatatttgcgccacggtattcttcctcggcagttggctgcgctatgactacggacaatatacctggcgcgcgtcgtccagccagatgctggacaagcgtgggatggtgatatggtcgaatctgttccatattggcattctggggatcttctttggccatctgtttgggatgctgacgccacactggatgtatgcctggttcctgccgattgcggtaaagcagcagatggcgatgatcctcggcggcgtgtgcggcgtattaacgttgatcggcggcgcgggattactgtggcgtcgtctgaccaatcagcgtgtgcgggcgacatccactacacctgatattatcatcatgagcattttgctgattcagtgcctgcttggcctgagcaccattccgttttcggcgcaatatccggatggcagcgaaatgatgaagttggtgggctgggcgcaaagtattgtcaccttccgcggcgggtcttcggaaatactgaacggtgtggcgtttgttttccgcgttcatctggtgctgggaatgactattttcctgctcttcccgttcacccgtctggttcatgtctggagcgcgccgttcgagtatttcacccgtcgctaccagattgttcgtacccgccgctaa

SEQ ID NO: 39944 - DNA, 1545 bp, Salmonella typhi
atgaaaatacgctcacaggttgggatggtactgaatctcgataaatgtattggctgtcacacctgctccgtcacctgtaaaaacgtctggaccggacgtgaagggatggaatacgcatggttcaataacgtcgaaactaaaccgggtattggctatcccaaaaattgggaagaccagcaggagtggcaaggcggttgggttcgtgatgttaatggcaagataaggccccgtctgggcggcaaaatgggggtaattagcaaaattttcgccaacccggtgattccgcaaatcgatgattactatgaaccctttaccttcgattatcagcatttacatacagcgccggagagtaagcatcagcccactgcccgtccgcgttcactgatcgacggaaaacggatggacaaggtgatctgggggccaaactgggaagagctgctcggcggcgagtttgaaaaacgcgcccgcgaccgcaacttcgacaacatacaaaaggagatgtacggtcagttcgaaaacaccttcatgatgtacctgccgcgcctgtgcgaacactgcctgaaccccagttgtgttgccacctgcccaagtggcgctatttataagcgtgaagaagacggcatcgtgctaatcgaccaggataaatgccggggctggcgtttgtgtatcagcggctgcccatacaaaaaaatctactttaactggaagagcggcaagtctgagaaatgcatattttgctatccgcgtattgaatccggccagccgaccgtttgctcggaaacctgcgtcgggcgcatccgttatcttggcgttctgctctacgacgccgacaggattgaagaagcggccagtaccgaacacgagacagatttgtatgaacgtcagtgcgatgtgtttctcaatccgcacgatccggcggtcatcgaagaggcgcttaaacagggcatcccgcaaaacgtcatcgacgccgcccaacggtcgccggtgtacaaaatggcgatggactggaagctggcgcttccgctgcacccggaataccgtaccctgccgatggtctggtacgtaccgccgctatcgcccatccagtcatacgccgacgcgggcgggttgccgcacaatggcaatattctgccggcggtggagacgctgcgtattccggtccagtacctggccaatatgctcagcgcgggcgataccggcccggtcattcgggcgctaaagcggatgatggcgatgcgccactacatgcgctcgcagacggttgaaggcgtgacggatacccgcgccattgacgaagtcggtctgagcgtacaacaggttgaagagatgtatcgctacctggcgattgccaattatgaagatcgttttgtcattcccaccagccaccgggaaatggcgcgcgatgcctttccggagcgcaacggctgcggctttacttttggcgacggttgtcacggctcggataccaaattcaacctgttcaacagtagccgtattgatgccatcaatatcaccgaagtacgtgataaagcggagggggaataa

SEQ ID NO: 39945 - DNA, 1488 bp, Salmonella typhi
atgtttcgtcagtggttaacgttagtcattattgtgctggtctatattcctgtcgccattgatgccacggtcttgcatgtcgccgcgccgacactgagtatgacactgggggccagcggcaacgagctgctgtggatcattgatatttattctttggtcatggctggcatggtgttgccgatgggcgcgcttggcgatcgtatcggttttaaacgcctgctgatgctgggcgggacgctctttggcctggcatcactggcggcggcgttttcgcataccgccagttggcttatcgccaccagggtattactggctattggcgcggcgatgattgtatcggcgacgctggccgggatacgcgccaccttttgtgaagagaagcatcgcaacatggcgctgggcgtctgggctgcggtaggttcgggcggagcggcgtttgggccgctcatcggcggcatattattagagcatttttactggggatcggttttcctgatcaacgtgccgattgtgctggtcgtcatgggcttaaccgcccgctatgttcctcgtcaggcgggccgtcgcgatcaaccgctcaatcttggccatgcggtgatgctgattattgccattttgctgttggtctatagcgctaaaaccgcgctgaaagggaatttgtcgctgtgggtcatctcgcttaccctgcttaccggcgcgttgctactgggactctttatccgcacacagcttgcgacatcgcgtccgatgattgatatgcgactatttacccatcgcattatcctgagcggcgtcgtgatggcgatgaccgcgatgatcactctggtgggttttgagctgctgatggcgcaagagctacagtttgttcacgggctatcgccttatgaggccggggtatttatgctgccggtgatggtcgccagtggattcagcgggccgattgcgggcgcgctggtctcgcgtctggggttacggctggtcgcgacgggcggcatggcgttaagcgcgctgagtttttatggtctggcgatgacggatttcagcacccaacaatggcaggcctgggggctgatggcgctgctgggatttagcaccgccagcgcattgctggcttccacgtcggcaattatggccgctgtgccggcagaaaaagcggcggcggccggcgcgatagaaacgatggcttatgaactgggcgcgggactgggcatcgccattttcggcctgttgttaagccgtagcttctccgcgtctatccgtctgcctgccgggcttgaggcgcaagagattgccagagcgtcatcttcaatgggagaagccgtgcagttggcgaatagcctgccgcccacgcaggggcaggcaatactggacgccgccagacacgcctttatctggtcgcatagcgtggcgttaagcagcgccgggagtatgcttcttttgctggcggtagggatgtggttcagcctggcaaaagcccaacgccgataa

SEQ ID NO: 39946 - DNA, 687 bp, Salmonella typhi
atgcaaaagctcaagcagcaggtatttgacgctaacatggatttgccccgttatggactggtgacgtttacctggggcaacgtcagcgctatcgatcgcgaacgcgggctggtggtgattaagccaagcggtgtcgcctatgaaaccatgaaggtagatgacatggtggtggtggatatggatggcaaagtggtggagggtcgttatcgtccttcttccgataccgctacccatctggcgctgtatcaacgctatccgtcgcttggcggcgtcgttcatacccattcaacccacgccacggcatgggcgcaggcggggatggctattccagcgctcggtaccacgcacgcggactatttctttggcgatattccttgtaccagggcgttaagcgaagaagaagtgcagggcgagtacgagctgaacaccggcaaggtgatcatcgaaacgctgggcgaggtggaaccgctgcatacgccaggcattgtcgtgtatcaacacgggccgttcgcctgggggaaagatgcgcacgatgcggtacataacgcggtcgtcatggaagaagtggcgagaatggcgtggattgcgcgcggcattaaccctggcctcaaccccatcgacgattatctgatgaataaacacttcatgcgtaagcatggcccgaatgcgtattacgggcagaagtga

SEQ ID NO: 39947 - DNA, 396 bp, Salmonella typhi
atgcgtcattacgaaatcgtttttatggtccatcctgaccagagcgaacaggttccgggtatgatcgagcgttactctgctgccatcactggcgcagaaggcaagatccaccgtctggaagactggggccgccgtcagctggcttacccgatcaacaaactgcacaaagcgcactacgttctgatgaacgttgaagcgccgcaggaagtgatcgatgagctggaaactaccttccgcttcaacgatgccgttatccgcagcatggttatgcgtactaagcacgctgttaccgaagcatctccgatggttaaagcgaaagacgagcgccgtgagcgtcgcgatgatttcgctaacgaaaccgcagatgatgctgaagctggggattctgaagagtaa

SEQ ID NO: 39948 - DNA, 315 bp, Salmonella typhi
atgaccaaccgtctgacgttgtccggcaccgtgtgcagggccccccttcgaaaggtcagtccatcaggaattccgcattgccagttcgtgcttgagcatcgttctgtgcaagaggaagccggctttcaccggcaggcgtggtgccaaatgcccgttattgttagcggacacgaaaaccaggccattactcacagtataacggtcggcagccgcataaccgttcaggggtttatttcttgccacaaggcaaagaacggtctgagcaaaatggttctgcatgccgagcagattgaattgatagattctggagactag

SEQ ID NO: 39949 - DNA, 228 bp, Salmonella typhi
atggcacgttatttccgtcgtcgcaagttctgccgtttcaccgcggaaggcgttcaagagatcgactataaagatatcgctacgctgaaaaactacatcaccgaaagcggtaagattgtcccaagccgtatcaccggtacccgtgcaaaataccagcgtcagctggctcgcgctatcaaacgcgctcgctacctgtctctgctgccgtacactgatcgccatcagtaa

SEQ ID NO: 39950 - DNA, 450 bp, Salmonella typhi
atgcaagttattctgcttgataaagtagcaaacctgggtagcctgggtgatcaggttaacgttaaagcgggctatgctcgtaacttcctggtaccacagggtaaagctgttccggctaccaagaaaaacgttgaatacttcgaagcacgtcgcgctgaactggaagctaaactggctgacgttctggctgctgcaaatgcacgcgcagagaaaatcaacgccctggaaaccgttactatcgcgtctaaagcaggcgacgaaggtaaactgttcggttccatcggtactcgcgacatcgctgacgctgtgactgcagctggcgttgacgtggctaagagcgaagttcgtctgccgaacggcgttctgcgtaccactggcgaacacgaagtgaacttccaggttcacagcgaagtattcgcaaaagttatcatcaacgtggttgctgagtaa

SEQ ID NO: 39951 - DNA, 891 bp, Salmonella typhi
atgaacatgaaaaaactggctaccctggtatctgctgttgcgctgagcgccaccgtgagcgcgaatgcaatggcgaaagacaccattgcgctggtgatctctaccctcaataatcccttcttcgtgtcgttaaaagacggggcgcaaaaagaggcggataaactgggttataacctggtggtgctggactcccagaacaaccctgccaaagagctggcgaacgtgcaggatttaaccgttcgcgggaccaaaattttgctgatcaacccgactgactccgatgcggtgggtaacgcggtgaagatggcgaaccaggcgaagattccggttatcacgcttgaccgccaggcaaccaaaggcgatgtcgtcagccatatcgcgtctgataacgtgctgggcggtaagatcgctggcgactatatcgcgaaaaaagctggcgaaggcgccaaagtgattgagctgcaaggcattgccggaacatctgcggcgcgtgagcgtggcgaaggtttccagcaggcggtagccgcccacaaatttaatgtcctggccagccagcctgccgatttcgaccgtactaaaggtctgaacgtcatgcagaacctgctgaccgcgcatccggatgttcaggctgtcttcgcccagaacgatgaaatggcgctgggcgcactgcgcgcgctgcaaactgccggtaaagcagatgtgatggtggttggatttgacggtacgccggatggcgaaaaggccgtaaaagatggcaaactggcagcgactatcgctcagttaccggatcaaatcggcgccaaaggcgttgaagtagcggataaggtgctgaaaggcgaaaaagttcaggccaaatatccggttgacctgaaactggtcatcaagcagtaa

SEQ ID NO: 39952 - DNA, 966 bp, Salmonella typhi
atgacaacccaggctgtttctggtcgccgttatttcactaaagcgtggcttcttgagcagaagtcgctcattgccctgctggtgttgatcgcgattgtttcgacgttgagccccaacttttttaccgttaataatctgttcaatattcttcaacagacctccgtcaacgccattatggcggtggggatgacgttggtgattctgacatcggggatcgatctgtccgtcggttccctgctggcactcaccggtgcggttgccgcttcaatcgtcggcgttgaagtgaatgcgctggtcgcggttgccgccgcgctggcgctgggcgctgcgattggcgccgtcactggcgttatcgtcgcgaagggccgcgtacaggcgtttatcgctacgctggtgatgatgctgctactgcgtggcgtgacgatggtttacaccgacggtagcccggtcaacaccggctttaccgataacgccgatctgtttggctggttcggtatcggtcgtccgctgggcgttcctacgccggtctggatcatggctatcgtctttatcgccgcctggtatatgctgcatcacacccgtctgggacgctatatctacgcgctgggcggtaacgaagcggcgacgcgtctgtctggcattagcgtgagcaaagtgaaaattatcgtctattcactttgcggcctgacagcatcgctggcgggcatcattgaagtggcgcgcctctcttccgcgcagccgacggcgggtaccggctatgagctggatgctattgccgccgtggtgctgggcggcaccagccttgcaggtggtaaagggcgcattgttgggacattgatcggcgcattgattctcggcttccttaataatggtttgaatttgttaggtgtttcctcctattaccagatgatcgtcaaagcggtggtgattttgctggcggtactggtagacaacaaaaagcagtaa

SEQ ID NO: 39953 - DNA, 420 bp, Salmonella typhi
atgaagaaaggcaccgtactcaactctgaaatctcgtcggtcatttcccgtctggggcatactgatactctggtggtctgtgatgcgggtttacccatcccgaatagcactgcgcgtatcgatatggcactaacccagggcgtaccttcttttatgcaggtggtggatgtcgtgacctgggaaatgcaggttgaggcggcgattcttgcaacggaaatcaaacaacagaatccgcagctccacgaaacgttgctcactcaccttgagcaactgcagcaacaccagggaaacaccataaaaattagttatacgacacacgaacaattcaaaaaattgactgcagacagtcaggcagtgattcgcagcggggagtgttccccgtatgcgaacgtcattatttgcgctggcgtcactttctga

SEQ ID NO: 39954 - DNA, 663 bp, Salmonella typhi
atggcttatcgcgatcaacctttaggcgaactggcgctctctattccccgcgcatcggcgctgtttcgccagtacgatatggattactgctgcggcggaaaacagacgctggcgcgcgccgccgctcgtcacgacgtcgatattgacattattgaagcgcaactcgcgcagttggctgaacagcccatcgaaaaagactggcgcgccgttccgctggcggacattattgaccatatcgttgtgcgctatcatgaccgacaccgcgaacaactgccggagcttatcctgcaggcaaccaaagtggaacgcgttcacgcggataagccaaacgtcccacgcggcctgacaaaatatctcaccgcgctgcatgaagagctttccagccatatgatgaaagaagaacagatcctgttccccatgatcaaacagggtatgggtcgccaggcaacgggcccgataagcgtaatggaaagcgagcatgacgaggcgggagagctggtagacgtcatcaaacacgtcacccaaaatgtaacgccgccgccagaagcctgcaccacctggaaagcgatgtataacggcattaatgagatgattgatgctctgatggagcacatcagcctggagaataacgtgctgttcccacgcgcgctggccggggaataa

SEQ ID NO: 39955 - DNA, 1869 bp, Salmonella typhi
atgagcactgataataagcaatcgttgcctgcgattaccctcgcagctattggggttgtctacggtgatattggtaccagcccgctttatacgcttcgtgaatgtttgtccggtcagtttggttttggcgttgaacgagatgccgtgtttggttttctgtcgctgatcttctggctactcatctttgtggtttccatcaaatatctcaccttcgtgatgcgcgccgataacgcgggtgaaggtggaattttgacgctgatgtcgcttgccgggcgtaatacctcggcgcgcaccacatccatgttagttatcatgggactgataggcggcagctttttctatggcgaagtggtcattacgccggcgatttcggtgatgtcggcgattgaaggcctggagatagtcgcgccgcagctggatacctggattgtcccgctctccattattgtgctgactctgttgtttatgattcagaagcacggtacgggaatggtaggaaaactctttgcgccgatcatgctgacctggtttttaatcctggcggtacttggcctacgcagtattatcgccaatcccgaagtgttacatgcgctgaatcctgtctgggcggtacgttttttccttgaatataaaaccgtatcgtttattgcgttgggcgcggtggtgctgtcgattaccggcgtagaggcgttgtacgccgatatgggacacttcggtaagttcccgattcgcctggcgtggtttaccgtggtattgccgtcgttagtactgaactactttggtcagggtgcattgctactaaagcatccggaagcgattaaaaaccccttcttcctgttggcgccggactgggcgttaattccgctgctgattctggccgcgctggcgacggtgatcgcctcccaggcggtaatttccggcgtcttttcgctgacgcgtcaggccgtgcgtcttggctatttgtcgccaatgcgcattatccatacctccgagatggagtccggtcagatctacatccctttcgttaactggctgctttatttcgcggtcgtggttgttattgttagctttgagcactccagcaacctggcggcggcctatggcatcgccgtgaccggcacgatggtgctgacgtctattctttctacgaccgtggcgcgtaagaactggcactggaacaaatattttgtcgcgctgatcctcatcgcattcctgtgcgtggatatcccgctgttctcggctaacctcgacaaattgttgtccggcggttggctgccgctgagcctgggtctgatcatgttcacgatcatgaccacctggaagagcgagcgtttccgtctgttgcgtcgtatgcatgaacacggtaattcgctggaagcgatgattgcttcactggagaagtcaccgccggttcgggtgccgggtactgccgtatacatgtcgcgcgcgctcagtgtgatcccttttgctttattgcataacctgaagcacaacaaagtgttgcatgagcgcgtaatcttactgacgttgcgtacggaagatgcgccttatgtgcataacgttcgccgggtgcagattgagcagttgtctccgacattctggcgcgtggtggccagctacggctggcgcgaaacgctaaacgttgaagaggtgttccaccgctgcggtctggaaggccttagctgtcggatgatggaaacgtcgttctttatgtcgcacgagtcgttgattgtcggcaaacgcccgtggtatttgcgtctgcgcggcaagctgtatttgttgttgcaacgcaacgccctgcgcgcgccggatcagttcgagatcccgcctaaccgcgtgattgagttaggtacgcaggtcgagatttaa

SEQ ID NO: 39956 - DNA, 1428 bp, Salmonella typhi
atgaaaaaaaccacattagcaatgagtgcactggctctgagtttaggtttggcattgtcgcctctgtctgccacggcggctgaaacgtcctcttcagcaatgactgcccagcagatgccaagcctggcaccgatgctcgaaaaagtgatgccatcggtggtcagtattaatgtagaaggtagcaccacggtgaatacgccgcgtatgccgcgtaatttccagcaattctttggcgatgactccccgttctgccaggacggttctccgttccagaattctccgttctgccagggcggcggtaacggcggcaacggcggtcaacaacagaaattcatggcgctgggctccggcgtaattattgacgccgcgaagggctacgtcgtcaccaacaaccacgtggttgataacgccagcgtgattaaagtacagcttagcgatgggcgtaaattcgatgctaaagtggtgggcaaagatccgcgttctgatatcgcgctgattcaaattcagaatccgaagaacctgacggcgattaagctggcggactccgacgcgctgcgcgtgggggattataccgtcgctattggtaacccgtttggtctgggcgaaacggtgacgtcaggtatcgtttcggcgctggggcgtagcggcctgaacgtagaaaattacgagaactttattcagaccgacgccgcgattaaccgcggtaactccggcggcgcgctggtgaacctgaacggtgagctgatcggtattaacaccgcgattctggcgccggacggcggcaacatcggtatcggcttcgctatccccagtaacatggtgaaaaacctgacgtcgcagatggtggaatacggccaggtgaaacgcggcgaactggggatcatggggactgagctgagctctgagctggcgaaagcgatgaaagtcgacgcccagcgtggcgcgttcgtcagccaggtgatgccgaattcgtccgcagcgaaagcgggtatcaaagccggggatgtcattacctcgctgaacggtaaaccgatcagcagctttgcggcgctgcgcgctcaggtcggcactatgccggtcggcagcaaaatcagcctcggtctgctgcgtgaaggtaaagcgattacggttaatctggaactgcagcagagcagccagagtcaggttgattccagcaccatcttcagcgggattgagggcgctgaaatgagtaataaaggccaggataaaggcgttgtggtgagcagcgtgaaagcgaactcacccgccgcgcaaattggcctcaaaaaaggcgatgtgattatcggcgctaaccagcagccggtgaaaaatatcgccgagctgcgtaagattctcgacagcaagccgtcggtgctggcgctgaatattcagcgtggtgatagttctatttatttgctgatgcagtaa

SEQ ID NO: 39957 - DNA, 1158 bp, Salmonella typhi
atggctggctggcatcttgataccaaaatggcgcaggatatcgtggcgcgcactatgcgcatcatcgataccaatatcaacgtaatggatgcccgcgggcgtattatcggcagcggcgatcgggaacgtattggtgaattgcacgaaggcgcgttgttagtgctgtcacagggccgggttgtggatatcgacaacgccgtggcgcgacacctgcacggggtgcgtcaggggattaatcttcccttacgccttgagggcgaaattgttggcgtgatcggtctcaccggcgaaccagagcatctgcgtaaatatggcgaactggtgtgtatgactgccgaaatgatgctggaacagtcgcggttaatgcaccttttggcgcaggatagccgtttgcgtgaagagctggtgatgaacctgattcaggccgaagaaaatacgccggcgctggtggaatgggcacagcgtttagggatcgatttgaaccagccgcgtgtggcggcggtggtggaagtcgacagcggccagcttggcgtcgatagcgcaatggcggaacttcagcagttgcagaatgcgcttaccacgccggagcgtaacaacctgatagccattgtttcccttaccgagatggtggtgctcaaacccgccttaaactcgtttggtcgttgggatgctgaagatcatcgtaagcgcgtagagcagcttatctcgcgaatgaaagagaatggtcagctacgttttcgcgtggcgctgggtaattactttaccggaccgggcagtattgcacgctcataccgcacggcgcgcaccacgatgatggtcggcaaacagcggatgccagaaagccgcagctatttttatcaggatttgatgctgccggtcctgttagatagcctgcgtggcggctggcaggccaatgagctggcgcgcccgctggtaaaactcaaagcgatggataacaacgggttattacgtcggacactgacggcgtggtttcgccataatgtccagccgctggcgacctctaaggcgctgtttattcatcgtaatacgctggaatatcggctaaatcgtatttcggaactgaccgggctggatttgggaaattttgacgatcggctgttgctgtatgtggcgctacaattggatgaacagcgttaa

SEQ ID NO: 39958 - DNA, 825 bp, Salmonella typhi
atgcagcagttacagaacgttattgagaccgcttttgagcgccgcgccgatattacgccggctaatgtagataccgtgacccgagaggcggtaaaacaggtcatttctctacttgattccggcgcgctgcgtgtcgcagaaaaaatcgacggtcagtgggtcactcaccagtggttgaagaaagcggttctgctctctttccgtattaacgataaccaggttatcgacggtgcggaaagccgctacttcgataaagccccgatgaaattcgctgattacgacgaagcgcgttttcagaaagaaggcttccgcgtcgttccgcctgcggccgttcgtcagggcgcatttatcgcccgcaacaccgtgctgatgccgtcttacgttaacatcggcgcctacgttgacgaaggcaccatggttgacacctgggcgacggtgggttcctgtgcgcagattggtaaaaatgttcacctttccggcggcgtgggtatcggcggcgtactggagccgctgcaggctaacccgaccatcattgaagacaactgctttattggcgcgcgttctgaagtcgtggaaggcgtcattgtcgaagaaggttccgtcatttccatgggcgtatacctcggccagagcaccaaaatctacgatcgcgaaaccggtgaagttcactatggccgcgtaccggcgggctccgtggtcgtttccggcaacctgccgtcaaaagacggtaagtacagtttgtactgcgcggtgatcgtgaaaaaagtcgacgccaaaacgcgtggtaaagtgggcattaacgaattattgcgcacgattgattaa

SEQ ID NO: 39959 - DNA, 2673 bp, Salmonella typhi
atgaatactcttcctgaacagcacgcgaataccgcactccccaccctccctgaccagccgcaaaaccctggcgtctggccgcgcgctgaactgaccgtcgccggtatcaaagcccgcatcgacatctttcaacactggctgggagaggcatttgacagcggcatttgtgctgaacagcttattgaagcccgaaccgaatttatcgaccagttgttgcaacgcctgtggattgaggccggtttcggtcagattgccgatctggcgctggtcgccgtcggcggctatggacgcggcgaactgcatccgctttccgatattgatctgctcattttaagccgcaaaaagctgcccgatgaacaggcgcaaaaggtcggcgagctgctgactttactttgggacgtcaagctggatgtcgggcatagcgtacgtacgctggaagagtgtctgctggaaggtctgtctgatttaaccgttgcaacaaacctcatcgaaacgcgcctgctgatcggtgatgtcgctctgtttctggcactacaaaaacatattttcagcgaaggtttttggccgtccgacaaattttacgccgccaaagtagaagagcagaaccagcgccaccagcgctatcacggtaccagctataatctggagccggatattaaaagcagccccggcggcctgcgcgatatccatacattgcagtgggtcgcccgacgtcacttcggcgccacctcgctcgatgagatggtgggattcggctttttaaccccggctgagtgcgcggagctcaacgagtgcctgcatatcctgtggcgcattcgctttgcgctacatctggtggtcagccgctacgataaccgcctgctgttcgaccgccagttaagcgtcgctcaacgccttaactacagcggcgagggcaatgatccggttgagcggatgatgaaagactacttccgggttacgcgtcgggtgagcgaacttaatcagatgctgcttcagctatttgacgaggcgattctggcgctgcctgcggatgaaaaaccacgtcctgttgacgatgagtttcaactgcgcggcacgctcattgatctgcgtgacgacacgctgtttatccgcgaaccgcaagcgatcctgcggatgttttatatgatggtgcgcaatagcgcgatcaccggcatctactctacgacgttacgccacttgcgccacgcccgccgccacctgagccaaccgctgtgttacatcccggaggcgcgcactctgtttctgagtatgctacgccatcccggcgcggtcagccgcggcctgctgcccatgcatcgccacagcgtactgtgggcttatatgccgcagtggtcgcacatcgtcggacaaatgcagtttgacctgttccacgcatacacggtggatgaacacaccatccgcgtaatgctcaaactggagagctttgcgaaagaagagacacgccagcgccatccgctatgcgtcgatctctggccgcggcttccccatccggaactgatcctgatcgccgcgctgttccacgatattgcgaaaggacgcggcggcgaccattcggtactgggcgcgcaggatgtactcaccttcgccgaactgcacggtttgaactcacgcgaaacgcaactggtcgcctggctggtgcgccaacacctgctaatgtcagtcaccgctcagcgccgcgacatccaggatccggaagtcatcaagcagtttgccgaagaggtgcaaaccgaaacacggctgcgttttctggtctgcctgaccgtcgcggacatctgcgcgaccaacgaaaccttgtggaatagctggaaacagagcctgctgcgcgagctgtacttcgccactgaaaaacagctcaggcgtggaatgcaaaatacgccggatatgcgtgagcgcgtgcgtcaccatcagcttcaggcgctggcgctgctgcgaatggacaatattgatgaagccgcgctgcacaaaatctggacccgctgtcgcgctaactattttgttcgtcatagtccaaatcagctcgcctggcacgcacgccatttattgcagcacgatctgagccaaccgttagtgttgctcagtccgcaagccacgcgcggcggaaccgaaatttttatctggagtccggacagaccctatctgtttgccgccgtctgcgccgagctggacaggcgtaatttaagcgtccatgacgcgcagatctttaccactcgcgacggcatggcaatggatacgtttatcgttctggaaccagacggcagcccgctggcggcagatcgccatgacgttattcgcaccggtcttgaacagaccattacgcagcatagctggcagccgccgcagccgcgtcggcaaccggcaaagttacggcactttacggtcgaaacggaagtcaattttctgcccacccataccgacagaaaatcattcatggaattgatcgcgctcgatcaacctggtctgctggccagggtcggacaaatttttgccgatctgggaatttcgcttcatggtgcccgaattacaaccattggtgaacgagtagaagatttattcataatcgccacagcggatcggcgcgcacttaataatgtgctgcaacttgaggtgcaacaacggttgacagcggccctcaatccaaacgataaagggtag

SEQ ID NO: 39960 - DNA, 726 bp, Salmonella typhi
atggcaactgtttccatgcgcgacatgctcaaggctggtgttcactttggtcaccagacccgttactggaacccgaaaatgaagcctttcatcttcggcgcgcgtaacaaagttcacatcatcaaccttgagaaaactgtaccgatgttcaacgaagctctggctgaactgaacaagatctctgctcgtaaaggtaaaatccttttcgttggtactaaacgcgctgcaagcgaagcggtgaaagaagctgctaacagctgcgaccagttcttcgtgaaccatcgctggctgggcggtatgctgactaactggaaaacagttcgtcagtccatcaaacgtctgaaagacctggaaactcagtctcaggacggtactttcgaaaagctgaccaagaaagaagcgctgatgcgtactcgtgagcttgagaaactggaaaacagcctgggcggtatcaaagacatgggcggtctgccggacgctctgttcgttatcgatgctgaccacgagcacattgctatcaaagaagcgaacaacctgggtatcccggtatttgctatcgttgataccaactctgatccggacggcgttgacttcgttatcccgggtaacgatgacgcaatccgtgctgttagcctgtacctgggcgctgtcgctgcaaccgttcgtgaaggccgttctcaggatctggcttcccaggcggaagaaagcttcgtagaagccgagtaa

SEQ ID NO: 39961 - DNA, 1890 bp, Salmonella typhi
atgttttatcaggatccttttgacgtcattattattggcgggggtcatgcaggcactgaggccgcgatggccgcagcgcgtatgggtcaacagactctgcttttgacacacaatattgacacgttggggcagatgagctgcaacccgacgatcggcggtattggcaagggacatctggtaaaagaggtggatgcgctcggcggtctgatggcgaaagcgatcgatcaggcaggtattcagtttaagatactaaacgccagcaaaggtccggccgttcgcgctacccgagctcaggcggatcgagtcttatatcgccaggcggtacgtatcgcgctggagaatcagccgaatctgatgatcttccagcaagcggttgaagatctgattgtcgaaaacgatcgcgttgtcggcgccgtgacccaaatggggctcaaattccgcgcgaaagcggtggtgctgaccgtcgggactttcctggacggcaaaattcatattggtctggataactacagcggcggtcgtgctggcgatccgccatccatcccgctgtctcgccgtctgcgtgagcttccgctacgcgtcagccgcctgaaaaccggcacaccgccgcgtattgatgcgcgtactatcgatttcagcgtgttggctcaacagcatggcgataacccgatgccggttttctcgtttatggggaatgcttttcagcatccgcaacaggtgccgtgttacatcacgcataccaatgagaaaacccatgacgtgattcgtaataacctcgatcgtagcccaatgtacgctggcgtgatcgaagggatcggcccacgctactgtccttcgatcgaagacaaggtgatgcgttttgccgatcgtaaccagcatcagatcttccttgagccggaaggactgacctctaacgagatttaccctaacggtatctccaccagcctgccgtttgacgtgcagatgcagattgtccgttccatgcagggcatggagaacgcgaagatcgttcgccctggttacgcgattgagtatgatttcttcgacccgcgagatctgaaaccgactctggaaagtaaatttattcacggcctgttctttgctggtcaaatcaacggtactaccggctatgaagaggctgcggcgcagggcttgctcgctggtctgaatgccgcgcgtctttccgccgacaaagagggctgggcgcctgcgcgttctcaggcttatctcggcgtgctggtggacgatctctgtacgctgggcaccaaagagccgtatcgcatgtttacctcccgcgccgaatatcgcctgatgctgcgtgaggacaacgccgatctgcgtctgaccgaaatgggccgcgagctgggtctggtggatgatgaacgctgggcgcgcttcaacgagaagctggaaaatatcgaacgcgaacgtcagcggctgaaatcgacatgggtaacgccgtctgcggaatccgctgatgaagtgaatgcgcatttgaccacgccactctcccgtgaggccagcggcgaagatctgttgcgtcgtccggaaatgacatatgcgcagctcacttcgcttgccgcattcgcgcctgcgcttgaagatgagcaagccgctgaacaggtggaaatccaggtcaaatacgaaggctatatcgctcgccagcaggatgagattgaaaaacaactacgtaacgagaatacgttgctgcctgccacgctggattatcgtcaggtttccggtctgtcgaacgaagttatcgccaagctgaacgatcataaaccggcgtctatcggccaggcatcgcgtatctccggcgttacgccagcggcaatctccattctgctggtatggctgaaaaaacaaggtatgctgcgtcgtagcgcttga

SEQ ID NO: 39962 - DNA, 624 bp, Salmonella typhi
gtgctcaacaaactctctcgtctgctggctgatgccggtatttctcttaccgatcaccagaaaacgctgctggtcgcctacgttgatatgctgcacaaatggaacaaagcatacaacctgacgtcagtgcgggatcccaacgaaatgttggtacgccatattctcgacagcatagtcgttgcgccgtatctgcagggacagcgttttatcgatgtaggaacaggaccggggctgccgggcatcccgctggctattgttctccctgacgcgcatttcaccttactcgacagcctgggcaagcgggtacgttttctgcgtcaggtccagcacgaactgaaactggaaaacatcacgccggttcaaagccgcgttgaagcctatccctccgaaccgccgtttgatggcgttatcagccgcgctttcgcatcgttgaatgatatggtgagctggtgtcaccatctgccgggagagaaaggacgtttttatgccttaaaagggcaattgccaggggatgaaattgcctcactacctgacaattttagcgtcgaatctgttgaaaaattacgcgttccgcaactggaaggcgagcggcatctggtgattattaagtcaaacaaagtttaa

SEQ ID NO: 39963 - DNA, 1344 bp, Salmonella typhi
atgttaaacagtatattcattatattctgcctgatcgctgtaagtgcgttcttctccatctccgagatctcgcttgccgcatcacgtaagattaaacttaagttattagctgatgaaggcagtatcaacgcacaacgcgtattgaaaatgcaggaaaatcccggcatgtttttcaccgttgtgcaaattggcctgaacgccgtcgctattcttggcggtatcgtcggcgatgcggcattttcgcccgccttttccgcccttttctcgcactatatgtcgccagaactctccgagcagttgagctttattctctctttctcgctggtgacggggctgtttatcctgttcgcggatttaaccccgaaacgcatcggtatgattgcgccagaagctgtggctttgcgtatcatcaacccgatgcgcttctgcctgttcgtttttcgcccgctggtgtggctgtttaacggcatggcaaacaacatcttccgcctgttcaaaattccaatggtgcggaaagacgacattacttctgatgatatttacgcggtggtggaagccggcgcgctggcgggcgtcttgcgcaagcaagagcacgaactgattgaaaatgtgtttgaacttgaatcccgcaccgtaccgtcttctatgacgtcgcgcgaaagtatcatctggtttgatctacacgaagacgaacaaagcctgaagaaaaaggtagccgaacatccgcactcaaaatttttggtgtgtaatgaagatatcgaccacatcatcggctatgtagattccaaagatctgctgaaccgcgtgctggcgaaccaaagtatggcgctgaatagcggcgtgcaaattcgcaataccttgattgtgccggatacgctgaccctttctgaggcgctggaaagtttcaaaacggcgggcgaagatttcgcggtcattatgaatgaatacgcgctggtcgtcggtatcattacgctgaacgatgtgatgaccacgctaatgggtgacctggtcggccagggactggaagagcaaattgtggcgcgcgatgaaaattcctggctggttgacggcggcacgccgattgacgacgtcatgcgcgtgctggatatcgatgagtttccgcaatccggcaactatgaaaccattggcggctttatgatgtttatgctgcgcaagatcccaaaacgtactgattcggtgaagttttccggctacaaatttgaagtggtggatatcgacaactaccgtatcgatcagttgctggtgacgcgtctcgacaataaaagcaacgtaccggcgccgaaactgcccgatgcgcaaggtaaagaagacagcgcggcctga

SEQ ID NO: 39964 - DNA, 816 bp, Salmonella typhi
atggcttcagaaaatatgacgccgcaggaatacataggacaccatctgaataaccttcagctggacctgcgtactttctcgctggtggatccgcagaaccccccagccaccttctggacgctcaatattgactccatgttcttctcggtggtgctgggtctgttgtttctggtgatgttccgtagcgttgctaaaaaagcgaccagcggcgtgccaggcaagtttcagaccgcgattgagctgatagtcggctttgtgcatggcagcgtcaaagacatgtaccatggcaaaagcaagctgattgcgccgctggccctgacgattttcgtctgggtattccttatgaacctgatggacttactgcctatcgacctgctgccgtatatcgctgagcattggctgggtctgccggcaacgcgcgtggtgccgtctgctgacgtcaacatcaccctgtcgatggcgctgggcgtattcatccttattctgttctacagcatcaaaatgaaaggcatcggcggcttcgcaaaagagttgacgctgcagccgttcaatcactgggcgttcattcctgtcaacttaatccttgaaggggtaagtctgctgtccaaaccggtttctctcggtctgcgactgttcggcaacatgtatgccggtgagctgattttcattctgattgctggtctgttgccgtggtggtcacagtggattctgaatgtgccgtgggccattttccacatcctgattattacgctgcaagccttcattttcatggttctgacgattgtctatctgtcgatggcgtccgaagagcattaa

SEQ ID NO: 39965 - DNA, 1542 bp, Salmonella typhi
atgcaactgaattccaccgaaatcagcgaactgatcaagcagcgcattgctcagttcaatgtggtgagcgaagctcacaacgaaggtactattgtttctgttagtgacggtgttatccgcattcacggcttggccgattgtatgcagggtgaaatgatctccctgccgggtaaccgttacgctatcgcactgaacctggagcgcgactccgtgggtgcggtagtcatgggtccatacgctgaccttgccgaaggcatgaaggttaaatgtacgggtcgtatcctggaagttccggttggccgcggtctgctgggacgtgtggtaaacaccctgggtgcgccaatcgacggtaaaggtccggttgataatgacggcttctctgccgttgaagcgattgcgccgggcgttatcgatcgtcagtctgtcgatcagccggtgcagaccggctataaagccgttgactccatgatcccaatcggtcgtggtcagcgtgaactgatcatcggtgaccgtcagaccggtaaaaccgcgctggctatcgacgccatcatcaaccagcgcgactccggcatcaaatgtatctatgtcgctatcggccagaaagcgtccaccatctctaacgtggtgcgtaaactggaagagcacggcgcgctggctaacaccattgttgtggtggcgaccgcgtccgaatccgctgcgctgcaatatttggcgccgtatgccggttgcgcaatgggcgaatacttccgtgaccgcggtgaagatgcgctgatcatttacgatgacctgtctaaacaggctgttgcttaccgtcagatctccctgctgctccgtcgtccgccaggacgtgaagcattcccgggcgacgtattctacctccactctcgtctgctggagcgtgctgcgcgtgttaacgccgactacgtcgaagccttcactaaaggtgaagtgaaagggaaaaccggttcactgactgcgctgccgattatcgaaacgcaggcaggtgacgtttccgcgttcgttccgaccaacgtaatttccattaccgatggtcagatcttcctggaatctaacctgtttaacgccggtattcgtcctgcggttaacccgggtatctcggtatcccgtgtaggtggcgcagcccagaccaagatcatgaaaaaactgtccggaggtattcgtaccgcgctggcgcagtatcgtgaactggcggcgttctctcagtttgcatccgaccttgacgatgccacccgtaaacagcttgaccacggtcagaaagtgaccgaactgctgaaacagaaacagtatgcgccgatgtccgtcgcgcagcagtctctggttctgttcgcagcagaacgtggttatctggcggatgtcgaactggcgaaaatcggtagcttcgaagccgcactgctggcttacgtcgaccgtgatcacgctccgctgatgcaagagatcaaccagtccggtggctataacgacgaaatcgaaggcaagctgaaaggcatcctcgattccttcaaagcaacccagtcctggtaa

SEQ ID NO: 39966 - DNA, 3780 bp, Salmonella typhi
atgagtttatggaagaaaataagcctcggcgtgttgattttcattgtggtgttactggcgagcgttgcgtttctggtcgggacgacgacggggctgcatctggtattcggtgcggcgaaccgctgggtgccggggctggatattgggcaggtcaccggcggctggcgggacttatcgttaaaaaatatccgctatgagcagccgggcgttgcggtaaatgcgggcgaaattcatctggccgtcgggcttgattgcctgtggcgcagtagcctgtgcgtcaatgatctggcgctaaaagacattaatgtcgctatcgacagcaaaaaaatgcctccttccgaaccggcgcaagaagaggaagaaagcgggccgctgaacctctccacgccctggcccatcacgctgtcgcgcgtggcgctgaataacatcaatatcaagattgatgacactaccgtttcggtgctggattttacctacgggctggcatggcaggagaaaaacctgaccctgaaaccgacgcggcttcagggactgctgatcgcgctgccgaaggtcgctgaggtggcgcaggaagaggtggttgaacccaaaatcgagaaacctcaaccggatgaaaagccgcttggcgaaacgctaaaagatctgtttgcaaaaccggtaatgccggagatgaccgatgttcacctgccgctcaatctgaatatcgagtcatttcgcggcgagcagctacgcatcaccggcgataccgatctgacggtgcgcacgatgctgcttaaagtcagcagtatcgacggtaatatgaagctggatactctggatatcgacgccaaccagggcacggtgaaagcctccggtacggcgcagctcgccaataactggccggttgatattacgctcaacagtacgctgaatatcgatccgctaaagggtgaaaagatcaaactcaaggtcggcggcgcgttacgcgaacaactggaggtcagggtgaacctttccgggccgatggatgtcgcgcttcgcgcccagacgcggctggcggaggccggtttaccgctcaatcttgaggtcgtcagccaacgcattgcctggccattgacgggtgatacccagtttcaggctgacgatctgaagctcaaactgagcggtaagatgaccgactatacgttgtcgatgcgaaccgccgtgaaaggacaagatattccgccggcgaccatcacgctggatgctaaagggaatgagcggcagattaatctcgataaactcaccgtcgccgctctggagggaaaaaccgaactgaaagcgctggtggactggcagcaggcgattagctggcgtggcgaactgacgctgaatggcatcaataccgctaaagagatcccggactggcccgcgaaacttaacggcgtcatgaaaaccaaaggcagcctctacggcggcacctggcagatggatgtcccggagctcaagctgaccggtaatgtgaagcagaacagcgttaacgtcaacgggacgctaaagggcaacagctacatgcagtggacgatcccggggctgcaccttgcgctgggcccaaacagcgccgatataaaaggcgagcttggcgttaaggagctgaatcttgacgccgccatcgatgcgccagggctggataatgcgctgccagggctgggcggcatggcaaaaggaatcgttaaagtccgcggtacggtagaagcgccgcagctgttggcggatatcaccgcccacggtctgcgctggcaggagctgtctatcgcccaggcgcgcatcgagggcgatattaaatccaccgatcagatagcgggccatctcaacgttcgcgtagagcggatttcgcagcccgacgttaacatcaatctggtgacgcttgacgccaaaggcagcgagaagcagcatcagctacagctccgtgttcagggagaaccggtatccggtcaactctccctgacaggcagttttgatcgcgaggaggcgcgctggaaagggacgttaagcgacacccgtttccagacgccagtggggccatggtcgttgacccgcgcgattgcgctggactaccgtaataaagaacaggaaatcagtatcgggccacattgttggctgaacccgaacgccgagctgtgcatcccgcaaaccattgatgcgggcgccgcaggacgggcgttggtcaatctcaaccgctttgatctggcgatgctgaagccatttatgcctgataccactcaggccagcggggtctttagcgggaaagcggacgtgtcgtgggacaccacccaggagggattgccgcaggggaaggtcacactttccggtcgtaacgtgaaggtcacgcagaccgtcaatgacgcgccgttaccggtcgcgtttgagacgctgaacctcagcgccgatctgcacaataatcgcgccgagctgggatggctgattcgcctgacgaacaatggtcaattcgatggccaggtgcaggtaaccgatcctcaggggcggcgcaatctcggcggtaacgtcaacatgcgcaatctcaatctggcgatggtcaaccctgtctttttgcgcggcgaaaaagcggcgggaatgttaaacgccaggctacgtctgggcggcgatgtgcaaagcccgcagttgtttggtcagttgcagcttagcgcgctggatattgacggtaattttatgccgtttgagatgcagccgagccagctcgccatgaactttagcggtacgcgctcgacgctcgctggtatcgtgcgaacacaacaagggcaaattaacctgaacggtaacgccgactggagccagattgacaactggcgcgcgcgggtgacggcgaaaggcagtcgggtgcggattaccgttccgccgatggtgcgcctggatgtctcgccggatgtggtctttgacgcgacgccttcgctgttcacgttggatgggcgtgtggacgttccgtgggcacgaattgtggtgcacgacctgccggagagcgcggtcggcgtctccagcgatgtggttatgctcaataatgacctgcaaccagaaacgccgcagacagcatctattcccatcaacagtaatctgacggtacatgtcggcaacaacgtgcgcatcgacgccttcgggcttaaagcgcgtttgaccggcgatttgaaagtcgcgcaggataagcaggggctggggctaaatggtcaaatcaatattcctgacggccgattccgcgcctacggccaggacctgcttgttcgtaaaggcgagctgctgttctccggcccgccggatcagccgctgctcaatatcgaagcgatccgtaaccctgacgccaccgaagacgatgtcattgcgggcgtgcgcgtcacaggcacagctgatgaacccaaagcggaaatcttctccgatccggcgatgccgcaggctgaagcgctttcttatctgctgcgtgggcaggggttggacagcaatcagagtgatagcgcagcaatgacttccatgcttattggcctgggggttgcgcaaagtggtcaggttgtgggtaaaatcggagagacattcggtgtaagtaatctggcgctggacacgcaaggggtgggcgattcgtcccaggttgtggtcagcggctatgtactgccgggtctacaggtgaagtatggtgtagggatatttgactctctggcgacgctcacgttacgttatcgcctgatgcctaagctatatctggaagcagtgtctggcgtagatcaggcacttgatttgctctatcagtttgagttttag

SEQ ID NO: 39967 - DNA, 1371 bp, Salmonella typhi
atgttaaatagtgctatgagcgtagtgatccttgccgcaggtaaaggcacgcgcatgtattccgatattcctaaagtgctgcacacgctggcgggtaaacccatggtgcagcatgtcattgatgcagctactaaattaggggccgcacaggttcatctggtctatggccacggtggcgagttgttaaaacagaccctgaaagatgacaagctgaactgggtgcttcaggcggaacagttgggaacaggtcacgcaatgcagcaggccgcgcccttttttagcgacgatgaagatattttaatgctttacggcgacgtgccgctgatttcggttgaaaccttacagcgcctgcgcgatgccaaaccgcagggtggtattgggttattaaccgtgaagctggacgatccgagcggctatggccgtattacgcgtgaaaacggtaaagtgaccggcatcgttgaacataaagacgccactgatgaacagcgtcagatccaggaaattaacactggtattctgatcgccaacggcgcggacctgaaacgctggttgtctaagctgactaacaataatgcgcagggtgaatattacatcacagatatcatcgcgctggcttatcaggaaggacgggaaatcgccgcggtgcatccggctcgcatcagcgaaacggacggcgtgaataaccgtctacagctttctcgtctggagcgtatttaccaggccgaacaggcggagaaactgctgttatccggcgttatgttgcgcgatccggcacgttttgatctccgcggcaccctttattgtggaatggatgtcgaaattgacgctaacgttatcatcgaaggttatgtaacgctcggtcaccgcgtgaagatcggcgcgggctgcattattaaaaacagcgttattggcgatgactgcgaaattagcccatacagcgtggtggaagatgcgcatctggaagcggcctgcaccatcggcccgtttgctcgcctgcgtcccggcgctgagctgttagcgggcgctcacgtcggcaattttgttgaaatgaaaaaagcgcgtctgggtaaaggttctaaagccggccatctgacctacctgggcgatgcggaaattggcgacaacgtgaatattggcgcggggaccatcacctgtaactatgatggcgcgaacaaattcaaaacggttattggcgacgatgtgtttgtcggctccgatacccaactggtggcgccggttactgttggtaaaggggccaccatcgccgcagggactaccgtcacccgtaatgtagccgacaatgaactggtattaagccgcgtgccgcaggtgcataagcaaggctggcagcgtccggtgaagaaaaagtga

SEQ ID NO: 39968 - DNA, 1830 bp, Salmonella typhi
atgtgtggaattgttggcgctatcgcgcagcgtgatgtagctgaaatccttctcgaaggtttacgtcgtctggaataccgtggttacgactctgccggtctggccgtggtggatgcagaaggtcatatgacccgcctgcgtcgcctcggtaaagtccagatgctggctcaggcagcggaagaacacccgctgcatggcggcaccggtattgctcacactcgctgggcgacgcacggtgaaccttcagaagctaacgcgcatccgcatgtttctgaacacattgtggtggtgcataacggcatcatcgaaaaccatgaaccgctgcgtgaagcgttaaaagcgcgtggctataccttcgtttctgaaaccgacaccgaagtgattgcacacctggtaaactgggaactgaaacaaggtggtactctgcgagacgcgattttgcgtgcgatcccgcaactgcgtggcgcatatggcacggtgatcatggatacccgccatccggatacgctgctggctgcccgttcaggtagcccgctggtgattggcctgggtatgggcgaaaactttatcgcttctgaccagctggcgctgttgccagtgactcgtcgctttatcttccttgaagagggcgatatcgctgaaatcactcgccgttcggtaaatatcttcgataacaccggcgcggaagtaaaacgtcaggatatcgaatccaatctgcaatatgacgcgggcgataaaggtatttaccgccactacatgcagaaagagatctacgaacagccgaacgcgatcaaaaacacccttaccgggcgcatcagccacggtcaggtggatttaagcgagctgggaccgaacgccgatgatctgttgtcgaaggttgagcatattcagatcctcgcctgcggtacgtcttacaactccggtatggtttcccgttactggtttgaatcgctggcaggtattccgtgcgacgttgaaatcgcctctgaattccgctatcgcaaatctgccgtgcgccgtaacagcctgatgatcacgctctcccagtctggcgaaacggcagataccctggctggcctgcgtctgtcgaaagagctgggatatttgggctctctggccatttgtaacgtgccgggctcttcgctggtgcgtgaatccgatctggcgctgatgaccaacgcgggtacggaaattggcgtagcatctaccaaagccttcaccacccagttaaccgtgctgttgatgctggtggcgaaactgtctcgcctgaaaggtctggatgcgtccattgagcatgatatcgtgcatggcctacaggcgctgccgagccgtattgagcagatgctgtcgcaggacaaacgcatcgagctgcttgcagaagatttctctgacaagcatcacgcgttattcctcggtcgtggcgatcaatatccgattgcgctcgaaggcgcgctgaagctgaaagagatctcttacattcacgcggaagcctatgctgcaggcgagctgaaacacgggccgttggcgctgattgacgccgatatgccggtgattgtggtggcgccgaacaacgaactgctggagaaactgaaatccaacatcgaagaagttcgcgcgcgtggcggtcagttgtacgtcttctccgatcaggatgcgggttttgtgagcagcgacaacatgcacatcattgagatgccgcatgtggaagaggtcattgcgcctatcttctacaccgttccgctgcaactgctggcgtatcacgtggcgctgattaaaggcaccgacgttgaccagccgcgtaacttggcgaaatcggtgacggtagagtaa

SEQ ID NO: 39969 - DNA, 852 bp, Salmonella typhi
atggctgaaattaccgcatccctggtaaaagagctgcgtgagcgtaccggcgcaggcatgatggattgcaaaaaagcgctgactgaagcgaatggcgacattgagctggcaatcgaaaacatgcgtaagtccggcgctatcaaagcggcgaaaaaagcaggcaacgtggctgctgacggcgtaatcaaaaccaaaatcgacggtaacgtcgctttcattctggaagttaactgccagactgacttcgtggctaaagatgctggcttccaagcatttgctgacaaagtgctggacgccgctgttgctggcaaaatcactgacgtagaagtcctgaaagcgcagttcgaagaagagcgcgttgctctggttgcgaaaatcggcgagaacatcaacattcgtcgcgtcgcttccctggaaggcgacgtgctgggttcttaccagcacggtgcgcgcatcggcgttctggttgccgctaaaggcgctgacgaagagctggttaagcagctggcgatgcacgttgcggcaagcaagccggaattcgttaagccggaagacgtgtctgctgacgtggtagagaaagagtaccaggtacagctggacatcgcgatgcagtccggtaagccgaaagaaatcgcagagaaaatggttgaaggccgcatgaagaaattcaccggcgaagtttctctgactggtcagcctttcgtcatggaaccgagcaaatctgttggccaactgctgaaagagcacaacgctgacgtgactggcttcatccgctttgaagtgggcgaaggcattgagaaagtcgagactgactttgcagcagaagttgctgcgatgtctaagcagtcctga

SEQ ID NO: 39970 - DNA, 726 bp, Salmonella typhi
atggctaccaatgcaaaacccgtctataaacgcattctgcttaaattaagcggcgaagctctgcagggtacggaaggcttcggtattgatgcaagcatactggatcgtatggctcaggaaatcaaagaactggttgaactgggtattcaggttggtgtggtgattggcggtggtaacctgttccgtggcgcgggtctggcaaaagcggggatgaaccgcgttgtgggcgaccacatgggcatgttggccaccgtcatgaacggcctggcaatgcgtgatgcgcttcaccgcgcctatgtgaacgcccgcctgatgtcggcaattcctttaaacggcgtgtgcgacaactacagttgggccgaggctattagcctgctgcgtaataaccgtgttgtgattctgtctgcaggtacgggtaacccgttcttcactaccgactctgcggcctgtctgcgcgggatcgaaattgaagcggatgtcgtactgaaagcgaccaaagtggatggtgtattcactgccgatccggcaaaagatccttccgcgaccatgtacgatcagctgacctacagcgaagtgctggataaagagctgaaagtgatggatctggcggcgttcacgctggctcgtgaccacaaactgccgattcgtgttttcaacatgaacaaaccgggcgcgctgcgtcgtgtggtgatgggcgaaaaagaagggacgttaatcacggaataa

SEQ ID NO: 39971 - DNA, 558 bp, Salmonella typhi
gtgattagcgatatcagaaaagatgctgaagtacgcatggaaaaatgcgttgaagcgttcaaaacccaaatcagcaaagtgcgcacgggtcgtgcttctcccagcctgctggatggtattgtcgtagaatactatggcactccgaccccgctgcgccagttggcaagcgtaacggtagaagactcccgtaccttaaaaattaacgtgtttgaccgttctatggggccagccgttgaaaaagcgatcatggcgtcagacctcggtttgaatccaagctctgcgggcaccgatattcgcgttccgctgccgccgctgaccgaagaacgtcgtaaagatctgacgaaaattgtccgtggagaagcggagcaggcgcgtgtcgccgtacgtaacgtccgccgtgatgcgaacgataaagtaaaagctctgctgaaagataaagcgatcagtgaagatgacgatcgtcgctctcaggaagaagtacagaaaatgaccgacgcggcaattaagaaagtggatgcggcgttggcagataaagaagcagaactgatgcagttctga

SEQ ID NO: 39972 - DNA, 759 bp, Salmonella typhi
atgttgtctgcaactcaaccagtaagcgaaaatttgccagcacatggctgccgtcatgttgccataattatggatggcaatggccgctgggcgaaaaagcaagggaagatccgggcctttgggcataaagccggggcgaagtccgtccggcgagcggtctcttttgctgccaataacggtattgatgcgttaacgctgtatgcctttagtagtgaaaactggaaccgaccagcgcaggaagtgagcgcgttaatggagctgtttgtgtgggcgctggatagcgaagtcaaaagcctgcaccgccataacgttcgcctgcgtattatcggcgatatcagccgatttaactcacgtttacaagaacgtattcgcaaatcagaagcgcttaccgcccataatacggggctaacgttgaatatcgctgcgaattacggcggacgttgggatattgtccagggagtccgacaactggcggagctggtgcaggctggagtgctgcgccccgatcagattgatgaagagagactaggccagcaaatctgtatgcatgagctggcgcctgtggatttagtaattaggactgggggagagcatcgcattagtaactttttgctttggcaaattgcctatgccgaactttactttacggatgttctctggcccgatttcgatgaacaagactttgaaggtgcgctgcatgcctttgctaatcgagagcgtcgtttcggcggtaccgagcctggtgatgacaaagcctga

SEQ ID NO: 39973 - DNA, 858 bp, Salmonella typhi
ttgctgaagtatcgcctgatttctgcttttgtgttaatacccgcggtcatcgctgcgctttttttattgccgccggtggggttcgccattattacgctggttgtctgtatgctggccgcgtgggaatgggggcagttaagcggtttcgccgcgcgttcacagcgggtttggctggcggtgctgtgtggtctgttattggcgctgatgttatttttgttgcctgagtatcatcacaacattcgtcaaccgctggttgagatgtcgctttgggcatcgttaggatggtgggttgtcgcgctactgctggtgctattttatcccggttcggcggcaatctggcgcaactcaaaaacattgcgtctcattttcggtttgttaactattgtgccatttttctggggcatgctggcgctgcgcgcctggcactatgacgagaatcattacagtggcgcaatatggttactctatgtcatgatcctggtctggggagcggactctggcgcgtatatgtttggtaaattgtttggcaaacataagctggcgccgaaggtttccccgggtaaaacctggcaagggtttatcggcgggcttgctacggctgccgtgatctcatggggttacggtatgtgggcgaatctgaatgttgcgcctgttatcttgctgatttgctctgtggtggcggctctggcttctgtactgggcgacctcaccgagagtatgtttaagcgcgaagcaggaattaaggatagcggccacttgatcccaggccatggcggcattctggaccgaattgacagtctgacggctgccgtaccggtctttgcttgcctgttgttactggtgttcaggacgctctaa

SEQ ID NO: 39974 - DNA, 1026 bp, Salmonella typhi
atgccttcaattcgactggctgacttagcagaacagttggatgcagaattacacggtgatggcgatatcgtcatcaccggcgttgcgtccatgcaatctgcaacaacaggccacattacgtttatggtaaatcctaagtaccgtgaacacttaggtttatgccaggcttctgcggttgtcatgacgcaggacgatcttccttttgccaagagcgcggcgctggtagttaaaaatccctacctgacctacgcgcgcatggcgcaaattttagatactacgccgcaacccgcgcagaatatcgcgccaagcgccgtgattgatgcgacggcaacgctgggtagcaatgtttcagtcggcgcgaatgcggtgattgaatctggcgtacaactgggcgataacgtggttatcggcgcaggctgtttcgtcggaaaaaatagcaaaatcggggcgggttcacgcttgtgggcgaacgtaacgatttaccacgacattcagatcggtgagaattgcctgatccagtccagtacggtgatcggcgcggacggttttggctacgctaacgatcgtggcaactgggtgaagatcccacaactgggccgggtcattattggcgatcgtgtcgagatcggcgcttgtaccaccattgaccgtggcgcgttggatgatactgttattggcaatggcgtgattattgataatcagtgccagattgcacataacgtcgtgattggcgacaatacggcagttgccggtggcgtcattatggcgggtagcctgaagattggccgttactgcatgattggcggcgccagcgtgatcaatgggcatatggaaatatgcgacaaagtcacggtaactggcatgggtatggtgatgcgtcccatcacggaaccgggcgtctactcctcaggcattccgctgcaacccaacaaagtatggcgtaaaactgctgcactggtgatgaacattgatgatatgagcaagcgtctcaaagcgattgagcgcaaggttaatcaacaagactaa

SEQ ID NO: 39975 - DNA, 552 bp, Salmonella typhi
atgacaaagcagcccgaagactggctcgacgacgttcccggtgatgacatcgaagacgaagacgatgaaattatctgggtcagtaaaagtgaaattaaacgcgatgccgaggaattaaaacgcctgggcgcggaactggtggatctggggaaaaacgcgctggataagatcccgctggacgccgatctgcgcgacgccattgaactggcccagcgaatcaaaatggaaggacgccgccgccagttgcagcttatcggaaaaatgctgcgccaacgcgacgttgaacctattcgccaggcgctggacaagctgaagaaccgccataatcagcaggtggtgctgtttcacaagcttgagcatctgcgcgatcgtctgatcgtcgaaggcgatgacgcggtagccgaagtactgaccctgtggccgcacgccgatcgtcaacagcttcgttcattgatccgcaatgcgaagaaagagaaagaaggcaacaaaccgccgaaatcagcgcgtcagatcttccagtatctgcgcgagctggcggaaaacgaagggtaa

SEQ ID NO: 39976 - DNA, 1290 bp, Salmonella typhi
atgaaaaccactcagaccagcacgattgcttcgattgactctcgaagcgcatggcgcaaaacggataccatgtggatgctgggcctttacggcacggcaatcggcgcgggcgttctgttcctgccgatcaacgcaggcgtcggcggcatgattccgctcatcatcatggcgattctcgctttcccgatgacctttttcgcacaccgtggtttaacccgcttcgtgctgtccggtaaaaacccgggtgaagacatcactgaagtcgttgaggaacacttcggtatcggcgcaggtaaactgattaccctgctctacttcttcgcgatttaccccatcctgctggtttacagcgtggcgattactaataccgtggaaagcttcctgacccaccagttagcgattaatccgccgccgcgggcgattctttccctgatcctgattgttggcatgatgaccatcgtgcgcttcggcgagcaaatgatcgttaaggcgatgagtatcctggtattcccgttcgtcgctgcgctgatgctgctggccttgtacctgatcccgcagtggaacggcgcggcgctggaaactctgtcctttgattccgccgcgtctaccggtaacggtctgtggatgacgctgtggctggcgattccggtgatggttttctctttcaaccactccccgatcatctcctccttcgcggttgcgaagcgtgaagagtacggtgaaggcgctgagaagaaatgttctaaaattctggccttcgcccacatcatgatggtgctgaccgtgatgttcttcgtcttcagctgcgtgctgagcctgacgccggcagatctggcagcggcaaaagagcagaacatctctattctgtcttacctggcgaaccactttaacgcgccgatcatcgcctggatggcgccgatcattgcgatgattgctatcaccaaatccttcctcggccactacctgggcgcgcgtgaaggctttaacgggatggtgattaaatcgctgcgtggtaaaggtaaatccatcgaaatcaacaaactgaataaaattaccgcgctgttcatgctggtcaccacctggattgtggcgacgctgaaccccagcatcctgggcatgattgaaaccctgggcggcccgatcatcgcgatgattctgttcctgatgccgatgtatgccatccagaaagtaccggcaatgcgtaagtacagcggtcatatcagcaacgtattcgttgtgattatgggcctgattgccatctccgctattttctactcactgttcagctaa

SEQ ID NO: 39977 - DNA, 1368 bp, Salmonella typhi
atgattagcgtattcgatatttttaaaatcggcattggcccttccagttctcacaccgtcggaccaatgaaagcaggcaagcagttcacggacgatctgattgcccgccatattcttacagatgtcacccgcgtcgtggtggatgtctacggctctctgtcattgacgggtaaaggccaccacactgatatcgccattattatgggcctggcggggaatctgccggacaccgtcgatatcgacgccattccgtcctttatccaggatgtgaacacccatgggcgtttactactggccaatgggcagcatgaagtcgaatttccggtcgataagtgcatgaatttccacgccgacaacctgtctctgcatgagaacgggatgcgtattaccgcgctggcgggcaataaagtgctctacagccaaacctactactccattggcggcggctttatcgtcgatgaagagcactttggtttgacaaatagcgaacccgttaacgtaccgtatccttataaaaccgccgcggatttacagcgccattgccaggagacgggtctgtcgctctccggtctgatgatgcaaaacgaactggctctgcacagtaaagaagcgctggagcagcacttcgccaaggtctgggaggtgatgcgcagcggtattgagcgcggtatcaccaccgagggcgtattgccgggcaaactgcgcgttccgcgtcgcgcggcggcgctgcgtcggatgctggtcagtcaggataagaccaccaccgatccgatggcggtcgtcgactggatcaatatgttcgcgctggcggtgaacgaagagaatgccgcaggcggacgagtagtcactgccccgactaacggcgcatgtggtattgtgccggcggtgctggcgtactatgacaaatttatccgcgaagtaaatgctaactcacttgctcgctatatgctggtcgccagcgcgattggctcgctgtataagatgaacgcctctatttccggcgccgaagtgggttgtcagggagaggtcggcgtggcctgttccatggcggcagcgggtctggccgagctgctgggcggtagtccggcgcaggtgtgtatcgccgcagaaatcgccatggagcataatctggggctaacttgcgatccggttgccggtcaggtccaggttccctgcattgagcgtaacgcgattgcttcagtcaaagcggtcaacgccgcgcgtatggcgctgcgccgaaccagcgaaccgcgcgtatgcctcgataaagtgattgagaccatgtacgaaaccggtaaagacatgaacgctaagtaccgcgaaacttcgcgcggcggcctggcgatgaagatcgttacctgcgattaa

SEQ ID NO: 39978 - DNA, 1374 bp, Salmonella typhi
atgactaaaaaaattgttgctgtgacggcctgtccgacgggcgtcgcccatgcctttatggctgccgaagcgctggaaattgaagcccgcaagcgtggtgactggatcaaggttgaaacccgcggttccgtcggggcgaagaacacgctgaccgcggaagagatagcgcaagcggatgtggtgattatcgcggcggatattgagctggatctgtcaggctttgttggcaaaagactctatcgcaccagtaccggcgcggcgctaaaaaagagtgcgcaggaaatggataatgctttcaatagcgccgaggtctatcaggggagtgccgggcgctcttcttcagctggtaaaacagagctacccggcgtttataagcatttaatgaccggcgtatcccatatgcttcctttggtggtggcgggagggttatgtatcgcgctctcttttgtcttcggtatccaggccttcaatgagccgggcacgctggcggctgcgttatttcaaatcggtggtaaggcggcctttgcgctgatggtgccggtactggctgggtttattgccttctcaattgccgatcgtccgggtctggccccggggcttattggcgggatgttggccagcctgtgcggtgctggtttcctgggagggattgtggccggttttctggccggttacagcgtacggtttctggcgcaaaatattaagctgccagcgtcaatggaagcgcttaagccggtactggttctgccgctactgtctacgctgattaccggcctaatcatgatttacgtggtgggtggccccgtttctgcggtgatggaagggctgacgacgttcctggggaatatgacctctacgaatgctatcttgctgggaatgttgctgggcgcaatgcaaggttttgaccttggtgggccggtgaataaagctgcgtataccttcggcgtcggtttactggcttctcattcctatatgccgatggcggccattatggcggcagggatggtaccggcattagggatgggcgtcgcaacctgggcggccagagcgaaattcactgcctctgagcatgaagcgggtaacgcatcctttatcctggggctgtgctttatctctgaaggggcgattcccttcgctgcgcgtgacccgatgcgcgtcatcccttccacgatggtcggtggcgcaatcgccgggggactgtccatgtatttcggttgtacactgatggcgccacacggtggtctctttgtcctggcgatcccgcatgcggtagaacatgtgatgcagtacctgctctcgattgccctgggcacgattgtctgcggcctgatgtacgcgctgttgaaaccgtctgcggttgcgcaaacagtttaa

SEQ ID NO: 39979 - DNA, 1974 bp, Salmonella typhi
atgtgcgtcagttactcgctatcgtccggtcgcgtgtcggctaatcatgaggagagagacgtgcgattccccaaccaacgtttagcgcagctatttgcgatgctgcaaaacgagacgctgccgcaggacgagctggcgcagcggttgtcggtctccacgcgtaccgttcgggcggatatcgccgcgctgaacatgttgctgacgccgcatggcgcgcaatttactctcagtcgcggcaacgggtatcaactcaaaattgatgatccggcacgttatcaatccctgcaaacgcagcaatctcccacgctggcgcgcggtccgcgcaccagccaggagcggatccactatttgctggcgcgttttttaacctccgccttctcgctgaagctggaggatttagcagatgaatggtttgtcagccgtgcgacgttgcagaacgatatggcggacgtgcgcgagcatttgctgcgttatcatctgacgctggaaacgcgtccgcgtcatggcatgaaattgtttggcggagagatggcgattcgcgcctgtctgaccgaccttttatggacgctggtgcagcaggagccctcccatccgttaattgttagtaccacgctgaacaccgaggtgtctcaacggctgcagtctcttttgccggatattttctctcattgtcaaatccgcctgaccgatgagggcgagctgtttctgcgtttatactgcgcggtggcggtacggcgtattcgcgaggggtatccgttatcggaatgcgtggcagaggaggtcgatgaaaaggtgcgccatgcggcgcatgagattgcggagctactacaacagctggctgacaagccgctgtcggagccggaagtaagctggctgaaggtgcatattgccgcccgccaggtacaggagattgcccccagcgccattaatgccgatgatgaagaggcgctggtgcactatatcctcaattttattaatacccagtacaactataacctgttgaatgataaacagcttcacgcggacttgctgacccacatcaaaacgatgatcacccgcgtgcgctaccagatcatgatccccaacccactactggaaaatattaagcagcactatccgatggcgtgggatatgacgttggcggcgatatcgagttggggaaaatacacgccgtataccattagcgaaaacgaaatcggttttctggtgctgcatattggcgttgggctggaacgtagttacaacattggctaccagcggcagccgcaggtactgctggtgtgcgatgctggtaatgcgatggtgcggatgattgaagcggtactggcgcggaaatacccgcagattgagattgcccgcactctgacgctacgcgactatgaggcgcgggacagtatggtggaggattttgtgatttccacagcgcggatcggcgaaaaagataagccggtcatcatgatcgcgccctttcctaccgactatcaattggagcagatcggtaagctggtgctggtggacagaacccgtccgtggatgctggataaatatttcgatgcctcgcattttcgcatcgtggagggggaaataaatcaacagacgctgtttaaaacgctgtgcgatcagttgcacgaggaaggctttgttgatgcggcgtttctcgattcggttattgaacgtgaagctatcgtcagtacgttattaggcgacgggattgccttgccacacgcgctggggctgctggcgaagaaaacggtggtttatacggtgctcgcgccgcaggggattgcctggggtgacgaaacggcgcacgttatttttttactcgccatcagcaaaagtgaatatgaagaggcgatggccatctacgatattttcgtcactttcctgcgcgaacgcgccatgacgcgcctctgcgcatgtcagaattttacgcaatttaaaacggtcgcaatggagtgtgtgagtcgcttttga

SEQ ID NO: 39980 - DNA, 960 bp, Salmonella typhi
atggctgcaaccaagcctgcttttaacccgccgggtaaaaaaggcgacatgattttcagcgcgctggtaaaactggctgcgctgattgtgctattgatgttgggcggtattatcgtctcattgatcatctcctcctggccaagtattcagaaatttggtttctcatttctttggactaaggagtgggacgcgccaaacgatatctacggcgcactggtgcccatttacggcacgctggtaacctcctttatcgcactgctgatcgccgttccggttagtttcggcattgccctgtttttaaccgagctggcgccaggctggctgaagcgtccgctcggcatcgccattgaactgctggcggcaattcccagtatcgtgtacggcatgtgggggctgtttatcttcgcgccgctgtttgcgacgtacttccaggagccggtcggcaatattctttccaacattccgtttgtcggcgcgctgttctccggcccggcctttggtatcggtattctggcggcgggcgtcatcctcgccatcatgatcatcccctacattgcggcggttatgcgcgacgtcttcgagcaaacgccggtaatgatgaaagagtccgcttacggtatcggctgtactacctgggaagttatctggcgcatcgtgctaccgttcaccaaaaatggcgtgatcggcggcattatgctggggctgggccgtgctctgggtgaaacgatggcggtcacttttatcatcggcaacacctaccagctcgacagcgcgtcgctgtatatgccgggcaacagcatcacttccgcgctggccaacgaattcgctgaggcggaatcgggtctgcacgtggcagcgttgatggagctggggctgatcctgtttgtgatcacctttatcgtcctggcggcgtctaagttcatgattatgcgtctggcgaagaacgagggagcacgttaa

SEQ ID NO: 39981 - DNA, 774 bp, Salmonella typhi
atgagtatggttgaaactgccccgagtaagattcaggttcgtgatttgaacttctactacggcaaattccatgccctgaagaacattaatctggatatcgcgaagaatcaggtaacggcatttatcgggccatccggctgcggtaaatcaacgctactgcgtaccttcaataaaatgtactcgctttatccggagcagcgcgcggaaggtgaaattctgctggatggcgacaatattctcaccaacacccaggatatcgcgctgctgcgcgcaaaagtggggatggtattccagaagccgacgccgttcccgatgtccatctatgacaatatcgcctttggcgtgcgtctgtttgagaagctgtctcgtgccgatatggacgagcgcgtgcagtgggcgttgaccaaagccgcattatggaacgaaaccaaagataaattgcaccagagcgggtactctctctccggtggtcagcagcagcgtctgtgcattgcgcgcggtatcgccattcgcccggaagtgttgctgctggatgagccatgttcagctctggacccgatctccaccgggcgtatcgaagagctgatcaccgagctgaaacaggattacaccgtggtgatcgtgacccataacatgcagcaggcggcacgttgttccgatcatacggcgtttatgtacctgggcgagttgattgagttcagcaacacggacgatctgttcaccaagcccgcgaagaaacaaacagaagattatatcaccggtcgttacggttaa

SEQ ID NO: 39982 - DNA, 465 bp, Salmonella typhi
atgcgctaccatcaatactatcccgtcgacatcgttaacggccccggtacccgctgcaccctgtttgtgtcagggtgcgtgcatgaatgccctggctgctataacaaaagcacctggcggctcaattccggccagccgtttaccaaagagatggaagataagatcattgccgatctgaacgacacgcgcattcaccgtcaggggatctcgctgtcgggcggcgatccgctgcatccgcaaaacgtaccggatatcctggcactggtacaacgcatccacgcggagtgcccggggaaagatatctgggtgtggaccggctacaggctcgatgaactcaacgccgcacagatgcaggtggtcaatctcatcaacgtgctggtcgatggcaaatttgtgcaggatctgaaagacccggcgcttatctggcgcggtagcagcaaccaagtagtgcatcatttgcgttga

SEQ ID NO: 39983 - DNA, 456 bp, Salmonella typhi
ttgactactaacactcatactctgcagattgaagagattttagagcttctgccgcaccgttttccgtttttactggtcgatcgcgtgctggactttgaagaaggtcgttttctgcgtgcggtgaaaaatgtctccgtcaacgagccgtttttccaggggcatttcccgggcaaaccgattttgccaggcgtgctgattctggaagcgatggcgcaggcaaccggtattctggcgtttaaaagcgttggtaaactggaacctggcgaactgtattatttcgcgggtattgatgaagcgcgctttaagcgtccggtggtgccaggcgatcagatgatcatggaagtcactttcgagaaaacgcgccgtggcctgacccgctttaaaggggttgcgctggtcgacggtaaagttgtgtgcgaagcaaccatgatgtgtgctcgtagccgggaggcctga

SEQ ID NO: 39984 - DNA, 1149 bp, Salmonella typhi
atggcggcacagcgtcctttaacgattgccctggtcgccggtgaaacgtccggcgatattcttggcgcaggcttaattcgtgcgctgaaagcgcgcgtacccaacgcccgttttgtgggcgttgcggggccgcgtatgcaggccgaagggtgtgaagcctggtacgagatggaagagctggcggtcatgggcattgttgaagtgctcggacgtttacgccgtttgttgcatatccgcgccgatctgacccgccgttttaccgaactcaagcccgatgtctttgtcgggattgatgcccctgatttcaatattaccctcgaaggtaatctgaaaaaacaagggattaagaccattcattatgtcagcccgtccgtttgggcctggcgacagaaacgcgttttcaaaataggcagatccacccatatggtgttggcttttctgcctttcgaaaaagcgttttacgataaatttaacgtcccgtgccgctttatcggtcacaccatggcggatgccatgccgctggacccggataaaaatgcggcgcgcgacgtgctgggtatcccgcatgacgcccattgtctggcgctactgccaggcagccgtggcgcggaagtggaaatgctcagcgccgacttcctgaaaaccgcacaattgctgcgacagcgctatcccgatctggaagtggtagtgccgctggtgaacgcgaaacgccgcgagcagtttgaaaaaattaaagcggaggttgcgccggatctcgccgttcatttgctggacggcatggcgcgcgaggcgatgatcgccagcgacgcggcgttgctggcctcaggcacggcggcactggagtgtatgctggcaaaatgcccgatggtagtggggtatcgtatgaagcccttcactttctggctggcgaaacgtctggtgaaaacggagtatgtgtctttgcctaacctgctggcgggaagagaattagtcaaagagctgttgcaggaagagtgcgaaccgcaaaaactcgccgaagcgctgttgccgctactggcgaacggtaaaaccagccatgcgatgcacgacaccttccgtgaattgcatcagcagatccgctgtaatgccgatgagcaggcggcagatgccgtcctggagttagcacaatga

SEQ ID NO: 39985 - DNA, 597 bp, Salmonella typhi
atgatcgaatttgtttatccacacacccatttagtggcgggtgtggatgaagtgggccgtggcccgctggtgggcgccgtagtgaccgccgccgtgatcctcgatccggcgcgtccgatcgtcggtctgaatgattccaaaaaattgtctgaaaagcgtcgtctgtcattgtatgacgagattaaagaaaaggcgttaagctggagtctgggacgcgcggaagcgcatgaaattgatgagctgaatattttgcacgccaccatgctcgccatgcagcgcgctgtcgctggtctgcatattgcgccagaatatgtgctgatcgacggcaatcgctgtccggagctgcctgtgccgtcaatggccgtggtgaaaggcgacagccgcgtggcggagattagcgcggcgtctattctggcgaaagtcacccgcgacgcagaaatggcggcgctggatatcgtttttcctcagtatggctttgcgcagcacaaaggctatccaaccgcttttcatctggaaaagttggcccagtatggcgcgacggcgcaccaccgacgcagttttgcgcctgttaaacgcgctctgggacttgtgtcctga

SEQ ID NO: 39986 - DNA, 3483 bp, Salmonella typhi
atgtctgaaccacgtttcgttcacctgcgggtgcacagcgactactctatgatcgatgggctggcgaagaccgggccgctggtgaaaaaggcggcctcattaggtatgcctgcgctggcgatcaccgattttaccaacctctgcggtctggtgaagttctacggagcgggtcatggcgcgggcattaaacccatcgtcggggcggactttaacgttcacaacgaactgctgggagatgagctgactcatctgacggtactggcggcgaataatacgggataccagaacctgacgttgctgatctcgaaagcgtatcagcgcggctacggcgcggcaggcccgattatcgagcgcgactggctggtagagcttaaagaaggtttgatcctgctttccggcgggcgcatgggcgacgtaggccgctgtctgctacgcggcaaccaggcgctggtggaggagtgcgttgctttctatgaagcgcattttcccgatcgctacttcctggaactgatccgtaccggcagacaggatgaagagacctatctccatgctgcggttgagctggctgaggcacgtggtttgccggttgtcgcgacaaacgatgtccgtttccttgaaagcgatgattttgacgcccatgagattcgtgtcgcgattcacgacggtttcacgctcgacgatcctaaacgtccacgcaattattcaccgcagcagtatatgcgcagtgaagaagaaatgtgcgagctgttctccgatattccggaggcgctggaaaatacggtggagattgccaaacgctgcaacgtaacggtgcgtctgggtgaatatttcctgccgcagttcccgaccggcgatatgaccaccgaagattatctggtcaaaaaatcgaaagaggggctggaagagcgtctggctttcctgtttccggacgaagaagagcgcaaaaagcgtcgcccggaatatgacgagcgtctggatattgaactacaggttatcaaccagatggggttccctggctacttcctcatcgtgatggagtttatccagtggtcaaaagataacggcgtgccggtagggccgggacgtggttccggggccggttcgctggtggcctacgcgctgaaaattaccgaccttgatccgctggaatttgacctgctgttcgaacgtttcctgaacccggaacgtgtctcgatgcctgacttcgacgttgacttctgtatggagaaacgcgaccaggtgattgagcacgtcgcagacatgtacgggcgtgatgcggtatcgcagattatcaccttcggtacgatggcggcgaaagccgttatccgcgatgtgggccgcgtgctggggcatccgtacggttttgtcgatcgtatctcgaagctggtgccgcccgatccgggcatgacgctggcaaaagcctttgaagcggaaccgcaactaccggaaatttacgaggcggatgaagaggtcagagcgctgatcgatatggcgcgtaagctcgaaggcgtcacgcgtaacgccggtaagcacgctggcggcgtggtcatcgcgccgaccaaaattaccgactttgcgccgctgtactgcgatgaagagggcaagcatccggttacccagtttgataaaagcgacgtggaatatgccgggctggtgaagttcgacttcctcggtttgcgtacgctgactatcatcaactgggcgctggagatgatcaacaagcggcgggcgaagaatggcgagccaccgctggatatcgccgccattccgctggacgataaaaaaagcttcgacatgctgcaacgctcggaaaccacggcggtcttccagcttgaatcgcgcggtatgaaagacctgatcaagcgtctgcaacctgactgctttgaagatatgatcgcgctggtggccctgttccgtcccggcccgttgcagtcagggatggtagataactttatcgatcgtaagcacggtcgtgaagaactctcttacccggacgttcagtggcagcatgaaagcctgaagccggtactggagccgacctacggcatcattctgtatcaggaacaggtgatgcagattgcccaggtactttccgggtatactctcggtggcgcggatatgctgcgtcgtgcgatgggtaagaaaaagccggaggagatggccaaacagcgttccgtttttgaagagggcgcgaaaaagaacggtatcgacggcgaactggcgatgaaaatctttgacctggtggagaaattcgccggttacgggtttaacaaatcgcactccgccgcttatgcgctggtttcttatcagacgctatggctaaaggcgcactatccggctgaatttatggcggcggtgatgactgccgatatggacaacaccgagaaggtcgtcggcctggtagacgagtgctggcggatgggactgaaaattctgccgccggatattaactccggattgtaccatttccacgttaatgatgagggcgagatcgtctacggcatcggcgcgatcaaaggcgtcggcgaagggccgatcgaagcgatcatcgacgcgcgtaatcagggcggctatttccgcgaactgtttgatctgtgcgcgcggaccgacaccaaaaagctcaaccgccgggtgctggaaaagctgatcatgtccggggcgttcgaccgcctggggccgcaccgcgccgcgctgatgaactcattgggcgatgcgctgaaagccgccgaccagcacgccaaagcggaagctatcggtcaggcggatatgttcggcgtactggcggaagagccggagcaaatcgaacaatcctatgccagctgccagccgtggccggagcaggtggtgttagatggggaacgtgaaacgttggggctgtacctgacgggccaccctatcaatcagtatttaaaagaaattgagcgctatgtcggcggggtaaggctcaaagacatgcatccgacagaacgtggtaaagtcaccacggctgcggggctcgtgattgccgcaagggttatggtcaccaagcgcggcaatcgtatcggcatctgtacgctggatgaccgttccgggcgtctggaagtgatgttatttaccgacgcgctggataaataccagcagttgctggaaaaagaccgcatacttatcgtcagcggacaggtcagctttgatgacttcagcggggggcttaaaatgaccgcccgcgaagtgatggatattgacgaagctcgcgaaaaatacgctcgcgggcttgctatctcgctgacggacaggcaaattgatgaccagcttttaaaccgactccgtcagtctctggaaccccaccgctcggggaccattccagtacatctctactatcagagggcggatgcgcgtgcgcggctgcgttttggcgcaacgtggcgtgtctctccgagcgatcgtttacttaacgatctgcgtggcctcattggttcggagcaggtggaactggagtttgactaa

SEQ ID NO: 39987 - DNA, 960 bp, Salmonella typhi
atgagtctgaatttccttgattttgaacagccgatagcagagctggaagcgaaaatcgattctctgactgcggtaagccgccaggatgagaaactggatattaatatcgatgaagaagtccatcgcctgcgcgaaaaaagcgtagaactgacgcgcaaaatcttcgccgatctcggcgcatggcaggtagcccaactggcgcgccatccgcagcgtccgtacaccttggattatgtccgtctggcgtttgatgagtttgatgagctggcgggcgatcgcgcctatgctgatgacaaagccatcgtcggcggtatcgcgcgtctggaagggcgaccggtgatgatcattggtcatcagaaaggtcgtgaaaccaaagaaaaaattcgtcgtaactttggcatgccagcgccggaaggctaccgcaaagcgctgcgcctgatggaaatggctgaacgcttcaacatgccgattatcaccttcatcgacaccccgggcgcttaccctggcgtgggcgcggaagagcgtggtcagtctgaagctatcgcccgcaacctgcgtgagatgtctcgtctgaacgtaccggtcatctgcaccgtgattggcgaaggcggctccggcggcgcattggcgattggcgtgggtgataaagtgaatatgctgcaatacagcacctattccgttatctccccggaaggttgcgcctctattttgtggaagagcgccgacaaagcgccattggctgctgaagcgatgggcatcatcgcgccgcgtctgaaagagctgaagctaatcgattccatcattccggagccgctgggcggcgcgcaccgtaatccggaagcgatggcggcgtcgctaaaagcgcagctgctggaagatttagccgatctcgatgtgttaagcaccgatgatttaaaaaaccgtcgttaccagcgtttgatgagctacggttacgcctaa

SEQ ID NO: 39988 - DNA, 1317 bp, Salmonella typhi
atgggaaacacaacaatacaaacacagagttttcgtgctgtggatgcagagcaaagcaaaagcaagcgctacattattccattcgccttactttgctcgctattttttctgtgggccgtcgccaataatctgaatgacattttattaccgcagtttcaacaagcttttacgctaactaacttccaggccggacttattcagtcagccttttatttcggttatttcgtcattccaattcccgctgggattttgatgaaaaaactcagttataaagcagggattatcactggactttttttgtatgcttttggcgccgcattattctggcctgccgccgagataatgaattacacattatttttaattggcctgtttatcatcgccgccggtttaggctgccttgaaactgcggccaatccttttgtgacggcattaggtccagaaagcggcggacatttccggcttaatctggcgcaaacttttaactcctttggcgctattatcgccgttgtgtttgggcaaagccttattttgtctaacgtgccgcatcaatcacaagaagcgcttgataaaatgacgccggatcagcttagcgcctataaacacagcctggtgttatcggtacaaacgccatacatgattatcgtcgccatcgtattagtagttgcgctgctgattatgctgaccaaatttccggccctgcaaagtgacgatcatagcgatgctaaacaaagctctttcttatcttctctctcccgactcatccgtatccgccactggcgctgggcggtgctggcgcagttctgctacgtgggggcgcaaaccgcctgctggagctatctgatccgctacgccattgaggagatccctggaatgacgcccggtttcgccgccaactacctgaccggcacgatggtgtgcttctttatcggccgtttcaccgggacctggcttatcagccgcttcgcgccgcataaagtgctggccgcctatgccctgcttgccatgctcctgtgtctgatttccgcctttagcggcggacatatcggcctgctggcgctgacgttgtgtagcgcatttatgtcaatccagtacccaaccatcttctcgctgggtatcaaaaatctgggacaggacactaagtacggctcgtcttttatcgtcatgaccattattggcggcggtattgtcacgccagtaatgggcttcgttagcgacgccgcaggcaaaatcccgaccgccgaactggttccggcattgtgctttgccgtcatcttcatttttgcccgtttccgttcacaagcggcgacaaactga

SEQ ID NO: 39989 - DNA, 423 bp, Salmonella typhi
atgctaaaaaccatttcaccgttaatttccccgacactgctcaaagtgctggccgagatgggccacggggacgaaatcattttttctgacgctcactttcccgcgcatagcctgggcccgcaggtgattcgcgccgatggtcttagcgtcagcgatctactgcgggcaatcattccgctctttgagctggatagctacgccccgccgctggtgatgatggccgccgtagaaggcgacacgctcgaccccagcgttgaagcgcgttatcgcgatgctttgtcattagaagcgccgtgcccggatatcgttcgtatcgaccgctatgcgttttatgagcgggcgcaaaaagcgtttgcgatcgttatcacaggtgagtgcgcgaagtacggaaatattcttttaaaaaaaggggtaacgccgtaa

SEQ ID NO: 39990 - DNA, 948 bp, Salmonella typhi
atgcaaaaccggctcactatcaaagacattgcccgcctgagcggcgtagggaaatcaaccgtttcccgcgtgcttaacaatgaaagcggcgtaagcaaacgtacccgcgagcgtgtcgaagcggtgatgaatcaacacggtttctctccgtcccgctccgcccgtgcgatgcggggacaaagcgataaagtggtcgctattatcgtcactcgccttgattcgttgtctgaaaacctcgcggttcagaccatgctgcctgcgttttatgaacagggctacgaccctattatgatggaaagtcagttctcgccgatgctggtaatggaacatctgggcatgctcaggcgacgtaacattgatggcgtggtgctgtttggctttaccggcatcacagaagagttgatcgccccctggaaagcctcgctggtgctgctggcaagagatgcgcaaggttttgcctccgtctgttacgacgacgagggcgcgattcatatccttatgcagcggctgtatgagcagggacaccgcaacattagctttctgggcgttcctcatagcgatattaccaccggcaaacgtcggcatgacgcatacctggcgttttgcaaaaaacataaacttcatcccgtcgccgcccttcccggtcttgccatgaagcagggctatgagcatacggcaagtgtcatcatgccggataccaccgcgttagtctgcgccaccgatacgctggcgttgggcgccagtaagtatttacaggagcaacgtattgagacgctgcaactggcaagcatcgggaatacgccgctgataaaattcctgcatccggagatcgtcactgtcgatcctggctatgctgaagccggacggcaggcggctttgcagctgatcgaacagatcaatggccgctgcgatccgcgccggatcgtcattccttctaccctcgcctga

SEQ ID NO: 39991 - DNA, 2709 bp, Salmonella typhi
atgctaaaaaccattacccgccagctttttgcccggcttaatcgtcatttgccttatcgtctggttcaccgcgatccgctgcccggcgcgcagaccgcggtaaacgcgactatcccgccttcgctgagcgagcgctgtctgaaaatcgcggcaatggagcaggagacgctctggcgcgtttttgatacgcacccggagggattaaacgccgccgaggtgacgcgtgcgcgtgaaaagcatggcgaaaaccgccttccggcacagaaaccctcgccgtggtgggtgcatctgtgggtatgttatcgcaatcctttcaacattttactcacgattcttggcggcatttcttatgccacggaggatctgtttgccgcaggcgttatcgccctgatggtcggtatctcaacgctgctgaattttgtgcaggaagcgcgctcgacgaaagcggcggacgcgctaaaagcgatggtgagcaataccgctaccgtactgcgggttattaatgaaaatggcgaaaacgcctggctggaattacccatcgatcaactggtgcccggcgatattattaagctggcggcgggggatatgatcccggcggatttacggattatccaggcgcgcgatctgtttgtcgcccaggcgtcgctgaccggcgaatctctgccggtcgagaaagtcgccacgacgcgtgagccccggcaaaataacccgcttgagtgcgacacgctgtgctttatggggacgaacgtcgtgagcggaacggcgcaggccgtggtgatggcgaccggcgccgacacctggtttggtcaattggcggggcgcgtgtcggaacaagataacgagcagaacgctttccagaaaggaattagccgcgtcagtatgttgctgatccgctttatgctggtcatggcgccggtagtactgattattaatggttacacgaaaggtgactggtgggaagcggcgctatttgcgctctcggtcgcggtaggactcaccccggaaatgttgccgatgatcgtcacctctaccctcgcgcgcggggcggtgaagctctcgaaacagaaagttatcgtgaagcaccttgatgcgattcagaacttcggcgcgatggatattctgtgcaccgataaaaccggcacattgacgcaggacaaaattatgctggaaaatcatacagatatttccggtaagcccagcgagcatgtactgcattgcgcctggctgaacagccattatcagaccggtctaaaaaatttactggatacggcggtcctggagggagtagacgaaaccgccgcgcgtcagctctccggacgctggcagaaaatcgatgagattccgtttgattttgagcgtcgccggatgtcggtggtggtcgccgaagattcgaatgtgcatcaactggtctgcaaaggcgcgctacaggagatcctgaacgtgtgtactcaggtgcgccacaacggcgatattgtgccgctggacgacaatatgctgcgccgggtgaaacgcgttaccgacacgctgaaccgtcaggggctacgcgtggtcgccgtcgcgaccaaatacctgcctgcgcgtgagggcgattaccaacgtatcgatgagtctgacctcattctggaagggtatatcgcttttctcgatccgccgaaagagaccaccgcgccggcgttgaaagcgctgaaggcgagcggaattacggtgaaaattctcaccggcgacagcgagctggtagcggcgaaagtttgccatgaggttgggctggatgcgggcgatgtcgttattggcagtgatattgaaggattaagcgacgacgcgctggcggcgctggccgcccgtacgacgttgtttgcgcgtctgacgccgatgcataaagagcgcatcgtcactttgctcaaacgcgaggggcatgtggtcggttttatgggcgacgggattaacgatgccccggcgttgcgggcagcggatattggtatctcggtagatggcgcggtggacatcgcccgtgaggcggccgatattatcctgctggaaaagagcctgatggtgctggaagaaggcgtcattgaaggtcgtcgtactttttctaatatgttgaaatatatcaagatgacggccagctcaaatttcggtaacgtgtttagcgtgctggtagcgagcgcttttttgccgttcctgccaatgctgccgctgcacttgctgattcaaaacctgctgtacgatgtatcccaggtggcgattccgtttgataatgtcgatgaagaacaaattcaaaagccgcagcgctggaatccggcggatttggggcgctttatggtctttttcggtccgatcagctcgattttcgacattttgaccttttgtctgatgtggtgggtatttcatgcgaatacgccagaaacgcaaaccttgttccagtccggctggtttgtggtgggattactatcgcaaacgctgattgtgcatatgatccgtacccgtcgtctgccgtttattcaaagtcgcgccgcctggccgctgatggcgatgacgttgttggtgatggtcgtgggagtttcgttgccgttttcgccgctggcgtcttacctgcagttgcaggcgctgccgttaagctatttcccgtggctgattgctattctggcgggctatatgacgttaacccagttagtgaaagggttttacagccgacgttatggctggcagtaa

SEQ ID NO: 39992 - DNA, 228 bp, Salmonella typhi
atgaaaaagactgccgcaattatctctgcatgtatgctgacttttgccctgagcgcctgttccggtcctaattacgttatgcacaccaatgatggacgtagcattgtgaccgacggtaaaccccagaccgataacgataccggtatgatttcgtataaagacgctaatggcaacaaacagcagatcaatcgtactgacgtgaaagagatggtggctctggaaaactaa

SEQ ID NO: 39993 - DNA, 1365 bp, Salmonella typhi
atgagccataacgacactatcgtcgcccaggcaaccccaccgggacgcggtggcgtgggtatcctgcgtatttccggtctgaaggcgcgcgacgttgcgcaagaggtgctgggcaagctgccgaagccgcgctatgccgactacctgccgtttaaagatgttgacggcagcgcgctggatcagggtattgcgctgtggttccccggcccgaactccttcaccggtgaagatgtgctggagctacaagggcacggcggtccggtgattctggacctgctgttaaaacgtatcctgacgcttccaggcgtgcgaattgcccgaccgggcgagttctccgagcgagcgttcctcaacgataagctcgatttagcccaggcggaagccattgccgacctgatcgatgccagttccgaacaggcggcgcgttcggcgctaaactcgttacagggggcattttccgcccgcgttaaccaccttgtggaagcacttactcacctgcgaatctacgtcgaagcggctattgattttccggatgaggagatcgactttctctctgacggcaaaatcgaagcgcagctcaatggcgtcatcgccgatcttgacgccgtgcgcaccgaagcgcgccagggcagcctgctgcgcgaagggatgaaggtagtgattgccggacgcccgaatgccgggaaatccagcctgctgaatgcgctggcaggccgtgaagcggccattgtcaccgatatcgccggtaccacgcgcgacgtgttgcgcgagcacatccacatcgacgggatgccgctgcatatcatcgataccgccggactgcgcgacgccaacgacgaagttgagcgtatcggcatcgaacgcgcctggcaggagattgaacaggccgatcgagtgctgtttatggtggatggcaccacgacggacgccgttgaccctgccgacatctggccggactttatcgcccgtctgcccaaaaatctaccgattaccgtggtacgtaacaaggcggatatcaccggcgaaacgctgggtattagtgaagtaaacggtcactcactggttcgcctctcggcgcgtaccggcgaaggcgtcgacgtgttgcgtaaccacctcaagcagagcatggggtttgataccaatatggaaggcggcttcctggcccgccgccgtcacctgcaggcgctggcggaagccgctaaccatcttgaacagggcaaagcgcagctattaggcgcatgggcgggggaactgctggcggaagagttgcgcctggcgcagcaaagcttaagcgagattaccggcgagtttacctccgacgacctgctgggacggattttctccagcttctgtatcggtaaataa

SEQ ID NO: 39994 - DNA, 1647 bp, Salmonella typhi
atggattcgcaacgcaatcttttagtcatcgctttgctgttcgtgtctttcatgatctggcaagcctgggagcaggataaaaatccgcaacctcagactcaacagaccatgcagacaacgaccaccgcagcgggtagcgccgccgaccagggcgtaccagccagtggccaggggaaaatgattacggtgaaaaccgatgtgcttgatttgactatcaacacccgtggtggtgatgtcgagcaggccttgctcccggcttacccgaaagaactgggttccaacgaaccgttccagctgctggaaaccaccccgcagtttatctatcaggcgcaaagcggcctgacaggccgcgacggcccggataacccggcgaacggcccgcgtccgctgtacaacgtcgagaaagatgcgtttgtactggccgacggtcagaacgaactgcaggttccgatgacttatactgacgccgcaggcaacacgtttaccaaaacgtttgtctttaagcgtggcgattatgcggttaacgtgaactatagcgtgcagaacaccggcgaaaaaccgctggaagtctccacctttggtcagttaaaacaatccgtcaacctgcctcctcatcgcgacaccggcagtagcaactttgcgttgcatacgttccgcggcgcagcgtactccacgccggatgagaagtatgagaaatacaaattcgacaccattgccgataacgaaaacctcaacgtcagctccaaaggcggttgggtggcaatgttgcagcagtatttcgctaccgcatggattccgcgtaacgacggcaccaacaatttctacaccgccaatctgggtaacggcattgtcgctatcggctataaagcgcagccggtactggtacagccaggccagactggcgcgatgaccagcaccctgtgggtcggcccggaaattcaggataaaatggcggctgttgcaccgcacctggatttgaccgtggactacggctggttgtggttcatctctcagccgctgttcaagttgctgaagtggatccacagctttgtgggcaactggggcttctccattatcatcattacctttatcgttcgcggtatcatgtacccgctgaccaaagcgcagtacacgtcaatggcgaagatgcgtatgctgcagccgaaaattcaggcgatgcgcgaacgtcttggcgatgataaacagcgccaaagccaggagatgatggccctgtacaaagcggagaaggttaacccgctgggcggctgcttcccgctgatcatccagatgcctatcttcctggcgttgtactacatgctgatgggttccattgaactgcgtcatgcgccgttcgcgctgtggattcatgacctgtctgcacaggacccgtactacattctgccgatcctgatgggcgtaacgatgttcttcattcagaagatgtcgccgaccaccgtgaccgacccgatgcagcagaagatcatgacctttatgccggtcatctttacagtgttcttcctgtggttcccgtcaggtctggtgctgtactatatcgtcagcaacctggtcaccatcattcagcagcagctgatttaccgtggtctggagaagcgtggcctgcatagccgcgagaagaaaaaatcctga

SEQ ID NO: 39995 - DNA, 1401 bp, Salmonella typhi
gtgtcactttcgctttggcagcagtgtcttgcccgattgcaggatgagttaccagccacagaattcagtatgtggatacgcccgttgcaggcggaactgagcgataacacgctggctttgtatgcgccaaaccgttttgtgctcgattgggtaagagataagtacctcaacaatatcaatggattactcaacacattctgcggcgcggatgccccacaactgcgttttgaagtgggaacaaagcccgttacgcaaacgctaaaaacgcctgtgcataacgttgtcgcgcctacgcagacaacgacggcgcaaccgcagcgcgtagcgcccgcggcccgttcgggctgggataacgtaccagcgccggcggagccgacctaccgctccaacgtcaatgttaagcatacatttgataacttcgtcgaaggtaaatccaaccaactggcgcgcgcggcggcacgtcaggtggcggataatcctggcggcgcctataacccgttattcctctatggcggcaccggtctgggtaaaactcacctgctgcacgcggtgggtaacggcattatggcgcgcaaacccaacgcgaaagtcgtgtatatgcactccgagcgctttgtgcaggacatggtaaaagccctgcaaaataacgccatcgaagagtttaaacgctactaccgctccgttgacgcattgctgatcgacgatattcaattcttcgccaataaagaacgatcccaggaagagtttttccacacctttaacgctctgctggaaggcaatcagcagatcattttgacgtcggatcgctatccgaaagagatcaacggcgttgaggatcgtctcaagtcccgctttggttgggggctgacagtggcgatcgaaccaccagagctggaaacccgcgtggcgatcctgatgaaaaaagcggacgaaaatgatattcgtctgccaggcgaagtagcgttctttatcgccaagcgtctacgctctaacgtacgtgaactggaaggcgcgctgaaccgggtgatcgccaatgccaactttaccggccgggcgattactatcgactttgtgcgcgaagcgctgcgcgatttactggcgttgcaggaaaaactggtcaccatcgacaatattcagaagacggtggccgagtattacaaaatcaaaattgcggatctgctttctaagcgtcgatctcgctcggtagcacgtccgcgccagatggctatggcgctggcaaaagagctcaccaaccacagtctgccggaaatcggcgatgcgtttggcgggcgcgaccacactaccgtacttcatgcctgtcgtaaaattgagcaactgcgtgaagaaagccacgatatcaaagaagatttttcgaatttaatcagaacattgtcgtcgtga

SEQ ID NO: 39996 - DNA, 1293 bp, Salmonella typhi
atgaccactctcacgttgaatacctcgttactctcttctcgccgtattctggctgcctttagcggtggcctggattctacggtgcttctgcatcaactggtgttgtggcgagaacgccatcctgacgtcacgctgcgtgctatccatattcatcacggtttaagccctcatgctgatagctgggtgcggcattgcgaaaccgtatgcgaacgctggcaggttccgctggtagtggagcgggtgacgttggcggataatggcctgggtatcgaggcccatgcgcgtgaagcgcgctaccgggcgttcgcacagacgctattgcctggcgaagtgctggcaaccgcgcagcaccttgacgatcagtgtgaaacattcctgctggcgttaaagcgcggcagcggtccggccggactttccgcgatgggagaacgctcgccttttgccggaactctgcttcttcgcccgctgttgagagaaacgcggaagacgctggaacagtgggctgtgcgtcatggcttatgctggattgaagatgaaagcaatcaggatgacgcctacgatcgcaattttttacgcctgcgcgcgcttccgctcttacagcagcgctggccgcattttcctgcggcggtagcccgtagcgcgacgctctgcgccgagcaagaaaggctgctggacgagcttctggccagcgatcttacggactgtatcacgacggagggaacattgcggctctctccattaatgtcgatgagcgatgtgcggcgggcggcgattttgcgtcgctggctggcgatgcgtaatgcgccgatgccctctcgcgacgcgctggaacgtatctggcaggaggtggcgctggcgcgcgacgatgcctctccctgtttacgctttggcgatcacgagattcgccgttatcagtcgcaactgtggtggattaaaaccgtagccggacaacacgaaacgacggtcgcctggcccgtctggcaaacaccgctggcgctgcctgccggcttagggacggtacagctcgttcctggcggcgaactgcgccgaccgcgagaggaagaatccgtcagcattcggtttaaagcgccagggttgctacacattgtgggacgtcacggcggacgtaaattaaagaaaatctggcaggagcaggggatcccgccctggcgacgagacaccacgccgctgttgttttacggcgaaacgctgattgcggctgcgggtgtttttgtgacgcgtgagggagcagcagaagataaagaaggggtgagtctggtttggcatgcctga

SEQ ID NO: 39997 - DNA, 1101 bp, Salmonella typhi
atgaaatttaccgttgaacgtgaacatttattaaaaccgcttcagcaggtcagcggcccgctgggcggtcgtcctacgctgccgattctcggtaacctgctcctccaggtagcggacggtacgctttctctgaccggcaccgatcttgaaatggagatggtcgcgcgcgttacgctttctcagccgcatgagccaggcgccactaccgtgccggcgcggaaattctttgatatctgccgcggcctgccggagggcgcggagattgccgttcagttggaaggcgatcggatgctggtgcgttctggccgtagccgcttctcgctgtctacgctgcctgccgccgatttcccgaatcttgacgactggcaaagcgaagttgaatttacgctgccgcaggccacgatgaagcgcctgattgaagcgacccagttttcgatggcccatcaggatgtgcgctactacttaaacggtatgctgtttgaaacggaaggtagcgaactgcgcactgttgcgaccgacggccaccgtctggcggtgtgctcaatgccgctggaggcgtctttacctagccactcggtgattgtgccgcgtaaaggcgtgattgaactgatgcgtatgctcgacggtggcgaaaacccgctgcgcgtgcagatcggcagtaataatatccgcgcgcacgtcggcgactttatctttacctcgaagctggtggatggtcgtttcccggattaccgtcgcgtattgccgaagaatccggataaacatctggaagcgggctgcgatatcctcaagcaggcgtttgcccgcgcagcaatcctctcgaatgagaaattccgcggcgtgcgtctgtacgtcagtgagaatcagctcaaaatcaccgccaataacccggaacaggaagaagcggaagagattctggacgtgagctatggcgggacggagatggaaatcggctttaacgtcagttacgtgctggacgtgctcaatgcgctgaagtgcgaaaccgtgcgcattatgctgacggattccgtatccagcgtacagattgaggatgcggcgtcacagtcggctgcctatgttgttatgccaatgcgcttgtaa

SEQ ID NO: 39998 - DNA, 933 bp, Salmonella typhi
atggaaaacaaacgcacactggtcgtcgcgctgggcggcaatgcgctgctcaaacgcggcgaaccgctggaggctgatattcagcgtaaaaatatcgaactggcggccagaaccatcgcccagcttacccggcaatggcgcgtagtgttagtgcatggcaacggcccacagatagggctgctggcgctacaaaatagcgcctacgctaacgttacgccctacccgctcgatattctcggtgcggaaagccagggcatgattggctacatgctgcaacaggcgctgaagaatcatctgccggagcgtgaaatcagcgtcctgctcacccaggtcgaagtcgatgccaacgacccggcattcctcaatccaaccaaatatatcggccccatttacgacgaagcgcaggcccgtgcgttacaggcagaaaagggctgggtattcaaagccgacggtaacgccttccgccgcgttgtgccctcctcgcagccgaaacgcattgtggaaaacgatgccatccgcgcgctgattagccgcgatcacctggttatctgtaacggcggcggcggtgtgccggtcgtggaaaaagccgatggctaccacggtatcgaggcggtgatcgacaaagatctgtccgccgccctgcttgccagccaaattcacgccgacgcgctgctcattctgaccgatgtcgacgcggtgtatctcgactggggcaaacccacccaacgcccgctggcgcaggttacgccggagctgcttcgtgaaatgcagttcgacgccggttcgatgggcccgaaagtgaccgcctgcgctgagtttgtcagccattgctgcggcattgccggaatcggctcgctggcggatgggcaagccattctcgcgggcgagaaaggtactttgattcggtgtgaaaccgccgacgttgacgcataa

SEQ ID NO: 39999 - DNA, 1254 bp, Salmonella typhi
atgtcgggagccaattcagcaatcagccgtcgccgtttactacaaggcgcgggcgccatgtggctattaagcgtgagccaggtcgggctggctgccgtaagccaggtcgttgcggtgcgtatctggcctgcgtccagctatacccgcgtcacggtagagtcgaatcgtctgctgaaatataaacaatttgccttaagtaacccggaccgcgtggtggtagatattgaggatgtgaatctgaactcggtgcttaaaggcattggcgcgcagattcgcagcgacgatccgtatatcaaatccgcaagggtagggcagtttgatcctaagactgtgcgtatggtctttgagctaaaacaaaacgtgaagccgcagctatttgcgctggcgcctgtggcaggctttaaagaacgtctggtgatagatctttatcctgctaatgcgcaggatatgcaggatccgctgctggcgctgctggaagactacaataaaggcgatctggataaacaggtgccgccttcgcaaagcgggccgcagcccggtaaagcggggcgcgatcgtcccattgtcattatgcttgatccgggacacggcggcgaagaccctggcgcgataggcaaatacaaaacgcgtgaaaaagacgtggtgctccagatagcccgccgcctgcgcgcgttgatcgaaaaagaaggcaacatgaaggtctatatgacgcgcaatgaagacatcttcattccgttaaaagtccgggtggcgaaagcgcagaaacagcgcgccgacctgtttgtctctattcatgcggatgccttcaccagccggcagcctagcggttcatccgtattcgcgctatcgactaaaggcgccaccagtactgcggcgaaatatctggcgcaaacgcagaacgcctcggacttaattggcggcgtgagcaaaagcggtgaccgttatgtcgaccatacgatgttcgatatggtgcaatcgctgaccattgccgatagtttgaaattcggtaaagcggtgttgaagcagcttggtaaaattaatgacctgcataaaaacaaggtcgagcaggcggggtttgcggtgttaaaggcgcccgatattccgtctattctggtcgagacggcgtttatcagtaacattgaagaagaacgcaagctcaagaccgcgacgttccagcaacaggtcgcagagtcgattctggcgggcattaaagcctattttgccgatggggcgacgctggcgagaagaagttaa

SEQ ID NO: 40000 - DNA, 2415 bp, Salmonella typhi
atgtcgaattcttatgactcctccagtatcaaagtcctgaaagggctggatgcggtgcgtaagcgcccgggtatgtatatcggcgacacggatgacggcaccggtctgcaccacatggtattcgaggtggtagataacgctatcgacgaagcgctcgcgggtcactgtaaagatatcgtcgtgactattcacgccgataactccgtgtccgtaacggatgatggccgtggcattccgaccgggattcatccggaagaaggcgtctcggcggcggaagtgatcatgaccgttctgcacgcgggcggtaaatttgacgataactcctataaagtctccggtggtctgcacggggtgggcgtctcggtagtcaacgctctgtcgcaaaaactggagctggttatccagcgagatggcaaaattcaccgtcagatctacgagcacggcgtgccgcaggcacccctggccgtcactggcgataccgataaaaccggcacgatggtacgtttctggccgagccacgaaaccttcactaacgtcactgaatttgaatatgagatcctggcgaaacgcctgcgtgaactgtcattcctgaactcaggcgtttccatccgcctgcgcgacaagcgcgatggcaaagaagatcatttccactacgaaggcggcatcaaggcgtttgttgaatatctcaacaagaataaaacgccgatccacccgaatatcttctatttctccaccgaaaaagacggtatcggcgtggaagtagcgctgcagtggaacgatggtttccaggaaaacatctactgctttaccaacaacattccgcagcgcgacggcggtactcacctggcaggcttccgtgcggcgatgacccgcacgctgaacgcctacatggacaaagaaggctacagcaaaaaagccaaagtcagcgccaccggcgacgatgcccgtgaaggtctgattgcggtggtttccgtaaaagtgccggacccgaaattctcctcacagaccaaagataagctggtctcttccgaggtgaaatcggcggtagaacagcagatgaacgaactgctgagcgaatacctgctggaaaacccatctgacgcgaaaatcgtcgtcggcaaaattatcgacgccgcgcgtgcgcgtgaagcggcgcgtcgcgcccgtgaaatgacccgtcgtaaaggcgcgctggatttagccggtctgccgggcaaactggcggattgtcaggaacgcgacccggcgctgtccgaactgtacctggtggaaggggactccgcgggcggctctgcgaagcaggggcgtaaccgcaagaaccaggcgattctgccgctgaaaggtaaaatccttaacgtcgagaaagcgcgcttcgacaagatgctttcctcccaggaagtggcgacgctgatcaccgcgctgggctgcggtatcggtcgcgacgagtacaacccggacaagctgcgctatcacagcatcatcatcatgaccgatgcggacgtcgacggctcgcacatccgtacgctgctgttgaccttcttctatcgtcagatgccggaaatcgtcgagcgcggccacgtttacattgcccagccgccgctgtacaaagtgaagaaaggcaagcaggaacagtacatcaaagacgacgaagcgatggatcagtaccagatttccatcgcgcttgacggtgcgactctgcacgcgaacgctcatgcgccagcgctatccggcgaagcgttagaaaaactggtctctgaatataacgccacgcagaaaatgattggtcgtatggagcgtcgcttcccgaaagcgctgctcaaagagctggtgtatcagccaactctgaccgaagccgatctttctgatgagcagactgtaacgcgttgggtgaatgcgctgattaccgagctgaatgagaaagagcagcacggcagtcagtggaagttcgatgttcatactaatacggaacagaatctgttcgagccgatcgttcgcgtgcgtacgcatggcgtggataccgattatccgttggatcacgagtttgtgaccggcgcggaatatcgtcgtatctgcacgctgggcgagaagctgcgcggtctgattgaagaggacgcgttcatcgaacgcggcgagcgtcgccagccggtaaccagcttcgagcaggcgctggagtggctggtgaaagaatcacgtcgcggtctggctatccagcgttataaaggtctgggtgaaatgaacccggatcagctgtgggaaaccaccatggacccggaaagccgccgtatgctgcgcgtgaccgtcaaagatgcaattgctgccgaccagctgttcactacgctgatgggtgatgccgttgagccgcgtcgtgcctttatcgaggagaacgccctgaaagcggcgaacatcgatatttaa

SEQ ID NO: 40001 - DNA, 813 bp, Salmonella typhi
atggctattaaactcattgctatcgacatggatggcacccttttgctgcccgatcacaccatttctccggcggttaaaaacgccattgccgctgcgcgtgaaaaaggggtaaacgtggtgctgaccacaggccgtccgtatgcgggtgtgcacagctatctgaaagaacttcatatggaacaacccggcgactactgcatcacctacaacggggcgctggtgcagaaagcaggggatggcagtacggtagcgcaaacagcgctcagctatgatgactaccgttatctggaaaaactatcccgtgaggtgggttctcacttccacgcattagatcgaaatacgctttataccgctaaccgcgatatcagctactacacggtgcatgagtcgtatgtggcgaccattccgctggtattttgtgaagcggagaagatggacccgaacactcagttcctgaaagttatgatgatcgatgagcctgccgttctcgaccgagcgattgcgcgtataccggcagaggtgaaggaaaagtataccgtgctgaaaagtgcgccgtacttccttgaaatcctcgataaacgggttaataaaggcaccggcgtaaaatcactggccgaggcgctgggtattaagccagaggaggtgatggcgattggcgatcaggaaaacgacattgcgatgatcgaatacgccggtatgggcgtggcaatggacaacgccattccgtcggtcaaagaggtggctaactttgtgactaaatcgaaccttgaagatggtgttgcctgggcgattgaacaacatgttctgtcctga

SEQ ID NO: 40002 - DNA, 1836 bp, Salmonella typhi
atgacaatccagaagcggttgctggaggccgttgaacaaaaactcttacggcccattgatgcccagtttgctttaaccgtcgccggtaacgacgatcccgccgtgacgctggcggcagcgctgcttagtcatgacgcaggtgaaggtcacgtgtgtctgccgttgtcgcgtttaacgttaacggaggaggcgcatcccttactggtcgcctggataagcgaaacggctacgccaatcgactggaaaaagcggttactggcgtctgcggcggttagctgcggcgatagccccgcgccgttaattctgtgcggcgatcgcctctacctgaatcgcatgtggtgcaacgagcgtacggttgcgcgcttttttaacgaggttaaccaggccatcgccgtagatgaagatcagttatcccgtattctggacgcgctattccctccgacagacgaggtgaactggcaaaaggtggccgccgccgtagcgctaactcgccgtatctccgtgatttcaggcggtcccggcaccggtaaaaccaccaccgtcgcgaagctgctggcggcattaattcaaatggcggatggcgaacgttgccgtatccggctggcggcgccaaccgggaaagcggccgcacgcctgacggagtcgctcggcgcggcgttgcgtcagcttcctcttaccgatgcgcagaaaaagcgtataccggaggacgccagtacgctgcaccgactgctgggcgcacagcccggcagccagcgattacgccatcatgcgggcaacccgctgcatctggacgtgctggtggtcgatgaggcatcaatgattgatttgccgatgatgtcacgtttgattgacgctctgccgccgcacgggcgggtcatttttcttggcgatcgcgatcagttggcatccgttgaggcgggcgctgtgttgggcgatatttgcgcctatgtcaacgcagggtttacggcggaacgcgcccgacagctaagtcgactcactggtagcgccattccggcgggggccggaacgcaagccgcgtctttacgcgatagcctctgtttgttgcaaaagagctaccgtttcggcagcgattctggcatcggcaagctggcggcggcaattaactgtggcgacaggtcggcaatccaggctgtttttcagcaggggtttagcgatatagagaagcgtacattgcaaagcagcgacgattatgccgggatgctggatgaagcgctggcgggctatgggcgctacctgcggttgctgcatgaaaaagcggcgccggaggcaatccttcaggctttcaatgagtatcaactgctttgtgcgctgcgcgaaggcccatttggcgtgaggggactgaatgaccgcattgagcaggcgatggtgcagcaacgaaaaattcagcggcatccgcactctcgctggtatgaagggcgtccggtaatgattgcgcgcaacgatagcgcgttggggctatttaacggcgatattggtattgcgctcgatcgcgggcaggggttacgcgtctggtttgtgatgccggacggcacgatcaagtccgttcagcccagccgtctgccggaacatgatacaacctgggcgatgacggtacataaatcacaggggtctgaatttgatcacgccgcgctgattttacccagccaacgttcgccggtcgtgacgcgggagctggtgtataccgctgttacgcgggcgcggcggcggttatcgctgtatgccgatgaacggatcctggcaggcgcgattgtgacgcgaacggaacggcgcagcgggttagccaccttatttgatgaagtcagtcgtatcggataa

SEQ ID NO: 40003 - DNA, 1005 bp, Salmonella typhi
atgtctacgttttaccaaaaaccttttttaaagttacttgatttcaccgccagtgaactcactgctctgttgcagcttgctgccaaactgaaagccgataagaaaaacggtaaagaagaacaaaagctggtgggtaaaaatattgcgctcatcttcgaaaaagactcgacccggacacgatgctctttcgaagttgccgcatacgatcagggggcgcgcgtgacgtacctgggttccagcgggagccagatcggtcataaggagtccatcaaagatactgcccgcgtcctgggccggatgtttgacggtattcagtatcgaggatatggccaggagatcgtcgaaacgctggctgaatattccggtgtgccggtatggaacggtttaaccgatgagtatcacccaacgcaattactggcggatctgctcaccatgcaggaacatctgccgggtaaagcctttaacgagatgacgttggtctatgccggagacgcacgcaataacatgggtaactccatgctggaagccgccgcgttaacaggattggatctccgtctggtcgcgccaaaagcctgctggccgcaagccgcgttagtggcggagtgcagcgccatggcgaaaaagaacggcggcgccatcaccctgaccgaagatattgcctcgggcgtaaaaggcgcggattttatctataccgatgtttgggtctctatgggcgaacccaaagagaaatgggcggagcgtattgccctgctgcgtgattatcaggtcaacagccagatgatggcgttaaccggcaatccgcaggttaagttcctgcattgtctgcctgcgttccatgatgacgaaaccacgctcggcaaaaaaatggccgaagagtacggtttacatggcgggatggaagtgaccgacgaggtttttgagtctgcggccagcattgcctttgatgaagcggaaaaccgaatgcataccatcaaagcggtaatggtagcgacgctgtctaaataa

SEQ ID NO: 40004 - DNA, 765 bp, Salmonella typhi
atgaattacccgcaaatactctctccggtgcttaatttcctgcattgcccgacgccgcaggcgtggattgtccaggcccgcgatccgcaaaatcttcctcttctgcttaccgatcacttgatctgcgaactgaaggctgcgcaaaccgcgttgctgttggtgcgtaaatatgtcgccgataaatcgggcgccgacgcgctgctcgcctggctgcaaccttacgaggcgttcgcgtttcgtcaggggccggagccggattttgttgccctgcataaacagattagcaaaagcgccatgccgcaaactgatgacccctggggtcgtcagcttatcgaccgtatggtgttattgattaaagaggagttgcaccatttttggcaggtacgcgaggtcatgcaggccagaaacattccttatgtgaaaatcaccgccagccgctacgcaaaaggaatgttgaaagcggtacgcacgcacgaaccgctcaccttaattgataagctgatttgcggggcgtatatcgaagcccgctcctgcgaacgttttgccgctctggccccctggctggatgaggatttacagacgttttatctctcgcttctgcgctccgaagcgcggcattatcaggattacctggcgctggcgcagcagatttccgccgaggacatttctgcgcgcgtgcgctattttggcgacgtggaagctgaccttatcttgtcgccagaccgcgagtttcgttttcatagcggcgtgccagccgccggataa

SEQ ID NO: 40005 - DNA, 2736 bp, Salmonella typhi
atgtcaacgccttcactgacccacagattatggctggccttcgctctgatggcggcactcaccctgctcagcaccgtgatcggctggataagcctgcgcgtcattagtcaggtggagcaaaccaatacgcaagcgctgctccccacgatgaatatggccaggcagttaagcgaagccagcgcttacgagctcttttccgcgcaaaatctgaccaatgccgacagcgagggcgtttggctggcgcaggggaagatgctgaaagcgcaaagccttaaaattaaccatcttttgcaggcattaagcgagcaggggtttaatacctcggccatcgcccggcaagaaaaagagattgcgcaaacgcttgggcagcagggaacgctggtcggtgaaattctcacgctgcgcgcacagcaacagcagttaagccgccagattgcggaggcggcggaaagcattgccgcccaggctcacggtcaagccaataatgcagcgacatctgcgggcgccacccaggccggtatttacgatcttatcgaaagcggtaaaggggatcaggctgaacgcgcgcttgaccgactgattgatatcgaccttgagtatgtgaatcagatgaatgagttgcgggtcaatgccctgcggtttaagcagctcattgtgaccttaaaagacgcgcaagggctgagcgatgccgaggaaaccgatgaaaaacttaatcagttggttaaaattttatcccgccgccagcagcgtatagaagatcctaccgttcgcgcccaaatcgccgacgcgctggggaaaataaaccagtacacgacactggttaccctgtttcgtaaggaaaacgccatccgcgaccagcttcaaacgcttatggccaataacctctttcagtttacccgcttcagtacggaagtgtcgcagttggtgaacgccatcgaaaaacgaaacgaggctgggttagcgcgtcttacacacgccagtcagcgtgggcaaatagggttagtgatcttaggtatcctggcgctgtgctcattaagttttattctttggcgagtggtttaccgttccgtatcccgcccgctggcgcaacaaacgcaggccttacagcggctactggagggcgatattgactcgccgtttccggaggcggctggcgtcagcgaactggataccatcagccgtctgatggaagcgtttcgcgccaacgtgcgcaaattgaaccgccatcgtgaggatttggcggaacaggtgcgatcgcaaacggcggagcttcatgcgctggtgctggaacaccggcaggcgcgcgccgaagcggaaaaggccaacgaggcgaaatcgacgttccttgccgccatgagccatgaaattcgcacgccgctttacggcattctcggtacggtacaattgctggccgataaaccgctcatggcaaactaccgcgacgatttacaggccattaatgattcaggcgaatcgctactggcgattcttaacgatattcttgattactcggcgattgaagtaggcggcaccaacgtttccattagcgaggaaccgtttgaaccgcgacaattgttgaatagcgcgctgcatttaatgcacagccgcgtgcaggtggcgctcatcaccgactttagcgagcaactcccttccacgctacaaggcgatccgcgccggatacgtcaaattgtgattaatcttttaagtaatgcggcgaaatttaccgatcgcggcagcatagtgctgcgcacgttttgcgacgatcagagctggtttattgaggttgaagataccggatgcggtatccctgaagcgaagctgacggctattttcaaaccgtttgtgcaggcgacaggatgccggggcgggacgggcctggggctggctatcagcgccagcctggcagaggcgatgggcgggacgctaaccgtcaccagtacgcttcatgttggcagttgttttcgcttacaactgccggttcgccaccccaaacctgcaagcaaaagtgcgttcagggaaccggtaaatcttaacggactacgcctgttgctgattgaagataatatgctgacgcagcgtattaccgctgaaatgctcacgggtaaaggggtgaaggtctcagtagctgaaagcgcgaatgacgcgctacgctgtttagccgaaggcgagccctttgatgtggcgctggtggattttgatttaccggattatgacggcttaaccctggcgcagcagttgatgagcctgtatcccgccatgaaacgcattggttttagcgcgcatgtgatagacgataatcttcgtcagcgtaccgccggtcttttctgcgggattattcaaaagcccgttccccgcgaggagctttaccgcatgatagcgcactatttacagggcaaatctcacaacgcgcgggtgatgttgaatgaacatcagcttgccggcgatatggcgtctgtcggcccggaaaagctccggcaatgggtcgccttattcaaagacagcgcgctgcctttagtcgaggagatcgaggcggcgcgcgccatgaatgacgacgttaacattaagcggctggcgcataaattaaaaagcggctgcgccagcctggggatgacgcaggcaaccgaagcctgtcgggagctggaattgcaaccgcttagcgatatagatattaaaactatcgtgacgcagggagtgacggcgctcgacgcatggatagccggtcatccttcgccatga

SEQ ID NO: 40006 - DNA, 516 bp, Salmonella typhi
ttgagccatattatgaataatgtcgcctcgccaacgctcacggtgcaccgaatcactaccgccgacaatgccgctattgcccgtgtcatccgtcaggtttcagcggaatacggacttaccgccgataaaggttataccgttgccgaccccaatctggatgaactgtatcaggtttatagccaaccgggcgcggcctactgggtggtagagcaaaacggttgtgtggtgggcggcggcggcgtggcgccgttatcctgtagcgaaccagacatttgtgaactgcaaaaaatgtattttttaccggtaattcgtggtcaggggctggcgaaaaagctggcgctgatggcgctggatcatgcccgtgaacagggttttaaacgctgctatctggaaacaacggcttttttacgcgaggcgattgcgctatacgaacgtttaggatttgaacatattagcgaaccgctcggctgcaccggacatgtcgattgcgaagtgaggatgttaaaggatctctga

SEQ ID NO: 40007 - DNA, 1041 bp, Salmonella typhi
atgcgcacgcttatttcgttcttttttttgataatcatcgtctcgaatgtagaaacggcgtcagccgaaaccgggttgctacactggacgcgcgccgatcgggcgattccctggcggcaaacgtcagtcaatgcgagtaaaccctggaaactgtgcgcattataccccagcctgaaagattcttactggttgtccgtcaactacgggatgcaaaaagcggccaaattgtatggcgttgatttaaaagtgctggaagcgaatggctatcggcaactggcgacgcaacaacagcaaatgacgcagtgccgggagtggggcgccgacgctattctgcttggcagcagtaccgatcgtttcccggagctggaacgatatgccggtaatgtgccggttattgaactggtgaacatgattcacgatgccagcgtcgcaacccgcattggtctgccgtggtttcagatgggttatctgccgggacgtttcctggtgcagtggagcaaaggaaaaacgcttaacgttttactcttcccggggccggaagaagccggcggcagtcaggagatggtggcgggttttcgtcaggcaattaaaggcagcgccatcaacattgtggatatcgcctggggcgataacgacattgaagtgcagcgaaacttactccaggaaatgctggaacgccatccggacgccaatgtggtcgccgggtcggcgatagcggcggaggcggcgatgggcgaagggcgaaatttgacgactccgctcacgatcgtctcattttatctgacgcatcaagtttatcgcggtttaaaacgcggccatatcctgatggcgctcagcgatcagatggcctggcagggagaattagcgataacgcagtcgattaaggtcttacaggggcaaccggtgcctgaaaatatcagcccgccggtacttattttgacgcataacaacgccgacagcgcgcgcgttcgccgttcgctatcgcctccgggatttcggcccgtctatctgtatcaatacacctccgaggctaaaaagtag

SEQ ID NO: 40008 - DNA, 1188 bp, Salmonella typhi
atgaataacgttatcagtagtaaagataaccataatcacacgttggtgtttacaggcaagggcggaaagtattttgttatttgccttgtgaatttcttgttgacgtgtatcacgtttggaatctatgcgccgtgggcgatggtgaaatgtcgacgttatatttatactaatatgacgctaaacaatcagccttttgcttacaaagccacgggcggcgcattatttattagtgtgttgttagtttttattatttatattgttagcctctcttttattgaacacggtcatcccggtctcggttttacgctattcggcttattaattgcgattattccttttatggcggtgaaaggattacagtatcaggcgatgatgacttcgcttaatggcgtacattttggattccagtgttccatgcggcgcgcctggtggtacatgttcgctcttccggtactcctgatggtggcgctttatattgttctttatattatctcactggtaaccatcgccgtcggcggtttagtgttcaatatcgtttttctcggtttgctggctattattgggataggggtcattaacggtattacctacagcaaatggatgaccttgtttggcaatggcgcaaactttggcattcatcgtttctcgattcaggttaatgttaaaacgtgcatcagagggtgcgtgttggcaatgttgaccctttttccttttgctgtcgtgattggttatctaatcgcgccggtgttcaccgacatgattcttttgagtatgatggggaatgcgcaggcaggaggggcgcttattctgcaatattatggccagataatggcatgttatttcctctattttctcgcgattattgtggtaaccagttacttatatgtggcgttacgcaacctgtttttaaacaatttgtcactggcgaacgattcgattcgttttcattcctctgtcactgcacacggtatgctgtggcggttactggtggtgtttgtgatttccggcgtgaccttagggctggcttatccgtggttgaaaatttggctggtgagctggctggcgcagaatacacaggtccagggcgatctggattcgcttgagttaaccaatgatgagaagccgctggaaaacagcccgctaatgtggatttctcgtggcatcatgccttacttcccgtttatctga

SEQ ID NO: 40009 - DNA, 1719 bp, Salmonella typhi
atgcgtactagccaatacctgctctccactctgaaggagacacctgccgacgccgaggttatcagccaccagctgatgctgcgcgccgggatgatccgcaagctcgcctccgggttatatacctggctgccgaccggcctgcgcgtcctgaaaaaagtcgaaaacatcgtgcgtgaagagatgaacaacgccggtgctatcgaggtgtcgatgccagtcgttcagccagccgacctgtggcaagagagtggtcgttgggaacagtacggtccggaactgctgcgttttgtcgaccgtggcgagcgtccgttcgtactcggcccgacccacgaagaagttatcaccgacctggtgcgtaatgaactcagctcttataagcagttgccgctgaacttcttccaaatccagaccaaattccgtgatgaagtgcgtccgcgctttggcgtgatgcgttcgcgcgaattcctgatgaaagatgcttactctttccacacctctcaggagtcgttgcaggaaacctatgacgccatgtacgccgcgtatagccgtatcttcagccgtatggggctggatttccgcgcggtacaggccgataccggttctatcggcggcaacgcctcgcatgaattccaggtgctggcgcaaagcggcgaagacgatatcgttttctctgatgtttctgattacgcggctaacattgaactggcagaagctatcgcgccgcaaacaccgcgcgcagcggcgacgcaggaaatgactctggtcgatacgccaaatgccaaaaccatcgcggagctggtggaacaattcaacctgccaattgaaaaaacggtaaaaacgctgctggtgaaagcggtgaaagacagcaagtctccgctggtggctctgctggttcgcggcgatcatgaactgaatgaagttaaagcggaaaaactgccgcacgttgccagcccgctgaccttcgctactgaagaagagattcgcgccgtaattaatgccggccctggctccctcggcccggtcaatatgccgattccggtcatcatcgatcgtaccgttgccgccatgagcgattttgccgctggcgctaacatcgacggtaaacactactttggtattaactgggatcgcgatgtggcgacgcctgttgttgccgacatccgtaacgtagtcgccggcgatccgagtccggatggtcagggaacgttgcttatcaaacgcggtatcgaagtgggtcacatcttccagttaggtaccaagtactcagaagcgctgaaagcctccgttcagggtgaagatggccgtaaccagatcctgacaatgggctgctatggtatcggcgtaacacgtgtcgttgccgcggctatcgagcagaactttgacgagcgcggcattgtatggcctgacgccattgcacctttccaggtcgctattctgccgatgaatatgcacaaatccttccgtgtgcaggagctggcggaaaagctgtacagcgaattgcgcgcgcagggcattgaagtgctgatggacgatcgtaaagagcgcccgggcgtgatgtttgccgatatggagctgattggtattccacatactatcgtgattggcgatcgcaacctggataacgacgatattgagtataaataccgtcgtagcggtgaaaaatcgctgattaaaaccggcgatatcgttgattatctggtcaaggcgattaaaggctaa

SEQ ID NO: 40010 - DNA, 708 bp, Salmonella typhi
atgagcagctttcagtttgatcaaatcggcgttattcgctccccctataaagaaaaattcgccgttccgcgccagcctggtctggtcaaaagcgcctgcggcgaactgcatctgatagcgccttacaaccaggccgatgccgttcgcggcctggaagcgttcagccatttgtgggtgcttttcgtttttcatcagacgatggacggcggctggcggccaacagttcgtccgccccgtcttggcggtaacgccagaatgggcgtttttgccacgcgctccacgttccgccccaatccgattggcatgtcgctcgttgcgctaaaaggtatcgagtgccggaaagagagcgtaattctgaaattaggcagtctggatctggtggatggcacgccggtggtggatatcaaaccgtatttaccgtttgccgaggccttaccggacgccgccgccagctatgcgcaacaggcgccgatagctgaaatgcctgtgagttttaccgctgaagtggctcaacagcttacgacgctggaaaggcgttatccgcagctacggacatttatttgcgatgtgctggcgcaagatcctcgcccggcttatcgtaagggtgaagagacgggcaaaacctatgccgtctggctgcatgattttaacgtgcgctggcgtgtggttaacaccggatttgaagtgtttgcgctggaaccacggtaa

SEQ ID NO: 40011 - DNA, 816 bp, Salmonella typhi
atggcgttcaaattcaaaacctttgcggcagtgggtgctctgattggttctctggcacttgcgggttgcggtcaggatgaaaaagatccgaatcatattaaagtcggcgtaatcgttggcgcagagcagcaagttgccgaagtcgcgcagaaagtcgcgaaagaaaaatacggcctggacgtggaattggtgacctttaatgattatgttctgcctaatgaagcgctgagcaaaggcgatatcgatgccaatgccttccagcacaaaccgtatctggatcagcaaatcaaagatcgcggctacaaactggtttccgttggtaagacttttgtctatcccattgcaggatattccaaaaaaatcaaatctctggatgagctcaaggacggttcccaggtcgctgtgcctaacgacccgaccaaccttggtcgttccctgctgctgctgcaaaaagtagggctgattaaactgaaagacggcgtcagtctgcttcctacctcgctggatatcgtcgaaaacccgaaaaatctgaaaattgttgagctggaagcgccgcagttgccgcgttcgctggatgacgctcagatcgcgttagcggtcatcaatacgacttacgccagccagattggcctgacgccagcgaaagacggtatcttcgttgaagataaagattctccgtacgttaacttgatcgtgacgcgtgaagataacaaagacgccgagaatgtgaaaaaattcgttcaggcttaccagtctgatgaagtgtacgaagccgcaaataaagtttttaatggcggcgcggtgaaaggctggtaa

SEQ ID NO: 40012 - DNA, 639 bp, Salmonella typhi
atgtggttactggttcgtggcgtctgggaaacgctggcgatgacctttgtctccggtttcttcggtttcgtgattggcctgccggttggcgtattgctgtatgttacgcgcccggggcagattatggagaacgccaggctgtatcgctccctctctgcggtggtcaatattttccgctcgattccctttatcatcctgttggtgtggatgattccttttacccgaataattgtcggcacctccattggtttgcaggccgcgattgtaccgctgaccgtcggcgccgcgccttttatcgcccgtatagtggaaaatgcgttgttagagatccctgccgggctgattgaagcctcgcgagcgatgggcgccacgccgctgcaaattgtacgtaaaatccttttaccggaagcgctgcctggtctggtgaatgcggcaaccattacactaatcaccctggtcggttactccgcaatgggcggcgccgtcggcgcaggcggcctcggtcaaatcggctatcagtacggttatattggatacaatgctaccgtgatgaatacggtgctggtattacttgtcgttctggtttatttaattcagttatccggcgatcgcatcgtcagggctgtcacgcataagtaa

SEQ ID NO: 40013 - DNA, 2856 bp, Salmonella typhi
atggaaaagacatataacccccaagatatcgaacagccgctttacgagcactgggaaaagcagggctatttcaagcctaacggcgacgaaagcaaagagtccttctgcatcatgatcccgccgccgaacgtcaccggcagtttgcatatgggacatgctttccagcaaaccatcatggataccatgatccgttaccagcgtatgcagggtaaaaacaccctgtggcaggtcggcaccgaccacgccgggatcgcaacccagatggtggttgagcgcaagattgccgctgaagaaggtaaaacccgtcacgactacggccgcgatgcgtttatcgacaaaatctggcagtggaaagcggaatccggcggcaccattacccgtcagatgcgccgtctcggcaactccgttgactgggagcgcgagcgcttcaccatggacgaaggcctttccaatgccgtgaaagaagtctttgtccgcctgtacaaagaagacctgatttaccgtggcaaacgcctggtgaactgggatccgaagctgcgcaccgccatctctgacctggaagtggaaaaccgcgagtccaaaggctcgatgtggcacatccgctatccgctggccgacggcgcgaaaaccgcagacggtaaagattacctggtcgtcgccaccacccgtccggaaaccgtactgggcgataccggcgtggccgtgaacccggaagatccgcgttataaggatcttattggcaaattcgttattctgccgctggttaaccgccgcattccgattgtgggcgacgaacacgccgatatggaaaaaggtaccggctgcgtgaagatcaccccggcgcacgactttaacgactatgaagtcgggaaacgtcacgccctgccgatgatcaacatcctgacctttgatggcgacattcgcgaaagcgcggaagtgttcgataccaaaggtgaagagtctaacgtttattccagcgagattccggctgagttccagaagctggaacgctttgctgcccgtaaggccatcgttgctgccgttgacgcgctgggcctgctggaagaaattaaaccgcacgatctgaccgtcccttacggcgaccgtggcggcgtagttatcgaaccgatgctgaccgaccagtggtacgtccgtgcagacgtgctggcgaaaccggcggtggaagcggttgaaaacggcgacattcagttcgtgccgaagcagtacgaaaacatgtacttctcctggatgcgcgatattcaggactggtgtatctctcgtcagctgtggtggggtcaccgtatcccggcatggtatgacaacgacggcaacgtctacgttggccgtaccgaagacgaagtgcgtcaggaaaataacctcggtgccgacgttcagcttcgtcaggacgaagacgttcttgatacctggttctcctccgcgctgtggaccttctccaccctcggctggccagaaaacaccgacgccctgcgtcagttccatcccaccagcgtgatggtgtccggcttcgatatcatcttcttctggattgcccgcatgatcatgatgaccatgcacttcatcaaagatgaaaacggcaagccgcaggtgccgttccatactgtctacatgaccggtctgattcgcgacgacgaaggccagaagatgtccaaatccaagggtaacgttatcgacccgctggatatggtggacggcatctccctgccggaactgctggagaaacgcaccggcaacatgatgcagccgcagatggcggagaaaatccgcaagcgtaccgagaagcagttcccgaacggcatcgagccgcacggcaccgacgccctgcgctttaccctggcggcgctagcctcgaccggccgcgacatcaactgggatatgaagcgtctggaaggctaccgtaacttctgtaacaagctgtggaacgccagccgctttgtgctgatgaacactgaagagcaggattgcggcttcaacggcggcgaaatgaccctgtcgctggcggaccgctggatcctggcggaattcaaccagaccgttaaagcctaccgcgaagcactggataacttccgcttcgatatcgccgcaggcatcctgtacgagttcacctggaaccagttctgcgactggtatctggagctgaccaaaccggtaatgaccgggggttccgagtctgaactgcgtggcacccgccatacgctggtcaccgtgctggaaggtttgctgcgtctggcgcacccgatcattccgttcatcaccgaaaccatctggcagcgcgtgaaggttatctgtggcattaccgccgataccattatgctgcagccgttcccggaatataacgccgcgcaggtggatgaagccgcgttggccgataccgagtggctgaagcaggcgatcgttgccgtacgtaacattcgtgcggaaatgaacatcgccccgggcaaaccgctggaactgctgctgcgcggctgtagtgaagaagccgttcgtcgtgttaacgacaaccgtagcttcctgctgaacctggcgcgtctggaaagcatcaccgtgctgccagccgatgacaaaggtccggtttccatgaccaaaatcatcgacggtgccgaactgctaatcccgatggcgggcctcatcaacaaagaagatgagctggcgcgtctggcgaaagaagtggcgaaaatcgaaggcgagattgcccgtatcgaaggcaaactgtccaacgaaggtttcgttgcccgcgcgccggaagcggtgatcgccaaagagcgtgagaagctggacggttatgcagaagccaaagcgaagctgattgagcagcaggcggttattagcgcgctgtaa

SEQ ID NO: 40014 - DNA, 483 bp, Salmonella typhi
atggcaacgcatttaaatccaccacaagaagcctcatatatgaagaatgcgacgttctatcttctggacaatgacaccaccgtcaacggtttaagcgccgttgaacaactggtgtgtgaaattgccgcagaacgttggcgcgctggcaagcgcgtgctgatcgcctgcgaagatgagaagcaggccattcggctggatgaagcgctgtgggcaagaccggcggaaagttttgtcccgcacaatctggcaggcgaaggcccacgcggcggcgcgccggttgaaatcgcctggccgcaaaaacgcaacagcagcccgcgcgatattttaatcagcctgcgtacaagctttgcagattttgccaccgctttcacagaagtggtagacttcgtcccttacgaagaaactttgaaacaactggcgcgcgaacgctacaaagcctaccgcgtggctggttttaacctgaatacggcaacctggaaataa

SEQ ID NO: 40015 - DNA, 471 bp, Salmonella typhi
atgaaaaaacaacagggctatacgctcattgaaacggtggtcgcgatgtcgctcattatcattctcagcgccacaggactttatggctggcaacgctggcagcagcaacagcgcctgtggcaaaccgcatgtcaggtgcgggattacctgctgcaacttcgtgaggacgctcactggcataaccgcgatcacattcttcgcgtggtcagcgaaggcggttcatggtgctttgtcagctctgttgctacgcaaacatcgtgtacgccatcttccccctttgtgtttacgcccgactggcgtgatgtcgtccttgccgatatcacgccgtcgttagccttctttggcctgcgcaatacggcatgggcagggcacatcgtgctgaaaaacgctgccggagagtggcgtctggtcgtctcctcctgggggcgaatcaggctatgtgagcgtaacgaggccgccacgtgtcaataa

SEQ ID NO: 40016 - DNA, 1512 bp, Salmonella typhi
atggagttcagtgtaaaaagcggtagcccggagaaacagcggagtgcctgcattgtcgtgggcgtctttgaaccgcgtcgcctttctccgattgcagaacagctcgacaaaattagcgacggatacatcagcgcattgctgcgtcgcggcgaactggaaggaaaaccggggcagactctgttgctgcaccatgttcctaacgttctttccgagcgaatcctcctcattggttgcggcaaagagcgcgagcttgatgaacgtcagtataagcaggttattcagaaaacgataaatactctgaatgatactggttcgatggaagccgtctgtttcctgaccgaactgcacgttaaaggccgcaacaactactggaaagtgcgtcaggccgtcgaaacggccaaagagacgctttatagctttgatcaactcaagaccaacaagagcgagccgcgccgcccgctacgtaagatggtctttaatgtgccgacccgccgtgagctcaccagcggcgaacgcgccattcagcacggtctggccatcgccgccgggattaaggctgcgaaagatctcggcaacatgccgcccaatatctgtaacgccgcctacctggcgtcacaggcgcgccagttggccgacagctacagcaaaaatgtcatcacccgcgtgatcggcgaacagcaaatgcgcgaactgggtatgaacgcttatctggcggtcggccacggttcgcagaatgaatcgctgatgtcggtgattgagtacaagggcaatccgtccgaagacgcgcgcccgatcgtgctggtaggtaaaggcctgaccttcgactccggcggcatctccatcaagccatctgaagggatggacgagatgaagtacgacatgtgcggcgcggcggcggtttacggcgtgatgcgtatggtcgccgagcttaagcttccgattaacgttatcggcgtactggcgggctgtgaaaacatgccgggcggacgcgcttatcgccctggcgacgtgctgaccactatgtctgatcaaaccgttgaagtcctgaacaccgacgccgaaggccgtctggttttgtgcgacgtgctgacctacgttgagcgcttcgaaccggaagcggtcattgacgtcgcgacgctaaccggcgcctgcgtgattgcgctgggccatcacattaccggtctgatgtcgaaccataacccgctggcgcatgaactgatcggcgcgtccgagcaagcgggcgaccgcgcgtggcgtctgccgctgggcgatgagttccaggaacaactggagtccaactttgcggatatggcgaacattggtggtcgtcctggcggcgctatcaccgcgggctgcttcctgtcgcgctttacccgtaagtacaactgggcgcacctggatatcgccggtaccgcctggcgttccggtaaagccaaaggtgccaccggtcgtccggtagcgctgctgtcgcagttcctgctcaatcgtgcgggctttaacggcgaagagtaa

SEQ ID NO: 40017 - DNA, 795 bp, Salmonella typhi
atgaaacagtatttagaactgatacaaaaagtgctggatgaaggcacacagaaaaacgaccgtaccggcaccggcacgctttccatttttggccatcagatgcgttttaacctgctggaaggctttcctctggtgacgacgaaacgctgccatttacgttcaattattcacgaactgctatggtttttgcagggcgataccaacatcgcttacctacacgaaaataatgtcaccatctgggacgaatgggccgatgagaacggcgatttaggcccggtttatggtaagcagtggcgtgcatggccaacaccggatggccgccatatcgatcagatcgccacggtcttgagccagcttaaaaacgacccggactctcgtcgtattatcgtttctgcgtggaacgtcggcgagctggataagatggcgctggcgccgtgtcacgcctttttccagttttatgtcgcagatggaaaactctcctgtcagctttatcagcgctcctgcgatgtgttcctcggtctgccgttcaacattgccagctacgcgttactggtgcatatgatggcgcaacagtgcgacctggacgtcggcgattttgtctggaccggcggcgacacgcacctgtacagcaaccatatggagcagacgcacctgcaattaagccgtgaaccgcgcgcgctgccgaaattggtcattaagcgtaaacccgattcgctttttgactaccggttcgatgatttcgaaattgaaggctatgatccgcaccccggtattaaagcgccggtcgctatctaa

SEQ ID NO: 40018 - DNA, 660 bp, Salmonella typhi
gtgatgtggcgtgtcttctgtctcgagctgcgcgtggcgttccgccacggcgcggacatcgccggcccgctgtggttcttcctgatggtcatcaccctgtttccgttaagcgtcgggccgcagccgcagctgctggcgcgtatcgcgccgggcatcatccaggtggcggcgctgctggcctcgctgctggcgctggagcggctgtttcgcgacgacctgcaggacggcagcctggagcagctgatgctgctgccggtgccgctgccggcggtggtgctggcgaaggtgctggcccactgggcggtgaccggcctgccgctgatgatgctctccccgctggtggcgctgctgctggggatggacgtgtacggctggaaaatcatggcgctgacgctgctgctcggcacgccggcgctggggtttctcgccgcgccgggcgtcgggctgacggccggcctgcggcgcggcggcgtcctgctgggcattctggtgctgccgctgagtgtcccggtgctgattttcgccaccgcggcgatggacgcggcatcgatgcatttacccgttgacggctatctggcggtgctgggggcgctgctggcgggcagcgcgacgttaagcccgttcgccaccgcggcggcgctgcgcatcagtacgcagtag

SEQ ID NO: 40019 - DNA, 2247 bp, Salmonella typhi
atgctcactcgcctgcgcgaaatagtcgaaaaagtggccagtgcgccgcgtctgaacgaggcgctgaatattctggtcacggatatctgtcttgcgatggatacagaggtttgctcggtttacctggccgatcatgaccgacgctgttattacctgatggcgacgcgggggttgaaaaaaccgcgtggtcgaaccgttgcgcttgcgtttgatgaggggatcgtcggtctggtgggcaggctggcggaacccattaaccttgccgatgcgcaaaaacatcccagctttaaatacattccttcggtaaaagaggagcgttttcgcgcgtttctcggtgtgccgatcattcagcgtcgccaacttctcggcgtgctggtcgtgcagcagcgcgaattgcgccagtacgatgaaagcgaagagtctttcctcgtcacgctcgctacgcagatggcggctatcctgtcacagtcgcaggtcacagcgctattcgggcaataccggcagacgcgaattcgcgcgcttcctgcggcgccgggcgtggctatcgcaacgggctggcaagacgcgaccatgccgctgatggaacaggtttacgaagcgtctacgctggatacctctcttgaacgcgaacgattgaccggcgcgctggaagaggcggcgaacgaattccgacgatacagcaaacgctttgccgccggcgcacaaaaagagacggcagccattttcgatctgtactcacacctgctttcagacgccagactgcgtcgcgaactcttcgccgaggtcgacaaaggcgctgttgcggagtgggccgttaaaaaaatcatcgaaaaatttgccgagcaatttgcggcgctaaccgataactacctcaaagaacgtgcgggagacttacgcacgctggggcagcggctgttattccatcttgatgattcagttcaggggccaaacgcctggccggaacgttttattctggtcgcggatgagctgtcggcgaccaccctggcggagctgccgcaggacaggctggcgggcgttgtggtgcgcgacggcgcggcaaactcgcatgcggcgattatggtgcgcgcgctcggtatccccaccgtcatgggcgcggatatccagccttcggtgctacatcgccgtacgttggtggtggatggctatcgcggtgaattactggtcgatcctgaacccgtgcttattcaggaatatcagcggctcattagtgaagagatagaactcagtcgtctggcggaggacgacgtcaatcttcccgcccaactgaaaagcggcgagcgtatcaaagtgatgctgaatgccgggctcagccccgagcatgaggaaaagttaggcagtcggatcgacggtatcggcctgtaccgtactgaaattcccttcatgctgcaaagcgggtttccctcggaagaagagcaggtggcgcagtatcaagggatgctgcaaatgtttaacgataaaccggtgacgctgcggaccctggatgtgggagcggataagcaactgccctatatgccgatcagcgaggagaacccgtgtctgggctggcgcgggatccgcattacgctggatcagccggagatctttttgatccaggtccgcgcgatgctgcgtgccaatgcggcgactggcaacctcagcattttgttgccgatggtcaccagtattgatgaagtcgatgaagcgcggcgtctgatcgaacgcgccgggcgcgaggtcgaggagatgatcggctatgcgatcccgaaaccgcgtatcggcattatgctggaagtaccatcaatggtatttatgctgccgcatctggctaaccggatcgactttatctcggtcggcaccaacgatttaacgcaatatatcctggcggtagatcgcaacaatacccgcgtggccagtatttatgacagtttgcatccggctatgctgcgcgcactgtccatgatcgcgcaggaagccgaaaaacatggtctcgatcttcgcttgtgcggcgagatggcgggcgatccgatgtgcgtggcgattcttatcggtctgggatatcgccatctttcgatgaatggccgttcggtagcgcgtgtgaaatatctgctgcggcatatcgattttgaagacgcgcaaacccttgccagacgcagccttgaggcgcagatggcgaccgaagtgcgtcatcaggtggcggcgtttatggagcgccgcgggatggggggattgattcgcggagggttgtaa

SEQ ID NO: 40020 - DNA, 1266 bp, Salmonella typhi
atgaagctcaacgccagacaggtcgagaccgcaaagccaaaagacaaaacctacaaaatggccgatggcggcggtttgtaccttgaggtttcggccaagggatccaaatactggcgcatgaaatacagacgcccctctgacaaaaaagaggatcgcctcgcttttggtgtttggcctactgtgacacttgctcaggcaagagcaaagcgcgatgaagccaaaaagttgctagtgcagggcattgatccaaaaaccgaacagaaagaggctcaggccgagaactcgggggcgtatactttcgaaactatcgctcgtgaatggcatgccagtaacaagcgctggagcgaagaccatcgatcgcgcgttcttcgctatcttgaactttatattttccctcatatcggttcgtccgacattcgccagctcaaaaccagtcacctgttagccccgatcaaaaaagttgatgccagtggtaaacacgacgtcgctcagcgcctgcaacagcgcgtcacggctattatgcgttatgccgtacagaacgattacatcgactctaatccagccagtgacatggccggtgcgttatcgactaccaaagcacgacactatccagccttaccttctagccgtttccctgagtttcttgctcgccttgctgcatatcgtggccgtgtaatgacacggattgctgtcgagctttccttactaacttttgtacgttccagcgagttacgtttcgcgcgttgggacgagttcgacttcgataaatccctttggcgcgtaccggcaaaacgagaagaaattaagggtgtgcgttattcgtaccgtggcatgaagatgaaagaggagcatatcgttcctctcagtcggcaggcgatggttttgttagagcagctcaagcagattagtggtgataaagagctgttgtttccgggggatcacgacgcaactaaggttatgagcgaaaacacggtaaatagcgcattgcgtgcgatgggttatgacacaaaaaccgaggtctgcgggcatgggtttcggacgatggcgcgtggtgctttgggtgagtcaggattatggagcgatgacgcgatagagcgtcagttaagccattctgagcgtaacaatgtgcgtgctgcctatattcacacttcagagcatttggatgagcgtcgtttgatggtgcagtggtgggctgattatctcgatattattcagtatgagcatattacaccttatgaatatgcaagagtctgcaacataaaatga

SEQ ID NO: 40021 - DNA, 804 bp, Salmonella typhi
atgactatccctgcattcggtttaggtacttttcgcctgaaagacgacgtggttatcgcttctgtgaaaacggcgcttgaactgggctaccgtgctgtcgacactgcgcaaatctatgataatgaagcggctgttggacaggcgattgctgagagcggcgtaccgcgtaatgagctgtacatcaccaccaagatctggattgaaaaccttagcaaagacaagctaatcccaagcctgaaagagagcctgaaaaaactgcgtaccgattatgtcgatctgacgctgatccactggccatctccgggtgatgccgtgtctgtcgaagaatttatgcaggcattgctggaagctaaaaaacaagggctgactcgcgaaattggcatctcaaacttcactattccgttgatggaaaaggctattgccgcggtgggcgcagaccatatcgccaccaaccagattgagctatctccgtatctgcagaatcgtaaggtggttgactgggcgaaagcgcacggtatccatatcacctcttacatgacgctggcatacggtaaagcgctgaaagatgaagtgattgcgcgcattgcggttaaacataatgcgaccccggtgcaggttattctggcatgggcaatgggcgaaggttactcggtgatcccttcatccaccaggcgtgaaaacctggcaagcaacctgctggcgcaggatctgcatctggatgccgaagataaaaatgcgatcgcggcgctggactgcaacgatcgtctggttagcccggaaggactggctcctgcctgggattaa

SEQ ID NO: 40022 - DNA, 696 bp, Salmonella typhi
atgtccgctctttgtccgctactgactccgcctgcttcggaagcattgctgttagcccaggcgcggcagctttccggctatacgttaggcgagctggcggtgatggccggcattaccacgcctaaagatttgaagcgagacaaaggctggatcggcgtcttgctggagatctggctcggcgccagcgccgggagcaagccggagcaggatttcgccgcgttaggcgtagaactgaaaactatcccggtggatagtctgggtcgtcctctggaaacaacctttgtttgcgtggcgccgttaaccggtaacagcggcgtgacctgggagacaagtcacgtacggcataaattgaagcgcgtgctatgggtgccggtcgaaggcgatcgcagcataccgttagccgaacgccgcgtaggttcgccgctactctggagtccgagtgaagaagaggacaggcagctacgcctcgactgggaagagctgatggacatgatagtgctgggccaggtggaacgcattaccgcccgccatggcgaagtcttgcaactgcgacccaaagccgccaatgccagggcgctcaccgaggctatcggcgcgcgcggggaacctattttgacgctaccgcgtggattttatctgaaaaaaaattttacgcaggcgctgctggctcgccattttttattgcagaatccgtaa

SEQ ID NO: 40023 - DNA, 429 bp, Salmonella typhi
atgcgtaactacgatttatccccactgttgcgtcaatggatcggttttgacaagctggccaatgcgctgcaaaacagcggcgaaagccagagcttcccgccctataacatcgaaaaaagcgacgataaccattatcgcattaccttagcgttagccggtttccgtcaggaagatctggatattcaactggaaggcacgcgcctgacggtgaaaggcacgccggaacagccggaaaacgagcccaaatggttacatcagggcctggtcatgcagccttttagcctgagctttacgctggctgaaaatatggaagtttccggcgcgacgtttaccaacggcctgctgtatattgatttaacccgtaacgagccggaaaccattccgccgcagcgtatcgccattaacgaacgctccgcattaaatagctaa

SEQ ID NO: 40024 - DNA, 1023 bp, Salmonella typhi
atgatggcgacaatgctggatgtttcccgccatgcgggcgtatcaaaggccaccgtctcacgagtgctgaatgggacggggcaggtaaaagaaagcacgcgccagaaagtgtttacggcgatgcaggctctggactatcgccccaacctgctggcacgctcgctggcaaatcgcaccagcaacagcatcggtctggtcgtctctacgtttgacggcttctattttggcagtttgttgcgccgggcgtcgcgccaggcggagtttcataacaagcagttgatcgtcaccgatggtcacgatacgccggaacgagagcagaaagccgtacaaatgttggccgacagacagtgcgacgctattattctttacactcgctatatggatgagccgacgattttgtcgttgattgacgccacggaaatgccgctggtgattattaatcgcaacatcactcaggcccacgatcgcgctattttcttcgagcaggagacggcggcattccaggcggtggaatacctgattacgcagggccatcgcgatatcgcctgtattacgctgcctgttcatactcccaccggcacatcacgcgtagcgggttatcgaaaggcgctggaaaaatatggcattccctggcaaccggcaaaagtgaaatacggcgattacacgctgacgcgcggctatgacgcctgccgggaattactggaggaaggcgtcacgtttagcgcgctattcgcctgtaatgatgacacggcgctgggcgcggcaaaagcgctgcgccaggccggattacgcatcccgcaggatgtgtcgctgtttggttttgacgatgcgccgggcgcaacctggcttgagccggggctttcaacagtctatttacccatcgaggatatgatagccaccgcaattgatcaggccgttcgtctggcgaacagcgagccggtcgccccgatcccgccctttaccggcacgctgattctgcgcgagtccgtcgccgcgggcccgttttttcaacgtccggtctaa

SEQ ID NO: 40025 - DNA, 1185 bp, Salmonella typhi
atgaaaaggcagagaaacgtcaatttgttgttgatgttggtgttactggtggccgtagggcagatggcgcaaaccatttatattcccgccatcgccgatatggcacaagcgctaaacgtccgggaaggcgccgtccagagcgtaatggctgcttacctcctgacctacggcgtctcgcaactgttttacggcccgctttccgaccgggttgggcgccgcccggtaatcctcgtcggcatgtctatttttatggtagcgactctgatcgccatgaccacgcatagtttgacggtgttgattgccgccagcgccatgcaagggatgggaaccggcgttggcggagtaatggcgagaacgctcccgcgcgatctgtatgaaggaacgcaacttcgtcatgccaatagcctgttaaatatggggattctggtcagcccgctgttagcgccgctgattggcggcctgctggataccctgtggaactggcgcgcgtgttacgctttcctgctggtgctttgcgctggcgtcaccttcagcatggcgcgctggatgccggaaacccgccccgccggcgcgccgcgtacgcggctgatcgccagctataagacgctgtttggcaacggcgcatttaactgttacctgctgatgctaatcggcgggctggctggcattgcggtctttgaagcctgttccggcgtgctgatgggagcagtattaggtctcagcagtatggtggtaagcattctgtttattctgccgattccggcggcgttcttcggcgcctggtttgccggacgcccgaataaacgcttctcagccctgatgtggcagtcagttatttgctgtctgctggcaggccttatgatgtggattcccggctggtttggcgtgatgaacgtctggacgctactcatccccgctgcgctgtttttcttcggcgccgggatgttatttccactggccaccagcggcgcgatggagccgtttccgttcctcgcaggcaccgctggcgcgctggtcggcgggctgcaaaatattggttccggcgtactggcgtggctttcggcaatgctgccgcaaaccggtcagggcagtctgggattgctgatgacccttatgggattgctgatcttggcgtgctggctgccgctggcgtcacggatatcgcatcagggacagacggtttaa

SEQ ID NO: 40026 - DNA, 1179 bp, Salmonella typhi
atgaaagaggttgtgatagtgggggctttacggacacccatcggctgttttcagggaacgctggcccgtcattccgccgtcgagctggggagtatggtcgtaaaagcgttaattgagcgcaccggcgtggacgctaatgctatcgatgaggtcatcctcggtcaggtactgacggctggcgccgggcagaatccggcgcgccagtcagccatcaaaggagggctgccgactaccgtttccgctattaccattaatgacgtttgtggttccggtttaaaagcgttgcacctggcgacgcaggctattcagtgcggcgaagcggacattgttattgcgggcgggcaggagaatatgagccgtgcgccgcatgtcctcaatgacagccgtaccggcgcgttgcctgatgccgacaatctggtggatagtctggtacatgatggcttatgggatgccttcaacgattatcacattggcgtgacggcagaaaacctggcgcgggaatatggcatcagccgcgagttacaggatgcttatgcgctcagttcgcaacaaaaagccagggccgcgattgataccggacgttttaaagatgagattgtccccatcgtcacgcaacgtaatgggcagaccgcaattgtcgatacggatgaacaaccgcgggccgacgccagtgcggaggggttagccctgctgcatccggcgtttgatagtttaggttcggtgacggcgggtaatgcctcttcaatcaacgatggcgccgccgcggtgatgatgatgagcgagacgaaagcccaggcgctggggctgccggtgctggcgcgcatccgcgcgtttgccagcgtcggcgtcgatcctgcgctaatggggattgcgccggtatatgctacccggcgctgtctggagcgtgccggctggcaactgacggaggtcgaccttatcgaagccaacgaagcgtttgccgcccaggcgttgtcggtaggaaaaatgctggaatgggatgagcgacgggtaaacgttaatggcggcgcgattgcgctggggcatcccattggcgcttccggttgtcgaattctggtttcactggtgcacgaaatggttaaacgcgacgcgcgaaaaggtctggcgacgctgtgtatcggtggcggccagggcgttgctttaaccattgaacgcgactga

SEQ ID NO: 40027 - DNA, 273 bp, Salmonella typhi
atgtcacataccatccgggacaaacaaaagcttaaagccagaaccagcaagattcaggggcaggtgatagcgctaaaaaaaatgctggatgaaccgcatgaatgcgcggccgtgttacaacagatcgcggcgattcgcggcgcggtaaatggcttaatgcgcgaggtgattaaagggcatctgaccgagcatatcgttcatcagagtgatgaagccagacgtgaagaagatctggacgtaatattaaaggtgctggattcttatataaaatag

SEQ ID NO: 40028 - DNA, 2190 bp, Salmonella typhi
atgagttttgtatccacaaataataaatccggtatgggagggctgacgacaaccacgccgccgataaccggagaaagtggcggtgtcaccgcagattcagtcgccggaagcgtggcagatgcggcagaagccgccgtggaacaggctgcgggatcgctgtttggcgcattgccggagccatcaggactggtgaaagccgcggtggcagcggcgcaggctgccgccgctgcaggtatggcgcaggatgcggtatcggccatcgtctctgctgttgcaggcgggccgggggcgcataatgtgacggtcagcggcagcgccgtaccgccgggcgcattactgttcgccagcctggacggcggcgaaacattaagtgaactgttcagttatgtggtacagctaaaaacgcccgacaccctgaatctgggctatgtctccccggcggccaacctgccgctcaaaccgatggtgggcaaagatctgtgcgtcaacatcgaactggatggtggcggtaaacgacatatcagcgggctggtcacggcggcgcgggtggtgggccatgaagggcgttcggttacctatgagctgcgtatggagccgtgggtaaaactgctgacccataccagcgactacaaagcattccagaataaaaccgtggtggatattctggatgaggttctggcggaatacccctacccggtggaaaagcggctggtggaaagctacccggtacgcacctggcaggtgcagtacggtgaaactgattttgattttcttcagcgactgatgcaggagtggggcatctactggtggtttgagcacagcgaggacagccacacgctggtgctggcggatgccatcagcgcccacaaagcatgtccggactcgccgctggtcgagtggcaccaggaagggctgaagctggacaaggagtttatccacactatcacggcaaacgagagtctgcggactggccagtgggtgctggatgatttcgattttacgaagccacgttcattgctggcaaacaccgtggcaaacccgcgtgaaaccggtcatgccacctacgagcattatgagtggccgggagactacttcgacaagagtgaaggcgagatgctgacgcgcattcgtatggaagcgcagcgcagccccggcagtcgggtgctggggggagggaatatccgcacactcatgaccggttataccttcacgctggaaaactatcccaccgccgaagtcaatcaggaatacctgctgatgcagaccttgctgtttgtacaggacaacgcgcagcacagcgggcaggaccagcactttaccttttccacccgttttgaactgcacccgacccgtgaggtgttccgcccgcagcggacggtgagcaaaccccacaccaaagggccgcagagcgccatcgtcaccggcccggcgggccaggaaatctggacggatcagtacgggcgggtaaaggtacagtttggctgggatcgctacggcaaaatggatgaaaacagctcctgctggatacgcgtcagctacccatgggcgggcaaaggcttcgggatgatccagatcccgcgtatcggccaggaagtgctggtggatttcaaaaacggcgatccggatctgccgatcatcgtggggcgtacctacaaccaggacaccatgccgccgtggggactgccgggaatggcgtcgcagagcgggatcttcagccactcgctgtatggcgggccaacgaacggcaacatgctgcgttttgacgacaaaacgggcgcggaggaagtgaagttccacgcggaaaaagatctcaacaccacggtgaagaataatgaaacgcatacggttatggtggatcgcactaaaaccattattaaaaatgaaaccaacagtattggtgaagacagaaacaccacggtaacgaagaatgacggcctttccgtaaaactggcgcagacgatcaatatcggcaccacttatcgtttagatgttggcgatcaattcacacttcgctgcggcaatgcggcgcttgttttacataaggacggctccattgagttttgtggcaagcaactgatgttgcataccagcgatgtcatgcaactgattggtaaaggtattgatatgaacccggatggcggcacagccgtaaccgccgatgatattgccccccttcccacctctgagtga

SEQ ID NO: 40029 - DNA, 4065 bp, Salmonella typhi
atgtatgaagcagcccgtgtggatgaccctatctaccacaccagtgcgctcgccgggtttcttatcggcgctatcatcggcatcgccattatcgcgcttgccgcctttgccttctttagctgcggttttcttgccgggctgattctgggttttatggccgatcaaatagcctccggggtattgcaactgggcgaggccatcgggcgctccatccaccacacggcaggaaaaatcctcaccggttcggagaatgtcagcaccaacagtcgcccggcggcgcgcgcggtactgagtacggtgaaatgcgataaccatatcgcagaaaaacgcatcgcccagggttccggcaatatttacatcaacagccagcctgccgcccgtaaggatgaccataccgaatgcgatgcggtggttgaagacggttcgccgaatgtgtttctcggcggcggcacacagacggtactggaaatcagttctgaaattccggactggctgcgcaaggtggtggatgtattgtttgtcgtggcgagtctgctcggcgggctggccggggcgtggcggcaggcggcaaagctggggacgaaatttggcactaaatgtgccgctaagtttatcggcggggagcttaccgggatggccgtgagtgaggctatcagcgggctgttcagcaatccggtggatgtgaccaccgggcagaaaatcctgctgccggaaacggacttcaccctgcccggtcgcctgccggtcacctgctcgcgtttttacgccagccacctggaaaccgtgggactgttgggacagggctggcggctgaactgggaaaccagcctgcgcgaggacgatgaacacatcacgctgaccggcgtacaggggcgggaactgcgttacccgaaaatgatgctgacgcccggccaccagatatttggcccgaaagaacagttatacctcagccgcctgcatgacgggcgttacgtgctgcattacaccgatcgcagctattacgtatttggtgattttgacagtgacggcatggcatacctgctgtttatggagacgccgcaccgccagcgcattgtcttcgggcacgaaggaggcagactggtacggatagcctccagcagcgggcatcacctgttactgcaccgcacacagaccccggcaggggagcggctgtcgcgaattgaactggtgcagggcggcacctgtggcaatctggtggagtaccggtatgacgataacggtcaactgaccggcgtggtgaaccgggcgggaacgcaggtgcggcagtttgcttatgaaaacgggctgatgacggcgcacagcaatgcggcggggttcacctgccgctaccgctggcaggaactcgacggcgcgccgcgcgtgacggagcacgacaccagtgacggtgaacattaccgctttgactatgattttgccgcaggcaccaccaccgtcaccggcaggcagggggagtcatggcagtggtggtacgacagggagacgtatatcaccgcgcaccggacgccgggcggtggaatgtaccgcttcacgtacaacgaagaccacttccctgtcaacattgggctgcccggcggtcgcacggtggcgtatgaatatgacatccagaaccgggtggtgaagacgacagatccggaaggccgggtgacgcagacgcagtggaacggcgagttcgacgaaatcacgcgcacggcgctggacgatgacgctgtctggaaaacgcagtacaacgcccacggccagccagtgcaggagacggacccggaagggcgggtgacgcagtacgcttacgatgaacaggggcagatgtgcagccggacggatgcggcgggcggcacggtggtgacggcgttcgacagccgggggcagatgacgcggtacaccgactgttcagggcgtagcacaggatatgaccacgatgaggacggcaacctgacgcgggtgacggacgcggaagggaaggtggtacgcatcagctacaaccgacttgggttgccggagacggtgaactcaccggggaaacagcaggacaggtatacctggaatgcgctggggctgatgagcagccaccggcgcatcacggggagcgtggagagctggcggtatacgccgcgcggtctgctggcggcgcacacggatgaggagaagcgcgagacgcgctggcagtacacgccggaaggccgggtgaccgcgctgaccaacggcaacggggcgcagtaccggttcagtcacgatgcggacggcaggctgatgcgtgaggtgcgcccggacggactgagccgtacttttatcctggacgacagcggttatctgacggcgatacagaccacgggtacgcagggcggcgtgcggcgggagacgcagcagcgggatgcgctgggccgtctgttacggacggagaatgaacacggccagcggacgttcagctacaaccggctggaccagataacggcagtgacgctcacgcccacggaggcggggcaacagcagcaccggatgcaggccgacacggtgcgttttgagtatgaccgcagcggctggctgacggcggagcacgcggggaacggtagcatatgttatcagcgcgacgcgctgggcaacccgacggacatcacgctgccggacgggcagcacctgacgcatctgtattacgggagcgggcatctgttacagacggcgctggacggcctgacggtgagcgagtatgagcgcgacagcctgcaccgtcagataatgcgcacgcaggggcagcttgcgacgtacagcggctatgacgacgacgggctgctgagctggcagcgcagcctggcgcccggcagtgcccctgttcttcccggccagcgcccggcgcggcagggctgcgtgacgtcgagggactattactggaacaaccacggcgaggtgggcacgattgacgacggcctgcgtggcagcgtggtgtacagctatgacagaagcggttacctgaccgggcgctcaggtcagatgtatgaccatgaccgttattattacgataaggcgggcaacctgctggataacgaagggcagggtccggtgatgaacaaccggctgccgggctgtggtcgtgaccgttacggttataacgagtggggcgagctgaccacgcggcgcgaccagcaactggagtggaacgcgcaggggcagctgacgcgggtcatcagcggcaacacggagacgcactacggctacgatgcgctggggaggcgaatccgcaaggcgacgtacgggcggcacacgggccatacggcgcggagccggacggactttgtgtgggaggggttcaggctgttgcaggagaacgtgcagcagcagggctggcggacatatgtgtacgatgcggaacagccgtacacgccggtggcgagcgtgacggggcggggagaaagcaggcaggtgtggtattaccacacggacgtgacgggcacgccgcaggaggtgacggcggcggacggaacgctggtgtgggcggggtatatcagggggtttggagagaatgcggcggacatcagcaacagcggggcgtactttcaccagccgctgcggctgccggggcagtattttgacgacgagacggggctgcattacaatctgttcagatattatgcaccggagtgtggacggttcgtcagtcaggatccgattgggttaaggggcgggttaaacctgtatgcgtactgccctaatccactgacatggatagatcctctgggactggatttacaccatataattccgcaagaggtttggaaaacttttaaaacggatttaaaaaaagtcaccggatatgtgcaaaacgtcacgaagaaagcaatggatgtaacaaacttaattgatctggataaacctttccatggtaatcatcctgcctatagtgcttatgtaaaagataaaattagtgaacttataaaaaataaaaaattaagtttaactgagctaagaaatttgcaggatgagttgaggtctaaaattaatgctgcaaaagcatctggtaaaaatctgaatgactattttaaaggaggttgctaa

SEQ ID NO: 40030 - DNA, 2532 bp, Salmonella typhi
atgacgatgcaccgggagccgggcggcgaacggtattactacacctgggcgtggtttgaaggcccggacgatgcggcgtggcgggtgacgggccatcatacggacagcggcgagcagtaccgtctggactggaatctggcagaacgttcgctgtgcgtgacggatagcatggggcgtacgcgctgccactggtgggatgcgcagggcctggtgacggcgtaccgggacgaggccgggcagatgaccactttccgctggagcgatgaagagcggttactgctggggatgacggacgcgcagggtggcaaatggcgttatgtctatgaccgtctcggccacctgacggagacgcatgacccgctgggccgggttgagcagacgcagtggcacccggtgtggcaccagccggaaacggaggtggatgccgcgggggtggcgtggcgttatgagtatgatgagcggggcaacctgcaggcggtcagcgacccgctgcaccagcgcacggtatacgggtatgaccggcacggccaggtggtgcggataaccgacgcgcggggcggagataaatacctgcagtggaacgaagacggacagcttatgcgccacacggactgttctggctcgcagacggcatggttttatgatgaacgcacgcggctggaaagggtgacggacgcggagagtaacagtacgcgttacagctatgacggcaacggacatctgacggaggtcatgttcgcggacgggcgtacggagcgttaccagccggatgcggcgggacggctggtgaaatatacgagcccggcggggcaaataacacgctggcagcgggacggccaggggcgggtgcgcaggcagacggatgcgacgggtcgcaggacggcgtatgagtacgacgcttacgggcggctgaccacgctcacgaacgagaacggggaaagctaccggttccggtacgatgttctggaccgggtgacggaacagacggaccccggcggcagccgccgggcatacgggtataacgcgctgaatgcggtgacggcagtgatatacggcggggagcgcgggggagaaatccgccacggtctggagcgtgatgcggcggggaggctgacggcgaaaatcacgccggagacgcgcacggaataccggtacgacgcggcggaccgtctgctggaaatccgccgcaggcggcatgatgcggcggaaggcggagagccggaagttatccggttcagctacgacagtgcgggtaacctgctgagcgaggagacggcgcagggcgtgctgcagcaccggtacgatgttcagggcaaccgcacagaaacgcagatgccggacgggcggacgctgcggtacctgtactacgggagcggacatctccagcaaatcaacctggggcgtgatgtcatcagcgagttcacgcgcgaccacctgcaccgtgaggtgcagcggagccaggggcggctggacatgcggcggatgtacgaccggacgggccggttaacgcggaaactgacctgtaaaggaatgcgcggtgtggtgccggagacgtttattgaccgggaatatgcgtacagcggccaggatgagctgctgaaaaagcggcacagccggcagggggtgacggattatttttacgacacgacggggcgcatcacggcgtgccggaatgaggcatacctggacagctggcagtacgacgcggcggcgaacctgctggacaggcggcagggagagaccgcgcaggcgggtgcaggcagcgtggtgccgttcaaccggataacgtcatatcgcgggctgcattaccgttacgatgaatatggccgggtggtggaaaagcggggccgcaacggcacgcagcactaccgctgggacgcggagcaccggctgacggaagtggcggtcacccgggggggcaccgtacggcgttacgggtacgtgtacgacgcgccgggcaggcgggtggagaagcacgagctggacgcggaaggaaagccgtataaccggacgacgtttttatgggacggaatgcggctggcacaggagtgcaggctgggaagaagcagcagcctgtatatctacagcgaccgggggagccacgagccgctggcgcgggtggacagggcggcgccgggcgaagcggatgaggtgctgtattaccatacggacgtaaacggcgcgccggaggagatgacggacggcgggggcaatattgtctgggaagcgggctatcaggtatgggggaacctgacgcatgaaaaagaaacccggcccgtacagcagaacctgcgtttccaggggcaatatctggacagggaaacggggctgcattacaatttgtacagattttatgatccggatatcgggaagtttatatcgggcgatccgatagggttagcgggtggaataaacctctaccaatatgcgcctaatccgctaagttatatagatccgctaggtttatgtaaaaaatttgctggtaaaggttctccggcagaaagggccaggaattatagaagcactggctag

SEQ ID NO: 40031 - DNA, 582 bp, Salmonella typhi
atgcgtaataaaataatacttgccatggcggctgccggtatgatgtatggcgcttctgtatatgcagtcgatccaccaacagcaggcccgttcggctcaggtaaaattacctttactggtaccatcaccaactccccctgtgatatcgcaccgggcgacgatgcgatcaccgttccatttggacagatttcttaccgtaaactgaataccgccgatgcaaccacggactcaaaaccgttcaccattcatctgcagaactgtgctttcgatccgaatatcccggacacagctggctccgcagggaaaatgtccaaagtgaccgtctctttctctggcggagccaatgtcgcgaaaaaggcttacaccaccagcggcagcgcacagcatgttggtgtccagctactgaagagtgacaacaccgcaattatcgagcccaacacccagatgccggaggacgacgctcagcaactgcaggccggaaacaacgaactcaacttctatgcccggctaatagcactggataatggcgtcacgcccggtgacttcaccgcatctgtcacctacactctgaaatacctgtga

SEQ ID NO: 40032 - DNA, 1503 bp, Salmonella typhi
atgaacacctttttttcccgtttaatcaccgttgttgcctgcttttttatcttctccgccgcgtggttctgcctgtggagcatcagcctgcatctggtagagcgcccggagctggcggcgctactctttcccttcggcctgcgcctgggacttatgctgcaatgcccgcgcggatactggccagtattgctgggcgcggagtggctgctggtgtactggttggcgcaggaagttgcgctggcccatctgccgcttttgatgatcggtggtgtgttgacgctactgcccgtggcgctgacttctcgttaccgccatcagcgcgactggcgcacgttattgcttcagggcgcggccctcaccgccgcggcgctactgcaatccctgccctggctggggcagggggaagcggcatggaacgcgctactgctgaccctcacggggggactgacgctggcccccatctgcctggttttctggcactatctcaccagcactacctggctgccgctgggaccatcgctggtatcgcagccggtaaactggcgcgggcggcatctgatctggtatctgctgctgtttatcgtcagtctgtggctgcaactggggttacctgctgaactttcgcgcttcacgccgttctgcctggcgttgccgattatcgcgctcgcctggcattatggctggcagggcgcgctcattgccacactgatgaacgctatcgcgctgatcgccagccagacctggcacgatcatcccgtcgatttattactttcgctgttggcgcaaagcctgaccgggctactgcttggcgcgggcattcagcgcctgcgcgagctgaaccagtcgctgcaaaaggagctggcgcgcaaccatcggctggcggagcgtcttctggagaccgaagagagcgtacggcgcgatgttgcgcgtgagctgcacgatgacatcggacagaccatcaccgcgattcgaaccctggcgggcattgtgcaacgactggcggcggataacggcggcgtgaagcagagcgggcaacttatcgagcagctttcgctgggcgtgtatgacgccgtgcgtcgcctgctggggcgcttgcgcccgcgccagctagacgacttaacgctggcgcaggccatccgttcgctgctgcgcgaaatggagctggaaagccgcggtattgtcagtcacctcgactggcgaattgacgaaacggcgctaagtgaaagtcagcgcgtgacgctgtttcgcgtctgtcaggaagggctgaataacatcgtaaaacatgccaatgccagcgcggtgacgctccagggctggcagcaggatgagcggctgatgctggtgattgaggatgacggcagcggcctgccgccgggctctcaccagcagggcttcggcctgaccggaatgcgcgaacgcgtgtcggcgctcggcgggacgctaaccatctcttgtacccacggtacgcgggtgagcgtctcgttgccccagcgttacgtttaa

SEQ ID NO: 40033 - DNA, 744 bp, Salmonella typhi
atgaaaacattgagtaaaagttcacacatcccactgtatcaacaggttgtggagtggataagggaaagtatttatagcggagaattggttgaggatgaccggataccttcagagtttcaaatcatggatatgctggaggtgagtcgcggtaccgttaaaaaagcggttgaccaacttgtccgggaaggtgttcttgtgcaagtgcagggtaaaggaactttcgtaaagaaggaaaatgttgcttacccactgggtgaaggtttgctctcctttgctgaagccttagccagccagaagataaacttcacaaccagcgtcataacctcccgactggaacccgctaaccgctttgtagcagagaaactgagtatcaaaccgggacaagatgttttatttcttaaacgccttcgttgtattggcgatgaaaaagtcatgttgattgaaaatcgtatcaacattgatctctgccccggtattattgatgtagattttaccagggagaatttattttcagcaatagaaagattatctgataagaaaataagtttttctgaaagccgttacgcagctaaattaattggtaatgagcgaggccattatcttgatattggtgaagacgcacctgttttgcatttggaacagttggtatttttctctagaggattggccattgattttggtaacgtctggttaaaaggtaataaatattatcttggcactattttacagcgcctggatgcctga

SEQ ID NO: 40034 - DNA, 822 bp, Salmonella typhi
atgtcttatgcacgacatttaccggtattaatgtatcaccatgtcagtgataaacccggacagataaccttatctccccgtacgttccgggcgcagatgaaatggctggctgaatctggctggaaaaccgttactgctgcagcggtggaagctttttatcatggtgcaagattgcctcgtaaaagcgtcatgctgacttttgatggcggctggctggataactggttgcaggtttttccggtgctgcaggagtttaatctgcatgcgcatctctttcttgtgaccagtttgatcagtgacggaccggttcgtattcctgcaggcgaaccggtgtactctcatgatgagtgtcagatgctggttaaacaaggccgggttgatgaggtcatgctgcgctggtcagaggtccgggagatgcacctcagtggccttgttgagtttcattcgcacacgcacacccaccgacgctgggaccagaagcctgtgtcccgtaatccgtcggatttgcttcgtgtcgatattcttcttagtcgtaagcggatgagggagatgctgggttactgcagtcagcatctgtgctggcctgagggctggtattgttctgattatattcatgtggctgaagagctggggttcacatacctgtataccacagaaaggcgtatgaacaatccagtcatcggttcacagcgtattggtcgtatcaacacaaaggagcgaaagaatgtgggctggctgaaacgtcgcctgttttatcacaccacgcccggattttcttcgctgctggcccggcataagggggcacgtcggatagctgactga

SEQ ID NO: 40035 - DNA, 1518 bp, Salmonella typhi
atgtctgaacaaaacgcacagggcgctgacgaggtagtcgatcttaacaatgaaatgaaggcacgtcgcgagaagctggctgcactgcgtgagcagggtatcccgttcccgaacgatttccgtcgtgaccgtacctcagaccaactgcacgcagagtttgacgcgaaagaagctgaagaactggaagcgctgaatattgaagtgtccgtcgcgggccgtatgatgactcgccgtattatgggtaaagcctcttttgttaccctgcaagacgtaggcggccgcattcagctgtatgtggcgcgcgatgatctgccggaaggcgtttacaacgagcagttcaagaagtgggatcttggcgatatcctcggcgcgaaaggtaagctgttcaaaaccaaaaccggcgagctgtctatccactgcaccgaactgcgcctgctgacgaaagcgctgcgtccgttgccggataaattccacggcctgcaggaccaggaagcgcgctatcgccagcgttatctggatctcatctctaacgatgaatcccgtaataccttcaaaacccgttcgaagatcctggccggtattcgccagtttatggttgctcgcggctttatggaagtcgaaacgccgatgatgcaggtgatcccaggcggcgcgtctgcccgtccgtttatcacccatcacaacgcgctggatctggacatgtacctgcgtatcgcgccagaactgtacctgaagcgtctggtggttggcggcttcgaacgcgtattcgaaattaaccgtaacttccgtaacgaaggcatctccgtgcgccataatcctgagttcaccatgatggaactctatatggcgtatgcggactacaaagacctgatcgagctgactgagtctctgttccgtacgctggcgcaggatgttctgggcaccacccaggttccatacggtgatgaagtgtttgacttcggtaagccgttcgaaaaactgaccatgcatgaagcgatcaagaaatatcgtccggaaacggatatggctgatctggacaacttcgactccgcgaaggcgattgctgaaagcatcggcattcacgtcgagaagagctggggtctgggccgtatcgtcaccgagatctttgacgaagtcgctgaagcgcatctgattcagccgaccttcatcaccgaatatccggctgaagtgtctccgctggcgcgtcgtaatgatgtgaacccggaaatcactgaccgcttcgagttctttatcggcggtcgtgaaatcggcaatggctttagcgagttgaacgatgcggaagaccaggcgcagcgtttcctggatcaggttaatgcaaaagcggcgggcgacgacgaagccatgttctacgacgaagactacgtgacggcgctggaacacggtttaccgccgacagcgggtctgggaattggtatcgaccgtatggtgatgctgtttactaacagccacacgattcgcgacgttattctgttcccggcgatgcgtccggtgaaataa

SEQ ID NO: 40036 - DNA, 1099 bp, Salmonella typhi
atgtttgaaattaacccggtgaataaccgcattcaggacctcacggaacgcaccaacgttcttagggggtatctttgactacgatgctaagaaagagcgtctggaagaagtaaacgccgagctggaacagccggatgtctggaacgaacctgagcgcgcgcaggcgctgggaaaagaacgttcatcgctcgaagcgattgtcgatacgcttgatcaaatgactcaggggctggacgacgtttccgggctgctggaactagcggtagaagctgacgacgaagagacgtttaacgaagccgtcgcggaactgaatacgctggaagagaagctggcgcagttggaattccgccggatgttctccggcgagtacgatagcgccgattgctatctcgatattcaggccggttccggtggtactgaagcacaggactgggccagcatgttgctgcgtatgtatctgcgttgggcggaagcgcgcggcttcaagacggaagtcattgaagagtcggaaggggaagtcgccggcattaagtccgcgactatcaaaatctccggcgaatatgcctatggctggctgcgcactgaaaccggcgtacatcgtctggtgcgtaaaagcccgttcgactccggcggtcgccgtcatacctcgtttagctccgcgtttgtgtatccggaagtggacgacgatatcgatatcgacattaacccggcggatctgcgtatcgacgtctatcgcgcgtctggcgcaggcggtcagcacgttaaccgtacggaatccgcagtgcgtatcacccatattcccaccgggatcgtgacgcagtgccagaacgaccgttcgcagcacaaaaacaaagaccaggccatgaagcagatgaaagcgaagctttatgaactggagatgcagaaaaagaacgctgaaaaacaggcgatggaagacactaagtctgatatcggctggggaagccagattcgttcctatgtcctggacgattcccgcattaaagacctgcgtactggggtggaaacccgcaatacacaggcggtactggacggtagtctggatcaatttatcgaagcaagtttgaaagcagggctatga

SEQ ID NO: 40037 - DNA, 1734 bp, Salmonella typhi
gtgaaacaacagagacaacttcgtcggcgcgaggctgatgagacggcggaactccccgccgatcttcctccattactacgacgtctatatgccagccggggcgttcgtagcgcccgcgaactggagcgcagcgtgaaaggaatgctgccctggcaacagcttagcggcatagataacgcggtggagatcctctacaacgcctttcgcgaaggtacccgcattattgttgttggcgattttgacgccgacggcgcgaccagtactgcgctaagcgtattgggaatgcgtgcgttgggatgtgacaacatcagttatctggtgcctaatcgctttgaggacggctacggtttaagcccggaagtggtcgatcaggcgaaggcgcgcggcgcacagcttatcgtcaccgtagacaacggcatttcatcccacgctggcgtagcgcatgcaaagacgttgaggattccggtgatcgtgaccgatcaccacctgcctggcgacacgttgccggatgccgaagcgattattaatcccaatctgcgcgactgcgaattcccgtctaagtcgctggcgggcgtcggcgtggcgttttacctgatgctggcgttgcgaacatttttgcgcgacaaaggatggttcgacgagcgcggcatcgcgccgccgaatctggcggagctgctggatttagtggcgttgggaacggtagcagacgttgtgccgctggacgccaacaaccgtattctgacctggcaagggctaagtcgtattcgtgccgggaaatgccgtccgggaattaaagcgttgctggagatatcgaatcgcgatccgcagcagcttgccgccagtgatttaggcttcgcgttggggcctcgtctgaatgccgccggcaggctggatgatatgtccgttggcgtggcgttactgttgtgcgacaacctcggcgaagcgcgtgttctggccagcgagctggatgcgcttaaccagacgcgcaaagaaatagagcaggggatgcaggcggaagcgcttatcctgtgcgaaaagcttgagcgcagtagtgaaacgcttccgggcggtctggcgatgtatcatcctgaatggcatcagggcgtggtcggaattctggcgtcgcgcattaaagagcgttttcaccgcccggtgatcgcctttgcacctgcgggcgacggcacgctaaaaggctcaggccgttcgattcaggggttgcatatgcgcgatgcgctggaaaggctggatacgctttaccctgatctgatgatcaagttcggcggtcatgcgatggcggcgggattgtcgctggaagagcataaattcgagcagtttcagcaacgttttggcgagctggtgacggaatggctcgatcctgccctgttgcaaggcgaggtgatctccgatggtccattaagcgcggcggagatgtctatggaagtggcgcaactgttgcgggatgccggaccgtgggggcaaatgttcccggaaccgttattcgatggtcgtttccgtctgctacaacagcgtctggtgggcgagcgccacctcaaggtgatggtggagcctgtcggcggcggcccgctgttggatggcatcgcatttaatattgatacgacctgttggccggataacggcgtgcgggaggtagaactggcttataaactggacattaacgagtttcgcggcaaccgtagtttacagattattatcgatgatatttggccgctatga

SEQ ID NO: 40038 - DNA, 714 bp, Salmonella typhi
atgaaaaagcgttttatgatgttcactttactggcggcggcgttttcaggcgtggcccatgcggatgatgcggctatccgtcagtcgctggctaagctgggcgttcagagtacggaaattcaggcctcgccagtggcagggatgaaaaccgtcctcactcacagcggcgtactgtacgtcactgacgacggcaaacatattattcaagggccgatgtatgacgtgagcggcgcgcatccggtaaatgtgacgaacaaactgctgatgagccagctaaatgcgctggaaaaagagatgatcgtctataaagcgccggatgagaaacatgtcattactgtttttaccgatatcacctgcggctattgtcataagctacatgaagagatgaaagattataacgcgctggggatcacggtacgttatctggcttttccgcgccaggggctggaaagccaggcggagcaggatatgaaatctatctggtgcgccaaagacaaaaacaaagcgtttgatgacgccatggcaggtaagggcgtgaaaccggcaagctgtgacgtgaacattgctgatcattatgcgttgggcgtgcagttgggcgttagcggtacgccagccattgtattgagtaacggctatgtggtgcctggctatcagggaccgaaagagatgaaagcgtttcttgatgagcatcaaaaacagaccagtggtaaataa

SEQ ID NO: 40039 - DNA, 897 bp, Salmonella typhi
atggaacaggatttagcgcgtattgagcagtttctggatgccctgtggctggaacgaaatctggcggaaaatacattaagcgcgtatcgtcgcgatttatcgatggtcgttgcgtggttgcatcatcgcggaaaaacgcttgcgacggcgcaggctgatgatttacaaacgctattggctgaacgggtggagggcggatacaaagcgaccagctccgcacgcctgttaagcgctatgcggcgctttttccagcatctgtaccgtgaaaagtatcgtgaggatgatccgagcgcacagttggcctcgcctaagcttccgcagcgtttaccgaaagaccttagcgaggcgcaggttgaacggctcttgcaggcgccgcttattgatcaacctttggagttgcgcgataaagctatgttggaagtgctgtatgccaccggtttgcgcgtgtcggaactggtggggctgacaatgagcgatatcagtctgcggcagggcgtggtgcgggttatcggtaaaggcaataaagagcggttggtgccgttaggcgaagaggcggtatattggctggaaacgtatctggagcatgggcgtccctggttactcaatggcgtatcgattgacgtattattccccagtcagcgtgcgcagcagatgacgcgacagaccttctggcaccgtattaaacattatgcggtactggctggaattgatagcgaaaaactatcgccgcatgttttacgtcacgctttcgccacgcatttgctgaatcacggcgccgacttgcgcgttgtacaaatgctacttgggcatagcgatctttcgacgacacaaatttatacgcatgtcgcaacggagcgtttgcgtcaacttcatcaacagcaccatccgcgggcatga

SEQ ID NO: 40040 - DNA, 348 bp, Salmonella typhi
ttgctccttcatgggctggttgccgcggtgattttattgatgccctggccgctgagttataccccgttatggatgatactactgtcgctggtcgtgtttgactgtgtacgtagccagcgcaggattaatacctgccagggagagatcaagctactcatggacgggcgcttacgctggcagggacaggactggacgctcttgcgtcctccctggttactgaagagcgggatggtgttgcgtttacgcgcagagtctggacgtcatcagcatttatggctggcggcggatagcatggaagaagcggaatggcgtgagttgcgtcggatactgttacagcagccgatatag

SEQ ID NO: 40041 - DNA, 267 bp, Salmonella typhi
atggatattcacaataaagcacgtattcactgggcatgtcgtcgcggtatgcgcgaacttgatatttccatcatgccgttttttgaacatgagtacgatagtttaagtgatgaagaaaagcgtatttttgtccgtttgttgcagagtgatgacccggatttatttaactggttaatgaatcacggtaaaccggctgacgctgaactggaacagatggtccgactcattcagacacggaatcgggaacgtggtcctgtggcaatctga

SEQ ID NO: 40042 - DNA, 981 bp, Salmonella typhi
atggcttttatctcctttccaccacgtcatccctcatcgtcagcccgcctgccgctgacgctgatcgcgcttgacgactgggcgctgtcgtccattaccggcgtagacagtgaaaagtatattcagggccaggtcaccgctgacgtaagccagatgactgaacagcaacaccttctcgccgcccactgcgatgctaaaggtaagatgtggagcactctgcgactgttccgtgagcgcgacggtttcgcctggattgaacgccgtagcgtgcgtgaagcgcaattaacggagctgaaaaagtacgccgtattttccaaagtagtcatcgcgccggatgacgaacgcgtattgcttggcgtggccggttttcaggcccgcgcggcgctggctaatgtctttagcgaactgcccaatagtgaaaatcaggtggtcagagacggcgcctccacgctgctatggtttgaacatcctgcggaacgattcctgcttgtcaccgatgtcgcgacggccaacatgttaacggagaagttgcatggcgaagccgaactgaataacagtcaacagtggctggcgttggatattgaagcaggcattccggtgattgacgcggcgaacagcggtcagtttatcccccaggcgactaacctacaggcgctgggcggcatcagcttcaagaaaggctgctacaccggacaggagatggtcgcacgggcaaaattccgcggcgccaataaacgcgcgctttggttgctggcgggcaaagccagccgggtaccggaagcaggagaagatctggagctacagatgggcgagaactggcgtcgtaccggcgctattctggcggcgacacagttggacgatggtcagttactggttcaggccgtcatgaataacgatttagaagccgaaagcgtcttccgcgttcgcgacgatgccaacaccctgcatatcgtcccgctgccttactcgttggaagagtga

SEQ ID NO: 40043 - DNA, 660 bp, Salmonella typhi
atggtgcaaaaaccattaatgacgcagggatattcgctggctgaggaaatcgccaacagtattagccacggcattggattggtatttggtattgtcggcctggtgctgttgttggttcaggcggtagaggcgaatgcgggtatgacggctatcgccagctacagtttatatggcgggagcatgatcctgctttttcttgcctcaacgctttatcatgccattcctcatcagcgggcaaaaatctggttaaagaaatttgatcactgcgctatctatctgctcattgccggaacctatacgccatttctgctggtaggtctggattcgccgctggcgcgcggactaatgattgtgatctggagcctggcgctattcggtatcctcttcaagttgacgattgcgcaccgatttaaagtgctttcactggttacgtatctggcaatgggctggctgtcgctgatagtggtttatcagttggcgattaagctggcgataggcggcgtgacgctgctggcggtaggtggcgtcgtttactcgctgggcgtaattttctatgtttgcaaacgcataccttataaccacgccatctggcatggctttgtgctgggcggcagcgtgtgccacttcctggccatctatttgtatgtgggacaggcgtaa

SEQ ID NO: 40044 - DNA, 1434 bp, Salmonella typhi
atgagaaaactcaccctgccaaaagattttttatggggcggcgcggttgccgcacaccaggttgaaggcggctggaataaagacggtaaaggccccagcatctgcgacgtgctaaccagcggcgcacacggcgtgccacgcgaaatcacccagaatgtcgttgctggcaaatactatccgaaccacgaggcggtggatttttacggacattacaaagaagacatccgtcttttcgccgaaatggggttcaaatgcttccgtacttctattgcctggacgcgtatcttcccgaatggcgacgaatcccagccaaacgaggccggtctgaaattctacgacgacatgtttgatgagttactcaaatacaacatcgaaccggtcatcaccctttctcactttgaaatgccattacatctggtacagcactacggcggctggaccaatcgtaaagtggttgatttctttgtccgttttgctgaagtcgtgtttgaacgctacaaacataaggtcaaatactggatgaccttcaacgaaattaacaaccagcgaaactggcgcgcgccgctgtttggctactgctgttccggcgtggtgtataccgagcatgagaatccagaagaaaccatgtatcaggtcttacatcatcagtttgtcgccagcacgctggcggtaaaagcggcacgtcgtattaatccacagatgaaagttggctgtatgctggcgatggtcgcgctgtatcctttctcctgtaaaccagaagatgtgatgtttgctcaggaatcgatgcgtgaacgctacgtctttaccgatgtgcagctgcgcggctattacccgtcctatgtgttgaacgagtgggagcgccgcggatttaacatcaaaatggaagatggcgatcttgaagtgctgcgcgaaggcacctgcgattatcttggtttcagttattacatgaccaacgcggtcaaagccgaaggcggtagcggcgatgcgatttccggttttgaaggcagcgtaccgaacccctatgttaaagcatctgactggggctggcagattgacccggtgggtctgcgctattcattgtgtgaactgtacgaacgctatcaaaagccgctatttattgtcgaaaacggttttggtgcttacgacaaagtagaagaagatggcagcatcaacgacgactatcgcattgactacctgcgcgcccatattgaagagatgaaaaaagcggtgacttacgatggtgtcgacctgatgggctacacgccgtggggctgcatcgactgcgtgtcgttcaccaccggtcagtacagcaagcgctacggcttaatctacgtgaacaagcacgatgacggtacgggcgatatgtcgcgttcgcgtaagaagagcttcaactggtacaaagaggtgattgccagcaacggcgagaagctttaa

SEQ ID NO: 40045 - DNA, 2874 bp, Salmonella typhi
atgacacagacgctaagccagcttgaaaaccgcggcgctttcattgaacgccacatcggaccggacgccgcgcagcagcaagagatgctgaatgcggttggcgccgagtcgttaaacgcgctgacaggtcagattgtgccgaaagacattcagctcgcgactccgccgcaggttggcgaggcggcaaccgaatatgccgcactggcggaattaaaagccatcgccgggcgtaacaagcgcttcacgtcctacattggcatgggctacaccgccgtgcagctaccgccggttatcctgcgcaacatgctggaaaatccaggctggtataccgcctacactccttatcagccggaagtctctcaggggcgcctggaagcgctgctcaacttccaacaggtgacgctggatctgaccggactggatatggcttcggcttctcttcttgacgaagccaccgctgccgccgaagcaatggcgatggcaaagcgcgtcagcaaactgaaaaatgccaaccgtttctttgtggcggctgacgtccatccgcaaacgctggacgtggtacgtacacgcgccaaaacctttggctttgacgtgattgtcgatgacgcggacaaagtgctggatcatcaggacgtatttggcgtgctgttacaacaggtaggcaccacgggcgaaattcacgactacggcacgctgattagcgaactcaaagcccgtaaggtgattgtcagcgtcgccgccgattttatggcgttggtgctgcttaccgcgccgggcaaacagggcgcggatattgttttcggctctgcgcaacgttttggcgtaccgatgggttacggtggcccgcacgcggcgttctttgccgccaaagacgaatttaaacgctccatgccaggccgtattatcggcgtctcaaaagatgcggcgggcaataccgcactgcgcatggcgatgcagactcgcgagcagcatatccgccgtgagaaagcgaactccaacatttgtacctcgcaggtactgctggctaacatcgccagtctgtatgccgtttatcatggaccggttggcctgaaacgcattgcgaatcgtatccaccgcctgaccgatattctggcggccggtctgcaacagaaaggcttaaagctgcgtcatgcgcactactttgacacgctgtgtgtggaagtagctgataaagctgcggtactggcgcgtgcggaagcggcagagatcaatctgcgcagcgatattcataacgcggtgggtattacccttgatgaaaccaccacccgtgagaatgtggcgcagttgttcaatgttttgctgggcgacagccacggtctgaacattgaaacactggataaagacgtggcgcttgatagccgttccattcagcaaggtatgctgcgtgacgatgcgattctgacgcatccggtatttaaccgctaccacagcgaaaccgagatgatgcgctatatgcactcgctggagcgtaaagatctggcgctgaaccaggcgatgatcccgctgggttcctgcaccatgaagctgaacgccgccgccgagatgatccctatcacctggccggaattcgctgaactgcacccgttctgcccgccggagcaggccgaaggatatcatcagatgattagccagctttctgactggctggtgaaactcaccgggtacgacgccgtctgtatgcagccgaactccggcgcgcagggggagtacgcggggctgctggcgattcgtcattatcacggaagccgcaacgaagggcatcgcgatatctgcctgattccggcctctgctcacggcactaaccctgcttctgcacatatggcaggaatgcaggtggtggttgtggcgtgtgataagaacggcaacatcgacctggacgatctgcgggccaaagcagaacaacatgctgcgaacctctcttgcatcatggtgacctatccgtccacccacggcgtctatgaagaaacgatccgtgaagtgtgtgaagttgtgcaccagttcggcggtcaggtttaccttgacggcgcgaacatgaacgctcaggtcggcattacctcaccgggctttattggcgcggacgtttcgcatcttaacctgcataaaactttctgcattccgcacggcggcggtggcccaggcatgggaccgatcggcgtgaaagcgcatctggcgccattcgtaccgggtcatagcgtggtgcaaattgaagggatgctcacccgtcagggcgcggtgtctgcggcgccgttcggcagcgcctccattttgccgattagttggatgtacatccgcatgatgggcgcagaaggcctgaagcaggcaagtcaggtcgcgattcttaacgctaactacattgccagccgtctgaaagacgcgtacccggtactgtataccggtcgcgatggccgagtggcgcacgaatgtattcttgatattcgcccattgaaagaagaaaccggcatcagcgagctggatattgccaagcgtctgatcgactatggtttccatgcgccaaccatgtcgttcccggtggcgggcacgctgatggtagagccgacggaatctgaaggtaaggctgagctggatcgctttatcgatgcgatgctggctatccgcgcagagattgaccaggtgaaagccggtgtctggccgctggaagataacccgctggtgaacgcgccgcacattcagagcgaactggtcgccgagtgggcgcatccgtacagccgtgaagttgccgtattcccggcaggcgtggcagacaaatactggccgacggtgaaacgtctggatgatgtttatggcgaccgtaacctgttctgctcctgcgtaccgattagcgactaccagtaa

SEQ ID NO: 40046 - DNA, 1095 bp, Salmonella typhi
atggcccaacagacgcctttgtacgaacaacacacgctatgcggcgcccgcatggtcgattttcatggctggatgatgcccctgcattacggctctcagcttgatgaacaccacgctgtgcgcaccgatgccgggatgtttgatgtatcgcatatgaccattgtcgatcttcatggtagccgtacacgagagtttctacgttatctgctggcaaacgacgtcgcgaagctaacgaagacgggtaaagccctctactccggtatgcttaacgcatcgggcggtgtgatagatgacctgattgtctactacttcactgaagatttcttccgtctcgttgttaactccgccacccgcgaaaaagacctctcctggattacccaacacgctgaaccttatgccatcgacatcaccgttcgtgacgacctgtcgctgattgcggtacaggggccgaatgcgcaggaaaaagcggcgactctgtttactgaccaacagcgccatgcagtagaaggtatgaagccgttcttcggcgttcaggcgggcgatctgtttatcgccaccaccggttataccggcgaagcgggctatgaaatcgccatgccgaatgaaaaagcggcggatttctggcgtgcgctggtggaggcgggcgtgaagccgtgcggtcttggcgcgcgcgacacgctgcgtctggaagcaggcatgaacctgtacggtcaggagatggatgaaggtatctctccgctggcggctaatatgggatggactatcgcctgggaacctgctgaccgcgactttattggccgtgaggcgctggagatgcagcgtgaaaaaggccatgagcagcttgtcggtctggtgatgaccgagaaaggcgtattgcgtaatgaactgccggtgcgttttaccgatgcgcagggcaatcagcaagaaggcattatcaccagcgggacgttttccccaacgttgggctacagcattgcgctggcgcgcgttccggcgggcatcggcgagacggcgattgtacaaattcgtaaccgtgaaatgccggtaaaagtgactaaacctgtttttgtgcgtaacggcaaagccgtcgcgtga

SEQ ID NO: 40047 - DNA, 1203 bp, Salmonella typhi
gtgcaaagtgttgatgtagcaatagttggcggaggcatggtgggactggctgtcgcctgcggcttgcaggggagcggtttgcgcgttgcggtactggatcacgttgttccccagcagttggcgaacgatgcgccgcctcagcttcgggtgtcggcgattaatgccgccagcgaaaaactgcttacccgtcttggcgtatggtcaaacattgtggcgcgacgggcaagttgctaccacggtatggaagtctgggataaagacagctttggccgtattacgtttgatgacgcaagcatgggatatagccatctggggcatattgttgaaaacagcgtcattcactatgcactgtggcaaaaagcgcagcaagcggcggatatcaccttaatggcgccagcggagttacagcaggttgcctggggagagaatgacgccttcctgactttaaaagacggcgcgatgttaaccgcgcgtctggtgattgccgcggatggcgccaactcctggctgcgtaacaaagcggatattcccttaactttctgggactaccgtcaccatgcgctggtagcgactatccgcaccgaagagccgcacggcgcggttgctcgccaggtgtttcatggtgaaggtattctggcgtttttgccgttaagcgatccgcatctgtgttccattgtctggtcgctttctccgcaggatgcggagcgtatgcaacagagcggcgacgaggcgtttaaccaggcgttgactatcgccttcgataatcggctgggcttatgccgcctggaaagcgaacggcaggtttttccgctgacgggccgctatgctcgccagtttgccgcgcatcgtctggcgttggtcggcgatgccgcgcacaccatccatccgctggcagggcaaggcgtcaacctcggttttatggacgcggccgaactggtggacgatctgtgccggcttcagcgccagggcaaagacattggccaacatctttatctccgtcgttatgagcgtagccgtaaacatagcgcggcgatgatgcttgccgggatgcaaggttttcgtgacctgtttgccggcgaaaacccggcaaaaaaattgctgcgcgacatcggactgaaactggcggacacgctccccggcgtcaaaccccaactgcttcgccaggcaatggggctaaacgaccttccgcaatggcttcgttaa

SEQ ID NO: 40048 - DNA, 549 bp, Salmonella typhi
atgattcggcaacgtcgccgtgcgctgacgccagagcagcaacgccgctttggtcaacaggccgccgcccgaatgctcagctttcctcccgtcgtgatggcgcacactgtcgccgtgtttctctcctttgatggcgaactcgacacccagccgctgatagaacagctatggcaagcgggcaagcgcgtctaccttccggttcttcatcccttcagccctggcaacctcctgtttctgcactatcatccgcagagtgcgctggtgaccaaccgcttaaatatccgggagccacggcttgatgtccgcgacgtattgccgctggcaaagctggatgtgctggtaacgccgttagtcgcgtttgacgaaggcgggcagcgtttaggcatgggcggcggtttttatgaccgcacgctacaaaactggcagcagcataagatcctacctgtgggctacgcgcatgattgccagttagtagaaaaactgccggttgaagagtgggatatcccgctgcctgcggtggtgacgccgtccaaaatttgggagtggtag

SEQ ID NO: 40049 - DNA, 1353 bp, Salmonella typhi
gtgtttataggatttgattacggtacggcaaactgctcggtcgccattatgcgcgacgggcatccacagttgctgacaatggagaataacagcgcattactgccgtctatgctgtgtgcgccgacgcgcgaagcggtgagcgagtggctgtatcgccatcatgatgtgccggcaacggacgaagaaacccaggcgctgctacgccgcgctatacgctacaaccgcgaggaagatattgaggttggcgcgcaaagcgtacagtttggtctggcgtcgctggcgcactatattgacgatccccaggaagtctggttcgtcaaatcgccgaaatcctttttaggcgccagcggcctgaaaccgcagcaggtcgcgctgtttgaagatttggtctgcgccatgatggtacatattcttcatacggcgcacagccaattgccggaggccattactcaggcggtgatcggtcgcccgatcaactttcagggactcggcggcgatgacgcgaaccgccaggcgcagggtattctggagcgggcagcaaaacgcgccggttttcaggaggtggtattccagtatgaaccggtcgcagcgggcctggactacgaggctacgctgcgggaagagaagcgtgtgctggtcgtggatattggcggcggtaccaccgactgttccatgctgctgatggggccgcagtggcgtcagcgcgccgatcgtgaaaacagcctgttggggcacagcggttgccgcgtgggcggaaacgatctggatatcgcgctggcctttaaaaatctgatgcctttgctgggcatgggcggcgaaaccgaaaaaggtatcgccctgccggtgctgccgtggtggaacgccgtcgcgattaacgacgtcccggcgcaaagcgatttttacagtagcgcgaatggtcgtctgttgaacgatttggttcgcaacgcgcgtgaagcagacaaggtcgcgttgctgctcaaggtctggcgtcagcggcttagctaccgcctggtacgctgcgcggaagagagcaaaatcgccctttccggccaggcggatgttacggcgaggctgccatttatcagcgacgacctggcggtcgctatcagccagcaaggactggaagcggcgctggatcaaccgctggcgcgtattctggaacaggtgcaactggcgctggacagcgcgcaggaaaaaccggatgtcatctatctgaccggcggcagcgcccgttcgccattgattaaaaaagcgctttccgaacagctaccgggcatacccgtcgctggcggcgatgatttcggctccgtcaccgcaggactggcgcgctgggcggaggtcgttttccgctaa

SEQ ID NO: 40050 - DNA, 1242 bp, Salmonella typhi
atgaaaggcagtaatactttccgctgggcaatagcgattggggttgtagtggccgccgccgcattctggttctggcatagccgtagcgaaagcccgaccgccgcgccgggcgtcgccgcgcaagcgcagcataccgccgccgcaggtcgccgcggtatgcgcgacggccctctggcgccggtacaggccgcgaccgcgaccacacaggctgtaccgcgctatctgagcgggctgggtaccgtgaccgcagcgaataccgttacggtgcgtagccgcgtggatggtcaactcatcgccctgcactttcaggaaggtcagcaggttaacgcaggcgatctgctggcgcaaatcgatcccagccagtttaaggtcgccctggcgcaggctcagggacagttagcgaaagataacgctacgttggcgaatgcgcgtcgtgatctggcgcgctatcagcaactggccaaaaccaatctggtttcccgtcaggaactggatgcgcaacaggcgctggtcaacgaaacccagggaaccattaaagcggatgaagccaatgtcgccagcgcgcagctacagctcgactggagtcgtatcacagccccggtctcgggacgcgtgggtctgaaacaggtggatgtcggcaaccagatttccagcagcgataccgcaggtattgtcgtcattacgcaaacgcacccgattgatctcatttttactctgccggaaagcgatatcgcgaccgtggttcaggcacagaaagcggggaaaacgctggtcgtagaagcctgggatcgaactaactcgcacaaattgagcgaaggcgtgttgctcagtctggacaaccagattgatcccacgacgggaacgatcaaaattaaagcgcgctttaccaatcaggacgatacgctgttccccaatcaatttgtgaacgcccggatgctggtcgataccgaacaaaatgccgttgtggtgcctgccgcggcggtgcaaatgggcaatgagggccactttgtgtgggtgctgaacgacgaaaataacgtcagcaagaagcgggtaaaaatcggtattcaggataaccgaaacgtggtgatcagcgcaggattgtcggcaggcgatcgcgtcgttaccgatggtattgatcggctgacggaaggcgcaaaagtcgaggtcgttgagccgcaaaccaccatggcggatgaaaaatccccttcccgccatgaaggtcaaaaaggagcgcgcgcctga

SEQ ID NO: 40051 - DNA, 3123 bp, Salmonella typhi
atgcaggtattacctccgggcagcacgggcggcccttcgcgtctgtttattctgcgccccgtggccaccactctgctgatggcggcgattttactcgccgggattatcggctatcgcttcctgcccgtcgccgctttgccggaggtcgactaccccactattcaggtggttacgctctaccctggcgccagcccggatgtcatgacctcctccgtcaccgcgccgcttgagcgccagttcggccagatgtcaggacttaagcagatgtcgtcgcaaagctccggcggcgcatcggtggtgacgctacagtttcagttgacgctgccgctggacgttgccgagcaggaagtacaggcggcgattaacgcagccaccaatttattgccttccgacctgccgaatccgccgatttatagcaaagtcaatccggcggacccgccgattatgacgcttgccgtcacctcaaacgcgatgccgatgacccaggtagaggacatggtagaaacccgcgtggcgcagaagatctcacaggtctccggcgtcgggctggtgacgcttgccggcgggcagcgccctgcggtacgcgtaaaactgaatgctcaggctatcgccgcgctcggtctgaccagcgaaacagtccgtaccgcaattaccggcgccaacgtcaactcggcgaaaggcagtctggatggccccgaacgggcggtgacgctttctgctaacgatcagatgcagtctgccgacgaataccgcaagcttatcatcgcgtatcaaaacggcgcgccggtacggctgggcgatgtcgccaccgtcgaacagggggcggaaaatagctggctcggcgcatgggcgaatcaagctccggctatcgtgatgaacgttcaacgccagcccggcgccaatatcattgcgacagcggacagcattcgccagatgctgccccagcttaccgaaagcctgccgaaatcggtgaaggtcacggtcctgtccgatcgcaccaccaatattcgcgcttccgtgcgcgatacccagtttgaactgatgctggcgatcgcgctggtcgtcatgattatctatctgtttttacgtaatattcccgccacaattattcccggcgtcgccgtaccgctgtcgcttatcggcacctttgcagtgatggtgtttttggatttttccattaataacctgacgctgatggcgctcactatcgccacgggtttcgtggtggacgatgcgattgtggtgatcgagaacatctcgcgctacatcgaaaaaggagaaaaaccgctggcggcggcgctcaaaggcgcgggcgaaatcggctttaccattatttccctcaccttttccctgattgcggtactgatcccgttgctctttatgggcgatattgttggtcgactgttccgcgaatttgcggtgacgttggcggtagcgattttaatctccgccgtcgtctctttgacgcttacgcccatgatgtgcgcgcgtatgctcagccggcagtctctgcgtaaacaaaaccgcttttcccgcgcctgcgagcggatgtttgaccgcgtgatcgccagctacggacgcggattagcgaaagtgctcaaccatccatggcttacattgagcgtggcattcgccacgctcctgctcagcgttatgctgtggataaccatcccgaaagggttctttccggtacaggataacggcattatccaggggacgctgcaggcgccacaatcatcatcgtatgccagtatggcgcaacgtcagcgccaggtggcggagcggatattacaggacccggcggtgcaaagcctgacgacttttgttggcgtagacggcgctaatcccacgctgaatagcgcgcgcctgcaaattaacctcaagccgctggatgcgcgtgatgaccgcgtgcagcaggtgatctcccggctgcaaaccgccgtggcgacgattcccggcgtggcgctgtatctccagccgacgcaggatttaaccatcgacacgcaggtcagccgcacgcagtatcagtttaccctgcaggccacgacgctcgatgcgctcagccactgggtgccaaaactgcagaacgcgctacagtcgttaccacagctctctgaggtaagcagcgactggcaagatcggggattagcggcctgggtgaatgtcgaccgcgacagcgccagccgtctgggtatcagcatggcggatgtggataacgcgctctacaacgcgttcggacaacgcctgatttcaacgatttatacccaggcgaaccagtaccgcgtcgtgctggaacataataccgccagcacgccgggtctggcggcgctggagacgattcgcctgacgagccgcgacggcggcaccgtaccgctcagcgcgattgcccgcattgagcagcgcttcgccccgctctccatcaatcatttagatcagttcccggttacgacattttcgtttaacgtgccggagggctattcgctcggcgatgcggtgcaggcgattctcgatacggaaaaaacgctcgccctgccagcggatattacaacgcagtttcagggcagtacgctcgccttccaggcggcgctgggcagcaccgtctggcttattgtcgccgccgtggtggcgatgtatatcgtgcttggcgtgctgtatgagagttttatccatccgattacgattctctcaacgctgcctacggcgggcgtcggcgcgctgctggcgctgatcatcgctggtagcgagctcgatattatcgccattatcggcattattttactgatcggtatcgtgaagaaaaacgccatcatgatgattgacttcgccctcgccgccgaacgcgaacaggggatgagtccgcgcgacgctatcttccaggcctgtctgctgcgttttcgaccgattctgatgaccacgctggcggcgttgctcggggcattgccattaatgttgagtaccggcgttggcgcggaattacgtcgcccgttggggatcgcgatggtgggcggcttactggtcagccaggtattaactctgtttaccactccggtgatttatctcctgtttgaccgcctgtcgctgtacgtgaaaagtcgctttccgcgccataaagaggaggcgtag

SEQ ID NO: 40052 - DNA, 3081 bp, Salmonella typhi
atgcgctttttcgcccttttcatctaccgcccggtcgccaccattttgattgccgccgccattacgctgtgcggcattctgggctttcgtctgctgccggtcgccccgctgccgcaggtcgatttcccagtgattatggttagcgcctcgctgccgggcgcctcgccggaaaccatggcttcgtcggtggcgacgccgttggaacgttctttgggacgcattgcaggcgtcaatgaaatgacttccagcagctcgctcggcagtacgcgcattattctcgaatttaatttcgatcgcgatattaacggcgcggcgcgcgacgtgcaggccgccattaacgccgcgcaaagcttgttgccaggcggaatgcccagccgcccgacttatcgcaaggccaacccgtccgacgcgccgattatgattttaacgctcacctcagagagctggtcacagggcaaactgtatgatttcgcctctacccaactggcgcaaaccatcgcgcaaattgacggcgttggcgacgttgacgtcggcggcagctccctgcccgcagtacgtgtaggcttaaacccgcaggcgctctttaaccagggcgtctcgctggatgaggtccgcgaagcgatcgacagcgccaacgtacgccgaccgcaaggcgcaattgaagatagcgtccaccgctggcaaatccagaccaacgacgaactgaaaaccgccgccgaatatcagccgctgattattcactataacaacggcgcggcggtacgcctgggtgacgtcgccagcgtcaccgactcggtgcaggatgtccgtaacgccgggatgacgaacgctaaacccgctattttgttgatgatccgcaagctgccggaggccaacattattcagacggtcgacggcatccgggcaaaactgccggaactgcgggcaatgatccccgccgctatcgatttacaaatcgcccaggatcgttcgccgacgattcgcgcatcgctgcaagaggtagaagagacgctggctatctctgtcgcgctggtgatcctggtggtgtttttattcctgcgttccgggcgcgccacgctaatccccgccgtcgccgttcccgtttcgctcatcggcaccttcgccgccatgtatctgtgcggcttcagcctcaacaatctgtcgctgatggcgctgactatcgcgaccggatttgtcgttgatgatgccattgtggtgctggaaaatatcgcccgccatctggaggcgagaatgaaacctttgcaggcggcattacagggtacgcgggaagtcgggtttacggtcatctccatgagtctgtcgctggtggcggtatttctgccgctgctgttaatgggcggcctgccaggacgattattacgggaattcgccgttaccctctcggtggcgattggcatttcgctggtggtctcgctcacactgacgccgatgatgtgcggctggatgcttaaatcaagcaaaccgcgcacccaaccgcgtaaacggggcgttggccgtttgctggtcgccttgcaacagggttacggcacgtcgttaaaatgggtgcttaaccatacgcgtcttgtcggtgtggtttttcttggcaccgttgcgctgaacatctggctttatatcgccatccctaaaacattctttccggagcaggacaccggcgtgttgatgggcggtattcaggctgaccagagcatctctttccaagccatgcgcggcaagctgcaggattttatgaaaattattcgcgacgatccggcggtgaataatgtcactggttttaccggcggatcgagggtgaatagcggcatgatgtttattacgctgaagccgcgcggcgaacgcaaagagacggcgcagcaagtcattgaccgactgcgggtcaaactggcaaaagaacccggcgccaagctgtttctgatggcggtacaggatattcgcgtcggcgggcggcaggctaacgccagttaccaatatacgttgctgtctgactccctgccggcgctgcgcgagtgggagccgaaaatacgcaaagcgctctcggccctgccgcaactggcggacgtaaactccgaccagcaggataacggcgcggagatgaaccttatctacgaccgcgacaccatgtcacggctgggtattgatgttcaggccgcaaacagcctgttaaataacgctttcggccagcggcaaatttccaccatttatcagccgatgaaccagtataaagtggtgatggaagtcgatccgcgctatagccaggatatcagcgcgctggagaaaatgttcgttatcaaccgcgacggaaaagcgattcctctctcttatttcgcccaatggcggcccgccaatgcgccgctgtcggtaaaccatcagggactttccgcagcgtccacgattgcctttaacttgccgaccggcacatcgttatcgcaggcgacggaggccattgatcgcaccatgacgcagcttggcgtcccctcgacggtacgcggcagtttttccggaacggcgcaagtcttccagcagaccatgaattcacagcttattttgatagtggcggcgatcgctaccgtctacattgtgctggggatactgtacgaaagctacgtccatccgctgaccattctctctactctgccatcggcgggcgttggggcgcttctggcgctggaactcttcaatgcccctttcagcctaatcgccctgatagggatcatgctattaattggcattgtgaagaaaaacgccattatgatggtcgattttgcgcttgaagcgcaacgaagcggcggcctgacaccggaacaagccattttccaggcctgcttgttacgcttccgtccaataatgatgaccacgctggcggcgctgttcggcgcactgccattggtgttatctggcggagacggttcggaattacggcagccgctggggataaccattgtcggcggtttggtcatgagccagctcctgacgctctataccacgccggtggtgtacctctttttcgaccgtctgcggctgcgtttttcgcgtaaaaatagcaaaccggtagtagagatatga

SEQ ID NO: 40053 - DNA, 1404 bp, Salmonella typhi
atgaaagtctggcggcccggaatcaccggcaagctgtttctggcgattttcgccacctgcatcgtgctgctgatcagtatgcattgggccgtgcgcgtcagttttgaacgcggatttattgactatatcaaacacggcaacgagcagcggctacaaatgctgggcgatgcgctgggcgaccagtaccagcaacacggcaactggcgttttttacgtaacaatgatcgcttcgttttccagattctgcgttcatttgagcatgacaacgaccgggataaacccggccccggtatgccgccgcacggttggcgcacccagttctgggtcgtcgatcaaaatggccgggtgctggtcggcccacgcggtccggtgccgcatgacggtactcgccgccccattctggttaatggcgtcgaagtaggcgcgattatcgcctctcctgtcgagcggctgacgcgcaatacggatattaattttgatatgcagcagcggcgtgccagttggatgatcgtggcgttatcaaccttgctggccgcgctggcgacgtttttgctggcgcgtggcctgctcgccccggtcaaacggttggtcgagggtacgcacaggctggcggcgggggattttaccacgcgcgtgaccccaaccagcgccgatgagctgggaaaactggcgcaagactttaaccagcttgccagcacgctggaaaaaaatcagcagatgcgccgcgactttatggcggatatttcccacgaactgcgcacgccgctggcggtattgcgcggcgaactggaagccattcaggatggcgttcgccagttcacgccagaatcggttacctcgctacaggcggaagtcggtacgcttaccaaactggttgacgacctgcatcagctgtcgttgtctgacgagggcgcgctggcttaccaaaaaacgaccgtcgatcttgttccccagttggaagtcgctggcggcgcgtttagagaacgctttaccagccgggggctaacgctacattacgcgttgccggatagtatgaccgtcttcggcgacccggatcgcctgatgcaactgtttaataatctactggaaaacagtctgcgctacaccgacagcggcggcggcctgcatatttccgccgaacaacgcgacaaatcattattcctgacctttgccgattctgcaccgggcgtcagcgatgagcagttacaaaagctttttgaccgtttttaccgcacggaagtgtcccgtaaccgcgccagcggcggttctggactggggctggcgatatgcgtcaatattgtacacgcgcataacggtcatcttcacgccgctcattcgccttttggcggggttagcattacagtagagttaccgctggatcgcgatttacagagagaagtatga

SEQ ID NO: 40054 - DNA, 1362 bp, Salmonella typhi
atgtttaaaccagaactcctttcgccagcgggaacgctgaaaaatatgcgttacgctttcgcttacggtgccgatgccgtctatgcgggccaaccgcgttactctttacgcgtgcgcaataacgaattcaatcacgaaaatttgcagcttggcatcaacgaagcccacgcgctcggaaaaaaattctacgtggtggtgaacatcgccccgcataacgccaagctcaaaacctttatccgtgacctgaaacccgtcgtcgagatgggcccggatgcgctgatcatgtccgatccagggttgattatgctggtacgcgagcacttcccggcaatgccgattcacctgtcggtacaggctaacgccgtaaactgggcgacggtaaaattctggcagcagatggggctgacccgcgtgattctctcccgcgagctgtcgctggaagagattgaggaaattcgccagcaggtgccggatatggaaatagaaattttcgtccacggcgcgctatgcatggcctattccggtcgctgcctgctttccggctacatcaataaacgcgatccgaaccagggcacctgcaccaatgcctgccgttgggaatataacgtgcaggaaggaaaagaagacgttgtcggcaacatcgtgcataagcatgaaccgattccggtacagaacgttgagccgacgctcggtatcggcgcgccgacggataaagtgtttatgatagaagaggcccaaagaccgggcgaatacatgaccgcgttcgaagacgagcatggcacctatatcatgaactcaaaagatttgcgcgctatcgcccacgtggagcgcctgacgaaaatgggcgtccactcgctgaaaatcgaaggccgcaccaaatccttttattactgcgcccgtaccgcccaggtctaccgtaaggccatcgacgacgccgccgcgggtaaacccttcgaccctacgctgctggaaacgctggaaggtctggctcatcgcggctataccgaaggtttcctgcgtcgccatacgcacgacgattaccagaattacgagtacgggtactccgtttccgaacgccagcaatttgtcggcgagttcaccggcgagcgtaaaggccaactggcggccgtggcggtgaagaataaattctccgttggcgatagtctggagctgatgactccgcagggaaatatcaatttcactctggaacagatggagaacgccaaaggcgacgctatgccggtggcgcctggcgatggctataccgtctggatgcccgtcccgcaggacgttacgctggattacgcactattgatgcgtaatttctcaggcgaatcaacgcgtaacccccatgctaagtag

SEQ ID NO: 40055 - DNA, 1053 bp, Salmonella typhi
atgactgatattgcgcagttgcttggcaaagacgccgacagccttttacagcatcgttgtatgaccattccttccgatcagctttatctacccggcaaggattacgttgaccgggtgatgattgacaataatcgtccaccagccgttctgcgtaatatgcagacgctctataatactggacgcctggcgggaacaggatacctttcgatactgcccgtcgatcagggagtggagcactccgccggcgcttcttttgcggccaacccgcgctactttgacccaaaaaatattgttgaattggcgattgaggccggctgtaactgcgtggcctctacctacggcgtactggcctcggtttcacggcgctatgcgcaccgtattccgtttttggtcaaactgaatcacaacgaaacattgagctatccgacagagtacgatcagaccctgtacgccagcgttgagcaggcgttcaatatgggcgccgtggcggtaggcgcgacgatctatttcggttcggaacagtcccgtcgccagattgaagagatctccgccgcttttgagcgtgcgcatgagctgggtatggtgaccgtattgtgggcttacctgcgtaattcttcctttaaaaaagacggcgtcgattaccatgtatccgctgacctgacggggcaagccaaccatctggccgctacgattggtgcggatattgtgaaacagaaaatggccgagaataatggcggttataaagcggtcaacttcggctataccgacgatcgcgtgtacagcaaactgaccagcgataacccgattgatttggttcgttaccagttggcgaactgctatatgggacgcgccgggcttatcaactccggcggcgcggacggcggtgacactgatctcggcgacgcggttcgtaccgcggtgatcaacaaacgagccggtggaatgggactaattctgggacgtaaagcctttaagaaatcgatggctgatggcgtgaagttgattaatgccgtacaggatgtctatctggatagcaaagtcaccatcgcctga

SEQ ID NO: 40056 - DNA, 1272 bp, Salmonella typhi
atgaaaacgacctttaaactgtcgttcatgatgttcgtggagtggtttatctggggcgcctggttcgtccccctgtggctatggctaaataaaagcgggttttccgccggtgaaataggctggtcttatgcctgtaccgccattgcggcgatcctgtcgccgattctggtcggctccgttaccgaccgttttttctcagcgcaaaaagtcctggcggtactgatgtttgcgggtgccgtactgatgtatttcgcggcacagcaaaccacctttgccggattctttccgctgctcctggcctattcattgacctatatgccgaccatcgcgctgacaaacagcattgccttcgctaacgtaccggacgttgaacgcgattttccacgcattcgcgttatgggaaccattgggtggattgcctccggcctcgcctgtggattcttgccgcaaatgttaggctataacgatatttcccccaccaacattccactgctcataaccgccgcaagttcagcgttgctgggcgtatttgcgttctgtctgccagacacgccgccaaaaagcaccggcaagatggatattaaagtgatgctggggctggatgcgctggttctgctgcgcgataaaaactttctcgttttcttcttctgttccttcctgtttgcgatgccgctggccttctactacatcttcgctaacggctatctgacagaagtgggaatgaaaaacgccaccggctggatgacgctcggccagttctctgaaatcttctttatgctggcgctaccctttttcactaagcgctttggtattaaaaaggtattattacttggtcttattaccgccgcgatccgctacggcttttttgtctatggcggcgcggagacgtacttcacttacgccctgctgttcctcggtattttgctgcacggcgtaagttacgatttctactacgtcaccgcctacatttatgtcgataaaaaagcgccggttcatatgcgtaccgctgcgcaagggcttatcaccctctgctgtcagggattcggcagcctgctgggctatcgtctcggcggcgtgatgatggaaaaaatgtttgcttatccgcaaccggttaacggtctgacattcaactgggcgggcatgtggacgtttggcgcagtgatgattgccgtcatcgcgctactgtttatgattttctttcgcgaatcggacaaagagatcactgctattgacgatcgcgatattgcgttgacacaaggggaagtaaaatga

SEQ ID NO: 40057 - DNA, 747 bp, Salmonella typhi
atggaacaagcgcatacccggctcatcgcgcaactgaatgaacgaatttcagcggcggataatacgccgctatacatgaaattcgcccagacggtaaaggatgccgtgcgcagcggtattcttgagcacggtaatattttgcctggcgaacgcgatctcagccagcttaccggcgtctcgcgcatcacggtacgaaaagcgatgcaggcgctggaagaagagggggtcgtcacgcgcgcccgcggctacggtacgcaaatcaataatatctttgaatattccctgaaagaggcgcggggattttctcagcaggttgtcttgcgcggcaaaaaaccggatacgctatgggttaacaaacgcgtggtaagttgtccggatgaggtcgcgcagcatctggcgatccccgcaggcagcgacgtctttttactcaaacgcattcgttatgttgatgaggacgcggtatcgattgaagagtcctgggtgcccgcgcatctgattcatgatgtcgacgcgattggcatttcgctgtatgactattttcgtcgccagcacatttaccctcagcgtacccgatcccgcgtcagcgcccggatgccggatgatgagtttcagtcgcatattcaaatggatggtaaagtgccggtgctggtgattaagcaggtggcgctcgatcagcagcagcggcctattgaatacagcatcagttattgtcgtagcgacctatacgtttttgtgtgcgaggagtag

SEQ ID NO: 40058 - DNA, 798 bp, Salmonella typhi
atgcagcctgacctgcactgccgcacgcttgcggcgcatacgttaaaacactttcgcgcgctctccccgcttacgcactgtatgacgaatgacgtcgtacaaacgtttaccgccaatacgttgctggcgctgggcgcttcacccgccatggtgattgatcctgtcgaggccagaccgtttgccgccatcgccaacgccttgctgattaatgtcggaacattaactgcctcacgcgctgacgcgatgcgtgcggcggtagaaagcgcttatgatgccaaaacgccgtggacgcttgatcctgtcgcggtgggcgcgctggaatttcgtcggcgattttgcctggatctcttgtccctgcgcccggcggcaatacgcggcaacgcctcggaaatcctggcgttatccggcatggcgctgggcggacgcggcgtagataccaccgaggcggcgttggccgcactgcctgcggcgcaggcgctggcgcgtcagatagactgcatcgttgtggttaccggagagatagattacgtcactaatggtcagcgcacgctgagcattcccggcggcgatccgttaatgactcgcattgtaggcaccggctgcgcgttgtcggcggttgtcgccgccagttgcgcgttaccgggcgccgcgctggacaatgtcgcgtcggcctgctgctggatgaaactggctggacaggtcgcggcagagcgtagcgaaggaccgggcagcttcatcccggcttttcttgatgcgctctatcatctggatatggaggcggccaatgcaacgaattaa

SEQ ID NO: 40059 - DNA, 315 bp, Salmonella typhi; identical to SEQ ID NO: 7543

SEQ ID NO: 40060 - DNA, 2034 bp, Salmonella typhi
atgactcaagtcgcgaagaaaattctggtaacgtgcgcgctgccgtacgccaacggctctatccacctcggccatatgctggagcacatccaggctgatgtctgggtccgttaccagcgaatgcgcggccatgaggttaacttcatctgtgccgatgacgctcatggcacgccgatcatgctgaaagcgcagcagcttggtattacaccggagcaaatgatcggtgaaatgagccaggagcaccagaccgatttcgccggttttaatattagctacgacaactaccactcaacgcacagcgacgagaatcgcgagctgtccgagctgatttatacgcgcctgaaagagaacggttttattaagaaccgcaccatctctcaactctacgatccggaaaaaggcatgttcctgccggatcgatttgtgaaaggcacctgcccgaaatgtaaatccgcggaccagtacggcgataactgtgaagtctgcggcgcaacttacagcccgaccgaacttatcgagccgaaatccgtggtgtccggcgcgacgccggtaatgcgtgactccgagcactttttctttgacctgccgtcattcagcgaaatgttgcaggcgtggacccgcagcggcgcgctgcaggagcaggtggcgaacaaaatgcaggagtggtttgaatccggcctccagcagtgggacatttcccgcgacgcgccgtattttggtttcgaaatcccgaacgcgccgggcaaatatttctacgtctggctggacgcgccgattggctatatgggctccttcaaaaatctgtgcgataagcgcggtgacacgaccagttttgatgagtactggaaaaaagactccgacgccgagctgtatcactttatcggcaaagacatcgtctatttccacagcctgttctggcctgccatgctggaaggcagccacttccgtaagccgaccaacctgttcgttcacggttacgtgacggtgaacggcgcgaagatgtctaagtctcgcggcacctttattaaggccagcacctggctgaaacactttgacgccgacagcctgcgctactactacaccgcgaagctttcttcacgcattgatgacatcgacctgaacctggaagactttgtccagcgcgtcaatgccgatatcgtcaataaagtagtcaacctggcatcccgtaacgccggttttatcaataagcgtttcgacggcgtgctggcggctgaactggccgatccgcaattgtacaaaacctttactgacgccgctgcggtgattggcgaagcatgggaaagccgtgaattcggtaaagctatccgtgagattatggcgctggccgacgtcgctaaccgttatgttgacgagcaagcgccgtgggtggtggctaaacaggaaggccgcgacgctgacctgcaggccatttgctcgatgggcatcaacctgttccgcgtgctgatgacgtatctgaaaccggtactgccgacgctttctgaacgcgttgaagccttcctgaacagcgaactgaactgggatgccatcgaacagccgctgctcagtcacaaggtcaacacctttaaggcgctctacaatcgcatcgacatgaagcaagttgaagcgctggttgaagcgtctaaagaagaggtgaaagccgcagccgcgccggttaccggcccgttagccgacttcccgattcaggaaaccatcacctttgacgatttcgccaaaattgacctgcgcgtagcattgattgaaaacgctgagttcgtagatggttctgacaaattgctgcgtctgacgctggatctgggcggcgagaagcgtaacgtcttctccggcattcgttccgcctacccggacccgcaggcgctgatcggccgccagacggtaatggtcgccaacctcgcgccgcgcaaaatgcgctttggcgtctccgagggaatggtgatggccgcaggacctggcgggaaagatatcttcctgttaagccctgatgacggcgcgaagcctggccaacaggtgaaataa

SEQ ID NO: 40061 - DNA, 1011 bp, Salmonella typhi
atgaaagctgctgttgtcacacaagatcatcaggttgatgttactgagaaaacgctgcgtccccttcgccacggtgaagctttgctaaaaatggagtgctgcggtgtatgccataccgatctacacgtgaaaaacggagatttcggtgacaaaaccggcgttattctgggacacgaaggcattggcgtcgtggcggaagtcggtcctggtgtcacctcgctgaaacccggcgatcgcgcgagtgtcgcgtggttttatgaaggatgcggacactgtgagtattgcaatacgggcaatgaaaccttatgccgcaacgtgaaaaatgccggttacacggtagatggcggcatggccgaagagtgtattgtcgtcgcggattatgcggtgaaagtaccggaaggcctggactctgcggcggcaagtagtattacctgcgcgggcgttaccacctataaagcggtgaagatttctcatattaaacctggccagtggattgccatctacggtctgggcggtctgggtaatctggccttgcagtacgcgaaaaacgttttcaatgcgaaagtgatcgccattgatgtcaatgatgggcaactgaaactggccgaggaaatgggcgcagatctgaccattaattcacgtacggaagatgcggctaaaattgtgcaggaaaaaaccggtggcgcgcacgcagcggtggttaccgcggtcgctaaggcggcgtttaattccgcagtagatgccgttcgcgccggaggccgcgtggtggcagtcgggctgccgccagaagccatgaaccttgatatccctcgcctggtgctggatggcattcaggttgtcggttcgttggtggggacacgccaggatctgaccgaagccttccagttcgcggcggaaggaaaagtcgtgccaaaagtcgctttacgtccgcttgaagatatcaacgttatttttaaagagatggaacagggacaaattcgtggccgtatggtcatcgatttccgtcgttaa

SEQ ID NO: 40062 - DNA, 216 bp, Salmonella typhi; identical to SEQ ID NO: 38694

SEQ ID NO: 40063 - DNA, 720 bp, Salmonella typhi
atgattaaagtgctgattgtggatgatgagccgttagcgcgggaaaatctgcggattttgctccaggggcaggatgacattgagattgtgggagagtgcgcgaacgcggtagaagcgattggcgcggtacataagttgcgacctgatgtgctgtttctggatattcagatgccgcgtatcagtggactggagatagtaggaatgcttgatccggaacaccgcccgtatatcgtttttttaaccgcgtttgacgaatacgccatcaaagcctttgaagaacacgcttttgattatctgctcaagccgatagaggagaaacggctggaaaaaacgttacatcgtctgcgtcaggagcgcagtaaacaggatgtttcgttgttgccggaaaaccagcaggcgcttaaattcattccctgtaccggacacagccggatctatttgttgcaaatggatgatgtcgcctttgtcagtagccgtatgagcggcgtttatgtgaccagcagtgaagggaaagaggggtttaccgagctgacgctgcgcacgctggaaagccggacgccgctactgcgttgtcatcgtcagtttctggtgaatatggcccatttgcaggaaattcggctggaggataatgggcaggcagagctgattttacgcaacggcctgacggtgccggtaagccgtcgctatctgaaaagtttaaaagaggcgattggcctgtaa

SEQ ID NO: 40064 - DNA, 1686 bp, Salmonella typhi
atgtacgagtttaatctggtgttgctgctgcttcagcagatgtgcgtgtttctggtcattgcgtggctaatgagtaaaacgcgcctgttcatcccgcttatgcaggtcacggttcgtctgccgcacaagcttctgtgttatgtcatgttttctatcttctgcattatgggcacttattttgggctacatatcgaagattcgattgccaatacccgcgcgattggcgcggtgatgggcggcctactcggcgggccggtcgtcggcgggctggtcggtctgaccggtgggttacatcggtattctatgggcggcatgacggcgctgagctgtatgatttccaccatcgtcgaagggctgctgggcgggttggtacacagcgttctcatacgtcgcggacgcccggacaaagtgtttagcccgctgacggcgggagcaattacgtgtgttgccgaactggtgcagatgctgatcattttactgatagccaggccgtttgacgatgccctgcatctggtcagtaatattgccgcgccgatgatgatgacgaataccgttggcgccgcgctgtttatgcgtattttgctcgataagcgcgccatgttcgaaaaatatacttcggcattttctgttaccgcgctgaaggtcgccgcgtcaacggaggggattctgcgtcagggatttaacgaagtgaacagtatgaaggtggcgcaggtgttatatcaggagctggatattggcgccgtcgccatcaccgatcgcgaaaaactgctggcttttactggtattggcgacgatcaccatctaccgggcaaacccatttcatcaggttatacgctgaaagcaattgaaaccggagaggtggtttatgccgatggcaacgaagtgccgtatcgctgttcgctacacccgcagtgtaaactcggctcgacgctggtgatcccgctgcgtggcgaaaatcagcgagtcatgggcaccattaaattgtacgaagcgaaaaaccgactgttcagctcaattaaccgtactctgggggagggtattgcgcagcttttatccgcgcagatcctggccgggcagtatgaacggcagaaggcgttgctgacgcagtcagagatcaagctgttgcacgcgcaggtgaatccgcattttctgtttaatgcgctcaataccattaaagcggtgattcgccgcgacagcgaacaggccagccaactggtgcagtacttgtcgaccttttttcgcaaaaatttaaaacgcccgtcggaaatcgtcacgctggcggatgaaattgaacacgtgaacgcttacctgcaaattgaaaaagcgcgttttcagtcgcgtctgcaggtacagcttgatgttccatcgacgctttcacgtcagaaattgcctgcgtttacattacagccgattgttgagaacgccattaaacatggcacgtcgcaactgcttgataccggcaacgtcgctattcgcgcccggcgcgaagggcagcatttgatgttagatattgaagataatgcgggactgtatcagccttccgccggcagtagcgggctggggatgagcttggtggataaacgtctgcgcgaacactttggcgatgattatggtattagcgtggcctgcgagccggactgttttacccgaattacattacgacttccactggaggaggacgcatga

SEQ ID NO: 40065 - DNA, 732 bp, Salmonella typhi
gtgaaacgactgtgtgatccgcttctctggcttattgttctgttcttgcttctgctgtttggattgccttatagccagccgttcttcgccgcgctgtttcccgatttaccgcgcccggtctaccaacaggagagttttgccgccctcgcgctcgcccatttctggttggtgggcatctcaagtttgtttgccgtcgtggtgggcgtcggcgcagggattgcggtcacgcgagaaagtgggaaagagtttcgtcccctagtggagactatcgccgccgtcgggcagacctttccgccggtcgcggtactggcgatcgcggtacccgtcatgggttttggtcagcaaccggccattatcgccttgatcctgtatggggtgttgcccatcctgcaggcgaccctggccgggctgggcgcggtgcctgccagcgtgatgagcgttgccagcggtatgggaatgagccgtcgccaacagttgtatcaggttgagctgccgctggccgcgccggtgattctggcgggcatccgaacctcggtgattatcaatattggtacggcgaccatcgcttcaacggtgggggccagtacgttaggcacgccgatcattatcgggcttagcggctttaatacggcctatgttatccagggggcgctgctggtggcgctggcggcgatcattatcgatcgcctgtttgaaaggctgacgcgcgcgcttacccggcacgcaaaataa

SEQ ID NO: 40066 - DNA, 2298 bp, Salmonella typhi
atgaaatggttatgttcagtaggtgttgctgtgagtctggcgatgcagccagcattggcggaaaacctgtttggcaatcacccgctgacgcccgaagcgcgcgacgcgttcgtcacggatttactcaagaaaatgactgtcgatgaaaaaattggtcagttacgtctgattagcgtcggccctgataacccgaaagaagcgattcgcgagatgatcaaagacgggcaggtaggggcgattttcaataccgtcacccgccaggatatccgtcaaatgcaggatcaggtgatggcattgagccgcctgaaaattcctctcttttttgcttatgacgtggtacacggccagcgaaccgtcttcccgataagcctcggtctggcttcttcttttaatctggatgcggtaagaaccgtaggacgcgtatcggcgtatgaagcggcggacgacggtctgaatatgacttgggcgccgatggtggatgtctcccgcgatccgcgttggggacgcgcctccgaaggctttggcgaagatacatatttaacctccatcatgggcgaaaccatggtgaaagcgatgcagggcaaaagcccggcggaccgctattcggtgatgaccagcgtgaaacattttgccgcctatggcgccgttgaaggcggtaaagaatacaacaccgtggatatgagttcccagcgtctgtttaatgactacatgccgccgtacaaagcggggctggatgcggggagcggcgcggtgatggtggcgctgaactcgctgaacggcacgcctgcgacgtcagattcctggctattgaaagatgtcctgcgcgatgagtggggctttaagggaattaccgtttccgaccacggcgctattaaagaactgattaaacacggtaccgcggccgacccggaagatgcggtgcgcgtggcgctaaaggcaggggtggatatgagcatggcggatgagtattacagcaaatatctgccgggtctgattaagtcgggcaaagtgacgatggcggaactggacgacgcgacgcgccatgtgctcaacgtaaaatatgacatgggattgtttaacgacccctatagccatctgggaccgaaagagagcgacccggtggacaccaatgccgaaagccgcctgcatcgtaaagaggcacgggaagtggcgcgggaaagtgtggttctgctgaaaaaccggctggaaacgctgccgctgaaaaaatcgggcaccattgccgttgttgggccgctggccgacagtcaacgtgatgtaatgggaagctggtctgctgctggggtcgcgaatcagtcagtgacggtgctggcgggtattcaaaatgccgtcggtgacggggcgaagatcctctatgccaaaggggcgaatatcactaacgataaagatatcgtcgatttcttaaacctgtatgaagaggcggtgaaaatcgatccgcgctcaccgcaggcgatgattgatgaggcggtgcaggcggcgaaacaggccgatgtagtggtcgcagtggtaggcgagtcgcaggggatggcgcatgaagcctccagtcgtaccaatatcaccattccgcagagtcagcgcgacttaatcaccgctctgaaagccaccggtaagccgctggtactggtattaatgaacggcagaccgctggcgctggtaaaagaagatcaacaagccgatgcgattctggagacctggtttgccgggacggaaggcggcaacgccattgccgatgtgctgtttggcgattacaacccgtcaggcaaactgccgatctccttcccgcgttcggtgggacaaattccggtctattatagccatctcaatacgggacgcccgtataatcctgaaaagccaaacaaatacacctcacgctattttgacgaagcgaatggcccgctctatccgtttggttacggtctgagctacaccacatttacggtgtctgacgtcacgctctcctcaccgacaatgcaacgcgacggcaaagtcacggccagcgtagaggtcacgaataccggtaaacgcgaaggggaaacggtcatccagatgtacttacaggatgtcacggcgtcgatgagccgcccggtgaagcaattaaaaggctttgaaaaaatcaccctcaagcccggcgaacgtaaaaccgtgagtttcccgattgatatcgaggcgttgaagttctggaatcagcagatgaaatatgacgcggaacccggcaagttcaacgtctttatcggcgtggattccgctcgcgttaaacaaggatcgttcgagctactgtaa

SEQ ID NO: 40067 - DNA, 762 bp, Salmonella typhi
atgaccaaagtcgcaattgtaacggcatcagattcgggaattggcaaagcgtgtgcgttgttattagcacaaaacggttttgatattggtatcacctggcattccgatgaacgcggcgcgcaggagacggcgaaaaaagcggcgcagtttggtgtgcgggcagagaccattcatcttgacctgagccagttacccgagggcgcgcaggccattgaacatcttatccagcgcctggggcgcgttgacgtgctggtcaataatgccggggcgatgaccaaatccgcgtttattgatatgccgtttacgcagtggcggcaaatttttaccgtggatgtcgatggcgcgtttctctgcgcgcagatcgccgcccggcatatgattaaacaaggagagggagggcgcattatcaacatcacctccgtccatgagcatacgccgcttccgcaagccagcgcctataccgcggcgaaacatgcgttggggggattgactaaatccatggcgctggaactgattgagcatcatattttggtcaacgccgtcgcgccaggcgctatcgccacgccgatgaatgatatggatgacagcgacattaagccgggatcggaaccctcgatccctatcgcccgaccgggttctacgcatgaaatagccagcctcgtcgcctggctgtgttcggaaggcgcaagctataccaccggtcagtcgctgattgtcgacggcggatttatgctggtgaatccgcaattcaacgcaaaataa

SEQ ID NO: 40068 - DNA, 939 bp, Salmonella typhi
atgcgtgttttactggcgccgatggaaggcgtgctcgacgcgttagtgcgcgagctgctgaccgaagtgaatgattacgatctctgcatcaccgaatttgtgcgcgtggtggatcagctgctgccggtaaaagtgtttcatcgcatctgcccggagttgcttcacgccagccgcacgccgtccggcacgccggtgcgtattcagcttctgggccagcatccgcagtggctggcggaaaacgccgcgcgggcgacggcgttgggatcgtatggcgtggacctgaactgcggctgtccgtcaaaagtggtgaacggcagcggcggcggcgcgacattgctcacagatcccgaactcatctatcagggcgcgaaagcgatgcgggccgcggtaccgtcgcatctgccggtgacggtaaaagtgcgtctcggctgggatagcggcgatagaaaatttgaaatcgccgatgcggtgcagcaggccggcgccagtgaactggtggtgcatggccgtaccaaagcgcagggctaccgcgccgagcatatcgactggcaggcgatcggcgaaatacgccagcgtctgactattccggttatcgctaatggcgaaatctgggactggcagagcgcgcaggcatgtatggcgaccagcggctgcgatgcggtgatgattggccgcggggcgttaaatattcctaacctgagccgggtggtgaagtataacgaaccgcgtatgccgtggccggaagtggtaacgttattacaaaaatatacccgactggaaaagcagggcgataccggtttataccatgtcgcgcgtattaaacagtggttgggatatttacgtaaggaatatattgaggcgacagaactctttcagtcgattcgggcgttaaaccgttcgtccgagattgcgcgggtgattcaggctattaaaatctaa

SEQ ID NO: 40069 - DNA, 1038 bp, Salmonella typhi
atgtctgaaataaatcagaacgtaaaagatagccgtcagcagtattaccagcatatttccgggcagaatctgacgccgctgtgggaatcgttacatcacctggtaccgcagacgccaaacgccaactgcgcgccggcctactggaattatcaggaaattcgtccgctactgatggaaagcggcaatgtcattggcgcgaaagaggcgatccgccgggtgctggtgctggaaaatccggcattgcgcggtcagtcgtcgatcacggcgaccttatacgctggtttacagctgatcctgcccggcgaagtcgcgccgagtcatcgccataaccagtcggcgctgcgttttatcgtcgaaggtaaaggcgcatttaccgcggtggacggcgagcgcacgccaatgcataccggcgattttatcctgacgccgcagtggcgctggcacgatcatggtaatccgggatcagagccggtggtatggctggatggtctggatctgccgttagtcaatctcctgggctgtggttttgcggaagactatcccgaagatcagcagccggtgacgcgaaaagagggcgattatctgccgcgctatgcagcgaatatgctgccgctgcgccaccagcgcgggaactcgtcgccgattttcaactaccgttacgaccgcagtcgcgaggcgttgcacgatctgacccgtatgggcgatccggatgagtgggaaggctacaagctgcgttacgttaatcccgtcactggcggttatccgatgccgtcgatgggcgcgttcctgcaactgctgccaaaaggctttgcctcgcgtgtggcgcggagcaccgacagcactatctaccacgtcgttgaaggggcagggcaggtcactatcggcaacgaaacttttcatttttccgcaaaagacatttttgtggcgccgacctggcatgaggtgtcgtttcgcagcagcgaagacacggtgttattcagcttttcggacaagccggttcaggaagccctggggccgttccgcgaagcacgttattaa

SEQ ID NO: 40070 - DNA, 1092 bp, Salmonella typhi
atgatgaaaaaaagtaaagcaatgttatttatcgctccggcgctgttttcatacgccatggctgcacaggcctgcacaacccttgctattcaggataaacaaggcgatatttttcatgggcgtacgctggaatatatgcaggatttaccctcatggttaacgtattatccggcgggaacgcagtttgataaaaaaacgccggatggcagccaggggataagctatcaggcgaagtatccgatactggccattacttccaccattactgatggcgatagcagagacatacttgaaggcatgaatagcgcgggattgtcatttagtgaaaacatgatcatgaatgcgcagttgccgccattgcccgcgagtgaatataaacaggcaattcctgtcacctcgttgggagaatgggcgctggcccgttttgctactgtcggcgaggtaaaacaggcaataaaagagggcaaattctggtcaccggaactgcatcggtttggcgatctgaaatcgccatttcattacgcgttttacgacaagaaaggaggaagcattgtcgttgaagtggaaaatggcaaattccatgtctatgacaatcccactcgcgtgatgacaaatggtcccgcattcccctggcatctgacaaatctgaataattatacgcaattaaccaatgtggaccgctcttcaggcacattgggcgggataaaagtgatgcagcctgatagcgggattgctattgcagacttgccatcgtccgatacgtcggtttcccgttttatacgcggcgtttattacaccacatatgcgccgcaagcgacatccgcccacgacgcaatgaatacgcttgcacatattatgagccgttttgatcgtccgaaaaatattacggttgattatatggggagtgaaggggaaggcaacgccacccgcaaaccggtctcagaatatacggtctggacaacgctgtctgacttgacgcacggtgagatgatggtgcgcggctacaatgatatcaactataaaacctggtccctttctcagtttaagaacgcgactgcgcccgtgttcgagaaaatcaacgtcaaaggataa

SEQ ID NO: 40071 - DNA, 909 bp, Salmonella typhi
atggcgaactgggcgcagaaattgaaattacatcacctgcaaacgctggttgcgctgggcgaacagggcaacctgacgcacgtcgcccggatgatgaatatctcccagccggcgctatcgaagtggctatctcaactcgaagatgagataggcatcacgctttttgagcgccacagtaaaggactacgcccctcggaaggcggtaaattactgctccagcacgcccagcgcctaattaacgatctggagcgttcacagtatgaaatcgcccgtttcaagcagggcggcctggttggcagcctgaagatcggctgttcgcccgtggcgactgactgcgtatcacaggcgattctgagcctgcttaacgaaatgccgacgctgcatctgaatattgaagagaaggtaatgacgccgctgctgcacgatttgcttgccggtcaggtggatgtggtggtagggcgtgtcggcggccgcgccctgcaactgccgcttaattatcaggtactttataccgagccggtctgctttgtggcgcgtccgcaccatccgctggccgcgcgagcgcagatcgcctggagcgatctggcacactggcggtggatagtctggccaaccggcacccctattcgcatcagtattgataacgccctcgtcgataatggcgtcatgctcccggaaaacaccattgaatcggcgtcaatgaacgtcagcaccaatttgctgcaaagcagcgatatgatctctattctttctttacggctggcgcaacgctatgccagccaggggcaactggcgattttaaacttgccaaaaattgagcaaaaaggcagcgtagggatgttctggcgtaagaatgagacgccgtctttggccctgagtcgctttttgtattttttagcccaggtttaa

SEQ ID NO: 40072 - DNA, 246 bp, Salmonella typhi
atgatcatggatgtacagacgatatttgtcatattagcctttctgctactcccgcttttttgctttcgtgaggcctggaaaggctggcgaaccggcgcggtagataaagttgtcaaaaatgcgcgaaaaccggtttatgtttatcgccatgccgatcccgtacaatattggtcttatctttttctttataccggttgcggttttttatttactggaatgattatttatcttcttttttatcgttaa

SEQ ID NO: 40073 - DNA, 948 bp, Salmonella typhi
atgacagtgctttttcacctgctgaagataatcatgatcgttagaccacaacagcactggattcgcctgatatttgtctggcatggttccgtgttatctaaaatcttttcacgactgctccttaactttcttctttctatcgccgttattatcatgctgccctggtacacaatgctgggtattaagtttacccttgcgccgtttagcatactgggcgtcgctatcgccatttttcttgggtttcgcaataatgcctgttatgcgcgttacgtcgaagcccgacatttgtgggggcagttgatgatcgcttcacgctcaatactgcgagaggtgaaaacaaccttgcctgatgaacgcggtatcgaggattttgttcggttacaaatcgcttttgcccactgtttgcgtatgacattgcgtcgacagcctcaaacgcaagttctgggaaactatcttgaccaggaggcgttacagaaagttgtcgcttcccattcccccgctaaccgtatcttattgctgatgggagagtggctggcgattcgccgccgcagcggaaagctttccgatattttatttcatagcctcaacaaccgcttaaatgatatgtcgtcagtgttggccggctgtgagcgcatcgccaacacgccggtgccttttgcctatacgttaattttgcatcgtacggtttatcttttctgcattatgttgccatttgcactggtggttgatctgcactatatgacgccgtttatttcggtgctgatttcttatacgtttatcgcgctggatgcgttagcggaagagttggaagatccgttcggtactgaaaataatgatttaccgctggatgcgatatgcaatgcgatagaaatcgatttactgcaaatgaatgatgaaagggatattccggcaaaacggataccggataagcgctatcaactgacctga

SEQ ID NO: 40074 - DNA, 873 bp, Salmonella typhi
atggacctgacgcaactggaaatgtttaacgctgtcgctctgacgggcagcattacgcaggcggcggcaaaagtgcaccgcgttccgtccaatctgaccacgcgtatccgccagcttgaagccgacctgggcgtctctctgtttattcgcgaaaaccagcgactcaggctgtcaccagccgggcataactttttacgttacagccagcagatcctggcgctggttgatgaagcccgtatggtggttgccggagaggaaccgcaaggactgttttcactcggcgcgttagaaagtactgccgccgtacgtatccccgcgctgctggcgggttataaccagcgttaccctaaaattcagttcgcgttaacgaccggtccttccggcgccatgctggatggcgtgctcgaaggaaagctgaacgccgcctttattgatggcccgctaatgcatccggggctggaaggtataccggcttaccaggaagagatgatgatcgtcgcgccacacggccattccgtcgtttcgcgggccagcgaggtgaatggttataacatctatgcttttcgcgccaactgttcttaccgacggcatttcgaaagctggtttcatgccgatggcgcgacccccggtacgattcacgaaatggagtcatatcatggaatgttggcgtgcgtaattgccggcgcaggtattgcgctgatgccagcaagtatgctcaacagtatgccaggacatcatcaggtggaagcctggccgttggcggagaagtggcgctggcttagcacctggctaatgtggcgacgcggggcgatgacgcgtcaacttgaggcctttatcgagttacttaacgcccaactggcgagcgccgactga

SEQ ID NO: 40075 - DNA, 1191 bp, Salmonella typhi
atgacaatcaatccagtttcccgcaaggtcgcgtggctacgggtagttacgcttgctattgccgcttttattttcaataccacagaatttgtgccggttggtttgctatcagacattgctgaaagctttcatatgcaaaccgcgcaggtcggcatcatgctaaccatttacgcctgggtagttgccgttatgtcgctgccttttatgcttcttaccagtcaaatggagcgccgtaagctactcatttgtctgtttgttttgtttattgccagccatgtgctctcctttctggcatggaactttaccgtgctggtcattagccgtattggtatcgctttcgcccacgctattttctggtcgataaccgcctcgctggcgatccgcctggcccctgccgggaaacgcgcgcaggcattaagtctgatagcgaccggcaccgcgttggccatggtgcttgggctgccgataggtcgcgttgttggtcagtattttggctggcgcaccaccttttttgccatcggcatgggcgcattaattacgctgctatgtctgattaagcttctaccgaaattgccgagcgagcattccggctcactaaaaagtttacctttgctattccggcgcccggcgctaatgagcctctatgtactaaccgtcgttgtggtgactgcgcattacacagcttatagctatattgaaccgttcgttcagaatgtcgccgggctcagtgcgaattttgctaccgtcctgttactgatcctcggcggcgccgggatcatcggcagccttgtgtttggtaaactgggtaatcgtcatgcctcgtcgctcgtcagtatcgctattgccctgctggttgtctgtctgcttctgctgctgcctgcggcggatagcgaagcgcatctggccatactgagcattttctggggcatcgcgattatggtgatagggcttggtatgcaggtgaaagtactggcgctggccccggacgcgaccgatgtcgcaatggcgctattttcaggcatctttaatattggtattggcgctggcgcgctggtaggcaatcaggtgagtttgcactggtcaatgtcggccatcggctatattggcgccatacccgcctgtgccgcgctggtatgggctgtgctcatattccgcaaatggccagtgacgctggaagaacaaccgcattaa

SEQ ID NO: 40076 - DNA, 666 bp, Salmonella typhi
atgatggatttgtttaaagcgattggattggggctggtcgtactgctcccgttagccaatccgctaaccaccgtggcgctgtttcttggccttgcgggcaatatgaatagtgcggaacgcaaccggcagtcctatatggcttcggtttatgtcttcgctattatgatggtggcgtactatgccgggcagttagttatgaacaccttcggtatttcgattccagggctacggatcgccggggggttaatcgtggcgtttatcggcttcagaatgcttttcccgcagcagaaggcgcatgagtcgccggaagcgaaaagcaaatcggaggagctggcagacgaaccgacggccaatattgcgtttgttccactggctatgccaagcaccgcaggaccggggaccatcgcaatgatcatcagttccgcttccacggtgcgtcatggcggcgagtttcccgactgggtcattatggtcgcgccgccgattatttttcttgccgtggcggtgatcctgtggggatgcttacgcagttctggcgctattatgcggctggtgggtaaaggggggattgaagcgatctcccgcttaatgggattcctgctggtgtgtatgggcgtgcaatttattatcaacggcgtgttggaaattattaaaacgtaccactaa

SEQ ID NO: 40077 - DNA, 858 bp, Salmonella typhi
atggaaatgctcgaagagcaccgatgttttggcggctggcagcagcgctggcgtcatcatgccgccacgctaaactgcgccatgacattcagcatttttcttccgccgactcaggataatgaaccgcctccggtactgtactggttgtccgggttgacctgcaatgatgagaattttaccaccaaagcaggcgcgcagcgtatcgcagcagaactgggcattgtattggtgatgccggataccagtccacgcggtgaacaggtcgccgacgatagcggatacgatttaggccacggcgccgggttttatctcaatgccacacagccgccctgggccagccattatcgcatgtacgattacctgcgcgatgagcttccggcgcttatccagacacagtttaacgtcagcgaccgttgcgccatcagcgggcactcgatgggcggccacggcgcgttaatcatggcgctgaaaaatccgggcaaatacaccagcatctctgcttttgcgcccatcgtcaaccccagccgcgtgccgtggggaatcaaagcgcttaccgcttatctcggcgaagatgaatcagcctggactgagtgggatagctgcgaattaatgctggccagccagccgcaggacgccattcctgtgctcatcgatcagggtgacagcgatcaattcctcgccgatcagcttcagcccgccgtactggcggaagccgcgcggcaaaccgcctggccgatgacgctacgaatccagcccggttacgatcatagctattattttattgcgtccttcattgaggaccatctgcgctttcatgcccggtatttacgggacgagcatgagacgtcaccaacataa

SEQ ID NO: 40078 - DNA, 1188 bp, Salmonella typhi
atgaatccaggattgagacgttcgacgttggctctactcgcctcatcgctgttattgacaattggacgcggcgccacgctcccctttatgaccatctatcttaaccgtcagtacggtttaggcgtggatctgattggctacgcgctgaccagcgcgttaacgatcggcgtcatctttagtcttggctttgggattctggcggacaagtttgataaaaagcgctacatgttactcgcgattatcgccttcgcctgcggatttatcgccatcccaatggtgcataatgtcgtactggttgtcctgctttttgcgcttattaactgcgcctattcggttttttctaccgtcctgaaggcctggttcgccgataacctcaccgcgacaacaaaaacacggattttttcgctcaactataccgtactcaatatcggctggacggttggcccgccgctcggcacgctgctggtgatgcaaagcatcaatttacccttctggcttgccgctatctgttccgcatttccgctggtctttattcaggtatgggtgacacgttcggttgccgccagcgaggggaaaaatgccgctatctggtctccctccgttctgctgcgcgacaaagcattattgtggtttacgctttcggcatttctggcctcctttgtgggggttgcctttgcgtcctgtatttcacagtacgttatggtcgttgccgatagcggcttcgcggaaaaagtggtagccgtcgtcctgccggttaatgcggttattgtggtcagtttgcaatacgccgtgggccgtcgacttaccgccgtcaatattcgaccaatgatgacgaccggcaccgtcttttttatcgccgggctcatcggatttattttttcaggcgacaatctgtttttttgggggctttcagcggcagtattcacgattggcgaaattatttatgcccccggcgaatatatgttaattgacaacattgcgcctgccgggatgaaagccagctatttttcagcgcaatcgctgggctggctgggtgcggcggtaaacccgctggccagcggcgtcatcctgacgacgcttcccgcctggtcgcttttcgttgtcctgataatcgccattgtgttcgcctgggcactgatgttaaaaggaatgcggattacccctacgcaacaggctatcacctgttaa

SEQ ID NO: 40079 - DNA, 858 bp, Salmonella typhi
atgaaatacatcggagcgcacgtcagcgctgctggcggtctggctaacgcccctgcccgcgcggctgaaattggcgcaacggcctttgcgcttttcacaaaaaaccagcgtcagtggcgtgccgccccccttactccccaggtcattgatgactttaaaatcgcctgtgaaaagtatcatttctcggcggcgcaaatccttccccacgatagttacctgattaatctgggccatccggtcagtgaagcgctggaaaaatcacgcgatgcctttctcgatgaaatgcagcgctgtgaacaactcggcttaaccttgcttaattttcatcccggtagccatctgatgcagattgcacaggaggattgcctggcgcggatcgcggaatctatcaatattgccctcgcgcagaccgagggcgttacggcggttatcgaaaatacagccggtcagggcagtaatctggggtttgagtttgaacagttagccgccatcatcgacggcgtggaagataagtcgcgcgttggcgtctgtatcgatacctgccatgcctttgccgctggatacgatctgcgtacgccagaggcgtgcgaaaaaacgttcgccgaattcgggaaaattgtcggatttcagtatttgcgcggaatgcaccttaacgacgccaaaagcgccttcggtagccgcgttgaccgccatcacagtctgggtgaaggcaatatcggccacgatgcgtttcgttggattatgcaggatgcgcgttttgacggtattccgctgatactggagaccatcaatcctgatatctgggcggaagagattgcatggttaaaagcccagcaaattgccgaagcgatggcctga

SEQ ID NO: 40080 - DNA, 687 bp, Salmonella typhi
atgaccgtcgaaacgcagcttaaccctacacagcctgtcaaccagcaaatttaccgtattcttcggcgtgatatcgtgcattgtcttatcccgcctggcacgccgctatcagaaaaagaggtctcaacccgttttaacgtttcgcgtcagccggtgcgcgaggcttttataaagctggcggaaaatgggttgattcagatccgccctcagcgcggtagttatgtgaataagatttcgctttctcaggtacagaatggctgctttgttcggcaggcgatcgaatgcgcggtggtccgccgtgcggcggcgatgatcaccgacaaccagtgctatcaactggcgcaaaacctgcacctgcaacatattgccatcgagcgcaaacagattgatgattttttccagcttgatgacgatttccaccaaaaactggcgcagatcgccgattgccagttagcgtgggataccattgaaaatatcaaagcgacaattgaccgggttcgctatatgagtctggatcatgtttctccgccggagatgttgctgcgccagcaccatgatattttctccgcgctggaaaatcgtgacggcaatgcggttgagagcgcaatgacccagcatttgcaggaaattagcgaatccgttcagcttatccgtcaggaaaacagcggctggtttagcgaagagtaa

SEQ ID NO: 40081 - DNA, 1467 bp, Salmonella typhi
atgcaaaacaggcttttatcggcaaaggcgacgcttcctgattacgatcgcgcggcgctggcggcgcggatggtccatctcggttttggcgcgtttcatcgcgcgcatcagggggtttatacagatattctggctgcggagcagcatagcgactggggctattatgaggttaatcttattggcggcgaacagcagattgccgatctaaagcagcaggataacctctataccgtggcggagatgtcggcggatgcctggacggcgcgtgtggtgggcgtcgtcaaagcggcgttgcatgttcaggttgatggtctggaacgtgtgctggcggcgatgtgcgaaccgcaaatagcgattgtgtctctgaccattaccgagaaagggtattgtcattcgccagccacgggtcaacttctgctggaacatcccatgattgccgccgacctgcaaaatccgcatcaaccgctaacggcaccgggtattattgtcgaagcgttagcgcgtcgtaaagccgcaggcttaccggcatttaccgtgatgtcctgcgacaacatgccggaaaatgggcatgtgacgcgtcaggttgtgacggcttacgcccgggaggtggatgcggaactggcgatatggatcgagcaaaacgtgacatttccgtcaaccatggttgatcggattgtccctgcggtcacgccggagacgctggataaaatcgaacaactgaccggcgtgcgcgatccggcgggcgttgcctgtgaaccgtttcgtcagtgggtgatagaagatacgtttgtggcggggcgtccgcagtgggaaaacgcgggcgcgacgttggtcgccgacgtggttccgtttgaagagatgaaactgcgaatgcttaacggcagtcattcattcctggcttatctggggtatcttgccggctatcagcatattaatgactgtatggatgacgacaactatcgtctgaccgcgcaggcgttaatgttacgcgagcaggcgccaacgctgaaagtccagggggtagatttacagcgttatgccgatcagttgattgcgcgttaccgtaatccggcgctgcgtcatcatacctggcagattgcgatggatggcagccagaaacttccgcagcgtatgctggactccgttcgctggcatcttgctaatcatagcgattttgatttgctggcgctgggcgtggcggggtggatgcgttacgttggcggcgtggatgagcagggtaaggcgatcgacgtcagcgatccgctattgccggttattcagcgcgccgtggcaaacagtgaagaaggcgccagtcgtgttaaggcgctgctgggaatggctgaaattttcggcaacgatttgccgcaggcggcgcggtttacgcaaaaagtgcaagaagcctatgacagtttactgacatatggcgcgaaagcgagcgtggcgaaatatgccgagcgcttgaaatag

SEQ ID NO: 40082 - DNA, 1182 bp, Salmonella typhi
atgcacaacagtcccgccgccgctgcgcccaaatcgtttgacctgacgtctaccgcctttttgatcgtcgcttttctcaccggtattgctggtgcgttacagacgccgacactcagtatttttctgacggatgaggttcacgcccgtcccggcatggtgggtttcttttttaccggcagcgcggttatcggcattatcgtgagccagtttctggcgggtcgctcagataaaaaaggcgatcgcaaaaaactgatcgttttctgttgcgtgctgggcatgttggcctgcgtgttgtttgcctggaaccgcaactactttattttgctgttcatcggcgtctttctcagtagcttcggctctaccgccaacccgcagatgtttgcgctggcccgagaacatgccgatcgtacaggtcgtgaagcggtgatgttcagctcaatcctccgcgcccaggtctcgttggcctgggtcattgggccgccgctggcctatgcgctggcgatgggttttagctttacggtgatgtatttgagcgcggcggtagcttttatcgtctgcggcgtcatggtgtggttctttttaccgtcaatgcgcaaagatgcgccgctggcaaccggcacgctggaagcaccgcgtcgtaatcgccgcgatacgctgttgctgtttgtcatctgtacgttaatgtgggggactaacagcctgtatatcattaatatgccgctgtttatcatcaatgagctgcatcttccggaaaaacttgcaggcgtgatgatgggcaccgccgccgggctggagattcccacaatgctgattgcaggttacttcgccaaacggttgggaaaacgcctgttaatgtgcatcgccgttgtcgccggactgtgcttttatgcggggatgttgctggcgcacgcaccggcaacgttgctcggcttgcagttgctgaacgcgatttacatcggcattcttggcgggattggcatgctctattttcaggatctcatgccaggccaggcgggttcagccaccacgctgtataccaataccattcgcgtcggctggatcattgccggttcgttggcgggaatcgccgcagaaatctggaattatcatgcggtcttctggtttgcgttagttatgattgtcgccaccatgttctgcctggcgcgtattaaagatgtttaa

SEQ ID NO: 40083 - DNA, 1806 bp, Salmonella typhi
atgattgcgcgcgtaatgcttctgcttgtcgcactggttagcgctggcgcccaggcccaggaaatcaaagaaagctacgctttcgccgtactcggcgaacctaagtatgcttttaactttgatcactttgattatgtgaatcctgctgcgccgaaaggcggtcagatgacgctttccgccattggtacgttcgataatttcaatcgctattcgctgcgcggcaatcccggcgtacgtaccgaagccctttacgatacgctttttaccacctcggatgatgaacccggaagctattacccgctgattgccgaccatgcccgctatgccgccgactattcctgggtggaaatctcgattaacccccgcgctcgttttcacgatggcacgcccattaccgcccgcgatgtagcctttacctttcataagtttatgaccgaaggcgtaccgcagttccgtctggtctataaaggtactaccgtgaaggcgattgcgcctttaaccgtgcgaattgagctggcgaagcctggtaaagaagacatgcttagtctgttttcactaccgatcatgcccgaaaaattctggaaaaatcacaaactcagcgatccactttcaacgccgcccttagccagcgggccataccggattactcagtggaaaatgggccagtacattgtctattcacgcgtcaaaaactactgggcggctaatctgccggtcaatcgtggacgttttaacctcgacactgtccgctacgattactaccttgatgacaatgtcgctttcgaggcgtttaaagcgggcgcatttgatctacggctggaaaacgacgctaaaaactgggcaacgcgctatatcggtaaaaatttcgataatcattacatcattaaagaagagcagaaaaacgagtcggcgcaggacacacgctggctggcctttaatattcagcgcccggtatttaaagaccggcgggtacgtgaagccgtcaccctggccttcgattttgagtggatgaataaagcgctgttctataatgcctggagccgaaccaacagttacttccagaataccgagtacgccgccagaaattatcctgacgccgacgaactggtattactcgcgccgatgaaaaaagatcttcctcctgaagtcttcactcagatctatcagccgccggtctctaacggcgacggctacgatcgcgaaaatcttcttaaagctgacgccttgttgacgcaggccggatgggtgatcaacggacagcaacgggtcaatagcgtcaccggtaagcctctgacgtttgaacttctccttcctgccagcagtaatagccagtgggttctgcccttccagcataatcttcagcgtctgggcattacgatgactatccgtcaggttgataattctcaactcaccaaccggatgcgtagccgcgactatgacatgatgccgaggctatggcgggcgatgccctggcccagctccgatctacaaatctcatgggcgtcggaatacattgactccagttataacgctcccggcgtacaaagcccggtggtggataagctgatcgcgcaaattatcgcagcgcagggtgataaagcgaaactggtgccgctgggacgggcgctggatcgcgtgctgacctggaactattacatgctgccgatgtggtatatggcgcaagacaggctcgcctggtgggataaattctcccatccggcgattcgcccggtatataccatcgggttagatacctggtggtatgatgtcaacaaagccgccaagctaccggcagccaggaggtag

SEQ ID NO: 40084 - DNA, 1191 bp, Salmonella typhi
gtgaccacccggcagcactcttcctttgccattgtctttattcttggcctgttggccatgttaatgccgctgtcgattgatatgtatcttccagcgctgccggtgatttctgcgcaattcggcgtgcctgccggtagcgcgcagatgacgctcagcacctatattctggggtttgcgctgggtcagcttatctatggaccgatggcggatagcctcgggcgtaagccggtcatcctgggcgggacgctggtatttgccgctgcggcggtcgcctgtgcgttggcgcagactatcgatcaactgatcgtgatgcgtttctttcacggtttggtggctgcggcggcaagcgtcgtcatcaatgcgctgatgcgggatatttatccaaaggaagagttttcgcgcatgatgtcatttgtcatgctggtcactacgatagcgccgttaatggcgcccattgttggcggctgggtgttggtatggttaagctggcactatatcttctggatactggctattgcggcgattctggcgtcagtcatgatctttgctttgattaaagagacgctgcccgttgagcggcgtcagccttttcatattcgtaccacaataggtaactttgccgcgttgtttcgccacaaacgcgtactgagctatatgctggcgagcgggttcagttttgccggtatgttctcttttttgagcgcggggccgtttgtctatatcgaaattaatcatgttccgccgcaggatttcggctactacttcgcgttgaacatcgtatttctgtttgtgatgacgattatcaacagccgttttgtcagacgggtaggggcgctaaacatgtttcgggccgggctatggattcagtttgcgatggcggtgtggatggttttcagcgcgctgatgggcattggattctgggcgctggtggttggcgttgcggcgtttgtcggctgtgtgtcgatggtttcgtccaatgcgatggcggtcattttggatgagtttccgcatatggccggaacggcgtcttcgttggcgggcactttccgctttggtattggcgctatcgtcggcgcgttgctgtcgctggctacctttaacagtgcgtggccgatgatctggtcgattgcgctttgcgccgcctgttccattctgttttatctctacgccagccgtcccaaaaaacggtga

SEQ ID NO: 40085 - DNA, 696 bp, Salmonella typhi
atgcgacttgataaatttatcgctcagcagcttggcgtcagccgcgctattgccgggcgtgaaattcgtggtaaccgcgttaccgtcgatggcgacatcattaaaaatgcggccttcaaactgctcccggaacatgcggttgcgtatgacggcaatcccttagcgcagcaacacgggccacgctattttatgcttaacaagccgcagggatacgtttgttcaaccgatgatcccgatcatccaacggtgctgtatttcctggatgagccggtggcgtataagctgcatgccgcaggacgtctggatatcgatactaccggtctggtgttaatgacagatgacggtcagtggtcgcaccgcattacgtcgccgcgccatcactgtgaaaaaacctatctggtgaccctggagtcgccggtggccgacgatacggcagcgcaatttgcgaaaggcgtgcagttgcataatgaaaaagatctcactaaacccgctacgctggaggtgataacacctgtgcaggtccgtctgaccatcagcgaaggccgttatcatcaggtgaagcggatgtttgccgcagtaggcaatcgcgttgtggaactgcaccgcgaacggattggcgccattacgctggatgagaatctggctcccggcgagtaccgcccgttgactgaagaagaaatcgccagcgtcggctaa

SEQ ID NO: 40086 - DNA, 1761 bp, Salmonella typhi
atgatttttacactccgcccctaccagcaagaagccgtagacgccacgctcagccactttcgccgccaccgtacgcccgccgtgattgttctgccgaccggcgcaggtaaaagcctagtgatcgccgaactggcgcgcgtcgcccgcggacgggtactggtgctggcgcatgtgaaagagctggtcgcgcagaaccacgccaaatattgcgcgctggggctggaagcggatattttcgccgccggactcaaacgtaaagagagtcagggcaaagtcgtgttcggcagcgtacagtcggtggcgcgtaatcttgacgccttccaggaggagttttcgctgttgattgtcgatgaatgccaccgcatcggtgacgatgaagacagtcagtatcagcaaatcctcactcacctgagtaaagttaatcctcacttacgtctgcttggactcaccgccacgccttttcgcctcggaaaaggctggatttatcaatttcattatcacggtatggtgcgcggcaacgacaacgctctgtttcgcgactgtatttatgaactgccgctgcgctatatgattaaacacggctatctgacgccgcctgagcggcttgatatgccagtggtccaatacgatttcagccgcctgcaggcccaaagcaatgggctgttcagcgaagccgacctgaaccgcgagctgaaaaagcagcagcggattacgccgcacatcatcagccagattatggaatttgcgcaaacgcgcaaaggcgtgatgattttcgccgccacggtcgaacatgcgaaagagattgtcggtctgcttccggcggacgacgcggcgctgattaccggcgatacgccagggcccgagcgcgacgcgctgattgataatttcaaggcgcagcgttttcgctatctggttaacgtctcggtactgaccaccggctttgacgccccacacgttgatctcatcgcgattctacgtcccacggagtcagttagtctttaccaacaaattgtcgggcgtggtctgcgccttgcgccgggaaagaccgattgcctgattcttgattacgcaggcaacccgcacgacctgtatgccccggaggtcggtagcccgaagggaaaaagcgataacgtccctgtccaggtattttgcccggcctgcggctttgccaacaccttctgggggaaaaccactgccgacggcacgctgattgaacactttggccgtcgctgccagggctggtttgaggatgacgacggccatcgcgagcagtgcgattttcgctttcgcttcaaaaactgcccgcagtgtaatgccgaaaacgatattgccgcccgacgctgccgggaatgtgacgccattctggtcgacccggacgatatgttaaaagcggcgctcaggctcaaggatgcgttagtcctgcgctgtagcggaatgacgatgcagcatgggcaggatgagaaaggcgaatggctgaaaatcacttactatgacgaggacggcgcggatgtcagtgagcgcttccgcttgcacacgcccgcccagcgtaccgctttcgaacagctatttattcgcccgcatacgcgcacgcccggcgttcctttacgctggatcacggcggcggatattgtcgcgcagcaggcgctgttgcggcatcccgattttgtggtcgcgcggatgaaaggccagtactggcaggtgcgtgaaaaagtgttcgactatgaaggccgcttccgccgggcgcacgaattacgtggttaa

SEQ ID NO: 40087 - DNA, 285 bp, Salmonella typhi; identical to SEQ ID NO: 38677

SEQ ID NO: 40088 - DNA, 1149 bp, Salmonella typhi
atgataaaactggaaaatctcaccaaacaatttgtacagaaaaagggtcagccgctaaaagccgtcgacaacgtcaacctgaacgtgccggaaggcgaaatgtgcgtcttactcggtccctccggctgcggcaaaaccaccacgttaaagatgatcaaccggctgatcgcgcccagcagcggtaatattcttatcaacggcgagaataccaacgatatggatacggtaacgctacgccgcaatattgggtatgttatccaacagatcggcctgtttcctaatatgacgattgaagaaaatattaccgttgtgccgcgcatgttgggttgggacaaagcgcgctgcaagcaacgcgccgaagagttgatggacatggtggcgctggatgccagaaaatttctgcatcgctatccaaaggagatgtccgggggacagcaacagcgtattggcgtgatccgcgctctggccgccgatccgccggtactgctgatggatgagcccttcggcgcggtggaccccattaaccgcgaagtgatccagaaccagtttctggatatgcagcgtaagctaaaaaagaccgtgatgctggtcagccatgatatcgacgaagcgctaaaactcggcgaccgtatcgccgtgttccgtcaggggcgaattgtacagtgcgccagtcctgatgaactgctggccaagccggctaacgagtttgtcgggtcgtttgtcggtcaggacagaacgttaaagcgtttgctactggtctccgcaggcgatgtgaccgaccaacagccaaccattaccgcgcggccttccatgccgttaagcgaggcgttcggcattatggatgatcacgatattcgcgccattaccgtcattgacaacgacggtaagccactgggatttgtgaagcgccgggaggcgcggaacgccagcggaatctgcgccgatatcacccatcctttccgtattacgggcaaagcggaagataatctgcgtattgtgctgtccagattgtacgaaagtaataccagctggatgccgatcgttgatgaagacggacgctataacggtgaaatctctcaggattacatcgccgattatctcagctcaggccgcactcgtcgggcgctaaatattcacgaaagcagctaa

SEQ ID NO: 40089 - DNA, 1077 bp, Salmonella typhi
atgattgaagtcggaagaatcattgcagaacgctataagattttatcttatgttggtaaaggtgggatgcaagacgtatataaagttttagatctaaagctggatttagatttagctttaaagactccacttcctggtttggaaagcaaaagatttcttaaaagtgccaaaatcgctgcaaaaataaaccatcacaatatagcaaaaacctttgattatgttgaagataatggcaatatatttttagcggaagaatttgttgaaggtgaaaaccttgaggaaaaattgcgccactttgattttttagacccacattatggcgcttgtatactacataaccttgctaaaggaataatggcatctcataaagcagatgttattcatagagatttaaaaccgagtaatgtaatggtgtctggcggagtacaaatttcgaatctaaaaattacagattttggaatagctacgctaacacaagaactttttgatgaagctgctgccagtggtgacctaacaagatcgacctctggtacgataaaaggtgctttacccttcatgtctcctgaattaatgtttggtaaaaagggtaaacctatagaagcatcaactgatatttggccattaggtgcaatgatgtttaaattattaacaggagactatccatttggcgtttatttagatgctgctgttaatgttaaaacaaaaaatagaatggaatggccaacctttatgactgccaatccacaatatcaaagtttatcacaagatctacaaaaaattgtagataagtgcttaagttatgactcggacaagaggcctacagctgaaacgcttgttaaggcatgtgaaaccctttgttatttatccgaagaacgtcatgtcggtcgcgtcaataatcttattcaaggagggataagtggatttattgatgggacaccttctaactccttttttagtatggaaagtgtatacggttcgaggtacccaaacacctcaacaagaaatactgtttgttattccacttttgatggacacccatggcctagagcacaccctgtaattctttggaaagattga

SEQ ID NO: 40090 - DNA, 1074 bp, Salmonella typhi
atgaggaaaacaaaaatgaagattaatcacgtcctaccagaaagatattcattaaagagcactgaactcggtggtggcatgggggacattttaatatgtaaggataatcatttagatagagatgtaattgtaaagttgttaaaggatggagaagaagagagacgtttactagatgaacagaaagcgctactcaaacttcgttctaaacatgtagtacaactttatgatttaattgacataacagtctccgaaaaaactaaaaaaggattagttctggagtatattaacggagtggatttaaattataacccgtcagaaagtcaccccgaaaaactaaagaaattatggcagatagcatgcgggttaagtgacatccactctgctaaagtaattcacagagatataaagcccaataatattagagtagacgagaataaaattgttaaaatattagattttggtttagcaaggacctcaggcacagaagcattcactcattctgttattggaaccttaggatatatggctcctgaactatggaagagaaaaaacattagtttcgatcaaaaaattgatgtttatgcatatggtgtcctcgttttagatttattcggcatagaaaaaccagatgaattatacgaacatcccccggccgcgataaccaatatacctgaattaggaaagatacttccaaaggacttagccagaactttcattagttgcttaagccatgacaaatatgctcgaccggcaatgtcttcggttagagatcaaatagctaaatacctattaaaagatagacaccgtgccctcttcgtcctgaatggaaagaaatatgaaataaatgctaaaaataaaagtgttacgatcacttggggtactagtggaagtatggaaatagtatatgatggtttcgactttaaagtaggtaatttttcaggaagtgcgacaattaataaccaacaagtgataacaaataaagtatttcctagctgcagtgtaattactcttataaatgaaaaatctagaagctttgtcacctttgatatatctagaccggaggtaatatcatga

SEQ ID NO: 40091 - DNA, 1254 bp, Salmonella typhi
gtgagtcgtacaactattctcgatgacgccacggcgagcgatatcgatgaacaacgccattctcagccggttcaatttattaaacgcggtacagcgcctttcatgcgcgtcacgctggctcttttttccgcgggcctggcgactttcgcactcctttattgcgttcagcctatactaccggtactttcccaggagtttggcgtctcccccgccagcagcagcgtttcactttctatttctaccgccatgctggctatcggcttactttttaccggcccgctttctgatgcgataggccgtaaaccggtgatggtcaccgccttgttattagcctcctgctgcacattgttatcaaccatgatgaccagctggcatggtattctgattatgcgcgcgctgatcggtctgtcgttaagcggcgtcgccgcggtgggaatgacctacctgagcgaagaaatccatcccagctttgtcgctttctctatggggctctatattagcggtaattccatcggcgggatgagcgggcgtttattaagcggcgtcatgaccgacttttttaactggcgcatcgcgctggcggccatcggatgctttgcgctggcgtccgcgctgatgttctggaagattttacctgcctcgcaacatttccgtcccacgtcgctacggcctaaaacgctatttattaatttccgtctccactggcgcgatcgagggttaccactgctgtttgcggaaggttttttactgatgggcgcgttcgtcaccctgtttaactacattggttatcgcctgatgctctccccctgggaattaagccaggccgtggtcggactgttatccgtagcctatctcaccggcacatggagctcgccgaaagctggcgcaatgacctcacgctatggccgggggccggtgatgctgttctctaccgcagtaatgctgggcgggcttttactgacgctttttacctcgctttggctgatttttgccgggatgctgcttttttccgccggctttttcgccgcgcactccgtggccagtagctggattggcccgcgtgcgcgccgggcgaagggacaggcctcgtcactttatcttttcagctattatctggggtccagtattgccgggacgctaggcggtgtattctggcatagttacggctggaacggcgtaggtggttttatcgcgctaatgctggtgctggccatcctggtcgggacgcggctacatcatcgtcttcacgcctga

SEQ ID NO: 40092 - DNA, 822 bp, Salmonella typhi
atgcataaaaccattgctgtattactgggcatagtgtgttttttaccggttatggcgaaagccgggggggctgaaacagacgccacggatgccagcgacgtcaaaacgcttttttttaaccatgacgatcgagtgcccgtcgccgatccgacccaatcgccgtgggatgccatcgggcaactagagaccgccagcggtaatttgtgtacggcaacgcttatctccccgcatatcgccctgacagcaggtcactgcctgctaacgccgccgaaaggaaaaccggacaaagcggttgcgctgcgttttgtggcgcgaaaaggagtatggcgctatgaaatccacggcattgaaggccgcgttgaaccgtcgctgggccgacgtttgaaagcggatggcgatggctggattgtgccgcctgccgcggcaagctgggattttggtctggtaatattgcgctacccaccttccggtatcacgccagtgcctttatttaccggcgataaagcggcgctcactgcggcgttgaaagccgcagaccgaaaagtcacgcagtccggttatccggaagatcatctgaatgcgctctattcccatcaggattgcgtcgtgaccggctgggcgcagaatgccgtactctcacaccagtgcgacacgttacctggcgacagcggctcgccgttattattgcacacggatagcggatggcagctcattggcgtacaaagctccgcccctgcggctaaagatcgctggcgcgccgataaccgcgctatatccgtcaccggctttcgcgataagctgaaagctctggcgcaggattaa

SEQ ID NO: 40093 - DNA, 1530 bp, Salmonella typhi
atgcgaattggcataccaaaagagcggttacccaatgaaacccgtgtcgctgcgacgccgaaaacggtagagcagctactgaagctggggtttagcgtcgctatcgaaagcggggcgggtcaactggcaagttttgacgacaaagcgtttgcgcaggctggcgcggatattgtagacggcaatgctatctggcaatcggaaattattctcaaggttaatgcgcctgaagaagaggaaatcgctttactgaaccccgggactacgctggtcagttttatctggcctgcgcaaaatcctgggttaatggagaaacttgccgaacgtaaggttacggtgatggcgatggactccgtgccgcgtatttcccgcgcgcagtcgctcgacgcgttaagctcaatggcgaatatcgcgggttatcgcgccattgtagaggccgcgcatgaatttgggcgcttctttaccgggcaaatcactgccgccgggaaagtgccgccggcgaaggtgatggtgattggcgcgggcgttgccggtcttgcggctatcggcgcggcaaacagcctgggggcgattgtccgcgcgtttgacactcgtcctgaagtcaaagagcaggtccagagtatgggggctgagttcctcgaactggattttaaagaggaagccggtagcggcgatggttacgccaaagtgatgtccgaggcgtttatcaaagcggaaatggcgctctttgccgcccaggccaaagaagtcgatatcattgttaccaccgcgttgattccgggcaaacctgcgccgaagctgattacccgcgatatggtcgattctatgaaggccggcagcgtgattgtcgacctggccgcgcagaacggcggtaactgcgaatataccgtcgccaatcaggttgtgacgacggacaatggcgtaaaagtgattggctacaccgatctaccggggcgtttgccgacgcagtcatcccagctttatggcaccaacctggttaacctgctgaagctgctgtgcaaagagaaagacggcaatattgacgtggattttgacgatgtcgtgatccgtggcgtgacggtgattcgtgacggcgacattacctggcctgcgccgccaatccaggtttccgcgcagccacaggccgcgcctaaagcagcacctgcgccaaaagagccggaaaagcccgcttccccctggcggaagtatgcgttaatggcgctggcgatcattctttttggctggctggccgatgtcgcgccaaaagagttcctcggccattttaccgtgtttgcgctcgcctgcgtggttggttattacgtggtgtggaacgtgtctcatgcgcttcatacgccattaatgtcggtgaccaacgcaatttcagggattattgttgtcggggcattattgcaaattggtcagggcggctgggtcagcttcctgagctttatcgcggtgcttatcgccagcattaatattttcggtggcttcaccgtgactcagcgtatgctgaaaatgttccggaaaaactaa

SEQ ID NO: 40094 - DNA, 846 bp, Salmonella typhi
atgttcagatatttatgtaaccagaaagctgcactgctgaccgccattctcctgatggcggccggcgtgctcaccctgtgtttcccggagtcctggtacccgcaggaaacagaatggcagctcacggcagaaaaagaaattaccgggatacacggcggcctctccggcctgacatggaacccggacagcagaacgctgtttgccgtgaccgaccacccctcctcggtggtggagctggacacggaagggaacgtgctgcgggtgataccgtcagacggcgaccacgattttgaggccatcgaatacctcggcgggaaccgctatgccctgtcccgggagcgggagcggacgctcaccacccactgcattgacagcagcacgaccgtcctcccgccggcaacatacagcctgacgctggatgtgaacaggcacagcgacaatgccggttttgaaggccttgcctggggacggggagagcatgccctgatggtggcgcaggagaaaaaaccgctgcggctttacgtgacggaccggagccctgatgcgctgtcggtgagtgactcgctgacacaccgggcgtccctgccatggttcctgaaggatatctccggtctgcattatgaccggaacaacgggctcctgtatgtactttcccatgaatctgccgtggtcgtggtgtcggatctggacggcgggaggaaggtgatgtcgctgcgccggggacactgtggcctgcgaagggatatcccgcaggcggaggggatagcctcagatgaccgggacacgctgtggatagtcagtgaaccgaatctgttttaccgcttcacccgcacggcttcgtcctga

SEQ ID NO: 40095 - DNA, 3750 bp, Salmonella typhi
gtgacgctggatttctatgtcagagaaagcaactacatccaactggatgacgatctaagaaactggatcggtagccgtttctcttccaaatttgtccgcaacccagattcgaaagagccagatgacaaccaggttaaacgctggccgcaaattcgccacggtaatgtgactcagcgcctggtcaagctgttgattttaggggccaaatttaacaccgtaaatacggtaactattgatattgttaacgcctggctgaaagaagcctggctccagctaacaggatctctggcggtattgaagcctgatggaaaccgtttttatttaccgaaagagcatctgacattctctctggtgcaaaaagcacgcatttgtccagtgaccaataaattactggcgacaaccttcaaaggtctgaccccctatttgcccatgcatatccagttcgagcgactgacgagtgcacagtacgacgcgtttttggctcaggaagtcacgctgccagcgatctgggaacacgatcgctctcaggatgattatgtcgacgggttaacaaaagtgcgtgactgggtaagccaggatccgcaagtgctaccattacgctcgcaaaacctctggacggacattaacgatcgcgtggtagaaggtggattttactaccgcaccgcagaacactcggcacagcaatcgtcggagcgcctgcaaagctacgaaagaatgtttaaaaacgggcagcttaacgtccttaactgctcaaccacgatggaaatgggtgtggatattggcggtatttctgcagtggtgatgaacaacgttcctccgcatccggccaactatttacagcgagccgggcgtgccgggcgtagtaaagagtcacgcgctatttcgtacaccttgtgcaaagggaacccgcacgatcagcaggtttttgctaatcccctctggccgtttgagacggtgatcccggctccaatggtggcaatgaactcagagcgtctggtgcagcgtcacgtcaattccctgttactgtcagaatacttatgccatgtggtcggtgaaaccgaaaaagagcgtaccagccttaatagccagtggttctttggcgaagagctcgaccagtcggtatgcaatcgttttaaagcctggctcgaacgtccgacgctgagcattgataacgcgctggagcgtctggttaaagggacggcattgcacggcgttacggcagaaaaactgcgggataaaacgcaggaggctattgccgtcttacagacacgctggctggggatcttccgcgatctcgtgaaacaggaaagtgaatcgcagcccaatacgccgtaccgcaggcgactggaactggagaaaaaacggcattgtggtgaatacctgttacgcgatctggcggcccgaactttcctacccggatatggcttcccaacggatgttgtcacttttgataacttcaccatggaagattatatccgcgagaaaacgcacaaaagccgtgataagaatgaccgggaggataacgtttcgcgttataaagggctgccttcgcgcaacctttccgttgcgatccgtgagtatgcgccgggcgcggagattatccttgatggtcgggtattccgctcggccggtgtttcgctgcactggcataaccttaacgccgatactaacgaagcccagcgtctggacagcgcctggcgttgccataaatgcggtactttaggctatgaggaaggtattggtggctcgggggatttattctgtaccaatagcgcgtgcggggagcggatcacgctggataaccgacgtcaggtattacagcccgccggttttgtcaccgatgcccatactcccgttacgaacaacattgaaacaatgaaattcatcccggtggtgcctgcctgggtgtttgtgaaagcagaacgcgtgccactgccaaacccgctgatgggttttatggcgtcaggcgcggatggtcatgttttccagcagagcatgggcgaaggtggacacggttatgcgctgtgcctgagctgcggccgggcggagtcaatgctcaatgccaccgatacgccgaaatcgatggaagcgcattatcctccgcgccccggtaaatctgatcgcgacagccagaatcagcggattatctgccctggctccacggcgctgaataagaatgtcacgctgggtgcgctggcgcgcaccgatgtgtttgaactcattttgcgccgtccgcaaaacggggagtatatccccgataattctgatgaaggccgtattgtggccatgacgctggcggttgcactacgtcgagcgctggccagcgtgctgggggtatcggcgacagaactgggctatgcggtgcgtccggtcagactggataatgagcaatcggtcctggcggtgcagctttacgacattatcagcggcggtgcggggtttgcttccagtgcgccattgcatattgaagcggtcctcaaagggatggtgaaacagctgggatgccgccactgtgataccgcctgtagcgaatgtctgctcgattcgcagacccgccacgatcacgatcagctggatcgtaaagccgcgcaggcctggctgggggaggatttcagtcactatatcggtttgccggaggcggaaaaattctccctggccgacgcgcagtattgcccaggcagcattgaggatgctatccgtcgtgccattaacgacggggcgcgcaaactcacgttgtggatgaatgggccgcttaacgagtgggatttgtatgcccgccagttccgaacggcgatccagaactatcggctgaaagatgaggttgaggttacgctggttgtgcccggtcatattgaagatccggagcttttacaggagattgcgcagtttgccgccattggtatgcagctttgccagtctgagctgaatacggatacgccggttgtcgcacaggtagcattcaacgatcgcctgatgatgttgatttctcgcagcccagaggccaccatccccggcccgaactggcatctgaatagccagatggttattcgcagccatgcgtttgagccgataacgcttagtaaagcagagctattatccgatgccgcaggtagcagaggcctggtcaacgatattgagatccataagcagcttaatggcccggtttctcaatttggtcagcgtttctggggcgtgttaaccggggcgcaggaagatattcagacgctgctgaaggaaaaccaggtgacgcgcattcactatagcgatcgttatctgcaaaacccggtggcgctggcgttattaggcgggctgttaaaaccgctgaaatcgatcctggcgcaggatgcgcaagtgacgattgatacgctgtttaagagtaaagagcggccaggcaacaagccgttccatgactggatgagtgaagcggattttcaggattttgccgaccagtggtttgcggcatctatgggcagagccgtcgtggttaacaccgttggctcgccgcgtgatattccacaccatcgtaaactgatggtgaccttcagtaatggtcaggcgctgaagatccgttttgaccaagggatgggatactggcgcatcgtctttgcgcgagcgtatcgcgattttgattttaacgatgatgtggctttccagctcgggaatatggcaaaagcctgcgttgaaggtcaggtggtcaacagcgaggaaagttgggcaaccgatgtgctggtgcaggtgatagtcccttaa

SEQ ID NO: 40096 - DNA, 726 bp, Salmonella typhi
atgtttccagtgggacgtaaatgggcaaatattgttgctaaaaaaacggctaaagacggtgcaacgtctaaagtatatgcaaaatttggtgtagaaatctatgctgcggctaaacaaggtgaaccagacccggaatcaaactcagctttaaaattcgttattgaacgtgcgaaacaagcacaggttccaaaacatgttattgataaagccattgataaagccaaaggtggcggagatgaaacgttcgtgcaagggcgttatgaaggctttggacccaatggttcaatggttatcgctgaaacgttgacgtctaatgttaaccgtacgattgctaatatccgcacaatttttaataaaaaaggcgggaatatcggagctgcaggtgctgtcagctatatgtttgacaatactggagtgattgtatttaaaggaacagaccctgaccatatttttgaaattttgcttgatgctgaagttgatgttcgtgatgtaaccgaagaagaaggaaacatcgttatttatactgaagctacagacctgcacaaaggaattgcagcgctaaaagccgctggaattactgaattttcaacaacagaattagaaatgattgctcaatcagacgttgaactttcaccagaagatttagaaatctttgaaggacttgttgatgcccttgaagatgatgatgatgtgcaaaaagtatatcataacgttgcaaacctctaa

SEQ ID NO: 40097 - DNA, 1383 bp, Salmonella typhi
atgcgataccgttttcccgataacttctggtggggcagcgcctgctcagcgttgcaaaccgaaggggatagtctgaatggtggtaaaagccagaccacgtgggatgtgtggttcgagcgccagcctgatcgttttcatcagggcatcggtccagcggaaacctcaacgttctatcgccactggaagcaagacatcgcgctactgaaacagttaaaacacaacagttttcgcacctcgctaagctgggcgcggctcattccagacggtgtaggcgaggtgaatccacaagcggtgagcttctacaatcacgtcatcgacgagctactggcgcagggcatcacgccgtttattacgctgttccattttgatatgccgatggtcatgcaggagaaaggcggctgggaaaatcgcgacgtcgtagaggcgtttggtcggtacgcgcaaacgtgttttaccttgtttggcgaccgcgtgaagcactggtttacctttaacgagccgattgtgccggtggaaggcggctatttgtacgacttccactatcccaatgtggtggattttaaacgtgcggccaccgtggcgtaccataccgtgctggcgcactcgaccgccgtgcgcgcctggcgcgccgggcgctacgacggtgaaatcggcgtagtgctgaatctgacgccgtcctacccacgctcgcagcatcccgccgatgtgcaagccgcgcatcatgcggatctgttattcaaccgcagttttcttgacccggtattaaagggagaatacccggcggagctggtggcgctgctgaaaacctatgaccagctgcctgcctgtcagccaggcgaccgtcagcttattgccgacggcaaaatcgatttactggggattaactattatcagccgcgccgcgtgaaatgccgtgatacagcggtgaatccgcaagcgccgtttatgccggagtggttatttgactattacgacatgccggggcgcaagatgaacccttaccgcggctgggaaatttacgcgccaggaatttacgacatcatcaccaacctgcgggataattacggcaatccgcgctgttttatctccgaaaacgggatgggcgttgagaacgagcagcgttttgtgcaagcgggacagattcacgatgattaccggattgactttatctctgagcatcttaaatggctgcataaaggcattagcgagggctgtcactgtcttggctaccacatgtggacctttatcgataactggtcatggctgaacggctataaaaatcgctatggttttgtacaactggatttagccacccaaacgcgcacggtgaaaaaaagcggagaatggtttgccgccaccgcagagcataacggttttgattaa

SEQ ID NO: 40098 - DNA, 774 bp, Salmonella typhi
atgaaatcaaacacttctcagcaaagaccttaccaggaagtgggcgcaatgatacgggatctgattgtgcagacgccgtaccgccccggggagcgcttgccgccggaaagagagatcgctgagaggctcaatgtgacgcgtaccgtcgtgcgtgaagcgctgatcatgctggaaattaaaggtctggttgaagtccgccgcggcgccgggatctacgtgctcgacagcgcggataataacgagatggaaggcgctgacgtcaatcactgtaatgacgccgggccgtttgaactgttacaggcgcgtcagttgctggaaagtaatatcgctgaatttgccgctctgcaggccacccgcgaggacatcattaaaatgcgccaggcgttacaactggaagagcgagaactcgcctccagcgcgccgggcggctcagaaagcggcgatatgcagtttcatctggccattgccgaagcgacccataacagtatgttggtcgagctcttccgtcagtcctggcaatggcgtgaaaataatccgatgtggctccagcttcatagccatctgggcgatacgctttaccgtaaggagtggctgggcgatcataagcagatcctcgcggcgttaattaagaaagacgcccgcgcagcgaagctggcgatgtggcagcacctggaaaacgtgaagcagcgtctgctggagttttccaatgttgatgacatctactttgatggctatctgtttgagtcatggccgctggacaacgttgatgcctga

SEQ ID NO: 40099 - DNA, 462 bp, Salmonella typhi
atgacgactcaggtacgtaagaatgtcatggatatgtttatcgatggcgcacgccgcggttttaccatcgccacgaccaacctgttacccaatgtggtcatggcatttgtcattattcaggcgctgaaaattaccggtctgctcgactgggtaggccatatctgccagcccgtgatggcgttgtgggggcttcccggcgaagcggctacggtgcttctggcttcgctgatgagtatgggcggcgccgttggcgtggcggccagtctggctaccgccggcgcgctaagcggccacgatgttaccgtactactgccagccatttacctgatgggaaacccggtacagaatgtcggccgctgtctcggtactgccgaagtcaacgccaaatattacccgcatattatcgcagtctgcgccatcaatgcgctgctgtcgatctgggtcatgcagcttattgtttaa

SEQ ID NO: 40100 - DNA, 903 bp, Salmonella typhi
atgggttccaccagaaaagggatgctaaacgtcctgattgccgccgtattgtgggggagttcaggcgtttgcgcgcagtacatcatggagcaaagccgtatgtcgtcacagttcctgacgatgatacgtttgttattcgccgggctgatactggtgaccttctcctttatgcacggcgataagatattttcgattcttaaaaaccgcaaagatgcactgagtctgctgattttctccgtggtgggcgcgctcaccgttcagctaaccttcctgctcacgattgaaaaatccaatgccgccaccgcgacagtgctgcaatttttatcgccgaccattattgtcgcgtggtttgcattagcgcgaagaacacgaccaggcattctggtcttaaccgccattcttacatcgcttatcggcacctttttactggtgactcacggcaatccaacatcgctgtcgatctcttcaggcgcgctgttctggggtatcgcctccgcatttgccgccgccttttatacgacctggccttccaggctaatcgcccaatacggcacgctgccagtggtcggctggagtatgtcctttggcggccttattctgctgcccttctacgctaaagaaggaacgcactttgcggtgagcggcagcctgattctggcctttttctacctggtggtgatcggtacgtcgctgacgttcagcctgtatttgaaaggcgcgcagctgattggtggccccaaagccagcattttaagctgcgcggaaccgttaagcagcgccctgctgtcgctgctgctgttggggattagttttaccttgccggactggctgggcacgctgctcattctctcgtcagtgattctgatctccctcgattcccgtcgacgcgcgcgggccgcttaa

SEQ ID NO: 40101 - DNA, 1251 bp, Salmonella typhi
atgctggaacaaatgggcattgctgctaaagcggcgtcgtataagctggcgctgctctccagctgcgaaaaaaatcgcgtgctggaaaaaatagccgatgaactggaagcgcaaatggaaagtatcctcagcgcgaacgtacaagatgttgagcaggcgcgagccaatggcctgagcgaagcgatgctggaccgcctggcgctgacccctgcgcgtctgaaagcgattgctgacgatgtgcgccaggtctgtaatctcgccgacccggccgggcaggtgatcgacggcggtctgctggacagcggcctgcgtctggagcgccgccgcgtgccgttgggcgtggttggcgttatctatgaggcgcgtccgaatgttaccgttgatgtggcttctttgtgtctgaaaaccggtaatgcggtgattctacgcggtgggaaagagacgcatcgcacgaatgccgcaaccgttcttgtcattcagaaggcgctgaaagcttgcgatttaccggaagcggcggttcaggcgattgataatccggatcgttcgctggtcagtgaaatgctgcgtatggataagtacatcgatatgctgatcccgcgcggcggcgcaggcttgcataaactctgccgcgagcaatccaccattccggtgattaccggcgggattggcgtgtgccatatttttgtcgatagcagcgcagacatcgccccagcgctgaagattatcgtcaacgctaaaacccagcgcccgagcacctgtaacacggtggaaaccttgctggtgcatcaggacatcgcagaacgctttttgcctgcgctgagcaagcagatggcggagagtggcgtaacgttgcatggggatgaaaccgtcatgcaggcactgcatggccctgccaaactggtggcgctgaaaccggaagagctggataacgagtttctgtctctggatctgaacgttgtggtggtcgaaaatatggatggcgctatcgcccacattcgcgaacatggcactcagcactccgatgcgattttaacgtgcgatatgcataatgctgcgcgtttcgtgaacgaagtagattccgctgcggtttatgtcaacgcctctacccgttttaccgatggcgggcagtttgggcttggcgcagaagtggcggtcagcacgcagaaattacatgcccgcggtccgatggggcttgaagcgcttaccacctataagtggataggctttggcgatggtacgattcgtgcgtaa

SEQ ID NO: 40102 - DNA, 1389 bp, Salmonella typhi
atgagtggggggaaattgccggaggggtgggtgacaacccatctttcagaaatatgcagtaagcctcaatatggctacacaactaagtcaagctctatgggggatgtaaaatttttaagaacaaccgatattacaaaaggagcggttgactggtccagtgtaccttattgcatggatgccccggaagatgtttcaaaataccaattacaggacagagatattgtgatatctcgagccggttcggttgggtttagttttttggtacaaaaccctccaagccaagttgtttttgcttcataccttattcgatttaaaccagttaattatttttcagaatattacttaaaacgttttttagagtcgagtgactattggaatcagctgtctttaatgtcagcagggaatgctgtacaaaatgttaatgctcaaaagttatcaacacttacagtaccaataccacctatagccgaacaaaaaatcatcgccgaaaaactcgatacgctgctggcacaggtagacagcaccaaagcacgtcttgagcaaatcccacaaatcctgaaacgttttcgtcaggcggtgctagctgctgcggtaagcgggttgttaattggttcaaataaaagaaaccaccatccattatgtagtgaatggcaatggccagacctaccatcaacttggagtgttcataaatactctgaacttgttgatagcagactaggtaaaatgcttgataaagctaaaaattttggctctgcaacaaaatatcttggaaatataaatgttcgctggtttagttttgatttagaaaaccttcaagatatactaatttcagatatagagcgcagagaattatcactcaagcttggcgatgttttaatatgtgaaggtggtgaacctggtcgatgtgctatatggagtgaacctcaggacatacctgttattttccaaaaagcattacatcgagcacgggtaaaagacaaaatcatccccgaatggttagtttataatttgaaaaatgattcaaataacattagcttatctcagctctttacaggaactacaattaaacaccttacaggaaaagcactagcaaattatcccatcagagttcctccattagaagaacaacacgaaatcgtccgccgcgtcgaacaactcttcgcctgggccgacaccattgaaaagcaggttaacaacgccctgaaccgcgtcaacagcctcacccagtcaatcctggcaaaggccttccgcggcgagcttaccgcccagtggcgtgcggaaaacccaagtcttatcagcggtgaaaacagcgccgccgccctgctggaaaaaatcaaggccgaacgcgccgccagcggtggtaaaaaaacctcgcgtaaaaaagcctga

SEQ ID NO: 40103 - DNA, 618 bp, Salmonella typhi
atgatgagaaagccttcacaaattgtccattgcattagttgcgatttatcctgtcaattattccctgacagcgcagtacgggtgcaatactgtcataatgcggcattttccatctggccagatggtaatgctttcctgaaaaaagggtttattgaaaagttattgcttgatagacacaaccatttatccagcggttttatctttgttgatttttctttcccgaatcttcgacgatttaccgatttacaatgggctgacagtctggcaaacagtggtatgcatattgtcctgatttctgacagaagtttaactccgctggccaattactggattttgaaaagcaataaaatacaaggaattatttattccgatgacgatgatattgtgcaacagcaaaagatgcaccgcttgtttaccggtcggcttgccaacagtaaacgtggacgaacgcttaactatacggaatttatattactgaagcactttgtatcaggaataagtattcagcagattgtaaatattgacaatattgatattaagaaactttatgtgcataagctgcggcttgaaaataagctagggcatagcattcataaaataatatcaaatattttatag

SEQ ID NO: 40104 - DNA, 3510 bp, Salmonella typhi
atgaacaaatctaacttcgactttctcaaaggcgtcaacgacttcatttacgccatcgcctgcgcggcggaaaacaactatccggacgatcctaataccactctgataaaaatgcgcatgtttggcgaagccaccgcgaaacatctcggccagttgctggatatacccgtctgcgaaaaccaacatgacctgctacgcgaactgggcaagattgcgtttattgatgacagcatcctttctgttttccataagctgcgccgtatcggtaacctggccgtccacgaatttcataacgatctggacgatgcccagatgtgcctgcggctcgggttccgcctcagcgtctggtactaccgactggtaaccaaagattacgatttcccggtgccgatgtttgttctgccagaacacggcgagaatctttatcaccaggaagtgctgacgctgaaacaacagttggaacgtcaggcgcaagagaaagtacaaagtcaggccgaactggaagctcagcagcaaagactggttgcgctcaacggctacattgccatccttgagggcaaacagcaggaaaccgaagcccagaccaaagcacgtctggccgcgctggaggcacagcttgcggcaaaagatgccgaactggcgaagcaaaccgaacaggaacgtaaggcctatcacaaagagatcaccgatcaggctatcaagcgcacgctgaatctcagcgaagaagagagccgcttcctgatcgacgcccagttgcgcaaagcgggctggcaggccgacagtaaaacgctgcgctttgccaaaggcgctcgcccggaacccggcgtcaataaagcgattgccgaatggccaacgggtacagatgaaacgggaaaaacaggctttgccgattacgtattgttcgttggcctgaagcccatcgccgtcgttgaagcgaaacgcaaaaataccgatgtcttcagcaagctcaacgagtcttaccgctacagtaaatacttcgataacggatttttacgcgacacgctgctggagcactacgctcccgacgaagtgcatgacgccgtgccagagtatgaaatcagctggcaggacaccagcggcaaacagcgctttaaaatccccttctgctactccaccaacgggcgcgaataccgcgcagcgatgaagaccaaaagcggtatctggtatcgcgatgtccgacacaccaccaatatgtcaaaagcgctgccggaatggcatcgcccggaagagctgctggatatgctgggcagcgacccgcagaaacaaaaccagtggtttgctgaaaaccccggaatgagcgaactcggcctgcgctattaccaggaggatgccgtccgcgcggtggaaaaggctatcgttaacggccagcaagagatcctgctggcgatggcgaccggtaccggtaaaacccgtaccgccatcgccctgatgttccgcctgatccagtcgcagcgtttcaaacgcgttcttttcctggtcgaccgtcgctcgcttggcgaacaggcgctggggtcgtttgaagacacgcgcattaacggcgacacctttaacagcatttttgatatcaaagggttgaccgacaaattcccggaagacagcaccaaaattcacgtcgccacggtgcagtcactggtcaagcgtacgctgcaatccgatgagccaatgccggttggccgctacgactgtatcgtcgtcgatgaagcacaccgcggctacattctcgataaagagcaaaccgagggcgagctgcagttccgcagccagctggattacgtttccgcctaccgtcgcattctcgaccatttcgatgcggtaaaaatcgccctgaccgccacgccagcgctgcatacagtggagattttcggcgaaccggtttaccgctacacctaccgtacggcggtgatcgacggttacctgatcgatcaggatccccctattcagatcgtcacccgcaacgcgcaggatggggtctatctttccgagggtgaacaggtggagcgcctgaacccacagggcgagctgatcaacgacacgctggccgacgatcaggattttgaggtcgccgactttaaccgtggcctggtgatcccggcgtttaaccgcgcggtatgcggcgagctcaccaaatacctggatcccatcgggcaacaaaaaacgctggtgttctgcgtcaccaacgcccatgccgacatggtggttgacgaactgcgtaccgcgtttaagaaaaagtatccgcagcttgagcacgacgcgatcatcaagatcaccggtgatgccgataaagacgcgaagaaagtgcaaagcatgatcgtccgtttcaacaaagagcggttgcccaatatcgtggtcaccgtcgatctgctgaccaccggtgtggatattccgtctatctgtaatattgtgttcctgcgcaaagtcaaaagccgcattctctacgagcagatgaagggccgtgccacgcgtttgtgcccgtcggtagggaaaaccagctttaagatttacgactgcgtggatatctacagttcgctggaaagcgtcgacaccatgcgcccggtggttgtgcgtccgcaggtggagctgcaaacgctggtcaacgaaattaccgactcagaaacctacaaaaccattgaagcggatggccgcagttttgccgaacacagccatgaacagctggtcgctaagctgcagcggattatcggtcttgccacctataaccgtgaccacagcgaaacggtggataagcaagtacgtcgtctggacgaactgtgcctggatgccgcgggcgttaactttggtggtctggcttcgcgcctgcgggaaaaagggccgcactggagcgccgagattttcaataagcttcctggttttatcgcccgcctcgaaaggctgaaaaccgatatcaacgccctgcgcgatgcgccgatcttcctcgatattgacgatgaggtggtgagcgtcaaatcgctgtacggcgactacgatacgccgcaggactttctcgaagcgttcgatgcgctggtgcaacacgcccctaacgcccagccggcgctgcaggcggtgatcaatcgtccgcgtgacctcacccgtaaagggctggtggaattgcaggagtggtttgaccgccagcattttgaagagtcctctctgcgcagcgcgtggaaagaaacacgcaatgaagatattgccgcccgcctgatcggccatatccgccgtgcggcggtgggcgatgcgctcaaaccgttcgacgagcgtgtcgatcacgcgctggcgcgtatcaaaggcgagaacgactggagccctgagcagctaagctggctcgaccgtttagcgcaggcgctgaaagagaaagtggtgctcgacgacgacgtcttcaaaaccggcaatttccaccgtcgcggcggtaagtccatgttacagcgcacctttgacgacaacctcgacagcgtgctggataagttcagcgattatatctgggacgagctggcttaa

SEQ ID NO: 40105 - DNA, 957 bp, Salmonella typhi
atgaccccgattgcagttaccctacttaccggttttcttggtgccggcaaaaccaccctactacgccatatcctcaacgaacaacatggttttaaaatcgccgttatcgaaaacgaatttggcgaagtctccgttgacgatcaactgattggcgatcgcgccacacagatcaaaaccctgactaacggctgcatctgctgtacccgctccaacgagctggaagatgcgctattagacctgctcgacagccgcgaccgcggcgatattgctttcgaccgcctggtgattgaatgcaccggcatggccgaccccggcccgattattcagacctttttctaccatgacgtattatgcgaacgctacctgttagacggcgtgattgcgctggtcgacgcggtgcacgctaacgagcagatgaaccagttcaccatcgcccagtcgcagataggctacgccgaccgtatcctgctgaccaaaaccgacgtggcaggcgacagcgagaaactgcgcgagcggctggcgcgtatcaacgcccgcgccccggtttacaccgtggtacacggcgatattgacctgagtcagttgtttaataccagcggctttatgctggaagagaacgtgctggcaagccaaccgcgtttccactttattgccgataaacagaacgatgtgtcgtcaattgtggtggaactggattacccggtggatatcagcgaggtttcgcgggtgatggaaaacctgctgctggaatcagcggataaactgctgcgttacaaagggatgctgtggatcgacggcgaacccaaccgcctgctgttccagggcgtgcagcgtctctacagcgccgactgggacagaccgtggggcgacgaaacgccgcatagcacgctagtgtttatcgggatccagttgccggaagacgagatcagagcggcgtttgcggggttaaggaagtaa

SEQ ID NO: 40106 - DNA, 204 bp, Salmonella typhi
atgtttgatactttaggtcaggcaaaaaaatatctcggccaggcggcaaaaatgttgattggtattccggactacgacaactatgtcgagcacatgaaaaccaaccatcccgacaagccgtacatgacctatgaagagttcttccgcgaacgtcagcaagcacgttacggcggcgatggcaaaggcggtatgcgctgttgttaa

SEQ ID NO: 40107 - DNA, 537 bp, Salmonella typhi
atgtctatgaaaaaatatttagcaatgatcacaggctcgcttcttgtctccagcagcgcgatggctgtttctgataacaccatcacctttcaaggggaagtctctgatgaaacgtgctctgtcgtgattaatggtaatcaggctaaacccgtcgtgttattgccaacagtaagtactaaagagttatcagaacaagggaaaaccgcggggccaataacgtttgatattgggctgtccgggtgtaccggttctaaggacaaaacaacaaaaatttccaccgtctttgtcggtaatcaggtcaccagtaacggtaacctgggtaatactggcagcgcgaaaaatgttgaagtccaattactcgacacttcaggggagccaatcaatctgaccggcggctttactggcgacggcgacctacagctggaaccaaatgcttctgaagcgagcgcgacttataccgcgcggtattactctaccgggaaagcagaggctgggacagtcgctgccaccctacaatacgccgtttcgtataaataa

SEQ ID NO: 40108 - DNA, 894 bp, Salmonella typhi
atgaaacgtccggactacagaacactacaggcgctggatgccgttatacgtgaacgaggattcgagcgcgccgcccagaagctgtgcatcacgcaatccgccgtctcacagcgcataaaacagcttgagaatatgttcggacaacctttgttggtgcgtaccgttcctcctcgccccacggagcaagggcaaaaattactggctctgctgcgtcaggttgaactgctggaagaagagtggctgggcgatgaacaaaccggctctacgccgctactgctgtcgctggcggttaacgccgacagtctggcgacctggctgcttccggcgctggcgccagtactggcggactcccctatccgtctcaatttacaggtggaagatgaaacgcgcacgcaagaacgtctgcgtcgcggcgaggtggtgggcgcggtgagtattcagcatcaggcgctgcccagttgcctggtagacaaactgggcgcgctcgactatctgtttgtcgcgtcaaagccgtttgccgagcgctattttcccaatggcgttacccggtcgtcgctgctgaaagcgcccgccgtcgcgttcgaccatctggatgatatgcatcaggcttttttgcaacagaatttcgatctaccgcccggcagcgtgccgtgccatatcgttaattcatccgaagcgtttgtacagcttgcgcgtcagggcacggcctgctgcatgatccctcacctgcagattgagaaagagctggaaagcggcgagttgatcaacttaacgcctggcttgctacaacgccggatgctttactggcaccgctttgccccggaaagccggatgatgcgcaaagtgaccgacgcgctgctggagtacgggcacaaggtgctgcgtcaggattag

SEQ ID NO: 40109 - DNA, 747 bp, Salmonella typhi
gtgaagttcaaagtgatggccctggcggcattagtgggtttaagtgcaatgtcggcgcaggcaagcgaattgccggaaggcccgcacatcgtgacttccggtacagcaagcgtcgatgctgtgcctgatatcgccaccttagcgattgaagtgaacgtcgcggcgaaggatgcggcgacggcgaagaagcaggccgatgagcgcgtggcgcaatatctttccttccttgagcaaaatcagattgcgaaaaaagacattagcgcggcgaatctgcgcacgcagccggattatgattaccaaaacggtaaaagcattctgaaagggtatcgcgcggtgcgaaccgttgaggtgacgctgcgtcagttagataaactcaattcgctgctggacggcgcgctgaaggcgggtctgaacgagattcgttcggtatcgctgggcgtggcgcaaccggacgcctataaagacaaggcccgcaaagccgccattgatgacgcgattcatcaggcgcaagcgctggcagccggttttaacagcaaattggggccggtttacagcgttcgttaccatgtctctaattatcagccgagtccggtggtgcgaatgatgaaagccgcagatgctgcgccggtatccgcgcaggaaacttacgagcagccgactattcagttcgacgatcaggtcgatgtggtattccagcttgaacctggaacagggcagacgtcgacaacggccgccagcacgcagtaa

SEQ ID NO: 40110 - DNA, 2151 bp, Salmonella typhi
atggatacgaaaaagatattcaagcacataccctgggtgattctcggaatcatcggtgctttctgcctctcggtcgttgccctacgtcggggtgaacacgtgagcgccctgtggatcgtggtcgcttccgtttccgtctatctggtggcttaccgctactacagcctgtacatcgcccagaaggtcatgaaactcgacccgacgcgcgcgacgccggcggttatcaataacgacggcctgaactacgtgccgactaaccgctacgtgctgtttggtcaccacttcgccgccatcgccggcgcaggtccgctggtcgggccggtattggccgcgcagatgggctatctgccggggacactgtggctgctggcgggcgtagtgctcgcgggcgcagtgcaggactttatggtgctgttcatctcttcccgccgtaacggcgcctctcttggcgagatgatcaaagaagagatggggaccgttccaggcaccatcgcgctattcggctgcttcttaatcatgatcatcatcctcgcggtgctggcattaattgtggttaaagcgctggccgaaagcccgtggggcgtcttcactgtctgctcaacggtgccgattgcgctgtttatgggcatctacatgcgcttcctgcgtccgggacgcgtaggcgaagtctccgttattggtatcgtgctgctggtggcgtctatttacttcggcggcgtaattgcccacgacccgtactggggcccggcgctgacctttaaagacaccaccattaccttcgcgctgatcggctacgcctttgtttccgcgctgctgccggtatggctgatcctcgccccgcgcgactatctcgctaccttcctgaaaatcggcgtgatcgtcggtctggcgctggggattgtgatcctcaacccggaactgaaaatgccagcattgacgcagtatgtcgacggtaccggcccgctgtggaaaggcgctctgttcccgttcctgttcatcaccatcgcctgtggcgccgtctctggcttccacgcgctcatctcttccggcaccacaccgaaactgctggcctgtgagaccgatgcgcgttttatcggctacggcgcgatgctgatggagtcctttgttgcggtgatggcgctggtggcggcctcgatcattgaaccgggtctctacttcgcgatgaacaccccgccggcaggtctgggcattaccatgccaaacctgcacgagatgggcggcgagaacgcgccgctgattatggcgcagttgaaagacgttactgcacatgcagcggcgaccgtcagctcctggggctttgtgatttccccggaacaaatcctgcaaactgcgaaagatatcggtgaaccgtcagtattgaaccgcgcaggcggcgcgccaacgctggcagtaggtatcgcgcacgtgttccacaaagtcctgccgatggcggatatgggcttctggtatcacttcggtattctgttcgaagcactgtttatcctgaccgcactggatgcgggtacccgttccggccgctttatgttgcaggatttgctgggtaacttcgtcccgttcctgaaaaaaaccgattctctggtcgcgggtatcatcggtaccgcaggctgcgtcggtttgtggggctatctgctgtatcagggtgtggtcgacccgctgggcggcgtgaagagcctgtggccgctcttcggtatctctaaccagatgctggccgccgtggcgctggtgttgagcaccgtggtactgatcaaaatgcagcgcaccaagtacatctgggtgacggtaatcccggcggtatggctgctgatctgcaccacctgggcactgggcctgaaactgttcagcgccaacccacagatggaaggtttcttctacatggcaaacctgtataaagagaagattgccaacggcaccaacctgaccgcgcagcagattgccaatatgaaccatatcgtggtgaacaactacactaacgctggtttgagtattctgttcctggtggtggtgtacagtattatcttctacggtttcaccacctggatgaaggtacgcaacagcgataaacgtaccgataaagaaaccccgtatgtgcccgtgccggaaggcggcgtgaagatctcttcacaccactaa

SEQ ID NO: 40111 - DNA, 2292 bp, Salmonella typhi
ttgtccgagttgctctctgtcgctctgtttctcgcctctgtgctgatatatgcctggaaggcgggccgtaacacttggtggtttgccgccactctcacggtgctgggactttttgtcattctgaatattaccctgtatgccagcgactattttaccggcgacgggatcaacgacgcagtgctttatacgctcacgaatagtctgacgggagcgggagtcggcaaatatattctgccgggaatcggcattgccctggcgttagtggcggtattcggcgcgctgggatgggtactacgccgccgccgtcaccatcctcatcatgtcggttacagcctgctggcgttactgctggcgttgggttcggtcgacgccagcccggcgtttcgccagattaccgaactggtaaaatcacaaatgcgcgatggcgatccggattttgccgtttattataaagaaccagcaaaaaccattcctcatccgaagctcaatctggtctatatctacggcgagagcctggaacggacctattttgataatgacgcgttccccaatctcacgccagagttgggcgcgctgaaaaatgaggggctggatttcagccataccatgcaactgccgggaacggattacaccatcgccgggatggtggcttcccagtgtggtattccgctgtttgcgccgtttgagggcaatgcgtccgcgtcggtttccagcttcttcccgcagaatatctgcctcggcgatattctgaaaaactccggctaccagaactatttcgtgcagggcgctaacctgcgttttgccgggaaagacgtgttcctgaaatcacacggatttgatcatctgtacggcgctgaagagctaaaaacggtggtggcggacccgtcttatcgtaacgactggggcttctacgacgatacggtgcttgatgaggcatggaagaaatttgaagcgctttcccgctcaggccagcgtttttcgctgtttacgctgaccgtagatactcaccacccggacgggtttatctcacgcacctgcaaccgtaaacgctacgattacgacggcaagcccaaccagtcctttagcaccgtaagttgcagccaggaaaacatcgccgagtttatcaacaaaatcaaagcgtcaccgtggtttaaagataccgttatcgtcgtctcttccgaccatctggcgatgaacaatacggcctggaaatacctgaataagcaagatcgcaacaatctgtttttcattctgcgcggcgataaaccgcagcaggagacgctggcggtcaaacgcaacacgatggacaacggcgcaacggtgctggatattctcggcggcgataattttatcggtctgggacgtagcagcctttccgggcagtcgctgtcggaagtgttcctgaatgtaaaagagaaagtgctggcgatgaagccggatatcattcgcctgtggaatttcccgaaagagataaaagattttaccgtcgatcgggacaaaaacatgatcgcgttttccgggagccacttccgcctgccgttactactgcgcgtatcggataagcgcgtcgagccgttaccggaaagtgaatactccgctccgctacggttccagttggccgacttcgccccgcgcgataatttcgtttggatcgatcgctgctacaaaatggcgcagctatgggcgccggcgctggcgctctctaccgactggtgcgtctcgcagggacagcttggcgggcagcaaaccgtacagcatgttgataaagcgcagtggcagggtaagacggcgtttaaagacacgatgatcgatatggagcgctacaaaggcaacgtcgataccttaaagattgtcgataacgatattcgttataaagccgatagctttatttttaatgtggcgggcgcgccggaggaggtgaagcagtttagcggcatttcccggccggagtcctgggggcgctggtcaaatgcgcagttgggcgatgaggttaaaatcgaatataaagcgccgctgccgaaaaagtttgatctggtgatcaccgccaaagccttcggcgacaacgcgaatcggccgattccggtacgcgtaggcaacgaagaacagacgctggtgctgggtcacgatgtgtccactatcacgctgcatttcaacaacccgacggacgcgaataccttagtcattgcgccgcccgctcccgtctccaccaacgaaggtaatattttgggccattcgccgcgcaaattggggattggcatggtggagatcaaagtggtgaatgttgagagttaa

SEQ ID NO: 40112 - DNA, 1164 bp, Salmonella typhi
atgtctgtaattaagatgaccgatctggatctggccgggaaacgcgtttttatccgtgcggatctgaacgtacctgttaaagaagggaaagtgaccagcgacgcgcgtatccgcgcttctctgccgaccatcgaactggctctgaaacagggcgcgaaagtgatggtaacttcccacctgggtcgtcctaccgaaggcgagtacaacgaagaattctctctgctgccggttgttaactacctgaaagacaaactgtctaacccggttcgcctggtcaaagattacctggacggcgttgacgtggccgaaggtgagctggtggttctggaaaacgttcgctttaacaaaggcgaaaagaaagacgacgaagcgctgtctaaaaaatatgccgccctgtgtgacgtatttgtgatggacgcctttggtactgcgcaccgcgcgcaggcttctacccacggtatcggcaaatttgctgacgtcgcgtgcgcaggcccgctgctggccgctgaactggatgcactgggtaaagcgctgaaagagccggctcgtccgatggtggctatcgttggtggttctaaagtatctaccaaactgactgttctggattccctgtctaaaatcgctgaccagctgattgtcggcggcggtatcgccaacaccttcgttgccgctcagggccacagcgtcggtaaatccctgtacgaagctgacctggttgacgaagcaaaacgtctgctgaccacttgcgatatcccggttccgaccgatgttcgcgttgccaccgagttctccgaaaccgcaccagcgactctgaaatccgttaacgacgtgaaagaagacgagcagatcctggatatcggcgatgcttccgctcagcagctggctgaaatcctcaagaatgccaaaaccattctgtggaacggcccggttggcgtgtttgagttcccgaacttccgtaaagggactgaaatcgtggcgaatgccatcgctgatagcgaagcgttttccatcgctggcggcggcgacaccctggcggcaatcgacctgttcggcattgctgacaaaatttcctacatttctactggcggcggcgcattcctcgaattcgtggaaggtaaagttctgccagccgtagcgatgctcgaagagcgcgctaagaagtaa

SEQ ID NO: 40113 - DNA, 2112 bp, Salmonella typhi
ttgtatctgtttgaaagcctgaatcaactgattcaaacctacctgccggaagaccagattaagcgtcttcggcaggcgtatctcgttgcacgtgacgctcacgagggccagacacgttcaagcggtgaaccctatatcacgcacccggtagcggtggcctgtattctggccgagatgaaactcgactacgaaacgctgatggccgctctgctgcatgacgtgattgaagatacccccgccacctatcaggacatggaacagcttttcggtaaaagcgttgccgagctggtagagggggtgtcgaaacttgataagctcaagttccgcgataagaaagaggcgcaggccgaaaactttcgcaaaatgattatggcgatggtgcaggatatccgcgtcatcctcattaagcttgctgaccgtacccataacatgcgcacgctgggctcgttacgcccggataaacgtcgtcgtattgcccgtgaaaccctcgaaatctacagcccgctggcgcaccgtttaggtattcatcatattaaaaccgagctggaagagctgggttttgaagcgctgtatcccaatcgttaccgcgtcattaaagaagtggtaagagcggcgcgcggcaaccgtaaagagatgatccaaaaaatcctctctgaaatcgaaggacgtttgcaagaggcgggaattccgtgtcgcgttagcggtcgcgaaaaacatctttactcgatctactgcaaaatggtgctcaaagagcagcgttttcactcgatcatggacatttacgctttccgcgtgatcgttcatgactccgatacctgctatcgcgtactcggccagatgcacagtctctataagccgcgtccgggacgcgtgaaagactatatcgccattcccaaagcgaacggctatcagtctttgcacacctcgatgatcggcccgcacggcgttcctgttgaagtccagatccgtaccgaagacatggatcagatggcggaaatgggggttgcggcgcactgggcgtataaagagcacggtgagaccagcaccacggcgcagatccgcgcccagcgctggatgcagagcctgctggagctacaacagagcgccggtagttcgtttgaatttatcgaaagcgtaaaatccgatctcttcccggatgagatttacgttttcaccccggaagggcgcattgtcgaactgcccgctggcgctacgccggtggattttgcctatgcagtgcataccgacatcggccacgcctgcgtcggcgcgcgtgtcgaccggcagccttatccgctgtcacagccgcttagcagcggtcagaccgtcgaaattattaccgcgccgggcgcgcgtcccaacgccgcctggctgaactttgtcgtcagctctaaagcgcgcgctaaaattcgtcagttgctgaaaaacctcaaacgtgatgactccgtaagcctgggccgtcgtctgcttaaccatgctttaggcggcagtcgtaagctggcggaaattccgcaggaaaatattcagcgcgaattggatcgtatgaagctggcaacgcttgacgatctgctggcggaaatcggtctcggcaacgcgatgagcgtagtggtcgcgaaaaatctgcagcaaggcgaagccgtggtgccgaccgttgcgcaatcgaatcacggccacctgccgattaaaggcgcggatggcgtgcttatcacctttgcgaagtgttgtcgtccgatcccaggcgacccgatcatcgctcacgtcagcccaggtaaaggactggtgatccaccatgaatcctgccgtaatatccgtggataccagaaagagccagagaaatttatggcggtcgaatgggacaaagagacggagcaggaattcattaccgaaatcaaggtggaaatgtttaaccatcagggcgcgctggctaacctgacggcggcgattaataccaccacctccaatattcaaagcctgaatactgaagaaaaagatggtcgcgtctatagtacctttattcgccttaccgcacgcgatcgcgtacatctggcgaatatcatgcgcaaaatccgcgtgatgccagacgttattaaagtcacccgtaaccgaaactag

SEQ ID NO: 40114 - DNA, 675 bp, Salmonella typhi
ttggcggcctgcaccacgctgctactccctgcgcagaccgtgttcccggtttatagcgcggcggccttcctctgtctgctggcgctgaaatcaacgcggcggcgggcgaagtatgtcgcctggctgatgctgtctttagggtttgggctatggctggtacatggcggttggctaacggaatggataagcgggcagcctcgcgatccgcagcgctgggtatatgccgttacgctatggctacgtctgctggcgatcgtgtcgacgtcgcagctatggatgcagtatgtgccggttcagcggtttattcgcgccctgttcgcttcacgtctgccacccggcatcgcttacctgttcgctggcccgctgctggtcgtcgaacagctcaaacgacaactgacgatcgttcatgaagcccagcgcgcgcgcggcgtaccgctggatgaaggctggtatcagcggctacgggcaatgcctgcgctgatcgtgccgcttacgcaaaatgcgcttaacgatctgacaatacgcggcgcggcgttggatatgcgggggtttcggctgcatcgagcccgaaccacgctgtgggcgccgaaagatagcatgttacaacgggttgcgcggtatggcatggtactgctaatactggcggaagcgggagtatggatatggttacgttag

SEQ ID NO: 40115 - DNA, 1992 bp, Salmonella typhi
atgtcctcacgtaaagagcttgccaatgctattcgtgcgctgagcatggacgcagtacagaaagccaaatccggtcacccgggtgccccgatgggtatggctgacattgccgaagtcctgtggcgtgatttcctgaaccacaacccgaccaacccgtcttgggccgaccgcgaccgcttcgtgctgtccaatggccacggctcaatgctgatttacagcctgctgcacctcaccggttatgacctgccgatgtccgaactgcagaatttccgtcagctacattcaaaaacccctggtcacccggaagtgggctacaccgctggcgttgaaaccactaccggcccgctggggcagggtattgccaacgccgtcgggatggcgattgccgagaaaactctggcggcgcagtttaaccgtcctggccacgacatcgttgaccacttcacctacgtctttatgggcgacggctgcatgatggaaggcatttctcacgaagtgtgctctctggctggtactctgaaactgggcaaactgatcgcgttctatgatgacaacggtatctctatcgatggtcatgttgaaggctggttcaccgatgacaccgcgaaacgttttgaagcctacggctggcacgttatccgtggcattgacggtcacgatgccgacgccattaaacgtgccacggaagaagctcgcgccgtgactgacaaaccgtccctgctgatgtgcaaaaccatcatcggcttcggttcgccgaacaaacagggtacccacgattcccacggcgcgccgctgggcgacgcggaaatcgcgctgacccgcgaacagttgggctggaaatacgcgccgttcgaaatcccgtctgaaatctacgcccagtgggatgcgaaagaagccggccaggcgaaagagtctgcatggaatgagaaattcgcggcttatgagaaagccttcccgcaggaagctgctgaattcactcgtcgtatgaaaggcgacatgccggctgacttcaatgcgaaagcgaatgagttcatcgctaaactgcaggcgaatccatccaaaatcgccagccgtaaagcgtcccagaatgccatcgaagccttcggtccgctgttgccggaattcctcggcggctccgctgacctggcaccgtctaacctgaccctgtggtccggttcgaaagcgattaacgaagatgccgcaggtaactacattcattacggtgtgcgcgaattcggtatgaccgctatcgccaacggtatcgccctgcacggcggtttcctgccgtacacctccaccttcctgatgttcgtcgaatatgcccgtaacgcagtgcgtatggcagcgttgatgaaacagcgtcaggtgatggtctatacccacgactccatcggtctgggcgaagatggcccgacgcaccagccggtcgagcaggtggcaagcctgcgcgtaacgccgaacatgtccacatggcgtccgtgcgaccaggtggaatccgcggtggcgtggaaatatggcgtagagcgtcaggatggcccaaccgcgctgattctgtcccgtcagaacctggcgcagcaggagcgtactgaagagcaactggcgaatatcgcccgcggtggttacgtactgaaagattgtgcgggccagccgcagattatcttcattgcgaccggttctgaggttgagctggcggttgccgcctacgaaaaactgactgccgaaggcgtgaaggcgcgcgtggtttccatgccgtccaccgacgcgttcgacaagcaggatgcggcctaccgtgaatccgtgctgccgaaagcggtctctgcgcgtgtggcgattgaagcgggtatcgctgactactggttcaaatacgtcggcctgaacggcgctattgtcgggatgaccaccttcggtgaatccgccccggcagagctgctgtttgaagagtttggcttcacggtggacaacgtgatcgccaaagcgaaagcgctgctgtaa

SEQ ID NO: 40116 - DNA, 1065 bp, Salmonella typhi
atgacaacaccatcctggcgatcgcttcgtattaagaagtatcagttttctttacgtcttttcttgtttctcagcgccgtgtcggcgctatttactctcgttttccccctttatcagatcaatgtattttgcacgccaatgatcgggatagtgggcctgagcgtattactgttgatatggcatgggaaatatgggcaaaaaagaattaacctcccctttatctccctactctttgggggaatatgggcggcgcgtattgcgctaaagtatccggcgttaggccattatgatttctcttttttactgatctccctgcttagcgttctgtttatcggctcgatagcctttgccgcgaatatcgtcgcgtttacgctctattcgctaccgccagtcgcggtctgcctgtggttgaacggtaatgaacaaggtttgcgaattctctatttgctggccctgccaatggtgggaatcgctattcaacatgttatccagaaacgctacgataattttgcccaacagctcatgtttaagctgctggccgagcgggaaaccctcaatggcctgagtatgcttgatccattaaccggcttatataaccgccgtggcctgcaaaatcggctggatacgttacaggcgccgggcagccatgaacactacgtcctgctattggatatcgatcatttcaaagcgtataacgatcactacggtcatatgatgggcgatcaggcgttaatccgcgtctcagcggcaattcgggacgccgtgcgatcgcgcgatgtcgtctgtcgttttggcggggaagaatttctggtgttgctgaccaccgccgaaccacagcaagcccgcgctaccgcagaacgtatccgacaggaagtatacgatcttaaaatcccgcatatgtttaacgaaagcgtcgccaccaatgtcactgtcagtatcggcattgcgcccttgacggatcgcaatatcggagacgctatcgaaaaagcggataaagcgctctacgaagccaagcatcttggacgtaaccacattctggtcagcgacgacatgcgcgccctatga

SEQ ID NO: 40117 - DNA, 864 bp, Salmonella typhi
atgatccgcagtatgaccgcctacgcccggcgtgaaatcaagggtgaatggggtagcgcgacctgggaaatgcgctcggtaaaccagcgttatctggaaacttactttcgtctgccggaacagttccgtagtcttgaacccgtcgtgcgcgaacgcattcgtacacgcctgacgcgcggcaaagtcgaatgtatgctgcgttttgaacccgatgccagcgcgcaaggcgagcttattctgaatgaaaagctcgcgaaacaattagttagcgccgcaaactgggtcaaaatgcagagcgacgaaggggaaatcaatccggttgatattttgcgctggccaggtgtcatggcggcgcaagagcaggatctggacgcgattgccgcagaaattttagccgcactggacggtacgctggatgactttatcgtcgcgcgcgaaacggaaggccaggcgctgaaagcgctgattgaacaacgtctggaaggcgtcagcgccgaagtagcgaaagtccgcgcgcatatgccggaaatcctgcaatggcagcgtgaacgcctggtcgcgaagctggaagatgctcaggttcagttggaaaacaaccgtctggagcaagagctggtgatgatggcgcagcgcattgatgtggcggaagagctggatcgtctcgaagcgcacgtcaaagagacttacaacattctgaagaaaaaagaggcggtaggtcgccgtctggacttcatgatgcaagaatttaaccgtgagtcgaacaccctggcctctaaatccatcaacgctgatgtaactaactccgctattgaattaaaagtgttgatcgagcaaatgcgcgagcagatccagaatattgaataa

SEQ ID NO: 40118 - DNA, 921 bp, Salmonella typhi
atgagcactttaggtcatcagtacgataactcactggtttctaatgcgtttggttttttacgtctgccaatgaacttccagccgtatgacagcgatgccgactgggtgatcactggcgtaccgtttgatatggcaacgtccggtcgcgctggcggccgtcatggcccggcggcgatccgtcaggtgtcgaccaacctcgcctgggaacatcaccgtttcccgtggaattttgacatgcgcgagcgcctgaacgtcgtggactgcggcgatctggtgtatgcgtttggcgatgcccgtgaaatgagcgaaaaattacaggcgcacgctgaaaaactgctgtctgcaggcaagcgtatgctctctttcggcggcgaccacttcgtcacgctgccgctgctgcgcgcccacgcgaaacattttggcaaaatggcgctggtacattttgacgcgcataccgatacctacgctaacggctgcgaattcgatcacggcacgatgttctacaccgcgccgaaagaaggcctgatcgatccgcatcattcggtacagatcggtattcgcactgagtttgacaaagacaatggctttaccgtgctggatgcctgccaggtcaacgatcgcggcgtggatgatattctcgctcaggtgaaacagatcgtcggcgatatgccggtctatctgacctttgatatcgactgtctggacccggcgtttgcgcctggcaccggtacgccggtgatcggtggtttgacctccgatcgcgccattaagctggtacgtggtctgaaagatctgaacattgtcggtatggatgtagtggaagtcgcgccggcttacgatcagtcggagatcaccgctctggcggccgcgacgctggcattagaaatgctctatatccaggcggcgaagaagggcgagtaa

SEQ ID NO: 40119 - DNA, 1029 bp, Salmonella typhi
atgtctgcttttaccccggcaagtgaagtcttgctgcgccacagtgatgatttcgaacaaagccgtattctttttgccggagatttgcaggatgacctgcccgcgcgctttgaatgcgccgccagccgcgcgtatacgcaacagtttcaccactggcaggcgttaagccgccagatgggcgataacgtccgttttagcctggtcgcgcaagccagcgatgtcgctgactgcgatacgctgatctactactggccgaaaaataaacccgaagcgcagttccagttgatgaatattttgtcgctgatgccggtgggcagcgatgttttcgtcgtgggagaaaaccgcagcggcgtgcgtagcgccgaaccgatgctggcggactatgcgccgctgaacaaagtagatagcgcgcgacgttgcggcctttaccatggtcgtctggaaaagcagccgcagtttagtcttgaatcctggtgggccgagtacaatatcgacgggctgaccatcaaaacgttgccgggcgtattcagccgcgacggactggatgttggtagccaactgctgctgtctacgctgacgccgcacaccaaaggtaaagtgctggatgtcggctgcggcgctggcgtgctttccgccgcgctggccagccattcgccgaaagtgcgcctgacgctgtgtgacgtcagcgcgccggcggtggaagccagccgcgccacgcttgccgctaatggtcttgaaggcgaggtattcgccagcaacgtcttttcggaagtcaaaggacgttttgacatgatcatctccaacccgccgttccacgacggaatgcaaaccagccttgatgcggcgcaaacgctcattcgcggcgcagtgcgccatctgaacagcggcggagagttacgcatcgtggcgaacgcctttctgccctatcctaagattctggatgagacctttggcttccatgaagtcatcgcgcaaaccgggcgctttaaggtttatcgtatcgtgatgacccgtcaggcgaagaaatag

SEQ ID NO: 40120 - DNA, 642 bp, Salmonella typhi
atgaaaccgtatcagcgccagtttattgagtttgcgcttaacaagcaggtactaaagtttggcgagtttacgctgaaatccgggcgcaaaagcccctatttcttcaacgccgggctgtttaataccgggcgcgacctggcgttgttaggccgtttttatgccgaagcgctggtggattccggtattgaatttgatctgctgtttggccccgcgtacaaaggtattccgatcgcgacgacgacggcggttgcgctggcggaacatcacgataaagacctgccgtactgctttaaccgcaaagaggcaaaagatcatggcgaaggcgggagtctggtgggcagcgcgctacagggccgcgtgatgctggtggatgacgtgattaccgcaggtacggcgattcgcgagtcgatggagattattcaggcgcacagggctacactggctggcgtactgatttcgctggatcgtcaggaacgtggccgcggcgagatttccgcgattcaggaagtggagcgcgactatggttgtaaggttatctccatcattacgctgaaagacctgattgcctatctggaagaaaaacctgatatggctgagcatctggcggctgtgcgagcataccgggaagaatttggcgtgtaa

SEQ ID NO: 40121 - DNA, 1155 bp, Salmonella typhi
atggcaaaacacctttttacgtctgagtccgtatcagaagggcatcctgacaaaatcgcagaccaaatctctgatgccgtgttggacgctatcctgcaacaggatccgaaagcacgcgtcgcctgtgaaacctacgttaaaaccggcatggttttagttggcggtgagatcaccaccagcgcctgggtcgatatcgaagagattacccgtaatacggtgcgcgaaattggctatgtgcattccgacatgggctttgacgccaactcttgcgcggtactgagcgcaattggcaaacagtctccggatatcaaccagggcgttgaccgcgcagacccgctggaacaaggcgcgggcgaccagggcctgatgtttggctacgcgacaaatgaaaccgacgtactgatgcctgcgccaatcacctacgcgcaccgtctggtacagcgtcaggctgaagtgcgtaaaaatggcaccctgccatggttgcgtccggatgcaaaaagccaggtcactttccagtatgacgacggcaaaatcgtcggtatcgacgccgtggttctctctacgcagcacgcagaagatatcgaccaaaaatcgctgcaagaagcggtgatggaagagatcatcaaacccattctgccgtctgaatggttaaatacgtccactaagttttttatcaacccaaccgggcgttttgttatcggcggcccgatgggcgattgtggtctgaccggtcgtaagatcatcgttgatacctacggcggtatggcgcgtcacggcggcggcgccttctccggtaaagatccgtctaaagttgaccgttctgcagcttacgctgcgcgttatgtcgcgaaaaacatcgtggcggcaggtctggcggatcgctgtgaaatccaggtctcctacgctatcggcgtagcggagccgacgtccatcatggtggaaacgttcggtactgaaaaagtgcctgctgaacagttgattctgctggtgcgcgaattcttcgacctgcgcccgtacggcttgattcagatgctggatctgctgcacccgatctacaaagaaactgcggcttacggccacttcggtcgcgaaaacttcccatgggaaaaaaccgacaaagcgcaactgctgcgcgatgctgccggtctgaaataa

SEQ ID NO: 40122 - DNA, 2091 bp, Salmonella typhi
atgtttgcgacaacgcgtatggcgctattgataggcggagctatcggcggcgcgacttttcctctttttgcccaggaaaccacaaaaaatgataccgtcattgtcacctcgcccgttcagagtggcgcgaccaggctggcgacgccagatattgaaacgccgcagtcggtatccattattacccgccagcagtttgaagagcagggcgcaaccagcgtgcgtcaggcggtcagctacaccccaggcgtatacagtaaccagataggcgcctctaaccgctttgattacatcgtattgcgtggtttttcggacggtagtctggataacgtctatctcgacgggttaaaaatgatgggcgacaccaattcgcacagttcgttggtggttgacccctggtttctggaagatatcgaggtggtacgcggcccggcgtccgttctgtatggacgttcatcgccaggcggcattgtctcgttgacgtcgcgaaaaccggcgtttgatgccggaggagaagtgaagctgtttgccggcaataacaaccagcgcggggcggcttttgatgtgaccggcccactggatgacaatgaacgtgtggcggcgcgtcttagcggcatgacacgttacgccgattcgcagtttacgcccctgaaagaggaacgttatgcgctgatgccgagcctgacctggagaattaccgatcggacgcgtcttgatcttatggcctatctgcaccgtgatccgcaaggcggtagccactccggactgccttatcaaggcacggttgtaccttataacggcggaaaaatttctaacactttctttgaaggtgaagatgactacgacaaatacgatcgccgtgaaaatatggtgggttataacattgagcatctgttcgataacggctggtcggtacggcaaaaattgcgttatttgcataccaaagtgacgttgaatcaggtctatgccgcaggttggttgaatgaaacggcgctgaatcgcggctattccggctccggggagaaaatgtcggctatcgcgctggataatcagctcgacggcagcgtggataccggggcgattaatcatcgtctgctggtggggatcgattatcaggatcgcagtaatcatactactggctattatggcgcgtttccgccgattgacgctttcaaccctgtttatggcgctcagccggattacattacgttgtatagccgtgaaaaacataagctgcggcagaccggatactatttacaggatcagatgtcatgggatcgctggcgctttacgttgggcggtcgttacgatcgggtcagcgtgtctaacatcgacaaacttcatgattcacgcagcgatctcgataaaaacaacgtcagcacccgtgccgcgttgctttatctgttcgacaatggcgtcgccccctatctcagttattctaccgcgtttacgtcgaccagcttcgccgacgaaaacggcaatgtgctggaaccgatgaaaggcaagcagtgggaggcgggggtaaaatacgaaccgctgggggggaacagccagtttagcgccgccgtgtatcgtattaaccaaaccaatatcgcgaccaaagaagaacctaccgatccgtaccgctcgattggtgaaattgagtctaaaggggttgaactggaggccattagccatttgtcggatagcgtccgtttgcaggcggcgtatacctatactgatatccgttataagaaaagtagcccgcaagagcaggggaagcgcgcggtttatgctccacggaaccaggccagcgcctggctaagctacgatgtgaaaagcggtctgttagagtggctgactttgggctccggcatccggtacgtcaacggcgtgaccagcgatcgcctgaatacccacacgttgccgtcctatacactggtcgacatggtggttgggtatgatttatccagcattgggttaaatggcttgagcgcccagctcaacgtaaataatctgacggacaaacgctatgtcgctgcctgtaattcgctctcttattgttattttggcgccgagcgtagcattgtaggcagcgtgtcatgggcgttttga

SEQ ID NO: 40123 - DNA, 1170 bp, Salmonella typhi
atgacagacacgacgatcctgcaaaacaacacgcatgtcattaagcctaaaaaatcggtcgcgctttccggcgtacctgccggaaataccgctctgtgtaccgtgggaaaaagcggtaacgatctgcactatcgcggttacgacattctcgatctggcggagcactgcgaatttgaagaagtcgcgcatttactgatccacggaaaattaccgacccgcgacgagctgaacgcgtataaaagcaagttaaaagcgctgcgcggattacccgccaatgtccgtaccgttctggaagcgttaccggcggcctcgcacccgatggacgtgatgcgtaccggcgtttccgcgctgggctgcaccctgccggaaaaagagggacataccgtctccggcgcgcgcgatattgccgataagctgttggcttcgctcagctctatccttctttactggtatcactacagccacaacggcgaacgtattcagccggaaaccgacgatgattccatcggcggccatttcctgcatctgctgcacggtgaaaagccaacccaaagctgggaaaaggcgatgcatatttcgctggtgctgtacgccgagcatgagttcaacgcctcgacgtttaccagccgggtaattgccgggaccggctcggatgtctactccgcgattatcggcgcgattggcgcgctgcgcggcccgaaacacggcggagcgaatgaggtgtcgctggaaattcaacagcgttatgaaacaccggacgaggcagaggcggatatccgtaaacgcgtggaaaacaaagaggtggtgattggctttggacatccggtttacaccatcgccgacccgcgccaccaggtgatcaaacgggtggcgaaacagctttcagaagaaggcggctcgctgaagatgtaccacatcgccgaccgtctggaaacggtgatgtgggagaccaaaaagatgttcccgaatctcgactggttttcggcggtctcctacaacatgatgggcgtccctaccgaaatgttcaccccgctgtttgtcatcgcccgcgttaccggctgggcggcgcacattattgaacagcgtcaggacaacaaaattattcgtccttccgccaattataccggcccggaagatcgcgtatttgtgccgatcgaaaagcgttgctaa

SEQ ID NO: 40124 - DNA, 1395 bp, Salmonella typhi
atgcctgacaataaaaaacaagggcgttccaacaaggccatgacattttttgtctgctttcttgcagccctggcaggattactttttggcctggatatcggcgttatcgccggtgctttacccttcattaccgacgagtttcagattaccgcacacactcaggaatgggtggtcagctccatgatgtttggcgcggccgtcggcgctgtcggcagcggctggctctcctttaagctgggtcgtaaaaaaagcctgatgatcggcgctatcctgttcgtcgccggttcgctgttctccgctgcggcgcctaacgttgaagtcctgattatttctcgcgtgctgctgggtctggccgtcggcgtcgcttcctacactgcaccgttgtacctgtccgagatcgcgccggaaaaaattcgcggcagtatgatctcaatgtaccaactcatgatcaccatcgggattctgggcgcttatctgtccgataccgcgttcagctacagcggcgcatggcgctggatgctcggcgtgatcatcatcccggccattctgctgctgatcggcgtcttcttcctgccggacagcccgcgctggtttgcggcgaaacgccgtttccatgatgctgaacgcgtcctgttgcgcctgcgtgacaccagtgcggaagcaaaacgtgagctcgatgaaattcgcgaaagtttgcaggttaaacagagcggttgggcgctgttcaaagagaacagcaacttccgccgcgccgtgtttcttggcattttgttgcaggtaatgcagcaatttaccgggatgaacgtcatcatgtattacgcgccgaaaatcttcgaactggcggggtacacgaataccacggagcagatgtggggcaccgttattgttggtctgactaacgtgctggcaaccttcatcgctatcggcctggttgaccgctggggccgcaagccgaccctgacgctgggcttcctggtcatggcgattggtatggggattctgggtacgatgatgcacatcggcatccattcaccgtctgcgcaatacttcgctatcgctatgctgctgatgttcatcattggatttgcgatgagcgctggtccgctgatttgggtactgtgctccgaaatccagccgctcaaaggccgcgatttcggcatcacctgctccaccgcgaccaactggatcgccaatatgatcgtcggcgcaacgttcctgaccatgctgaacaatctgggtaacgccaacaccttctgggtctacgctggcctgaacgtgctgtttatcctgctgaccctgtggctggtgccggaaaccaaacacgtttcgctggaacacattgaacgtaacctgatgaaaggtcgtaaactgcgcgaaatcggcgcccacgactaa

SEQ ID NO: 40125 - DNA, 1590 bp, Salmonella typhi
atgacgttgtctccttatttgcaagaggtggccaaacgccgcacttttgccatcatttctcacccggacgccggtaaaaccaccattaccgaaaaagtgttgctgttcggacaggcgattcagaccgccggtacggtaaaaggccgtggctccagccaacatgcaaaatctgactggatggagatggaaaaacagcgtggtatctctatcaccacctcggtgatgcagttcccgtatcacgattgtctggtgaacctgctggacaccccggggcacgaagacttctccgaagatacctaccgtaccctgacggcggtggactgctgtctgatggtgatcgacgccgcaaaaggtgttgaagacaggactcgtaagctgatggaagttacccgtctgcgtgatacgccgatcctgacctttatgaacaaactcgaccgtgacatccgcgacccgatggagctgctggatgaagtggaaaatgagctgaaaatcggctgtgcgccgatcacctggccgattggctgcggcaagctgtttaagggcgtttatcacctttataaagatgaaacttatctgtatcagaccggtaagggccacaccattcaggaagtgcgcatcgttaaagggctgaataacccggatctggacgccgccgtcggtgaagacctggcgcagcaactgcgcgacgagctggaactggtgcagggcgcatctaacgagtttgatgaagagctgttcctggcaggggaaattaccccggtatttttcggtaccgcgctgggtaactttggcgttgaccatatgctggatggtttagtggcgtgggcgcccgcgccgatgccgcgtcaaaccgatacccgcacagtggaagcctcagaagagaggttcaccggttttgtctttaaaattcaggccaatatggacccgaaacaccgcgaccgcgtggcgtttatgcgcgtggtttccggtaagtatgagaagggcatgaagctacgccaggtccgtaccggcaaagatgtggtgatttccgacgcgttaacttttatggcgggcgaccgttcgcacgttgaagaagcgtacccgggcgatattttgggtctgcataaccacggcaccattcagatcggcgataccttcacccagggcgagatgatgaagtttaccggtatcccgaactttgcgccggaactgttccgtcgtattcgcctgaaagatccgctcaagcagaagcagctactgaaagggctggtgcagctttctgaagagggggcggtgcaggtattccgtcccatctccaacaacgatctgattgtcggcgccgtgggcgttttgcagtttgacgttgttgtcgcgcgcctgaaaagcgaatacaacgttgaggcgatttatgaatccgtcaacgtggcgacggcgcgctgggtggaaagcgccgatgcgaagaaattcgaagagtttaagcgtaagaatgaaacgcagctggcgctggatggcggcgacaaccttacctatatcgcccccacgatggttaacctgaacctgacccaggaacgttaccctgacgttcagttccgtaaaacgcgcgaacactga

SEQ ID NO: 40126 - DNA, 708 bp, Salmonella typhi
atgtaccgtaatttttcttttgctgctgcgttgctggccgcagcgttttcaggccaggcattggccgacggcattaacaatttttctcaggccaaagcggcgagcgtcaaagtcaatgccgacgcgcccggcagcttttactgcgggtgccaaatccgctggcagggtaaaaaaggcgtcgtagacctggagtcctgcggctataaggtgcgtaaaaacgagaatcgcgccagacgcattgagtgggagcacgttgtccccgcctggcaattcggtcatcagcgccagtgctggcaggacggcgggcgaaaaaactgcgctaaagacccggtctactgcaaaatggaaagcgatatgcataacctgcaacccgcgattggcgaagtgaatggcgatcgcggcaactttatgtatagccagtggaacggcggcgaaggtcagtacgggcagtgcgccatgaaagtggattttaaagcgaagctcgccgagccgcccgcccgcgcccgtggcgcaatcgcccgcacttatttttatatgcgcgaccaataccaactgaaactttcccgccaacaaacgcagctttttaacgtctgggataagcagtaccccgttaccgcctgggagtgcgagcgcgatgcgcgtatcgcgaaggtccagggtaatcataatccctatgtgcaacgcgcttgccaggcgcgaaagagctaa

SEQ ID NO: 40127 - DNA, 666 bp, Salmonella typhi
atggatacgttggacgaattattgccgcgtgaaaaaatgctcagatccggcattgcttccctcagcgacgtggaactgctggcgctttttttacgtaccggcacgccgggaaaagatgttatgacgttggcaaaagagatattgcagcactttgggtcgctgtatggcctgctgtcggcggactttgcgcagtttcgcggcgtaaacggcatcggcctggcgaaattcgcgcagttgaaaggcattgctgagctggcaaggcgctattacagcgtgcgcatgaatgaggaaagtgcgttgctgagtccggaaatgacgcgggaatttctgcaaagccaactgacgggcgaagagcgtgagatctttctggtgatcttcctagatgcccagcaccgggtgcttcagcacagccgcctgttttccggcacgcttaaccacgtagaggtgcatccgcgtgagattgttcgggaagcgattaaactcaatgcttcagcggtcattctggcgcataatcacccttcaggctgcgcagagccaagtaaagcagataaacttatcactgagcgcgtgataaagtgttgccagtttatggatatccgggtgctcgatcacctgataattgggcgcggagagtacgtttcttttgccgaacgcggctggatttaa

SEQ ID NO: 40128 - DNA, 732 bp, Salmonella typhi
atgcgtattccccgcatttatcaccctgaattgttgacgtccggtacgcagatttcgttatgcgaagatgcggccaaccatattggtcgtgtactgcgcatgggagcgggacaagcgttacagctgtttgacggcagcaatcaggtattcgatgctgaaatcattagcgccagtaagaaaagcgttgaagtgcaagtgatgaaaggcgaaatcgacgatcgtgaatcgccgctacatatccatctgggccaggtgatgtcgcgcggtgaaaaaatggaatttactatccagaaatcgatcgaactaggtgtaagcctcattacgccactgttctctgagcgctgtggcgttaaactggataatgaacgtctgaacaaaaagcgccagcagtggcaaaagatcgccatcgccgcctgcgaacaatgcgggcgtaaccgggtgccggaaattcgcccgccgatggcgctggaagcctggtgcgccgagcaagattccgggctgaggctcaatcttcatccgcgcgcccatgccagcatcaacactctgccgctgccggttgaacgcgtccgactgctgatcggcccggaaggcgggctgtcggcggacgaaatcgcgatgaccgcgcgctatcagtttactgatattctgttaggacctcgcgttctgcgtactgagacaaccgcgctcaccgccattaccgcgctacaggtgcgttttggcgacttaggatga

SEQ ID NO: 40129 - DNA, 237 bp, Salmonella typhi
atgtcccgagtctgccaagttactggcaagcgtccggtgaccggtaacaaccgttcccacgcactgaacgcgactaaacgccgtttcctgcctaacctgcactctcaccgtttctgggttgagagcgagaagcgttttgtcaccctgcgtgtatctgctaaaggtatgcgtatcatcgataaaaaaggcatcgaaacagttctgtctgaactgcgtgcccgtggcgaaaagtactaa

SEQ ID NO: 40130 - DNA, 168 bp, Salmonella typhi
atggctaaaggtattcgtgagaaaatcaagctggtttcttctgctggtactggtcacttctataccactacgaagaacaaacgtactaagccggaaaaactggaactgaaaaaattcgatccagttgtccgtcagcacgtgatctacaaagaagcgaaaatcaaataa

SEQ ID NO: 40131 - DNA, 810 bp, Salmonella typhi
atgcctgaattacccgaagttgaaaccagccgccggggtattgaacctcatttagttggcgctactatcctgcacgcccatatccgtaacggtcgtctgcgctggccggtttcagacgaaatttatcgtctgagcgacacacccgtccttagcgttcagcgtcgtgctaaatatctactgctggagttgcctgacggctggataattattcacctggggatgtcgggaagcttgcggatactgtcggaagcgctgccggcggaaaagcacgaccatgtcgatttggtgatgagcaatggcaaaattctacgttataccgatcctcgccgctttggcgcctggttatggaccaaagagctggaaggacataacgtactggcgcatctgggaccggagccgctaagcgatgagtttaatggcgaatatttgcaacagaaatgcgcgaagaagaagacggcgattaaaccctggctgatggataacaagctggtggtcggcgtggggaatatctacgccagcgagtcgctgtttgccgctggtattcaccctgaccgcctggcgtcgtcactctcgacagaggagtgcgacctgctggcgcgggtgattaaagccgttttgctgcgctctattgaacaaggcgggacaacgctgaaggattttctgcaaagcgatgggaagccgggctattttgcccaggagttgcaggtgtacgggcgcaaaggcgagccgtgtcgggtatgcggtacgccgatagtcgcaacgaaacacgcacagcgcgcgacgttctattgccgtcactgtcagaagtaa

SEQ ID NO: 40132 - DNA, 417 bp, Salmonella typhi
atgagcgacaccttactggcctttgacttcggcacaaaaagcatcggcgttgcaataggacaacgcattaccggcaccgcccgtccgcttccggcaatcaaagcacaggacggcacgcccgactggacgctcattgaacgtttgctgaaagagtggcagccggacgaaattattgtcgggctaccgctcaatatggatggcactgaacaaccgctgacggcgcgcgcccgtaaattcgccaaccgtattcatgggcgcttcggggtaactgtcacgctacacgatgaacgactcagcaccgttgaagcacgctccggtctgtttgaacgaggtgggtatcgcgcgctgaataaaggcaaagtggactcggcctccgccgtgattatcctcgaaagctattttgaacaggggtattaa

SEQ ID NO: 40133 - DNA, 1551 bp, Salmonella typhi
atgcctgcctcatgcgaaactgcgctccagcagcgttgccagcaaattgtgaccagcccggtgctcacgcctgaacaaaaacgccattttctggcgctggaagctgaaaacgccctgccttatcccaccctgccggaagatgcccgccaggcgctggatgaaggcgtcatttgcgatatgtttgaggggcacgcccccttcaaaccgcgctacgtgttgcccgattacgcccgatttctggctaacggttcacagtggctggaactggaaggcgcgaaagatctggatgatgcgttatccctactcaccattctgtatcatcacgttccttccgtgacgtccatgccggtttatctcggccagcttgatgcgttgctgcaaccgtatgttagaattctaacacaagatgcgatcgatattcgaataaaacgtttctggcgttatctcgacagaacgctgccagacgcctttatgcatgccaatattggccctgccgatacgcctgtcacacgagcgattttgcgcgccgatgccgagttaaagcaggtggcgcctaacctgacgtttatctacgatgcggaaattacgccggacgatctgctgctggaggtcgccaaaaacatttgcgaatgcagtaagccacacatttccaacggccctgtaaatgataaaattttcacaaaaggccattatggcatcgtcagttgttataactcgctaccgcttgccggcggtggcagtacgctggtacgtctcaacctgaaagccgtggcagaacgcagtacgtctgtcgatgacttcttttcacgcacgctaccgcactactgccgacagcagatcgccatcattaattcacgatgtgaattcctctatgaaaagtcacatttctttgagaatagcttccttgtacaggaaggtttgatcgatcccgaacgttttgcgccgatgttcggtatgtacgggctggcggaagccgtgaacctgctgtgcgaaaacgccggcctgaccgcccgttacggcaagaatgaaacggcgaacgagctgggctaccgtattagcgcccaactggcggatttcgtcgaaaatacgccagtgaagtatggcaggaagcaacgggcgctgctccatgcccagtctggcatcagttccgatatcggcactacgccgggcgcgcgtctgccgtatggcgatgaaccggaccctatcacccatttgcaaaccgtcgcgccgcaccatgccttttatcatgccgggatcagcgacattctgacgctggacgaaaccatcaagcgcaatccgcaggcgctggttcagctttgtcttggcgcgttcaaagccgggatgcgggaatttaccgccaatgtcagcggcaacgatctggtgcgcgtcaccggttatatggtgcgcctgtcggatctggcgaaatttcgcgccgaaggctcgcgcacgaataccacctggctgggagaagaagccgcacgtaatacccgcatcctggaacgacagccacgcgtagtcagccatgaacaacagatgcgctttagtcagtaa

SEQ ID NO: 40134 - DNA, 981 bp, Salmonella typhi
atgaatatggaagaaattgtgacgcttagtgtaaagcataacgtctcggatctacacctgtgtaacgcctggcctgcgcgatggcgcaaacaaggacgcatggagaccgcgccttttaccgcgcctgatgtcgacaggcttctgcttgattggcttaatgacgcgcaacaatatcagtggcgaacgcacggtcagcttgatttcgccgtctcgctgtctggcacgcggcgcctgcgcgccagtgcgttcacacatcaacagggaacgtcgctggcgatacggctattgcccgagcgttgtcctgatctggcggaaatccagacgccgccgatagtacccgcactgcttgccagcgagaacggactgattctggtcactggcgctactggctgcgggaaatccactacgctggcggcgatggtgggacatcttaatcaacatgccgataaacacatcctgacgctggaagatcctattgagtaccgttacaccagcaagcgttgcctgatacagcagcgggaaatcggccagcattgcgccacttttgccgccgggctgcgcgcggcgttacgtgaagatcccgatgtcattttactgggagagctgcgtgacagcgagaccattcgcctggcgctgacggcggcggaaacggggcatctggtactggcaaccctgcatactcgcggcgcggcgcaggcggtggaaagattagtggatagttttccggcgcaggaaaaagaaccggtacgcagtcaactggcgggtagtctgcgcgccgtactatcgcaaaaactggaggtcgacagacaggatgggcgcgtggcgttgtttgaattactgattaatacgccagccacagggaatttgatccgtgaaggcaaactccatcagttggcccacgtgatacaaaccgggcagcagcaggggatgatgacattcgcccagagcgcgcaatggcgtcaggcgcagggacggctgtag

SEQ ID NO: 40135 - DNA, 705 bp, Salmonella typhi
atgaacgatatcgcgcataacctggcacacatccgggacaaaatctccgccgcggcgacgcgttgtggccgctcttcagaagaagttacgttgcttgcagtgagtaaaaccaaacctgcgagcgacatcgcagaagccattgccgccggacaacgggcatttggtgaaaattatgtacaagagggggtggaaaaaatccgccactttcaggaagcgaaagtggaaggcctgcactggcactttattggccctttacagtccaacaaaagtcggctggtggccgagcattttgactggtgtcataccatcgatcgcctgcgtatcgcctcgcggctgagcgaacagcgcccggataatctgccggcgctaaatgttctgatccaaattaatatcagcgatgaaaacagcaaatcaggcattccgctggcggaactggatgagctggccgctgcggtggctacactgccgcgtctgcggcttcgcggactgatggcgatcccggcgccagagtcagattatgtaaggcagtttgaagtcgcacgtcaaatggctgtagcatttgccgggctgaaagcgcgctaccctgacgttgataccttatctctgggtatgagcgacgatatggaagccgcgattgcggcaggtagcacaatggtgcgcatcggcaccgctatctttggtgctcgtgattacacaaaaaattaa

SEQ ID NO: 40136 - DNA, 798 bp, Salmonella typhi
atgccgttggagaatgtcatgactgatttaaaagcaagcagcctgcgtgcgctcaaactgatggatctgaccactctgaacgatgacgacaccaatgaaaaagtgatcgcgttgtgtcatcaggcaaaaaccccggtcgggaatacggcggcgatttgtatttacccgcgttttatcccgattgcgcgtaaaactctgaaagaacaaggtaccccggacatccgcattgcaacggtgactaacttcccgcatggcaatgatgacatcgatattgcgctggcggaaacccgtgcggcgatcgcctacggcgctgacgaagtggacgtggtattcccgtaccgcgcgttgatcgccggtaacgagcaggtgggttttgacctggtaaaagcctgtaaagacgcttgtgccgcagcgaacgtattgctgaaagtgattatcgaaaccggcgagctgaaagaagaggcgctgattcgtaaagcctctgaaatctccattaaagccggtgcggatttcatcaaaacctctaccggtaaagtgccggtaaacgctacgccggaaagcgcgcgcatcatgatggaagtgatccgcgacatgggcgtttccaaaaccgttggcttcaaaccggcgggcggcgtacgtacggcggaagacgcgcagaaattcctcgcgatcgcagacgaactgtttggcgctaactgggcagattctcgtcactaccgctttggcgcatccagcctgctggcaagcctgctgaaagcgctgggtcacggcgacggtaagagcgccagcagctactaa

SEQ ID NO: 40137 - DNA, 975 bp, Salmonella typhi
atgacagaccttatccatcgccctcgccgcctgcgcaaatccgctgcgctgcgcgctatgtttgaagagacaacacttagcctgaacgacctggtgttgccgatctttgttgaagaagaactcgacgattacaaagctattgatgccatgcccggcgtaatgcgtatcccggaaaagcagctggcgcgagagattgaacgtatcgcaaatgctggcattcgttccgttatgaccttcggcatttctcaccatactgatgacaccggcagcgatacctggaaagaagacggcctggtggcaagaatgtcccgcatctgtaagcaaaccgtgccggagatgatcgtcatgtccgacacctgcttctgcgaatacacctcgcacggccactgcggcgtgttgtgcgaacacggtgtggataacgatgcgacgctggccaacctcggcaagcaggccgttatcgcggcggcggctggagcagattttattgcgccctccgcggcaatggatggacaagtccaggctatccgccaagcgctggatgccgccggttttaccgatacggcaataatgtcctactccaccaagttcgcctcttctttctacggccccttccgtgaagcagcgggtaccgcgttaaaaggcgaccgcaagacgtatcaaatgaatccgatgaaccgccgtgaagcgattcgcgaatcactgctcgacgaagcccagggcgcggattgcttaatggtgaaaccggccggcgcgtatctggacgtgctgcgtgaaattcgcgaacgcacagagttgccgcttggcgcttaccaggtgagcggtgaatacgccatgattaaatttgctgctatggctggcgccatcgatgaagaaaaggtcgtgctggaaagtctgggctcgattaaacgcgccggcgccgatttgattttcagctacttcgcactggatctggctgagaaaaatattctgcgttaa

SEQ ID NO: 40138 - DNA, 2886 bp, Salmonella typhi
atgcactcctggaaaaagaaacttgtagtctcacaattagcattggcttgcactctggcaatcacttctcaggcgaatgctactacatacgatacttttgggtaccatgacgatgcggccactgtttttggctgggatgataccaacgaccatgactatctaacttatggtggttatgtctacaacaccccagctagtgatagcggctattttgatacaaaatttactggtgacactgtaaatggcgttatttcaacttattatctgaatcatgattacgccaatgatactgcgaatacattggatgttaccaactcaaccattcatggtatgattacttcttaccagatgggctacggtcaatatgtttggactaacggtagtgattatacgacccatgattgggttgatgatgatacttttaatctaaacatttctaattctacaatcgatgatgactttgaggcgttttacttcactgatacctatctcgattctgatggaaaaacagtcaaaaccgattatgacaaattggttactgctggtttaggcactgctataacccttgatgttgaaagtaatattaatattactaacaattctcatgtggctggtattgctctttaccaaaatgatcttggcaattcaacatatacaaccgaagcacatcagtgggataacactattaacgtagcgaattcaactgtaacttcaggctcctggtccgaagatgaggaacaaggccattttggcaattcaagtgaaccaagcgattataatggcaatggttggaataaagatgatgttgctttagcttttgttgacgatccttattcaaattaccgtatggtaaacaacgttacgtttaccgactcgcagttactgggggatgtcgtccttgagagctcctggaattataatttctattctaatggccgtttagtcgatgattccactactgtctatacgaatggtggttgggcagatgatgatcaaaacgttgatcacctgacattgaccctgaataacactaaatgggttggtgcggcggttaatgattcacagtcaatggatccagtgcaattctatgatgttgatgccaatagcttagatccagactcgactaattatgatgcctggggacgtgttaatagtgctgcttccttccagagcggtatctttgacgtcagcttgaataatggatctgagtgggataccacaaaaacatctgtaatagataccttagcagtaaatagcggctctcaggttgatgtcgctaatggctccaatttaaccgctgataccattactctaaacggtggttcagctatgaacatcggggaaggtggctacgttgatactgatcacctgaccgttgatactttcagtacagttactttggctgatgatgtcagcagtgcatggagtgatgatgcactgtatgctaatactattaccgtaactcacggtggtatgttagatattcaaaccaacaatacaaacgcagatagcgtcattgatactgatacgttagaactgactagcagtaacgttgcggataataatggcaatgtttatgctggtgtgttcaacattcatagcaatgactataccctaaatgccgatttggtgaacgaccgtacctgggataccactcaggctaactacggttacggcgttgtcgcgatgaactctgatggtcatctgactatcaacggtaacggcgatatcaacaatggtgacgaggctgatgcaagtagcaccactgacaacgttgtagcggccactggtaattataaagtgcgcatcgacaacgctactggtgccggttctgttgcggattacaaaggtaacgagctgatttatgtcaatgacataaacaccgacgctaccttctctgcagcaaacaaagctgacctgggtgcttacacctatcaggctaagcaggaaggcaacactgtcgtgctggaacagatggaactgaccgactacgctaacatggcgctgagcattccttctgcgaacaccaatatctggaacctggaacaagacaccgttggtactcgtctgaccaacgctcgtcatggcctggcggataacggcggcgcatgggtaagctacttcggcggtaacttcaacggcgacaacggcaccattaactacgatcaggatgttaatggcatcatggtcggtgttgataccaaagttgacggtaacaacgctaagtggatcgttggtgcggcagcaggcttcgcgaaaggcgatctgagcgatcgtaccggtcaggtggatcaggacagccagtctgcctacatctactcttccgctcgtttcgcaaacaacatctttgttgacggtaacttaagctactctcacttcaacaacgatttgtctgctaacatgagcgacggtacttacgttgacggcaacacctcttctgacgcctggggcttcggcttgaaactgggttatgatctgaagctgggtgatgcaggctacgtaacgccttacggcagcgtatccggtctgttccagtccggcgacgactaccagctgagcaacgacatgaaagttgacggtcagtcttacgacagcatgcgttatgaactcggtgtagatgcaggttataccttcacttacagcgaagatcaggcgctgaccccgtacttcaaactggcttacgtttacgacgactccaacaacgatgctgacgtaaacggcgactctatcgacaacggcgtagaaggttttgcggtacgtgttggtctgggtactcagttcagcttcacgaagaacttcagcgcctacaccgatgctaactacctcggcggcggtgatgttgatcaagactggtctgcaaacgttggtgttaaatatacctggtaa

SEQ ID NO: 40139 - DNA, 624 bp, Salmonella typhi
atgttatctttaaacaagccactacaggaattcaacagactcgataaatgcctttctaagcatggtacgcgtttcgagtttgttaacgataaagagattatctgttcacctgatgaaagtaatacccatacctttgttattttagagggggttgtttcgttagttcggggtgataaagttcttattggtattgtgcaggccccttttatttttggcttagccgatggcgtggcgaaaaaagaggcacaatataaattaattgcggagagcggttgcatcggttatcgcctctcatcatcacaaactctcgccatcattgagcagaaccaactgtggcgtgaagccttctgttggatagtatggaaaagtcaggtactggagcttcgtgacaagcagctcattggtaataattcttacgaccagattcgtgcgacgttaatgacaatgattgagtgggatgaagaacttcgctcacgtattggtgttatgaattatatacatcaacgaacgcgcgtatcgcgatcggtggtggcggaagttctcgcggccctgcgtaagggtaattacattgaaatgaataaaggcaaattgatcagtattaaccgtttgccctccgaatattaa

SEQ ID NO: 40140 - DNA, 1095 bp, Salmonella typhi
atggcgaaattgcgggtaggaatagtatttggcggtaagtcggcggaacatgaagtgtctttgcaatcagcgaaaaatatcgttgatgcgatcgataaaacccgcttcgacgtggtgctgttagggatagataaggcgggacaatggcatgttaacgatgcggaaaattatttgcagaatgcagacgatccggcacatatcgcgctacgtccttcggcaatcagtctggcccaggtgcctggcaaacaccaacaccaattgattaacgctcagaacgggcagccgctaccgacggtagatgttatttttcctatcgtccacggtacgctgggcgaagacggctcattgcaggggatgctgcgcgtcgcaaacttaccgtttgtcggttcagacgtgctgagctccgcagcctgcatggataaagacgtcgccaaacgactgctacgcgatgcaggactgaatatcgccccgtttattacactcacccgaacgaatcgtcacgcgtttagttttgccgaggttgaatcccgtctgggactgccgctgttcgttaagcccgccaatcagggctcttcggtcggcgtcagtaaagtcgctaacgaagcgcaatatcagcaggcggtcgcgctggctttcgaattcgatcataaagtggtggtggagcaagggatcaaagggcgcgagatcgaatgcgccgtattaggtaacgataacccacaggccagtacctgcggcgaaatcgtactgaacagcgaattttacgcctacgatactaagtatattgatgataatggcgcgcaagttgtcgtgcctgcgcagatcccttccgaggtgaatgacaagatccgcgcgatcgcgatccaggcttatcagacgctggggtgcgcgggtatggcgcgtgtcgatgtcttcttaacggcagacaatgaggtcgtgattaacgagattaatacgctgccaggttttaccaatatcagtatgtatccaaaactctggcaggcgagcggattgggctataccgatttgatcagccgcctgattgagctggcgctggaacgccatacggcgaataacgccttaaaaaccacgatgtaa

SEQ ID NO: 40141 - DNA, 594 bp, Salmonella typhi
atgcaaaaagttgttctcgcaaccggcaacgccggtaaagtgcgcgagctcgcgtcgctgttaagcgattttgggcttgatgtggtagcgcaaacgaaactgggcgttgactctgcggaagaaaccggcctgacgtttattgaaaacgcgattctcaaagcgcgccatgccgctaaaatgaccggtctgcccgccattgccgatgactccggtctggccgttgacgttttaggcggcgcgccgggtatctattccgcgcgctattctggcgaaaacgcgacagatcagcaaaatctggaaaaactgctgcatactctacgagatgttccggacgacaaacgccaggcgcgattccattgtgtactggtttatttgcgtcatgccgaagatcccacaccgatagtctgtcacggtagctggcctggcgtcattactcgccaggcggccggaaatggcggatttggctatgatcccattttcttcgtaccgtctgaaggcaaaaccgccgcagaactgacccgtgaagaaaaaagcgcgatttcccaccgtggacaagcgctcaagctgctgctggatgcgttacgcaatggctaa

SEQ ID NO: 40142 - DNA, 1383 bp, Salmonella typhi
gtggcaaaagctcccaaacgcgcctttgtttgtaatgaatgtggtgccgattacccacgctggcaggggcagtgcagcgcctgccaggcctggaacaccattactgaggtgcgccttgccgcgtcgccgacggtggcgcgtaacgaacgtctgagcggatacgccggcagtgcgggcgtatcaaaagtgcagaaactgtctgacatcagtcttgaggaactgccgcgcttttctaccggttttaaagagtttgaccgcgtgctgggcggcggggtggtacccggcagcgccattttgattggcggtaaccccggcgcgggcaaatcaacgttgctgctgcaaacgctgtgcaaacttgccgagcagatgaaaacgctgtacgtcaccggcgaagagtcgctacagcaggtggcgatgcgcgcgcaccgtctcggcctgccgaccgctaatctgaatatgctctccgaaaccagcatcgagcagatctgcctgatagcggaagaagaacagccgaagctaatggtgatcgactccatacaggtgatgcatatggcggacatccagtcgtcgccgggcagcgtcgcccaggtccgcgaaacggcagcctacctgacgcgcttcgctaaaacgcgcggcgtggcgatcgtgatggtcggccacgtcaccaaagacgggtcgctggcggggccgaaagtgctggaacactgtattgattgctcagtattgctcgacggcgacgccgattctcgtttccgcacgctgcgcagccacaaaaaccgctttggcgcagtcaatgagctgggcgtcttcgctatgaccgaacaggggttgcgcgaagtgagcaatccgtccgccatctttttaagccgcggcgatgaggtcacttccggcagctcagtgatggtcgtctgggaaggtacgcgaccgttgctggtggagattcaggcactggtcgatcactcgatgatggcgaaccccagacgcgtggcggtcggtctggaacaaaaccgtctggctatcctgctggcggtgctgcaccgacacggcggtctgcaaatgtcggatcaggacgtcttcgtcaacgtggtcggcggcgtgaaagtcaccgaaaccagcgcggatctggctttactgctggcgatggtctccagcctgcgtgacaggccgttgccgcaggatctggtggtgtttggcgaagtggggctggcaggcgagattcgtccggtgccgagcgggcaggagcgtatttccgaggcggcgaaacacggttttcgtcgggcgattgtgcctgccgccaacgtaccgaaaaagccgccggaaggaatgcaggtgttcggtgttaaaaagctcgcagatgcgttaagcgtgtttgacgacttataa

SEQ ID NO: 40143 - DNA, 1146 bp, Salmonella typhi
atgattaaaaaaatcatatttactgttactcctatattttcaattcctcctcgtggcgcggctgcggtagaaacctggatttaccaggttgcaaaacgattatcaataccgaatgctattgcttgtataaagaatgccggctatcctgaatataataaaataaacgataactgtgatattcattacattgggtttagtaaagtttataagcgtctttttcagaaatgggctcgtctcgacccactaccctattcccagcgcatccttaatattagagataaagtgactacccaggaagatagcgtcattgttattcataatagtatgaaactgtatcggcagatcagagagcgcaatccgaatgcaaaactggttatgcacatgcataacgcatttgaaccagaacttcctgatacggatgcaaaaattatcgtgcccagtcagtttcttaaagcgttttatgaagaaagattgcccgccgctgctgttagtattgtgcctaatggtttttgtgctgagacttataaaagaaacccacaagataatcttcgtcagcaattaaatattgcggaagatgccaccgttctcttatatgccgggagaatttcgcctgataaaggcatcctgttgcttttgcaggcgttcaaacaattacgtaccttaagaagtaatattaaacttgtcgttgttggcgacccttatgcaagccgcaagggtgaaaaagcagagtatcaaaagaaagtactggacgccgcaaaagagattggaactgattgcattatggctggagggcaatcacctgaccagatgcataacttctatcatatagccgatctggttatcgtgccatctcaggttgaagaagcattttgcatggtggctgtagaagcgatggcagcaggaaaagcggttcttgccagcaaaaaaggggggattagcgaatttgtgttagatggcataacgggctatcacctcgcagaacctatgtcgagcgacagtataattaatgatattaaccgtgcgcttgctgataaggaacgccaccagattgccgaaaaagcaaaatccctggtgttttcaaaatacagttgggaaaatgtagcgcagcgtttcgaggaacaaatgaaaagctggtttgataagtga

SEQ ID NO: 40144 - DNA, 1668 bp, Salmonella typhi
gtggctcaattcgtttataccatgcatcgtgtcggcaaagtggttccgccgaaacgtcatattctgaaaaacatctcgctgagcttcttccctggcgccaaaatcggcgtgctgggccttaacggcgccggtaagtctaccctgctgcgcatcatggcgggtctcgataaagatatcgagggcgaagcgcgcccgcagcccggcattaagattggctacctgccgcaggaacctcagctaaacccggaacacacggtacgcgagtcgattgaagaggccgtttcggaagtggttaacgccctcaaacgtctggatgaagtgtacgcgctgtacgccgatccggatgccgacttcgacaagctggccgcagagcagggccggcttgaagagattatccaggcgcacgacggtcataacctgaacgtgcagcttgagcgtgctgctgacgccctgcgtctgccggactgggatgccaaagtcgaaaaactgtccggcggcgagcgccgccgcgtggcgctgtgccgtctgttgctggaaaagccggacatgctgctgctcgacgaacccaccaaccacctggatgccgaatctgttgcgtggctggaacgtttcctgcacgacttcgaaggcaccgtcgtggcgattacccacgaccgttacttcctcgataacgtcgccggctggattctggagcttgaccgcggcgaaggtattccgtgggaaggcaactactcctcctggctggagcagaaagatcagcgtctggcgcaggaagcgtctgccgaagcggcgcgccgtaaatccattgagaaagagctggagtgggtgcgtcagggcgcgaaaggccgtcagtcgaaaggtaaggcgcgtctggctcgctttgaagaactgaacagcgttgagtatcagaaacgtaacgaaaccaacgaactgtttattccaccaggaccgcgtctgggcgacaaagtcattgaagtcagcaacctgcgtaaatcctacggcgaccgcgtactgatcgacgacctgagcttctcggtaccgaaaggcgctatcgtcgggatcatcgggccaaacggcgtgggtaaatcgaccctgttccgcatgatgtccggtcaggagcagcctgatagcggcaccattacgctgggtgaaaccgtcaagctggcctcggtcgatcagttccgcgacgcgatggacaacagcaaaaccgtctgggaagaggtgtccggcgggctggatatcatgaagatcggcaacaccgaaatgccaagccgcgcctatgtaggccgctttaacttcaaaggcgtcgatcagggcaaacgcgttggcgaattgtccggcggtgagcgtggtcgtttgcatctggcgaagctgctgcaggtgggcggcaacgtcctgctgctcgacgaaccgacgaacgacctggatatcgaaaccctgcgcgcgctggaaaacgccctgctggagttccctggctgcgcgatggttatctcgcacgaccgttggttccttgaccgtatcgccacccacattctggattatcaggatgaaggtaaggtggaattcttcgaaggtaactttaccgaatacgaagagtacaagaaacgcactctgggcgccgaggcgctggagccgaagcgtatcaagtacaagcgtattgccaaataa

SEQ ID NO: 40145 - DNA, 954 bp, Salmonella typhi
atgcgagttttgatcgttaaaacatcatcgatgggcgacgtattacataccctgcctgcgcttaccgacgcgcaacaggcgattccggggattcaatttgattgggttgtcgaagaagggtttgcacaaattccgtcctggcacagtgctgtcgatcgcgtgattcccgtcgctattcgccgttggcgcaaggcctggttttccgcgcccattaaagcggaacgcatagcctttcatcgggcggtatgcgcataccaatacgacgctgtgattgatgcgcaggggctggtaaaaagcgcggcgctggtgacgcgtctggcgcatgggataaagcacggtatggactggagtaccgcccgcgaaccgctggccagcctgttttataaccgtaaacaccatatcgcaaagcaacaacatgcggttgaacggacgcgcgagctgttcgccaaaagcctgggatacgataaaccgcagtcgcagggcgattatgccatcgcaaaacattttctgcattgccagcaggcggttagcgatccgtatgcggtgtttttacatgccacgacccgcgatgataaacactggccggaagcaaactggcgcgagcttatcggcctggtgggcaacaccggattacggataaaacttccctggggcgcgcctcatgaggaggctcgtgctaaacgactggccgaaggctttgactatgtggatgtgttaccgcgcatgagcctggaggaggtcgctagagtgctggctggcgcaaaatttgtcgtatcggttgataccggcctgagccatctcaccgccgcgctcgacagaccgaatattacgctatatggcccaacggaccctgggttaattggaggttatgggaagaaccaaatggcatgctgctcaccagaacaaaacctggcgaatttagatgccacaagcgtatttggaaagattcattaa

SEQ ID NO: 40146 - DNA, 141 bp, Salmonella typhi; identical to SEQ ID NO: 39185

SEQ ID NO: 40147 - DNA, 360 bp, Salmonella typhi
gtggttaagctcgcatttcccagggagttacgtttgttaactcccgctcatttcacattcgtcttccagcaacctcaacgggctggcacgccgcaaatcaccatcctcggccgcctgaattcgctggggcatccccgtatcggtcttaccgtcgccaagaaaaatgttcgacgtgcgcatgaacgcaaccggattaaacgtctgacgcgtgaaagcttccgtctgcgccagcatgaacttcctgcaatggatttcgtggtggtggcgaaaaaaggggttgccgacctcgataaccgtgctctctcggaagcgttggaaaaattatggcgccgccactgtcgcctggctcgcgggtcctga

SEQ ID NO: 40148 - DNA, 276 bp, Salmonella typhi; identical to SEQ ID NO: 39192

SEQ ID NO: 40149 - DNA, 66 bp, Salmonella typhi; identical to SEQ ID NO: 39182

SEQ ID NO: 40150 - DNA, 1776 bp, Salmonella typhi; identical to SEQ ID NO: 39384

SEQ ID NO: 40151 - DNA, 693 bp, Salmonella typhi
atgaaatctctgaatactctagtgatattaacttcagtaatatccacctctgtttttgctggcgcttatgtagaaaaccgtgaggcctataacctggcgtctgaccaaatggagtttatgctgcgcgtcggctataactccgatatgggggccggaattatgttgaccaatacctatacgctacagcgtgatgatgaattaaagcacggttataatgagattgagggctggtatccgttatttaaacctacagataaattaaccatccagccaggcgggttaataaacgacaaaagcattggttccggcggcgccgtctatctggatattaactataaatttaccccgtggtttaatcttacggtacgtaaccgatataatcacaataattatagttcaaccgatttgaatggcgaactggataataatgacagctatgaaatcggtaactattggaattttatcattaccgataaattttcttatacctttgaaccacactatttttataacgttaatgattttaatagtagtaatggtacgaagcatcattgggaaatcactaataccttccgttatcgtatcaatgaacactggttgccctactttgaattacgctggttagatcgtaacgtgggcctctaccatagagagcaaaaccagattcgtatcggggcgaagtatttcttctga

SEQ ID NO: 40152 - DNA, 117 bp, Salmonella typhi; identical to SEQ ID NO: 6587

SEQ ID NO: 40153 - DNA, 504 bp, Salmonella typhi; identical to SEQ ID NO: 39194

SEQ ID NO: 40154 - DNA, 447 bp, Salmonella typhi
atggatcgaccataccgcatacaggaagggtgttttgtcctgcctgaaacatttacggatcgcagcgtcaatatttttatcctggagggcaatgaacgaacatcgcccagcctgaatatttcccgcgatacgctaaaacctgatgaagacctgcccgcctatattgaccgccagattgcgctgatgaaaaaaaatctcggtcagcaccgggtattgtcgcgagcgcctgcacaggcaggaacgggcaatgatgccctgatgggggaacaaattgccgccacccataaatccgggaaaacggaagtgtaccagcgtcaggccgggtttattgcaacccctggcaaggtactagtcttcaccctgaccagtccccgtccttttgatgataaagcagacctactctggaacacctggctggcaggctttcagccggataaaaacgaataa

SEQ ID NO: 40155 - DNA, 42 bp, Salmonella typhi
atgacacgcgttcaatttaaacatcaccatcatcctgactag

SEQ ID NO: 40156 - DNA, 504 bp, Salmonella typhi; identical to SEQ ID NO: 39194

SEQ ID NO: 40157 - DNA, 261 bp, Salmonella typhi
atgaaacctgatattcatcctgtataccgaaccgtcgtatttcacgacaccagcgcaaatgaatatgtgaaagtgggatcaactatcaaaactgaacgtgaaatcgaactggacggcgtgacatatccgtatgtcactattgatgtgtcatcaaaatcgcatcctttttataccggtagacagaaaacgtttgatagcgaaagtagcgccgcacgcttccagaaacgttttggtcattttatcggcgctaaacgggggtaa

SEQ ID NO: 40158 - DNA, 282 bp, Salmonella typhi
ttgaatgaaaaccaaatcgagggtatcaaaatgaaaaaagtattagctctggttgttgccgctgcaatgggtctctcttccgcagcattcgcggctgagactgcaacgcctgcaaaaaccgcagcgcctgccaaaacaacccagaccacccagcaccacaaaaaacagcataaaaaaaccgttgagcaaaaagcgcaggcggctaaaaagcaccagaaaaaagatggcaaaaaagccccagccaaatctacgtcaaaaacaacttcgcaaccagctgcgtaa

SEQ ID NO: 40159 - DNA, 1224 bp, Salmonella typhi
atgcttataatttcatacattgcattatgcttattatttatagtttatctctatactctttccgtaagaattgagggaaaaataataaatgtaatggtcccatacctgataataacagtccctacactgtacgtgtttgaaggtatatttgtatacctctcagaggtgcagaattatacagtggaatatttgtttttctatacttgctatataacatacatagcatcatttgttatttcttatctttacacacaaagaaaacccatatacaacaaatcaaacacgaaaaataaaccaaggtatgtgtttacttcattgttattcaccttccttgcttttatcatttaccttccagtgttgatggagttcagagagtatatacttagcccaagaagaatatacgaattaaccagaacagggtatggtatatacttctatccttcattaatgttttctcttgtcgcttctatttgcgcgttctttacatacaaaaaatcaaagttattttgtatttccatagttttatttaactgtatacttattttcttgcatggtaacaaaggaccaatatttagtatatttatagcattcatcctttacctttcatatattgaaaataaaaaaattaaatttatgttcctggtaaaatcgtttgctgttatagcagtcattgtaacggcattctttgcatatacgtttactgatgggaatccgatagaaaatatggctaattactcggattatacccgtaatgctgttcttgttgcttcctcaaactttgactttatgtacggaaaattactaatggagagcgaggtttactcgaggattccgagggctatttggcctgataagcctgaagattttggcgcattgtatctggcaaaagtatttttccctgatgcattctacagaaatcagggcgctcctgctttcgggtatggtgaactatacgcagatttcgggctttttacaccagtttggttagttatatctggagtatttaaaggcgtcctagctaagtatttctccaataaaactcaggaaacaaagtcagcgcattatttcataatgttcctattttgcattggaataagtgtgattcctgttagcatgggatggttgttccctgagcatttgatgattgcttttatggtatacattgcatcttcctttgttttttcagagcatataagattcgttttactaagaaacaataaataa

SEQ ID NO: 40160 - DNA, 180 bp, Salmonella typhi
atggcaaagactattaaaattactcaaacccgcagtgcaatcggtcgtctgccgaaacacaaggcaacgctgcttggcctgggtctgcgtcgtattggccacaccgtagagcgcgaggatactcctgctgttcgtggtatggtcaacgcggtttccttcatggttaaagttgaggagtaa

SEQ ID NO: 40161 - DNA, 276 bp, Salmonella typhi; identical to SEQ ID NO: 39192

SEQ ID NO: 40162 - DNA, 774 bp, Salmonella typhi
atgacaatagaagttcaaaggtgggaagataaatttgagattaagcccggggtttgggtttatgtcccaagcgttgaggcacgtaaagtcggagggaagatacttcaggctgtcagaaacaagtggattccgccactctatttttaccatctaagaactggtgggcatcttaaagctgccagattacacttaaaaagtgatttttttgccgttgttgatattaaacaattttttcagtcaacgagccgtagtcgtatcacccgtgatctaaagagctacttcacctattctcaagcgcgggaaatctcaacattttcaactgtaagaaacttgtcccatagtccacataagcatgtcctcccttttggttttgttcaatctccaatacttgcaaccctctgcttagataaaagttattttggtagcttactacgccgattgaacaaacatcatgatctcaagctaagtgtgtgtatggatgatgtgatcatctcgtcaaacaatttggcccaattacaagcggcttacgacgaagcactagtggcaatgcgtaaatctggttatcaagccaacatgagtaaaactcaggcaccatcgtcaaagattagcgtgtttaatttaactttgagtaagggagttatgaaagtcacatctcagaaaatgagtgacttcctgattgatttctattcaagcaattatgagccgcacagaataggggtcaaaaactacgtcgaagctgttaatccagggcaagcgaaactctttaagttgtaa

SEQ ID NO: 40163 - DNA, 387 bp, Salmonella typhi
atggcttacagcgaaaaagtaatcgatcactatgagaacccgcgtaacgtagggtcgtttgacaacaacgacgataacgtgggaagcggtatggttggcgcgccggcctgcggcgacgtcatgaagttgcagattaaagttaacgatgaaggtatcattgaagacgcgcgcttcaagacttacggctgcggttccgctatcgcctccagttctctggtaacggagtgggtgaaagggaaatccctggacgaagcgcaggcgattaaaaacaccgacattgcagacgaactggagctgccgccggtgaaaattcactgctctattctggcggaagacgcgattaaagccgctattgcggattacaaaagcaaacgcgaagcgaaataa

SEQ ID NO: 40164 - DNA, 495 bp, Salmonella typhi
atgagactgacatctaaagggcgttatgccgtgaccgcaatgttagacgttgcgctcaactccgaagcgggcccggtaccgttggctgatatttctgaacgtcaggggatttccctttcttatctggaacagctattttcccgtttacgtaaaaacggtctggtttccagcgtacgcgggccgggcggcggttatctgctgggtaaagatgctggcagtatcgcggtcggcgaagtgatcagcgcggttgatgaatccgttgacgcgacccgttgccagggcaaaggcggctgccagggcggcgataaatgcctgacccatgcgctgtggcgtgatttaagcgatcgtctgaccggttttctcaacaatattactttaggcgagctagtgaataaccaggaagttctggatgtgtctggtcgccagcacacgcatgacgcgccgcgcgccagcggtcgtgcgcaggacgctatcgacgttaaattacgcgcttaa

SEQ ID NO: 40165 - DNA, 657 bp, Salmonella typhi
atgtggcgtgtcttctgtctcgagctgcgcgtggcgttccgccacggcgcggacatcgccggcccgctgtggttcttcctgatggtcatcaccctgtttccgttaagcgtcgggccgcagccgcagctgctggcgcgtatcgcgccgggcatcatccaggtggcggcgctgctggcctcgctgctggcgctggagcggctgtttcgcgacgacctgcaggacggcagcctggagcagctgatgctgctgccggtgccgctgccggcggtggtgctggcgaaggtgctggcccactgggcggtgaccggcctgccgctgatgatgctctccccgctggtggcgctgctgctggggatggacgtgtacggctggaaaatcatggcgctgacgctgctgctcggcacgccggcgctggggtttctcgccgcgccgggcgtcgggctgacggccggcctgcggcgcggcggcgtcctgctgggcattctggtgctgccgctgagtgtcccggtgctgattttcgccaccgcggcgatggacgcggcatcgatgcatttacccgttgacggctatctggcggtgctgggggcgctgctggcgggcagcgcgacgttaagcccgttcgccaccgcggcggcgctgcgcatcagtacgcagtag

SEQ ID NO: 40166 - DNA, 249 bp, Salmonella typhi
atgactaccattacactagtcaacgaacaaaatagtactggcaatcctttttctgcacatatgttatgtgaacagcgagctattcaggaaattacttacgaactattgcaatcgcagcagcatgtctcaaataaggatatcatcgccaaacttattgaaaaactggaaacagaaaaagacgtagtgcagcttgatatttaccgcaatgccttagaagccgttttttttcagacacctgacgacatctaa

SEQ ID NO: 40167 - DNA, 132 bp, Salmonella typhi
ttgccattgcaacaaggcggctatatgacgcttacgcagttgggcgtggccttctggcacgatctggcggcgccgatcattgctggcattatcgccagtgtgatcgtcaactggctacgtgacaggaagtaa

SEQ ID NO: 40168 - DNA, 1680 bp, Salmonella typhi
atgactcagcatactcaaactccttcaatgccttctccgctctggcaatactggcgcggtctttccggctggaacttctattttctggtcaagtttggcctgctgtgggcaggctatctgaattttcatcctttactgaatctggtattcatggcgtttctgctcatgccaataccaaaatatcgccttcaccggttgcgccactggattgccattcccgtcggcttcgcgctgttctggcatgatacctggctgcccggcccgcaaagcattatgagccaggggacgcaggtggcggaattcagctccggttatctgctcgatctgatcgcccgttttattaactggcaaatgatcggcgccatcttcgtactgctggttgcctggctatttttatcacagtggattcgggttacggtgtttgtggtcgccatcatggtatggctgaatgtcctgacattaaccggcccggtttttacgctgtggccggcaggccagccaaccgatacggtgacgacgactggcggtaacgcggccgctaccgtcgcgacagcgggcgataagccggtcatcggcgatatgcctgcgcaaaccgcgccgccaacgaccgcgaatctgaacgcctggttgaacaccttctatgccgcggaagaaaagcggaaaacgacgttcccggcgcagcttccgcctgatgcgcagccgttcgacctattggtcatcaatatttgttcgctctcctggtcggatgtcgaagcggcaggcctgatgtcacatccgctatggtcgcactttgacattttgtttaaacactttaattccggtacgtcttacagcggcccggcggccattcgtctgctgcgcgccagctgtggtcaaccttcgcatacccgactttatcaaccagccaataacgaatgttatctgtttgataatctggcgaaactgggctttactcagcatctgatgatggatcataacggtgaatttggcggcttcctgaaagaagttcgcgaaaacggcggtatgcagagcgaactgatgaaccagtccggcctgccaaccgccctgctgtcattcgacggctcgccggtatatgacgatctggcggtcctgaaccgctggttaacaggggaagaacgtgaagccaattcccgctccgcgactttctttaacctgctgccgctgcacgatggcaaccacttccctggcgtcagcaaaacggcggattataaaatccgcgcgcagaaactgttcgatgaactggacgccttctttaccgaactggagaaatccgggcgtaaggtgatggtagtcgtcgtaccggagcacggcggcgcgctgaagggcgacagaatgcagatctcaggcctgcgcgatattcccagcccctccatcaccaacgtcccggcgggcgtgaaattttttggcatgaaagccccgcatgagggcgcgccgattgatattaatcagccgagcagctacctggcgatttccgaactggtcgtacgcgccgtggacggtaagctctttaccgaagacagtgtgaactggaacaagctgaccagcaatctgccgcaaaccgcgccggtttcagaaaacgctaatgcggtggtgattcagtaccagggtaagccctacgttcgtctgaatggcggcgactgggtgccttacccgcagtaa

SEQ ID NO: 40169 - DNA, 300 bp, Salmonella typhi
atgacagagcttgaaaaacttcaggccagcgcagaacaggcagcggccctgctcaaagcgatgagccacccaaaaagattactgattttatgtatgctttgcggttcaccaaaaaccagcgcaggcgaactggcgcgcattaccgggctaagcccctccgcgacgtcgcagcatctggcgcggatgcgggaagaagggctgattgatagtcaacgcgatgcccagcgcattcactatttcattaaaaatgaggcggttaatacgcttatcgccacgttaaagaatctctattgtccataa

SEQ ID NO: 40170 - DNA, 405 bp, Salmonella typhi
atgcgatctgtgttaacgatttccgtcggcctgcttttcggcctggcgttaagtagcgtcgcgcacgcgaacgaccataaaatactgggtgttattgccatgcccagaaatgaaacgaacgatctcgcgctgaaaattcccgtctgccgcatcgtgaagcgcattcaactcacggcggatcacggcgatatcgaacttagcggcgcatccgtctattttaaaactgcgcgtagcgccagccaaagcctgaacgtcccttcctcaatcaaagaaggccagacgacaggctggatcaatattaatagcgataacgacaacaaacgctgcgtatcaaagattaccttctcaggtcatacggtaaattcttccgatatggcgagacttaaagtcattggcgacgattaa

SEQ ID NO: 40171 - DNA, 237 bp, Salmonella typhi; identical to SEQ ID NO: 38969

SEQ ID NO: 40172 - DNA, 240 bp, Salmonella typhi
atggaaaacctgaatatggatctgctgtacatggctgccgctgtgatgatgggtctggcggcaatcggtgctgcgatcggtatcggcatcctcgggggtaaattcctggaaggcgcggcgcgtcaacctgatctgattcctctgctgcgtactcagttctttatcgttatgggtctggtggatgctatcccgatgatcgctgtaggtctgggtctgtacgtgatgttcgctgtcgcgtag

SEQ ID NO: 40173 - DNA, 471 bp, Salmonella typhi
gtgaatcttaacgcaacaatcctcggccaggccatcgcgtttattctctttgtctggttttgcatgaagtacgtatggccgccgttaatggcagccatcgagaaacgtcagaaagaaattgctgacggtctcgcttctgctgaacgagcacataaggatcttgaccttgcaaaggccagcgcgaccgaccagctgaaaaaagcgaaagcggaagctcaggtaatcatcgagcaggcaaacaaacgccgcgctcagatcctggacgaagccaaaactgaagcagagcaggaacgtactaaaatcgtggcgcaggcgcaggcggaaattgaagccgagcgtaaacgtgcccgtgaagagctgcgtaagcaagttgctatcctggctgttgctggcgccgagaagatcatcgaacgttccgtggatgaagctgctaacagcgacatcgtggataaacttgtcgctgaactgtaa

SEQ ID NO: 40174 - DNA, 534 bp, Salmonella typhi; identical to SEQ ID NO: 39187

SEQ ID NO: 40175 - DNA, 288 bp, Salmonella typhi
atgctgcataccttacctcattgcgcttcgggcgttgattttcccgctttgctgcgcctgctaaaagagggcgatgcgcttttgctgctccaggatggcgttaccgtcgcgattgaaggtaaccgcttccttgaaagtctgcgcgatgcccccataacggtctatgccttgaaagaagacattgacgctcgcggcctgggtggtcaaatttcagacagtgtcgtcagggttgactatactgagtttgtcagactcacggttaagtatgccaaccagatggcctggtga

SEQ ID NO: 40176 - DNA, 192 bp, Salmonella typhi
atgaaagcaaaagagctgcgtgagaagagcgttgaagagctgaacaccgagctactgaacctgctgcgtgagcagttcaacctgcgtatgcaggctgcaagtggccagctgcaacagtctcacctgttgaagcaagtgcgtcgtgatgtcgcacgcgttaagactttactgactgagaaggcgggtgcgtaa

SEQ ID NO: 40177 - DNA, 1395 bp, Treponema pallidum
atggacgcagtagggtatgaagtattctggaacgagacactcagccagatacggagtgaatcgaccgaagcagaatttaacatgtggtttgctcatttgttctttatcgcatcttttgaaaacgctatcgaaatagcagtaccttcagactttttccgaatacagtttagccaaaaatatcaagaaaagcttgagcgcaagttcctcgaactttctggacaccccattaaacttttgtttgccgttaaaaaaggcacccctcatggaaatactgctccccccaaacacgtgcatacctacctggagaaaaactctcctgcagaggttccttccaaaaagagctttcaccccgacctgaacagagactataccttcgagaactttgtatccggagaagaaaccaaattcagccatagcgctgctatctccgtatcaaaaaacccaggcacttcctacaatccgttacttatctacggtggagtgggactaggaaaaacccaccttatgcaggctattggacacgagatctacaagacaacagacctgaacgtcatatacgtcactgcggagaattttggaaatgaattcatttccacattactcaataaaaagacccaggattttaaaaaaaaataccgctacaccgcggatgtacttcttatagatgacattcatttttttgaaaacaaagacggattacaagaagagcttttctatacgttcaacgaacttttcgagaaaaaaaaacaaattatctttacctgcgacaggcctgtacaagaattgaaaaatctctcttctcgcttacgctcgaggtgctcccgagggcttagcactgatctgaatatgccatgttttgaaacgcgctgtgctatcttgattaaaaaaatacaaaactataacagcacctatcctcacaaagccatccacatttcagacgatgttgtccgacttgtttctgaaaacatttcttcaaatatcagggatcttgagggggcattaacaaaaattatcgctttcattgaagtgtcgggatccatcacgatagatatcgttccctctctcctaaaagagttcttcctctctgcaaggccaaaacacatcacagtagaaactattcttcatgtagttgcagatcactttaacatttcgtattcagatctaaagggtaagaaacgcaataaaagcgttgtttatcctcggcaaatcgctatgtttctctcaaaggaactgacagagctctccactactgaacttggtatcgaatttggtggcagagatcattcaaccgtcatttacggatgtcaaaaaatagaaggagaaattctcactaatccttcgttacaggcaaatcttgatttgctgaaaagtaaagttcaagattcaatccgctag

SEQ ID NO: 40178 - DNA, 1116 bp, Treponema pallidum
gtgaaaatcctatgcgagaaagaagcctttctgaaggaaataagcacagcacaagaggttatttcaaataaaaaaaacacgtctattttttcgaacgtcctattagctgctcaaggagccctgcttaccatcagagcaaccgacacaaaagttacctttgaaactagcattcccgtcaatgttctcgccgaaggcacaacgacagttttttgcgacaaacttgtgaatgttgtttctgcccttccaacaaaagaaatcgaattaacgttatgtgaagaacaacttgtcattacccctccaaacaaaaagataagctttcagctcagaaccctctcgcatgagagttttccatgtttccctcaaaatgaaggaggcgtctctcttgctgtgcctacctccgatcttagaaacatgattaaccataccgtttttgcagtttcagaagacagtacgcgccattttatcaatggcgtacacgttgattttcagtatggaaatattatttgtgtttcaacagatggaaagcggctcgcctatatagaaaaaaagggagaatcctctccccaatccttttcgggtgttattgtgccaactaagatcttaggcatagtaaaccgtaagcttacccctgaaggatcagtgacgctatgcattacgtcgcagcacgtttacttttttttcggtggatataagttttcttctgtgcttattgaggggcaatttcctaattacaaaagagtaatccctgatcatcaggagcgttctttttgtgttggacgtgtggagctaatggaggcacttaaacgagtctcgttgttggtagaacaaaaatctcacaggatatttattaccatacagcagggtttgttgactttaagctcaaaagctcacactcaagaaaatgaaataggtgatgctcaggaagaaatagcctgtgcttatacaggagaaagtgaggtcatagctcttaactatctataccttgaagaaccgcttaaggtttttacttcgaaggaggttcaagtggaatttaccgatcctgcaaaagcactcacgcttcgtgctgtaccaaacacggactgctttcacatcattatgcctatgcaaacggagtga

SEQ ID NO: 40179 - DNA, 2442 bp, Treponema pallidum
atggaagaaattagcaccccagagggtggcgttcttgtgcccatttctatagagacagaagtcaagcgtgcttacatagactattctatgtccgtcatagtttctcgtgcgcttccggatgtccgcgacggtttaaagcctgttcacagacgtattctctacgcgatggaggaaaaagggctacgcttttcaggacctacacggaagtgtgccaagatagtgggggacgttttgggaagctttcatcctcatggggatgcgtccgtctatgacgcgctagtgcgtcttgggcaagatttttcccttcgttatccagtcattcatcctcaaggaaatttcgggactatcgggggcgaccctccggcagcgtatcggtacaccgaagcgaagatggcgcgtattgcagaatctatggtagaggacataaaaaaggaaacggtttcctttgttcccaattttgacgattctgacgtagagcccacggttcttcctggaaggtttccttttcttcttgcgaatgggtccagtggtattgcagttggtatgactacaaacatgccaccgcataatttgcgtgagatagccgcagctatctctgcgtacatcgagaacccaaatctttcgattcaggagttatgcgattgtatcaatggtcctgactttcccacgggaggcattatctttggaaagaacgggattaggcagtcttacgaaacaggtcgagggaaaattgttgtccgtgctcgctttaccatcgagacggattcaaagggtagggataccattatttttacagaagttccgtatcaagttaatactaccatgcttgttatgcgtattggggaacttgcacgtgcgaaagtgatcgaaggtattgcgaatgtaaacgacgagacttccgatcgtacagggctacgcatagtggtagagctcaaaaagggtacccccgcacaggtagtactcaatcacctgtttgcaaagactcccctgcagtcctcttttaatgtgattaatcttgctttggtagagggaagacctcgaatgctcacgctcaaggacctagtgcgctactttgtagaacaccgggtcgatgtagtgactcggcgtgcgcattttgaattacgtaaggctcaggagcgcatacacttggtgcgtgcgctgatacgtgccttggatgccattgataaaatcatcacgcttatccgtcattcgcagaacacagagcttgcaaaacagcgtttgcgtgaacaatttgactttgacaacgtgcaggcgcaggcgatcgtagatatgcagatgaagcgcttgacaggtttggaagtcgagagtttgcgtacggaattgaaagatttgacggagctgatttcttctctggaggagttacttacttctccccaaaaggtcttgggagttgttaagaaagagacgcgtgatatcgcagatatgtttggggatgatcggcgtacagatattgtgagcaatgaaatagaatatctggatgtagaagattttatccagaaagaggaaatggttattcttatttcccatcttggttacattaagcgcgttccagtgtctgcgtatagaaatcagaatcggggaggaaagggctcaagttcagcgaatctggcggctcacgattttattagccagatatttactgcatcaacacatgactacgtgatgtttgtcacgagccgtgggcgggcctattggctaaaagtatacgggattcctgaatctggtcgggcgaatcgtggttcgcatattaagtcgcttctcatggtagcgacggacgaggagatcacggccatcgtatctttgagagagtttagtaataaaagttatgtttttatggctactgcgcgaggtgtagttaaaaaggtaactactgataattttgtgaatgcgaagacgcgcggtattatagcgcttaagctgagcggaggtgacacgctggtgagcgcagtgttggtgcaggacgaagatgaagtaatgcttattacgcgtcagggaaaagcattgcgcatgtcggggagggaggtgcgcgagatgggtcgcaattccagtggggtgattgggataaaattgacgtccgaggacctagtggcgggggttttgcgagtaagcgaacaacggaaagtactgataatgacggagaatggatatggtaagcgggtcagtttttcagaattttctgtacatgggcgagggactgcaggacagaagatttacacacaaacggatagaaaaggtgctataataggtgctcttgctgttctcgatacagatgagtgtatgtgtattactggtcagggaaaaacgattcgcgtggacgtgtgtgcaatcagcgtgctggggcgtggtgcgcagggcgtgcgtgtgttggatatcgagccatcggatttagtagtaggacttagttgtgtaatgcaggggtaa

SEQ ID NO: 40180 - DNA, 1815 bp, Treponema pallidum
atgccgaaaattagcattcatgaggcgttgttttttgagctgctcggtgaacggtgcgacgatgatacgttggagcgacgtttgcgaagtgctaaggctgaattggagtgcagctctttttccgtgagggaagataaagagggagggagcctttcgccaggaggggaggtgtgcgatcctgtgcagaggacgaggggtcaggccagctgtgtacgtgagggtgcgtttgatgcgcgtcttttaaaaatcgaacttaacgacacaaatcgtccggatttgtggtctacagcagggcttgcgcgcctcttgcgtgttcacgcagggggggcttcgcgcgcagcgcagtatcgtgcatttctttcagatcgctgtacggtgcgcgactcgtatgggcgatgcgtagtagtggatgcgcgtttgcaaactatacgcccttttattgctggctttgtggctcggggtactggactgagcgaagtaagactgtgggatctaatacaaacacaggaaagactcgccagtaattttggacgtaggaggtgtaccctttcgctggggtgttaccgtgcacaggatatatgttggccactcgcataccgcgctgtcctactcgcagaggtaagtttcacgcctctcggtatgtccatgccgctgtctggtgagcagattctgacgcaacatccgaaagggcgtgaatatggtcatctcctcaaggattattctttcgttcccttattagtcgatgctcgtggtgaggtgctttcgcttattccgatcactaatagcgcgtcgctgggtgcagtagtgaccggggatacagaactatttatcgagtgtagtggtacggatatgtgcgcagtgctagtagcggtgaatagccttgcgtgtgatctttctgatatgggtatgcagattgaacctgtgcaaattacctatagttttgacaccccatgggggaggtctgttactacccccttttattttcaagaaaaaagggaggttgcgcacgagcagatagatcgtcttttggggatgcccttgcctgttgcagatataaccgaagcctttgcaaggatggactgtgccgtgcaagttaagcagggaacctatgtcgtcgagcctgcagcgtaccgtaatgattttctccatgcggtagatctgattgaagaagtgatgctgggtagaacgcttgaccgtttttctccgcaggttccatgttcttttacagtgggcagactgagtgatctgacccttttgacgcgcaaaattaagcaccttctagttggatttggttatcaggagatgatttttcattatcttggctctgccagggagttttgcacgcgtatgcgatgcacggcagatgatttaatcgagatagaaaatcctcttactgaaagctaccgattcgtgcgcaggtctatcattccgtgtcttctgtcagctgagctaaagtcagcacatgcgttgtatccacatcgtattttcgaaattggaaaggttgccttttgctcccctcatggtgaacacggtacatgcacgcaacaatcacttggattcctcaatgcctcgcaggaggcaagttacaatgaggtggcgagcctagtttcaggacttttgtattgtttgaaacttccgtatcaggtagaggaagcgcaggatccgcggtttgtcttaggcagacaagcgagtatctgcgtgcatggttctcgtgtgggtatatttggggagatacatccgcaggtgctgagtaattgggatatccgcatgccgtgctttgctggggaacttgatgttggggccctattgccgtag

SEQ ID NO: 40181 - DNA, 2574 bp, Treponema pallidum
ttgctggggaacttgatgttggggccctattgccgtagctcgctctggcgagagctttcctggcaagaagttacgggtatcgttgctcctgacactattgcgtatctgaaagcccgtgcgcaggatcacccctttttgctagcgcatgaacgtgcctgcgctgcgatacgtcttgggatgagaatgtacggtgacggctacaatatctgtgtgattggcgcgtcaggcaccgggaagcgcactacgctccaatatctattaaaagattttgtacctcgtcccgagcaaatgtgggatatagcgtatgcatacaattttgtgcatccgcacgaaccgcaggtgctgcagtttccggcgggagaagggatgccttttgctacggcgttgaggagatcggttaacgctattctcaatacagcacaggatattgtgaaaagtgatgccttcttacgtgagcggcgcacattgctggctgatattgaaacacgtgagtgtgctgagctttcacgtattgaagcggagttgtatacgcgtgggtttcgtgtgagatggcataggaaacgtggtacgtactcctttgatttagttcccctattaaagggaaaagacagtagctttgaagcgctgcacgatttagcttcccgcgcgaagctttctagatgtgtagtacacgaactccatgcgcgatatcgtctttcctgtgatgaggtttcttcgctgctccatacgttgcgcactgcgcggcgggccgcgcgtaggcgtcttgcgcagtactaccgtgcgcgtttgcggttaattatcctcgagcagatggcctgtattaaaaaacgcgtggcgtgttatgcaccggttttttcccctccacctgtttcgtgtgcggcggaacagacggaaagggagaagacttcctcttctcgcctcattgaggtgccgcatgaatttgaagaaatgcgtgcgcgcatcatatcgtacatagagcggatacaaaccgatgtgcaggtgcgggtacagtgtttaatgtcaatgcgtatttctgcactagtaaaaaagcggtttttcgatcgctataccttaaatttcgtgtgtgtgcacacagaacatgcggggtatgtgtttacggagcatcagccgaatttggcgaatttatgtggatcgattgaaagcaaggggaatgaaggggatacgctggagaatgggcatttacgcattcgtgcaggtgcgctgcatcgagcgcatgcaggtgtactcatcgtgcagctcgaagatctactggcggaggaagaagcatggacacatttgaagcgtgcgctgcgtaccaagcaggtgttactcccagcgggtagttcccagtcccaaggtatgttgcggcctgaaggagttccgctcacatgcaagcttgttttggttggcgagccatgctctttcgaacgtctatctcaggaagattcctcgttccgagaactatttaaggtgtgtgcagaatttgatacgagcatgccgaattctgataagaatcaagttgctttgatagcctaccttgatagagttgtggcgcgttatggcaccttctcacttgattcctcagcgtacgcgcgattgttagcatatgcggaagaactggcagagagtcatacacggctcagtacttcttttgtacaaattgcagatttagtattggagtctcatgcagtggccgtggatatgcatccagatgtgtcggtgattactgcgcatgtggtgcaggaagcgctgaatcgcaggcagtacgtgtgttcccgcgcgcgggagcgttttcagcgcatgatagcctgtggagagttattggtagaggtacagggatatcgaatagggagaattaacgcgctggcaatcgaagaacattgcggccatagctttggcatagtaatttcgttaacggcacaggcatccgcgggtaaggaaggagtgatgaatattgagcgggaggcaggtctttcgggggaaatttatgataaggcgcatttaatcatcacttcgctattgcgtgagaagtgcttgtctgcttttgcagatgctgcatttgatccagctgtggatgaccttggaaaggggcaggatagttttccactgtgtctttctgcagcgctttgttttgaacagtcgtatcacgggattgatggggattcggcgtctgctgcagaatttttagtattgctttctgcgattggccggtttcctcttcggcaggaccgcgcaataacaggaagtgtgaaccagttgggacaagtgcaagctattggaggagtgagcgagaagatcagtggcttttatgacgtctgtgctctgaacggactgacgggaatgcagggagttttgatcccaaagagtagttgtgcacaattgtttttgcctgaacgtgtgcaggatgcggtgcgtgctggtacgtttcacgtgtgggcggtatgcacaattgatgatgcgctggaattgatggtgccggacgatttgaaagagcagggaagtgctcagctctaccagtgtgtgcgtgcgcgtttgcgggatttttatgtcacagtgaaaggacactgcgagtag

SEQ ID NO: 40182 - DNA, 2124 bp, Treponema pallidum
gtgaggaagtgtgcgatgcgaattatgcggagattaatgttatttcttatgtgtctatgtgctgcgctgtttgcgcaagagctggttcgcgaacagagtgttacaaagtctgcagatattacggtgctacttgatacgtctggcactattttaccgtaccgttccgtggtaagcggtagtgtgctaaaagatatcgctactcgttttgtgcgtttgggtgattcgttccatattatttcgtttagtgccacgccacgtcacgagatttctcaggttatccgtagtgagtttgatctttctcaggtagtgtctcgtttcatgatattgcatcagttggggttatattctgactttttaacagcgctagatttcgcgcgtacacacttacgcgctttgcctgcagcacatgaaaaaattttgattgttgtgtctgacggtatttttaacccgcctgcgcgtaccgcatataaaaactacaacaaggatcaggtaaaaattaaccttgcacgggctgccgcggatctgagacgagagcaggtgcgtgtgttttacataaaacttccctttccccaggacatccagatccgcgatttggatgacaatctgctgactgacctacaaaagacagatgatgttcaaatctctgcagtcggtagctttgcagaaggacaaacaagaaggcctaagttggacactgtgggtgtggtttccgatcaaacgggcggcgttgcagataaccatgcagttgctacgcacggaagggaggacgggacagtccaaggggttgttggcagccatgtggaggtggcacgcacacaggacagacgcagtaatgcagatcctgctaaaagggaaggggttcggccttcctcagaagcaactgatgtttcccgcgagttcacggaggatttgggaatcagggtgagtccggttgattcagatggttctgtgcgtttttccgagaaggagcgcacgcttcccgtgttacactttccaagggtccttgaggtacagggtaagtatgcagaatgtatgttcgaggttgaaaatagcacggatgctcccgttttgttgcatttggagcgggtgatttttgacaatggcgttgagactgacatagtttcggtgcaaacagagtcttgtgcagtagcgtccggtgcacgcgcgatgttgcgaacaacttttttattacctaagcgctaccacgaagagggaacgtaccaggtgaccatgcgtgtacagtttgcagataacgtccgcgtgttccctcaggtggcaacagcagagctgcgcgtttctcctttgccttttcttggattggtgcggagaggtatacatggggttctgtcttctgtagggcttacgcatgcgtttggatatgtgttggacatggtagggttgagtcgcacgggtttcggtgcggtgcttttgcctctgtttgctttggctatcttcttagtacttgtatcagccgtggtgtgtaggtcaaagcgcgtgttgtctcgtaagtcatggcgcggaagtccccgtacagagaatgggtgtcagggtcctggttcgatgtctgattttcgggcgcattctgttaaggaacaaaggcaggatcaggagcgcgtgtatgcaggcatggagagaattgtatctcagcgtaaaagcgatgtgcaggatcgcctcagtgtattgaatgcggcaactgcatttgggcgtgatcgagtttcattttcccccagggtaacgcgtgcggagcatggatgtagtcggtcaggaatgactgaaatttttgtgtttgatcaaacacgtgcgattggcaagcgcaatattcacgtaatgaaagcaggaacccgtttaggggttggcgggcacaagggggatgacttcctaatttttttggtgccgtttccaaggcggctagcacaagtgtattttgacggtgaagtatatcatcttgctatcttgaagccgaggtacttcccgtacgaggagtcgagtgtggtgcacgactgcgtcggcagagtggttacccttgtctctgacagggggtatcatgtgcccttcacattccgccagtatgaggatcccgctgtgagattgaacaatctgctcacctctatcgaatacgcttga

SEQ ID NO: 40183 - DNA, 3072 bp, Treponema pallidum
atgagtacgcttcttcacggttttgaaattatctggcgccattcactcgctgagctttcggcagtgggtgtctatgctcgacacaaaaaaacagggcttgagttgtaccacattctcaacgaagacccggagaatttgtttgccttctgttttatgacggcagaagaagcaagtaccggggttgctcatatccttgagcattcggtgctctgtggatcacagcattatcccctcaaggatccgttcctcatactcgcgaaacaaagcgtgaaaacgtttcttaacgctctaacctttccggacaaaacagtatatccggcctcctccttggtagagactgactacttcaatgttatgagtgtatatgcagacgcagtctttttccccctgatcgaagagtggacctttaagcaagaaggacaccgctttgagtttaatgagcacaaccaacttaccctccagggcgttgtactgaatgaaatgcgcggtgtgtatgcagactttcatacgcttgtgtataagcacgcaacacacgcgaccacacgtggctcagtgtatgcacacgattcaggaggtcatccaacagttattcctcgtctcacgtacgaatcgtttaaagcttttcacaaaaaacactatcacccgtcaaactgcaagctttttctgtacggaaatatacccaccgaaaaacagatggcatttattgaggataaatgcctttcaaaattttctgcccgcaaagcgttgccccccatcccccctatccctgcataccaaagtccccgtacgtacaccgggtacgcaccggcgagcgaggggatggatttaacacggtgcgccgtattgctcagctggttactcccagaatcagacaaggctgaacagttaatggacgtgtttttgctcgaacacgttttgctcggtcacgatgctgctccccttgcacaggcactgttagaatcagaactcggtgaggatttatacgcatataacggcagtcacatcgatctaaagcgtatgcttttttttgtaggtatgactggggtgcagcatacacaggtcgatgcactaaaggcatgcgtgtttgaaacactagagtcgcttgttgcgcacggcatccctccacaggaagtggaaacagcgctgaatgcactcgaattttcaaatactgaagtacgccgctctgacggtcctttttctctcgtgctcatgcagcgttcgctgcgtggatggttgcacggtgcaggtccagaaagttctttgcgttatatccccgcactgcaggcactgcgtgaaaaggtacaccaccatccacactacgtggaaaatctcatcctcacgcacttgctgcgcaacccgcagtacacggtactttcggtacacccagacccagacttctcaaaaaaacttgatgagcaattagaaaaatacgtacaggatttctcccgtacactcacgcagccagcagcggcgcgcctccgagctgaccaagaatcactgcgtgtacgacagacaacacccgatccggaggaactccttgcgttgctcccccatataaagcgggaacaactgccagtccccaccccagaactgagcgaaaccatgcagttttttggttctgttcctgttctcgtgcatgagcttgccacgaacgatattacgtacttacaccttgcaatcccagcagatatgctcagtgtaaaagaagcacaacttctgccactgtatggctacgcactgacaggtatgggaaccgagacacatcattggagtgtggtatctgccgagattgcccgtctcaccgggggctttgccgcccgctgtatagtagcaggcgatcagggaagcgagatactccccttactgaggggacagaacacactgcaacgcagcgatatagtcgggcgagcgtggctagttgtcagcgtaaaaatgctgtcgcgctttatcgtacaggcgatttcgtacgtgtgtgcacacgtgcgcagtctttcttttacagatacacgacggttaaaagacatccttgcacaatataaaaatgacttggatagcgctgccatgcattcaggacattccattgcacttgcaaaggcaaacgctcgcgtgaatgcagcaaaggccgtagaagaactctggactggagtcacgcagattcgcttggtacgtgctttgtggacagagtgtacagaaaccgttgcctccccttcgctggcagccaaactcaaagcgctgcatgaaaaactgctcactgcaggagtgatcggatgtgtatgtggtacagaaacatcgttacacacagcgctagatgcattggcaaaacctctggcgtgttttcgtgcaccgctatccacttattttatccaccacacctctgcgcccacagcgcacgaacaacagataccctccgctcacggtgtgctctttcaagaggccctgcagcacatgcgcacccgcaatatgctgacgctgcttccagcccctgtgcaagtgggttttgcagcgctgtcccttgcacatccacggcttcctttggagagacgcggggtagagcaggtgtttgcccgatatctaagtactgagccgttttgggaaaaaattcgaacgataggtggtgcttacggtgcattcaccctgccagatccagtacatggcatattttcctcactaacttaccgcgatccaaatccgctccactcccttgacgtgatattcaagacgattgagcacctgcacgccgatcacaagggcacctccagtctctttaaccagaagacgatggaacgtctaatcataggagcgtacagtacggcggtaactcctgaaacaccggagcataaaagttttgcgagtttcctgcgctttctcaacggaacgacagaaacagagcgtattgcggctattgagcatattctagacgcacgggtaacagacatgcacttgtgtacccaactactctgggcgcagcgcacgtgtgctgaagctgcggtggtaagcactgcaacctcaattcgggaagcggcaacgcttgagccttatttttcaaaacttgaagctgagccccctctctaa

SEQ ID NO: 40184 - DNA, 1278 bp, Treponema pallidum
atgagttgctatcgtgttgaaggtgggtttcccgtttcaggttgtattcgcgtgtgtggaaataagaatgcagcgcttccctgtattgcggcggcagttctcacacaagagccagtgttactgcaaaatgtgcccgacattgaggatgtggcggtgatgttaactatctttcgtgcgtttggtgggagtgttgaaaggcgtggtaatcatgagtacatgttacatcttcctcagttacagacgtgcgaagtgccgtgcgaggctgcgcagaaagtgcgtgcttccattctttttgcagggccacttcttgcgcgtggtagaaaagcagtgcttccaccacctggtggtgatgttattgggcgcaggagacttgatacgcattttcttgcgcttgccgcacttggcgcacaagttcgtttagatggggtgtttactttctctgcaaataagctggtgggatgtgatgtcttcttagacgaggcatctgtgacggcgacagagaatgtgcttatggcttcagttcttgccgagggggttacggtaatcacgaacgcggcgagcgaaccgcatgtgcaagatctatgccatttgttgaatgcgatgggtgcgcgcgtctctggcatcggatcgaatgttttaacaattgagggggtgagcgcgttgcatggtaccacatatacacttggggctgatttcatggaagtaggttcgcttattgggcttgcggtagtaacgcgtggagcattgacgatttcggatgtgaacgtacgtgatctacgtccactaggttttgcgtttaaaaaacttggagtaatttggagcgagcaagagcacgcggtaagcgtctctgcgtcgcaggatctgcgggtaaattacgattttggcggtatgattcctaaaatagatgatggcccgtggcctgcatttccgccggatctgactagcattatgacagtggtggcgactcaagtcgaaggggttatattgattcatgagaaaatgtttgagtcgcgtatgttttttgtggacaagttaattaccatgggtgcgcgtatcatcctgtgtgacccgcatcgggcgcttgtttcaggtccgagtgcattgcatgggagtgacctggtatctcctgatgtgcgtgcgggaatggcgatggtgcttgcagcgtgttgtgcgcgcggggtaagtataatccgtaacgtgtatcaaattgagcgtggatatgaacgtctagtggagcgtttgcaggcaattggtgtccgtatttggaaagagggttga

SEQ ID NO: 40185 - DNA, 1635 bp, Treponema pallidum
atggcgaagcaattgctgtttaatgaggaagcccgcaagaagctgctttccggggttgagcagatttcgagtgcggtgaaggtaacgcttggtcctaagggtcgcaatgtcttgcttgaaaaagggtacggggctcccacagtcacgaaggatggggtttccgttgcgaaagaggttgagctcgaagatccgttcgagaatatgggtgcacagcttttaaaagaggtggctacgaagacgaacgacgtagctggggatggcacaactactgcgacggtattggcgtattcgatggtgcgtgagggtctgaaggcggttgctgccggtatgacgccccttgagttgaagcgtggtatggataaggcagttgcgattgcagtcgatgacattaagcaaaattccaagggtataaagagcaatgaagaagtcgctcatgtagcgtcagtatctgcgaataacgacaaagagattggaaggattctggcaagcgcaatcgagaaggtggggaatgacggggtcattgacgttgacgaagcccagacaatggaaacggtgacggaattcgttgaagggatgcagtttgatcgtgggtacatctcgtcctacttcgtcactgaccgagataggatggaaacggtgtatgaaaatccttacatccttatctacgataagtccatctcgactatgaaggatttgcttccgctactcgagaaaattgcgcaaacaggtcgcccgctgctcatcatagctgaggatgtcgaaggcgaagcactggctacgctggtggtgaatagtcttcggggaacgctgaagacgtgtgcggtgaaggctcccggtttcggcgataggcgtaaagaaatgcttgaggatatcgcgattctttcgggcggtcaggtcatttccgaggatttaggattgaagctagagtccgcggatattgcgctcttaggtcaggcaaagagcgtgaaggtagacaaggagaataccacgattattgacgggtcgggtaagtcgaaggatatcaaggatcgtatagagcagattaaaaagcaaatagaggcctcgacttcagattatgacagtgagaagttgaaggagcgcttggcaaagctctctggtggcgttgcagttatcaaaattggtgcagtcaccgaagtggaaatgaaagagaagaagcaccgggttgaagatgccttaaatgcgacacgtgcggcaatagaggaaggtattgttgctggtggtggtttagcgcttattcaggctgcggcggcgctcgagaaagctgatttgagtggactgactccagatgaggcggttggttttaagattgtgcgtcgtgctctcgaggagccgatacgccagatttcagagaacgcgggtattgatggcgcagttgtggcagagaaggcaaaggagaaacgtggcatcggttttgatgcatccaagatggaatgggttgatatgattaaggtcgggattatcgatccggcgaaggttacacgttcagcactacagaacgcggcttcggtttctgggcttttgttgactaccgaatgtgcaattgctgcaattcccgaaaagagttcctctacaccgccagctcctgacatgggaggtatgggaggtatgtattga

SEQ ID NO: 40186 - DNA, 933 bp, Treponema pallidum
atgagtcaggagatcggtatcaagctcgcggacgggtcttttttccctctctttactgcagagggtgcgcagcgcacaacgctcgagctcgttaccgcgaatgaccaacagtctcgtgctcttttgagcttttttaaacgggtttctcctggcgatggagaggcgtcggtcacctctgcagaacttgagcctatgggtgcgctttcgatagacacgttgtccgttgctgcggcggggggagctactattcgcctcgaggttgagtgtgatgggagtcggtgccgtgcgcgtgcgacggatgtaggttctggtgcttttcaggaaacctctttctccgtgttggagagatcctcaggagacgcgacaccggatgagcagcctgctgctcagatcgagcatgtcagttctttccctgaagacgagggaggggatggttctaccctcacgaggagacgacggattttgttggcagtgtgcgcatttctcattctgctcggtggtgtcttggtaggttgggttctgtacatgcacggcgcctctcgtcctgcggtcgtgccgtcacaaaaagttgaactgcccaggtcttctgcgcatgttgcagcgcgtgagcttgagcgtactgcggttgaggcacgtgtcgtcgatctcccatctgagactgctcttccagaaacccacaaggaaaaggacgtcccccctgcgtctcccggggctgaaacggctacgagtgcagcggcagaacctgtagaggagtctgggtctggatccgtcaaggttgtgcgttatacggtcaaacggggggatacgctctgggatttggcgcggagttattacaagactccgtggcgctacatgagaattgctgagtttaaccgactgaaaaaccctgatcatatcgttgcaggaacctcaattgaaattccgtcacggtaa

SEQ ID NO: 40187 - DNA, 1893 bp, Treponema pallidum
atgggtttcagattttctgactatgacgttatcgtcgtcggtggtggacacgcaggtgccgaagcggcgctggccgctgcccgtatgggggagcacacgttactcatcactcagacaatcgatagtatcggcaggctctcatgtaatccttccattggaggaatttccaaggggaatattgtaagagaaatcgatgcactcggcggagagatgggaaagtttgcggatgcatgcatgattcagtatcgactgctcaacaaaagccggggccctgcagtgcaggcgccgcgtatccaagcagataagtttttgtatgcccagaaggtgaagtatacgttggaatgtacgcagcatcttcacctgtatcaggacacagtggtagacgttgtgtgttccaataccactgatgcaggatatgtagcgtatggggcagcgcatgcggtagttaccgcacgcggcagacgcatctctgcacgtgcggtggtactgactacggggacctttatggaagggcgtgtgtatattggggaatatgaggcacctgaaggccgattaggggaacatgccgctgaagggctgggagctgcgctgagaaaaaaggggtttcagatgggacggctgaagacgggtacgcccgcgcgcgtactacgaaaatctgtagatctttcggtaatggaaaagcaagaagccgacgctatcatgcgtcctttttcctttgctcacgtggaaatcaatcgtccacatgcggactgttatattaattacaccaatgagagaacgcatcagctcatccgtgagaattttcatcgttctccattcttttctggcagaataaaggcggtagggacacgatattgtccgtctatcgaagataaagtgaggaagttccccgacaggatacgtcaccagctgtacatagaaccggaaggattagatacggaagagttatatataaacgggctttcatcctgtttgccagaggatatacaggatgaaatgatccgcactatccctggtatggaacgcgcggttattacgcgtcctgcatacgcggtggattatgcggtgctattccctgtacaacttggtattgatttgcaaacaaaaagggtgagcgggctcttttctgcaggtcagattaacggaacatccggctatgaagaagctggaggtcagggtattatcgccgggattaacgctgcgctgtacgcgcgcagtactaaaaccaaagaggagtatcatccatttgttctgaaacgcgacgaagcatatattggcgtcatgatagatgatcttgtaacacaaggaatagacgaaccctatcggatgtttaccgcgcgtgcggagtatcgtttgaaactccgtcacgatactgcggatgaacgtcttacagaaaaagcttacgccattgggctgcagaagaaatctgctgtagaaacgttgcaaaaaaagatgcgtacgaagcacgagatcttgcatctgcttcagaccaacaaagttagtcttacccatgcaaacgcatatgttcagctgaagccgcatataggtaaatcgtttgcagctacgctacgtgatccggtaatacctcttgggcttatcgcttcgctgaacgagcagatagcgcagttccctttggaagtgttccagtcggttggggtggagatacgctacgaacactacatcgctgcacaggatcaaagaattgcacaagtggagaaaatggaaggaataaagataccagcgcattttgattacgcgcgtatatcaggtctctctgtagaatcccgtacacgattggaacacgttcgcccggacactatcgggcaggttgggagaatgcgcggaatcagaccctctgacgtaatgctgttgctcgcccacttaaagcggtag

SEQ ID NO: 40188 - DNA, 1056 bp, Treponema pallidum
gtgatagaaaagttggaagaactgcgcgctcagtggagaaaactacagcaggaagtggagaatccttcgcttttctcttccactcagagttatcgtgaacgtatgcgcgatcacgcctatctttccagactgatggaagagtatgatcgctatttgcttactgagaagcagttggaagacgcgcacgttctcatccaagatgagtcggatgctgattttaaggacgttattcggcaagagatccgtacacttgaagctgcactgcacacgagtcaaaagcgactaaagacgctgcttattccccccgactctttgcaagagaagaatattatcatggaaattcgcggcggtaccggcggtgatgaagcagcgctctttgctgcagatctatttagaatgtacacgcactacgctgagtcaaaacaatggcgctatgaagtccttgcagtgagcgaaacagagttgggaggatttaaggaaattacgttctctatctcggggcgcgatgtgtatggcagtttacgttatgaatcgggtgtgcatcgcgttcaacgtgtccctagcactgaagcgtcggggcgcatccataccagtgcggttaccgttgcagtgctgcctgagatggaagagactgaagtggacattcgtgctgaggacgtgcgtgttgatgtcatgcgtgcaagtggtcctggtgggcagtgtgtcaacaccactgattctgcggtgcgtcttacacatctacctacgggcattgtcgttgtctgtcaggacgagaagagtcaaatcaaaaacaaagccaaggccatgcgtgtattgcgcagcagagtgtatgatttagaggaatcgaagcgccaggttgcccgtgcaagggaacgcaaaagtcaagttggttcaggggatcgttccgagcgcattcgcacgtataattttcctcagaaccgtgttacggatcatcgcgtgcgtgttacgctctacaagctagatgcagtgatgcagggtgcgttggatgacattatcgagccattgtgtattgcgtctcgagagagtgtaatctag

SEQ ID NO: 40189 - DNA, 1047 bp, Treponema pallidum
gtgtattgcgtctcgagagagtgtaatctagtgcaagaactctgtacgattcgacaggcgcgtatgtacgcgcgagcgttgtttcaagacgccccctgtttgcgcggacagaacacaccgcttttagatgcagaccttattctgtcgaagttgcttgcgaagccgcgtgcgtggattctcgcccaccagcaggatgagattgcctccgttgcacacgagtttaagcgtctcgtgcatcttcgttgtaggggacgtgcgttggcgtatctgactcgagaaaaagagttttttggtctgagattccgtgtcacccgtgctacgcttatccctaaaccggataccgaattgcttgtagaaagtgtcctggcgcacgttgcgtcccaaatgatgaagccgcgttcagtatctgtgcataaagacacaagtgcactgcctgtcttgaagatattcgaggcgtgtacgggatgcgggtgtattgccattgcacttatgcatatgttgcgtgcgcgtggcacgccacctctctatgtcattgcatccgacatttgcatgcgggcccttgccgtagcgcggtataacgcgcgccgactcttggatgtatctgcaaattcgcgcgtacgtttcgtgcacgcagatgtgcgtgctcctattccgttcttttctccttctgaaggcacggacgtggtacaggagcgcggggtgtgcgttccgtatgatgtgatatgtgcaaatccgccttacgtaccgagtgcgcaagcgcgcgcgctgttgcaggacgggagaggggagcctctcggtgccttagatgggggtgcagatgggctagacttggttcgcgcattcgcacaccacagtgccgcagcgctaaaggaaggcgggtgcgtgttttgcgaggtcggctcaaaccacgcacaacgtgcagcgcgcatcttccaggcagcagggtttgccacggtgaaaatttcaaaagatctctccgggaaagagcgcctgattagcgggatactgcgctcgcagtctagagctgtaacagcgccgagtggctag

SEQ ID NO: 40190 - DNA, 1056 bp, Treponema pallidum
atgatggaaagttcaacgatactgcaaagacgcgcgctgtttaatgaggcaggagacattgaacttcataagcgacgcatggtcggggggaacactaccaatctcaacgactttaacaatatgaagtatccctgggtcagcaagtggtatcggcaggcaatgaacaacttctggatccccgaagaaatcaacatgagcagtgacgtgcaagattatcgtaatctatccgctatcgagaaaaccgcgtacgataaaatcctctccttccttattttcctagatagcatccagactgcgaatctgccaaatattggtcagtacattaccgcaaatgagattaacctgtgcctaaccattcaggctttccaagaggctgtgcattcgcagagttacagttacatgctggacaccatttgctcccccgaagaacgcaatgacattctataccagtggaaggacgacgagcatctgcttgcgcgcaataaattcattggcaacttgtacaacgagtttcaagatgacaaaagcgtactcgcactgctgaaggtagcaattgcgaattatgttttggaaggaatttatttctattcgggttttatgttcttctataacttggggcgtaataacaagatgcccggctcggtgcaggaaattcgttatatcaaccgcgatgaaaacacacacctgtggctttttcgatccattattcaagaactgcaaaaggaagagccacaggtgttcactgcacgcaatgtacgcttatttcgcgatatgattcgcgaaggatgcgaacaagaaattaagtggggggactatgtcattggggatcagatccctggactaaatcgccacatggtggcagactatatccggtatttgggtaatcttcgttgcgaaaatttaggctttgagcccttgtacgaggggcaccgtgtagaaccggaatcgatgagctgggtaagtcagtacagcaacgcaaacttgattaaaaccgatttttttgaagcaaaatcaaccgcgtacgcgaagtcatccgcaatggtggatgatctctaa

SEQ ID NO: 40191 - DNA, 1782 bp, Treponema pallidum
atgagtaccccggttcgcattagcgaaatggtcctacgtgatgcgcatcagtctttgcacgctacgcgcatgactaccgaagacatgctccctatttgtgacaagctagatcgcgttgggtattggagtttggaggcgtggggaggcgccacgtacgacgcctgcattcgctttctaaatgaggatccctgggagcgtttgcgtgctctcaaatctcggttacctaagacccctattatgatgcttttgcgtgggcaaaacttgctaggctaccggcattacgcggatgacgttgtagatgcgttcgtagaggccgctgcacgcaacggcgttgatgtgttccgcatcttcgatgcacttaatgacccacgtaacctcagtcaggctgcgcgtgctgcaaagaaaacaggcaagcatgtgcagatggctatctcttacgctaccacaccctatcataccgcagagaagtacgtagagttagcaaaggagtatgcgcgcttcggtgcggattctatttgcattaaggatatgtcggggttgctgaccccgtacggggcgtacgatctggtttctgccattaaaaagagtgtcgatttgcccgttgagttgcacacccacgccactactggtatgtctgttgcaaccctggtgaaggcggcagaagcaggtgttgatgtaattgacactgccattgcttctatgtccatgggtacttcccacagccctacagagactttagtggaaatcctacggcacacgggccgtgactcagggctcgacataaatctcctgctagaaatagcagcctacttccgtcaggtacggaagtgctatgcccagtttgagtctagttttctgggtgcagacacgcgtatcctcgtgtcccaggtgcctgggggtatgctttccaatttagaaaaccagttgcgtgagcagggagccctggataagatggaccaggttcttaaggaaattcccctggtacagaaggactgcggttatatcccgcttgtgactcctacgagtcagattgtaggtacgcagtcagtattgaacgtgctgtttggccggtaccaccggcttactgctgagacaaggcgtctgctcacgggtcagtatggccggactcccgcctcctgtgatgcaggtttggtggagcgggccttgaaggaagaaaagttatcgcagtcgcttgtctgccgcccagcggatgccttgcctcatgagcttgatcgcatgaggtctgaggcgcgcgccgcaggcgcacaggataccattgaggatgtgctcacgtatgctatgtttcccaagatcgctcccacattctttgcttcccgtgcgcaagggcctatttcgttcagaggaaaggggcaggggcaaaaacagaagggtgagagtgcagggtcggtagcttcttatgtggctaccgtaaatggtactgcgtacacagttgtgcaggaaggcgctgttctccgggtaaatggtactccctacaccgttagggttgaggcaggcccgtccgttgcttcgggtacgtcgcagggtaccgtgactacggcaaaggttggggcgtgtactacgctacccgcgccggtcgcaggtagcgtagttaaacacaccgtgcaagatggagctacggtaaattcgggggagacggtgctcatggtggagtccatgaagatggaacttgaagtgaaggccaccgctgctggtactatccatttcctaatagcgcctggcgcgcatgtcagtgcggggcaagtcttagcagagattcgctag

SEQ ID NO: 40192 - DNA, 1410 bp, Treponema pallidum
atgaatacgcgtttaccccttcgagtactccagtgcgtgttggtgggattgcttgtgtgcgggcccctgtgtgcagctacgcgccgcccggtacgtgcttctgcgccggtgcctatggtacagagttgtaaagacacgggggcacgatgtgcgccggcgtcgtccatgcgtgaggacatgcgtgcgtcacacggagctgcgccgcttctctctgtaaggaaatttttactcaatacgtggcatagtaccggtctctacgctttctttcatggcgtaacacaggtgccggatcttgcaaatccgcagcgaacacacagcgtgttcggttatcaacaggcgttgctgctcgtggttggtctgctcatcatttatctcggtgctgctaagggctttgagccgctgctgctcattcctattggctttggtactgtcttcgtcaacatccctggtgcgggcatgtatagtgagcatggtatgctcaaactcatttacgatgctggggtggggaatgagtttttccctatgctcatttttatgggtatcggtgcacttaccgattttggaccactgattgcgaatcctaaaatggcagtccttggtgccgctgcccagttaggggtgttccttactctctttggggttgcagcgttgaactttgtacccgggatccgctactccatcctggatgcctgcgccattgccattatcggtggggcggacgggccaacttccatctacgtatctgcgaagcttgctcccgaactcatggccgttatcgcggtggcggcatattcgtatatggctcttgtacctattattcagcctccgcttatgcgcctgttaactaccagaaaagaacgtcttattaggatgaaacagctgcgtcctgtttcgcggatagagagagtactctttccgcttgtcttgctcttgctctcggtgctgctcattcctgcggcttccccactcatcggtatgatcgccttcgggaactttgttaaggaatgcggtgttgtggagcggttgtctaagacgatggctaacgagcttttgaacatcgtgtcgatcttgctgtctttgggtgttggttctcagatgacacccgataagattatgaaccccaatgccttgggcattatcgtgttgggactcgttgccttttctgtcgcaaccgcagggggagtattcatggcaaagttaatgaatttgtttttgagcgagaaaattaatccacttatcggttccgcaggggtgagtgctgttcctatggccgcgcgtgtttctaataaggtggggctagaggaggatccttctaacttcttgcttatgcacgcgatgggtcctaacgtggctggtgtcattgggaccgcgatagccgcaggggtgttcatctcggcctacggagggtag

SEQ ID NO: 40193 - DNA, 1317 bp, Treponema pallidum
gtgccgggcatgcctaatcccactcaggaactcaagggaaaaattccccctcataacctagaggccgagcgggctgtgctcggcgctgttctactggatgactctgctctgagcacggcaacagagcagttgtctgcgagctctttttattccgctgcgcaccagcgcatctttcaagcactcgtagagttatcggatttaggtcaacgccctgatatcctcgtgctcagcgagcacctgcgctcctgtgaggcgctcgatttcgtcggtggcagcgcgtatgttgcctctctcaccgatgcggtcccaagcgccgcgaatgttgaatactacacacgcatcgtttgcgacgctgccatgcgccggtcgctactaaaagtagcccgcattatcaccgcagaggcattcaatgacaccgtgtcgggcaacatcgtactcgaaacagcacaaagggaaatctatgacctaacaaatgcaaggagagtagcaaccttcaaattgctgaaaaacctcattcctgatttggtcaatactattgagactcgttaccgaaatcaaagcgatctggtcggaattgccaccggcctaacggctctggataatcttaccggtggattccagaactccgagcttattgtcataggtgcgcgtccttccatggggaaaactgcgctcgccatgactatggcctcgaacattgccataaggcaacgtattccaaccgcctttttttctctggaaatgtctaatttgcttctgatgcagcgacttatcgctgcagagtcaggagtatccgcgacgaacctgcgcaaagggcttttacaactttccgatttcgggcgcatccaaaacgccgcaggagagatgtacgacgccccactttacatcgtggacgtgccaaacatgaagctactggatctccgtgccgtggctcgtcgattatgcgtacaagaaaagatccagattatttttgtcgactacttgggacttatcgtagcagacaatccctttgcgccccgctacgaacaatttgcagcgatctcccaatcactaaaaagcctcgcgcgcgagctagacatccccatcgtagcactttcgcaagtcggtcgaccggcagagggctctgcgccaaacctggcggacattcgtggttcgggggcaattgagcaggacgccgacgtggtcatgtttctacaccgcgaccgcaacgaaaccgagactcaactcattttagcgaagcaacgcaacggccccattgggacagttgagctcgaattccaagcgagctttacccgcttcgtctgcaaaagcccctag

SEQ ID NO: 40194 - DNA, 471 bp, Treponema pallidum
atgaagattattctcaatcaagacgtaaagatccttggtgaagaaggtgatgtgaaagaggtcgccgcaggctattttcgtaattacctctaccctcgaaaccttgctgttcctcataatcgttttaccgtggctcgcttcaaacagcgacaacaggacatagagatgcgaaagtctctcaagcgacaagatgccgcaaatcttaaggctcgtttagaggctcagcctgtggttattgccatgcccgccggtaccaacggtaagttgtacggcgctgtcacgagtcataccgttgcagaacaacttgcgtgcatgggatttgaggttgagcgcaagcgtgtggaggtccctggtcttactctgaaatgtgtggggaactatcacgtcactataagactatacgaggaaatatgtgctgttgttcctgtcaccatcaaaaaccaaagcgaagcggacagtgtgagtgagtag

SEQ ID NO: 40195 - DNA, 300 bp, Treponema pallidum
atggcagaagatcatccgagtgttgacctggatacgcatctcagttctcctcgtgaaagtgaagagagcgcacccaagaaaaacagacaattctatcgaaagaaagtatgccgtttttgcacgcagaagcttttagctgattataaggatccggacacgcttcgtcgctttatcacagagcggggtaagattctgccgagacgcatcaccggtacgtgtgccaaacaccagcgccgtgttgctctcgaagtcaagcgttcccgcgccgttgcgctcctacctttcgttctgaccgagtag

SEQ ID NO: 40196 - DNA, 531 bp, Treponema pallidum
atggcagacgtcaatcatgtagtgctcgttggtcggcttacgcgtgatgcggagctcaagtacacttctgcaggtggtgctctgtgtcgtttttctgttgctatcaatcggcgcaggaaaagtggtgatgattgggttgaggaagttaatttcttcgatatcgttctatggggacgccagggcgaagtcatcagccagtatcttatcaaaggcaagcaggtagccgtcgagggggaattgcgtcaaagccgttgggagcaagaggggcagtcacgcagcaaggtagagatctctgcgactaacgttcaactcctcggttctgtcctcggtggcgctgctcgtgccgaggacggtgagttttcttcctcgcgcgttgccgccgagtcgaccgctggtcgtgtccgcggcacatcctcagattctaggtcacccacaggcgatatcttgggtgagaaaagaggactggacgcaacctcgtcccttgatgaggctgatttttcaagttcagatctggacaccgttccattttag

SEQ ID NO: 40197 - DNA, 282 bp, Treponema pallidum
atgaggacctacgagctaatggccgttttcagtgcacacgaggatctctttcttcagggttccaccgccgttcgtgccctcctacaggaaaacgacgcagtcatcgcccgcgaagaccatattggagagcgggaacttgcgtatcctctgaagaagcaaaagaggggccgttacctgctcttcattgttcagtgtgagccggggaaggtgcgcgaactcgatcataagctcagattgcgacacgacttactcacgcacttgtttgtgcgtgtcgattcctga

SEQ ID NO: 40198 - DNA, 1182 bp, Treponema pallidum
atgtcttatataattttgacgccgggggggggtatggggcttatggggtgcgagtgtagtgttccgccttttgaaacggttgaaacgggcaaacggtcagtggatgcggacaggattatgcgtctgtcccgggatggctacgcgttcttaaaggtcaatgaccttgagagggcagagagcgagttcggtaaaattctccaaattgaagcggataacaactatgccctcgtggggctcggggatgcggcgcgcaagagacgcgcgtaccaagaggcatctgactattacacgaggtgcttacagcattaccctcgcaacagctatgcgctctttggtcttgcggactgttataaaaacatgcgtcggtacgtgaaggcagtggaagtgtggcagcagtacctggagcaggatagccacaacattgcggtgcttacgcgcatggccgatgcttaccgtaaaatacatgattttcaaaactcgagaaacctttactcccaggttatcgccctggatgaacataattcctacgcgctaattgggcttgctcacttgcactacgacttcaagaagtaccgtgaagcactcatctactggaaaaagctcctggagtgtgcagaacacagtgtggatatccgtgtactcacctctatcgggaattgttatcgtaaaatgaaactctttagtcagggattgccctattttcaggaagcgctgaagcgtgacccaggtaatttttatggattttttgggatggctgactgctaccgcggcatgaacatgcaggagcgttccatccagtactgggagaagattctggagaaggacacgcagaatcgtgtcatcctcacccgtattgccgacgcatatcggcacattggggaatacgaaaaggcccatcaaacgtataaaagggcgttggatatcgattacgatgcctatgccacgctcgggctcgcagtcctttgtaaactccaggggagatacgaagaggcggttgtgagtcttgatcgactcgtgcagcttgatcggaaaaactatcgcgtatatgtggagcttgcagactgctaccgcaagctcgggcagaagcaaaaggcgcttgagacacttcgtccctttcagcagtttggggttaagaaccgtgttgtttctgagcttatgagtgagttggagggtgcatcgtag

SEQ ID NO: 40199 - DNA, 2637 bp, Treponema pallidum
atgaacacagacaggtacacagtcaaagcaagcgaagcgctcaatgacgccatatctctggcagaagcggagaaccacggtcaagttgaggaggaacatctactccacgccctactttcccagaaagacgggattatctctccgctcattgaaaaaattggggcaaaaccggacttcctgtacgatgaattactccaatgcctgcgccgcaaaccacgtgttaccggtcctgccgcccaaacgcgctgtgcaccaacgctgagcaaagcctgtgcacgtgcagaacgcctcgcgctcaagaaccaagatgaatatgtctcctgcgaacatctcctgcttgccataagtgagacagatagcaacactgcacgtctccttcacagtcagggcattaccagtaaaactatcagtgccgccctcaaagatatacgcggcagcaagcgcgttacgagccaggatccagaatcaacattccagtgcttggagaaatactgccgagatcttactaccctcgcccgagaagaaaaaatagatccggttattggacgtgatgaagagatccggcgcgttatgcaggtactctcacgtcgtacaaaaaataacccagtgcttattggagaacccggcgtagggaaaaccgctattgtcgagggacttgcacgccgtatcgtttcaggagacgtaccagaaagcctcaagggaaagcgtttgctttcccttgacctcggcgcattggttgccggtgcaaagttccgcggggaatttgaagaacgactaaaagcggtaattgaagcggtacagaaaagcgacggtggcgttattttattcattgatgaactacacacgctcgtaggcgccggcgcaagtgagggatctatggatgcgtcgaaccttctgaaacctgcgcttgcgcgcggtgaattgcgttcaatcggcgcaaccacgctcaacgaatatcgcaaatatatcgaaaaggacgcagcgctcgaacgccgctttcagcaagtgtactgcgtacagcctacggtggaggacaccattgctatcctgcgcggtttgcaagaaaagtacgaagtgcatcacggggtacgtatcaaagatgaagcgcttgttgcagcaaccgttttgtctgaccgttacatcaccaaccgctttttaccagataaggcgattgatctggtggatgaagcagcaagccgcctgaaaatggaaattgaaagtcagcctgttgagctagaccaggtggagcgcaagatattacagctgaatatcgaaaaggcctctctccttaaagaaagtgatccggcttcaaaggaacgtttggaaaagttagaaaaagagctcgcaggcttcctagagcgccgtgctgcaatgcaggtccaatggcaaaatgagaaagggaggatagaagagtcacgccgctacaaagaggagcttgagcgtctccgcattgaggaaaccatgttttcacgtgaaggggacctgaacaaggctgcagaacttcggtatggcaaaattccagaacttgaaaaaaaaatcatgcttcttactgcagaagtagagaaaaaatccggtctagaaggacagctcttgcgcgaggaagtgtgtgaagaggacattgcgaaaattatttctatgtggaccggaattccggtatccaaaatgatggcaagcgagcaacagaaatatctgcagcttgagtcagtactcatgcaacgtgtggtagggcaggacgaagcagtgcgggtaatttccgacgcgattcgtcgtaataaggcaggactttctgatacgcgccgtcctcttggcagtttcttatgtgtcggtcccacgggggtaggaaagacagaacttgcacgtacgttagctgattttcttttcaacgatgagcgtgcactgacgcgtatcgatatgagtgaatacatggaaaaacacgcgatcagccgactcattggcgcgcccccggggtatgtgggctatgacgaggggggacaattgacagaagcggtacgacgtagaccctacagcgtacttctttttgatgaagtagagaaagcgcaccaggatgtgtttaatatattcctgcaaatactcgacgatgggcgcttgactgacggccaaggaagggtggtggatttccgcaacacgatcatcatcatgaccagcaatatcggatcagagcatattctttctgcacgcgagtcgcgcacacacacgtcggacttgcctgtacccgagacacaatctacagaagaacaaactctaccagagcagatacggggattactgcacacatactttcgcccagaattcttaaaccggattgacgaagtgttaatttttaagcgtctcacacggaaacatattcgcctcatcacagacatccaactgcagatggtagtggagcgtttggaaagtcgacatataaaacttcgtgtgcgtgacgcggcgaaagcctatcttgcggagcgcggatacgacgacactttcggagcacgaccactgaagcgtgcaatccaaacggaattggaaaatgccctagcgcgtgagattctcagtggccgattcagaggcggctcaactatcgtggtggatatgtgtaaagatgctctgtgtttcactgaacaaacatcctga

SEQ ID NO: 40200 - DNA, 1617 bp, Treponema pallidum
atgtgcggcgcatccctgggagactgcgtcgggtcgtgtgcgcgtgtcaatgcgttgtatgtagggagagatggggtgggtgcagaaaatgtatggggctgtggtaggtctgcggtgagagagagtgcgcaccgggatggcatctacatcgttggcgcaggattcgcagggagtgtccttgcccgtgagatccaaacgaaaaaagtactcggcacagttattgcttttttggatgacgatccgtgcaaaatcggatcgaatcttcacggtgtcccggtgcttggtcccatttttgaagttgcccggattgtgcgtattactccgcatgatcacgcgctgattgcaattccttctatctccattgagcgtttgcgtgacatttacctgacgctgcgcgctgcggggtttacggttatcaaacttctgccggcgcttgctcaaatcatcgatggtactgcgcatttagtgcaaacacgtgaaattgatccgcaggatttactcacgcgcacaccggtgaccattaatcttaaaaagagcctggcgtacctatgcgggaaacgcgtgttagttactggtgctggaggatctatcggcagcgaactagcctgtcagttgctctctggtgatgtggagcgtctctatttgttcggtcatggagagaactccatctaccaaatcgataaaaaaattcgtaggctgcaggaagagggtgttggatctcgcacagttattgttcctgttattggcgatttaaaggatgctgcgtacgtgcgctatcttatcgagcagctgcgctgcgatgcggtttttcatgctgccgcgtataagcacgttcctatgatggaactcaatcctgtttcagtgattgaaaataatgtcttcggcaccaaattcttgctcgatgcctgtattgcgtgtagggttaagcgctttgtacttttgtccactgacaaggccgtggatcctgtttctatctacggagtatctaagatgctcaacgagaagaatgtcttgtatgctgctgagcgtgtgcgcgatttcggtcacgatgccgcgtatatgtttgtccgttttggaaacgtattgggttcccgtggttctatcatgccgctctttattgaacaaataaagaaaggggggcccgttaccgtgacagatcctgccatgacacgattctttatgactattcccgaagcgtgttcactcgttttgcaagtcggtggagtaggagtaaatggagcgtcgtatcttttggacatgggggagcctgtgagcattatggagactgcgcagcaacttattcgctattttggttacgagccagacagagatattcctatccacgtggtgggcttgcgtcctggcgagcgtctcagtgagccactcgtttccaaagacgagcgtatagagccgacggtatatccaaaggttctgcgtttgcgtgaacgtgaacctttggattttgcgcaccttgaacgcctgtgggatcaactgtatccttactgtttcccttcaggagaaaaggtgcggtaccggcacaaagaaggacttgtccgcgtgctatgcgactcgtgcgcgacactgaaacagcggtatatgccaaatagcgaggcatag

SEQ ID NO: 40201 - DNA, 2223 bp, Treponema pallidum
ttgcgtggcgtatgtgatagagaccgtggtgcgcaccgcacaagaatgtgcaaagggaagagcatatatatgagcgtgttcgtttcagacggtgcgcgcacagggagcgtctatgcacagcttgtccgtgcgccgcgcgttgcaggattgctgctgaacatagatattccctctctccctgacgggtactctttttatactgcagcacatattcccggatgcaatgccgttcggtgtggggaaaatactgtgccggtttttgcgcatggagaggtggtgtacgcaggggaaccggtgggtatcctcattgggcctgatgagcatgtggtacgtaatttagtgcaagatgtggtggtgcatacgtgcgcagagcgggcctgtgcgtcggaaatactctgtggaatcagtgaaggggaacccctcgctcaaaaggtggcggtgcaaggagatgcagaaactgcttttaaacgcgcatcacacacggtatgctcctcttgtacatttgagccgcgtgtacactactttgcggaaatgccagaagtacaggcactacccgacgcgcacggtctgcacgtgtacgctgctacgcagtggcctgcgcacatgagaaaaactatcgcgcaggtactgaatatttctgagcatgcggtgcacgtacatccgcagcaggaagcgctttcctgtgatgggagaatatggttcccctcagtgatggcaagtcaggcggcgcttgcagcctattgtgcgaaaaagccggtacgcttgtctttttcctttcaagagtatgtgcagtactgtcctaagactcccaagattaccattgcacatcgcacggcgctcaacgccgcgcatgcggtagaaggtatgtttgtttttatctccctcgatgcaggagcggggaatttattgatcgatcgtatggttgcgcatatggtccatactgcattaggaaattatgaaattcctcggtaccgcattgaatgcacagcgtttcgttcaaatgttggattaacggatgtttttaatggatgggcagatgcatacacttctaatgcattagaaatgcatattaatcagttatgtgctgagcttcatatattccctgacgagtggcgtgtggcgcacatgaaagatacgcgggaaacacagcgttttgcgcggttgctcgcctatctgtgtgaggaaggagattttcgtcgaaagcacgcagccttcagcatggtcaatgcagtacgaaaagcacatgacacccatgcctggcgtggtattggactcgcgttggggtttcaatatgatccgtctgcgatgttagcccgttcgggtttttcctatgtattacaaatgacgctgcacactgatgcgcgcattgtggtgcacagcgttccgctttctgattcgtttaaacgggtagtggttgcgtttctcatcagagagtttgcgtgtctggaggatgcgatcttttttaaaagtagtgatgaggcgtatggcgtggatctgttgggtccgtctgtggaatcagtggggatgagggtgtttgcacggttggtgagaaagtgtgtacgagcaattcagagacaacgcttcagaaagccacttcctatcacggtacaggggtcctttaacacggccaagaaggggcaggtgtatcaagtggtgactgttgctaagtcagatgtttcggtgcccgatgcgcaatctgagcagtgtgcctcaaaggtacctgtgactgctgatactagcggaaaatgtgaggatatgaacggttttaccaaaatgcacggaatgagcacgcacactcctgcagcctgtattattgaactcgaattagatgcgttgtgcgtgcaacctaagattgtcaggttgtggtttgtttgcgatcctgggtatgtcttttgtgaaaaagatgtgtaccgtaccgtgagtcgaagcattactcgtgcgctttcgcacgtatctgtagaaaagatttgggagcgtgcgcgcacacccgagtatgttatcatcgatccatccgatactcctccctatcacgtcacccttttgagttcaaatgctgctgcgcgtgcggtgggaacggttgccgaaggtattgttcctgctgcgtactacgcagcactgcggcaaattttgccgatttctcaaaacgctacccataaggttccttttgttgcgcgggatattttttatgagatgttttccctcagtgcagacgattctctatga

SEQ ID NO: 40202 - DNA, 447 bp, Treponema pallidum
atgaatttggagaccgtgttgacgccggaaaccgtaagcctgcacctgaagggttctaccaaggaggagatcatcgacgaaatgctcgagatgttcgtccgtgcaggaagggtgagcgacaaggttgctgcgcgggagtgtgtgctcgatcgagagcgaaaaatgtctacggggatgaagcatggcattgccataccccacggtaaaactaattcagtgagtagtctggttgcaggggttggtgtttctgacagtccggttgacttcgactctttggatcaagaaccttgtcgtattttcataatgaccctttctccacttgacgtcactggtccgcacctgcagttcttggctgagatcagtctcctgtttaagagttctgagaaacgtcgggagatccttgatgcaacaagtaaagcggaggttattaaaatcctcaccgagtag

SEQ ID NO: 40203 - DNA, 1065 bp, Treponema pallidum
atgtccgcgcaccggatacgcgcgcgtcggatcacgcgccgtaacgtcccacttgcagagcgatgttctttccgcattggtggcgctgcgcagttttgggcggagccgcgctcctgcacacagctgcgcgcgcttattgaggaagcgcagcgcgcacgcattccgctgtcccttattgggggaggctctaacgtgttaatcgcagacgagggcgtaccgggtctgatgttgagccttcgtcgctttcgcagtctacacacccaaacacagcgcgatggctcagtgctcgtacatgcaggcgcggggttacctgtggccgccctcctggccttttgtgcccatcacgctctacgcgggcttgagacctttgcagggctgcctggtagtgtcggtggtgccgcgtacatgaacgcccgatgttatgggcgtgcaatcgcagattgctttcactctgcgcgcacgctcgtacttcaccccgtgcgttcgcgcgcaaaagaactgccagaggtgagaaaaaacgcacaagacaaaagaggggaatgtcttggcctcgacggcggaccgtttacctgcagcagttttcagaccgtcttcgcgcgcgcgggggattggggctacaagcgctctcctttccagagtcctcacggtgttgaactccatgcaggaaggcgtcttatcctctcgctgtgtgtacgtctcactcccggcaatccggcgcagattaggaagcacatgcaggagaagattgccgatcgtatttcaaaggggcagtttcgctttccgtcagcaggcagcgcgtttaaaaacaacccagcttttggtaaaccgtctggcattctcatagaagaggcaggtttacggggcacctcctgtggggctgcgcaggtagcaccctggcatggaaatctcattatcaatacggggaatgccaccgcacatcaggtgcgcacactcttgcgcgtcgttcggcaacgcgtgtttgaaacacacggagtgtggctcgaacgggaaatcattttttctggagaatctgtgaggatgacttccagttcgcgagactcatga

SEQ ID NO: 40204 - DNA, 1563 bp, Treponema pallidum
atggccttgcgcgtatacaacacccttactcgtcagcaagagcactttcaaccctgggagcacgggcacgtgcgtctctacggttgtgggcctacggtgtacaattatccccatctggggaatctgcgcgcatacgtttttcaggatacggttcgacgtaccttgcactttcttggataccgcgtcacctacgttatgaatattaccgacgttgggcatttagaaagtgacgcagacagtggtgaggataagctggtaaggagcgcacaggcgcatggccactcggtgttgcaggttgcagcgcactatcgcgcagcctttttccgcgatactgcactgctcggtattgaagagccgtccattgtctgtaatgccagcgattgtatccaggatatgatcgcgtttatcgagcaattgctcgcgcgtgggcacgcgtactgtgcaggagggaacgtgtattttgatgtgcgatcctttcctagctacgaaagcttcggttctgccgcggtagaagatgttcaggaaggagaggatgcggcgcgcgcgcgggtggcacacgatacgcataagcgtgatgcacgtgattttgtgctgtggtttacccgtagtaaatttgtgcgtcatgcgttgacgtgggattctccgtgggggcgggggtaccccgggtggcacatcgggtgttctgcaatgagcatgaagtttttaggaccacgttgcgacatccacatcggaggggtggatcatattcgtgtgcatcaccgtaacgagcgtgctcagtgtgaagcaattactggtgcaccctgggtgaggtactggttacaccacgagttcttgctgatgcagctgcaaaagcgcgcagtacatgcggatatgggcagttcggtggtgtcgtctttttctaaaatgtccaagtcctgtgggcagtttttgacgctttcttcgctgcaggagcgtggctttcagccagctgattttcgcttctttttgttgagtggacagtatcgcacgcaacttgctttttcttgggatgcgctaaaaacggcgcgtgccgcccgacggagttttgtgcggcgagtggcgcgtgtagtggacgctgctcgagcaactacaggcagcgtgcgcggcactagtgcagagtgtgccgcagaaagggtgtgtgaatcgcgcgcatcagaatctgagctgctcttaactgactttcgtgctgcgttggaggatgacttttctacgccacgtgctctgagcgccttacaaaaattggtgcgtgatacctcggtgccgccatcgctgtgtgtttcggcactccaggtggcggatacagtgctagggttaggcataatacaggaagcgaccgcatcgctatctgcgcaggttcctgctggcgatacgttgccgcagcgtcctttaccgagtgaggagtggattggacagttggtgcgtgcgcgtgcacatgcacgccaaacgcgtgattttccccgtgcagatgagatccgtcggcagttgaaggctgaagggattgaacttgaagacacccatcttgggactatttggaagcgcgtgtaa

SEQ ID NO: 40205 - DNA, 1011 bp, Treponema pallidum
atgaccttcgttgaatcaatgcagcggcgtgctgtgcttgcgcaaaaacgactcgtgcttcctgaggcctgcgagcagcgtacgctcgaagccgcccgtttgattgtgttcagaaacatagccgcaaaagtttttcttgtcggatgcgagcgtgatatcaaaaacaccgcagacaggtgcggtatcgaccttaccgacatggtcgtcatcgatccgagcgttagcaagcacagagatcagttcgcagaacgttattttcagaagcgaaaacacaaaggaataagtcttgcccaggctgcagaggatatgcgcgatcctctgcgtttcgctgctatgatgcttgaccaaggtcacgcagatgccatggttgccggtgcagaaaacactaccgcgcgcgttcttcgtgcaggcctcaccatcatcggaacccttccgagtgttaaaactgcctcttcctgcttcgttatggatactaataacccccgtctgggaggaacacgtggtctatttattttttcagactgtgcagtgatccccactcccaccgcagaacagttggctgatatcgcctgctctgctgcagaaagctgccgcaccttcattggagaggaaccgactgtcgcacttctttcctactctactaaaggatcaggaggtgatagtgacgagaatatcctgcgtgtacgtgaggcagtcaggattctacacgaacggcgggtggactttaccttcgatggggaattgcagctcgatgctgcgctcgtacctaagattaccgaaaaaaaagcgcctcacagtcctattacgggaaaggtgaacacactcgtgtttcccgatctttcttcgggtaatattgggtacaagcttgtccagcgcctttcagatgcggatgcatacggacctttcctgcaaggttttgcaaaaccactgtctgatctctcgcgtgggtgctcggttgaagatatcgtcgccgcttgtgcagtcacacttgtgcaatcgaatggacgctaa

SEQ ID NO: 40206 - DNA, 363 bp, Treponema pallidum
gtggatcagtcgtttgttgaggaaatgaaagtgagcttagtagagcgcaagcgctcgcttgcgcgttcgctgacaaccaacaatgaagattttcaagcgattgtcgccggggtggaccctaaggattctgccgatattgcctctgatgacatggatcgtaagatgctcgagtctttgagcgcaaaggatctcagatgtctacaacagatcgagtctgcgcttttgcgtatcgaacagggacgctacgggaaatgcgccgattgcggcgaatctatccccgaggatcggctgcgcgccatcccctactcgctcatgtgcattgagtgccaaagcgcgcgtgagtcaaagcggcgtgccttttag

SEQ ID NO: 40207 - DNA, 219 bp, Treponema pallidum
gtgacgaaagaagaagcaatcgaggtggacggagtggttaaggaagcgctgccgaacaccacctttagagtgcaattgcagaatgggcacgagatccttgcgtatctttcaggtcggatgcgcaagcactacatccgtatcgtgcccggagactcggtgaaggtcgcgctctcaccctacgacctctcccgcggcagaattatgtttcgtgagcgttag

SEQ ID NO: 40208 - DNA, 756 bp, Treponema pallidum
atggtcaccgttctgtcacttggaggttccatcgttgcgcctgagacgcccgacatagagcttctcgggcggttcgttcgttccgttcaacggtacctatacgaagacgcctcacggaagctcattgtcgtttcaggcggtggtgcacctgcgcgcacttatcaaaacgcctatcgtgcgctacgccggagcctgtcttctccggcctgtgcgaaacctgcgcacgagggcgataatcaggaagacagggagctgtatgccacggccgaacacgttgaacttgactggattggcatcatggctacgcgtttgaacgcgcagctgctcaaatccctttttggaatcctttgtccaaatccggtcgtgtatgacccgactgcggcgaacgttttttcaggtcaggtgctcgttgctgctggttggaaaccgggtttttccaccgacaccgacgctgtgctccttgcagagcgttattctgcaaagacggttattaacctttccgacgttgcgcatgtgtacacgggggatcctcgttcagacaaggatgcgaaggcgctcacatccctctcctgggatgatttcctcctccttgtcgacaaggagtgggtaccgggcagccatgtcccctttgacccagtcgctagtgtccgggcaaaaaagtcgggaattcaggtcatttgcgcaacagggcgtgacttaccgaatttggagcgcatcctgaacaggcaagagttcgtggggaccaccattgggtaa

SEQ ID NO: 40209 - DNA, 1974 bp, Treponema pallidum
atgctctctacacttaatcctgagcaacgtcgagccgttaccacacttgagggaccgcttctcattatcgccggcgcaggctcagggaaaacgcgcgtaatcacggcgcgcatcgcgtatatgctcgaatgcggtattctgcaatcgcgcattcttgcactgaccttcactaacaaggccgcacacgagatgtctgaacgtattaaagctctcacgggcaaacctttacgcaacacgaccgtcagtacttttcacgcttttggcgttacgattttgcgagaacatatccatgttctcggctggaggaagaactttagcatttatgatgaaaatgataaacgtgctctcattcgcgaagcagcaaaggaagtacatctcctgccagaagttcttgacacaaactgcgtgagcacgctcttttccgctattaaaatgcagcgtaagaacttaaaagagctacagcacaaggaacgtgctctttggcacgaatatcatactgcgttgaaattatttaatgcggtagactttgacgatttgatcgtactgccaatccagatcttcagtgaatatcctgatatccttgcttcatataagagtcgctatcattacattttagtggatgaattccaagacaccagtgcacagcagtaccgtttaatgaaaatgctcgctacacaaaatatctgtgtagtaggggacgatgatcaatcaatttattcttggcgtggagcacaccacgacaatattctctcttttgaaaaagacttcccctacgccacagaaattaccttagagcaaaattaccgttccaccggaactattttggctgccgcaaatggcgttatcgcacacaatacacaacgcaaggaaaaggcactgtggtccggtaacgattcaggaaaacctattgaaatcttcaatcccgaaacggaacgtgatgaagcaatctttattgcaaacacgattctcgcagaacaaatacgcgcatcctattctttcagtagttttggagtcctactccgcacgaatagttttatgcgcataattgaagacgtatttttgcaagaaaatattccataccgtgtctcaggcggcatgagcttttttcagaggaaagaaataaaggatgtgctcagttatctgcgggtaatttctaatcctgacgacgatgtcaacctattacgcatcattaataccccgaggcgaggaattggaaaaaaaacactgcatctagtctccgacattgctaatacacaacaatgttccgtgttcaatgcactgaatcaaattatcaataaaacacatgcagtcgatttaaaagaatcacatcgtaccgctgtggaaaattttctccagctcattacccaggcgcgtacccatctactttcggggaaaaatcttgcgtacaaggtacgcaaatttgttgaagacattcagtattttaattacctcatccaagaattccaaaaaaacgaacatgccgcacgttttaaattcttgcaaatcgaacacttagtcgaatccatcgaacactgggaacagagttcagaacacggaagcttgtacgactacctaaaccgcgttacgttgctagcacgcgataacgtccaaaaagaaacagagggcgctgtgtcgctcatgacaattcatgcgtcgaaggggctggaatttcccgtagtgtttatcgccggcgtggaagcgggaaccattccacacgaacgaagtatagaagaggttcacagcatcgaggaagaacgacgccttttctacgttgcaattacccgcgcaaaagagaagttgtacctgacacactgccgcacaaggaaacgcggcggaaaaagggaagagcgcaccgcctccccctttctggacgaaattcccaaacacctggtgcgcgcccatgcaccggaaggaaaaataagcgaggaagaggtcacgcgggccttcacacgcatcaaaaaactatttacgtga

SEQ ID NO: 40210 - DNA, 1824 bp, Treponema pallidum
gtgggtaatacttcagattgggtagagatggatggattgcgctatgtgtatgccgcgcagggtgcggcccccatgcctgctcctacggataatcctgcttgtgatgcgcacatgtcgcatgacgtcatagcgcgtactgcccaagcagtttttggtattcgtgcgctgtttccttggcagcgcttggtaattgctaacatactggatgcggcgcatgcgtgtacacatacaactccgttcgctgcggcaggttcttctcaaaccgatgctacgagggtgactcatgtggatgacgcgcagcctgaggataatttcgtcggtgccatgcaagacacacgttttgatcaggatggcgtgtcacgcgcacatcaagtggtgctattgccgacaggtgcaggaaaatcgctgtgttttcaagtacctgccctctttttagaggggccgacgctagtggtgtacccactgttatcgctcatgcgtgatcagtgccgtcggatgcaggcagtgggattttcggtcatcttgttacgtggtggactgaatgcgcaagagcgcgcgtacatgtatgcgcagttggataggtgtgctgaggcgtatggccggatgcgaggcgttacgcctcctgcacaccagacggcagaattttcccttgcagattcgatctcttttgatgcgtcactcttctctgatgacgtgagtaccttctcgaaggtggtacatgtggatgaacgtcttgctcagaaaaggacagaaagtcgaagaggtgtatgcatcatcgcaagtccagagatactcacacaacctgcgctgcgcgcacgcgtgcgtgcatgtcgcgttgcgcatttggttattgatgaagcgcactgtgtgtccgagtggggagattcgtttcgtcctgattacgtgcgactaggcgaattggtgcaggatcttgcgcctcaagtggtgactgcatttacggcgactgcaagtcaaacagtgcttgcgcgcatcatggaagtgctgtttggcggtcgtgcgcacgtgttgcagggaacagtagatcgcccgaacattcgatacaccgtacgcacggtgctgtgtaagcagacggcactgactcaacttgtagcgcgttgtgtgcgccctgcagttattttttgtgctcgtcgggtacaggtggagcgtgtagcccaccatttgcgcacgtgtctttctgacacacagatacgtttttatcacgcagggttgcagagggaagaaaaagaaacagtggagcgatggtttcatacccatgattctgccgttttggtaactacttgcgcgtggggaatgggagttgataagccgaatgtacgtacggtcattcacgtggatgcgccactgactgtggaggcgtacgtacaggaggttggaagagcaggacgggacggaatgcgtgcagacgcatttttattgtggtcacctcgagatgctcgctcgatagaaacactgccgcatgcacaacgggtgcgtgcgcacgtgttgcgccactttgctgaaagcggacgttgtcgccgcgcagttttacttgagtctttgggggaacagaatgtgtgtgccggatgtgatgtgtgtgcaggcactgcacgttttgtatgtgaggatgtagaagcgctcttacagtttttgaaaaagaatgcgcgcagattcactgtatcatcgttggtgcagcacctcgcgctacatcagaaagtgctcagtgtggcggatgtacgtgccttgctatattacgcgctcgaaacaggacgtgtgaaaaaaaaacattcactcttgtggggtgatgtcctgtatgttgcacgttaa

SEQ ID NO: 40211 - DNA, 1782 bp, Treponema pallidum
atgaaaaggtttattccccatcgggtgattcacgcggtgtgtatcgggcttgcacttgtaggttgtaggaaactcgattctcgtgcgggggattttgagttaacgattatacatatcaacgatcatcattcgcatttggaaccagaacccttagagcttgcagtggcaggggaaagactcagagcggctgtaggcggttatgcggcgcttgtgcacgagatacaacggttgcgtgcggagtcgaagaacgcattggtactgcatgcaggagatgcactcataggtacgctgtattctaccctctttagagggcgtgcggacgcggtgctgatgaaccatgcaggatttgatttttttacccttggcaatcacgaatttgataatgggaatgagggactcaaagaatttctgcactatttggaagtgccagttctctctgcaaatgtggttcctaatgctgccagcacgttgcatggcttgtggaagccgagcgctattgtggagcgtgcaggtgagcgtattggggttatcggacttgatacggtaaagaaaaccgtggagtcatccagtcccggtaaggatatcaattttattgatgagatagaggcggtgcgtcgtgcaactgttgaaatgcagcagcaaggagtaaataaaataatcctcctttctcatgcaggttttgagaagaactgtgaaattgctcagaacatttctggtattgacgtcatcgtgtcaggtgatacccactaccttttgggggatgaatcactcggacggctaggtcttccggtagttggtgaatatcccagaaagattatgtcccctgcaggggagcctgtgtatgtggtagaggcgtgggagtatggtaagtgtctgggcgagctgaacgtagtctttgaccgaacaggagtaataacgagtgcagtaggcatgccgcgttttttgttacatacgaatacattgcaaaaaaaaggagcggatagaaaaaattatcctcttgaggaggcagagcgtgaagcgctgcttgtggcactgaggatgacgccagagattatatttgcgcaggagaatgatcagattatatctgtgttggaagaatttaaaaaggaaaaggaggcgcttggtgcgcaggcaattggcgtaattaccggtgcctcaatgcgaggtggttctgtgcatcgagttcccgatgcacagaatccacagggttcggttgcaacgcggtttgtagcagagacgatgctctcagacattcaaagttttggtgcggggaaggtagattgcgtaattcaaaatgcaggcggtgcgcggtcaaatattcagcctggtgagattacgtataatgacgcatacacgctcctcccctttagtaacacgctggtgttggtggacgtcagcggtgcagagttgaaacaaattatagaggatgcattgcagtttgcacttggtgatggttccacgggagccttcccctatggggcgggtgtccggtatgaagcgcgccaagaaccagatgaacatggcaaacgagtgataaagcttgaggtgcaaaaaaaagatggagcgtgggtgccagtagatgagcgcgcgccgtatcggttgggtgtgaactcgtacattgcgcggggaaaagacggatataaaacgctcggagagattgtcagtacgcgcggagctgaggatacgtatctgcgtgatgcggagtctttgattaagtttttgcgtgcgcataaaaattttcgtgcatacacagattccaatgtgatattccgtcttaaatag

SEQ ID NO: 40212 - DNA, 2994 bp, Treponema pallidum
atgcaagagaaaaaaacgctttaccttcttgatgcctacggacttatttatcggagttaccacgcgttcgcgcgtgcgccgttgattaacgacagcggtgcgaatgtttctgccgtatatggtttttttcggagtttgcacacgctcctgtgtcactatcgaccccgttattttgttgctgtttttgattctctcacgcctacctttcggcacgtacagtacccagcctataaggcaaaaagggataagacttctgcagagctttatgcgcaaattccccttatcgaagaaatcctgtgtgcactgggcattacagttttgcgtcatgacggctttgaagctgacgacctcattgcaaccctagcaaaacgagttgcggctgagcactgtcatgttgtgattatctcctcagataaagatgtacttcagcttgtgtgtgatacggtgcaagtgctcagacttgacatagatcataagtggacatgttgcgacgctgcgtacgtacagcaacggtggacggtcatgccaacacaattacttgatttgttctctctcatgggagattcctccgacaatgtgcctggtgtgagagggattggtcctaagacggctgcacatcttctccactgttttggcacacttgatggtatttatcgtcatacctattccttaaaagaagcgctgcgcacgaagatagtgtgtgggaagaaagatgcatttttttctcgttcactcattgagttgcgtgacgatgtaccatgtgttttttcgctcgaagattcctgttgtattccgctcgatgtaacgtctgctgcacgtatttttgtgcgagaaggattgcatgcgcttgcacaacaatatcgtgcttgtgtgcaagaaatagatacagaagcaacaaacgatacattacaaatgacagagtcttctgtgctcacgtctggtcgatgtgcaaatgagtgtttcttatctcaggtagaagggagggctagtacaccggaggtgaactccgtattgaagtcggagttgaagacgagtgctgtgtctggcgccatacctatagaaaatagagatcttaggcaggatgttatgcttgcacgcagtgcaggtcattatcgtggtgttactgaccctgtagaacttaaacgtattattgattgcgcgtgtgcgaatggtgtggtcgcgtttgattgtgaaacggatggattgcatccgcacgatacacgtctggtcggattttcgatctgctttcaggaagcagaggctttttatgttcctcttattgttccggacgtttctcttcataccgagtcaactcagtgtacatgtgcacgtagcactaatgtcgagactgaaaaggagtgcacagaacagcatggggtatctgcatctgctgtgcaggatccggcatatgtccaagctgtcatgcaccagcttcgacgtctttggaatgatgagacgctcacacttgttatgcataatggaaagtttgattatcacgttatgcatcgtgcaggcgtttttgagcactgtgcatgtaatattttcgatacgatggttgcagcttggttgctggatcccgatcgcggtacatacggtatggatgtacttgccgcatcattctttcagatcagaacgattacatttgaagaagtggtagcaaaagggcaaacctttgcgcacgtcccttatgagtgtgcagtccgctatgcagcggaggatgcagatattacttttcgtttataccattatttaaaactccgcttggaaacagcaggattgctttctgtgtttgagaccatagaaatgccgcttttgcctatcctagcacgtatggaagaagtggggatttttttacgtaaggatgttgtgcagcagctcactcgatctttttcagatttgatccagcagtacgagcacgatattttttctcttgccggtcatgaatttaatattggttctccgaagcaactgcagacagtcctttttcaagaattacatttaccgcccggtaaaaagaatactcaaggttattctactgatcattctgtattgaagaaacttgcacgtaagcatcccattgcagaaaaaatattgctctttagagatctttcaaagttacgttcgacgtataccgaatcgcttgcaaaacttgctgatcaaacagggcgtgtacatactagctttgtgcaaattggtaccgcaactggaaggctttcgagtagaaatccaaatttacaaaacattcccattaaaagcacagaaggaagaaaaataaggcaggcgtttcaagctactgttgggcatgagttaatttcggcagactatacacaaatagagctggtcgtgttggcccatctatctcaagatagaaatcttctcaatgcatttcgacagcacattgatattcatgcattgactgctgcatatattttcaatgtgtctatagacgatgtacaacctgcaatgagaagaatcgcaaaaactattaactttggaatcgtgtatggaatgagcgcttttagattgagtgacgaacttaaaatttctcagaaggaagcgcagagcttcatttaccgttattttgaaacgtacccgggggtgtatgcttttagtacacaggttgcagagcagacacgtaaaaccggctatgtgactagcttggctggaagacgacgctacatccgtactatcgatagtcgcaatacgcttgagcgcgcgcgtgccgaacgtatggcgttgaatactcaaattcagagttctgcggcggatattgtgaaaattgccatgatagcaatccagcgtgcgtttgcgcgccgaccgttacgtgcacaattgttgctgcaggtacacgatgaattgatttttgaggcgccagctgctgagacagcgatagtgaaagaaattctctttgctgagatggaacatgctgttgagctctcgatcccgctgcgtatacacgtggagtctggaaatagttggggtgattttcattag

SEQ ID NO: 40213 - DNA, 1578 bp, Treponema pallidum
atggctgcaggctttggctcccgttgcgtgcctcttacatacgctactccaaagggcctgctgaaagtctttggtgagcccatgattgagcgtcaaattcgtcagttacacgaagtcggcattactgacatcacggtcgtcgtcggctacctcaaagaggcctttgagtacctcgtcgacaagcatgacgtgacgctcacctataaccctgactatgaaactgccaacaacctatccaccctctaccacgcccgtcatttacttcgaaatacctacatactctcaagcgataactggctacgcgaaaacatttatcactcccatgagtgggattcctggtatacggctgtcaagacacaagggaaaacaaaggaatgggtgttaaaaaccggattgtacgacaaaattaccgccgtgaaaattggtggcagaagtgggtggatcatgtacggtccagcttacttttctgcatcgttttctaaaaagatcatccccctcatcgaagctgcctacatgcgcccagaaaaccgcgcgtggttctgggaagacgtctttatgcgcaatacaaaatcccttaccatgtttgccaacaaacaggctgacaaccttatctacgaatttgagtcgctcgatgagctgcgcaagtttgattttgcgtacatggtttcgagcgataacgagtggatgcgcgtcatttcccatgttttcaaccaacccgaaatgacaatcggtaagctgcgtccacttaaagcaggaatgacgaacaaatcttttatctttgagctgaatgataagccgtacctattcagaattcctggagagggtaccgaactccttgtcaatcgcttccaagaagctgccgtgtatgaagcaattaagccccttaatatttgtgacactctcgttcaccttgagcctgcccgtggtattaaaatcaccgtcttccacaaagactgccgcagtgcaaaccctagtgatccggcagaccttgacttgtgcatgaggattgcgcgcaaactccatcaatcaggtatttgtgttgcccataggttcgacttcagatcgcgtattgcgtattacgaaaagcttgccctcgaccagtacagtattctttacgctgactatcgttcagtgagagaaaaaatgaatacactcttggctattgtcgattcagtggacaaaccgtgcgtacttacgcatgtcgatctaaccccagataacttcctgctttgcgatggcagtgcccagctcatcgattgggaatatgcgggcatgtgtgatccgcttgtggatatcgcgatgttctctttgtatgcccactttaacaccgcccagatagaagatctcatgtatcgttattttcagcgtaatccgcacggagaagagcgcctgcgcgtcttttgctatattgctcttgggggatttttgtggtctttgtggacgagctacaaacaggcgcttggtatctcgtttggagattatggactgaaaatgtaccgatatgcaaaagaatattacgaagcagttcagacgctcctgaaaacacatagggcagatcatgcagaaagaaaaatgtga

SEQ ID NO: 40214 - DNA, 1386 bp, Treponema pallidum
atggcacatcttcctaaagagtacgatttttctatagagtcattgggggaaagcaaaattccctctcccatctacctgtctcacacccttggcgacttcattcctaactacgtcagtgacaatgagtacatcagccatgaactgagtgcgcgtctgggggagacggtagggccctttactcataaaaacttgatggagcgtgcgggcccgcgccagaagattttcttcaacccgcatcacgttcatgcaggtattgtcacctgtggagggctctgtcccggcctcaacgatgtcattcgcgccatcgtccgctgcctttggggccgctatggcgttaagcgcattagtggtatccgctttggctataagggcctcttgcccgattacaacttcgatatcctgccgctcacccctgaggtcatcgataactgccacaaaacaggtggttcgctgctaggcacctcgcgcggtggggggaaccgtgtggttgacatcgtcgatggtatcgagcggctcaacctgcacattctctttatcattgggggggatgggagtcagaagggagcaaaagagattgccgacgaaataaaacaccgcaaccttaagatttccatcatcggcattcccaaaacggtggacaacgacatctcttttgttcaaaagtcatttggcttcgatactgctattgtcaaagcaacagaggcagttgccgcagcgcacatggaggctcgttcacagattaacggcattggactggtcaaactcatggggcgtgagtctggattcatcgctacgtacacggcgattgcgagccatgagacaaacttcgtactcatccctgaagtgagctttgaccttgacggtccaaatgggcttttggctcacctagagaagcgaatcgcgctacgtaagcatgcggtgctcgttgtagcagaaggtgcggggcaagacctaatggtaaatgcggacggtgtgccctccggtgattcccaaggaggtagtttgcgcgtgagcagcggcacggatgcgtcgggtaacaagcgccttgcggatatcggtttgttcttaaaagaaaagattggagtctatttcaaagaaaagcgtatacacatcaatttaaagtacatcgatccgagctacttgattcgttccgcggttgctgcgcccatagattcgatttactgcgaacgcctcggtaacaatgcggtgcatgcggcgatgtgcggtaaaacgaaaatgatcattggcttggtgcacaataagtttgtacacctcccaatcgatgtggtggtgtgccaacgcaaacacgtaaatcctgaaggatcgttgtggcgcgacgcccttgatgcaacaggacagccgattgtgatgaaaaatattatctag

SEQ ID NO: 40215 - DNA, 987 bp, Treponema pallidum
atgcgaataccaaagtggactccagcaacgtggagcgtggtggcaggatgcataggtggggtgctcggtatcgtgattgttggaattgcctcccctattaggatcatttctcccactgataatggggtggtcacccgttttggcaagtatcatcggacgctagaaccgggattgcattatcttatcccctttgtagagtgggtgtataaagtgccggtaaccaaggtgcaaaaggaagagttcgggttcagaacgtcgaagagttccgagcagagtcactatgtgaataatatcagtcacgagtctcttatgcttacgggggatttgaatattgtagacgtcgagtgggtggttcagtatcgcattgtagatccaagagcatgggtgtttaatgttgagtcccaggagcgaaggcaaaccattcgagacatttcaaaagcagtggtgaacagtttaattggagatcgagcgattcttgatatcatggggccggagcgcagtgcgattcagatgcgtgcgaaggatatgatgaatgttctcctgaaaaggattggcctaggtgttcttgtttcctccgtgcagctgcaaaatgttgttcctcctcaggaggtacagcaagcgtttgaagacgtgaatattgctattcaggatatgaatcgactcattaacgagggaaaagagtcctacaatagggaaattcctaaggcccgaggtgacgcggacaagttgattcaggaggctatgggatatgcgaatgaacgcgtaaatagagcaaaaggagatgtagcacgttttgactcaatctatgctgaatatgtcaaagcacctcatgttaccaaaacgcgtttgtaccttgagggactgggggctatcctggaaaagactgaaaatgtgctgttgattgacaaaaaactggagaatcttttaacgctcaaggatatcagtaaggtatcgaagaaggtcgtggcaggaacacgcgaggagtag

SEQ ID NO: 40216 - DNA, 660 bp, Treponema pallidum
atggcgaaccagacactgtggcttttagtagctcgtgcaaccggacagacaagtctgatggtgtgtgcttcagcaagtattgcgctagcagcgggaaccccgttggggatattgctgtgcgtaatgtcgcctggacacgtgtgggcgcatcctgcgtggcatcgtgtgttaagttcgtcaatgaacgtgctgcgcgctttcccatttgtgattttgctggtggtgttgcttccgctctcgcgtatgctcacaggacgcacagtgggaacggcggcggctatcctcccgcttgcgatagctgcgctccctttcgtggcacgggtgattgaaagtgctctgctggaggtggagccagggataatccaagcggcggtggcaatgggttcaagcatgcggcaacttgtactaaaaatcatgctgcctgaggctgctcctgcatgtgtttctggtgtagcactgatggtaattaatctaattggatactcagcaatggcaggggcgattgggggaggaggtttaggagacgtagcgatccgctacgggtatcagcgcttccaaccagaggtgatgacaatggcagtgcttgcaatcctggcgcaggttgcgctaacgcaatggatcgggcgtataatctgtacccgaatacgagcgcgcaggtag

SEQ ID NO: 40217 - DNA, 1107 bp, Treponema pallidum
atggcggtcaattgtggcattatcggtctgccgaatgtggggaagtcgacaattttctccgcgctcactgcaaacgtcgtggaggcggcgaattatcccttttgtactatcgaacctaacgtgggtatggtgacagtacctgatgtgcgtcttgaagcactggctggtcattttcggccaaagaaaacggtgtatgcctccattgaatgtgtggatattgctggtttggtaaaaggtgcctcgcagggggagggattgggcaatcgttttcttgcgcatgtgcgagaggttggagtacttgcacatgtggtgcgctgttttgagcatacggatatcgttcatgtacataataaggtcgatcctctttcagatattgaaacggtgcatatagagctggcattggcagacctggcctcggtagaaaaacgggctgtgcgtgctcaaaaggagtcgcgtatgggaaagtcccttcaaaaggaaagcacgctggtattacgggcactcgatacgctgcgcgaatatttagaaatgggaaaggcggcatgtatggcgccgctgtcggatgaggagcgcaacgcggtgcgcgatatgcgcttgttgacaatgaagccgcacctgtacgtgtgcaatacagacgaaagcggcatgcagtacggaaatgatttcgtgcgcgcggtgcaagagcacgcacgtgtgcataacacgcaggcaattgttatgtgtggaaaatttgaagcagagcttgcgcagctttctgatgtggcagagcaaaacgcctttttgcaagaattagggttgcgcgaatcaggacgtgcggcgcttgcgcgcgcagtgtattccctgatggggttgcgtaccttttttaccgcggggcctgaggagtgtcgcgcgtggaccattcgggcagggctgcgtgcaccgcacgcggcaggagtgatccacagcgaccttgagcgtggttttattcgtgcagaaacgtattctttcgatgatcttgcgtcctgtgggagtgtggcaaaggtgagggaggcaaaccgcgttcggcaggaggggaaggaatacgaggtgcaagacggggacgttatcttttttaaattcaatgtgtga

SEQ ID NO: 40218 - DNA, 1728 bp, Treponema pallidum
atgcgccccatgcatattggcaatctcactcatcttacgatgctcgtgttgtgccttgcgattcgtttgtgtgatcaattcctcccgttctcggtgcagtttttcacgattgtaggagacgtggggatcttggtgcttgtatggtcttcccttgcttcttccctgaacaaagagaagtatgtgcgcacctttctgcgccagtacaccgtaccagtgttccttggattgctcatcacgctccttaccttcgtgcgtgcaagtgtgacgcttaccactgcctccggtgatctttacaccacgctgacacatatacagaatattacgctcggtatctttgcactcatcgccttcaaagcacaaaagaagtttgcagagcgggcagtatctaatccatcacagacgttaattgtttcctttttggtggtaattttcataggcacacatcttctgatgtttcccggtgccacgccgcatagtcagcccctccccatgctgactgccttgttcactgcaacatccgcggtatgcgtgacagggctctcggtcattgacgttgcaacgcagctgagtacgtggggaaaagccatcctcgctgcactcattcagattgggggactaggatttatggtgttttcgttttttggtatgatcaccataaagaaaaagatgagcctcgaaagcagactcgtcgcctcgcatctggtgagcgacagtgacatgggcagcctatcccataacctaaagctcattattttctcaacctttttcattgaagcgctcagtgcgctgtttctattcgtcggttttagccaaacagaaggctataccatacagtctctcggcaatgcctacttccatgcgatatctgcgttttgcaatgcggggttctccctgtacccaaacagtttggaatcgttcgtttccaacccatggataacgttccccattgcctttaccatcatattggggggaatcagttttgtggtcatcgatgaagtactgtgccgtgtccacggaagtatcaaaaacattttttttaagggaaaaaatatcctcggctctctcagcctgaatacttttgtcgtgttgaaagcaactgttctgcttcttgctgtttcttttgttggtatctatctactcgaacatactcactccatgaaagtctatcaggtaggcacgcagtacctggccgccttttttcaagcggtgacgctgcgaacggcaggattttctactatcccgttttcaaacctccgtacggcgacgttgttttttatgacctttattatgttcgtaggaggagcgtcagggagcacggcaggggggatcaaacttaatacagcggcagcgattatcgcttcttttcgctcattcatccatcatgatccaaagccacgcattagaaatttagttattcagggtaagcaggttgagcggtcgtttcttattctagggttcggtatttgcacagtgtgccttgcaggtttctgcttgagtttgacggataacatcccgttcatttaccttttgttcgagtcggtttctgcattcgcaacggttggtctttcagttgggataactgccaatctcagtactgcagggctgatgatcctcttaattctcatgtttaccggcagggtaggaaccttgactattttaactgcagcaagtaaagaagaacaggatatgagcgtcgaatacgcgtgtggggacttagccattggttga

SEQ ID NO: 40219 - DNA, 534 bp, Treponema pallidum
atgtctgtgcatcagggtgggatacgttttcccttgctgtatctagagatggaaacaccgctcggtcgtatgtgcatagccgagcgagcgcacactattgtgtatgtgtggttccatcgggttggtccaagaggatctcctgtatctggtgtgtgcgcgcagcacgtgtgcccgggtaaaacggcgctcttgcgtgagacgcagtcccaaattcacgcttacttttgtggagcgctgcgcgagttttcagtaccggtcacggtagagggcacgccttttatgcaacgcgtctggggcgccacgcgcaacatcgcgtacggcacgacaaaaagctatgcacagctttcacaggacatcggctgtccacgcgccgcacgcgcagttgggcaggcattgcatcgcaacccgctgcttttgcttattccttgccatcgggtaataagtgcgcgtgcatcaatcggcggttttgcgtacgggagtgctctcaagcattttttgctgcagcaagaggcggctgtgtgcgcatgtgaatga

SEQ ID NO: 40220 - DNA, 1008 bp, Treponema pallidum
atggctcaccgtatgcgtgttgtcttctgctgcgctgcagcgttgtcgctctgctgctgtagtcgcagccggacggacgcgccgtcgcttgttatctatgtctacgactcctttgcttctgaatggggacctggccctgaacttgcgcggcgcttctacgcgaaaacagggtattccgttcagtacgtggtgtttgaggacgtcacgcgcgctattcatcgtgccatccgcgatcagcacacgccgtcatccagaggtgccgatcttatcatcggggttgaccaatacaccctcccccttgcgcgtgaagcagatctcttcagtccctaccaaccggcccttccgcttcctcacgccttgcgcatagacccacacaacctcgcagtcccctatgactgggggtacgtcgccttcatgttcaacacagacgctgcgcttcccgagccacagcggctttcagatcttgcaaatcccgtctacgcaaaaagcattgcacttgcagacccgcatactaacgtgcttggtacgatctttatcggttgggcccacacatcactcggcgctgcatggcctgcgttctggaatacgctctatcgcgcgaatctccttgcgctcgccccgagctggagcgccgcatacggcttgttcaccgcaggggaagccgcactggtacttagttacaccacaagtgcagcgtaccacctgcaccatgacaaccatacgcgctttaaacctctcctctttcccgagggccaccccatgcatatcgaaggtattagcctggtgaagcgtacgaaacatgcgcgggttgctactcagtttatcgactttctgctcagcactgaagcgcaggagctccttcccctcactcagtggatgtacccggccaatcctgacgtaccgttgcctgccgcattctctgcagtccctcaacctgctgcctgcgtgtctctctcgccgcagatgtgccgcgctgcagcagcggcattacacgcatcaaccccatga

SEQ ID NO: 40221 - DNA, 594 bp, Treponema pallidum
atgagtaagtacacggttaagcgcgcgagtgtattgtgcatttttggcataggactatttgttcctgcaaccggaacctttgcctgcggtctactactcgtacttggcttttgggttctatttttttcctcgctgctggcgagatttctctcacagttttttatgcgcacgcgcagcgctcctttgttcgaggtctgtcttaccctctcagccaccattatgtatgacaacttgatccaaggctttttcccgcttgtgcgtatgatgctgtgtccttaccttttcattaccgcgctttcgcgcacactcgatctctgtcttaccgcatacgatgcagatgccgaatcgctcgaatgcgtaggtgtcttcggcatcatgattgcgggaatttctcttgtacgtgaattagttgccttcgggtgcgtttcgctaccggccccgtcggggttcttgcgcatcatctcttttccacccagcaatgtaatacgctttgcagccaccggcgcagggaccctcataagctgtggtattgttctttggatattccgcagtgcaggtaacgaccacacgccctctttaaggagtgaatggtga

SEQ ID NO: 40222 - DNA, 405 bp, Treponema pallidum
gtgaatttttcgctggaattccccgtaagatcctatgagctagacggatacggacacgtgaacaatgcggtatatctccaatattttgaatatgcgcgcgccgcttttttgctccacatagggttcgacctcaaacagttgcacgaagcaggttacgctttctacgtaacccaggcgcacattcactaccgcactgcagtgcatctattcgatacgttgcgcgcccgggtaaaaccattaaagctcggaaaagcttccggcgtcttttcacagacgctggagaaccagcatcacgtgctatgcgcggatgcggaaattacctgggtgtgcgtttcgcgcacaagcggcaaaccaactaagattccccccgagtatctggtacctgcgctgtatccgaactactag

SEQ ID NO: 40223 - DNA, 1854 bp, Treponema pallidum
atgtctgcgttttttgcaccaaccctgcggtctgcacctgctgatgcaaccatcgcaagccaccagctgctcatgcgcgcagggtacgtcagaaaaatcgccaacggcctgtttgcgtaccttcccctgggcctgcgcgttcgacacaaaattgaagcgattattcgggaagaactcgaggctatcgggtgtttggagtgcaccgcgcctgtcgtgactcctgcagagttgtggaaggaatctggccgctggtaccgcatgggcgcagagcttttgcgcgccaaaaatcggctcgatcacgagctccttttcagtccgactgcagaagaatccttcaccgctttggtgcgcggcgactgtacttcctacaaacattttcccctcagtctctaccaaatcaacgcaaaatatcgcgatgaaatccgtccgcgttacggactgatgcgcgcgcgcgagttcaccatggccgacgcctattctttccacacagactgcgcatgccttgcgcgcacgtacgaaaagtttgcgcacgcgtatcgcgccattttccgtcgcatcggcctatcagtcattgcagtacatgcacacctcggtgcgatgggggggcaggaatccgaggaattcatggtagagtccgcggtgggcgacaacacgctcctgttgtgtccccactgcacctacgctgcaaattgcgaaaaggccgtcggacagcgccccctcccagacacgcatgacactcatctaaaagacgaacacgaagggtcagatctcaagacgcctgcagcaatgcgcgaggtgcacaccccgcacgtgaaaactattgaggaacttgaacacttcttgcacgtacctgcacatcgctgcatcaagacgcttatttaccgcattgacacggtgccccaggcggctgggcattttgtggcagtgtgcatccgcggcgacctagaactcaacgagtcaaagctcgaagcgctcctgcgcgtgccatctgtagtactggcaactgaacaagaggtgtatgcactcagcggcacccccgtaggattcattggtccggtaggacttgcacagcgtgctgcagctgcgtatgccgctcgcacccctgcgttcttcccctccgctgctgagcctgcatccgtcacttctgacattccatttttttccctcgttgcagatcagtccgtgatggctatgcacaacgctatcaccggtgcgttgaaagttgacacgcatcttgtgcaggtagaaccgggtcgagactttgttcctgacgcagttgcagatctcatgctcgtgcgcgccggcgaccggtgcatacactgtggagcgcccctatacgaaaaaaagggtaacgaactaggtcacctctttaaattaggggacaaatacacgcgcagcatgcaccttacctttactgatgagcagggtgtacgacagttccccctgatgggctgctatggcattggccttgatcgcacgcttgcctctgtggtggaaaaccaccatgacacgcggggtatcagctggccgcttgcgatcagcccctatgcagttgtgctcatacccatccctcacacgcaggccccctatgcagcagcagaggcactgtacgtgcagctgcggacacggggagttgaggtactgtttgatgatcgtgcagagcgacccggagtaaagttcgcagacgctgatttaatcggtattccccttcgtgtggtactgagtgcgaaaacgctaccgcgcgttgaatgcacaacacggtgtggtgcgcacacgtatttttttacgcaagaagaggcgtccgagcacattgcacgcctgctcgaacaactcgcttccccggaaagttcgtaa

SEQ ID NO: 40224 - DNA, 810 bp, Treponema pallidum
gtgacggtcggcgtttttgctgcactgggagaggaggttgcgcgcgtacgtgagtgtctcgggggagtaggtacagagcgggcagggctcacgttctatgttgtgtcggtgggtgcgcttcaggtggtgtatgtgtgcggcggtgttgggaaagtgaatgcagcgctttgcactcaactactcatttcggagtttggtgcgcgtgtgcttatcaatacaggaattgcaggtgctctcgatgagcgcttgtgtgtttttgatgtgctagtttctgtcgatgcagtgcagcatgatgtagacgttaccgcttttggttaccagaaagggcgtattccgcgcatggattctgtagagtggactgcgaacacggcattgcggtatttggtgcgggaagcctttgatctctgcacacgggatccggagtggaccgagggtgcttgtgcgctctctggctcgggggatccgccttctcgcgtttctcgtttagtcgaagggcgcgtcgcctcaggggatcttttcgtgtcagatgcgcaaacacgtgcacgcattatacgcgaatttggtgcgcatggtgtggaaatggagggggcagcctttgcgcatgtagcgtcagttaatggcgtcccctttgttattatacgctgtatatccgacggtgcgggtgctgagcaggatgtctctatgagttataaagagttttcgacgcgtgcggcgcggcgttctgcccttttgacgttgcgtgttcttgagcgtctcagcgctttacgcacatcggtagtggcttctcttttcccgatggtcgtggtgtaa

SEQ ID NO: 40225 - DNA, 927 bp, Treponema pallidum
atgggtcttatcgcgcgcgcttcccgcatccggcgtagctcgggtgtctcctgcgagtactaccgcctggagctgcagttcgtacagctggttgaatctctcggaattccccgcgcgggttttctctttctcactgaagagcgcatgtttgacctgcgtttccccttcgggattgacaccaccacgttttaccgtatgcgtgttcccacctccctcctttcgcccggcctgcctgcggagcagtggacgaccctgttcaggcaggaacttaccgaattgcagggttacttctcttcccatctattcagcacgctgcgtgcgctccacttgtatccgttttccgctggaagcgtgcgcgtatacctagtgctctttgatacccgaaccgacgtcgaggaaggtgccctcgctgcagaccttcacggtgatgcatcaggcgaggagcgcgtgcgttcctttatccttgccgtacaggcgcgcttctcgtttatcgaggcgagtaggcccgtgtatccgcgacagccggagttggcaccgagctgctcccagctcgagttcgccctgaacaatcagcggatggcaaacctgttcactatcagcatcaaccagagtgcgttgccccccgccgttcttcaggaagagctgagtatggtacgccgctgctgtgcgctgagcaaccagctattaacgctcgtagggaacgacaaccttgcctcatgcgtcgcttcccgggagctgcgcgttgtggtcttttcttcctttcccgtcgatcctgagctgtacctaaaccaacttacccgtggcgtcagcgcgtactttgttaaccacgcggagaattcacttctcatcacaagcagtggaactactcgcgcgcagacggacgtcctccgtttcttgcagtacgaaaccggggagacgtgtcgctga

SEQ ID NO: 40226 - DNA, 1884 bp, Treponema pallidum
atgacacaggcactgcaggtgccttccgcacccgcgcgttgccgtcatttacggcgtaagaacggggtgcttttacgaattgttgaaaaaacggaccgcacacgctatgctcatgctttgcggcacggctgccgacacaggatgtgtgagggagttcacggcacagaggaagatgctatgggatcagagtcagcagaaatggacagtccacacgcaactgcacgccctcaggagcagggggaagaccgtgcctgggatgcgtgtggcgtgtgggtaaaggtaccgccggaagcgcaggagccacccgtcagctcaggtggcccagaggatccagaggcgcctgcccaacacgctcccccgggtgcgcgcgtggatgcggtgcggcaccatgtgtaccgtgcgcttcctgtgcagtcctctgcagaggattctcgtggctttgttgacctctccgtggaggacgaggtgctcgctcgcgggtgcagccacgctccgggtggcgagtcctcctccgaccaggcggcagatgcgccagccggagatgccgcttactcggaggtgccgtcgttcgacgatttggtcacacgcaccgcgcagtctcaggacgacagagttgatctatcggcagcgatgagctccgttgtgaccgaagagccgccagagccgcgcgggtgcagcatgccctgccccagcgggtcgtgcgacaccacagagttcgacgacttgctctcgagtttgagccacgacgcaccggaatacccggtcgattccgaccctatcacttactctgcttcggagccttcttcggaaggaccggtacgcggcgccccattcagtgacgtggacgcagttgcgcagtccctcatgggtgatgcccaggtggccgcgcagggggcgcaggccagtacctcaggcgatgcttccaccgatttgcttctgaaaattgcacaggaaatcagcagtatccgcgctgatctagaccagctgaagggaaccttctcccggcaagctggcgccgagcctgctcaggctcccgccaccgctccggctccggaaggaacagaggctgcctactccgggtttttctgtgacgatgatccagacgagacgattgcgcttaccaacgatgagctgaacaatatcctcatcacctctgagtttaccgaggaagatgggaaagactctgcggccgacgcatttggtggtgaactcagtggttttgagtcctctcacatcgggtccgctgcaggcgatttcagctacctagaggaggacgaccacgctgcagcgcgcgtcgcgcaggagcagtgggtacaacaggggcgtgctactcttggaaacgaagttttcgatgtgaaagagcagggggctcacgcggatcgtgacgctgcggccgatccgtctcctgttgccaaagatgacgcatcgcctgaggctcaacgggcgcacgtttcctccaccggcctcgatgcagccggtgccgagcagcccctcaatactgaaaatgtcttcgacgacgaagacacccagcgcgaagatacatcgttcccactgccagaagagcaggagttggacgtctccgttccctcgctagagttttctgctccccacgcgattgaaaccgccgcctctgagtcttcggaggttgccacgccggtggcaatcgagtccccgccccaatcggaagcggcccgtcctgcgcagggggattctgccaaccttgcacctcccctctcaaagagccttgccgacgaggtgcgctctgtgctcgggtatatggaccggctgctcgaaagtctgcccgaggagaagatcgaggagtttgcgcgatcggagtatttccacacgtacaaacacctctttgacgagctagggatttcctaa

SEQ ID NO: 40227 - DNA, 405 bp, Treponema pallidum
gtggaagaccgtctagagtgtggcatcgcgcttgaaggcacggaggtgaagtctgtgcgcgcggggcatctttcttttcctgacgcatttgcagagatgcgcggaggcgagctgtggctaaagaatgtgcatattgcggagtacgtgcatgcttgctcctttgcccccaatccggatcggatgcggaagttactggcacatcgggaccagattgcgcgcttgaagcgcaaggttgaagagaaaggctatactctggtccccctggagttttacctaaaagcagggcgggtgaaggtagcgctgggaatctgcaagggcaagaagctttttgacaagcgcgcgcagatcaaagctcgcgacaacgcacgggagctgtcccgcagcctctgtgagcgacaccactag

SEQ ID NO: 40228 - DNA, 708 bp, Treponema pallidum
atgtttgcgcggtggagaaggtactcatatttggcgcggcgcgaagcacggcggaatgcgaccgcagtttgtagtgctggggtgggcttctttctgttctatctttttatcactacgcatgtggttgcagcgtatcgcattcaggcggactcgatgcagccgaccctgagcgcaggggattgcgttcttgcctcgtccctgtttcgctttgcccgcatcaagcggggggatttggtgcttgcaactccccttgagaaagaggatataggcctgtttaaaagggcgatgaatgctgtgttaggcttcgcaagccttcaattgtaccggccgtttggcgcggcagatcgcatgttttcgcggccgcaaatgcgcagggtggtgggccttccaggggacactgtctatatgcgcgattttgtgctgtacgttaagccccacggtcagcaacacttcctcacggaatttgaagtgagtgcagttagctacgacgtgcgtaagggggtgcttcctgagcattggtctgaacggcttcccttttctggtttcatggaagagatgcagttggacgagcactcctacttcgtgctgtgcgataatcgaattgtctccagtgattctcgtctgtggggtgccatcgacggtagtacgcagataaaagcaaaggcattcatgcgttatttccctttcggagcatttggtgtcttgtag

SEQ ID NO: 40229 - DNA, 1488 bp, Treponema pallidum
ttgacagcctgcgtttgtcttattaccatcggccgcaaaataccggacttgcgcgcccgcggtgggacgcaagaggatgccaaaccagtcatcaaatgttggtttgatggtgttcaggtgggtcccctttcaagcgtgcgcaatgcgcttggatcccgcgctggttgtgcgcggtgcctgagaggcccgtttggttgtagcgctgtcgatccttcgtttcgcttttttgtgcctccttgttgcgtgcgggcgtgcggggtccgccgtatctgtgccacagatcttttgaggaggattttcatggccaaggaaaagttcgcgcgcactaaagttcacatgaacgtgggtactattgggcacgtcgatcacgggaagacaacgctctctgcggcgatcacctcgtactgtgcaaagaagttcggtgataagcaactaaaatacgacgagattgacaatgcgcccgaagagaaagcgcgcgggatcaccattaacacgcgtcatcttgagtatcagtccgatcgtcgtcattacgcgcatattgattgtcctgggcacgcggactatgtgaagaatatgatcacgggtgctgcgcagatggacggtggtattctcgtcgtgtctgcgcctgacggcgttatgccacagacgaaggagcatcttctgctcgcccgtcaggttggtgttccctccatcattgtttttttgaacaaggttgatttggttgatgatcctgagttgctagagctggtggaagaagaggtgcgtgatgcgcttgctggatatgggttttcgcgtgagacgcctatcgtcaaggggtctgcgtttaaagctctgcaggatggcgcttccccggaggatgcagcttgtattgaggaactgcttgcggccatggattcctactttgaagacccagtgcgtgacgacgcaagacctttcttgctctctatcgaggatgtgtacactatttctgggcgtggtaccgttgtcacggggcgcatcgaatgtggggtaattagtctgaatgaagaggtcgagatcgtcgggattaagcccactaagaaaacagtggttactggcattgagatgtttaataagttgcttgatcagggaattgcaggtgataacgtggggctgcttttgcgcggggtggataaaaaagaggttgagcgcggtcaggtgctttctaagcccggttctattaagccacacaccaagtttgaggcgcagatctacgtgctctctaaggaagagggtggccgtcacagtcctttttttcaaggttatcgtccgcagttttattttagaactactgacattaccggtacgatttctcttcctgaaggggtagacatggtgaagccgggggataacaccaagattataggtgagctcatccacccgatagctatggacaagggtctgaagcttgcgattcgtgaaggggggcgcactattgcttctggtcaggtgacagagattttgttgtag

SEQ ID NO: 40230 - DNA, 309 bp, Treponema pallidum
atggccagggagagaattcgggtaaaactgtgcggatttgacgtggagctagtggatcaaagttcgcgcgcgatcgtgcacgcggtgcagaaggcgggcgctgaggtgctcggacctattccgcttccgactaggatgcacaagtttacggtcttgcgctctcctcatgtgaacaagaagtcgagggaacagtttgagatgcgtacgcacaagcggctgattgatatcatcgaaccttctcaggaagtgatgaatgcgcttatgggtttagagctttctgcaggagtggatgtgcggataaagcagtga

SEQ ID NO: 40231 - DNA, 627 bp, Treponema pallidum
atggttggtttaatcggccagaaagttggtatgacccagatttttgacgcacggggttgtgttacgccggtgacggtgattcgggtggagcacaacgtggtggtaggactgaaggatgtggagcgcttcggttactctgcagtgatacttggcacagggtgcatgaagaaaagtcgtatctcaaagccatatgctggacagttcgctgagcggataccgccggtgagggtcatgagggagtttcggggctttacgttggacgtttcggttgggcaagtgctcgatgtgcgtgtattggagtccgtgcgttatcttgatgtgtgtgctctctcaaaaggaaaaggatttcagggagtagtgaagcggtggggtttcagcggaggtcgctcttctcacggatcgaagtttcatcgtgaagcgggttccaccgggcagtgtacgagtcctggccgtacgtttaaaaacgtaaaaatgccgggacgtatgggggctgagcgggtgacggtgcagaatctgcgtattgaacggattgatgtgggtttgggtgtcgtgatggtgcgcggtgcggtgccaggtagaaacaaggccacggtgtttctgcggaccgcggtcaagcgtgaaagatag

SEQ ID NO: 40232 - DNA, 651 bp, Treponema pallidum
gtggaaaagacagtgtattcggttgaaggtgttgcgctgcggtcagttgagcttgatgagagtgtctttgggctttcggtgaaccggggtgtgatttattacgcgataaatagtgagttgagtaacaagcgcttggggactgcgtgtactaagggacgttccgaagtgcatggttcgaataccaagccctataagcagaagggtacgggtcgtgctcgccgcggagataagaagtctccacttctggtggggggtggtactatatttggtcctaagccgcgtgattttcactatgctctcccgaagaaggtgaagcgtttggccatgaagtctctcctaagtttaaaggcgcagggggatgcgctgacagtgattgaggactttacggtcgaaagtggaaaaactagggatctgatacaggtgttgcgtcattttgcacaaagggagcgtaccgttttcatcttgcaaaatgatgatgcgttgttgaagcgtgcggggagaaatattccaacgctcagttttttgtcgtacaaccgtttgcgcgcgcacgaccttttctacgggcgcaaggtattggttttggagactgcggtacataagatcgcggatttctatcggtcaaaggatgctgcacaagatggaacatactga

SEQ ID NO: 40233 - DNA, 285 bp, Treponema pallidum
atggaacatactgatgtagtgattgctccggtgcttacggagaagtcgaatgcgctgcggcaacagggtaagtacgtgttccgtgttgcagctcgtgcgacaaagattcagattaagcaggcggtgacgcagctttttggagtaacggttaggcggtgtacggtaatgaatgtctttgggaagaagaggcgtgttcgtcatcggaccggtaggacgtctgggtggaagaaggcgatcgtgcacgttgcagcaggacagtcaattggtgttcttgagcgtgcatag

SEQ ID NO: 40234 - DNA, 822 bp, Treponema pallidum
atggcgttgaagatgtataggcctatgacggcgggcttgcgggggcgtgttgatctgtgtcgtgcggagcttaccgcgcgcacgcccgaaaagagtcttacacgcggtaagcctgccaaggcgggcaggggtgctgggggtaggatttcggtgcgtcatcgtgggggtgggcataagcggaggtaccgtgatatcgattttaaacgtgatttgcacgacatacctggcacggtaaagactatcgagtatgacccgaatcgaagtgtgaacatcgcgcttgtgttttacgcgaatggtcagaagcgctatatactcgcacccaagggtttgaaggtgggacagcaggtcgttagcggagagaaggtccctttagagcccgcgaacgcgctgccactcggggtaattccagttggttttacggtgcataacgttgagcttacgatcggtaagggtggtcagatcgcgcgttctgcaggcaccagggcggtgattgcggcaaaggacggtggctatgtgatgcttcgtttgccctctggggaggcgcgtctggtgcatcgcaggtgctatgccactattggtgaattaggtaatgaggatcatatgaacacggctttggggaaggcaggtcgtgcgcgttggcgtggggtgcggccgacagttcgtggtatggctatgaatcctgtggatcacccgttaggtggtggtgaagggcgtggtaagggacgtaacccagtaactccctgggggcagccgtgtcgaggatacaagacgcgcaagaagcgcagggtatccgatcgctttatcgtgtcaaagagaaagtaa

SEQ ID NO: 40235 - DNA, 288 bp, Treponema pallidum
atgtctaggtcggtgaagaaaggtcccttcgttgataaaaagctgtataagcgagttgtcgagatgaacaaagcggctaatcagagaaataaaaaggtgatcaagtcgtattcgcgttgttccaccattatccctgaaatggtgggcttcactatctcggtgcacaatggcaagtcgtggatcccagtgtacattacggaggagtttgtggggcataagctgggtgaattttctccgactcgtgtgttccgtgggcatagcggttctgacaagaaagtgggaaggtag

SEQ ID NO: 40236 - DNA, 375 bp, Treponema pallidum
atgactgagcgtgtcacgtatcgagcgaagacaaaatttttggttgcgtctccgacaaaggtgcgtccggttgcgaatgtggtgaagtgcaagccgtatgtgcgcgcgatggcgcttttgggacacttaccgcacaagggtgcacgtttaatctccaaggtcatgaagtcagcggcttcgaatgcaattgatcgggacaagcgtcttgatgaagagcgcttgttcgtgcgtgacattcagatagatgaggggcctcgtttgaagcgtctgtggtgccggggacgggggcggggagatgttcagttgaagcggatgtgtcacatcactgttgtggtagaggaaagtgtgaggacgaaagatgggtcaaaaggttag

SEQ ID NO: 40237 - DNA, 744 bp, Treponema pallidum
atgggtcaaaaggttagtccaatcggtctgagactggggatcaataaagtatggtcttctaggtggtatgcaggtcctcgggagtacgcggcgttgctgcatgaggatttaaggattcgtagcatgattcgctcctttcctgagtgcaaaaatgcggatattgccgaggtggagattgtccgtcatccccagcgagtgacggtagtgatgcacaccgcgcgccctggagtagttattggagcaaagggtgtaaatatagaaaagattggcgctgaggttcaaaagcgtttgaataagaaggttcaaatcaaggtaaaagagatcaagcgcatggagttaaatgcttacttggttgcgcagaatgttgctcgccaactcacggcgcgtgtttcttttcgtaagtgtttgcggcaggcctgtgcggggacgatgaagtctggtgctcaaggggtaaaaattcgagtttcggggcgtttgggtggtgctgagatgtctcgcactgaggagataaaagaggggcgtacgcctctgcacacgctgcgcgcagatattgattatggttttgccgaggcacatacgacttatgggagtatcggggtaaaggtgtggctatactcagggatgatgtacgggaatgagtgtcgcaaagatgtaggctctctgttgcggcgatcgcgcagggagagtggccaaaagtctgacgagttggtgcgcgacgagcgtacgcatgcggagagaggttga

SEQ ID NO: 40238 - DNA, 420 bp, Treponema pallidum
atggcgcttagtcccaagcgggtaaagtaccgaaaggtacagcgggggagggtgaagggggatgccactcggtgcaatgcggttgattttggtgcgtacgcgctggtgtgtcttgagccgttttggttgacgagccgacaaatcgaagcggctcgtgtagcgttaaaccgaaggattaagcgcgggggtaagttgtggattcgtgtttttcccgataagccatacagcaagaagcctgcagagacgcgtatgggaaaaggaaaggggtcgcctgagtattgggttgcggtagtaaagccaggtactgttctgtttgaactaatgggtgtagaacgagcgttggcagagcaggcgatgcttctggcaggaagtaaacttccaatcaagacgcggtttgccgaacgcgtacaggaaatttag

SEQ ID NO: 40239 - DNA, 219 bp, Treponema pallidum
atgggtcggggtgggtgtgcgcaattatcatattctgagcttctttcgaggcgtcgtgagcttgagagaaaatacttggatctgcgctttcagcttgttgttgagcatgttgacaacaagcttatgaaaaggattctccgtcgtcaaattgcggcggttaatacttttttgcgacataaagagttgactgaactagaaaagagaggggttcgggagtga

SEQ ID NO: 40240 - DNA, 255 bp, Treponema pallidum
gtgaaaaggcctgagcggcgcacccttgtcgggctggtgaccagtgacaagatgcacaaaaccgttacggttcggattacgacaaagaagttgcacgcgttgtataagaagtacgtgtcgcggagcaaaaagtatcaggctcatgatgaggaaaataccgcgcgggcaggggatgtggtgcgtattgccgagagtcgtcctttgagtaggcgtaagcgctggcggttggtagagattgttgaacgagcgaagtaa

SEQ ID NO: 40241 - DNA, 369 bp, Treponema pallidum
atgattcaggtgcagtcgcggttgaacgtcgcggataattctggagccaggttggtgcagtgtattaaggtggtgggtggatcccgtcgccggtacgcgagtgttggggatatcatcgtggtggcagtgaaggatgcacttcccacttctgtgattaagaaaggatcagtagagaaggccgtcattgtacgagtttctaaggaatatcgtcgcgtagacggtacttatattcgatttgacgacaatgcctgtgttgttatcgatgctaatggaaatcctaaggggaagcgtatttttggtcctgttgcgcgggagctgcgggatatggattttacgaaaatcgtgtctttagctcctgaggttttgtga

SEQ ID NO: 40242 - DNA, 312 bp, Treponema pallidum
atggggaagacggtaaagattcgcaaggatgacatggtattggtgattgccggcaaagatcggggtaagcggggtgcagtgctgcgtgtgctccgcgacgtagatcgcgttttggtgcagggtttgaacatgcgcaaaaagacgattcgtagaaagagtgctcaggatgaggggggtatcatggaggttgaagctcctattcatatttccaacgttatgattatgggcaagaaggggcctacgcgcgtggggtatcggatggaaaacggtaagaaagtgagggtatgtcgtaaaacaggagaggtgctatga

SEQ ID NO: 40243 - DNA, 558 bp, Treponema pallidum
atgaccgatcattcttgcatacctgaactgaaagtccggtatgtgcagcagattgttccggatatgatgcgggattttggttactcgacggtgatgcaggttcctaagctgttgaagatagtgttgagtatgggtctcggggaagcgctcgctaatcggaagcttttggacgcgtcagtagcagatttgggtgttattagtggccagcatgcagtaaagactagggcgcgcaagagtattgcgaattttaagctgcgtgaaggcaatgagattggggtgatggtgactctgcgccgtagtaggatgtatgagtttctccaccggctcatcaatgttgctctgcctcgtgtaaaggattttcgtggggtaagtcctcktgggtttgatggacatggtaattactcgatgggtattacggaacagattatttttcctgaaattgactttgacaaaatcgagcgaattagcggtttgaacgtcaatgtagtgacatctgcgcagacagatcaggaggctcgtactcttcttacgaagctcggtatgccttttagaaaataa

SEQ ID NO: 40244 - DNA, 186 bp, Treponema pallidum
atggcgacagtagcaatgatcaataaggcaaaagcaactccgaaatacgctacgcgcaggtacaaccgctgtggggtgtgtgggcgaccccgcgggtacatgaggagatttcaattgtgccgcctgtgttttagaaagctggcgagcgagggtcaaatccctggggtaacgaagtcgagttggtag

SEQ ID NO: 40245 - DNA, 399 bp, Treponema pallidum
atgggtgtttcggatcctgttgcagacatgctcacgaagatacgtaacgcggcgcgtgcgggacatgaaaaagtggatgtaccttcttcgaagttgaaagttgaggttgtgaaaatactgaaaacggaaggatatatcaggaacttcaggaaagtagaggaggatggttccggttgtattcgtgtgtttcttaagtatgacgataacgaaacgtcggttattcacggtatcgagcggatttctactccgggccgccgtgtgtactcggggtacaagacgcttcgtcgtgtgtataacgggtacggcactttgattgtttctacctctctaggggtgaccactggcaggcatgcaagggagcagcgtgtgggtggtgagctgatttgcaaagtttggtag

SEQ ID NO: 40246 - DNA, 540 bp, Treponema pallidum
gtgtcaagaattggtaaagttcctgtgtctgttcctggcggtgtgcacgtgcgagtctcttctggggtggttgaggtcgagggtccaaagggggtgctttcgtgtgcgtttctcccagtggttacggttcgtgttgagcaggaatacgtaattgttgcccggtgtgatgattccaagcgcgcgcgtgcatgtcatgggctgtatcgcaagcttttgagcaatatggtagttggggtaagcgaagggttttctaagacattggtaattacgggtatcgggtaccgcgctgaggttcaagggcgggtgctggtgatggcattgggttactccaatgactttacagtgctcattccctctggtattgaggtgcgggttgagtcttccacgagggttattgtttccggtgtaagtaaggaaagagtgggggagttcgcagcgcaacttcgtaggctgcggttgcctgaggcgtataagggtaagggtattcgctatgattacgagaccattgtgcgtaaggtaggaaagtcaggggtaaagtag

SEQ ID NO: 40247 - DNA, 363 bp, Treponema pallidum
atgctaaggaagtgcagtgataaacagcgaaagaggatgaagcgtaaggttcatattaggaagagggtgtatggcacggcggttcgccctcggatgacggtgttccgaagtaatcggaacatttcggtgcaggtcattgacgacgacgcgcgtagcacgcttgcgtcagtttctactcttgagaaggattttgttctgcttagggcaaatgtttcttctggtttgcagataggagaagagatcggcaggcgccttttagagaaacacattgacacggttatctttgaccgaaatgggtacttgtaccacggggtagtggcggccgtcgcagatggtgcacgtaaggcaggagttaagttctag

SEQ ID NO: 40248 - DNA, 519 bp, Treponema pallidum
atggatcgtcacagggattttggcaaagacagacttcgagacaaagagtttaccgagaaattaatcaagctgaaccgcacggcaaaggtagtaaagggcggacgtcggttttccttttcggcactcacggtagttggtgatcaaaagggccgcgtggggtttggttttggtaaagccggggatgtgagcgaggcaattaggaagagtgttgaaagggcgaagcggagtatggtgctctttccgctcaaggatggtaccatcccgcatgaagtacaagctaagtttaagggctctctggtgttactgcgccctgcctgttcaggtacgggtattattgctggtggaaccgtgcgtgctatcatggaggttgcaggtgcaaccgatgtgctgtctaagtctttgggttcgaattctgctatcaacgtggttcgtgcaacgtttggggcggttgcgcagttgatggatgcaagaaagttggcacgtgagcgtgggaaggcactcgtggatatgtgggggtag

SEQ ID NO: 40249 - DNA, 462 bp, Treponema pallidum
gtggcggatttccatttgattgctccgaagggggctaatagggcgcgtcgtatcgtgggtcgtgggtcctcctctgggcggggtaccacgtctgggcggggtactaagggacagcaggcccgtgcggggcataaggcttatgtaggttttgagggtgggcagatgccgctatatcggcgtgtgccgcggcggggtttttctaactgtgctttcaaaaaggaatacgcggtagttaatgtgggcgcgcttgagtttgtctatgctccaggggagacggtcaacagacagactctcattgagaagggcttggtaaaggggcgggtccccttcatcaaaatcttggcagacggagagctgacaaagtctattgtggtgcgggtggaccgggtttctgctcgtgcacaggagaagattcagcaggcgggcggttcagtggagtgtattgaagcgcaggaacgatga

SEQ ID NO: 40250 - DNA, 1353 bp, Treponema pallidum
atgaaacagggtgtttttgcagcggtgttccggataagggagctgcgtgcgcgtatctttttcacgcttagcgtgttgacggtgtttcgctttggctcggtgctgacagttccgagtgtggacccgcgtgcgctttctgcttatttccgatctcaggttcggggaaatgcttttgcagactacatggatttttttgtaggcggggcgttctcgaatttttcagtgtttatgctgggagtgatgccgtacatttcgacgcagattctcatgcagctttcgatgattgtttttccaagtcttaagaaggttgtagaagatgtaggggggagacgtcgcgttcagttttggacacgtgttgcaacggtttttgtgtgtcttatacagtcttctgcggtaaccgtttacgcaaatcagattcccggtgccattgttattcagagctacgccgtgcatctgtttgtcaccatgctgacggtgacctcagggagtatgatcacgctttggcttggggaacagatcacagcgcgaggcattggtaacggtgtgtcaatgattattttttcgggtattgtcgcgcgtttgcctcatgcgcttgcagagatgtggaggctgcagcgtcttggcgaattgaatatggtgtttgtgatcgttgcgtttgtgatgtttgtaggaattattgtgctggtggtgtatgagcagcaggggcaacgaaaaataccaattcattatgcgcggcgtgtggtcgggcggaaaatgtacggtggtcagagcacgtatatcccttttaaaataaacccttcgggcgtaattccgattatttttgcctcatcttttttgacatttcccctgcagatagccagcagtattggaccgaacgtgcgctttctgcatcagcttgcgcagttcttacgaccgaacagttggtggtacaacgcgttctatgtagttttgattgtgttttttgcgtacttctacacgcaagtcacccttaacccgactgagatagcaaagcagattcgcgagaacggaggtacgattccgggtattcgtgcggataagacggaagaatatctacaagggatcttgaaccgcctggtacttcccggttcgttgtatcttgggatgatcgcagtgctgcccaccttgattcaagctgcgtttgggtttccgtcctctatttccttactgatgggcggtacttctctgttgattctggtaggggtggatctagacactatgagtcagattgaggcgcagttgaaaatgcggcagcgtgaggggttgggagggcgtggcaaagtgctaccgcgcatttgtagcgggtacttgcgaaaggatgtatacgaggagtga

SEQ ID NO: 40251 - DNA, 114 bp, Treponema pallidum
atgaagataaggacgagcgtaaaggttatttgtgataagtgtaagcttattaagcgtttcggtattatccgggtgatttgtgtgaatccaaagcacaagcaacgtcagggctaa

SEQ ID NO: 40252 - DNA, 366 bp, Treponema pallidum
atggcgcgtattgcgggggttgatcttcctaataagcatgtcagcgttgcgttaacttacatatatggtatttcgcgttcatccgccaggactatttgtgagaaggcccgcatcagttctgcttgtctgataaacgatttgagtcaagatgagcttgcagttgtccgtgcaattatcgatagagaatacaaagtggaaggtcgtctgagaactgaggttgccttaaatatcaagaggttgatggatattgggtgttaccgagggctaagacatagaaaggggctgcctgttcgtgggcagcgcacgcgaacaaatgcgcgcacacgcaagggtaagagaaaaaccgtcgctggaaagaaaaagtaa

SEQ ID NO: 40253 - DNA, 381 bp, Treponema pallidum
gtggcggtcacaaagaagcgtaaagaaaaaaagaatgtgtacgaggggaacgtgtatatccaggcgactttcaataacaccatcataacggttactgacctgcaaggaaatgcgctctcctgggcttcgtccgggggccttgggtttaatggggcaaagaaatctactccttttgcagcacagacggtcgcggaagctgcggtacagaaagcgcagcagtgcggactgcgtgaagtacatgtgtttgtcaaagggccgggtattgggcgtgagtcagcaattagaatgcttggtaccatgggactgagggtgcgttcgattcgcgacatcacacccattccacataacggctgtcgtccgcgtaaaactcgccgcatctga

SEQ ID NO: 40254 - DNA, 1056 bp, Treponema pallidum
atgcctcgtagaaatcttttgaagggttttaaaagacctaaggtgctggagtttctttcggagaactcaagcgagtgttatgggaagttcaccgcctctccttttgagactggttttggcaccactgttggtaactgtttgcggcgcgtcttactctcttctatccaggggtatgcggtcaccggggttcgcatcacgtcctttgatgcggacggggttgcgcacttcatttcaagcgagtttgaacagattccccacgtacgggaagataccctcgagattctaaataattttaagcgtctgcgttttctcctgccgcagggggcagagtctagtacgttcacgtatgagtttcgcggcgcggtgtctttgacggggaaggactttgctaagaagtttcaactcgaggttctgtctcaagacctgctcatcatggaaatgatggacggtgcgcatgttgaagtagagctacacgtcgaattcgggcgtgggtatgtacctgctgaatcgcacgatcggtatgccgatttagttggggttatccctgttgacgcaatttttagtcccgtgttgagagtccgctatgatattcagtcttgccgtgtaggtcagcggggggattacgatcagttatcccttgaagtgtggacagatggtacggtgcgtcccgaagacgcgatagccgaggcagcgaaaattatcaaggagcactttacagtttttgttaattttgacgagaccgcgctcgacctggaggacgagccagaagaggatgaccctgccgttctggagctgttgaacacgaaaatcgctgatgtagatttttcagtgcgcgcgcgtaactgccttttaactatgggaatcaagacgctgggggagttgacaaggatttctgagcagacacttgcgaatacgcgtaatgtgggtaagaaaagtttaagtgagatacagggcaagttgcaggaatataacttgcgtctgggtatggctgactacaaccatgtgggggttgttagtagactgatgcgacagaaggaagaaatagatgaggcatag

SEQ ID NO: 40255 - DNA, 495 bp, Treponema pallidum
atgaggcataggaccggtttcaacccgctttcgtgtatggctgcgcataggcgtgcgctccgtcgcaatatggttacttctctttttaagtttgagcggatcaccacgacgaagccgaaagctgccgaggtgcggcgcgcggcagagaggttaattacgcgttctaagtctgactctgtgcataaccggcgccaggtggcccgttttatttgggataaggctgtgttgcacaagttatttgcggatatcggacctcgcatgcgggaacgtgagggggggtatacgcgcatattgaagttgggcctcaggcagggggatgcggcacatgtggttgtgttggaattggttgactatacctttgaaaaaagcctcaaaaaacgcgcgcgtactgatagtgtgcctgcaagaaaaggagctgggaagaaggatgcttcgcgcgtcagtgggacggttccagacggtcagtctcaaaaaataggaaagaagaaagaatag

SEQ ID NO: 40256 - DNA, 1908 bp, Treponema pallidum
atggggaagattattggcattgacttgggaacgacaaattcatgtgttgcgatcatggaggggggggagcccgttgtcattcaaaatgccgaagggggaaggactacgccctccattatcggtttcacctctgatggtggacgcgtcgtcggtcagccagcaaaaaaccaaatggttactaatccggaacatactatctattcgataaagcgctttatcggcagtcgtttcaatgaactgaccggtgaagcaaaaaaggtgccctacaaaattgttccacagggagacgacgtgcgcgttgaggtggagggtaagctttactctacgcaggagatctccgcgttcattttgcaaaaaatgaagaagacagctgaggattatttgggcgaggcagtcacagaggcagtcattaccgttccggcttactttaacgatgcacagcgtcaggcaaccaaggatgcggggaagatagcagggctcgatgtgaagcgtattattaatgagccgactgctgcgtcgcttgcctttggttttaacaaagactctaagagagagaagattattgctgtgtatgatcttggggggggtacctttgacatatccatcttggaactcggtgacggtgtttttgaagtcaagtcaacgaatggggacactcacctggggggcgatgactttgatgcacgtatcgtgcaatggctggagcagggcttcaagagtgacacgggtatcgacttgggcaacgaccgcatggcgttgcagcggctgagagaagcggcggagaaagcaaagatagcgctttcttcctctgcgagtaccgagattaatttgcccttcattactgcagatgccaatgggccaaagcatctccagaggactctctctcgatctgagtttgagaagatgactgatgatctttttgagcggaccaaagagccttgccgcaaggcgctcaaagacgccggaattagtgcggacaggatcgatgagattctcttagttggtggttccacgcgcatgcccaaagtagcgcacgtgatcaaagatgtctttgggaaagaaggatcgaagggagtcaatcctgacgaggctgtcgcaattggcgctgcaattcaaggaggtatcctcgggggggacgtgaaggatgtacttctcttagacgttacgcctctttctctaggaattgaaacaatgggcggggtgttcactccgcttatcagtcgtaataccaccatccccacgcgcaagagtcaggtgttttccaccgcagctgatgggcagacggcagtttccattcacgtgctgcagggggagcgtggcatggcgaaccaaaaccggacgctcggtaattttgatctagtaggaattccccctgctccgcggggagtgccgcaaattgaagtgacgtttgacattgatgcgaatggtatcgtgcacgtttctgccaaagacctagggacgggaaaagagcagcacatccgcattgaaagttcgagtggtctgagcgaaagtgaaatcgaccgcatggtaaaggaagccgaagcgaatgcagaaagtgataagcgtgagcgggagaaaatcgaagcacgtaacgtggctgactccctaatctatcagacggaaaagacgctcaaggaggcgggagacggggtgaacgctgcggaccgcgcgcgcatagacgaggcgatcgcagagttgaagacggtgctctcaggcgacgacgtcgcatcgatcaaagcgaagactgagatcttgcagcaagcttcctacaaaattgcggaggaaatgtataaacgtcaagcagcagcgggtgccgctgcaggtaagaagagtgatgcaccctctggcaatgaggcagaaggtggtgacgttgattacgaggtagtgaaggacgaagattcaaagtag

SEQ ID NO: 40257 - DNA, 327 bp, Treponema pallidum
atggataatataaatatcgccaaagacgttcggcctgggtgcgttttattaacggtgactggagcggtcagctcctatacttacggggagtttgagtcgcgtgtgcatggggcgctcaaagagaatcacgttgttttggatctctccggcgtgacggctatgtcttcttcgggattgggggtgcttatctctgcatacgatgagggactgaagtaccagcgtcgtctgtgcattcttaatccttctgagagcgtacgcagagcgatagagctgaccggcttctctgaaatgttcacggtaattaaatcattagatgagttggactaa

SEQ ID NO: 40258 - DNA, 687 bp, Treponema pallidum
atgtttttctctctttatgaacgccggcaatcgctgcttcaccgtgctcctcccgtagcgaaagtcgcaagcttcgctctccttctcctgtgctgtaatgcacagagttggtgtatgcacgcgtcgcttacacttgtgctgctcgcattaacgctcattgtcacacgttctctgaaatgcgtggctgcacacatacgtgtagttagtatctacctcgcttttttcttttctctgaagatcctgcacacatttttcagcaccggtgttgttagcgctacacaaatcaaccagcacatacatgcaggataccacataggcatccgcctatttttattgctgtgcgcatcttcacttttttacgcgtgcacatcccgtttggaacttttctccctgtgtctccgtatgggaaaggtgctacatgtgcgcagcacagcgtacacaacaccctgtgcagtttacgttatgatgctcgtattgtacttcggacacgatatctttcgtgagtggacggagctccgcttcgtgtggagagcacggacgcgcgcgaacacctctttttacaactgggtagacgcgaccctccatttttcaaaaacactattgactcggttgctagaacgcgcgcaacacccctccctaagaagggcggactttaaggtttcggataatattttgtcaagcgagtga

SEQ ID NO: 40259 - DNA, 171 bp, Treponema pallidum
atggcaaagaggacggcggtggagcttattgcgcttcagtgcactggatgcaagcggcgtaattacaccacttcaagaaaccgacgtaacgttcaggaaaagctcgagctcaggaagtattgtccttttgagcgtagacgtgtgctgcatagagaggcgaagataaagtag

SEQ ID NO: 40260 - DNA, 558 bp, Treponema pallidum
atggcgaaagagtggtatattctgcacacattctcgggtcgcgaggcaagggtggagcgggctgtccgtatgctcgtggagcatgcgaggattccaacgaacgttatctttgatataaaaatccctgaggaactgcttaccgaggtgaaagatggtaagaagagggtggttaggcgtaagtttttccctggttacttgttggtggaaatggatttgcccgaggttgactggaggatagtgtgtaacgaggtgcgcaggattcctggtgtttccggttttttgggttcttcgggcaatgcgaagcctcaggcggtttctgcggatgaagctcggcgtattttgcagaaggcgggggaaattaagggggataggactcctcgtatcgctcagacttttttggttggacaacaggtgaggatcgttgaggggccgtttgctactttctcgggtgaggtggaggaggtgatgagtgaacgcaacaaggtgcgtgtggcagtcaccatctttggccgcgctactcctgtggagttggagctagtccaggtggaggcgctctga

SEQ ID NO: 40261 - DNA, 441 bp, Treponema pallidum
atggcagcgaagaagaaagtggttactcagataaagctgcagtgtcctgcaggcaaggcgacgcccgcgccgccggttgggcctgcgcttgggccgcacggggttagtgccccgcagtttgtgcagcagtttaatgaccgtactaaatccatggagcctgggttggtggtgccagtggttgtcaccgtctattctgacaagagtttttcgtttgtgctgaaaacgccgcctgcggctgttcttattaggaaggcgtgtgggatcgaaaaaggatcgacgaattctgttaagcagaaggttgcgcgcttgtcgctggcgcagttaacggagattgctcaagtgaaattacctgatatgagcgctttaactctcgatgctgcgaagcgtatcatcgcgggtacggcacgcagcatgggggtggaggtagagcgttcattatga

SEQ ID NO: 40262 - DNA, 681 bp, Treponema pallidum
atgaagagggggaagaagtatcgcgctgccgttgcgcgttatgatcgcgccgagcggttcagtcttgaccgtgcggtaggtttgcttaaggaagtgaggtatgcttcctttgacgagacggtggaggtgcacgttagtctgaggcttaagaagaatcagacggtgagggatacggttgtgctcccccaccgttttcgggccgaggttcgtgtgctcgttttttgtaaagaggatcgtgtttcggaagcgcttgctgcaggtgctgcctatgcaggcggtgctgaatatcttgagaaggtaaaaggaggctggtttgacttcgacgtggtcgttgctagtcctgacatgatgaaggacgtcggtcgtcttggtatggtgttaggtcgcagagggctgatgcctaacccgaggactggcacggtcagtgcggacttgggggctgctgtctgtgagttgaaaaaggggcgtgtcgagtttcgcgcggataagacaggtgtggtccatctagcagtagggaaaacgacgatggactctgcgcagattgtagagaatgttgacgtgtttctgtcggagatggatcgcaagaagcccgttgacgtaaaagctggttttgtccgttcgatttcgctcagctccagtatggggcctgggatttgggttgtccataagtcagaggagtag

SEQ ID NO: 40263 - DNA, 543 bp, Treponema pallidum
atggcagtacgcgcacgaaggctgcagccggcaaaggtggctgctgtcgagagccttacgcgtgatttgggtgaggcttcttcttatatctttacggagtatcgagggcttacggttgagcagctgaccgcgttgcgccgcgcgctgcgcgaattctcgtgcgtgtatcgggtggtgcgtaacaattttgcgaatatcgcctttacgtccctaaacatgacggtgggagagtatctggtggggcccacggccatcgccctagtggacacggagcatgcgaatggcgtcgcgcgtgtgctgttcgattttgcaaaggaagtgcctgccttagtggtgaagggtgcaattcttgatggggaggtgtttgacgcttcgaaggtagaagcgtattcgaagcttcctggaaagaaagagctcgtttccatgttcttgtccgcgctgaatgcaacgacggtgaagttcgtacgcgtattacaggctgtgatggacaaaagggatgagggtgtagaagtttccgtggtgtcgggaggtgattcgtcctag

SEQ ID NO: 40264 - DNA, 390 bp, Treponema pallidum
atggcggcgttgagtaatgaacagattattgaggcgattcggggcaagaccatcctggagctttctgagcttatcaaggcggtggaggaggagtttggagttaccgcggctgtgccggtagcgccggtagcggaaggtggcggggcaggttctgtagccgctgaggagcagacagagtttactgttgtgcttaaaggacttgcagaaccaggcaaaaaaatcgcggttattaaagaggtgcgcaacgttatctcagggcttggcttaaaagaggcgaaggatctggtggagggtgcgccaaagactttgaaagaaaatgtatccaaggaagaggcggcaaagataaaagagtcaatgaccgcagcgggtgcgctcattgagatttcctag

SEQ ID NO: 40265 - DNA, 3537 bp, Treponema pallidum
atgtcagcacgagtttgcaaaacacacagagtgtacgtgggaagggatgtcaggaattttatggacatcccggatctcatcgaaatccagcttcgatcttacgacacctttctgcatggggcccggaatacaccgtccggcgccgacacccttatctccggtactagagaggagctcggcctcgaagacgtgttcaagactacctttcctatcgagagctctacgggggacatgacgctcgagtaccaatcatactcccttgatgagaaaaacatcaagttctccgaggcggagtgtaaacaaaagggtttgacgtacgccattccgctgaaggcgcttgttgatttacgtttcaataatacgggggagattaggcgcaaagacatttatatgggagatatccccaagatgactgaacgcggcacctttatcatcaacggtgcggagcgtgtggtggtatcccagatccatcgttcccctggtgttgtcttttctcatgagaaggacaaggaaggacgggaggtattctccagccgcattattccgtaccggggaagctggcttgaatttgaaattgatcagaaaaaagatctcatctatgcaaagcttgataaaaagagacgtatcctaggcaccgtgtttttgcgtgcgttgcactacgaaacgcgtgagcagatcatcgaggccttttacgccatagaaaagacgcctgtttgtcaggatcgtgcggagtacgagctgctcacaggtaagatcctagcacgatcggtgacggtggaaaatgagcagggtgaaacccgggtgttgtacaaagcaggagagaaaatccatccccatgtcatcgatgatctgctgcaaaacggcatatgtgaggtctacattattaaccttgaagcggaaggttcgttgcgttctgcggtcgttatcaattgtcttgaacgagaggaaatgaagttctctaagtcgggtgcacaggacgagctttcgcgtgaagaggcactgtgtattgtatactcagcgctaagaccaagcgatcctatgaccatggacgcggcggaaaaagatttgcagacaatgtttttctccccacgtcgctatgatttagggcgggtggggcgctacaagctgaacaagaaatttcgctctgactcgccgactactgagtgcacgctcaccctcgatgatatcgtaaataccatgaaatttctcatcagaatgtatagcggtgatgcacaggaagatgatatcgatcacctgggcaaccgtcgtattcgttcggtgggggaattaatgaccaatacgttaaaaacggcctttttgcgcatggaacgtattgcgaaggagcgtatgagttctaaggaaacggaaacgatcaagccgcaggatctcatttccataaaacctatcatggctgcgattaaggagttctttggtgcaagtcagctttctcagttcatggatcaggtcaatccgctggcggagttgacacacaagcggcgtttgaacgcacttggtcctggtggactttcaagggagcgtgctgggtttgaggtacgcgatgtgcactacacgcactacggtcggatgtgtcccattgagacccccgaaggaccaaatatcggtttaattgtttctatggccaattacgcacgcgttaacgggtatgggttcttggaggtgccgtatgtacgggtgcgtgacggagttgttacgaaagagattgagtacctggatgctatggacgaggatcgctactacattgggcaggattctacggcggtaggaccggacggggtcatccgtgtagatcatgtctcttgtcggcaccggggggattacagtacgcgtagtcctaaggatatccagtatatggatgtttcccccaagcagataatttctgtttctgcttctctcataccgtttcttgagcatgatgatgctaaccgtgcgttaatggggtcgaacatgcaacggcagggagtgccgcttatttttcctgaacccccgcgcgtgggtacaggcatggaagagaagtgtgcatatgactctggagtgctggtgaaggcaaagcaagacggaacggttgcctacgtttcctcagagaagatagtggtttgttccgccgcggcgtctggggaagagcaggaggtcgtgtatccgttacttaagtatcagcggacaaatcaggatacctgttaccaccagcggccaatagtgcacgtgggagatcgggtacaggtaggagatgcgcttgcagacggtcctgcaacgtatcgaggggagcttgcgcttggcagaaacattctagttggttttgtgccgtggaacggttacaactacgaggatgccattttgatttctcaccgggtggtaaaggaggatatgttcacctcggttcacatcaaagaattttctactgaggtgcgtgaaaccaagctgggttctgaacgaatgacgaatgatatcccgaataagtctgagaagaatctggataatttggatgcagaggggatcattcgtattgggtcaaaggtgcgtgcgggagacgtgcttatcggaaagattacgccaaaaagcgagtctgagacgacgccagagtttaggctgctgaattctatttttggggagaaggcgaaggaagtgcgtgattcttctctacgtgtgccgcatggagttgagggtacagtcattgacgtgcagcgactcaggcgttcggagggagatgatttaaaccccggggtgtcagaggtggtgaaggttcttatcgctaccaagcgtaagctgcgtgaaggggataaaatggccggtcgccacggtaacaagggtatcgttgcgcgcatccttcctgaagaagacatgccgtatctggatgatggtaccccgcttgatgtctgtttgaacccgctcggtgtaccttctcgtatgaacataggacagattcttgaatctgaattgggacttgcggggttgcggcttgacgaatggtatgagtctcctgtctttcaatctccaagcaacgagcagattggggaaaagttgatgcaggcaggttttccgactaattcaaaagtgatgctgcgtgacggacgcacgggggattattttcaaaaccctgtatttgtgggggttatttactttatgaagcttgcgcatctagtggatgacaaaatgcacgcccgctctacaggtccatattcgcttgtgacgcagcaacccttagggggtaaagcgcagtttggagggcagcgtctcggggaaatggaggtgtgggcgcttgaagcctacggcgcggcgaataccctgcaggagttgctaacgattaaatcggatgatatgcacgggcgttctaaaatttatgaggcaattgtaaaaggggaggcttcgtctcctaccggtattcctgaatcttttaacgtgttggtgcaggagctgcggggacttgcgctcgactttacgatttacgatgcgaagggcaagcagattccgctcactgagcgcgatgaagaaatgacgaataagattggctctaaattttaa

SEQ ID NO: 40266 - DNA, 4251 bp, Treponema pallidum
atgaaggatatccgggattttgacagtttacagataaagcttgcctcccctgataccattcgggcatggtcctatggagaggtgaaaaagcctgagacaattaattaccgcacgttgcgtcctgaacgtgaagggcttttttgtgaacgcatttttggtactacaaaggaatgggaatgcttttgtggaaagtttaagtcaattcggtaccggggtgttatctgcgatcggtgcggggtggaggtaacgcatttcaaggttcgcagggagcgcatggggcatattgagcttgcaacgcctgtttctcatatttggtactaccgttgtgtaccaagtagaatgggtttgttactcgatctacaggtgatcgcactgcgttctgttttgtactatgagaagtacatagttatagagccgggcgacaccgatttaaaaaagaatcagttgctcactgaaactgagtacaatgacgcgcaggagcgctacggtggcggctttacggcgggaatgggagcggaggctatccgtacccttttgcaaaaccttgaccttgacgcgcttgttgcacagttgcgtgagaagatgatggagaagggtgcgaaaagcgacaaacgcttgctgcgtcgcatagagatcgtagaaaactttcgggtgtcgggaaataagccggaatggatgattttgagcgttatcccggtgatcccgcctgatttgcgtcctatggtgcagctcgacggagggcgttttgctacctcagatctcaatgacctgtatcggcgtgtgatccaccgcaatagccgtttgattcggctcatggaactgaaggcgccggatatcatcattcggaacgaaaagcgcatgttgcaagaggcagtggacgcgctttttgataattctaagcgcaagcccgcgattaaaggtgcgtcaaaccggccgcttaagtctatttctgacatgctcaaggggaagcaagggcgttttcgccagaatcttttgggcaagcgggtcgactattccgggcgttcggttatcgtagtggggcctgaacttaagttgtggcagtgcgggttgcctacaaaaatggcgcttgagctgtttaagccctttattatgaaaaagctggttgagaaagaaattgtctcgaacatcaaaaaggcaaagatgctcgtggaacaagagtcgccgaaggtattttcggtgttggatgaagtggtaaaagagcatccagttatgcttaatcgggcgccgacattgcatcgattgggcattcaggcttttgagccggtgttggtggaggggaaggcgattcgtcttcatccgcttgtgtgtaaaccttttaatgctgattttgatggggatcaaatggcggtgcatgtgccgctgacgcaggcggcacagatggagtgttggacgctcatgttgtcgaatcgcaatttgcttgaccctgcaaatgggcgcacgattgtgtatccatctcaggacatggttctgggtttgtattatctgacaaaggaacgctctctgccggagggtgctcgtcctcgccgtttttcctcggtggaggaggtaatgatggctgcggaaaagggggtaatcggctggcaggatcagattcaagtgcgatatcacaaatgtgatggtcagcttgtggtcactaccgcaggaagacttgtgttgaatgaggaagttcccgcagagattccttttgtcaacgaaacgcttgatgacaaacgcatcaggaaattaattgagcgggtgttcaagcgtcaggattcttggcttgcggtgcagatgctcgatgcactgaaaactatcggttatacctacgcgaccttctttggtgcaacgctcagtatggacgacatcatcgtgcctgagcagaaggtgcagatgctcgaaaaggcgaacaaggaagtgctagcgattgcgagtcaataccgcggggggcacatcacgcaagaggagcgttataatcgcgtcgttgaggtgtggtctaaaacaagtgaggagctcacttcgctcatgatggaaacacttgagcgcgacaaggatggatttaataccatttacatgatggctacctcaggtgcgcgcgggagtcgcaatcaaatccgccaactggcgggaatgcgtggcttaatggcaaagccgagtggggatatcatcgaattgcctattcgttctaattttaaagagggactcaatgtcattgagttttttatttctaccaacggtgcacgcaaagggctcgcagacactgcgctaaagaccgctgatgcggggtatttgacacgtcgtctggttgatatcgcgcaagatgtggtggtgaacgaggaggactgtggtaccatcaatggcattgaatatcgcgcggtgaagtccggcgatgagattattgaatcgcttgctgagcgcatcgtaggaaagtatacacttgaacgtgtagaacaccccatcacccatgaactgctgctcgatgtgaacgaatacatcgacgatgagcgtgcagaaaaggtggaagaagcgggcgtggagtcagtgaagttgcgcaccgtgctcacgtgcgaatctaagcgaggagtgtgtgtgtgctgctacgggcggaatcttgcacgcaacaaaattgtagaaattggggaggcggttgggattgtagccgctcagtccattggtcagccgggtacgcagctgacaatgcgcacgttccatgttgggggtacggcaagcagtactacggaagagaaccgcatcacgtttaagtatcccatactggtaaagagtattgagggggtgcatgtgaaaatggaggatggctctcagctgttcacgcgtcgggggacgctcttttttcacaaaactctggcagagtatcagcttcaagagggtgacagcgtgcaggtgcgtgaccgcgcgcgggtgctaaaggatgaggttctctaccacaccaccgatgggcagacggtgtacgcttcggtgagtggttttgcgcgtataatcgatcgaaccgtgtacctggtagggcctgagcaaaagacggaaattcgcaatggttctaatgtagtaatcaaggcagacgagtatgtgccgcccggaaagaccgtggctacgtttgatccgttcactgaacctattttggcagagcaggatggctttgtgcggtacgaagatattattttgggctctacgctcatcgaagaggtaaatactgaaacggggatggtggagcgcaggattacgacgttgaaaacaggaatacagcttcaaccgcgggtattcatctctgatgagtcggggaatgcgctgggttcgtactacttgccagaggaagcgcgcttgatggttgaagaaggcgcgcaggtgaaggcgggtacggtcattgtaaaactggcaaaagcaattcaaaagacatcggatattacgggggggctgccgcgtgtttctgaattatttgaagcgcggcgccctaagaatgcggctgtcttggcacagatttctggggttgtgtcgttcaaaggactgtttaagggtaagcgtattgtcgtggtgcgtgaccattacgggaaggaatataagcacctcgtgtccatgtcgcgtcagcttttagtacgtgatggagatacggttgaggcaggcgaacgcttgtgtgatggttgctttgatccccatgatatcctggcaattctgggtgaaaatgctttgcaaaactatttgatgaatgagatccgtgacgtgtatcgtgtgcagggtgtttcaatcaatgaccagcacattggtttagtggtgcggcaaatgctacgaaagacagaggttgtctcggttggggacacgcgttttatctacgggcaacaggtggataagtaccgttttcacgaagagaaccgtcgggttgaagcggaaggggggcagcctgcggttgcgcgcccaatgttccagggtataacgaaggcggcgttgaacatagactctttcatatctgcggcatctttccaagaaacgaacaaggtgctcaccaatgcggcgattgcaggctctgttgatgacttgtgtgggttgaaggagaacgtcattatagggcacttaattcccgcaggtacggggatgcggcgttatcgtcaggtgaagctgtttgacaagaacaagcgggatcttgatgtgcagatggaggaagttatcaggcgtagaaaacttgaagaggaggcgcttgcccaggcagttgcgggtatggaaggggaacctgaaggcgaagcgtga

SEQ ID NO: 40267 - DNA, 375 bp, Treponema pallidum
atgccgacaattaatcaattgacgaggatagggcgtaaggcggttttttctcgtacgaagagccctgcgttgcaggcttgtccgcagaagcgcggagtgtgtacgcgtgtgatgacagttacgccaaaaaagccgaattctgctctgcgtaaggtggcgcgtgtgcgtctaagtagcggggttgaagtgacggcgtacattcccgggattgggcataatttgcaggagcactcgattgtgctgattcgcggtggacgtgtgaaagatttacctggagtacgttatcatattatccggggggccaaggacactcttggcgtggtggatcgtaagcgcggtcgttcaaagtacggggctaagcgccctcgcgcgtag

SEQ ID NO: 40268 - DNA, 471 bp, Treponema pallidum
atggggcggaagcgacgggtgtcgcgtcgggtaccgccgcctgacgcgcggtataacagtgtggtgttggcgaagtttatttgtcgaatgatgctggcgggtaagaaggcaactgcggtgggtattatgtacgattgtcttgaacgtattcagcaaaggactggtgaggagcctcttccggtgttcacaaaagcgttagagaacgtaaagcctgcagtggaggttaaatcgcggcgggttggtggttctacctatcaggtgccgatggaaattcgggaaacgaggcgtgaggctttaggtatgcgctggattatcggtgcagcacgcaggcgcagcgggcgtggcatgtcggagcgacttgcagcagagatccttgatgcgtaccacagcacgggaactgcctttaaacgtaaagaggatacgcaccgcatggcagaggccaataaggctttttcgcactatcgctggtag

SEQ ID NO: 40269 - DNA, 1074 bp, Treponema pallidum
gtgcattggtactttgacagggtatctcgagcgaggggcattatgaagtttttgcgttcgtgtttgataggtggtgttttcttttttgcactgtgtctttctgctgatgaagcgtttgtgtctgcgatgaagcttgcgcgtacgttgaatgtgtcggttagttggaatccgctttcgcaaacaattttattttccaaaggtgagcgacgagtacaatgtcgggttgggcaagtgcttgcactattggatggtagtgaggtgctgatgattgatccgccggtggtaaaggacgcggtggtgtatgtaagtggagggtttgcagagcggctaaggaaagtatttgggtattcttcacatcaacctgagcatcgtgtgggtgcggtgctcatagacccaggacatggaggaaaggattgggggacgaagggctcgtaccgtgagcagggtaaaacggtggtggtgaaagaaaaagacattgcgttgcgtgcatctcaaaatatctatgacttacttacggcgcgctatccggatcgtaaaatcattatgacgcggaaaggggattcatatcttacgcttgaggagcgtgtggcgatggcaaatggggtaaagctagggaagtacgaagcgatcctgtacgtgtcggtgcatgcgaatttttcatggaatacaaaggcttctgggtttgaggtgtggtacttgccgcctgaatatcgcaggtcaattcttgataaaaatgcggcgtccaaagaggtgctcccgatcttgaactcgatgctcgaagaggaattcacaatggaaagtattatgattgcgcgcagtatcgctgacggaatgcaagcaagcgtcggtgcacaaagtaaaaatcgtggagtaaaagaggaggcctggtttgtagtacggaacgcgaagatgccaagtgttttggtggaattaggctttgtgagtaatccggtagaggcgcggttgctcaacgatgcggactacttgaaaaggtgcgcgcagggaatctacaatgggcttgtttcttttatcacgtattttgaaggttcggggggatttaccggacccttatga

SEQ ID NO: 40270 - DNA, 318 bp, Treponema pallidum
gtgaagagagttaggagaacgcggtctttcgttgtcgatgcactttgtgacgaggtggatttgagccgtcgccatgtcgcgagggttgttgatagctttgtctctgtggtaaccgctgcattggaacggggggagacagtcgagctgagggattttggggtgtttgagtctcgcgtgcgtaaggcttccgtcgggaagagcataaagacaggggaggtggtctctattccaagtcattgtgtggtagtgttccgccccagcaagcgtttaaagagtgcggtgcggggatatcgttcgggggaggttggtgcggattga

SEQ ID NO: 40271 - DNA, 1641 bp, Treponema pallidum
gtgcggattgaggaatggtgtcgttcccgtctgggcgagtttttgttgtttgttctggcggtttccctgttcgcgctctctcaccctaaccctctgcttcccagagggtgtgctctcctagcgtatggggcgcttgctcctctcttccttttggtaaggtgggcctcgggttttgcggttgtgttctgggggggtgcgtacggcgcgttcagctacggtgcgttttcttattggctttttgtatttcatccggtggcgttgtgcgtagttgccggcttctctgcgctttttcttgcggcgctgtgtcttgcgctgaaggctggtggtgcattttggcagcggcgggcgcttctcgtgcagtgtcttgtgtggcttgggtatgagtacgcgaagacgcttggttttcttggtttcccttacggggttatgggttattcgcaatggcgtgtactgccgcttatccaagttgcatcggtcttcggtgtgtgggttgtttctgcattggtggtttttccttcagcgtggctcgcatctgtcctggggcagtgggttgaggaaagtgaaaggaatgctcgggcgtttttgtctgccgcgtatagccactgggtttcggcgctggtgtgggttggtctgtgtgggttttgtgtatgcgcggccaaggcgggatggtggccggattgcacagctcacacgcgggcaaaggttgcgctcgttcagcctaatggtgatccgcgacgcggcggtatcgagtcatatcgggcggattttagcacactgacgtatctttctgattgggcgcttgagcggtatccagatgttgatttggtggtgtggccggagacggcttttgttcctcgcatcgactggcactatcgctaccggcacgaacagcagtcatttcagttagtatgcgatttgctggactacgtgaacgccaagaactgcccgtttattatcggtagtgacgacgcatataagaagcgcacgaaggaggggaattgggaacgtgttgattacaatgcggcgcttcttttcattcctggggtgaacgtgcttccgccgagtccgcagcggtaccataagataaagcttgttccctttacggagtactttccgtacaagcgggtatttccctggttttacaacttcttggaaaagcaggatgcgcgcttttgggcccaggggagtgaattcgttgtgtttgaggcacgagggttaaagttttctgtcccgatttgtttcgaggatgcgtttgggtacatcacgcgtgagttctgtgcgcgtggtgcctctttgctcgtcaatatttctaacgacagttgggcaaagagtctttcctgtcagtatcagcacctgagtatggcggtgtttcgcgcaatcgaaaacaggagggcactggtgcgtgcaagtacgtctggccagacggttgcaattgcgcctgacgggcgtatactcgatgaactacagccctttgccccgggagttttggtggcggacgttccgattgtcacatgcgcatgcggaggctaccggtattggggggacgcgttgggagtctttttttgtgtggcgtccctttttatattgattgctggtggtgtgcgccatatgctgagatgcaggaggggcgggtggcgttga

SEQ ID NO: 40272 - DNA, 1560 bp, Treponema pallidum
atgaaagtttctgttggtaccgtcgtcggacaaggagagttgggtttggaagagggaatcgtggggaatcagattgtgtctgaggatagtgccgctgacgtgggggaatgcgatgcctacggcgggaggaagaagctcgtcatccgctctcgctcacggagacgagtggtgacgccaaaagcgctggaggtggaaaaacgtccgcgaagagccctacgctttaagcaaaatttctgcccagaagatgcggaaacaagtgagtcttccgccgacgttaagggtagggcgcgtttgctgattgatgatttaactgagatggggatgcatgccctgcgtgattttgcagtacagcggggtatctctcaagaagacgtggttgtcatgaaaaagtcagatatcatctttcacgttcttaaaaatcacactgagaatggtggcgttatctttgcttctggctcgctggagatattgcctgacgggtatggttttttgcgttcacctcagaacagttatttgcccggttccgatgacatctacgtctctccaagtcagattcgcctgtttaatctgaaaacgggcgacaccatctatgggcagattcgctcccctaaggagggagagcgtttctttgcaatgctccgcgtggaaacggtaaacttcgaagaagtagcaaaggtacaggaccgtgtccctttcgacagtcttacccctttgtacccgcgggaaaagctgaatttagaaacaagaacggaagatatctcaacgcgtgtcatgaacttgttctgtccgatcggaaaggggcagcgtgcgctgattgtagcgccgccgcgtacgggaaagacgattctcatgcagaaaattgcaaatgccatcacgcaaaatcatcctgaagtttatcttatcgtgctgctcatcgatgagcgtcctgaagaggtaaccgacatggagcgtacggttgatgctgaagttatttcttctacgttcgatgaacaggctactcgccatgtacagattgcagagatagtgcttgagcgcgcaaagcgattggtagagcaccggaaggacgtggtgattttgcttgactcgattacgcgtctggcgcgtgcctataaccaaacgatgccaacttcaggtaaagtgttgtcggggggagtggattcaaatgctctgcacaaaccgaaacgcttctttggtgcagctcgcaatgtggaggaaggaggaagtctgacaatcattgccactgcgcttattgaaacaggcagtaggatggatgaggttatttttgaggagtttaaaggtacggggaatatggagataaatctcgatcgtcgcctttcggatcggcgcctatttcccgcggtgagtattaaaaagtctggtacgcgtaaggaagagttgctcctgacggaggaagaaatgcagcgtatttgggtgttgcgtaaggtaatcaatcctatggacgatgcagaaattgtggaattgttaattgataagatgcgtaaaacaaagaacaacgaggcatttttgaggtctatgaatacgggtgcgttctcctcctga

SEQ ID NO: 40273 - DNA, 204 bp, Treponema pallidum
atgaaaaagggactgcatcctcggtacgaggagacgaaggtggtgtgtgcgtgtggtaacgtcatcgtgactgcttctaccgtgaaggacttgcgggtagagatttgttctgcgtgccatccgttttttaccggtaaacagaaactggtagattcagcaggacgcattgacaggttcaataggcgatacaaaattcgaggctag

SEQ ID NO: 40274 - DNA, 651 bp, Treponema pallidum
atgaggctttctgacttttatactgcgctgagactggcgttggttctccctttctttgcactctatcatatgtcacgttgggttgttatgtactttcctgctgccaatgtggggcgtgtggtgtctatcgcgtcggtgctgctttttcttttcattgcgtgcactgatttcctcgacggttattacgcgcgcaagtcagggaagtattctagttttgggaaggttttcgatccctttgctgatgtgatagcgaatgtaactgtcatgctttgcctcgtggcagacaacttcatgccggtttttctttttctgtgtattttgtatcgggaatttggaatgatgttcctgagaatgcttgcgtgtggcgaaggtcacgtagttggtgcccagagaatgggaaagctgaaaacagcctcgtatatgggtgcggtccttttttcgcttcttttgaaagcattgtacgcctttgaattggctggcgcggattggtatgagcgcatgcgtgcggttggccgcctggtgtacgtggtgccagtggtattggctcttgcttcttttttttcttacttgaagacttttttccccattctcaagcgcgtgtgtgggcgtacccgttaccctgtatgcaagacatgtcgtgaatgggattaa

SEQ ID NO: 40275 - DNA, 657 bp, Treponema pallidum
atggaactcaatgcatatattgaccacacgctcttaaggccctctgcgtctgaggccgaagtgttgcgtctgtgccaagaggcgcagcactatcgcttcgcgtcggtatgtgtaaatccttgccatgtggcgttagcagcaggtgcggtgcgggggacggcggtgcgggtgtgcagcgtgatcggttttccctttggtacgcacgtcacggaggtcaagtgcgctgaggcgcagcgtgcgttggacgatggggcgcaagagttggatatggtcgtccgtatagacaaggtgtgcgcgggagaaagagaggttgtagaacgcgaaattgcgcaggttgcagcgcggtgtcacgcgcgcggggccattgtaaaagtgatcgtggaaaccgccctcttagatgagatgcacatcgcgtttgcgtgttcctgtgtggaggcaggacacgcggattttatcaaaacatccaccggctacgcgtcgcgcgggggaacggaaggggatattcagtgctttaaaaaatatctgaaaggtgagacaaagataaaagcctcaggcggcatccgtacgcgcgcgcaggcgcagcgttttatcgagcttggctgtgcacggattggtaccagcaatggggtggcgattatggaagagcgtgcctcctag

SEQ ID NO: 40276 - DNA, 1368 bp, Treponema pallidum
gtgatacatactcacacgctctcgctgagcttcatgctgttttcattcttcttcggtgcaggaaacctcatccttccccccttactgggaaaacacgcaggtacgacactcgccacggcgttgctcggctttgccacttccgcagtcctcataccaatcgcagggctcattactatcgcacacgcaggcggtattgtccctttgtcagaaagggtaggaaaacgcttcgctcacttgtatccggctattactctccttgtcatcggaccggcgctttctatcccacgggcaggaatcgtcccctttgcgctcgccatcgctcccctcatccatcgggcgaataccacactacttgcgcagcttatatatacaacatgcttcttcattgtttcctactggctctgcatgcgcccacacaccttaagcaacactctcggcaaagtacttacccccgcgctcctagtactcgttctcctcctcttccttgcctccttcactccgacactcggtccctacctccctgcacagggcgcttacgctacccacatacccttcagccagggattcttagacggttacctcaccacggatgcactcgcctcccttatgttcggcaatatgatccttacctatttgcatcggacccgctacacaaccgcccctttccctcccactccagcaaacacccccgcagatatgcgcaccgtcgcctggatagcaggggtcatgctcttttttacctatggagtactggcgcatctcggcgcactcagcgcccgccaactcccccataccgttaacggcgcgcacatactcgcgtcggtgtcacgccaccttttcggaaaagcaggcatcgcactactaggactgatctttacaattgcctgcctaactacctgcgccggactgcttgtttgcgtcagcgaatacttccacaaacgcgcaccccgtgtgtcttacctgtgctggatacgcctgttcaccatatccagctttgcgctcgcaaatacaggactagaacgtatactggcatacggaacacccctactcatgatcctatacccaatctcgctggtcctcattggcatatcacacctcgagcgactcatacggataccacgcgccgcctaccgcctgacagtatggagcgcaggaacactcagcacctgtgcagtcggtacgccgcttgtggcgcacacccggataggacacgtgttgaatacactcatacatacccttccactcgcacaggaacagctctgctggcttatccccagcgcggcagttcttatacttagtactgcgcatgcacgcttacgtgaaaaaacatgcacgcctcgcggtacgctacccctcacggataactga

SEQ ID NO: 40277 - DNA, 1437 bp, Treponema pallidum
gtgcgcgtgtttcctgtctgtccgctgctgcgtgaagtgagtgagcgtttcatccgtgcaggattttgcatttatgttgtcgggggtgctgtgcgtgactttctcctgaaccgcagtgctcatgattgggatcttgcaactgacgctccccctgagcgtgtgcgtatgctttttagacgcacggttcctactggtattgaacacggcactgttacaattcttttcagagggcattctattgagtgcactacgttccgtgttgagtcggattattccgataggagacatccggattctgtttgctttgccgcgcgcattgaggacgatttggcaaggcgcgacttcactgtcaatgctttcgctgccgcgctcccctcgggggaaatcatcgacgtatgtggcggttacgccgatttgcgtaacggtcttatctgtagcgttggggatgcacatgctagattttctgaagatgcgttgcgtcctttgcgtgctgtgcgttttgcagcgcagttatctttttccatcgaagcgcgcacgcgtgaagcaattatcgcgctacgcgctcatactgcacgtatttctcgtgagcgggtgcgtgatgaactttctaagatgctttgtactccccgtccgagtattgcgctccgcctaatggaagagactggattgctgcacacactttttcctgcgctggcgcaggtgtgtgggagaaacgaaggggaggagaaggagacgcaggacagtctgcaggtttcaccgcagcaacgacgtgacgctcgcacctttgctgcgtgcgcgtttgctgcgtgcgatcgggtgcctgcagagcttgcggtccgccttgcagcacttctctttccgctggctcactatcgtacgcttcctgcttcaggaacgggggcagcgttgtttatatgccctcctgcacttgctgaagcgcgcgagcttttgcgtggcctgaagtacccgaattacctgacggctcaggtgtgtcacttggttgcacacgcgcgttttactccacacgaatgttggtctgaaggaacgctccgtcgtttcgttgtgacggtaggtactactcagctagaatcgctgtgtgtcctgcggcgtgcctatcttgctgatgacgattaccgcatatctgctcagcctggagtgtcctgcgagaatgcgcgggaaggaaaaaaaatgcaggaacagtttgaaatattcgtaacacgcgtgcgcagggtcgccgcacaattgcctgtgcacggcatacgcgaccttgcggtgaacggacgcgacttgatagcgcagggcattcccccaggtcccaccatagggcacatcctgaacgcactgtttgatatggtcctcatgcaaccgtcgcgcaacacgcgtccgcagcttttggaacatgcgcaggagattgtgcgcaccatggcgcagaattag

SEQ ID NO: 40278 - DNA, 762 bp, Treponema pallidum
atgggtaaaaccttggtgttcgtaaatcaaaagggaggggtgggtaagacaacctctgccattaacttgggtgcgtatttagcgcttgcaggaaagaaaaccttgctcgttgattttgatcctcaagggaacatgtcctcgggtctcggcttagctagagggttgaccgtgtatgatcttcttgcaggtaaggcacacatcaacagcgtgctgcgcactacaccagtgcataacctttttgctatccccgcttccatcgatctttctggcgcgacggtggaactagtagatgaacaagaccgcgagctctaccttaaaaagatattggcagaagtaaaagacacgtacgactttatcctgattgattgtccgccctcgctgggtatcctcacattgaatggacttgcagcggcaaacgaggtgttcatcccattgcagtgtgagtattttgcacttgaaggcctcacactcttactgcagacggtaaagcgtgtacaaagtggtctgaataccgcgctttcgatcggaggcatcttctttaccatgtatgatactagaactaagctggcgcaagaagtggttaagcaagtgacaacctattttggggacaaggtgttcaatactatcattcctcgcaacgtaaagttatccgaagccccttcgcacgggttacccattagttcttacgatgcacagtgcgcaggggcacggagttatgagaagcttgcacgggaaatagtggcacgcgatgggcaaagataa

SEQ ID NO: 40279 - DNA, 885 bp, Treponema pallidum
gtggtgttgtcgcacagcgtccggcgcgctcagcgcgtggatattatgaaacaattgctgataaccgcagaaccggattccggcgggtatgtgcagctttcaggcaaggattttcattacatggtgcgtgttcgacgcgcacgcgtgggggatacattcaccctgcgtacgcaggccggtgcgcagtacagcgcagtagtatccgctctcgacatacatacgcgttcactaatcctccactgcacgcccatgcccccagtggatgagaaaacgcaggtaacgcttgtgttgcttcagtggatgccccgtgcgcgcgtctttgacgcgatcgttcggcatgcgacagaacttggaactgcgcgcatcataccgattcgaggagaacgttcgctcatccgcgatgaaaaagacacccagcatgcacgcttgcagcgcatcgtgcgggaagcgcgtcaacagtctggttctgccgtgaacacccgtgtggacacgctccacagcctccttggcgcactgcatatgctcgagcaggaatttccttatccttctgcagtgcgtatctattgcagtgaaaaacacgtgggaggttcctttcacgaactgctttggacaggacgttctacacactgcaccgcgcaccgtacgcccacagagccaaatgcgccgcacaacacgccggatgtgcgcgcgcaggcggttatacttgcagtaggcgctgaaggcggtttttctgatacagaagagcgcacgcttcatgacgcgcactttgcacccctgcactttcgcacgaatgtgctgcgcgtagaaacggccgcgctctatgctcttgcaggcgcacatctccttcttagtgaggcagcactatggaacaaacgcagctggtaa

SEQ ID NO: 40280 - DNA, 2592 bp, Treponema pallidum
gtgcatggggggggggagagagagagaagtttcgttcatcctcgcacccgttgcgttgcggtgcgtgcaaggactgtgctacagtgccggccgatggggaccgtgatcatcgctcttgatggacctgcaggctctgggaagagcagcgtctgtcgtctgctcgcgtctcgccttggcgcgcaatgtttgaacacgggttctttctaccgtgcatttaccctcgccgcattgcgtagggtatcggagttggccgtgcaagcgtgctctccttctccggaccctgatgcggcggtcgggtgcgcggctgttccacacgcaacaaatctggacacatcatatgctcctctgacggcccagaagaaggttgcactttttgatgaagcgtattgggtttcgtttgcgcgcacagttgcgctttcttatcgtgcgggtgtgatgtacgtgggcgaagagaacgtggagtcactgctgcgttcggatgaggtggagtcggcagtctcgtacttcgcggcaatgccggctattcgggcaattatgacggggaagatccggtcggccgtttgtggtgcgcgggtagtttgtgaagggcgtgatctaacgacggttgtgtttgtggatgcggacttgaagtgctaccttgacgcttctattgaggcgcgtgtggcgcgtcgttgggcgcagggaacgagccggttatcgaagcaggaactcgagcagcgcatgcgcgcgcgtgacgcacacgacagggcgcgcaccgtgggggggctcaggtgtgcgcctgatgcgctgtacgtggatacttcttgcttgaccattgaggaggtttgtgaaagaatygcgcgcgaggcgcaccgcagagctttgtggggaggagagcgttcagtggaaaatcaggaggggaagggtacaccattggtgccgcggcagctgcaggagcggtattcgtttgaggctccggaacctggttctgttaggatggggacggtggttcaggttaatgcggggacggtgtttgtagacatcgggggaaaatctgaagggcgcgttccagtggaagagtttgaggcgccgccgaaggcaggggatggcgttcgggtgtatgtggagcgcgtgacgccttatggccctgagctttccaagacgaaggccgatcgcttgggtttgaaagttaagttacgtgatgcggagcgagacgggactccggttgaggggaggatcgtccgtctaacggaaaagaagagtggttttgaagtggacttgggtgcggggatgatggcctttttacctatcagccagtcggactgtcagaaagtcgacgcgcctgagagtctcattgggcttacgtctaagttctatatcgagcgtatatcccaaagcaaacagcatcgcggcaacgacaacattgtcattaatcgacgccggtatttggaggagcgtgcgcggcaggcgcgcgaggagttcttcaattcggttcatattgaagattccgtatccggagtggttaagagctttacgagttttggtgctttcattgacttgggcggtttcgatggcctcctgcatgtgaatgacatgagctgggggcacgtggcgcggccgcgcgagtttgtgaagaaaggacaaaccattgagttgaaggttatccgcctggatcaggcggagaagcgtatcaatttgtccctgaagcattttcagccggatccgtggcttgagtttgaaaacaagttcggcgtgaatgatgtggtcaaggggcgtgtaacgaaaatcgctgatttcggtgcgttcattgaacttgctgagggtatcgaggggcttgcgcatattagtgagttcagctgggtaaagaaaacgagtaaacccagtgacatggttaaaattggggatgaagtggagtgtatgatcctcgggtatgatatccaggcgggacgggtgtctctggggcttaagcaggtaacggcgaatccttgggaggaaatagaggctcgttatcctgtgggtgcgcgctttacgcgccgtatcgtaaaggttacgaacgcaggtgctttcattgaaatggaagagggaatagacggctttttgcacgtcgatgatctgtcctgggttaagcggacgcgtcctgcagaccatgagcttgaggtaggtaaagaaatcgagtgtatggttatcgagtgtgatccgcaagcgcgccgtattcggcttggtgttaagcagttgagcgacaatccgtggcaggtgtttgcgaacgcctatggggtagggtctaccgtggagggggaagtatcttccgtgacggattttgggattttcgtgcgtgttcccggtggcgttgaggggcttgttcgcaagcagcatctggttgagaatcgggatggggatccgggtgaagcgctaaggaaatacgcagtgggggaccgggtcaaggcagtgatcgtagatatgaacgtgaaggacaggaaggttgctttttctgttagagactatcaaagaaaggtacagcgtgacgagctttctcggtatatgtccgccccgcggggggaggacgaaggctcgtttacgctcggtgatttgatgaggcaaacgtctggaaagtga

SEQ ID NO: 40281 - DNA, 834 bp, Treponema pallidum
atgtcaggcgcacaggttaggttggtggttaccgatatggacggtacttttttggatagcgaaaataacattccacctgagaataagcaggcggtaaagtgtctgcacgagaagaatatcccttttgttattgcaactggtaggatgctgcctatggtgcaggagtatgtgcggcagttgcagttggttggaccggttgttgggtataacgggggaatgatccgtgaaattaagacgggcaaaactatttttcaaaaatgttttgctgctgaagcatttgctcgtgttttggaatacggcatggcgcatcgcctagattacctagtttatacgtctgacagtgtatatgcaccggactacagtgtccgtatacgggcgttccatgaatacaatcgtttggcccgtcgtggggggagcgcgcttatccctatctttcccatagaagcactatcaggcgatcggcagcgacaggttatgaaaatccttgtgcaaaatttttctccctcagatcttgaaacagcagctgagtttattggcagtttgcatggagtgcactgtgaacactccatgccgcacctgattgatgtaatgcccgagggagtggataaagggaatgccctgcatatattgtgccagtactacggcatttctttggaacaagtatgcgtgtttggtgatcagaggaatgatatcgtcatgttcaaagcagcgggcgtttccttttgtatgcgtaatggtcatgaggaagcaaaaaaacacgcaacgtatattgccgaatctaatgatgatgcaggttttgcacaggctttgaagcgctatggggtggtagagtaa

SEQ ID NO: 40282 - DNA, 882 bp, Treponema pallidum
atggtgcgttctgcgcgttcagagtacaagtgtcgcctgtgtgcccgttgtgatggatacgggtgtcgtggtcagttaccagggatggggggtgtttttaacagtgcgaattttatcgcgaactgccttgcatggaaaaaatatgttccgcaaaggcatgaactaccggtcgtgcgtcttgcgcctatgacgggtgcagttgaaaacgtcggatatcctgacgaggtctcgttttattatcggctcatcgaagcggtgtccggaacgggtgtcctgttgagtgtgggagatggttgtccggacatcaaactgcagtcgggtattgctgcgttgcgttccttcaaaaagaaggctgcagtgtttatcaaaccgtatgtgaacaaaaaaatttttgaacgtatcgagtggggtcgggacgttgcggagtttgtgggtgtggatatcgatgcgtaccatattgtgaccatgagagataaagtgcagttagagaaaaagactcctacgcaccttcgtgcagtcagacgttttgcaaaacttcctatcgtggtgaaaggaatttttgcgccgcgcgatgtcgaattagtcagagagttgaaaccggatgtcgctatcgtatcaaatcatggaggcagggttgaaactgcgcgcggaagcacagcggactttctttttgaatacggtggagagttagcgcgctgtgccggtgaagtgtgggtagacggtggtattcgcagttatgcgcatttgtgcgcagcacgggagttgggtgcgcagcaggtgctgatagggcgtccttttatcacagctcttctcaaaggaggaaagggtggggtgcaacttctcgtgcggaatatgacggataggtccgttcggtgtgtatga

SEQ ID NO: 40283 - DNA, 1266 bp, Treponema pallidum
atgagatgttcagggtttactgatttggcgatcgtcgcctgtcctggtggcgagcacttcgcggacgaaactatcaaacatttgacgcgtgtgtgtgaacgcaagtttcaccagagaatggaccgtttgacggaccgctacggtcttgactcggggtcggtgatacgagatgcgaacttttaccgggaccttttttccacagagttgtgtgcgcacgatgacgtacgtcgttttaatccaccgcattttaaggtggatgcacagtttatctgttttctaaatggtgagttaaaaacgcaaattaatgaatgtattcgtggcaaggacgtttttattttccaagatgtagaaaatcatcaaccagtcctggtgaataacggaaaaagtaaaaaaatattctccgtgaatgatcacgtgatgatgctcattgtgaccatagatgcagttcggcacgcgggagctgggcgcgttaccttggttttacccacttatccgtatagccgtcagcacaaaaagtgtggacgtgagggactgacggcgggtttgctcgggagtgtatatgagtatcttggcgtgagtcacattgtcactcttgatttgcattcacgtgagattgaaaatgcctttcatcgcacgcggcttgaaaacttacacgccagttatcagattatccgggagttggcaaagattgaaaatctttctgaccccgatatcccttttgtagtagtggcgccggacagcggggcggttgaacggaataaattttattcttctggtttaaaaaagccactcgcgatgatttataaggtgcgtgattattcggtggtcgcgcaaaatgcaaagcagagcaatattgtagaaattaacttgctcggcgatgtggaggggaagacggcgtttattgctgacgatatgcttggcagcggaggtacgatgctaaaggcgatggaatttttgaaaagtcgcggagcaaagcaggtgatcgcggcagtgagtttacctttctttacgggaaatgcacttgagttatttgatgaagcgtacgagaaacggtatttctctcggattattggcacaaatgcggtgttccacacacagctttcgcacaagcagtggtatactgaaaccgatgtgtcagggttgttcgcgcgcgtcatcgcgcgcattcatcataatcaatcgttgagcagtctcttggatgatcgcagtatcatcgagcgactcctacacgctcgcttgtccgttgcggggacaccgcgcgcatag

SEQ ID NO: 40284 - DNA, 1245 bp, Treponema pallidum
atgggttcggggatctttgtcgcggacatcggtacgtcttccctaaaagcggcgattatttcccaagatggaaaggtgttacagtaccagcgcgtgttctttcctcagccggtgaaggcccaggattgggtgcgttcattttttacggtgtttgagcggttgcgtgccgtgcatcacgttattgccattactatttcgggcaatggaccgagcgtcgttgccgtgcacaagaagagtcatgccgaggatcaactgattttgtggaatcaagcgggggcgtctgatccccggtgcggtgtttctctttttttgccaaaggttttgctccttttgcagcgattgcatttttgtgcgcgtgatgtacagttttttctttcttctcacgaatacttgatatatcgactcacggggtgtgcggttacggtattaccagagcgacgttacatgccgacgtactggacgtctgagagtttacgcgcgtgtgcgttacctgaaacgctctttgcgccgttcgtggctcctggctcaattgttgcctcctatcggggaataccggtagtctgcggcgcgccggactttgcggcagcactcattggaacaaatacgttacatgcagggagcggatgcgatcgggcaggatccagcgaggggttaaatgtatgtgttcgtctgcctcctgcgatcaggtctgcggatgcaagggtccgcgtgttaccgtctttgagagcagatttttggaatgtctcgtttttaattgcggattcagggagtcgttttgcctcttatatgcggcgcacccatgctcaagggtttggggaacggatgggtcaaattatggcgttaccttttcagctgcatgatgcgtatccccccaccgtggtgggagaagggagacagctggtagaggatcttgcctttgaggtgtgtgcaggtctggagtatctggagtctgtgacccagttgcaaccggtatacaccgtttcaggtggacaggcaaaggatagtcgttggttgcagcttaaggctgatgtcagtgggcgttgttttgtgttaccagaaattcatgacgcagaactgacaggaaacgcggcgctcgcgtgtgttgccttggattttgatgcggatatgcaaacagcagcgcaacggctgtgtcgtctcaagcgtgagtttattcccaaccgtgccagacacgaacagtatgcacagaagcgtcttttgcgtgctgcgcgtgaggcacaggggtag

SEQ ID NO: 40285 - DNA, 1947 bp, Treponema pallidum
gtggcgtgtgcaaagcgcgctacgggggcagcgcttcggcaaaacgcgggagctggctgtctacgctctggcaagggtttttctatgcatgaaacgtcctacaaacctatccaccggctgtcccctgacaccgctaaaaaaatcgccgcaggagaagtcatcgagcggcccgcctccgtcgtgcgcgaattgctcgagaacgcactcgatgcaggcgccaccaaaatccatctggaaattaacgcaggcggctgcgcgctcatccgcgtgagcgataacggccacggcatgtccccccaggatttgttgctatgcgctgaagcacacaccacgagcaaaatatcgtctgcagacgacttattgcagctgcgcacgttaggcttccggggagaagcactcgcctccatcgccgcagtcagccgcctgcaccttacgagcacccgatcagggcccctcgcgtggcactaccagccaaaggctgcaggcactgcagcgcacgtaccgccggtgccgcagggcaccgaagcaggcgtgctagagcctgcaagtcttgagcgaggcaccgtcgtacgcgtcgagcagctttttgaaaactttcctgcgcgcaaacgctttctcggacgccaaagcgcagagaccaccctgtgccgcagcgcactcatcgacgtctccctcgcacatcaccccgtggagtttcgcttcaccgtcgacggaacgcacaagctcaccctgctcagtcagcaaacccggaaggatcggtgtcttgaaacgcaaatgctcaaaggagatcctgcgctcttccacaccatagaaggaggtgactgctcgtttcactttcaccttgtactttcagaacccgccatctgccgcagagaacgccgcggtatttttaccttcgtcaacggacgacgcatttttgattacggtcttgtccaggcacttgtgttaggaagcgagggatacttccccaatggcacctttccggtcgcctgccttttcctcaccgttaacagcgaacgtattgattttaatatccaccctgccaaaaaggaggttcacttacaggactatgctcacatccgccacacactcagccgcagcgttgcgcacttctaccgtcagtgcactattgctcactacgtacgtgcagaacctgcccacgcacctgccactcagggcaacgcgccaacacattcctcacccccctgcaccggcgtacgagaagaacccgccgctccctgcgcgcacacaccccggtacgaatccctgttccctctacccgtgcagcatgcgcacctgcttcctccgtcacctcctcacatctcgtgcgaacacgcgcgcgattgcactcacccagcccccgctgccgaaggagatgcgcctgtgcacaaccatacccatacaggtgcattcaaagtactcggacaggtagcaggaacattcatcgccgtagaacgcaacaacgctctctaccttatcgatcagcacgcagcacatgaacgcattatttttgatacgctacagcggaaccttggcactgcacaaatacttcttattccctaccacattcacccacgctcggatgaagaggcgcgcatcatgcaccgcgcctgcacagaactttctcctgcaggatttcgatttcacgaagaaccagacggttcgtggcacgtaactgcggtgccgctccactggcgggggagcgaagagcaacttgcacacgatatcctctactcaggaaaaaacgcgcacgacatcctgcgccacgtcctcgctacctgtgcctgccggtctgcgtgtaaagacggcaccatcctggatgacgcaacgctccactcgttagtggagcaggcttttgcattaccacaatcgaggtgtccccacggacggcccatttggattgtcattggccgagacgaattgttcaaacggatcaagcgcacgtaa

SEQ ID NO: 40286 - DNA, 1734 bp, Treponema pallidum
atggatccggcttttatctttattacaggcggtgtagtttcctcgctgggcaagggtattgccgcaggtgccatcggacttttgcttaagagccggggtatatccgtggtgaatcaaaagtttgatccctacctgaatggggatcccggtaccatgaatccctatcagcacggggaggtgtttgtcacgcaagatggcggcgaaacggacctggatctgggccattacgagcgcttcacggacgtgccttcaagtagattcaatagcacgactgcggggagcgtgtaccgggctattttggaccgtgaacgcgcgggaggatacggaggtgctaccgtacaggttattcctcacgttacggatgaaatccaggcgcgaattcgcgccgctgctgctaccacgggggctcgggtggttatcaccgaaatcggtggtaccgtcggtgacatagagtcgcttccgttcatcgaggcgattcgtcaaatcaggcgtgttctggggaaggagcgctgtctttttattcatttgggtttagttccctacttacccagttgtggtgaaatgaaaaccaagccgctacagcacagcgtaaaggagctgctaggacttggtgtgcagccggatgtcatcctgtgccgcagcgagcgtcacatcacggatgcggtgcgcgaaaagctgagccttttttgcaatgttgagcggcgtgctattgtcgagaacgtgacggctcgttctatctatgaggtgccgctccttttggaagcagaagggctgggagcgctcttgtgtgagcgtttgcgtctttttgatacctgctgcggggggcaggtggcgcgtaatctcggtgcaggaggcgcgcagtcggctgtgttgggagcgggggggacggtccgtacagacggtggtctgcatcctgcagcagggcagggggcagagccagatcttacggcgtggcgcgcaatggtccgtgcactgtactatccgcggcgggagcttacggtggcgctggtgggtaagtatgtgtcgcttgcggacgcgtatttgagcgtgagcgaagcgttgacggcggcgggtatttgccatcgtgcgcgagtggacatgcgctggatagacgcagaggaaatctgcagcgtgcaggacgctgggcacgctcttgcggacgcagatgcgctggtaattccaggtggctttggcgtgcgggggattgaagggatgatctgtgcagtttcgcacgcgcgtgtgcagaacctgccctatcttggcatttgcttggggatgcagattgcagtcattgaatttgcgcgcaatgtactgttgctggcaagtgcacactctcgagaatttgcggtagacacccctcacccggttgttgatcttttgcccggttgtgtagataccccaacgggtggaagcctgcgtctgggacagtatcgctgtctgcttgcggaaggttcgcgcgcgcgtgcactgtacggtaggggggaggtctgggagcggcaccggcaccgctatgggttgaacgcggcgtatcgagcgcgctttgaggcgagcgcgttgcgtccggtgggagtggattcagactgtggcgcagtggaggtggtggagcacggggagcatccgtggtttttcggcgtgcagttccacccggaattttgttctcgaccgaaccgggctcaccctttgttccgggcgctggtggcggcgggcttggagcgaaaagacagtcgttcttga

SEQ ID NO: 40287 - DNA, 615 bp, Treponema pallidum
atggcagtgaagcgggcacggggaaagattgtacgtcggctggggattaacatttttgggaatccaaagtacacgcggcttttgggcaagaagcccgcgcctccaggcaaggagcatggggtgaagcagcgggcaaaggtgtctgtgtacggggagcagctaaaggaaaagcagaagtttcgctttgcgtatggaatgtccgagcgacaattccgtaatctttttgctcaggcacatcggatgaagggcgtgacgggtaacaatatgctgtcgctaatggagcggcggctggataacacggtgttcaggatgggctttgcgatcagtcgtgtgcaggcgcggcagatggtgtcacatcgttacttccttatcaatgggaagacggccaatatcccttccatgcgcattagcgcgcatgatgtcatcactactaagaaccggaaaggtattcatagcatcattcgtcacaacctgaccctttctcaggggcagcgcggttcctggctaaacgtggatgaggagcagctttcggcaactgtctctgagctgccgcgtgcgcaggatatccatccggtggggaatatccaacatatcgtggagtactactcgcggtag

SEQ ID NO: 40288 - DNA, 1029 bp, Treponema pallidum
atggatgatggtcccttgagggttgttgtgcttacctcatttgtcatactcgtagtagtctgtgccgttgcgctgtgtactttttttgtgttcctcaaaagccctgatcaggtgatgactccccatatcgtgggcaaggactttgtgtctgctgctatagagatgcaggcaaaggagctgtatccccgcgttcagttgcggttttctacccgtgagaagcctggtgttgttcttgaacagaacccacctgcgggggccatcgtcaaggctgggcgctacgtggacctcgtagtgagccaacaagcagtgactacgcacgttgaggactatcggggattgcaggttgaagaagcggtggcgcgcatcgctgctgctgaagttgagcgccgcatctcagtgaaaacaccccacttatatcggttcagcactggcgcagctggcaccattttggagcaggaccctgctcctggcgcggttctgtctgcggatgtagagttgcgttttgtcgtcagtaaggggtctgagcgcgagcagactacagtccccctattggtaggatatagtttgcctgagctgtaccgtgttatggcgcagacggcgctcaccttgcagtttaccgtatctcccccgtctccttctggggagagaaaagacggagaagcacgtggaagaacgcgtgccaatgcgcaggactacgcgcgggtttcagcacaggatcatgaccctggttcgcgcgttgaagcctttcgcgccatgcaggtgcaggtgctctttccagagcgtggagaggctcacgaaatatacggtatcttagctctcgatctgccgcgttatccgtatcctatgtcctgtgtgttggatgtacagtatccagggggggtgcgtaccgcgcttgcaatgtttcagcatccggggggacgtttcaccatcccctatggattgcctgcaggggcgacgctcttcctaacggtgggggggaaggaattgttttctggagaggtgggtgcattgcctcatgcaggttcctag

SEQ ID NO: 40289 - DNA, 2703 bp, Treponema pallidum
gtgaggtccctcgcgtcagatacccctctcatgcgtcagtaccacgccattcgggcacagcatccggatgcggtcctgttctttcgcttgggcgatttctacgaaatgttcgattccgacgcgctccacgtgagtaccctcttggggctcacccttacaaaacgaaatggaacacccatgtgcggggtgcccgtccataccgcgcgcacgcacatagcacgcctgcttaagcacggtaaaaaagttgccttgtgcgagcaggtttctcatcctgtccccggagaactcacacagcgcaaggtaattgagattatctcccccgggaccgcagtggaagatgactttctcagtcagggattttcccaatacttagccaccgtctgtgcctcagacgccaccgtcgccttttcttacctagaagtcagcaccggcgccttcttcatcaccagctttccccgcgccgaagcagcggacgcattgcaaaaagagttcggacgtgtccagccgtctgaggttctcctgtctgcttcagtgctccgttcactgcctgaacttgccgctatcctcagtctctacccccggctcgttcgtaccaccggcgcagatgcgctttttaatcccgagcacactaaaaaccgcctgcaccattgctttcgcacacgcaacttggattgcctcaccctcctgccccattcgccagacctcgctgccgccggggcgctgattgcgtatttggaagaaaccacgcgacacccgctctcccacgtcagtgccatcacccgctaccatatccatgactttgtagaaatcgatgacgctacgcgcaaaaatctagagatacttcaaaatctccacgacagcacccatgcgcattctctttttgaaacactcaactatacacacaccgccatgggtaccaggctcctgcgctattggctgcaccaccccttgcgctcccaggaggaaattcaaaaacgcctcagtgcagtggtcttttttcatcaccgtccccacatcctcaagacactgcgtgcaacactctcgtgtgttcgggatgtggagcgcctagtcgcccgcgtggcgttagaaaaggcgcacggacgtgacttgctcgccttaaaagaaagtctcagggcaatccttaccttccgcagcctcgagcgcgaaagtccctttcccccagaccttcttccctcagaaggggataccccggtgctgcaggaactgtatggtcttttagaacagtctatcaaagaagattgccccgtaacgctaagcgatgggaaccttatcaagcgtggtttttctgcgtccttagatgaactgcaccgcgtgcgtgacaatgcaaatgaaattctaaaacaatatttggcagaggagcgtgagcgcacgggtatcggtacattaaaaatgaagtacaatcgcatgctcggtcactttctggaggtatccaaagggcatctttctgctgtccctgcgcactttattcgtcgccgttcactgagcaatgccgatcgctttaccaccgaacagttgtcagaattggaagcaaaacttgcccgcgcccgtgagggcctcgtttcctttgaacaagaactctttgcagatatccgccgtaccgtatgttctcatacccagctgctgcgcacgaacgctgcacgggtggcacagctggatgtgctccaatcttttgcgcacgctgcgctccagcatggctggagtcaaccggtctttatcaaagacggtgcacttcgtattacggggggcagacatccggtggtggaacttcatctcccctccggggagtttgtacccaatgatctgacactttcttcaagtgaacatgcggtgttgccgcgctttgcgctcatcaccggaccgaatatggcaggaaaaagtacttttttgcgtcagactgcgctcatttgcctgattgcgcaggttggctcctttgtccctgcagaaaaggcagagctcacccccgtcgatcgtattttttgtcgggtaggagcggccgataaccttgcgcgcggggaatctaccttcttggtagaaatgagtgaaacagcacacatcctgcgtgcagcaacccgcgacagccttgttatcatggacgaagtaggacggggaacggcaactgaagacggtttatccatagcgcaggcagtcagtgaatatttgttgcatcatgtgcgtgcaaaaacgctgtttgcaacacattaccatgaactgtcccgtcttgcccacccgcagttagaacacctcaagcttgatgttctagaaactgacaataccattgtatttctgaaaaaagtgacgcccggttcttgcggcagttcgtacggcatttacgttgcgcgtctggcggggctccctgaatcggtactggcacgcgcgtgtgagcttttgaaacaactgcagcagcgggcaggatctgctccacgtgcgtctgctgcgcacgaagcagatgcagtggctcaaacagaagcagtacacgcgcacaaggcagcgtctaaaccgtgcgcgcagcgtgtgtcggcagatctatttactcaagaagagttaataggcgcagagattgcatcgttgaatccagacgccattacaccgcttgaagcgctgacactcatcgcgcggtggaaacgcagcctccgcggttctgcaacgcagcagagcagcgccatgacaaaacggaaggggtaa

SEQ ID NO: 40290 - DNA, 1725 bp, Treponema pallidum
gtgaataattccgcactccgtgcgtacctgagtacgcgtgctcctgaccagatacatagtgcttttgttgcgtatttggccaatcttgatttagttgcgcaccagtttccgcagattgcttctgatattgtgcaggagctgatagatcagcggtcgtatgtaaagttaatcgcaagtgagaattacagctctcttgcggtgcaagcggcgatggctaacttgttgactgataaatacgcagaagggttcccccatcatcgctactatggcgggtgtcagaatgttgattctattgagtctgccgccgctgcagaagcatgcgcgctctttggtgctgagcacgcatatgtccagccgcactccggtgcagatgcgaatcttgttgcattctgggctatcctttcgcggcaaattgaaatgccaaccctttcttctcttggtgtcaccgccgctacgcatctgagtgaggaacagtgggaagtactgcgccagaaaatgggtaatcaaaaacttatggggttagattatttttcaggcggtcacctgacccacgggtaccgccaaaatgtttcaggacgaatgtttcgtgtggtgtcctacgcggtggaccgagacacaggactgctcgattacgctgcaatcgaggcacaggcaaagcgggaaagaccacttattttacttgccggatacagcgcgtatcctcgttccattaatttccgcatctttcgggaaattgcagacaaagtgggcgcagtactcatggctgatatggctcactttgctggactggttgcaggcggtgtttttacgggagacgaggatccagtgcgctggtctcatatcgtgaccagtaccacacacaaaacgttgcgcgggccacgcggtgcctttattttgtgtaaaaaagaatttgcagaggcggtggataagggctgtccgcttgtgctcggcggcccgctgccacatgtgatggcagcaaaggcggttgcgtttcgtgaagctcgaaatgctgcttttaaaacctatgcgcacgcagtccgtgataatgcgcgtgcgctggcagatgcctgcatacaacaggggatgcagctgcagacaggggggacggataaccatctgctattgcttgacgtgcgtccgtttggactgacaggtcgtcaggcagagcgcgcgctgatagactgcggagtgacgctcaaccgtaactcgctcccctttgacccaaacggcgcatggctcaccagcggactgcgcatcggaacccccgcggtaacgagccttggaatggggcctgaggaaatgaaaagaatagcgcgcctgatcgcgcgcgtgctcggcgctgcaacgcctgtgcggacaaagacaggtgcgctaagcaaatcggcggccgaggtgcccggcgaggttagaagctcagtctgctcggaagtgcgggagctgctcgcacgcttcacgttgtaccctgaactcgacgaacccttcttgcgcgcacactttacgcgtcgccctgcgggacaaaacacctgccgacgaagggacttgaacccttacggggttaccccaacagattttgagtctgtcgtgtctgccagtttcaccacgtcggcccgcgcgcagcctatcacacgaggaacaaaaggtacagctgttcatgtagtcttcttgcgtgaggccccgtgtctcccattgagggagccgttatttttctcccatgaggagttttag

SEQ ID NO: 40291 - DNA, 1467 bp, Treponema pallidum
atgggcgcagacattgggttcattggacttgctgtcatgggagagaatctggttctcaacattgagcgcaacggtttttccgtcgcagttttcaatcgcaccaccacggtggtcgaccgatttcttgcagggcgcgctcatggcaagcgaatcaccggcgcccactccattgcagaacttgtttcacttttggcacgtccacgcaaaatcatgctcatggtcaaagcaggcagcgcagtcgatgcggtcattgaccagatactgccccttctagaaaagggggacctcgttatcgacggtggcaactctcattaccaggataccatccggcgcatgcatgcgctagaggccgcaggtattcatttcattggcacaggagtttcggggggagaagagggggccctccgtggaccgtccctcatgcctggaggctctgctcaggcttggccgttggtttctcccattttctgtgccattgccgccaaagccgacgatggcaccccgtgctgcgactgggtcggcagtgatggcgccgggcactacgtgaaaatgattcacaacggcattgagtacggcgacatgcagataatcgccgagggctactggtttatgaagcatgcgctgggcatgagctatgagcacatgcaccatacgtttacccgctggaacacgggccgcttacactcgtacctgattgagattaccgcggctattctggcacatcaggacacagacggcacaccacttttagagaaaattctagatgccgctggacagaaggggacgggcaggtggacgtgtgttgcagcgctcgaagaaggcagcccgcttacactgatcacagagtcagtgatggcgcgtagtctttctgcgcaaaagcaagcgcgctgcaaggcacatcgcgtttttggttctcccgtgaaagtctccaaagcagaaacgctaagtgcacagcagcgcgaagaactggtgtctgcactggaagacgcgctgtattgcgcgaaaatagtctcgtatgcgcagggttttgagctgttatcgcatacggcaaagcgccgaggatggacactggatttttcccggattgcatcgctgtggcgtggcgggtgtattattcgttcaggattcctgtccaagatcagtgcggcgtttgctcagcagcacgatctagagaatttggtacttgctccctttttcgcagaggaattaaagcgtgcgtgtccaggctggcgcaccatagtggcagaatcggtacggcaggcgttgccagttccggccctctctgctgcgttagcctggtttgatgggttcaccggtgctgctttgccggccaacctccttcaggcacagcgagattattttggtgcgcacacctacgagcgcacagatgcgccgagaggagagttttttcacacaaactggacaggcaccggcggtgataccattgcaggaacctactcaatatag

SEQ ID NO: 40292 - DNA, 1218 bp, Treponema pallidum
atgccagatattggagagctgctaaagacgacgcgcgaacgcaaacacctcagtctcgaacaggctgcgcacgagacgagtatcgcacgccgttacctggaggcgctcgagaacgatgagtatgatgtttttcccggcgaaccctacatccttggctttttgcgcaattactgcgagtacctccagctggatacggagcagtgcatcgctcgctataaacatttaaaaattcaagaaatgtcgctgccaacggagaccctcctaccgagtaaacggtggggttcatttcccctgttaaagggagttgcctgtgtgctcttcctgggtggggtgctgggtgtgtattacgcgcggcaccgcgcgctgggttttctatcccgtattgtgttctttggcagagcacagcgtaccccaagggagctgtctccccccgatgcaacgggggcggtgcgcgaaacagtgtcgctgtcttctgcacaacatgaggagcgtgcgcgacgcacgcgttcgagcgcatctcgctatacgcttgctgaggaaaagtttgaacacacggtctttccaggagatgtgttggttatcagttccggggggaatgcgtacgagctaaccgtcagccgcactacgccgcacctgtatctggacacgcccattggtacacaggtgatctctcttggtcagcgcctagtgatggatttgaatacagatgtgcagccggacgtagaaataagtgtggaagacattgaagcacatcaggcggacgggggcgcgcgtgttcgcgtgtttacaggtagtctggtgcagacgctccgtgatcgcagtgctcagagctttgtgcctacaagtggggtaaatgtctctggtcagacgggagtcgctgccggcgcgcgatatcaagttttgtttgaaggcggtgttgcgtacccggtgacaatgaacgcaacgtttcgctcgtactgtttgttccggtacgaagcagatcgcacgcggcgggaggagcggtattaccaaaagggcgagcagctgacggtgcaagcaaacaacgggattcgggtgtgggcatctaacgggaatgtggtgcagctgcaaattgtcgcaggcggtaagacggtggatgtaggcctcagccgtccgggggaagtgctggtcaaagacatcaaatggatcaaagatgaggacgccgggcggttcaagttcgtggtcatggaagtagactag

SEQ ID NO: 40293 - DNA, 858 bp, Treponema pallidum
atgtgttgcccgaattataattcggcgcgtgcacttgcacagtttttgacggagcgcggtttgcggatgcataaaaagtgggggcagaattttctgctcgatccggtgttacgtacgcagcttgttaagatattggcgccggagcgtggggaacgtgtatgggaaattggtgcaggcattggtgcgatgaccgcacttttggtgcaaaacagtgattttttaacagtgtttgaaattgatcgcggctttgtgcagacattgcgcaaactttttgatgcacacgtccgtgtgatagaaggggatgtgttgcaacagtggcatgctgcagcagcacaggaacaacctgcgtgtgttctaggaaatttaccctacaatattgctgcccgttttattggaaacacgatcgaatcaggctatatttttaagcgtatggtggtgaccgttcaaaaagaaatcgggttgagaatgactgcgctccctgcacaaaaatggtattcatacttttcagtactctgtcagtggcagtatgaagtgcgtgtgattcgtaacgttgcgcctgtctgtttttggccgcgtcctcatgtagtttctcaagcattggtactcaccaagcgtaatgcggtgccttcttgtgtggatcctgcgctttttctgcacgtgacgaaaactttgttttctgcgcggcgtaaaacggtaagaaataatttactcacgtggcaaaaaaggatgccaggcggtgcagctgtgtgtgtagaagaactctgcgcacgtgcaggtattgacgcgcgtgcgcgtgcagagcaactgagcatctatgattttattacgctttctgatacgctgcgcgcgctactgtag

SEQ ID NO: 40294 - DNA, 1446 bp, Treponema pallidum
atgaagcgggggactctaccaaaagatgtgtcaggtatcaagattcacatgattggtatcaagggcactggcatgtctgcgcttgcagagctactgtgtgcacggggtgcccgtgtgtcaggtagtgatgttgcagatgtgttttacacggataggattctcgcccgtttgggtgttcccgtgcgtactcccttttcttgccagaaccttgctgacgctcccgatgtggttatccactctgcagcctatgtgcctgaagaaaacgacgagttggcagaggcgtaccggcggggtattcctacccttacctacccagaagcgctgggggacatttcctgtgcgcggttttcgtgtggtattgcaggtgttcatggaaagacgaccacgaccgcgatgattgctcaaatggtaaaggagctgcgccttgatgcgtccgtccttgtggggagcgctgtttcgggaaacaatgattcttgtgtggttcttaacggagataccttttttatcgcagaaacgtgcgagtaccgtcggcatttcctgcattttcatcctcaaaagattgtcctcaccagtgttgagcacgatcaccaggattattactcctcgtacgaggatatactcgcggcatactttcattacatagataggcttcctcaatttggtgagttattttattgcgtggatgaccagggcgtgcgggaggtagtgcagcttgcgtttttcagtagaccggacctggtgtatgttccttatggggaacgtgcgtggggcgattatggggtcagtattcacggtgttcaagaccggaagataagcttctcattgcggggttttgcaggtgagttttatgttgcgctccccggtgagcatagtgttttgaatgcaaccggtgcgctcgcattagcactgagtttagtgaagaagcagtatggagaggttaccgttgagcacctcaccgctctgcggaaggtactcgctctttttcagggatgccggcgaaggagtgaagttcttggggaagtgcgcggtattttgttcatggacgattatggacatcatccgactgcaattaaaaagacgctccgcgggttaaaaacgttctttccggaaagaagaattgtcgtcgattttatgtcccatacatattcgcgtaccgcagccctcctcaccgaatttgctgagtcttttcaggatgcggatgtagttattttgcatgagatttacgcctctgctcgggaagtgtatcagggcgaggtgaacggtgaacatctttttgaattaactaaacggaagcaccggcgggtgtattattacgaggctgtcatgcaggcagtgccttttttgcaggctgaattgaaagagggcgacctgttcgttacgctcggcgctggagacaattgcaaattgggtgaggtgttgttcaattattttaaagaggaggtgtaa

SEQ ID NO: 40295 - DNA, 3423 bp, Treponema pallidum
gtgcgtggcatactccattcttggaatgagctccagcatgcgctgcgctcgctgcgtgccgcacgctttccctaccgcgttgaagggtgcaccggtggactgcggtcctacttttttggcgaatacgtgcgcacgtgttgcgcacacatagtgctcgtagtccctaccgaacaggacgtcgccgccgtctgcaccgaccttgcacatgcagcagttcctacgcgcgtgctgccctggtgggggtcgctgccctaccgccctgtctcacctaacgcacacgtgttctctcaccgggtagaggcgctgtgcgcactcgcacagcgcgatgcaaccgcgccatgcgcgttcgttttcacccagcgtgcactgctcacccccgttcctcccctcgattatgtgcgtaccctcaaacgctccttccgtgtgggagagcacatcgagatccacacgctcgctgcccagcttatgcaatggggatatgcacgtgtcgaccacgtcagcgcttgcgcagagttttctctccggggagaaattctcgatatcgctgccgcagcgcaggctgctgacaacacacaagcgtaccgaatcgtgtgtgattttaacaccatagaacgtatccatatactggcggtgtccacgtgtgccgtcctgcaagaggtatctgcgtgcacactgtacgctgcaaaagaaattctttggagtgaggagcgtatagcgttcctccaccaaaatctccaaaaactgtccgaatgtcctgcccactgcgtcccgtgtatcgaagaactcacccacagaaaaacgtatgaaggggaggaaatgttctatccactgtgctttgaacgtcccacctgcgttctcgaatattttcgccacagcccttcacccccaagcgtcttttatcttgactacgaacgccagcacaacggtgcacgcgcgctccaagacgagtgtcggaacctctaccataaaatgcaactcgcgcacgaacatgtacctgcgcgctggtatcctcaaccagaacacatagtgctcgatttttccgctgtctgcgcgctccacctgcacacggtgtatttcactcacttttttccacagctgccagcgtgcgaaagtatatgcttggcaagcgatcctgcacgcagcttcttcggtaacattccttacttcaaagaagagctactccgtctttcaaaagacggatggcacgttttcgtctttgcagaaagtgagcagcaggcactgcgcatcagagcactagtcaaaggttgcgacgtcactgtgctaccttgcgcgctttctgcaggatttagcattcctgctctcaaaatactgatcgttcaagaaggcgaaatcttcggtcgccgcagaaaaactcctcaatcagtgcaacgcgcacggagcacgcctatcgacacatttgtggaattaaatcccggggattacgtggtgcatgcgcagtacggcatcggtttatttaagggaatagagcgcataaaaacagcacagtcagaacgtgattacgtaaacctcctctatgcacaggaagaaacgatccttatccctattgagcaggcacatctggtgcaacgttacattggaaatgaagggaacaaacctcacttagatagccttgggtcaaagtcatgggaaacgagaaaagcacgtgtcaaaaaatctgttgaaaacatcgcgcaaaaactagtggaactctactctctgcgaaaaactacgcgcggccacgccttcccaaaagatgacgaatggcagtatgcgtttgaagcagcattcccctacgaagaaacagacgatcagcgcatatgcattgaagaagtcaaacaggatatgcaagaagccgtccccatggatcggctggtgtgcggagatgtcggatacggaaaaacagagattgcaatgcgcgcggcatttaaggcggtaatgggaggaaaacaagtggtgttcctcacccctaccaccttactagtggaacaacactttcgcacaatctgcaatcggtttaaacactttcccgtcagaatcgagaagctctcacgctttgttcctaaatctgaacaaaaggacatactcgccaaactcgcgcatggagatatcgatcttattgtgggtacccaccggcttatccaaaaggacgtgtccttcaaggatcttgggttgatgatcctcgatgaggaacaacgtttcggtgtgcaggataaagaaaaattaaagcagatgaaaactaatgtagattgtctctccctcagtgcaacgcccattccccgaacgcttcacatgggtatgctcaaaatcagagacatgagcttgctcaccacccctcctgaaggccgcctacctatagaaacggttatccagcagtttgatccaaaccttgttgccactgcaatcagaaaagagctagatcgtgaggggcagattttttacctacataacagaatcgaaaacttagaatccgtaaagtgtatgctccaaaaactcgtgcctgagctatccatatgcgttgcccacagtctcatggggtcagaagaactggaagacatttttgaaaggttttatcaaaaaacgttccagctcctgctttctaccaccattattgaaaatggtatcgacgttcccaatgcaaatactatcatcatagatagagctgatatgtacggggtttcccagctctaccaactcaggggacgcgttggtcggtctgacaaaaaagcatatgcgtatctgctgtactatcacgacgtggcactttcagaccttgcaataaaacgtttacaggtgatctctgactttactgaccttggggcgggtttcaaagtcgccttaaaagatatggagattcgcggggtaggaaatctattaggcaaagaacaatcaggagatatctattcagtcggattcgacctgtatgtacagctgttagaagaggcaatagaacgcctccaacatgctccaaacgagcaaaggatagaaaccgtcatcgatcttaattaccgagggttcatcccccatacgtacattgccgcagatgaaattaaaatggaactgtataaaaaaatcgctgcagctcatacgcatgaggagcttgagcgcatacgcacggaaactatcacccggttcggtcctatccctgaggaagcagctgggttgtttaccgtggcagaaatcaaagtgcggtgcgaaaagctcgccattctctcactcaaagaaacacacgaaagcttattgattgagtttgacaaggtctgcgacactgccttcaaaaagatactgcgcctggtacagacctccaacgatcgcgttcgccttgacgcaaagcagcccaacatgctgatcctcacatcagatgccattgaaataaaagagaaaggcatctttatttgtgaaatactcaagcgtcttgagtcataa

SEQ ID NO: 40296 - DNA, 1092 bp, Treponema pallidum
atggggttaatttttttccgttatgatcgctgctatatgttgtcggtgttgtcgtatcttcacgtgtactttgggccgtttcgtctgttgcaatcttatgcggtgttgatggggattgccctgtatgcgggattcttttttacgtatggggtgttgcccagtgcgtatcgctttttgccccaagacagggggcgtgcgtttgcgccgtgtgcacaggaagcagcgggtaaacccacaggggcaggagtgatttttgtgtccgtctttgtgttgttagtgtacctgcttatgcgtccgagttttgtgcatgcgcttatattgctgctgacgtggggggtgatgctcaccggatacttagacgattgcgcgcaggtgtgctggggggagtatcgcaaaggcgcgttggactttttgtttgcggtgctgacagcagcgctgttgggtcatttttattttcacgatcaggtgttctggtggtttccttttttttcagatccggtgttcgtctctccttttttattttttgccggttcggtggtgattttgtggatgtcaattaacgcaaccaattgcacagacggggttgacgggctttcgggagcgttggtgttgatggcgcttctttcgatgggtacgattttttactttttgttgggaaatgtgcgtgcggcgcagtacctactggtgccgtttgtagtggatggtgcgcaatgggcactgatgagttttgcacttgccggggcgctgatggggtatgtgtggcgtaatgcacaccctagtacggtgttgatgggagacgcaggctcccgtgcgctggggtttttcattggggtgttggtgttgatctcgggcaatccatttttgctgttgatgacaagcggtgttattttggtgaatgggggtacggggcttctaaaagtggtgttgttgcgtttttttcatgtgcggatcctgagccgggtgcgctttccgctccatgatcacatgcgtgagaattggcactggtctacggcgcaggtattgctgaggtttatgattttacagggactgctcacgattggtcttttgggggttttgttcaaactgcggtag

SEQ ID NO: 40297 - DNA, 1287 bp, Treponema pallidum
atggtagaggtctacgcgcggttgcgcgctgctgttgctcggttggcggtctgtagcgctgcggagaaggacggtgccctgcgcgctgtgcgcgatgcgctacatgcgcagcgggaggatatcctgcgtgcaaatgcgcaggatcttgcgcgggcgcgtgaggcgggtcttgccgcaccgcttgtcgcccggctcgcgctgagtgaacaccttcttgaggacatgttgcggtctttgactgttctttcgcttcagcgggatcctatcggggaaattatagaagggtacactcttgcgaatggactggaaatccggaaggtacgtgttcctctgggggtggtggctgtcatctacgagtctcggcccaacgtgaccgtagatgcgtttgcacttgcgtacaaaagcggcaatgcggtgctcctgcgcgcaggttctgcagcgagttattcaaatgccccgcttttgcgcgcaattcacgtgggtttgaagaaagcgcatggtgtcgtggacgcggtggctgttcctcccgttttggaggaaaaatatggtgatgtggatcatatcctccgcgcgcgcggctttatcgatgcggtatttcctcgtgggggggcggcgcttatccggcgcgtcgtggaaggcgcccacgtgccagttattgaaaccggatgcggcgtgtgccacctatacgtagatgagagtgcgaatatcgatgtggcgctgcagattgcagaaaacgcgaagttgcaaaaaccggccgcatgcaattcagtcgaaacgctgttggtgcatcgtgcggttgcgcgtccttttttgcaccgtgtacaggagatttttgccacctgtgaggagactacgcgcaagcccggtggtgtggattttttttgtgatgctgagtctttctcccttctcacagaaaggggcgcgagaaaaaatgtttttcatgcacaggcagagacctgggatcgggaatacctggactatcaggtatccgtgcgggtggtgccaaaccttgaagaagcactcaggcacattgctcgtcattctacgaaacactcagaggttattgtcacgcgcgatcgtgcccgtgcgcgtcgttttcatcaggaagtagatgctgcctgtgtatatgtcaatgcttcaagtaggtttaccgatggagggcagtttggcatgggagcagagattggggtcagtacgcaaaaattgcacgcgcgcggtccgatgggtttgtgtgcactgactacttcaaaatatctgattgatggagaggggcaggtgcgtccgtga

SEQ ID NO: 40298 - DNA, 627 bp, Treponema pallidum
atgaatattctgcataactttgttgtattcgaaggtattgatggcacaggcacgagtacacagttgcgtgcgctcgaacgccattttcaggcccgtaaggacatggtctttactcaagagcctaccggaggggagattggcactctcattcgggatgtgctgcaaaagcgtgtgatcatgagctctaaggcattgggattgctctttgccgcagatagacacgagcacttggaaggtgcaggaggcattaacgattgtcttgcagaaggaaagatagtgctctgcgatcggtatgttttttccagtttggtgtaccaaggcatggcggtgtcgggtagtttcgcgtatgaattaaataaagagtttccgcttcctgaagttgtgttctattttgacgcgcctatcgaagtatgtgttgagcgtatcaccgcacgtgggctgcaaacggaactgtatgagtacacgtcttttcaagaaaaggcgcgcaaggggtatgaaactatatttcgcaagtgccgtcatttgtaccctgcaatgaaagtgattgaaatagacgcgcgcgaggaaattgaagttgtgcatgagcgtattcttcaccatctgcgcgaatacaggcgtctaaaatag

SEQ ID NO: 40299 - DNA, 237 bp, Treponema pallidum
atggcaagaagatgtggactgtgtggaaaggggacgatcagcgggtgcgccgtgagtaaatcgatgcaccactgcaagcgggtgtggaaaccgaacctgctcgcagtgagagtagttgtagatggctctgcgctgaacatgcggatttgcgcgcgctgcctacgcagcaaccctcttatgaaaaaggctcagccgcgggcgaacgcgccgctaagggcggcggcgcccaagctctga

SEQ ID NO: 40300 - DNA, 2439 bp, Treponema pallidum
gtgcccatgagcgattacctcgacgcgggcaacgaagagttgctgaaggattttttcagcgaggcggagcaacaggttgagcagctcgaaagcaatatactcgtcattgagcaggatcccaccaatcgggacgctgtagacgagattttccgtgcggcgcacacccttaaggggggtgctgcgactgttgagatgcacgagttgtccggcttcacgcatgcggtggaggatctgctggatgggattcgctcagagaaggtaactgttgacggggcggttgtggacttgctcctgacgtcgttggatgtaattaaggcgatgctcgagtcccgtgcgggcggtggtccctacgcggaggatgtctcggatctcgttgcgcgtctgcgctcgtatctgcctgcgtctgggactgtgccgggggcggcgcgtggattgtcggtgtcttcgccaaatgcagccgaagctgcaaaggggaccgcggtaggtgaagatgggacggaagcccctcaggtagggcgagtgccgccgctgtctcttctttctgaatacgatcggttggaattgcgcgagatcgttccgcctgagcactctgtctacgcgcttacggtgcgttttgatgagagtaatctgatgaacacggtcggcggtatccaggtgtttacagcgttgaagtcctgcgcaagcgtgctcaagacggttcctgatttcgacgcactgtatcaggacatgttccatgagtatgttgtgtacttcgtttccactgtgcaggattcagtatgtgtgtcgcaggttgcttcgattccggacgttacgctttcggtgagtgtagcggaagttgcgcttgcagatctgtgtactcccctctctgaacatggggagctgggtgtttgcgcagacgcggggacaggtggtgtgtccgaagggagcggcgctgccgtgcgcagcggaggggaacgcgttcctaactccctgccgaaacaggttgccgggtgcgcggtgccttctgcaaaggactcatcaaaggctacctcaagcggctacggctcggggtccgtgttgcgcgtagatgcgaaacgcatcgattatcttctgaatttggtaagtgagacggtgattatcaaggcctcgctcaatcagagtgcgcttgaatttggggaggtgtacaccctattccaaaacgctaatggcgcgtacaaggagcgtttgcgtaagttttttgatagggttcccgcttacttagaaaaggtaaagaacggtcaggacgcagatgcggtgcgcaaggggatgatagcagaggctgtcggtgtctttgacattttttcttcgtttgagaatggactgaaacagtccgtcactaagtttcggtcttctgctcagaatttggggcgtatttctggtgagcttcaagaaggtgtgatgaaaatccgcatggtgcctattagccagattttcagtcgttatccgcgtgtggtgcgcgatctctcgcgggacttgcgtaaagaggtgcggttggtcattgaaggagaggagacggagcttgataagtctgtggttgaagatttgctcgatcccattatgcactgcgtgcgtaattctctcgaccacggcatagaagcgcctgaagttcgcgcgcgctctggaaaaccggcgcaaggtacgcttctcctgcgcgcaagcaacgaaggaaatatgatcgttattgaggttgccgatgacgggcgtggcatcgacgtggaggcagtgaagacgaaagcagttgagcgaggtgtgttgcacccaggcaagaacctcactgaggttgaggcgttccaacttatttttgctcccggtttttcaacctctcggtcggtttctaatgtttctggtcggggtgtggggcttgatgtggtgaagactcacattgagaggctcaatggcactgtctccgtcttttcggaagtgcagaagggaacgcgctttgtcataaagctgccgcttacactggcaattattcaggggctcttgatacgggtggggcaggaggtgtactcgataccgatagcttcggtcatcgaaagccatcgtatcaagagtgaagagattaaccggattgataactacgaggtgttcaatgtgcggaacgaggtcattagcttgctgcgtctcgataggctgttcggtatcagctgcgatgatgaggtgaccggtcagtatcactatgtggttatagttggtgcggcagagaaaaaggtggggctcatggtggatgcgctgattggtgaggaggacgtagtcatcaagccactgcgggatcaattcactagttcccctggtattgcaggggcatctatcctgggtgacggttcggtgtcgttgattatcgatgtggggcagctgcttgagcttgggttgaagcgggaaatattggcgcgtgagcgtcgagaagccacggtgtggtag

SEQ ID NO: 40301 - DNA, 2826 bp, Treponema pallidum
gtgctcttcctgaaaacgcttgaggtatttggctttaagtcgtttgcagatcgcgttcgcgttgagtttgcagatggcgtcactgcgctgttgggcccaaacggctgtggcaaaagcaatgtcgttgacgccataaagtgggtcctcggagagcagtcctctagggccttgcgtgccgacagaatggaagacgttatattcaacgggaccgagtcgcgtcgttcgttgaacgttgcagaagcctctcttaccgtttgcgatgaagctggtatcctttcgctcgatgtgccagagattttaattaaacgcagactctatcgttccggggaaagtgagtactttcttaacgggaatgccgtccgtctaaaggagatccgcgagctcttttgggatacgggaatagggaaggttgcgtactccgttatggagcaggggaaaatagaccagattctctcaaataaaccggaggaacgtcgctacctttttgaagaagcagcaggggtgacgcgctttaaagttcgtggcgcggaagcagcacggaaattggagaaaacggcggagaatttgcgtcatcttgaggttattctgcaagaagtagagaagagctacgagagttcaaagctccaagctgcccagacgcaacgttaccgcatgctcaaagaggagatttttgcgcgagatcgcgatcttggtctgttgcgtctgcgtgggtttttagaaaaccaagcccgagcggatggagcactccagcgcaatcgcgcgcggcgcgacgcgttgcaaacacaggtggaggaagcacagcagacgctttctgctcgcataggcgagatcaatgatatggaaaagcgcgttgacgcgctccaaaaggaaatctatggccttgcaattgaacagaaagcgaagcaaaacgaggcatcgctacatcgtaagcatctttctgaactgaaagagtcgattggtcagatagaaatgcgcaagattggtgtagaaagtcgcgtgcagaatttggaagaagaagtagcagagcaagacgcacacgtgtatcagttaggcagtgctctatcctctgttgaagagcatattgaatcgtttgcgcggagcttgcacgttgcaagtgagcacgtctcagagaatgatcaaacgcttcgcgacatacagggacagatgcaagagataagtgccgcgtgtgttgaacttgaagcgtccctacgtgacgtggcagaagatattgccgcagagcttgacacgcgcctgagtgcagccgggtactctgcgcgcaatcgggcagaggctgagcgtacgttggtagcgggggtacagcgcctgcgaaccttcgtggaggggagagcacgtattgtttcagactttctggtggtagatacccacactgaaggggagctgtgccggatgctgactacagttgtggacgcgttcaatgaggcggtaaagatagtgcactgcgttgagtcagacatagcagaatatgcgcgtgtttctgcccggtttatcgatgagtttgttgctcctcaggggattatgaccaagaaacgtgaatttgagcgacagcttgaacagcaccgtgcacagcttgagcggcatgctgcgcgtcagcgcacactgcaggaagagaacaagctccttgttgggaagatagaagcctgtcgcaaaacgcttgaatccctgcgtgtggatcaggcgcgtctgcgtgctgaagctgaggcaggacaaaaacaggctgcaggaaccagaggggaggtggcacgtcagcgcgcagtgattaaagagctcgaaggggagttgtttaccgagggggagcgggtggcggcgctcgaagagcgcttactagaggttgaaggggaaataggacagctagaacagcgcggtgttttgctcaccaaaagtcttgagaactgcgaaggagagatccgtgtgcggaatgccgcagtaacatctgaagaacatgcgctccaggaagcgcgcgtggaacttgcacaggtggggcggcagcttgagcaggcacatcgggagttgatgcagtgcgaaactgagattcgcaatttacgtgaacattttcgagaacagcacacccgcgatctgagtgagtttgaggatttaataccggggattgaaaaaacggcaagtgatctgcgccaagagcgtggggagcttcaggctcgagtgaaggaaatcggggcggtgaactttatggcggtggaggagtttcaggaggtaaaggagcgctacgagtttctcgttgcgcaggttgcggaccttgaaaaggcgcgcgcagatctgcagcgggtaaccgataaaattaaggctgaatctgcagaacttttcttggcaacataccgacggattcgtaagaattttcacgaggtattccgtcgtctgtttgggggaggtcgcgcagagatacgtctttcagatcctgcagcggtgctctcgtgtggaattgaaatcctcgcgcagccaccggggaagaagctcgagcatattggcctcctttctggtggagaaaaggcaatgactgcagtagcgttgctctttgcaacgtatatggtgaagcctgcgccgttttgtcttttggatgaaatcgacgcagcgttggatgagcataatgtagctcgttttgttgggatgcttgatgagttttctgacgtcagtcaatatatcgtaatcacgcacaatcggcggacggttttgggtgcacgcaccatgcttggggtaacaatggaagagccgggggtatcgaaagtggtttcgattgcacttgaatctgcttctgagcgaccggctaacggcgaggcaggaggagccatttga

SEQ ID NO: 40302 - DNA, 1551 bp, Treponema pallidum
gtgagtgtgtgggtggcgctcgccttgctgggaatgtgtgtttcgtgtacgcacgtgcctccgcctcgtgccctcatcgtttcaaaggagccgcctccagcgttggattctgcgccgcgccctgcgattccagaagcagttcctcttccgtcccctgtggaggaagaaatcgccggtcgcctccctcctgcacctgccgctgcacctgagcgcgttcctgagtcctcacaggagcgggaacagaaacctgagtcttcgaagcctcaggtggtagagccggtgtcgcttgcctctccggtgaagcctcgcgaggctgggagtgtacctgatgttcttccagtacctgaagtgtcgtcgccgcacgttgcgccgccggcaccccctgcgccgacagctccccggccgcatcgtccctcccctccgcctgtatcgccttctgcatccaaaccaaagcagcgcgctgtacctccttctccgccccctgcatcagagcctcctcgtgaggcggaggtgcaggctgagcctgagccggcagaggattctccacgcgcgatggtgcctgaagaaccgcctgaggatgaggtgccgcgcgtttcgcgcgcggtacagcttgcagtggggcaaaaacttgaggttttgtatccgggcgaaggttgggtgtacgtgggcgagcatactgcgcagcctggtttgcgctatcaccagcgcaagttggaggagtcgcattcgctttttacctttagtgctgagcgagagggtgattttgtcttagcgttctcctattttgatgtgtttcggggtgattttgtctccgacgcacttgcggtcaaggtggtaccgaagcgggaagggctcgcgcgtgtggtgcgtgcgcctgagtaccggcgtacggtgtcgtctcctcctgatactgtcgtttctgagttatctcctgcgggaacgggtaccgagcgcagagcagaagagagtggaacttctggttctcagcgcgccgctgcccatactggagcgcctgtccggcaggatcagacggatactgctgttgcagagaaagctcagcacggtacgccccgtcctgatgaaaaaaaagatcgggaacccaccgtaggaggacgtgaccctgtgccgtcggatgcagtagcacagggtgtgtcggagcggtactctccgcggaagatttcaccagcgtctcaaccttctgctccctcagctgcgcctattgaggcgcatgtcccggcatctgctcacaaagagggtcaagaaaaacgcgatcacctagcagaagcgcgccagttttgtgcacagggaaacgcgcgagatgccctcgcttcgctcggcgatttctttgcgcagttcccttctcacgaacgaatggacgaagcgtggttcctgcgtggacaagcctatgagatcaacggcgcacagagaaacgtacgcctcgcgctcgaagcatacaagacaatactggaacgcttcccccacagcccatactggaaaaaggcagacgaacgcgcacgctttatcaaaaacttttttattaagatttcttag

SEQ ID NO: 40303 - DNA, 417 bp, Treponema pallidum
gtgagcgcgcaaactcagcgactgcacccgccattctatgacaagcggacacagcgtgtcaattcccccttctctctacctgcacccaaaacacaagagaaaaaatacctgtgcctattaggcacagttgacagcgtgtgcgctcccctctacgatccacccctagctttcaccataccacaagcagaggtcagccatatgaacgagagaaacaagttactcgcacgcgccctgtattcctgcgttccacacgtccaaggctcggacgactacgaggacgactttgaagacagcgacttccaggacggggatttcgatgattttgaagacgaggatggctttgacgatgacgatgactttgaagacgacgattttgaatatgaagatgaggacaatgacctagactttgacgaatag

SEQ ID NO: 40304 - DNA, 591 bp, Treponema pallidum
gtggatgaaaggcgtttgaaggggaaaaggcgcgtccagttggggaagtatgccgctgtgcgtggcagaaaggaagggcgtttgcctgcggttatgtatgaccatcggggcgtgtccgttccccttgaacttgcgcagcaagacttcgatagattgtttcgtgccttaaccaggagtactgttctgtctttggaactggatggtggcgaggtcttttgcgtttttgttaaggactatcagcataacatggtcagtgaccgtgtggagcatgtggatttctacgcagttgaagagagtgttccgttgcgaatgcgaatccggctgcagttgtgtggttctcctgaaggagtgcgctatggggctcgcttggaaaaggggctctcatatatcgaggtagagtctttgccgcgcaacttgcccgaccgtgttgtgcttgatatcagtgggctcggggccggcgacgtgcgccgtgtgcgtgatgttcctctgcccgcgtcggtggtggttctcagcgatcctgatgcggtgattgtggcactcagttcttctgcttccgaagcgggttcacccgctggcgcgaggaccggctag

SEQ ID NO: 40305 - DNA, 1434 bp, Treponema pallidum
gtgagtgagtctaggcagaagcttcacccgctgctcgtccacgtggcgcgtagctttgggcatttccttgtgccgagaaagccttcttgcttgctcgtggcggtttcaggaggtgccgattcgcttgcgcttctttatgcggcgcacgagctcgctcctgactttggggtgtgtgcgtgcgcggtcacggttgatcacagtctgcgcgctcaggaaggtgcgctcgatgcgcgttttgtgcgtgcgctgtgtgctcgtttttctcctccccttccgtgtttcgtgcagcagatttctgccggtgcggtgcacgcgtgtgctaaaattcgtggccgcggtgtgcaggacgcggcgcgtgcactgcgctataaggtctttgaccacgtggctgctcgctgcggagcacaggtggttctaaccgcgcacacccgtgatgatcagtacgaaacactgctcatgcgcttattccagggagcggccgcgtccgcgttgcaaggtatacgagctgcgcgtggacggtacgtgcgtccgctgctaaaggtgagccgcacgtgtgttgaagatttcttgcagacgcgtggtgtgcgttggcgcgaagacgcatcaaatacgtgcaggaaatatgtgcgtaaccgtatccgtcatgaacttatccctgcacttgatgcagtgcttgcagggtggcgctctggcttagacaaaacgtttgcggggattagtgcagaacacagcttttgtgttgctgccttgacgcggtggcgtgaaggttgttcgcatgcgtgggaaccagtaccacgtgcgttgggcacgcgtctgcggatgcctcggtcggactttctcgccgctgaatttatattgcgcttctttcttttgcaggaggcttgcgttcgtttgggagtttcgcaccgggtgccacgcggggcgcttgaacggtgtgcgcgttttgatggtgtgcgtcggatacacgtttcagggctgcagttagagcgtgccggtgcatatgtgcttttttcctgcatacatgcgtcggacacagcacgtgagacaaagaaacaggatgcaggatcacctccttcctctgaaaagcaaggagtgagtgcaatctacgtggcgcgtcctggtgcctacccctgtgcgtgcggaacgcttcttgtggaagtacgtcctgccggcgtgtttgtctgttgcgcacaggaccacgtgggtgtaggtccgttttcttttcccttttatatcagaacccatcgcacgggagacaccatctccatccgcggtggtcataaggggatccgaaagatgttctcagagtggcacgtacctttatcggaccgcacggtgttaccgatgatagagcaggatggtgtgttgcgtgcgctctatggcgcagcacttggttaccaaaatcgttacgcggagaggactcctcatgagtaa

SEQ ID NO: 40306 - DNA, 2751 bp, Treponema pallidum
atgctcgtacgcactgcactcaggctcatctttggctcccagcacgagcgcgatctgaaaaatctcctgcctcttttgaatgccgtcaacgcccaggagtcctgggtacttcctctccaggagtctgagttcaaacaaaaaacagctgagtttaaggcgcgtgccgctgcaggagaagcgcttgacgcttttttacctcaggcatttgcgcttgcgcgcgaggcagctcgtcgtgttttaggcgagcgtccctatgacgtgcagatcctcggttccctcgtcctccaccacggcaaaatcgtggaaatgaaaacgggcgaaggcaaaacgctcatgagcgtggcagcggcgtatctgaacagtctttcggggaggggtgtgcatattgtcacggtcaacgactatcttgctgagcgcgacgcgcgatggatgcgtccagtatatgattatttaggcgtttccgtcggcgtcatcctctcttccatgggcagtcaggagcggcggtgtgcgtacgcgtgcgatattacctacggtaccaacaatgaactgggctttgattatctgcgcgacaacatgcaatttttaacggaagaaaaaacgcagcgtgatttttactttgccattattgacgagattgactccattctcatcgacgaggcgcgcacaccgcttattatctcagggcctgcagaaaatgatacccagcattacgccgaggttgacagactcgtcgggcagttacaggaagtggagcgaaatcctgccacaggtgactaccccaacgaagtggacggagaggaggttcgcggcgattatatcgttgatgaaaagaatcgcaaggtttccttcagtggtccggggatgctgcacattcaggatgtgctcacgcacgctgggcttatccaagggagtctatttgatgaagagaacttcaagtatatccactactttacgcaggcactccgtgcgcacttactttaccgcgcagacgttgattacgtagtaaaagacggacaagtacagatcgtagacgagtttaccggtcgcatcttggaaggtcggcggtattctgacggattacatcaggcaattgaggcaaaagaacacatccgcattgcgcaacgtaatcgcactatggcaactatcacgtttcagaacttttttagaatgtataaaaagctttctggaatgacgggaactgcggataccgaggcgttggagctcaataaaatttataaacttgaggtggtagttttgccgacgaatcttcccgtagcgcgggtggatgagcatgacgtggtatacctgagtgaagaagaaaagtggagtgccatttgtgatgaaataaaggaggcacacacacggggacagccggtactcgtgggcactatttctatagaaaagtccgaaaaactctctgctctgctgagaacacgcggtgtaaaacacgaagttctcaacgctaaaaatcacgcgcgcgaggcactgattatcgccgaagcgggggcgaagggttcggtgaccatcgcaaccaacatggccggacgcggcacggatatcaagctagggggtaatcctgaatttcgtgcacgacagagcgcaactgccatagcatcgaagcacggttcctcctctgtcactgtgcaggaacatatgcaagcgtgctatgaggcggaatacacacggtggcgcgcagattacgaagaggttaagcagctcggtggtttgtacgtcattggcacagagcggcatgaaagcaggcgcattgataaccaacttcgggggcgttcggggcgtcaaggggatccaggccgctcaaaattttttctctctctggatgatgatcttatgcgcatttttgggggggagcggctgaagcgttttatgagccgtgtgggtatggaaccaggagaacctatcacgcattcctggttgaataagagtattgagcgcgcgcagacgaaggtcgaagcacgcaactttgatgtccgtaagcacttgcttgaatacgatgatgtgctcaacgaacagcgctccttcatatacgcgcagcgagcacaaattttgatagacgagcatgtggtagagcgcgtgtataccacaatcgaggagtatcttaaccgagaaataaccgcacttcggcaagaattgaagcggcgtgggcggctttccctcggggcgtttcaacaaaacctgagcaccctgttcgattacgcactgggaggtgaggacgcatctggctggaacgaaacgcgtcttggaacgctgaagcaagaaatcctggcgcatttaaaaaagaatattgaatcaaagtatctgcttgcaggggcgcagaacatggatacgttcatccgctaccagtatgtgcaggcgatcgataaaaaatggctggaccatttggaacttcttgaaatcctccgggaatcggtgtacttgcgttcatatgggcaaaagaacccgcttaccgaatacaagcttgaagggttcgacctattttacaccatgttagacgacattcgcctttcgatcgcctcgcaggttgtgcgcgtaacggttcacatggaagagcagcgcgtcccgaggccaccacacgttgcacaggcggcacacgaatttcaagcactggggcagcctggcagagggcacggatcgctatctgctctcccgattcaagccggcgcaaaagtggggcgcaacaccccctgcccctgtggaagtggcaaaaagtacaaacactgttgtggccgctga

SEQ ID NO: 40307 - DNA, 450 bp, Treponema pallidum
gtggaggataacgcctttactggagcgtactcgtacaatctcgatgaaaaggggcgtctcatgcttcctgcgcgcttgcgtgttgcgctgagtgatacccgcttggtgctcacttgcgcgattgagtcctgcctgtgggtgtttccccgtgcgcagtgggaccgcttttcttcccagattagtgcgcgtgcttcgctgttccacgcgccgtctcgtgcagtgctgcgtcgccttattgctcctgcccaggaggttgagcttgatcgcgcgtggcgcctctttattcccccttccttgcgcgagtatgccgccttggaaaaggattgtcttattctggggctcagccactgccttgagatttgggaccgcgcgcgctaccgcgcctatcttgcagaaagtgaggcggacttccgtgcaggaaccgaaacactgcaggacctttgtctgtga

SEQ ID NO: 40308 - DNA, 1140 bp, Treponema pallidum
gtgagtctttccgggcatacgcacacaaaagaggaggtgcaggctgaggtggaggcaggagaggttcagtgcccagcgctttgccatcagccggtactcgtgcaggaatgcctgacgttgttggaacctgcaattgtgggtatctcgcgaggtgcagacagcacgagagatggggcgggggcgttttttattgacgggacactgggggatgggggacacacacaggcgtttttgcacgcgtaccctgcgctccgtgcgctcggtgttgaaatagatccgtcaatgctcgcacgggcgcgagcgcgcttgacgccgtttggcaagcggcttcgctatgtcctggggtggtctgatgtcttttttgcctccgcatatgcatcagctcctgcctctcctgcaacgggaaggactgcagctggcgccgcaggtgtgccgggtgcgtatccggcgccgcaggcagtattgttagaccttggtatttcttttttccattacaggggggcgatgcggggcttttccttcgcagaagaacatatgttggacatgcgcctggatcctcaagcctcccagaccgctgcagacctcctgaatcggctgccgcaggcacgtttggcacaattgttttttgaagggggagaggaacgttacgcgcgtcggattgcgcaggcggtgtgcgcgcagcgtcggcaggcgcccttttgctctgcgcgcgcatttgcagaagtcgttgcgcgcgtggtgccgccgatgcggacggcgcggtttgggaagcggcgcggtgttcttggggttttgccgaagctccatccggcaaccaaggcgtttcaagcattgcgcattgcggtgaacagggagcttgagcgtttgccacgccttcttacggcagcgtttacggcgcttgcgcctgggggtcgacttgcggttattagttttcactcgcgtgaggataggattgttaaggtacattttcggcactgggcgaaacgctgcagctgtccggctcgtgtgccgatatgcagctgcggcggtgtggcgcgtgcatcgctgattaccaagaagccgcttgtaccttcgtgtgtggagcgtgctgcgaatgccgcttcgcggagtgctacgttacgcgtcattgagaaacggtag

SEQ ID NO: 40309 - DNA, 1380 bp, Treponema pallidum
atgcttctgagttttgatgaggtatgtgcggcagtgcaaggggctcgcgtgtgcgatgcacgaggggcgcgcggttttgacggggtttcctttgacagtcgtgcggttgtgccgcgtgatttgtttattccgctccgtggtgcgcacgtagatggacatacgtttgttgaagaagcgctgcagaagggcgcagttgcaacgcttatagatcaaaggtacccccatgctggggaatatgttgcttggtgcactcgctttggagctgcctgtattgcggtgcacgacacgctcagggcgctgcaagatcttgcctccttttactgcaaaaagtttcctgcgcttattaggattggcattaccggatcaagcggaaagacaaccgtaaaagaaatggctcgcgcggtgttcagtgaacggtatcgggtggttgcgacgccaggaaatttaaattcagagataggtttaccgcagtcgctgttttttgtgcgtgcagaacatgaggtaggaatctttgagctggggatgaatcgtcggggggagatgcgtacgctcgctcagatacttgttcctcattacgcgatcattaccaacgtaggttgtgcgcacgtaggcattctgggcacgcagcaggcaattgcggaagagaaaaaagagattttttctcaatttactgaacacagcgtgggttttgtccccgacgatgcatatcgtgtattcctgtctaatatcccgtacggtagggttgtagtttacgatcagggggggcgtggtctagcaactgaggtgatagatgagggtttacgtggttctcgcgtgttatatcaaggacgatggattcgcgtgccactacctggggtgcataacgcaaagaatgcgcttgcagtgattgcgcttgccgcacaggtaggacttcctgctgaggaaattcagcgggggatggagcgggtaaaaccgccctttggccgctctcatgtggtgtgtgcgtcgctgacctttttgctcgattgttacaatgcgaatcctgattcaatggctgcggcgcttcatttgtgtgcgcatatttctgcagtatcaaaagtatatgtgctcggtgacatgggagagctaggagttaccgctgccgaagctcactatcgggtgtgtgttttggcagccgcttctgacgcgcgtgcagtgtatgtgtttggtcccgaattttgtcgtgcggtaagaaaagtttcctgggggaggaagcgcgtgtacgcctttgcactagaggaactgtctgcgctgcaagaaacgttagacgcgcaattacggcggggtgattttgttctggtgaaaggttcacgcagtgttgcgctcgagcggcttgaacctcttttgaggaaagagcgatga

SEQ ID NO: 40310 - DNA, 1155 bp, Treponema pallidum
atgagaccgatgatttccatcgagaaaaatgtacatcaagagcgttacagttttgtattcatactgcttgtcgcccttatggtaggagtaggttttgtaacgctttattcagggtcggtgcattatgcgcagcgcttttttcgttatcctggttattttttggtaagacagggagtgagtataggcatcggtcttgtgtgtttattgttttttacctttgttcgtttagcttctttaagaaaagcattgtctcctttgattctcgttgcatttgcgctctgtgtgtgcacgtttttccctggtattggttcaacgcgcaatggagcgacgcgttggattaaggtgtttgatattaattttcagccatctgaatttgtgaagctggtactcattgtttttcttgcaaacttttttgataagcaccgggagcatttcgatacacctatacgatcaatttttcctccctttgttgtgagcgtgatttttgtgtcagtagttttttttcaaaacgatttttctaccgctatgtttttgctttttatcacagtggttatgttcttcattgcaggtgcgcctctgtggtggtttttaagaggcataatggttcttgcgccgatagcagtgcttatgatcgtcacgtccaccaatcgtttgcgtcgagtgctttcatttttgtatccagatagagacccgcttggcgcaggataccaagtaaacgcggcgctcgaggcactgatggatggagggttgtgggggcgtggtattggaaatggggtgaggaaaattgcgagcgtgcccgaagtatattcggattttatttttgtcgttattggagaagagatgggattcattggtgtgtgtttatatttaatgttgttgtttgcgtttaccctcactggcatttctatcgcactcagatgtgctaatcgctttaatacttttttggctttcggcgcgtcggcggcaattgttttacagtcaattttgaatgttgcagtggtggtacgtctagttccagccactggtattcctcttccctttttttcttcaggaggttcatctattgtggtaacgctttctttatgtggattgatcatcaatgtttcaggggatgagaagataaggagggagcgtgaagaaacagtttttgtgtag

SEQ ID NO: 40311 - DNA, 816 bp, Treponema pallidum
gtgaagaaacagtttttgtgtagaaatactgaagcgtgcaagtaccctctggtagggtatatgtctatgcgggtgagagttgcagtactgaaggtggtaattgttatattgctgctcgtgttgtgtgtggagtttgtattttatctttttgttgttccggcaacttcttttgcaaaggtagaattttcaggaaatgtgacgatatccccggaatatttgatgaaggctgcagggctcactggtaaagaaaaatggatgagtttggacggttttacaatttcggaacgactggcatctgttccgttacttgctcaggtagaggtgttaaagaaatttccagatacgatgcatgttcatgtggtagagcgtgttgctattgcacttggttttgtgcacgttcaaggccgtgcgatgccggtgcagattgacaagacaggaacagtttttagtgttgggacggcacctcttgatacagtattgccggtagtaagtggtcttgaatttcgtaatccgcgcgtggggctacgcgtgcacgatcagcttgttcctctttttgtgcagttagataatttgagcaagcggaaccctcttttgctcggtgaaatttctgagataagcattgaacaaaaaagacacgggggatatgatttagcgctttacctggtgcgtgcacctatcagagtacgcatggacaaaaaccttagcgaagaaaagttgcggtatgtcatattgctcgttgatgcgctgcgggagtggcaaacgcagaggcgcattaaggagcttgacgtgagaggtgggacggcggtgtatcgctag

SEQ ID NO: 40312 - DNA, 1245 bp, Treponema pallidum
atgggtgaggttattgtcggcttagatatcggtaccgaatcgatcagggcggtagtggccgagcggttggaaggtggtgcgttacaggttgtaggtgtaggcgtcggtcattcaaagggtttgaggcggggtgtagtagtcaatattgagaatacagttgtgggtatccaccacgcggttgaagctgcggagatgatgtccggtatcgaagttgcgcactgcgttgtggggcttggaggtacccacatcgagggtagaaatttaaaaggtgttgtggcggttgcagataaggggaaggggcatcgcgaagttgatcaaagcgatattgatcgggtgcttgaagttgcctgtgcagtttctcttcctcccgatcgtaaaattcttcatgttattcccaaagtttattcggtggatgatcagcacggcatcaccgatccgcgcaatatcattggggttcgcctggaaggcgaggtgcatatgatcaccggttctgcaacgtgtatgcgcagtgtaatcgattgcgtgaaacgggcgaacttgcacatcgattttttaatgcataacgggctcgctgctgttcgttctgtgttaaacgatgacgagcgaaatgtagggtgtgtgctcattaatattggtgggggaactacggatgttattgcaatgtacaagggttccccggtgcttatcacttcgattcctgttgggggcagtcaggtaacttctgatcttgcaaaggtaaaaaacctcccgcttgaaactgcagagcgcattaaaattaaagatggatgttgctggatccccctgcttgagggagaagggagtgttctcatctccagccagggaaatcggattcctgtagaaatttctaaacgagaaatcgccgaaataattgaagcgcgcatgtgtgaggtttttacgatagtgcgcgatcgtctttcgacggtggagacgcaaagcggtcgtggtatcattgaaaatattattctctgcggcggtggcgcgcagcttaccggtgcggtagagcttgcgtcagcaatttttgatacaccgcgcgtgcaccttggaataccaggtactttgggaggattggcaggggaatatcgcagtcctgagtttgcagtggtgttaggactgattttagaatatacccataagcagggacagcgcgcttatcagggccgtgctgagatggagcgtgcgggagtgtttactaaagtgaaggatatttggaggaacttgttttaa

SEQ ID NO: 40313 - DNA, 1257 bp, Treponema pallidum
atgatgaatatagagcttgcaccttcaggcgaagagtttaccctaagtccaacggtcataaaggtcatcggtgccggtggtggtgggtcaaacgcggtaaataggatgatgagctgcggtttgcagtgcgtcgagtttattgcagcaaatacagatgtgcaggcgttgagctattctaccgcgcctaaaaagcttgccattggcaccaaggtgacaagggggttgggtgcaggcggtgatcctgagattggcgagaaggctgcaatggaagatgctgaagccattgcaagtgcgttgcagggcgcgaacatggtgttcatcaccgcagggatgggaggaggtacgggaacaggtgctgccccagttattgcaaagattgcacgggaacttggtgctttgacagttgccgtagtcacgaagccgtttcgctttgaaggcagagcaaagatgatgctcgctgagcgagggatcgaaaaattgcgcacgcactcggacaccgtgattgtgatccctaatcagaatttactcagtgtggtagataagcgctgcccgattaaagagacgtatctggttgcagatgatctgctgcgcaagtcggtgcaaagtatttctgatttaattacccttcctggagaagtgaatttagatttcatggatgtaaaaaacaccatggaagggcaggggtacgcgcttatcggtgtgggagagggagaaggggaaaaccgcgcagtagatgcggcaaccgctgcaattaataatccgcttttggaagagacgcggatagaaggtgctaccagactgctggttgcggtacgtggctcagagaacttgagcatgggagaagtcgatggcgtgatgtctgtggttgcaaagaccattgatccggatgcgattatcatccatggcacgtccatcgacgcgagtatgcaggatagggtgagggttacggttatcgcaacgggtgtaccgcaagcgagtatttcgatagcgggagatacacacagttctcaaaagataaaaacatcatcgtacggtgcggtgagtaccggtgtgtatattagttctgacgaatggaacagagctaaaagctctaaacagccaaacttacctggtctggctacgcgtaatagcgctgttcaagaaacgcgtatggaaaagaacggagtgaagggccacacgtttggcgttccgctcccctcggtaaatgaagatttggatgaaccgacctttttgagaaataggaacaagggtctgtga

SEQ ID NO: 40314 - DNA, 921 bp, Treponema pallidum
gtgaaagacgtcgatatccgtgtgcaatccttttacgcgtacttaatttcggcagaggcgcacgcgcttttgaccgcacggacgtacgtgactacgttgatgctttttcagaaaaaccttgatccgccgtgtaacattgaaagcgccaatgcgcacgattgtgtacgttttatcgaaaagcggagtgctgcgggtgtctcaggcaaaacgattgcgaaggacatggcggcgctgcacgcgttctatcagtttctcattttggagcaggtgcgtcctgataacccaatgcaagacgttgatgcaccgcgtcgtgcgtattcactgccgcgcgtgctgtctcccgaacaggtcaacacttttctgcaatccattccactgtgcacaccaggtggcgtgcgtgatcgcgcgctctttgaacttatttatgctgcaggtttgcgggtcagtgaggcagtttctctttccctttctgacattttttttgcagaacgtctgctaaaagtgacaggtaaggggaacaaagagcgtatggctccctttggagaacaggcgtgttactttctcatgcagtatatacgtgaggcgcgtgttcgttttacgagcgcgaagcatccggagaatagtgaaaaaaaaggagctgtctttttaaacaggcaggggggtcgtctgagtcgtaaaggtatatggaagcgcctgcaggatattgaaatccgctcaggggtggagacgcacgttcatacgtttcgccattcatatgcgacgcatttgcttgcaggcggtgtcgatttacattcggttcagtgtctgctcggccatgcagatattgcaactacccaggtgtacacacacgtggaaaatggacagctcgaagcgtgtcaccgcgcgtgtttttcttcagaaggtcttcgtgatgaaaactag

SEQ ID NO: 40315 - DNA, 2196 bp, Treponema pallidum
atggaagtgcgtgggctacaaccgaaaaggcagaagacatttgcgcggaagcatttggttattgtggaatctcctgcgaaggcgcagaccatcgaaaaatatctgggaacgcagtacgtggtgcgagcgtccatgggccacgttattgacttgccaaagtctcgtttagctattgatattgagcacgatttccagcctgagtacattacagttcgtggtcgtgcgcagtgtttaaaagagttgcgcaccctatctaagcagtcactgcaagtgtttcttgccagcgatcgtgaccgagagggggaggcgattgcgtaccaccttgcacagtctatccaggcgtattgtgatacgccgatcaaaaggatcgtgtttaatgaaattacaccgcacgcgattagggcggcaattggccatccggttccaatagataccgcaaaggtcaatgcacaaaaggcgcggcgcgtactggaccgtttggtaggataccacctatgtccgctcctgtggcataaggtgaaaaacgggttgtctgcaggacgtgtgcagtcggttgcacttcgtcttatctgtgaacgagaagttgaagtaaagcgctttgttccagaagaatactggacggttgaaggaacgtttgaaaaggataaaaagtcattttctgcactactgatactgattcaagggaaaaaggctgtattcaaaagcaaacaggaggctacaagcgctatcggtcttttttctcagagtgaggcacgagtttctcaaatacgcagttttgaaaaaaatgttcgaccgaagcagccctttactacctctacgttgcagcaatgcgctgccaataggctcgggtttacctcgcgtaaaacgatgcaggttgcgcagcagctctatgaaggcgtatctcttggtacccaccgcgtggggctcattacatatatgcgtacagattcggtgcgcgtttctgaagctgctgtaaaggaagtgcgcgcgtggatagcaacgcatttttctgacgcactgccgggtactcccaatcggtacgctgcaaagggaaagtctcaggacgcacatgaggcgattcgaccaacatatgttgcccacactcctgagcggattaaagcgcaccttacgcgtgatcaaatacgtctgtacacgttgatttgggagcgttttgttgcaagtcagatgacagatgcaagagtgcgcagtttgacgtttgaaattaccgctggcccggcggttttcagtgcaactgaaacgcaggttattgaacagggattctaccgtgtactgaaaatgttatcccccaaagatctctctaaagctgtacttccccctacgaaggaaggtgaggtagttgcactacataacgtgcagtccgtacagcactttacgcagggtcctgttcggtacacggatgcaagtatcgtaaaaatgttggaggaaaagggaattgggcgcccttcaacgtatgcaccgactatttcagtactgctggatcgctattatgtaactcgtattcaaaaacagctaatgccgaccccattgggaaaggtcattagtgatcttctcaccacctattttcatgatgttgttgatgtaagttttaccgcgcgcatggaaagtaaactcgatgaggtggaggaagataaaatcaagtggaattgtgtcattgcggatttctatcctgctttcagcgaaaaggtttcaacggtgatgaaagatcttaacagcatgcgcggtgtgttcgatgagaaaacagatgtggtgtgtagtcagtgtggtgatacgatggtgaaaaaactgggcaggtttggatttttccttgcatgcggaaagtttcctgagtgtagaaatactcagcctgtccctcttgcaaagtgtccgcgtcctgcgtgcgatgggaatatcgtggggaaaaaaacaaggggaagaaaggaattctatggctgcacgcgtttccctgtctgcgattttgtcactcactttaaaccgacctttgcagtgtgtcctcagtgtcgatgctttttggttgaaaaatcaaatcgcagagtcggcacatatactgcgtgtgtaaaccctgagtgtcggtatgtatctcctactcgaaaaaatctttctctgggaaaggaagctgtcttggatggtagccacaggggggcacaggataaaggagcagtgcaacattatgagtaa

SEQ ID NO: 40316 - DNA, 1059 bp, Treponema pallidum
atggccgttacatccgtgaaggataagctcgccacgggagaaaaaaagcaacgggatatcaagtctctcaatggtcggcaaaaggcagcgatatttctagtttctattggggaggaaatatccgctaaggtcatgggagaacttaaggaagacgagattgaaaagttggtgtttgaaatagcgcgtacagagtcagttgatgcagaactcaaggatgcagttttagaagaattccaggaactgatgaccgcacaaaactttatcacctcaggaggtatcgattacgcgcggggattgttggagaagtcgttgggaagtcaaaaagcaatcgagatcataaatcggctgacaagctccttgcaggtgcgtccctttgactttattcgcagaactgatcccacacacctgttaaattttattcagcaagagcatccgcagacaattgcgcttattttggcgtaccttgagccgaataaagcttctgttattttgcagaacctccctgatgagattcagagtgatgtggctcggcgcatagccacgatggatcggacgtcccctgatgtgttgcgcgaggttgaacgagtacttgagaaaaaattgtcaacgctttctagcgaggattatacggccgcaggaggtgtccagaacatcgtggacatcttgaatttggtcgatcgttcttctgaaaaatctattgttgaagcattggaagatgaagatccagatcttgcagaggaaattaaaaaacgtatgttcgtgtttgaggatattgtaatgctcgacgatcgggccattcaaaaggtgctgcgggaggtgaatatggaagaactcgcaaaggcactcaaggttgtcgacactgaagtacaagataaaatttttaggaatatgtcgaagcgggcagggagtatgctgaaggaagaaatggaatacatggggccgacccgcttgaaagatgtggaggaagcccagcagaaggttgtttctatcatcagacaccttgaagatagtggtgacattgtcatcgcgcgttcagaagaagacgagatgattgtgtaa

SEQ ID NO: 40317 - DNA, 450 bp, Treponema pallidum
gtgtacgctccacgcatgcgcctgaaccgcgtagacttttcgggttttcatttcgtcggctgcaatttttttaataccgtatttaatgcatgtgtgttcgcgaatgtagtgatgcgtatgtgtttttttgagcgttgctacctggtcaatagctctttcactgaagctgacattcagttctcctcttttgaggggagcatcctgcacacggtgagcttcgcacatgcagtactcttatctgacaacttcaaccgtatccacgcgcaggatgtttcttttcaggagagcgatctttctcacacccgtttcttacacgctacgcttgcaacagtgcgttttgaaaattgcaccgtgcaacacacgcactttatgccctcgcacactacgcactgcacattcaaaggatctagtaccgaacacgcccgcatatacctgagcgacctgccatga

SEQ ID NO: 40318 - DNA, 807 bp, Treponema pallidum
atgtcggaccgacgtgagcaatttcaatacgcatttttggattcaggtataggaggattgccctacgcacacgccttacgcgtgcgtgtgcctgaggcctcactggtgtacgtggcggaccgtgtatactttccttatgggaataaaagttctgcacagattattgcgcgtgcgtctgcagttttgcagaaagtgcagacgaatttttcaccacacatagtggtactcgcgtgtaacagcatgtctgtcaatgcacttgagtttttgcgtgcgcaggtttcggttccagtggtgggggtggtgcctgcaattaagcaggcggtggcgtgcagtcataaaaagcacattggtgtcttagctacacaatgcacgattacgcatccgtacacagcgtgtttgagagcacagtttggtgcagggtgtgtgtttcagatgcgtgcggatgcacgccttattgagtgtcttgagcgcgggttaatttttgaagtcgaagacatgcagcgggaggcagtggcgcgctcagttatgcccttccaggaagcgggggtggatgtgctcgtgctcgcgtgcacccattttgtgcacgtgcgtcatctttttcaggactgtgttggtacctcgtgtacggtggtagattcgctagaaggtgtggtacgcaggacgttacgtctgtgtccaccgcaatctcaattgcgtgggaacgccgcctgttacgtaactggtgcgcgcgatgcagtgtgcgcggcacgatacgcacggtatgcgcagcactttggattgcgctgggcgggttttttggacgtatga

SEQ ID NO: 40319 - DNA, 1899 bp, Treponema pallidum
atgtccctgctcaactcactcatcacctccctcaccttgccgcagcctgcgcagccgcttcatctatcactcacccggtcaccctcagggtggcgcaaggttttcccctacgcttttacccctgagcgcaccgtcaccctcacgcaaaaggctgacgctgtactcagcgcacaggtagcactcagctacgcccgattcttgaaaaaaaaggtcccaaaaccacgtgttgtcatcgcgcgcgactcgcgccctactggagagattatcagttctatctgcaccgctatcctccatctggaaggctgttcgctgcgttgtgtcggagtcggaccaatacccgaaattgcaagctacgcgaggaactacgacgctttcctctacatctccgcaagtcacaatcctatcgaatacaatggctttaaatttggcctaaatgacggcggcgtgctcagtcctactcaggcacaacagctgagcgaagacttcgtcgcacagtgtttacagcccgcctctttccagaaaatacgagagcattgtgccacgctcaacgcctctatactcgaaccgctgctgtacaacaaaacacacaaacaagaaagcctgcacagctatgatctcttcataagggaagtgatcgcaaattcccctaaagaaactgagcaccgtgcctttttccatcgctttacccagcagcgtgccgcctacagcgaacagggaacacccctgtctatcctcattgatttcaatggaagtgcgcgtgcagcttccatagataggcgcctcctagaatcactcggtgtcgccctttttagtatcgccgaaacgccaggggatattcgccatcgcatagttcctgaagggtcctctcttaccgcgtgcgcgcaggcactgaccgaggcagccacgcgaggttcatccccagaagaacgctccattgccttcggctttgtgccagattgtgacggagatcggggaaatattgtctattacgaccaaacccttaatcgcgctgtcattccgcacgaacaggcagtctttgctctttcggttgtgtcggagatctgtgaactcagtcgcaacctccgtatgcagccacaccgcgcgccgcctatcgcgctggttaccaatggtcccacctcgctgcgtgtagaagctatcgcgcagctcttagacgtgcacgtttttcgcacggaggtaggagaggcgcacctcattgagaaggcacaccttctacggaaagaaggctactgcgtgcgcattctaggggaaggatcaaacgggggcagcattctccatccggcggcagtacgtgatcctttgcatactgtttttgcactcttaaagctcttgctcctgcggggggatgggaaacagccaggactctttgcctggtggtgcgcgcactcacaccaaacagaacgcgcgcagcatgccttcacgatatcggatctatttgccagcctacctgcgtacacgactacaccaacgcacgatacgcgcgcgctcttgcagatacgaacgactgaccatgcactcctcaagagcgcatatcagcgggtatttgaacgcaggtgggcgcaggagaaagacacgttaaaaaaacgcttcggcatttgttcgtaccgcccgatattgtaccgcgggagggagcagcaggacgcggcgggggattttagccggtcggctgacggaggattgaaaatccaattttacaacgagcaccaagaagcggtggcgttcgtgtggatgcgcggttcaaagacagaaccaatatttagaatttctgcggatctgaaaggtaatgacgaggcgggggaagctgcgcttttgcagctgcacgcggacatggtgcgcgaggcagatcgctgtgcgctttcgtgtgcggatacgacttcataa

SEQ ID NO: 40320 - DNA, 1359 bp, Treponema pallidum
atgtttgagcaactgagcgcgagctttaaacgtatcgtaggagcgctgggaggacgcgcaactatcagcgaacggaatattcaagaagcagtagaatcaattaagcgcgcactgttagacgccgacgtgcacgttcgcgtagtgcgtcgctttgtgaatcagaccatacaacacgcgcagggacagacggtgcttgcgtcggttagccctgcgcagcaattcataaaaattgtacacgaaagactaactgccttcctcggtgaacatacgcggtcgctgcatcttaaggggcccgatacgcagtcgattattctcttgcttgggctccaaggatcggggaaaactaccagcgcagcaaagcttgctgcgtacctgaaggatgcaggtcgctcccctctcctggccgcttgcgatcacgttcgtgccgcagcgagtgctcagctggccgttctcggcacgcacattggcgttcccgtgtaccagcatgcgctgccgcacgaacagcagccgtgtgctcttgatacggcgcgcggtgcgcttcagtacgcgcgctcacacggcaatgacgtacttatcattgacactgctggccgtctccacgtggatgccgcgctcatgcaggagttaatccttctcaaagaaacactggttcctgtggaaacactccttgttgcagacgctctaaccggtcagactgtggtgcgcattgcagaagagttccatgccgcggtgggtatttcaggcgttgtgctcagtaagtttgattcagacacccgcggcggagctgcactgtctttgaaaagtattaccggtcagccactgctgtttgttggaaccggtgaacgaccgcaggactttgaaccgttccatcccgagcgagccgccggaagaattctgggtatgggggacatcgtttctctcgtggaaaaggcgcaaaaagcctttgatgcacaggaacatgcgcgtgcgcagaagaaaacgcaatcgcacgagcgtttcacgctcagcgatatgctcgaccacctgcaaactatagaaaaaatgggaccgctgcactcgttggtggagatgattcccggtttagcggtagccgtttctgccgatgctcttgacgcgcgcgcgttcaagcgtcaaaaggcgattattcaatcgatgaccgtgcaagagcgtgacaattttctcattatcggcccctcaaggaggcggcgcatcgcggcagggtcaggcacttcggtggctgatgttaaccgtttaattaagaatttcgagaggatgcgcacgctcatgcgcaagactgcatggcagtcacgccgggcacaccctaaaggagatacaccctatggatggccacatcgctag

SEQ ID NO: 40321 - DNA, 1680 bp, Treponema pallidum
atgctttgcacagcgcctcttgtttcaagcgccgcctcggcggtgctcttggcatttgcgattcccaacgagttttggctcgccggttcctccgtgctagggttgggggcgcttgttcccttgtacgttggattcctcctctcccctgcaaaaaaacacgttgcctgttcttatgggctgttcgtcgcactcgtgcacgcgtgttctagcttttggctcaaaaactttcagggcttcgcgctcttcaccctcggcgcatcaactgtcggttacttcttctatgcgcttcctttcggcgtagcgttcgcatgcatcctgcgcaagcaggcgcccgcgcgtgcctgcgcttttgcgctcgtgtggaccctctgggaatgggtaaagtcaaccggtatactcgcctacccgtggggtacggtccctatgaccgcgcacagcctctcgcacctcatacagatagctgatatcaccggcgtctgggggctttccttcctcatcccgctcgcaaacgcgtgcgttgcagaaagtctccacttcttcataaaaaagagagacagcgtccctgtgttccgtctctggctcctcaccggctgcttgtactgcctgtgcagtctctacggtgcctaccgcatcgccacccttggggctccacgtaccacgctcgcgttggcaatcgtacagcaaaatgcagatccgtgggatacaarttccttcgaaaaaaacctcaccaccgctatacatctgactgagacagcccttcgtacgcaaacagctccccccctgccgactactccctacagaaaagaaaaaacactcacacacgcttctgcgcgcgcacctgtcgacatggtggtttggagcgagtctagtctgcgctatccgtacgaacagtaccgtcacgtgtataacgcattgccagcggcacgacctttctcggcgttcttgcgcacgctcggcgcgccccttctggtgggaacccccttgagactgtctggtaactccactaaaggtggatacgccaatgcagtggccttgctccgcccagacgggcacgtggcgcaggtatatggcaaaatgcagatggtgccatttgcagaattcattccctggggacacatgacatctgtacaaagactggcgcagatgctcgccggcttttccgaaagctggacgccagggccagggccgcgcttgtttcatgtgccgtgcgccgcaggaggcagcgtgcgcttcgcaactcccatctgttacgaagatgcctttccttccctctgcgccgctttgcacacacaggggagtgagctccttattaatcttacgaacgactcttggtcaaaaactgccagcgcagagtggcagcactatgttgtctctctttttcgggccatagagctgcgtaccaccctcgtgcgctctacaaactctggctataccgtcgtcatcggcccagagggaaaaacgcgcgccgcgtttccgttgtttcaggccaccagcgcggtgctccacgttccagtgtacccggtagtgcgcacgtactatgcgcgcatgagagattgggtgatcgtgctgtgcgcgctcatcttttttgcagaaggagtgcgcatggccgtgcacacccgccggcacagcaccacgcaggcggaaagctcactgcagcagataaggggggagcatgtttga

SEQ ID NO: 40322 - DNA, 1083 bp, Treponema pallidum
atgttcagttccagtcccccgagttctcttcctaagtccgtttcctccccctctccgtgcgcggcgcgtacaggggatcgggggaggggtctttccgggctcatcgagttcattgacgcgcatcgcgcgtttgcggtcgtggggcatgagaagccggatggggactgtgtaggttccagtcttgcgcttgcctcgttcctaagacgcatagggaaagaggttgagcttttgtctgcgggtcctttcaagcgtagagagatcgctgcgtacgcgacactcttccgtccaagtctctctgcgcagatacggccgtctgatcagacggccgtcatcgtggtcgactgctctgagctcagccgcgttggcgctgagctcgcctcgcagcttgccccctttgcgcgcgcgttcatagaccatcacgaaacgtgcggcgaccactgcgcgcactcgttcgtcgtaaaaacagctccgtccaccactacattggtgcaaacgttaatcgagacgatggccggatctcttgaagcagccgaggcgcgcgcactttttttgggattggctacggacacaggtttttttcgccacctcgacgagcacagtgcggacacgttcgcttctgctgcgcgtcttgtacgtgcaggcgccaatccgaaggacacgtttcttgccatgaacggtgggagatcccttgcttcgcgcatgttgattgcgcgcgtgctttctcgactgacgccgtattatggtggcgcgctcatgacctcgtacgaaacttgcgaagacgcggtccagttggggcttgatgtgcgagactccgatgctctgtatcagctcatccagagcatccagggcgtcgaggcaattgtggtggtacgtcaggaatctcccacacattgttcggtggggtttcgatcgcgaggatcgattgacgtaagcgttatcgccgctcgcttcgggggtggaggtcatcgctgcgctgctggccttcgtatcgagggcaccgttgatgaactgttaccccgctttgttgctgcctttgaggctcagatgcgtgcacccgcggccggggcgcaggtgcgctcctaa

SEQ ID NO: 40323 - DNA, 810 bp, Treponema pallidum
atgcgcgcggttgatttcttgcgtagagctacagtatgctggtacatgcgcatttatcttgcgtcaaacaacgcgcacaagcacgcggagttctcctcacttttccccatgcacacgattctcctgccgaaagacgagggtatcgattttttctcgcctgaggacgggtctactttctttgctaatgcaaggcagaaggctgacgccctctatgacgtggtacatgcgcctgtgctcgccgatgactcaggtctctgtgtggatgctttagacggggacccaggggtgcattcggcgcgttttggtgcacagcatggggtacacacagacactgcgcgcatgcagctccttctggaacgtatgcacggacggcaggaccgtgcctgttcctttgtgtgtgtggcggtactgaagttgggatcggtgccgttgtgcgttgggcggggggtgtgccggggagtgttgactacagaaatgtctggggtagaaggttttggctatgacccgattttcctgttgccacacctgggcaggacgttcgctcagctcagcattgaggagaagaaccgcgtctctcaccgggcacttgcggcgctgcgcctcgcacaggtgttggccatgatgcagctaccccgtgcgctgcgctacgagttaaagcttttgcgtggtgctcgtcgtatgacgcgcggcggcgtgctgcggcctggcgccccctgtgcgcaacgtaagggacagaccgcgcagactgcccgaagacacaaattttatgcacgcgctcggaggtgtgcccgtcgcatacatcgtgcctag

SEQ ID NO: 40324 - DNA, 513 bp, Treponema pallidum
ttgtaccatggccccacgctgcaccatcggagggtccccatggcggtaaacgacgaacagtttcaactcgttaccttccagctcggggaggagctttatggcatcgacattatgggtgtcaaggagattgtgaaggttcaggacgttcgtcctattccctgtgcgcctgcttacgtggagggcatttttaacctgcgcagcgagattatccctattattaacctgcacaagcgctttcacctacgcgaggctacgctcgagtcgggcgacgagtatctcggcggctttgtcattctcaatgtggaggacagtaagctcggcattatcatcgaccgcatcgcgcgtgttatcgctgtctcgcaggaggacgtgcagtcccctccccaggttatcaccggcatcggggcggagtacattcatggggtcgtgcgccaggggacgagttatcttattgttctggatatccacaagctgtttagctccaaagagttgcaaaagctcgcgaacctctag

SEQ ID NO: 40325 - DNA, 918 bp, Treponema pallidum
gtgagcagccgcgtgtgtcctcagcggcctgttgcaaaatcatcgggggacgcgaaggtgttgcttattgtcagcacgtacaaaccgcgcgctgcggtgctcgctgcggacgttgtgaactttctgagcatacgtggattccagtgccacaccattgagtatgatggattgaataaagaaagctgtgctcgcgcaggctatatgtttgcagtcagtattgggggggatggtactacactgtttgccgcgcgctgtgcttctccttctggtattcccatacttgccataaatttagggcgtttcggctttatcgctcctattgagccacggtattggcaacaggcgttgagcgattatttggcagggggggtgcgccctgctgagcgtgcgctcatatcgtgcaccgtcacgcgtgcgggtaaagagattgcttcgtgtctggcgttaaacgatgttgtcctttcaagtggacgcgtcgcgcgtcttacccgggcagaggtgtgcttcaacgacatttcttttggcgtgtatgaagctgatggcattattcttgcgacgcctacaggatctactgcgtactcggcggcctgtggcggtcccatcctcgatccggaccttgatgcgtttgtcctcactcccataagcgcactgtgcctttctaatcgtcccgtggtagttccctcctcaggggtggtgcgtatcaaggtgttgtctatgcgacacaaagaaacggtgctgtctgtggacggacatgaattgtgcacgttgcaggaagaagatcagctgcttgcaagcaggtcatcgtgcagcgcacgattggttttctgtacaccacacgtgttctaccatgcactgtgctcgaaactggcgtggtcagggagtattttttctcgcaggggaagacgtcacgatgattga

SEQ ID NO: 40326 - DNA, 1215 bp, Treponema pallidum
gtggattcatctgccggtgtgtctccctgcaatagtccgtatgggagtggacttttggatgttccattaaaattaagaccgcgtgcgtcccactaccgtgcacgatcattggtaattggaggaaaggaacatgtgcgtgcgttgcctcttgggggtgacgcaccgattcctatccaaacaatgtggaaagaaccgctcattggtgcagatctccaatccattgtggaccgtcttttggaacttgaacaattagggtgtgacgttgtgcgttttgccgttcctgacagggaatcggctgagctttttgtggcgctttgcgcgcgcacgcgtatgccgcttgttgcagacattcactttgattaccggcttgcgctgcggtgtatggacggaccggtagcgaaagtgcgtattaacccggggaatatcggtgtgcgtgagcgcgtgcgtgcggtggtagaaaaggctcgagcaaccggcactgctttgcgtattggggtgaataccggttctctgccgggtgtggtgaagcgcgcagttgcggcgcgttacgcggatgggatgcagtcagtgaatgcgcgtgcagaagcgttggtgcaaactgcctttgcagaagctgcgtatctagatcagttacactttgatcgggttgtcctttctctgaaggcttctacggttgcagagacggtacgtgccaacgaactttttgcgcagcagtctgatattcccttgcaccttggagtaacagaagcaggcccgcttgtttccggtattgtcaaaagtacacttgcattttcccaattactgtcacgcaatattggtgccacggtgcgggtgagtctttcagatagcatggagcatgaggtgctggctgcgcgagaaattcttgctgaatgcggtaaacgggctggtggggttcgtttagtgtcatgtccgcgctgtggcaggattggttttgacgtacacgcatttgtgcggaggtggcaaaaggaactgttcagtttgaaaaaggatatcacggttgcggttatgggctgtgtagtgaatggtcctggagaaggaaagcatgcggatctcggtatcagcggtgcggaggattcggtgattttttttaagcggggaaagatagtgcgtcgcattcaggtacgtgatctttgcgcagacgagcgcacgcgcataatagacgcagcgtttaaagaggaattgtcaagtttatga

SEQ ID NO: 40327 - DNA, 1083 bp, Treponema pallidum
atggaagggcagacggcgcgcagagtgatcacggaggcaaagtttcttgatgactgtttgacagaacgtgacagctattatctgagtaaattggacgagttgtactcatctgcgatgagttcttttgcgcagtttgaagatcagcagaatggagcgcgtagcgcacgcgctgaagaaaatatcatcgctacatatgacagtatcgggaatctgatgcaggagatctgtaaagaattacccgcgctgaaggtatattcgtttgaaacgcaacgagagaaccatgcagaagtttctcgagttgtttcaaagctgcgtaatattcataccggatatagtgaattcatctactacacacagcgtgcgtttgaaatgctgtttaggcttgcctacggcggctctcatgaagagcataaaacatatcttattacaaaaacaccggttgcttttcctgtacaaaactatgcagtacataaaattgcaaacgtggattataaaattgagaacacggtgatgtgtgtcatgttacgaggagcgctgttaccttcgatgattgtttctaaggagatagaagaatattcttcgcatgggtacgtaacgccgtttgcgctttttaaaatcaagcgagatgatctccgtgatgagcgcgatatgcagtatgtgtttgatctggataaatcatacttttctgcacgagagttggatggtaaggatctggttttcgccgatcccatgaacgccaccggtggtagtttggttaccatagtgcgttatttgcaagatctcggtgtgaaaccaaaatctatcagctgttttcacatgatttctgcactgaaaggtgcgattcgtgtagtgcgttccctagagaattgcacggtgtatacgctgtggatggatcccgtactcaacgcgcgtgcgtatattatgcctggtcttggcgatgctggtgatcgagttaacggggttgatgttgaagactatccgcggaatattatccagcttttggcagactatggttcaaatatttctggcctgtaccggtcccagctccgcaagatagaggaaacggtattaggttctcgctga

SEQ ID NO: 40328 - DNA, 3276 bp, Treponema pallidum
atgtatacgcctgtggacccaaaggttgattttgtcgcgcaggagcggcgtattctcgccttttggcgggaacgccgggtgtttgagcagtctgtggcgcagcgtgcgcaggggaagtcttatgttttctttgacggtcccccttttgcaactggactgccacattttggtcactttgtgcccagcacgattaaggatattattccgcgctatcagacaatgcgtggtgcgtacgtgccgcgtcgctttggatgggattgtcatggtctgcccattgaacacctgattgagcaagagctcaatttgaattcaaaaagtgatgttgagtcgtatggtgtcagcgcgtttaacgcggcatgtcgctccagtgtgctgcgatatgtgaaggagtggcagcgcacactcacgcgtcttgggcgctgggttgacttcgataatgactataaaaccatggatgtctgctacatggagtccgtgtggtgggttgtggcgcagctatggcagcgaaaactgctgtatgaaggttataaaatactcccgtactgtccacggtgtgcgacagcactttctaatcacgaattgaatttaggtggatatcaggatgtgtctgatcctgccattactgtgcgttttgagtgtacatctgttgttcctggtagtcctgctgcacgggagttttgtgcggcagcgtcttggggaagtgcatcacttcctgcgcatacgtgctttcttgcatggaccaccacgccttggacgcttccgtgcaacgcagcgcttgcgctgggaccacaaattttgtacgtgctaatagaggcgaatgatgagcactatattttggctcgttctcgtcttgaattctattatccagattcgtctgcgtaccgcgtagtgtgggaaaaaagaggtgaacatcttgcggggattcgctatcggccgcttttttcttatcctgtgtttgggcagggaccggatccttctgtacaaggagattcagaggagggattgttctgtacgcgagttgcggattttgtttctactgaagacggcactggtgttgtacacgtcgcacctgcgttcggagaggatgattatgaagtatttaaggatgcgggtatttcgattcagtgtcctcttgatgcagagtgtcgctttaccgcagaggttgcagattatcaggggctttttgtaaaagctgctgataaggctattattgcacgtgtgcagaaacagggagcgttatttagacgcgaacagatttcgcacgcatatccacactgttggcgttgtgcgagtccacttatttaccgtgcggtgcacagttggtttgttgcagttgagaagataaaggataaaatgcttgcggcgaatgcatccatttgctggcagccatcgcacatacgtgatggccgttttggtaagtggcttgtgtgtgcaagagattgggcaattagtcgggatcgttattgggggaatccgcttcctatttggcggtgtgtgcactgcggtgcaacagattgcattggcagtcgtacgcagttatatgaacgttccggcatgttgcttgaagatttgcataagcacgttgtagatatggtaacaattccttgcgcctgtgggagtgtgatgcgacgcgttcctgaggtgctagattgttggtttgaatctggtgcaatgccttatgcgcagcagcactatccgtttgaacatgcaactgactttgagcggtatttccctgctcattttatctctgaagggttagatcaaacgcgagggtggttttacacccttaccatcttggctgtggcactctttgagcgtcctgcgtttgaaaactgtatcgttacggggttggtacttgcgtctgatggaaagaagatgtccaaggccctgcgcaattatgcggatccaaatgaagtcatggatcgctacggtgctgacgcgctccgcctctttcttgttcgttctgcggttgtccgtgcggatgatttaaaatattctgacgaaggggtgaaagatattttgaagactgtgattatcccattgtggaatagttacagtttttacgttacgtatgcgaacatcgatggtatcgatcctcctgtatgtgcaaaagttgacggaatgggtcaggcggtcacgcgtttagcgacgcatttgaataacccgttagatcgttggatcttgtcgctgacagaaaaattggtgcaagacattgcctgtgcacttgatgcttacgatgtatcgaaagttgcggatcctatcgtttcgtatgtagatcagctgaacaactggtacatccgccgatctcgaaggagattttggaaaagcatcaacgatgaagataaacgatgtgcgtacaacacgttgtattgcgtgctgaaaagatgtgtgctcgctattgctcccgtggtgccattcatcaccgagagtatatggcagaatatccgcgccgcggatgatgtgcagtctgtgcatcttgcagactatcctgtttgtacaccaatggtgcgagacgatgcactcgagtttaaaatggaaacagtgcagcgagttgtttctatggcgcgtgcgatccgagcgcagtgtaacctcaaagtacgccagccacttaaagctatgcaggttattacgcgtaacccgatggagcgctcagcacttcttgaaatggaagaagatgtgcttgatgagcttaatgtaaaagagctcgtgtttcatgagaaagaagacgagatagtagagtaccgtgcaaaagcgaattttagagtgctcggaaaagagcttggatcgaagacaaagcgtgcagcgctcagcattgagcggttgtcttctgcagaaattcaggagatactcgaggggacgacgctgtatctggatgtagatggagatcgtttggagttgactgaggaaaagatcctggtgcaaagaattgagcgcgagtctttgaaagcgataaatgaagggacacttacggtcgcgcttgacaccaccttaacggaagatctgctcttggaaggagcaattagggacttggtgcgcggagttcaaaatttacgcaaggagcgtgggttttccttagtggatcgtatttgtctgcgcgttttttcttcagatcaggatatagtgtgtgcccgcaaggcgtatgatctgcataggtcatatatcgttggcgagacgttggcagcgcatgtgcaatgggcacgcgtgcgcgacggtgcttctgcagtgtacgttaaatcggacgcagtactatgggaggtgagcattgataaggcgtag

SEQ ID NO: 40329 - DNA, 786 bp, Treponema pallidum
gtgtgccgcctgcagccgttttttcgcctccggttacaggtctatttagccaggagtggctgtgcctcccggcgtgcctgtgaggccttgattgcttcagggcgtgtgaccgttgatggtcagacggttacgacacagggacggaccgtttgtgcgcagaatgtggtgtgtgtggacggcaccgtcgtgcagcttgaacgagttcagcgctacgtgctcctgtataagccggttggatatatctgttccctcgcgccgcagtttcctgccgggtatgcacacacgcaggtgcgggcaggcccgtccaaacaggaatacgcgcgtgcaatcgatttagtacagcctgcgtatcaggagcgcctatatcacatcggccggctggacgtgcggtctgaaggcgcgctgctgttcacaaatgatggttcgtttgcgcaggctcttggccatccgcgttcgggaatagagaaagagtacattgtagaaacgcgtgagccagtccctgcagcgctgttgagctcttttgtgcgtggggtgtgggtggaagggtgccggtatcggtgcgtgcgcgcgcggcatcttgcagcgcagtgtgtacagcttgtactggttgaggggaaaaagcgcgagatccgtgtggtattcgaggcgtggggacaggatgtcgtgcgcttagtgcgggtgcgcattggcagggtgcgtctaggaccgctgaggcccggagcatttcgcaccatgaggctgcaggaagttgcgcagctcttgcagtgcgcagggtgtgcgcgatag

SEQ ID NO: 40330 - DNA, 1110 bp, Treponema pallidum
atgtgccaaaaatcctcaccgtgcacctacgcacgcgtacgctcccttccatccgttcgcttattctcctttcttgcgctcgcatttgcgtccttcctgcgggcagaggatgcctttgaccactttcgtgaaggagagcgcctcctttccttacagcaggcacagcaggccatcggtccacttcacaaagcagcacagcaaaaacccgcccacccgaaagcagcactctacttgggaatggcgtacctacagacaggacgctacacgcaggcaatccagtggctgcaaaacccaccagtacacagtcaggaatatgcgcacctatacgcctacaatctcgggaacgtatacttcgtgcaacatcgctacgaggaagcccaacatgcgtatgagcaggccctcgccctcaagcacgattaccctcctgccttgctcaatcgcgcaaacactgccatgaagcgacaagcctatgcacacgcactggctgactataaaaagtacgtgtcccaaaacccgactgcttcacaacactacgaagtgcagcgtatgatagcggcgcttgagcagtggctgcagcgcaaggaggcggaggaagcccggcgcaaggaggcggaggaagcccggcgcaaggaggcggaggaagcccggcgcaaggaggcggaggaagcccggcgcaaggaggcggaggaagcccggcgcaaggaggcggaggaagcccggcgcaaggaggcggaggaagcccggcgcaaggaggcggaggaagcccggcgcaaggaggcggaggaagcccggcgcaaggaggcggaggaagcccggcgcaaggaggcggaggaagcccggcgcaaggaggcggaggaagcccggcgcaaggaggcggaggaagcccggcgcaaggaggcggaggaagcccggcgcaaggaggcggaggaagcccggcgcaaggaggcggaggaagcccggcgcaaggaggcggaggaagcccggcgcaaggaggcggagtttgaagctctcaagcgcgcgcttagactgaaacaagcggaggacgcgcgtaccctctccactggatcggaggacaccgtcccctatcaggaggaacacaaccttgaataa

SEQ ID NO: 40331 - DNA, 1608 bp, Treponema pallidum
gtgaattggagaaatcttgacgagtgtgccgcatacgcccgcctgcaggcgattcgtgcgccgtcgctgaagacagtactctgtggaccagaggggatagaacgtgtgcggcgctattgtaccgacgcgggggctgggctgcgctatcactacgcagcgaaaacagtgaatgaagaaattctcacggcgcttgctgctcttgcagacgagcaggaattagtcgcaaagtacgacgccctgcgcgcaggagcacagataaacacgggggaaaaacgtaaggtgctgcatcacctaacgcgcctcggcgtgcaggggtcatcgcttgcctcgttgccgtgcgaagtgcgcgatatgcacgccttttatacaaaagaatacgaaagagtatgtgcgttcgcacggcaagtacacgaaggggggctgcgcacgtctcgcggcgcaccgtttaccgacgttgtacaaattggaattggtggatcagatctcggtccacgggcgttgtatctcgcgctggaaggttgggcacagaggcaccaggcggttaagatgcgcacacattttatctccaacgtggacccagacgacgcagcgcttgtactctcaaaactaccgcttgagaccacgctttttattttggtatcaaagagtggtacgacgcttgaaacactcagtaatgagcttttcgtcgcacacgtccttcgtcaagcaggtctagaaccgcacacacagttcgtggcagttaccagcgagaccagtccacttgcaaataatccccagtaccttgcttccttctacatggatgattttatcggtggacgctactctagttcctctgtctgtggcgctgtggtactcacgcttgcgtttggaccgcaggtgtttgggcacttcctctccggtgcggcagaggcggaccgagcagcacaggaacaagacatacggcgtaatgcagcacttcttgacgcgctcatcggtgtgtacgagcgcactattctgggatacgagcacaccgcggtgttgccctatagccaggcgttggctcgctttcctgcacatttgcaacaactagatatggaatctaacggcaagagtgttaaccgcttcggcattccgataacgtataagaccggcccggtgatctttggagagcctgggacaaacggtcagcactcgttctaccaacatttgcatcaaggaacatcggtggtgccgcttcagttcattgcctttcaacatagtcagctcgggcaggatccgataatccgtggatctaccggtcagcagaagctccttgcaaatgtcgtcgcacaaattgtcgcgttcgccaggggaaaagagcacgcggatgcaaataaaacgttttccggggagcgtccatccagtctgctatacgctaaagcgcttaccccacaaacgctcggcgcacttcttgcacactttgaaaacaagattatgttccaaggatttgcgtggaacttgaacagctttgatcaagaaggagtgcagctgggcaagacgcttgcacaacacatattagcaggagaggtggaaggcgtgttgcgcgcctacgcagatctgtttgatttagcacacgcgccgacgtgctag

SEQ ID NO: 40332 - DNA, 1548 bp, Treponema pallidum
atggggaaaatcagtggcagcggcacggtcgcgccgcacatcctggttatctttggcgcttcaggcgaccttgccgcgcggaagcttatcccctcgctttgggatctctttgagcaagagctcctgccccgtacattcggtatactcggcgcagggcgtacggctctgtctacagagtcttttcgcgcacggcttgcagaggcggtcacaaagcatgcagtgcgcacaccgcacgacccggcgcgcctcaccgaattcctgcagaagatccactacttctcgttcgatcccaccgactctgtcgcctttgccgactttgccacgtacgtgcgcaccctcgaccagtcgctgcacaccgagggcaactttatcttctatcttgccactccccctagcctgtacgaaactatccccacgcagcttgctatgcaccacttgaaccgggaacagggtaattttcgcagggtagttattgaaaaaccctttggctacaacctagaaaccgcgcagcaccttaatgcgagcttgcgtgcccactttcaggaaaaccaaacctatcgcatcgatcactatctgggtaaggaaacggtccaaaacatcctggtcactcgctttgccaatccccttttcgagcccacatggaaccggacccatatcgattacgttgaaattactgcaagcgaatcactaggtgtcgaaaaccgcggcggttactacgaccagtccggtgcattgcgcgatatgatccaaaaccacttgttactcctcttgggtattatcgcgatggaggcgcccgccgtcgtgagttcaagtcgtctacgggatgaaatcgtaaaggtctttgactgcctgcgccctatgggagaacgcgacgtcatgcagcatacggtgcgtgcccaatacgtcgccggcaagatacgcggtgtagccgtccccggctaccttgaggagtcaggcgttgaccctcgctcgtgcactgaaacctttgccgcactcaagtgctacatcgacaattggcggtggatggacgttcccttctacctgcggacgggtaagcgtttgcccacgggcgtcactgaggtgatcgtccattaccgaacgctccccatcgcgcttttcgagcacatcgaacgcccgtgcgcacgcgagggcaacgcgcttgtcattcgcattcaacccgacgaaggaattcagcttaaaatcgacctcaaagagcccggcgcggggttcaagactattcccgtcagtgttgattttcagtattcggctcttacctattcgcacttacccagcgcgtatgagcggctattgcttgactgcatgaatggagacaacacgctctaccatcgagatgacgcggtggagtctgcatggcgcttcatagatcctattcttgccgcatggaaatcaaacaagagtcctctacttacgtaccctgcaggaagctggggtccgaaggctgcagacgacctgatcaaagggagtgctccacggtggcatcacccctcttctacgctgctcagcgatgattttgcctgccgactctag

SEQ ID NO: 40333 - DNA, 2538 bp, Treponema pallidum
gtgtgcggcgccactgcgtgcggcgcaaggatctgcaaggcagaacgccaggaacactgtgagggcgcggtaccgtacgggtatgcgcaccctttctgcacggtactggttctgatctctttgagggagggtgtgtatccttttacccactgtggttgcctccgtagcgagctttgtgtagggtcgaacgggagatgccccaagcgtgcggcgccggatgcgctgcatatgtgcctgcgcggagcccacgcgccctgtggggcggagctttttcccgtaaaaccttgcaaacgaaagaacgcctgtggtagaatcggcccgcgctgggtgaagggtcttgtgacgtttcattctcacatcattataccgagggagtggcttatgggatacggttcatcagctgaggaaacgtcttctacaccgcatgcgtcaggccaaaggaaggttggttttctgtccctgcgcaccaagctcgcgctggtgtttgggctgcttgcgttcgtgtctggtctggtccagggcggtatattggtcgtttttgcgcgtaactccatagttggggagatttctagtcaccttgctggccgtgctcgggatacctcctccatcgtggaagggcggatcggcgcgctgttccagtttttggaaggtttggcacgtcttgaagttttgcaaggctcgtccgacaggcgccgtgcccaggtggacaggctaaagaaggaagcgttttttaaccgggatatcgcgcgtcttgcggtggtagatctcgcaggcgtgttgtacggggaggacgggcgcacgcattacgtacaagatcgaaagtactttcagcgggcggttaaaggccgttgttacgtctctgcgccctatccctcgcgttcgtcggatgacatggtcattaccttttccatcccggtatatgacgaagatcggcgggttattgccgtgctcgtagcggatgtgatttggacgtggctgtgtgatatcacaggggatttttctgtagggggggtggggagaatcgccgttattgacgaggttggtaccgttgtcgcgcacccacgtcacgaggtagtggcgcagcagacaaattatatccgcctggcaaaggaagacccggccacgtacgcgtccgtcgcagagttcgttgagaaggttatcaagtcagactctactgcctctcacgtgttctcgtatgaaggcttagagaaaatcggttcatctgccaagatgaagagcacaggatggaccgtcgtggtgtttgtgcctgtctccgagtttatggggcctgtgtacaccctgcagaactacctgcttgcggtgggtatcattgtggtactcttctccctcattgtggtgtatgccgttgcgcgcaagattgtgcgcccgctacgctctaccgtcagggtgttagaagacatcgcgtacggtgaaggtgacctgaccgtgcgtttgccagtggttggaggggacgaggtatcgctgctttgccagtactttaaccagacgatggagaagattcgctttgctatcgccacggtggggtcgagctctgacgatatgcggcgcatcggggacgagcttgccagtaacatgactgaaacagccagtgcggtaaacgagattaccgccaatatcgatggtgtcaagcaccgagttgacttgcaggtgagtggggtgtctgaggccacggacacggtggaacgtatcatcaagacaattaaggggctgaacagtagcattgagacgcaggcggtgaacgtcgcacagtcttcctcctcagttgagcaaatggttgccaacattgtgtctattacgcagacacttgaacggagtgatgaggcggtgcacagtcttgctattgccaccgctgatgggcgtgacacgctggttagctctagcggtattacgcaaaagatcagtgaggaatcgggaagcttgcttgaggcgagcagtgttattcagcacattgcaagtcagacgaacctgcttgcaatgaacgccgctatcgaggcggcgcatgcgggcgaggcaggaaagggttttgcggtggttgcggatgagatccgtaagcttgcggaagagtctagcacccaaggaaagaccattactgagacgctcaagacgctcagtgtggaaatagatacgctttccacgtcttcaaaagcggttgaggagcagtttgataccatcttccgtttgtccgatcaggtgcgtacaatgagccggtcgctgacagaggcgatgaaagagcagtcggatggaagccgtgaggtcctagctgcgattaagagcatcaatgccgccaccgtagacgtgaaggaggggtctgcggatatgctcaaagggggcgaggttattgcacgcgagatgcagcgcttggacgacttaactagtgaaattgccagaagtatgaatgagatggcagctggtgccatcgagatcaataacgcagtacacgaggttaatgagataacacagcgtagcaagcagagcatcagcagtcttgcagatgaggtggagaaattcaaggtatag

SEQ ID NO: 40334 - DNA, 969 bp, Treponema pallidum
gtgcgtgtgcacttctggggggtgcgggggtctgtgcctactcctgtgacacctcgacaggtccagtcaaagatagcggctgtcgttcagcgcataagtgcaaaggatgtcaggaatcagagatccaaggagcgttttatttctgatctgcctgcctggctctttgggactacgggtgggaatactacgtgcgtggagatggagactgattgcggggaaaccctcatctttgacgcagggacaggcattcgtgatctgggtatcgatcttatgagccgtccaggctacagggcgcaggggcatgtataccacctcctgtttacgcattttcattgggatcacatccaggggctaccctttttcaatcctgcctttgatcctcgtaataccattatcgtctatagcactcgcaagaaaatgaaggaattccttgaagatcagatgaggtatccttactttccaatatctatgtttggacgcgacggttttaacgcaaagtttgaatttcgcctgataggtaaccatgaggagtgctttgctattgggaagacgaagataacttggaaccgggtgcgtcatccaggcggatgtgtatcgtatgcggtgagcgaggctggtgggaagaaggtgattttttctaccgacaccgagttacggcagaaggattttgatagaagtgagcgtaatgtctgcttttacgatgccgcaagtctgctcataattgattcgcagtacaccatgactgaatccatcaaaaaagaagggtggggccactccacgttctctatagtggttgattttgcagtaagttggggggtgagaagactggcgctgttccaccatgaacctacgtatgatgataaaaagttgtttagcattttgcagaatgcctgctggtatcgcaagtacgttggtgcgcacgatcttgaaatactgctcgcacaggaaggaaaggatatctttgtatga

SEQ ID NO: 40335 - DNA, 1818 bp, Treponema pallidum
gtggctcggatttctgcgcacgttattgatgcgattgctgatcgtgtggatttggtttcgctggtgggaaattacacgcatctggagcggcgtggggatgactggtggggtcgctgtccatttcatcatgagcgtacgccttcgtttcatgtggtgccggataaaaagatgtactattgctttgggtgtggggttggtggatccactattaagttttttatggaaatcgagaaaattgatttccacgaagcggcagtgcgtcttgcaaagcgtgcaggaatcgagatgtcctttgaggacggggtgcacgctccttctgctcatgcttcctttacaatgcagctgtgtgaagtgtatcagcgcattgcagagacgttccatcacgtacttatgcacaccgcgcaaggagcgcgtgcgcgcgcgtacctagcctcgcgcaaggtaacggatgattcaatacgcacctttaagctcgggtacgctccgccggatccggtatggttgtttcaatttttaaggcacaagggatactcccccgagtttctggcccgttctgggttgtttgcaaaaaaaagcgagcgtatcgccgttttttcagatcggatcatgtatccgattgccgaccgctacggtcaggttatcgcattcggagcgcgcgccttggggactgcacctgcaaagtatttgaacacggcagatatgccacagtataaaaagggtgagcacttgtttgcgtttcactgtgctctttctcagatgagaaagacgcgcgcggcgattatatgtgaaggatacatggatgttatcgcgtttcatcaggcgcagttgacgtatgctgttgcgcctttaggcgcattgctgacgaaaagccaggcacgtttgatgcgttcgtttgtcgatcgaatatatatgtgttttgatgccgacggagcaggcagagcggcaacgtacaaggcgattttgttgtgtcgttccttgggttttgaggtacggatagtagaattgaatggaggtactgatcctgcagaatgtgcgtgtatagaaggagaggacgctttgagaaaaagcgtagaacggagcactactgacgcgcagtatttgatacggtgtgcacgccatgagcacagtcaccttggtgcagatgacacatcacgtgcggtgtcctttttattcccttatctgagtgtcttggactctgccattcagcgtgagcaagtcatgcaggatattgcgatggcgtttggcattcgcatacaggcggtgcacgcagattacctgcgttatgtgtcccgtaccacgcagaaagggacaacagggaattgtgttctgtctgtacagggaacagcgatacaggtgaaggagcctgctacgggagtacgcactgcgcagctgcgtttggtactagcggtggtagcaaatcctgagttatttgagctcctgcgggagagtgtgtgtgcagatgactttgaagatcctatggcaaaagagttattcataatcctagaggagtgttatcgtgcagacacgcgtgcaagtccgcatgttctttcgtgttgtacaaccgacgagttaaggaaactcgtgagcgaggcaattgtctgtggtgagttctcttgcaatgcgccgcagattgtgcgtgacggtgttgcgctcgtgcgtcgtaatagactgctgaaggagcgagaatcgctcgtagggcggctgcgccgatttggggatgcatcttcgggtgaggagtgcgggtctatgcaggagcttatgatggaaaagcagcgggttgatgaggagttagaaaggttgaaaggggtgaggaaatga

SEQ ID NO: 40336 - DNA, 1836 bp, Treponema pallidum
atgatggagctgtcacgtactcctgcggtgatgcgcctgttagaatatgcgagggagaagaaggctataacgcatgatgaggtcgagaacatactcgcgcactatggcgttgagacagaagagctgctacatgatgtgcttgatatgcttgagcaggagaatataaaggtcttctcctctgaagaggaggagctagaagacgaagtctttgcagggctgaaaggacctgccgcggacgatggcgatgggtcgttccccctttcaactgagcgcgtgcgtgataagctgtgcgacagtagccgtggggcacggcagaacttgctgtcaaacgcgcggaatattgcacttgacgatccggtgaaactctatctgcgtgatatcggccaagaaaagttgctcactgcggagcaagaggtcatgctttcaaagcggatggaagagggcgaaggcatcataaaggacattattacccagtctgggctccttcttcctgagttttatcacattgggcgcagtctttctaaaaaagctcttgcggttttggatcctgcagaaagcggacgtacgagaaaggaaatcagcgaggagatggccgatcgccggcgtctgaaacaggcatacggagaggtgcttcgctccttgtatcctgaaatgcgtcattacatggcaatgaaaaagcggctggatgagcgtggggagccggtgacggttttgagtagtgatgaagaagtgtgtaagcagcgcgacaagttgctttcctgtttacaaaaggtggacttgcaattagaggagatagatcgcttttctcgaaaatttttggacaccgcgcgaaaaatacgggaatacaagcggcgtaaagatcgccacgaaaagcaacttatgattgctgacctgtgtgacatgcgcaagattgggcgtggtctggccgtgccccgtcagcgtgcaaagttggaagagacgcttggtatgtctgcagattgtattcaagagatctatacacagattcaaaaagtgacacgcaggctgcgacgcatcgagtatgactttgaaaataccatcgacggtattttatccatggcgcgggcaattcaccggggtcatgtcatgctcaagaaggcaaaggataagctcattaatgctaatctgcgtttagttgtgtcgattgcaaagaagtacacaaaccgtggattgcttttttttgatctcgtgcaagagggcaatattgggctgattaaggcggtagaaaagtttgaatatcgcaagggatataaattttccacgtatgcgacgtggtggattcgccaggcaattacccgttctatttccgatcaggcgcgcaccattcgggttccggtacacatgatagagcagataaataaagtgacgcgtgagtctcggcagttgttgcaaaagtttgggcgtgagccttctgatgaagaaattgcgcagcagctctgttggacagttgaaaaagttaagcaggtaaaaagtgttgcgcgcgagcctatctctcttgaaactccaattggagaggaggaggactcttccttgggtgactttgtccctgacgctgacgtggaaaatccctctcgagttacagaaagagtcttgcttaaagaggaagtgcgatctatcctctccgctcttcctgcgagggagcacgaagttttgagaatgcgttttggtctcgatggagactactctcaaacgttggaagaggtcggtttgtactttgatgtgacgcgtgagcgtattcggcagatagaggcgaaggcccttaagcgtttgcgtcatccacgacacagcagaagattgaaggatttccttgacagttag

SEQ ID NO: 40337 - DNA, 1035 bp, Treponema pallidum
atgttttttctcagacgattttctgctgacgtgggtatcgatctaggcacgtgtaacaccattatctatgtggaaggaagagggattgtcgtcaatgagccgtctgtggtggcagttgagcggggaacgaagtcagtagttgcggtaggctcggacgcgaagcgcatgttgtggaaaactccgggaaatatcgttgcgatacggccgttgaaagacggtgtgatcgcggacatggatactaccgagaagatgattcgttactttatttctaaaattttgccgcgccacaggctcattaaaccgcggatggtcatcgggattcccagttgtatcacggatgtggagtgcagagcagtgcacgagagtgctagtaaggccggggctggggaggtggaggtacttgaggagtcacttgctgcagccattggcgctaatattcccatagaagaaccggcagggaacatggtgtgtgatatcggggggggtaccacggaggtgtcggttatctcgctcttgggtatggtggtcacgaatgcaattcgtgttgggggcgatgagtttgatcaggccattatcaagcacgtgcgatccgttcacaatttgattattggggagcagactgcagagcgtttgaaaattgaaatagggaatgcttctccggaaaagaatattgaaaaggtggaggtcaagggaaccgacgccatcaccggtcttcctcgcaggcttgagatagattctgttgaagtacgtgaggcgctcaaagagcctatcacgcagatagtggaagaaattaagcggacgcttgctcgaacgcctcctgagttggctgcggatatcgtcgaacggggcatcgtcatgacaggcggaggctctctcctcaaaggtctccctaaacttatttctaaggaaacgcatgtgccggttatccttgcagagaatcccatgaactgtgttgctatcggcgcaggaaggtaccacgaagtctacaaggatatttcaggggatcgtagtctgtatgcgggactgaattcatga

SEQ ID NO: 40338 - DNA, 1248 bp, Treponema pallidum
atgctcaggtctaagggggatctggtattgggctgctctttctgtggaaaaaaagaagatgagcgacgccggattgtgaccggtcatggggtttctatttgcaattattgtgtggagcggtgtgcagaatacttgcgtgatcgcaagccgtcggcacttgcgctcatgaccaaagaggagattccaactcctttagagttgaaagcttaccttgatcagtacgttattgggcaggatttggccaagcgggtgctatcggttgcggtgtacaaccactacaaacgggtggcaggtaggtctttggatattgattcggtattgattgaaaaatctaacgtgctgcttattgggccgacaggttcaggcaaaacgctgttggctaagacactttctcagaaaatgaaggtcccctttgcgatagcagatgctactacgctcaccgaggccggttatgtgggtgaggacgtagagaatatcttattaaagctcgttcagaatgcgaacggagatgttgccctcgcagaacgggggattatcttcattgatgaaatcgataagatttcgcgtaagagcgagaacgtgtctattacgcgtgatgtgtcgggtgaaggggttcagcaggcgcttttgaaaataattgagggaacgatagcatcggtgcctccgcaggggggtcgcaagcatccaaaccaagacatgctcagggtggatacatcgaacattttgttcatctgtggtggtgcgttcgttgggttagatggtattgtcggtacgagagtgtgtaagaatccggttggctttggagcagatgtaaaaacggtaaaggagcgaggtctgcaactgatgcacgaggacgtcattccggatgatttggtgaaatttggattaatcccagagattatcggccgtctgccggtgacggtcgccttggatgctctttctaaagaggatctgcgcaatatcttggtacgaccgcgaaatgctattgtccgtcagtttgaagcgttattcgcgttggatgacgtgcgtcttgtctttgatgaggacgctttggacgcaatagctcagcaggcaattgatcaaaaaacgggggcgcggggtttgcgctctattgtggaaagattaatgcttgatgctatgtttgaggcaccgtctctgaaagggaaaaaggagctatgcattacgaagaaggtagttacacaagaggaaaaagccagcgttcgccttgtttctgaacgtactgcgtga

SEQ ID NO: 40339 - DNA, 567 bp, Treponema pallidum
atggagagtctcataggcaagagggttatagactttaagcttcctgcgtatgtcggggggaagtttacggaggtctctaacgcatccattaagggtagctgggcggtgtttatgttttacccggccgacttcacctttgtgtgccccaccgagcttgcggatctcgcgcgcgtatatccgtcttttgtggagattggttgtaaggtatattcggtttctacggacagtgagtacgtgcacaaggcatgggcggatgcgacagacacgataaagaatctgccctacgagatgatttctgacaaggcgggaaagcttgcgggtttctttggagtgttgttgccagacacttggcatgcgctgcggggtacgttcgtggtcgatcctgaaggccttgtgaaagctttcgaggtacacgacatgggtattgggcgcgatgcggatgagcttttgcgcaaggttcagtcagcacagtttgtggctaagcatggggatcaggtttgtcctgctcgttggaagcctggagcaaagacgttgaagcctggtattgatttaatcggtaagatttag

SEQ ID NO: 40340 - DNA, 1200 bp, Treponema pallidum
atgcgcagaggtggtgcgtgtgtgcagaaaaaggagtacttgccgttaacttccaggcagcctggtgtctgcctcctttctgagatactcgtgcgtgcccttgaggcgcggtcgttcttccttgtcgttgttaccgttcctgcaggtgaagttgcgtacgcagaaagtcaagtggcgtgtgattcgcgtctttcggcgttcccgtctcgtacgcgtccagtcattctttacgtgccgggtgcacatacacgcagtgcgtctgtgcgcgcggggcttgacgcgatggctacgcatgcgcccgatgtggtcctggtgcacgacggcgcacgtccctttgtgagtgttgcgcttattcattctgtacttgaggctacctgtcgctatggagcggcagtgccggttatagaggcgacggatactcccaagggtgttgctgccgatgggagtatcgaaacgcatcttatacggagtcgagtgcgcttagcacaaacccctcagggtttttgctacgcgtcgctgtgcgctgcccatcaccgcgctgctactgatggggaacagtatactgatgacagcgagctgtacgctcgctacggagggaccgtacatgtctgcgccggtgaacgcagtaatgtaaagattacctatccggaggatctggagcagcgggcatcggagcctgctctcacgagggggatatcagtcctgccgtgtacggaagaaggtgccctgcgcgttggactggggactgatatgcacgcgctgtgtgcaggaagaccgctgatacttgcagggatacatattcccagtaagaagggagcgcagggtcattcggatgcagacgttcttgcgcatgcgagcattgacgcccttttgggtgcagcaggcctgggggatattggcacgtttttcccctcttgtgacggacgatggaaagacgcacattcttgcgcgttgctccgccatacctggcaactggtgcgcgcagcgtgctggcggctggtgaatctcgatgctgttgtctgtcttgagcagcctgcattacacccatttcgggaagcgatgcgcgcatcgcttgcgcaggccctggacacgcacgtaacacgtgtttttgttaaggcaaagactgccgaacgcctcggacctgttggatctggtgcggcggttaccgcacaggtagtggtacttttgaaaaagatatga

SEQ ID NO: 40341 - DNA, 1401 bp, Treponema pallidum
atgagggttattgttgttggatgcggtacgaatgggcgtgaacttacgcgtcgtttgagcgcgaggggacatcaggttacgcttgttgctgccgcgcatgagcctgtcccccgtaaaattcccgcgggggcacaagcgctcgtgcgtcatcaaaaagatcaccgcgctaccctgggtgaggcaggtatcgcaaaggcacaggcgtttgttgcggtcaccgaggttgacgaacttaacatagtactgtgtggtatagccgccgacttgaatgccggagtgattaaaatagcccaaacgcacgatgaccactacgctcacgcggtgtgtcgtgagtcgcgctgtatttttggtattgactttctcatatctgcggataaggaagcgatgcgtgcggtagtgagcaccgtcgagcagggtgccatcagcgatgtcatcccattgaaaaatgcaccgtatgaaattgcccgttttcctattgcaaagggcagcggcctcgatggtatcacgctctctgatatgcgtcgtctggtaaaaatttcttttgttgccgttgcttttgaagttcgggggaggagtgtaattccctcaggggagaccatgctcgcttctggtatgcgcctgtcagtactctgtgcgcctgaacatatgggacgtttttatgagctggcgggttttaaaatacatccggtaaaaaaaattgcactcattggcatgagcgcggtaggtacgctcgtggcacaggatgtagcagaaaaatgcaagccgcactttttcagtagtgccttcagtctttctccaagggagcgtgcgagtcttgtattggttgataagagtgaaacggcaacccaggcagtgtgtgctcaatttccgcacgttactgcctatcatggtgatgtcacagatgaggcttttttcgcagagattacgccggacacgtttgatctggtgattaccaccactaataactatgagctgaatatgattacagccgcatacatgaagacgctcggagtgcctcgggctgttgcattggtacacagctcccttatggaggatattgcggggaaaattggcatcgatgttgctgtttcttatcaagacgtagtggttgacgctattatgagccatttggccggttcccacgtcactggcatacatactatcggcgacggatcgctagaaatcgttgagttcgctatttccgcgcagtcccccctggtaggcaagcgcctgaaggatatcgctgtgcacggaagcttcttggtgctgctcatctcaacggtgcgtggctctttcattccttcaggagatacggttctgcttgagggaagtgtgctgatgttcatcgtacagtctgcgcagagtgaaaaaattgtcgcgttgcttggaggaacggtgtaa

SEQ ID NO: 40342 - DNA, 2883 bp, Treponema pallidum
gtgggctctgctgctcgtaatctgtgtataaagggtgcgcgtgagcataatctgaagaatattgatgttatgttgccgcgagatgcgcttgtggtgatctccggtctttctggttcaggcaagagttcgcttgcgtttgatactatttttgcagaaggacagcgtcggtatgtggagtccctttctgcatacgctcgccagtttttaggtcggttagataagccggatgttgactctatcgagggtctttctcctgcgattgccatcgagcaaaaaactacgcagcgtaaccctcgctcaacggttggtactgtcacagaaatttatgactactatcgtctgctgtttgcccgcataggacgcgcgcattgtccgcactgtgcgcgggagatcaaggaacaaaccgttgaccaaattgttgataccctcatgaccgtgccgtcgggaagcagaattcagttgcttgccccggtggtgcgaggaaaaaaaggtacacaccacaaggtcttggaagctgcacgcaaagatggttttgtacgagctcgtattgacggggctttgctccacttacacgagcgcatttcgttggataagcaaaaaaagcattctatcgatatagttgtcgatagaattcaattgtcagatacagtacgtaaacgattaacagaatcagtagagacgacgctaggctatgcagatgggctgttgaccgtcttagtgcagggagagaattctgggaccgtttccggaaagatagaaacatctgctctcctgccgtctgagttatttttttcgcaaaaaaacgcgtgcgcgcactgtaatgtctccgtacccgaattgcagcctcgcttgttctcttttaacgcaccttttggtgcctgtccgagctgtgcaggactggggattatgcagacatttgatttagatcgcattgtccctgatcaaaaccgttcttttaacgagggtgcttttttgccatttaaacctgagcatgagtggaaccgtgtgcggtttgctgcactcgcagaaaagtaccatttttctctcgatgatccggtacgcaatctgtcaaaacacgcactggatattatcctgcatggaagtggcagcgaggctcttgagttttcccatgaacgaaaagatggctctcgtaccgcacgctacattaagccgtggccgggaatttttagcgagctgcacaggagatacgcagagtcatgtactcactcacagcgcgaggtatatgaacggtatttatcggtgcgtacatgtgaagcgtgtcgagggatgcgcttaaagccagagtcgcttgcggtgactatagaaaaaaaaaacatccacgcactcagtgcgctgtctgtagatgattcgtgtgagttttttaaaactctccatctgacagaagtagaagcgacaattgcgcaacagatcctgaaagaaattaccgatcgcctagagtttcttcagaacgtgggtcttggatatctcaccttggaacgggctgctgccacgttatccggcggagaagcacaacgaattagactggcaacccagataggttcgcgccttacaggggttttgtacatactggacgaaccgtctattggtttgcatcagcgggataatgaacgactgatccaaacgcttcttcatttgcgtgatttgggaaacacagtgcttgtggtagagcacgatgagcaaacgctccgcgtagcagattatattgtagatctcggccccggtgcgggtgttcacggaggatatgttgtcgccgcaggcagtccacctgaagttatgcaggtgcaagcaagtcttactggtcagtatcttgccggtgcaattacattacccattcctgcagtacggagaacgggaaatggaaatgttcttacggtgcatgacgtccatgaacataacttgcaacacatttctgtacgtattcgactcggtacttttacctgcattaccggagtatccggctcgggtaaatcaacgcttttaattgatgtgctatatcctgcgttatacaaccgtgtgatgaacggcagacttcctgaaggaaaattttcctcgattgaggggacggagcatttagataaagtaatttatgtagaccaaagtcctatcgggagaactcctcgttcaaatcctgcaacttatgtgggtgtgtttacagatattagaatgctgttctcccaggttcctgaagcaaaaatgcggggatataaaccaggacgtttttctttcaatgttcctggaggacggtgtgagcattgtaaaggtgatggcgttatcactattgaaatgaattttttacctgatgtgtacattacctgtgatgtgtgtcacggcacccggtttaaccgggagacattagctgtgttttataagggcaagaacatttcccatgtgctggacatgacgatcgaagaagcgcgttcttttttttctgctgttcctcctatagtacgaaagctagaagctctctgctcggtggggcttgggtatgtgcgcttaggacagtctgctctgacgttgtcagggggagaagcccagcgcgttaaacttgcacttgagctttcaaagcgtgcgacaggaaaaactctctatatctttgacgaacctactaccggattgcattttgccgatatcatccaattaatggaggttgttcaacgcttggtagatcagggaaatacggttgtgatgatcgaacataacatggatgttattgttcaggcagactgtgttatcgatttaggtcctgaaggaggaatgcacggtggaactatcgttgcacagggaagccctgaagcagtatcccagataactgagtctcgcaccggttggtacatcaaagaggtgctgtgtaaaaagacatga

SEQ ID NO: 40343 - DNA, 1581 bp, Treponema pallidum
atgaaaagcaagagttctttgttgaaaagtgggttgctgctttctcttttaacacttgtctctcgtgtattgggtttagcgcgagaagtagtgaagtctacgcttatggggaccagtgcgacagcagatgcatttaccgttgcatttatgatcccaaaccttttccgccgactgtttgcagaaaacgccataagtgttgccttcattcccgtcttcacacagcactactcaatgccgagttcagcgcaagtgccatgttcttctaaaacgaaggagtttctttcagctatcttcacactgatgagtagtgtcactgcaagcatttctcttatcggtatactcggtgctccgtacatcgtgcgattatttgacactgatcagtcattaaccgtttcattaacccgcttgatgtttccctatttatggatgatctctctcgcagctttctttcaaggtatgctgcacagtattaaggtatttgtcccctcaggatgtaccccaatattttttaatgtcagtgtcattttttcgatgtactttctgaatgtgtcacatatgaacgtggctattgctgcagcaataggtgttcttataggaggatgtgcgcaagcactcttccagctaatatttgtatatatgcatgggtttcgttttacgctccagtctcctttaaaagcaatgcacgatgaaggtgtgcgacgaatcattgcgttacttctaccgacaactgttggcattgcaacctatcttctaaatgacctggtgtgtactgcgcttgcaacctctgttgagataggagttgctgcgagtgtgcaatattcacttcgtatacaagaacttttattaggaatatttatcgtttctctaagctctgtggtacttcctgatctttctttccatgttatgagaaaagattggcaatcgtttgaggacctcctgataacagcgataaaaatcgtcatgcttattacaattcctgcgacatttttcgtgttattttcaagtgaccgtatcataacgctcgtgtataaaaatgctatttttaacgaactatccgtgcgcatgaccgctaccatatttcgatggcatagcgtgggaatgcttgctattgcgctgaatcgcgttctcatctccgccttttacgcgcagcacaactcttttgcccctatgattgcaggaactatttcatttgtgacaaatatcattttagcaacactgctctttattcccttaggaggtaagggcattgcattttctctgagcgcggcgagtatggtacagaccgtttttttatggatgtttttaaaacgatcgtggcagataactatcccttcactgtataaaacttccctttactatggagtgaaaataactttattttctgtaatcgcgctggtacccacatgggcaagttctttttttacggcgtatttttttcctggctcccataaaataatttctcacggtgtccccttatgcgttgaggctcttattttttcgtgtactggctgcatactccttttactttcacgggacgaatttgcttacaaagcattacgctccatacgtttttgccggtaa

SEQ ID NO: 40344 - DNA, 1155 bp, Treponema pallidum
atgcgctttcgtgcacgcgtatctcagtcaactgcgaagtgcgtcgtgttcacaggaggcggcacgggaggacacattttcccgggaattgcagtttttcaagcgcttgcgcagcaggcggcggtgcgtgtcgtgtggattggtgcagcgcgtggtgctgatcgctccatagtggaatctgccggattagagttttgtggtatcaccgctggcaagtggcgtcggtacgcgagtgtgcgcaatttttttgatgtatttcgagtgctcgtcggtacggtgcaatcctattgtatcttgcgcgctttgcgcccgcaggcactattttctaagggagggtttgtgtccgtgccgccgtgcatcgcagcgtggcttttgcgcatacccgttgtcacgcatgaatcggatatcagtccaggacttgccacacgcatcaatgcgcgtttcgccgatcgtattttagtctcttatccgcacacgtcctgttattttccccgtgcgcgacgcgcagcagttcactgcacggggaatcctgtgcgacaagattttttttctgcacaggcagagcgtgcataccagtttttacgcattgaccaaaaaaagccattgctcacagtcctcggaggaagtagcggtgcgcgtgacctaaacgcgcgtgttctttcatgtagcaccttccttaccgaacgcttctatcttgtccatcaatttggcgcaggcaacgaggaccaaatgcatactatcaccaattcgcttagcgtcaatgctcggcatgcctacatgtcgtttcctttcattcaggcacatctgcccgatatactcgccgcgagcgcactggtactctctcgtgctggtgcgaacgcggtgtgggagtgcgcagtgctcggtaaaccaatgattctttttcctctcgaacgagggagttcccgtggggatcagattgaaaatgcagaatattttagcgcacacggtgctgcgtgcatccttcgtgctcaagatgaaaagggacatcaactggtgtctttgctcacagaactgttccatccttcctgcgctaggatagaggagatggcacgtgcgtcttacacacttggaattggcaatgccgcgtatgatattgcgcagcagttgcagactttcataaaggaggggatgtga

SEQ ID NO: 40345 - DNA, 2646 bp, Treponema pallidum
atggcgaagaacactgatattgagcacgacgcgcatgagccggccgggcacggggatgtgcgtgagtctgccgtggagaatccgtctgcttcggcagtgtctgacggggaggagcgcgccacgtttgcgccggaggttgctccgcaaaccgataccgaatcagcgcaaggtgcagcacaggagtcagagccagaggtacagcgcgcaggagaagctgaaaagggtgtaccagagaaggctaaggcagtagtgccgcttgatgagttgttgccgcagaaggtccacttaattccgctcaccggacggcctatctacccgggtatttttactccgcttctgataagcgatgaggacgatgtgcgttcggtggaaagtgcgtacagcgatagtggttttattgggttgtgtttggtgaaaaccgacacgcaaaacccaactatcagtgatttgtacgaggtaggatcggtcgctcgtattgtgaagaagattaatctgccagacggtgggttaaatgtttttatttctacacaaaaacgttttcgcatccgcaagcacgtgcaccacagcaagcctatcgtagcggcagtgcagtacctgtccgatcttattgagggggatccactcgagataaaggcacttgtgcgtggccttattggggaaatgaaggagctttctgagaacaatccacttttctcagaagaaatgcggctgaatatgatcaacattgatcaccccggcaaaatcgccgatttcatcgcgagtatcctgaatatttcaaaagaagagcagcaacgcacgctagagattctggatgtgcgcaagcgcatggaggaagtctttgtatatatcaaaaaagaaaaagacttattagaaatccagagaaaaattcaaaatgatttgaacagtcgggtggagaaaaaccaacgcgagtattttctgcgtgaagagctgcgttccatcaaggaagagctgggtcttaccaccgatccaaaggagcgtgatcagcggaagttccgtgcgctaatagattcgtttcactttgaaggggaagtgaaagaggctgtggagagcgaattggaaaagctctcccttacagacccgaattcccctgaatattcagtgggtcgaacgtacctcgagacggtgctctctttaccttggcacgctcctgagaaggaggaatatgacttaaagaaagctcagaaactgcttgatgaagaccattatggactcgagaatgtcaaagaacggatcgtggagtatttggcggtgcgaaagttacgcgccgataccaaaggctctatcatcctgctggtaggtccgccgggtgtgggaaaaacctcggtgggcaagtcgatagcgcgcgccatccacaagcccttcttccgtttctcggttggagggataagcgatgaggccgaaatcaaggggcacagacgtacttatatcggcgccctgccgggtaaggtgctacaggggctgaaaatagtaaaaactaaggctcccgtgtttatgatcgacgaggtggacaagattggttctggcgcgcgcggcgatcctgcgggggctctgctggaggtgcttgatccggagcagaacactacgttccgcgatcattacttagatttgccctttgatctctctcatatcgtgttcgtgctcactgccaatagcaccgatcctattccccgtccactgctggatcgcgctgagattatccgtctttccggttatatcgatacggaaaaggttgagatcgcaaagcgccatctggtgccaaaaacgctggagaagaatggtttaaagcgtgcgtgcgtctcttatcggaaggaggtgttgctacacctggtccattcttatgcgcgggagtctggggtacgggggctagaaaaaagccttgacaagctgcatcgcaagcttgccaccgagatcgtgttagggaagcgatcgtttgatgacaagtgtttgatggatgaagctctcatagggacctttttagggaagcccgtgttccgcgatgatatgctcaaagacgcgaacaaagttggtactgcggtgggtttagcctggactggcatggggggagacacgctccttgttgaggcaattactataccaggaaaagcaagttttaagctcactgggcagatgggagcggttatgaaggaatccgcttctattgccttgtcctggctgcgccgttacagcgcgcagcagcgtatcgcttcgccgaattggtttgaaaagcgcgcaatacatctgcatatccccgagggcgcaaccccaaaggacggtccgtccgcggggattaccatgaccaccacgctcttctcgttgctcacccagcagaaagtaaagcctcgcctagcgatgactggagaactctcactgaccggacaggtgctccccatcgggggattgaaggaaaagactatcgccgcacggcgcggtggtatcaaggagatcatcatgccaaaagcgaatgtgcgggatctggacgaaatccccgagcacgtcaagaagggcatggtgttccacctagttgaatcgatggaagaggtcctttctctcgccttccccaaggggaagcgtgtccgtgctggcactgccgcccaatctgcttctcctgaaacccttacaggctga

SEQ ID NO: 40346 - DNA, 1260 bp, Treponema pallidum
atgatgctgagaacttgtaaagatgtcacaatgcgaggtgagcgtgttgtcgtgcgtgttgattttaacgtaccgatgcgtgatggtatggtgcaagacgacacgcgcgtcactgcagcagttcctactctgcggtacatcatcgagcaggggccgcgacacgtagtgctcattagccatcttggagaccctacccgtgatgcggataaagcagaggggaacgctaagaaagatggttgtccctttgaccgccacgcattcattaacggcaaacaccggcttaagccggttgcggactgccttgcaaagaagttgggggtgccggtgcattttgcgccttcctgcgtcgggcagcgtgaatttattgaagggctgcccgacggttcggtagtgcttttggagaatgtgcgctttcaccccgaggaaacatctggtgatgcgaaggtgcaggagcaatttgcgcgggagcttgcccagtatggggacatttttgttaatgatgcgttcggcactgcgcaccgtgaacatgcatctacggtggtactcccgagacttatgcgtcgcagagtggccggtcttttgatagagcgggaagtgaggtacctggaacctatggtatgcaacccgaaggtgccaatggtggcggttgtcggtggtgccaaggtatcttctaagatagcagtcttggagagtctgcttcgaacatcgacggcgcttatcatcgggggagggatggcatacacctttttgaaagcgcaaggtgtgggtgtaggtacctccctagtggaggatgactttatcgacactgcacgtatgctgttgcaaaaggctcaaagcggtggtgtgtcggtggtattgccggtcgatcacgtatgtgcgtccacgttctgtgcggatgcgcagccggttgcggtggacgatgtgcatattcctatgcacttgatgggtatggatgttggtccgcgtacgcttgagcagtatcgtgcgcatttaaagggagtgagctccgtgttgtggaatggtccggtaggggtttttgagttcgatgcctttgcacacggtacacgggtgcttgcgcagttgatagcagaggcgacggatgcgggtgctacgtcggtagttggtggaggagactctattgcagcagtcagcaagtttgggcttgcaagtcgcatgagccatgtatctacggggggtggcgcatcgctgaagctctttgagggtaaagttttaccgggcatttcgtgtcttgaaacatag

SEQ ID NO: 40347 - DNA, 960 bp, Treponema pallidum
atggtaacggacggcgcttccccaagaagtggggtgtcgctcattatcggcagaccttcctcaggtaagtcaacctttctcaatgccgtgtgcgggtacaaggtgtccatagtttcccctatacctcagacaacccgtaacacggtgcgcggcatcgtaaatatagaatccgaccaaattgtctttatggacaccccggggtatcaccggtctgacagaaaatttaatctgcgcctgcagtcccttgtgcacagtaatgtaaaggatgctgatgtgctgttgtacctagtagacgctacccgtcaatttggagaagaagaagcagccatctgtgcattgcttgccccgtatcaaaaaacgcgcgtattgcttgccttcaataaagtggatgtccttcacaattcgacctcgtgcgacgagcatgcctttttacacaggcaaggcagcgtgctgcgggccggcagcctgggacgagcgctacacgccgcactcccccacctccctgctgatcgggtatttacaatatctgccctgcaccaggttgggctcgatgccctcatgcgcacgctgagagatctcttgccagaagcggcgcctctgtaccctcaggattgctatacggatcagaccatcgcctttcgcgtcactgagctcatccgagaacaggcaatcgcacgctgccgggacgaactgccgcacgcactatacgccggagtggaagacatggagctgcgccgcggcaagcgggaactgtggtgccgtgcgtttcttgcagtagaacgggaaagtcaaaaggcagtgctcgtggggaagaaaggtgcagttattcgcgccatacggctagatgccatccgcgcgctacgcacactcctcccctaccatatttcccttgatatacgagtgaaggtagaccgcagctggagacaacgcgaccacacactcagctcccttctgtactag

SEQ ID NO: 40348 - DNA, 1488 bp, Treponema pallidum
atgcgcgcacatgagtatgcgctcgacgatgacatcgtcgccattgccacggcgctcagtcctgccgcgttaggtattgtccgcacgagtgggagcagctccattgagcgtgttgcgtcctttttttctcgtgcgcaggctctgacgcgcgcacgtgcgcatacgtttctccacggatggattttggacggaaagacacgggtggatgaggtagtactgctggtgtaccgcgcaccgcacagttttacgggagaacatgcggtagaaattatttgtcatgggggcgtgcgtaccgtacaggctgtgtatcggctctgtcttgcgcaggggttccgtgccgcccagcgaggtgaatttagttttcgttcattctttcatggtaaaagggatttgacgcgtattgaggcgattcagtcactagttgatgcacgcacgtgtgcggcgcagcagcaagcggtgttgcacctttcaggtgcgctgcagcaggagatagcagcgcttacccgtgcgttactcgcgttttcagccacgcttcagggggaaattgagtatccggaagatgaagaaacgcgtgtgcacgatatcgatatgcgtgaacttgaaccgttggtagaacgtctgcgcaggctccgtgcctgctggcaggagcgtgcgctgcagcgaacgggagtgcgcatcgtgctcggcggttgtccaaatgcgggtaaatcatctcttttcaacgctcttttaggacaggatcgtgccatcgtttcgtccgttccgggtacaacgcgcgattggcttgaagcagaccttgatctatcgggcattccagtgcgtctgtgtgatacggcaggcttacgagtaactgacaatcctattgaggcacagggagtggtacgcagcgagcaactcttgcagggagcagattgcgttttttacattattaatggacgtgcaggtgtgcaggctgcagattgcgcttttctttcggactgtgcagtacccttggtagtggtagttacccacaacgatttgatgtctatgtctgagcgcatacaggtgtgtcaggcagtgcagccgtttatatcggcaccggtgttgtcgtgtgcgcgcagtcaggacgcgcgcggggcgggggagcagtgtttagcagggggaaagaacggggaggtgagggatcgtgcgccgcgcgcattcgtgtgtgtaagcgcaaagactcacgcggggttggacgcgctccgtgcacagacactccacctgctgcacggcggtcaggtgccgtacgaggagctttctcttggctcagaacgccagtacgtattggtagacgccgcagtgcaggcgttggagcatgcacaggaggcgtatgcacgtgggttcgggttggatgcagtggtgcacgatctggaagaggcgctctatcattgtggggcgcttactggagaagtgcacagcgaagatatcctagatgcgctgtttgagaagctctgtgtgggaaagtga

SEQ ID NO: 40349 - DNA, 1089 bp, Treponema pallidum
atggaagaatttatattctggaacttgtccgtcatacacgcggtgcagcaggctgcgcaccctgtgataacacacgcggttgttctttttaccttctttggagggaagggtatcgccctgtgttcgctctgggtgctgtggtgcgtagagtaccgaaagggtttagccattgcctacgcattggcatgtagcgaggggctcaattacgccctgaaggggctgttgcgtgtcccgcggccctttgtgcgtgacccgtcggtgaaacttgtgttccacgatggtttttctacaccctccgggcatgcacaggcgagtgctttgtttgtgttgctcgcgcgtagctatccgtctgcgaagactcctgttccctgcttttgtgcgccaggttgtggaaccgataggcaggtaggggatcgggagaacccgtcgtcttatggacaggagcgtaccccgctggcgcgcactgcatggacgggcgtggcgggcgtgctatttgtaggagtcattgggctttctcgtgtgtatttgggcgtgcactatcctattgatgtgcttcttggttggttaaacgcagtactttttggcgcgctgattctcggtatgcggcgcgcgctcaggcgtggggttgtgttctttacgcgcatacaggaggtctcaggacgcagttttgcggggttgcgcttttctgccgtggtgtgcatagcactcttgctagctgtcggtggggcggatgtgtcgatgtgtggtgcattctgcgggttaggagcagggcacctctttatctttgatcgttgggttacgcgcagggcacctgcaggcggcgtggggtttcatgctgctggggggtctttcacccagaaggtggtgcgcttttgcgtagggtgtgtgttctgtagtgtggtgtcttctgcgcttcatgcactgttctcgggtgcgcccgctgagtatgcacgcctgttgcgttttgtgcgttatggtataggagcttccctgagtacgggagtggtgccgctgctttttctccgtgtgggacttgcaggcggcttgccttttcacgcacctgcgcccacggccgtgagggaacggtag

SEQ ID NO: 40350 - DNA, 909 bp, Treponema pallidum
atgaagaaagtaggggtgcgcgttcgcgcgtgtatcctgtgcgcgcttgccgcgtgcgccacaggcgtccttgctaatcctttttttggcggcgctcccgcgcgcccgcggaggcagcgcaccccggagcttttgctgcgcagatacgcgctcgtccatcaacgcctcggtgccgccatagtacagtggagcaaaacccattcaacacgcgcgtggtggattactgtaatgctctcctttgcgtatggcgttctgcacgccttaggaccaggacacagaaaggcagcgcttttttctttctacctggggaggaacgcacctgtgtgggaacctgcgctcactgcagcgttacttgcggcgttgcatggcgcagcttccctgctcttgctttctgcatttagaggtgtttccggcgcaatcggtgcacacagtgcacgcacaatgtggtacatggaggtgggttcctacggattgctcaccttcttagcgcttttctctctcgtgcatgagctgatgcaccttttcccttcgggcgggcgctatttctcctgcggttgcagcgcgcacactgccgtgtgtatgcggacaggaacagtcgcccacatgcagtggggtactatgctcttgagcggtttatttatttgccctgctgcgttgtttgtgatgattctggtgctcagcttagatgcagttggacttggcgtcgcagcggtgctcagtatttcagcggggttagcactccccctgatggctgtcggttatttggcctgggcgagccgggcaggtattttttatcgcatgcagaagaacactcgtcatgcacaagcggtgctctctgtcgtgagcattacctcatacggaattatgctcatcgtctgtacttcagcgctcgtagcttcactcggttga

SEQ ID NO: 40351 - DNA, 1986 bp, Treponema pallidum
atgactgaagaagctatgcgcgcgatggcactttccatccgcagtttgacgatagacgccatcgaacgggcgaattctggtcaccctggtttgccgctgggcgcagcagagcttgctgcctgtttatatgggacgatcttaaagcataatccggcgaatcctagctggtttaatcgggatcgtttcgtcctgtctgcaggacacgggtctatgctcttgtatgctgcgctccacctttctgggtacgacgtttcgcttgaggatattaagaactttaggcaggtaggctcccggtgtcctggccatcctgaatacggttgtacccccggtgtggaagcaacaaccggtccattgggtcagggtatctctatggcggtgggttttgcgcttgcagaggcaatgcttgcggcacgttttaatactgatgagcatgccgttgtagatcaccacacctatgcgcttgtgggggaaggctgccttatggagggcgttgcctcagaggcttctagctttgccggcactatgcgtctgggcaagctcatcgttttttatgatgagaaccacatcagcatagacggatctaccgatctgacctttagcgaggatgtggctaagcgctacgaagcgtatggctggcaggtgctgcgcggttctatgtattcgtatacggatattatggatctcactgcgtgtgcaaagcgtgacgatcggccttctctcattatcctgcgttcgattattggaaagggtgcgcctaccgttgaagggagcgcgcgtgcccacggcgccccgcttggggaagcgggggtgagagaggcaaaaaaggcattgggacttgatcctgcgtgctctttttttgtagcgcctgagcttaccgctgttctccagaaacgaaagtgtgaatgtgcgcatgtcgaggactcgtggaatgagctctttgaagcatggagcacgcagtatcctgaaaaacgtgctgactgggacgctgcttttgttcccggaggggtaagtacttcgcagctagctcgtgttgtctgtccccattttgagaagggttcgtcacttgctactcggactgcttctggaaaggtgctcgacgcgctctgctctgtgctaccgaatctggtaggtggctctgcagatttacgcgggccgaatgcggtagcggtctcttcgttaagaccattttctgcagagcatcgtgcaggcggctactgttattttggtgtgcgcgagtttgccatggcagccattgtgaacggaatgcagttgcacggcggtttgcgtgcgtttggcgctacgtttatggttttttcagactactttcgccctgcgctccgtcttgcggcgctcatgcgcatcccttctgttttcgttttaacacatgactctatttttgtaggagaagatgggccgacgcaccaaccggtggagacgctcgctgcgctgcgtgcgattcccaacgtgcttgttctgcgccctgctgacgcagaagaaacgtttgaagcttggaaaatagcgttgctgcaccgcagtggtcctgtgtgtatcgttttgagtcggcagaacgtgccggtttttgagaaaagtgacagttcgtggcgctctacggtggaggagtcgggggcctatgtagtgcgcgaagggggtgctacgcctgagctgactgtcttggcaagtggctctgaggtggatttggcgttgcgtgccgcgcagctgagtaaaagacgtgtgcgtgtggtgtctgtactgtgcaaggagcgttttgaggcagcaggggacgaggtgcagcggcgcatacagggaggagcacgcgttgtagtggctgaggcaggggtgtatcaaggctggggagcgtgggcaaagcgggaaaaatgccttgtgctcgaccgtttcggayagtcaggccctggtacgcaggtggcacaggcgctggaatttaccgccgaagcgctggtggaaataatccttgattggttagcataa

SEQ ID NO: 40352 - DNA, 852 bp, Treponema pallidum
atgttgcgcacgagcgtgttggtatgtattgggtgtctctctgctgcaatccctgcgcgcttaggtgcccgtgcggtgccgcctctctctagtgcggtggtagatgaggcggcactcctttctgtgcaggaggcgcgtggtattcgcgcccttctagaggggcttgcgcgcccttctggagatggctcttccagatcgcatccttctcctgcgcctgaagctcatgcgcgtacgctccatgacggtacgccgttgcagatagcggttttgattgttgattcgctccagggggatagtcttgaggatttttcattgcgtgtggctcaggagtggggtatcggcagtcgtgcgcaggatacaggaattgtgttagtgattgcgcgcgcggagcgtaaagcacgcatcgaagtaggatacggtcttgaagaccgcgtcaccgacgtgcatgcacatcagcttatccgtgggacgctcgcgccgtgttttcaagctggcgcctatgcacagggtgtgtacgaaacggtgttgcgtttggctaccctggtgcggggtcaacacgaggtacagcagttcatgcagccgcgctctgtgcaacctgcggtaccgcgccggggtccagtgagaaatagtgccgggagcgtgtttttcttcctgctgcttttttactgtctggggggccggcttttgccagggggagtgttgtggccattgctgttcttcggcactcggcggcgttatgacccgttcgggtcagggtttagcggcgcattcggggagtgggcaggggatggaggagggttttctggcggtggtggtcgcttcggtggaggcggggcctctggttcttggtag

SEQ ID NO: 40353 - DNA, 1083 bp, Treponema pallidum
atgtctgcattgttttccttggttgcggtgtacgtgcttgtgtgcgcgctgcacaaacagattaaaaagtacgcgtctgtctgctacctcggcagtgcgtgtgtcagtgttgcggttgtctgtgtcgtgtggagcggcgcaaccaaggggaattttggcgtgcgtgtgcttctgcatccgctgacgagtgcgagtttttccaccgcgatctttacatttgtgatgtgcgcgagtgtgctgaagaacggtttgctcaagcagcgtgtcatggggttgcgtgcggaactggccatcaccgcggcgattctcactctcgggcataacatcgcgcatggaagggactacctggtgcgtctgtgcgggagtaccggggatttgtctacagggtttcttgtcgcgggtgctgtcagcatggtcctcgttcttttgatgagcattttggcggtaacgtctttcaaggtagtgcgcaggcgcatgggcgcaaagacatggaagcgtgtgcaacgccttgcatatctcttttacgggcttacgtatgtgcacctttcctttatcctcctaccgaccgctttgagggggtatatcccgagtgtcgtctcctacgtgttgtataccgtcatttttgccacgtacgcgttgctgcgtgtccgcaaggcgttgggaaagcggaagggtgcttgcgcgttgtgctccgcggcggttgctgtgtccttcgttgcgttcgtcttgggcgcgtctcacatggtcaggcacacgaggcgtgcgcacacggagaggactacgcgtgcaaaggcgcggaagtgttctcctgcagagatgaaggacggcgtctatgaggctagcgcgcagggtcacaacggaaagctaagtttgagggtgacaatctcgcagggtaggattgaagctgtcaccgtcgtggggcacagcgacgatgatccttatgcctcctgggcggtagagggtgtctcggcggcaattgtaggggctcagtctaccgatgtcgatgtggtgagtgaggcaacttccactagcgaggcaataattcgggccgtggagaaaattctccagcaaccgcaaccgtag

SEQ ID NO: 40354 - DNA, 1107 bp, Treponema pallidum
ttggtccacaaatcaccgccctcgaggcgcgcgtgcaggaagtatgggggagtctttgacgttgccgcatacgaggcgcgcatagcaacgcttgaggctgctgcagcagcgcctgacttttggagcgaacgcgcgcgtgccgaagcgctgttagcggaactgaaaacgctacgcgcaacgcttgagccgtggcgtgcgctgcgccgtgagagcgcagatctgcgcgcgttgtacgagcttgcccgcgaggcgcaagacgcatcgctggagccagaactttcctcccttttttcagacatttctgctcgtttcgaagaggcatcgcttacccgtctcctgcacgaagaggtagaccgcctcgacgcgtttgttaccatccactccggcgcaggaggagtggaggcctgcgactgggcacagatgctcatgcgcatgtacacgcgctgggcagagcggcgcagcttttgcgtacacatagttgacttacttgagtcagaagggggagtaaaatcggtgacgttaaaaatttgcgggtcacacgcctttggttttctcaagggagaaacgggggtacaccggctcgtgcgcatcagtccgtttgactctgccgcgcgcagacatacctcttttacctccacctacgtcttccccgtattagacgatcacgttgaggtgcacatacggagcgaagacatgcgggtagatacctaccgctcagggggagcaggcggtcaacatgtcaataaaacggactctgccgtgcgcatcacgcatctgcctacagggatagtagtcacctgccagaacgagcgcagccaaatcagcaaccgtgcaacggcgctgagcttgttacgcgcccgcctgtacgcctatgaacggcaaaaaaaacagcaggaacatcaacggtttgcttctgaaaagaaggatatttcgtggggaaatcagattcgctcgtacgtctttcatccctacaccatggttaaagatcaccgcagcaagtgcgaaacggggaatattcacgcagtcatggacggagcgttagaaccgttcatccgttcctacttggagtttctgtgtaccagtacccagtgtgtagaaccacagtga

SEQ ID NO: 40355 - DNA, 888 bp, Treponema pallidum
gtgaaggtgggtttaggaaacctagcacagaaaatacgacgcctgctcggtggacaggcgcctctggacgaaacgttttttagcgcgcttgaagagctgctcatcgaaggcgacctgagtctttcgacggcagagagcttttgcacacagcttcgaaacgccgcgcgcacacgttctgtacatacggaagacgcactgcgcacgctctttgcggaaattatggaatcgtgcgtacgcgttacccatcttgcaccaaatccgaaccagtgctcactgtatctcctacttggggttaacgggagcgggaagaccacttctgctgcaaagcttgcagcgtactatcagacccagaaggtgcatccgatactgtttgccgccgcagatacgttccgcgcagcagcggcagaacaactcgcacaccacggtgcacagctaggcgtgcgcgtcattgcgcacccggggggaaaagatcctgctgcagtggtatttgacgcaggagaagccttgcgcgcgcaaaagcgcggtcttttactcgttgacaccgcagggcgactgcacaataagacgcacctcatagcggagctgcaaaagatcgaccgtattgcgcagacaaaggtgagcgcagatgcataccgcaagatattggtattagatgccaccaccggtcaaaatgcatttcgtcaagcgcaaacgtttcacgaagctattggcgtggatgcactgctccttgcaaaatgcgacacacgcgcacgagggggagcagttttttccatcatgcaagagttaggtattccattagcctttttagggtggggggagcgctatacagacttggttgaagcgaacgcgcgcgagtttgtttcctcgttcctgcacggagaacgatga

SEQ ID NO: 40356 - DNA, 2637 bp, Treponema pallidum
atggggtatccgtttcgcgctctagagaaaaaatggcaggcctattggcgcgacaagcgcgtcttttgtgtgtccgaggatgagcgcttccctcctgagcggcgtgcgtacgtgttggacatgtttccctatccttcagcgcagggacttcacgtcggacatccagaaggctacactgcaactgatatttactgccgctacttgcgcatgggtggttacaacgtgctccaccctatgggttttgatgccttcggacttccggcagaaaactttgcactcaaaactggtactcatccgcgcgtctccacctccgccaactgcgacacctttcgcagacagatccagtcgtttggtttttcctacgattgggaacgtgaaatatctaccgcagatccagaatactatcgctggactcagtggctgttcctcaaactttatgaaaaaggattagcctatgaagcaaccgcgcccatcaattggtgtcccagctgcaaaacaggccttgcaaacgaagaagtaagagacgcgtgctgcgagcgctgtggtgctgaggtgacgcggcgtggtgtccgccagtggatggtgcgtattacagcgtatgccgagcgtctcctttcagatttagatgaacttgactggcctgagtcagttaaacaaatgcagcgtaattggattggaaaaagctgcggcgcggaaattgactttcccgtagatgcgcctgcgtgttcagtgcacgataagctaccacagacaattcgcgtgtacaccacgcgtgcggacacgctttttggagtaacgtacctggtacttgctcccgagcatgaagcggtaacggcgctcactacacacgcacaacgcgcagcggtacaggcgtacgtgcaacgtgcagcaaaaaagaacgatctcgaacgcactgatttagcgaaggaaaagaccggtgttttcaccggcgcgtacgtgcgcaatccaatcaatgatatgcgcataccggtgtgggtaggtgattatgtgctcgtttcctacggcacgggggcagtgatggcagttcctgcacatgatcagcgcgactgggattttgccactcggtttggcttacccaagttaaccgtggtgtctgcagactacactgcaacagttcctaatagcaactcccctcaaggcgcggtactccaaagatgcgtctcagacgagggttttgtcgtcaactctggagctttcaatggtcttgctagtgccgacgcgcgagaacgtattgttgcccatcttgaaatgcgtggcgcaggtgcacggcgcgtcacctatcgcctacgcgactgggtgttcagccgtcagcgctattggggagaacccatccctcttgtgcactgtccttcctgcggtgttgtacctctccctgagagtgcgctgccgcttttgttacccgaaaccgccgatttcactcccacggaagatgggcagggcccccttgcacgagcgcgcacgtggctgcgcgttccctgtccgcagtgtgcatctgacgcagtgcgagaaacaaacacaatgccccagtgggcaggatcctgctggtattacctccgttatatggacccccgcaataagactgccttttgtgcacccgagaaggagcgttactgggcgccagtggcgttatatgtaggtggtgcagagcacgccgtactgcatttactgtatgcacgcttttggcacaaggtattgtacgacttaggtcttgtaagcacgaaagagccctttgcgcggttggtgaaccaaggcatgattacgtcgtatgcatatcgcaggaaaaatggcgcgcttgtacctcacgacgaggtgcacactaatgctcaaggtacctacgtgcatgctcgtacgggggaaaaactcgagtgcgttgtggcaaaaatgtcaaaagcgttaaagaatgtcgtcaatcctgatgacatgattgcagcgtacggtgctgacgcgtgccgggtatacgagatgttcatgggacctcttgaggcttccaaaccgtggaatacgcaggggttagtgggggtttttcggtttttagaaaaaatttgggtacttgcggggcgcgtggcggccgcaaacggtattccacaagactctcgtgcagagccgccaggtgacctgcacgcacagaaaaagtcttgcagcatgtacgccctcgaaacgctgttacaccggactattcaaaaagtgaccgacgatacgtcggcgcttagttttaacacggcaatcagtcagatgatgatatttgtaaatgaggctacgcgggtggcgcggaggatgcctcttccctctaaaatgtgggagatgtttgtaaaaatcctctctccctatgcaccacatttggcagaagaactctgggaaatgtgtgggcacacgcacactatcgcatatgagccttggccacaggtggaccctgcgcgtgtggcgccgcatgtgtgctccgtagtggtgcaggtgaacggtaaagtgcgcgacaccttctccgtagcgccgaacgctccaaatgaggaactcgagcaaaaggcgcgggaaaccgccggtgcgcgtaagtttcttggtacgcagcagccaaagcgcgtagtgatagttcccaataaattagtaaatttcgttctgtag

SEQ ID NO: 40357 - DNA, 267 bp, Treponema pallidum
atggtcgtaaaaacggtgcgcgtgcttaatcgtgcgggcgtacatgcgcgtcctgcggcgcttattgtgcaagcggcaagtcgctttgattcgaagataatgcttgtgcgggatacgatcagagtgaatgcaaagtctattatgggtgttatggctatggctgcagggtgtggaagtgagctcgagttggttgtagaaggtccagacgaagttgctgcattgtccgccattgagcggctatttcagaataaattcgaggaagagtaa

SEQ ID NO: 40358 - DNA, 960 bp, Treponema pallidum
gtgctcaagctcgatctgaaagagcgcgattcgcttgatctgcgttgtatcgcaggtcaccatggactggcaaatcccatcactatctcggatctgaaccgaccaggtcttgtcctgtcaggcttttttgacttcgttgcctaccggcggatccagctttttggccgcggagaacatgcgtatctgctcgcccttttagagcagggacgatacggtgctatcgaaaagatgttcacctttgacttgccttgttgtatcttttcccatggaattaccccgccggagaagtttttgcatcttgctgagccttcttcttgccctatcttggtcactcgtcttacgtcgagcgagctttctttacgtctcatgcgtgttctctccaatatcttcgcaccgacgatagcgcttcatggagtattggtggaggtgtatggcgtcgggattcttatttcaggagattcaggagtaggaaaaagtgagactgctctggagttaattgagcgcggtcatcgacttgttgcagatgacttagtagaaatttcttgcgtcaatggaaatagcctcattgggcggggggtgcacaaaagtatcggtcaccatatggaaattcgcggtttaggaatcatcaatattacacagctgtacggggtcggttctatcagggagcggaaagaaatacaaatggtggttcaacttgaagagtggaattcttcaaaggcctatgatcgtctcggtacgcaggagctgaacactactattttggacgtcagtgttccccttatagaaataccggtaaggcccggaaggaacatccccatcatcctggagacagctgctatgaacgagcgtttaaagcgtatgggctatttttctgcaaaggaattcaatcagagcgtactcaaattgatggagcagaatgcagcacatgcaccgtattatcggccagatgatacgtactag

SEQ ID NO: 40359 - DNA, 609 bp, Treponema pallidum
atggtacctgcttttttgcaggtcgtatttccccttgttggttgtgcgcattatattttgtgggggcgggctatgagaaaggttatcgtatatggtgtcgtactgtgtctgtgtgtgccgtgtttcacagcaagctcggacaaggcagcgcaggtgccgtctgtgcagaaggaaatggccgatccggtggaaggtatctggaagagcgttgatgacaatacagggaaacccactggggtgtggcggttgtatgttcaggatggtaagctctttggcaagatcctcgtgtgcatggggagggctccgaatgcggcggtggtttcgtgtacaagaacgtatcctgatttctccaagaagggaaacgtcgccaatatgcccttggttggtacgcccttcatctataacctcgagcgtacttctccaggctcctggggtggtggatacgtaatagatcctgcaagcggtaagtactattactgcaaaattaatttcatccctgcggatgggaggagctacaaggttgatacgctgcagatgcgcggggaaatcagctgggggattgggcagaagccagtactggctcaggtcttcccagacggaagtcgatga

SEQ ID NO: 40360 - DNA, 636 bp, Treponema pallidum
atgaggtttgtttttcttggtcctcctggtgccggtaagggtacgcttgcaggtgaaatttctgggcgttgtggcgttgtgcacatctccacagggggtattcttcgggcagcaattcagaaacagacggcattaggtaaaaaagttcaaaaagtagttgaagtgggcggcttggtagatgaccagaccgttacggagctagtgcgggagcgtgtcagtcacgaagatgtggttagcggttttattctagatgggtttcctcgcactgtcacgcaggctaggtgcttagaggacattgtgccgatagactacgcggtgagtattgtagtaccggacgatgtccttgttgcgcgtcttactggccgcagggtgtgttcggcctgtgggagcagttatcatgtgctctttgcgcagcctaagagagagggtgtgtgcgatcggtgtagaggagtactggtcgtgcgggaggatgacaagatgtcggcaattcttcagaggcttaccgcctatcgagcgcaggcggagcccattgtccacttttacagtgagcgggggaaattagtttctcttaatggtgctccgccgatatcggatgtagtgttggagtttcaagagcgttttgcacaatcacggtga

SEQ ID NO: 40361 - DNA, 864 bp, Treponema pallidum
atgagcgcggaaataaagaggctgttaatcttttttttcggcgttccaactattcttatgttggtatatgcggcaccgcatgcacacttcctagcgttccatttggttatcttcggatcagttatgggtgcggtatgggaaatgcatgcgatggtgtcgcgcaggatgtgcacgtacccactggttttgttgatccctttcagtcttgtgcttccgcttttaggatatgcagcgctgtggcagcctgcacggggcgctgaatctgtcctttttattggagcactgggcacgctgctcatgagtgtttttttcaccgaattggtgtattcgttttctgcttcttttgaaaacgcccttgagcgtatggcctcggcactgttgcttgttttgtatccaggtatctttagcctttttttttcgctcattacgcggtggcgtcatgcagagatcgcattggtaattttttttctcatggtttttacgtgcgactcttgtgcatggttctgtgggacgctctggggagtcaacaacagagggataattcctgcaagtcctaaaaagagtattgcaggttttattggaggttttgccggttcggtaggtgcagggtgttttggctcacttgtatttggttcgcgtgtgacgctctctttggggatgctcatgggtgttggagccttggtaggactgactgccattgtaggcgatctagtcgagtcggtgatgaaacgttcggctcaggtaaaggattcaggattttttacccccgggcggggcggaattatggataacctggattcgcttgcgccgtcactggggactttttacattgcatgtgagtgttttgggatcgctgcagtatga

SEQ ID NO: 40362 - DNA, 687 bp, Treponema pallidum
gtgcagcacgtggccatcatcatggatggaaacgggagatgggcggaaaggagagggttgcggcgcagtgcagggcaccggcgggggctgcagacagcgcgagagattgtcgcggcgctgtgcgcgattcgggtgccttttgttactctgtatgtgttttctactgaaaactggaagcgctctgcgcatgaagtgcatttcttgatgaatttaatcaggtggtatttgaaaaaggagatgtcattctatgtggagcatgccattcgcgtagtgcacctgggttgtgcgcagacacttccgcctgatgtgcgcagccagatagagtatgttgtggaacgcactcggtctcatcggggaactactgttgcgcttgctataaattatgggggaaaagatgaaattttacgtgcggtaaaaaaggttttgtgcagcacttcgtgcccggatggtgagcttctcaccgaagaagctttcggcgcgtgccttgatgcgccgcagttgccgagtgtcgactttctcatcagaacagggggtcagcaacgcatgagtaattttttgctttggcaaagcgcgtacgcggagttctattttaccgatatcctgtggcctgactttcgggtagaagacatgctgcgcgccctggatgagtatcgcctgcgcacgcgtacctttgggggtttggaatga

SEQ ID NO: 40363 - DNA, 552 bp, Treponema pallidum
atgggtatcgctgagtgctatgagcagaagatgaagaagtccctctcagcgctgcaggagggttttaacacgctgcgtactgaacgtgcgactgcacatttgcttgatcagattactgtcgactactatcagcaaccaaccgcgcttagtcaggtggctaccgtttcggtacccgaggcgcgtttgatcattatccagccttgggataaaacgctccttgcggatatcgagcgtgcaattttaaagtcaaaattgtcgctcaatccctccaacgacggcaaggttattcgtctagtgattcctccacttacccaggagcgaaggaaggagcttgtcaggcaggcgcgcgcgttagccgagcaggcgcgcgttgctattcgcaatattcgccgtgagggaatcgaggaagcaaagcgcgggcataaggagggactgctaagcgaggatgcactgaaagcagcagaagaggccttccaaaaagcgactgacgcttctgtcgcagacgttgcacggtacttggccgagaaggaaaaggatatcctggaaggttga

SEQ ID NO: 40364 - DNA, 873 bp, Treponema pallidum
atggagattgctgctcgcgacgttaagtctttgcgtgataaaaccggggccgggatgatggagtgtaagcgtgcgctccaggagtgtgcaggggacgctctgtgtgcagaaaagtatcttaaggagagggggcttgctgccatcgaaaacaggcgtgggcgtgccactgctgagggagtcatcgttattaaagcacggcatgcagagggcgcggcctgtggggcgagcgctgtagcaatggttgagcttgtttgcgaaacagattttgtggcaaagaacgcagagttcatcgcccttgctgagcgtatagctcaggcggtgctcgagcacgcgtacactgaggtaaaccaggtsctgcgcgatatggtggtggacctcgcaacgcgcgtacgggaaaatatgagcttgacgcgccttgcgctcttacgtgccggcagtgccggtgcaggtcagtacctttctcactacgtgcaccctgataaaaaaacaggggtagtgctctccttttcctccgatgcgccggatgtgttcctgcgatccgatgtgcgggccttcgcgtatgactgctgtttgcacgcggcggcatatacccctcgctacgtgcgcgcagaggacgtgcctgctgagtatgtgcgggagcagcgtgaggtgttccaagcgcatgttgcgtctctccagaagcctgcgcatgtcaaggaaagtatcgtgcagggtaaactagagaagcatttggctgagatctgttttctgaagcagccctttgttaaggacgacaagctttctgttgaaaaaaagatggcagaagtgggtgcccgcgcagggggtgcgcttcggtttactcaggcactgatataccagctaggggtacagtga

SEQ ID NO: 40365 - DNA, 876 bp, Treponema pallidum
atggcagtggtgactatcaaaaatctgcttgaatctggggttcattttggccatcaggtcaggcggtgggatccgcggatgaaaaagtatattttcgcggagcgtaacggcattcacatcattgatctgcaaaagacgattacggccatccgcgaggcgtacgacatggtgcgcaggactgtttcctcaggcaagtccgttttgtttgtgggcacaaagaagcagtcgcagcaaaccattgccaaggaagcgcagcgctgtgggatgttttatgtgactaaccgttggctcggcggcatgctcactaacttttccaccataaggaagagtctttcgcgtctcaagaagatagaacgcatggagatagacggtacgttcgagcatctctctaagaaggaggtggcgtctttacgcaaggagcacgcgaagctagaaaagaatttgggcggcataaaggaaatgaaggagctgccgggtgtagtgtttatcattgatacgcgtaaggagactatcgctatccgtgaggcgaggcgagttggtatcccgattgttgcggtggtggacaccaactgtaatcctgaaggtatcgattacccaatccccgggaatgacgatgcgatccgtgccatttccctttttacccaactcattgccaatgcggttatggaagcgggtaacgagcatggtttgaaaatcattgagaacttgcaggatgaggagagtggcgatgagcttgacgagtccgtttccttgcacgaggaagggcgcgaaattactgactatgaaaattatactcctcctgaggagcgtgagtattctgtgaacgatgaaggcgatgtgtttgatgaggatgagtcgctctacgaggggcgttag

SEQ ID NO: 40366 - DNA, 1572 bp, Treponema pallidum
gtgcgtgctatgcaccctttgctcaaggagattctgactcatcccccctcaggccagcacgaatgcgttcacggttgggtgcgctccaaacgggagacaaaacgcgctgtctttatcagtctgagcgacggttcttgccctgatacccttcaggttaccgttcccctgcccgagtgttccgcctccctttcctctggggcgcaagctgagcaaatccctaatgtccgcgacgctgtcctccagggggaaacgctcgctcaaacgctcaaacgcgttactaccggcgcctgcattcgcgccgagggtgcactcgtcccctccccaggcgccgggcaagcgcttgagttgcgcgcttgcaacctgactgttcttggcgaggcgcctgctgaaacctatcctttgcagaagaaatcgcatagttttgagtttttgcgtgcgcacgcccatctgcgcgcgcgcactagtacctttgccgcgtgtgcacgggtgcgcagtgcacttgcaggcgctgtccaccgctttttctccgagcgacactttcagtacgtgcacacaccgatcattaccgcttcggactgcgagggtgcaggcgagctctttcgcgtcactacttttgatcccgtgcgtattgcgcgcgaagcacacgcagcgggcgcggcaggcaacccctacgcactcacgtacgcggacgacttttttggtaaggcagcgcgcctaaccgtttcgggccaactgcagggggaagcatatgcgcttgccctcacgcgcatctacaccttcggccctacttttcgcgcagagaactcaaatactagccgccatctttctgagttctggatggtggagccggaaatcgcctttgcacgcatcactgactgcatggacgtggcagaggagtttttggcgtacctgctacgcgcagcactcaaggactgcgcgcaggatatagccttccttgacgagcgcgcagcgcagcatgcgcgaagcgcgcggggcgacacaccccttgccgcgcgcagcacagcgcgcacaccgccagtgcggacgccagggcagctgacgcgcatgctcgaagacgtcgcccgcgcgcctgccacgcgcctgacatacacagaggcaattaaactactggagaacagtgggcgctcctttgagttccccgtacgctggggatgcgatttacaaagcgagcacgagtgttttttaacagaagaggtgttccacggcccggtgattgtctatgactacccaaaggaaatcaaggccttctacatgaagctcaatgccgacggcacaacggtgcgttccatggacctgctagttccgggattaggggagattatgggaggctcggagcgcgaggaacagtttgaagtactctgtgctcgcatccgtgccagcggttttgaccctcacgactatcgctggtacaccgatctccgtcgctttggtaccgcgccccatgcaggttttggactcggcttcgagcgcttgctgcagtacgtcaccgggcttgggaatattcgggatgttattccgtttcctcgtacgccgcgcactgcggacttttag

SEQ ID NO: 40367 - DNA, 780 bp, Treponema pallidum
atgcccacactcctcgatatccgcgacctgtgtatgtccattgcggataggcccatcctcaaaagtctcaacctaaccctgaataccggcgaggtgcacgccgtcatgggaccgaacggtgcaggcaagtccactcttgcaggcaccatcgtgggaaatccccactgcactatcgaacgtggggaaatttattttcaagggcagtgtatcaacgacgtgcctgtgtacgagcgcgctcggcggggtatttttctctcgttccaaactcctgaggaagtccccggtctttcggtcgaggagtttctccgcgcggcaaaagaggcggttcttggtactaaagtttccgtgctcgactttcacacgcagttgcgtgcgaagcttgctcgcttgcgcatcagtgaggcgtacgcctcgcgcggcctgaatgtaggattctctgggggagagaaaaaaaagaacgaaatacttcagctcgctgttcttgagcccaaactggccatacttgacgagacggattcaggacttgatgttgacgctacgcgcattgtcttcgagggcattgacgatatccgtacgcccgatatgggattcctgatcatcacccatcaccgagaagttctcgagtacattaagcctgacgtggtgcacatcctcgtcgacggtaccatcgtgaagaccggtgacgtgagtttggtgcactacgtggttgaacacggttacgctgactttgccacgccccgtgcaggcgaacaaggaggcacgcccgtttctccggaatag

SEQ ID NO: 40368 - DNA, 444 bp, Treponema pallidum
atgaacgcagaagcgatataccgacaggtgctgctcgagtacgcacgcaagcaggaacaccgcagggtgttagaagggccggtaggcatcgagcggggtcataatcccagttgtggcgatgacctcacgctcttgataaagagagaaggtgatcgcatcgctgatgtagcctttttaggtaccggttgtgcggtgtccaccgcttctacaaatatactcatcgaactgatcaagggtgcgtcagtggcgcaggcgcaaaaaacggttgcgctgttctttcacatgatggcacagcagtgcctcacagaccaggagcgggcacacctacaggacgcgtgcatcctcgcctgttttgcatccatgcctgcgcgcattaagtgcgcaaccctcagctggcacaatgcagatattcttttgcaccacaaaaaggatacagacgcgtga

SEQ ID NO: 40369 - DNA, 1176 bp, Treponema pallidum
atgaagatcctgcacacagcggacctacatctaggcaaaacactccatgaagtatcgctttttgcgtcacagaaaaaaatgctcggcgatctgtgcaccctccttgcgcaggacaactacgccgcgctcatcatcgcaggcgacatctatgaccgctgtgtaccctctgcagagagtgtcagtctttttagttcttttttgcaaaatatcaaacggtccatgccacggctcccgatatatctcatccccggcaaccatgattctgcgcaacgtctctcctttgcccaggagctacttaagcagcagggagtattcattgcgcaggatcctgaagagagcacccgtccccatctcctctgtcacgagggggaaacagtgcagttatttttacttccctttctccacgcaggtgccttttcctatcttgatgaggaaaacaccacttgtctcattcacacccaatccgaactccttcaagaagcctcgcgtcgcttgcagcgtgcagtatcgttggacaccccttctatccttgtcgcacacctatttacccaaaaaggtattagctgcgaaagtgaacgcccgtttgttggcaatgccgtttacgctgacccacactggtttgactttttcacctatgttgcacttggtcatttacacaaatgtcaaaaaatcaccgaacgcatgtactattccggatctcctttgccctattcgtttgacgaagcaaatacccaaaaggttgcgctttctgtagagattcactgcaacacaaagggattccccatccatgtgactccccttccacttgagccacttatccctcttcgcaccatacgcgactcattccacgcactatataccggtgatcgctatctcctttatcaacgtgattttttagaaatcaccctgaccgacccggcgctcgtgcacaatcctattggccttttgaagccgcgctatccaggattgctcagtatcaagcaggaaaatgcgttcgcctttgatataccccccccctactcctctaacgaggggatagcgccctgcacacaccactcattgcgcacacactttgatgtatttatgcacgaagtaagccccactcctgatgacagagaaaagggcgctctctttcaggaactttttgacgaaatgcaacaggaattctcatcgtga

SEQ ID NO: 40370 - DNA, 3144 bp, Treponema pallidum
gtgaagccgatgcgtcttacgctccacaacatcggtcctttcgttggcacccatacagttgacttcaccgcgctcggtcctatttttctagtgtgtgggaaaacaggttcaggaaaaaccactctattcgatgcgatcgcctatgccctgtatgggaaaccccttggaacccgtgcagaagttatccgcagtctgcgcagtcattacgccgcaccatcagaagctgcatttgctacgctggaattttcactcggcactaaaatctaccgggtacaccggacgctgacttgcacactttcccacagaaaaacagagcaacccgagcagctgtatcttgagcaaaaaaaaggtcatggatgggagcgtattgcttgtgcgcataaaagtgaaactgaatgtgttattcacgatcttctcaaactcaatagcaaagaatttgagcgcgtggttatgctcccacagggagaatgtgcgcaatttttaaaagcaaattcaaaagaaaaaaaagaaacgctgatgaatctatttcctgttgatcaatatactgctcttatggagcgagcaaaaaaaaaatcgctccatgccaaagcagtgcttgaaacgctgcgttcgcaacttgaaactctatgtgcggagtgcatgcccgacacataccacgaaaggaaacaaacgctagaagctgagttacagcacgcacgtgacgcactgcagcaaacccgcatctcccatgcgtactatacacaaaaacgtgaagcgctcgaagcacagctaaaaaaacaacaactttgtaaagagctgcgtgcgcgtatagaaacataccgcgcgcaagaaccagtccacgcggaaactcaaaagcgtattgatcgcgcgcgaaaagcggcaccacttgctgcgcacataaaacacgtcacccagtgcgaacaagatgcacagcgcattcatgcagaaatacaggaaaagatgcgttcacgcgaacaattgctcatgaaacgagctgcgcatgtcgcgcagcagtcatccattgaagaacaacgccgtctactacaaacacttcatagtgcgtgcattcacattgaagacgcgcatgacgttgccacgtcgatacgcgacatatcttgtcaggcgcacacactcacgcagcatatccacacgcttgcacaacaaaaaacaacacttacccagcaagaacaatcgttgtgtaaagaactggatatactgcaaagagaagcgggtactatcgatactcgtacatctgcctttaatgatttacaaattcaactcgcgcatgcaaagaagacacaagaattgtctcagcgatatgccgagctctgtgcggctcacgcaacatgcactgcacaatgtgaaaaacttgagaaaatacacgcacaaaaaagcgcgtatagcacacgggcacgtgagcagctccttcagacaaaagaacaaattcatctccaagaaacccggacacacgcggtagtactcgcgcgtctcttagagcatcaagaaccgtgtcctgtctgcggctcttgcattcatccgaatcccgcacgtcaagacatagataatcttgaaccgttaacccggcgcatgcaacgcatagaacaaacatacgcgcagctggaaaccagcgagaaagatgtgtaccacatcctcacctctgagcgtgagcgacgtgcatcctacagtgcacaaatgcaggaaatacagcattcattttccattcttacatcgtgtgatacgcgatcatcctgcgatattccaaacgtgcaaaaaattaccgtacgtgttttggatctcacggaaaaattatctcgtgcaaaagatatgctcgcatgcgcgcaacacgctttactgagaaaaaaacagcctgagcaggatttacaggatgtacgcgcacacctgcagcaatgctcacaagagctcgcaaaaaaagaaacagcactccacgcattgcaagaaacgcttacacagcagcgcgtacgcattcacgcactgtccatacgtttacccaaggaattgcttgcatcgaacctacttgctccgcaaaagatgcagcatgagaaggagagtgtcgcctattggaaagagatgctcgcacactgtcaaacccttatgcgagaattgcacacccatattgaagaatacgaccgagagttcaatgagatagaaaacgcttctagtgcgcttggcgccgacattgcagcgcgagaagatgcactgaaccatgttcaaaaagaatacatgcaccttgcacgtaccgtgtgttgcgcacgaacagaagcgcatttcaataacaacgaagaagtaaccgccgctcttatgactgatgctgaactttctcatgctgcagcagaaattcaatttttcaatgaattgcgtgcggctgacacccatctactgaaaacactcgaggcagaaataggaacagaaattccatccgatcttgatgaactgaatgcgcaatgtcatacgttggtaaaagatgaggaaaactttctctctcgtattgaaatactgtctgccacgctacacacactcacacatcagtatcttaaatacgaagagtgttcaaaacagcttgcacaaaagacgcaagaaagcgcaaagcttataactctttcagatgaactgaatgggataaaccaaaaaaaaatacaatttgacgcatgggcactcatttcttttctgcacgaaattactgcctacgcaaacatacgtttgcaaaaaatgagtgaaggacgttaccatctgagggtagctgactcgcacgtcaatgcacgaggatatcaaggacttgcgctgctcgttgcagatgcgtacactgggagcgtgcgcccttcggcaacactttcaggaggcgaaacctttatggcctctatcagtcttgcacttggtcttgcagattctatccaaacccgatcgggaggtattgtgcttgactcgctgttcatagatgaaggatttggaagtttggatgaggcaagtttagataaggcaattggcatcttagatgaaatcagagagggaagtcgcatgataggcatcatttctcatgttcatgaattgcgcacgcgcatccctcacaaaattctgataaaaaaaacaaacgcaggatcacacgtaatgcagggggatgcagaatga

SEQ ID NO: 40371 - DNA, 1482 bp, Treponema pallidum
atgaaaacgagcgcgctctttcttgatttttacgaattgactatggcgcagggatacttttttcacaagccgcacgagtgtgcggtgtttgaagtattctttcgtaaacaccccttcgcgggagggtactccatttttgcaggactcgatccgctcctgacggcaatagagcagttccgcttcagtggagaagatatcgattatttgcgcaccttgcacttatttcatgatgactttttgtcttaccttgcttccttccgcttttcaggagatatacacgcgctagaagaaggttcagtaatatttcctcacgaaccgatcatccgcgtgcacgcgcgcttggttgaagcacttctgcttgaaggattgatactcaacaccattaatttccaaagcctcatcgcaacaaagactgcacggatgtggcgcgcgtcaggtgaaggtgttcttatggagtttggcctcagaagagcacagggctatgacggcgcgttgagcgccacacgcgctgctgcaataggtggcgcaacagggacaagcaatacacttgctgcaaagctctacggtattcggccaatgggaactatggcgcacgcgtgggtgatgtcttttgacagtgaagaagaggccttcgaacgctatgctgcactctatggaagcgcgtccgtattcctcatcgatacgtaccataccctggaatcagggatacagaatgcaattgcaataggcacacgtttgaaggcggcaggaaaatcttttggggtacgcctggactcaggagacatgcagtatcttagcgtgcaggtgcgtgcagcactagacgcagcgggattgcccgaagcacgcattgcagtttcaaatgagctggatgagacgatcatcgaatctttagttttaagcggtgctcccatcgatgcttggggtgtaggcacacacctggtaaccggaggagcagactctgcctttaccggagtgtacaagatgagtgcacgcgctacgacacagccggcgcacactcaacacgggcatgcagcatcccaacgcctcccccactgggacgatgcacactggctgccagtcatgaaagtctcggataacccggcaaagactaccacacctggaataaagcaggtatggcgtctgtatgatgcagcggggcaatacaaggcggatgttataggacttgcagatgaggtgatagagccgcaggtggcacagcgatacatacatcctttttataatcttcaatcattcacgttcgcagcgcaccaggtggaaccgcttttgcgcacggtcatgcaggcgggcaatcggttacgtgccggcgaatcagtacaagaaatccatgcacggatgcgcgcacaactgcaacgattggataaaagctatgtgcgactgttaaatccacacgtttataaggtttcgctcacggagcgacttgcgcagttaaagaacacgctcatcacagcgctccgccgctaa

SEQ ID NO: 40372 - DNA, 1014 bp, Treponema pallidum
atgctgcgcgtccttaccggagaccggcccacggggcgtctccacctcggtcactatgcaggctcgctcgggacgcgtctgcgcatacagtctgagcacgagtgtttcttcatcatcgcggatctgcacacgctcactacacgccatgggcgtgcacagcttgccgagctgcctgctctcgttcgtgagctcgtgctggactacctagcttgtggcatcgacgcgcagcgtgcggtcatttatctgcaatcggcggtgccagaagttacagagctggcgttcatttttgcgaatctggtaacggtgccgcgtttgcagcgcatcccttccttaaaggagatggctcaagcggcaaacctttctgaacttccctttggtcttttgggatatcccgtacttcaagcggcggacattctgctggcgcgggcgcatcttgtgccggtaggtaaagataatgaaagtcacgtagaactgacgcgcgaagttgcaaagcgtttcaatcgcctctatggggaggtctttccattgccgcgtgcactcctcagtgactgcgccactctcgtgggaactgacggacaagcgaaaatgtctaaaagtttggggaacgcgatttttctctcggacgatgaagagacggtgcggcgcaaggtccgtgcgatgtacacagatcctgcgcgcacccgggcagatataccaggacgcgtggaagggaatccggtgtttgcgtaccacgatgcgttcaacccaaacacggacgaggttgcacattttaaagagcggtatcgcgctgggcgcgtgggagacacagaagtgaaagacgctcttgcgcgcgccttgaatacgtttttagaacccatccgcgcacgccgtgcacagttagaacagcagcctgcgtaccttgcacgcgtattagaggaaggctgcgcgcgcatgcgtgctgaagcacgcaaaaccatgcagagagtaaaagaggcgatgggtctttctgcacgtcctctcgttcatctgccgtag

SEQ ID NO: 40373 - DNA, 2472 bp, Treponema pallidum
atgagtactgcgcagagacgtgttcaagaacttgaaaagctcattcttcaccatcaagaccgctactacaacgcggagtctgatatttcagatgacgcctttgacgcgctttgggaagaacttgcaaggcttgatcctggaaatccgctgcttaaagcaatcggttctgacagtcaacgtgacgcagtgaaaaagcgccacattgttcctatgggtagtcaacacaaagctgcagacgaggagtccttcagcgcatgggcaaaaaaaaatgcattgcaggcatttctcgtccaacacaaactcgatggcgttagcttagagttgcaatacgagcgcggtcatttttgctgtgcgctcacccgtggtaacggcattgtcggagacgacgtcactgctaacgtacgcggcatgcgtggctttgtgccgaccctcactgcagagtggggaccttgcggcaatctccccttcacggggggtgttcgtggcgaagtcattatgcacaaggatatacatcgttcccactatcctactcacgcaaattgccgcaacaccgtaaacggcatcctaaagcgaaaggacggccgcggccgcacccacctccatattgtttgttacgacgcagtacccggcacccccggtaaaccgttcaccggctccctcccctttgctgatgaaacagaaaagcttgcctggctcgcgcgccaaggtttcgtgacggtacattcgcatcgctgcgctaacgcacaggaagttgttgcactccgatctgagattatgcgcacgcgcgagctgttgccttacagcatcgatggcctggtagtaaagagtaccgatcttgacttccaggacgcacaacttcccagacctaaaaagcagatagcctttaagttcagtacacaggaggcgataaccaccttgcgtgacgttcaatggcaaacatcaggagtgacgtacacgcccattggtattaccgatccagtgcgccttgcaggaactacggtcaagcgcgcaaatttatgtaacccgaatatgctcacaaagctgtgtctcaaaattggcagccacgttttaatttccaaacggggggagattatcccaaaaattgaagcactcgtttcaaccccagcacatgcgcaggaaatccacataccgacacagtgtaccagttgcaacacagtgctggaaaacagtgggagcaggcttttttgtcctaatgtaaactgccccctgctctcgcatcaccgcattacacggtggattgagtgtttggagatcaagcatgtggggaccgaactcattcagcgtctttttgaagaaaaaaaggtacgccgcatcccggacctctacacgctcacctgcgaggatctcattgagattgagcacgtcggcaatgcaactgcaaaaaaaatactcgaagctatacaccacaaaaaagaaatagcgttgcaaacgtttattgccgggtttggcatcgaggggatcggagaaaccatgggagaaaaacttatctgtgccggttttgacacacttgaaaaagtgctccacgcaacaacggagacactcgagtccatctatcagtttggaacagaacttgcaaaaagcgtggtaaccggtattgcacgggttaaggatgatatgtgtgaactgcttgatagaggcttcgtgcgcattcttgccaagcagcaggcagagtcgccactccggggaaaaagcttttgcttctcaggctccctcagaaatggagatcgcgcgactatacaccgtatacgcgcgctcggaggcgttgtgagaacgtcagttactcgagacctttcgtacctaatattcgaaagcctatcacagccctatcgcaccgcgcaaaaactaaaaaaagaacagggggtagcgctagaaattatttcggaagacgagttttgcaggcttctagatcaagcttccgcatcctgtacccatacgggggaaaccgtacaccccttgcaaggaaagagtttttatttctcaggtgcgtcgcgcagtatgaatcacaaacatgctcaagaaaaagtgcgcgcgttaggaggggatgtcgcatcgtccgtaacagcccagcttgactatctggtgttttacagtcagtcgacacgttatcgcaccgcatgcgcgttgggaatccaaattatttcggaagagacgctccacaagcttattgccactgcccaatcgcctttgcatacggatgcacacgtgcacgcgccattgcacggcatgagcttctgcttctctggcgatctcgacggtatgacacgcgcccaggcaatcgcgctcgtacaacgcctaggcggaacagtgaaaacggctgtcagtacacagctgacgtatctggtgtcaaacgatccacatgggcagtcacgcaaatgccagaacgctgttcggtgtggcgtgcgtattatcagtgagcacgtctttctcgctctgtgcaccccggggacctaa

SEQ ID NO: 40374 - DNA, 1965 bp, Treponema pallidum
gtgtcgacagttcgattctgtccgacggcaatgctgccgccctcgggcgagggcctgtgcgcgcttgacagaccctctctccgatgctaccgtgcgcgctcgtgtgaacttatgcctgagggggcaaccatgtacgccggtacttatagtactcctccgatcagtgtattgctacgcgagctcgtgctctcctgttgctgggtgccactcttgtttctctccgcttctgcggcggstyycttcggcgatggccagttcgttgaactcctcctttctcccgctagcgtgctgtacctcttgtgcctctttccgcttctccattatcgcgcgctgtgcgccgcttttattcgtggagaagatgaggcgcgcttcagcaagcgcgtcaacagctatgggaggacggcgctccgtgcgtcggttctcctcagctgcttcgtcccgttcgtctctatcctcgcgcgttccccgtttgagacaggtccacagatggcagtgtatgttatgctttctgccggtggctgtctgctgtttgctcctgcgctgcatttcctccttacgcgtccgcttgagcggtgggctgccttcctgcctttgcgcgaaagttctgtgcgcgcaaactggacccgcatgcttcttaccatagcgattgcgctgttcgttgccacgttactcctcgtctctgcaccactccttgtacgcacagatagccagaacattactccggcagaactgctcaccatggcgggtacgtttggactctgtgccagcgccgtaagctgcatggagtttctcctgtgcgcgtaccttacttcgcgagaaatcacccgtttgcgcgtgctcgccgagtgcatcggaactggcgactacacctgtgcggacgtacctagagaaacccgcacctcgatcggtcttttggcgaggtcactgagctccctgcgcgacaaagatcgcgcgtttttctcccgcttcttgcagctgacacagagttcaagcgcaattgcacacactgcagagacggatatcgctcacctcgaggaggcagctcgcaccaccaaagaggagattgatcacgtcaacgaaaatgtgacggcgcagactgccaccatcagctcctctaaagaaatagtggggactatggttgagggagtcgggcgtctgaatgcaagcgtcgaggcagagtcggaaactgtcacccggtccatcacccttgtcgagcaaatggtagagaaaatccattctatcgaaaagattatcgaaagcaacgacgcgcgtgtcggacggttgcgagaggagacaaaccgcgcagggaacctcaccaaccgatcgctggagcttacccagaatatttccaagtcttccaaggcactcttacaggccagcttggtaatacggaagatcgcaagtcagactacgttgcttgctatgaatgccgcgatagaggctgctcacgcgggtcaggacggacgcgggtttgcagttgtcgccgacgaaattaggaaattagcagaggaatcaaacgaacagggaaagatcatttcttcagtcctcgtacaactcactgaaaagatagagcatatcgcgcagcaggcggagagcctgagcaagcagttttccaatctctttgtccttgcagaagaagttaaacagcgggaatctaccgtcatgcatgccatggaggagcagtcttcagggggtgagtacatcaggcggtccatggaggctattacaggcaaccgcagacgtatccgcggcggtatctcgctcatgctcaaggatggagagctggtcctcaaggatatgaacgaacttgcacacaacacaggcggtatcaccgtggctatgcacgacatggccgccagcacgtctcgtatcttggatgcggtcacctccgtcaagattatcgcttcagagaataagaatgcaatggacatgcttacgaaccagctcacccagctgcgcctgtag

SEQ ID NO: 40375 - DNA, 1329 bp, Treponema pallidum
gtgcgcgtgggttctgctgtttctccgaaagttttaaaaggctttcgcgatcttttaccggatgaagagattgagcgtgcattgctcgtagaaaaactgacggtggctttaagacaaatgggttttgtacctatcgatacccccgcgttggagtacaccgaggttttgctgcgcaaaagtgagggtgacacagagaagcagatgtttcgctttgttgataagggtggaagagatgtggccctccgctttgatcttacggtgccgcttgcgcggttcgttgcaacgcactatgcgcgtttgtattttccttttaagcgctatcattttgcaaaagtgtggaggggcgagaagcctcagatgggtcgttatagagaattcacgcagtgtgattttgatatcgtcggttcggattcggtgtgtgctgactttgaaattctaaagtcgatacggcacatgttgtatatggctggtgcagaacacatacgtattcacgttgcgcatcgtggcctgtttgatcgttttttgcgtgctctttctttgtctgaccaggctgagcatatcctgcggataattgacaaacgtgcaaagatggcgccgcatgtgttgacagctcaacttgagtcgctttgcgatccagttcgtgtgcaaaagattatgacgtatgtaagtgcgggggaggtggacggtgttgcgccgtcgtttgaacatacattgtctgccattgagacattgacagggggtgtctcggaagagagtacacggcttagaaaaatatatgagctactctgtgcagtgaacattcagtcctcttatgtgttcgatccatctatcacgcgtggttttgattactacaccggtatggtgtgtgaaacgtttttaacacagttgcctcatatcggttcggtgtgctcaggtgggcgctatgaccatctgacggctttgtacatgaaggatgcagtgagtggggtgggtgcatccattgggttggatcgcttgtatgcagcgtttcagcagttgggaatgtcccgagagcacgtttgttttgtgcaggcgcttatcttctgtcaggatagtgcgctcatggatgtgtaccaaaagctgtgttcatactttgcagtgcaggtggcgacggaagtcttccctgatccgcggaagttgagccaacagtacgcctttgcagagaagaaggggattaggtgggggatctttgttgaacagcgcaacgccgtggtggaggactgcctgctcgtactgcgcgacctttctacgcgaaaggacacacgcctacctgcgcacgaagtgcgcagacgcatggcagctgaagggtaa

SEQ ID NO: 40376 - DNA, 1761 bp, Treponema pallidum
atgcactccagtcaattgttcgaacgtgctcgtctttatcttgaagaagaaacagatcctttctttgcacagcaggtacgggatcttgttgcacagaataatatagcagagctcgaagagcgctttttgcaaactctttcgtttggcaccgccgggctgcggggtgttgtcggcggaggaacaaacagaatgaaccccttcatgatcaaaaagatcacgcacgcgattgcgctctatttactaaaaacttttcctgaaaaggcagcgcgcggcgcgctccgtgccgttatagcctacgactcgcgtgtacattctcgtctgttcgcacacactgctgcgcacgtgtttcttgcacatgacattaccgcctacctcttttcggatccacgcccgactccagaactttcctacgcagtacagtatcttacctgtgacgtgggcatcgtggtcaccgcatcgcacaacccaccgcagtataacggatacaaagtgtactggaacgacggggcacagatagcgcatcctcacgaaaaaaatatcaccgaagaaatgaacgctatcacgagtgtcgtgaaccttgaggaaaaggtacctgtcaaacgcagtgcacccacgatcattgatgcagaaattgatgaaccgtactgcacctctataaaggaaaagctttttcgccccggtcttacgaaagagaccgtccagtcgatgcgtattgcatacaccccattacacggaacgggtgcactccacgtcgagcgcatactgggggatatggggttctccattatgaccgtgcctgagcaacggttgccagatgggaacttccctacggtgtcgtctcctaatccagaagatccggccgcgttggtgcatgcgtgtgcatatgctgatcgcgtacatgctgaggttcttatggcgactgatcctgacgcagaccgctttgcatgtgcagtaagaaacacccgcggtgtgttgcagttgctcacgggcaatcaaatgggagcgctcttcactgactacattctgctaaccctgcaggaacaaaacaatatgcccgcgcgtcctgcaattgtacgctccgttgttacgtccccacttagcgaccgtatagcacgcacatatggcgcaacgtgtgtagagtgccttaccggattcaaatggatatgtggtactgcagaaaagatttcacagtcaggagcgtactcctacgtatatggatttgaagaaagttacggacacaattttggtattcaggtgagagacaaagacggtatcaacgccgcagcgctctgtgcagaaatgggtgtgtactggaagttgcgcggaatgagcctgatcgatcgccttcaccagttattcaggacgcatggcctgttttgtgaaaagacgctgaacaaaacctatgcgggcgtcgcgggtgtaagcaccatgaatgcaataatgaatacgctcaggagacagccgctaacccaaattgcgcgcaagcgggtaatgaaggtgagggatatatatcttggtgttgagtttagtccagaaaatcctgcgcagacatctgccctttcttttcctcagagtaacgtgctgcagtattttgtacaggatggcagtattgtaagtatacgaccgagtggaacagaacaaaaaataaagtgttatatcatccaccctctgaccgtcagtacctcgatagaagaagcagaacaggcgggcaacatgtttatcaccgcagttgaacaagagatgggtacatatctgcaatga

SEQ ID NO: 40377 - DNA, 1281 bp, Treponema pallidum
gtgcttgattatcggtttattagagagaacgtggatgcagtaaaagaaaatgtgaaggtcaggaacgtgcatgcagatgtggacgcgattgtgcacttatatgatcagcgcgtaaagcttttagcagagttgcaagaattacaacgtgcgcgtaatgagaacgcacagacgatgaaaagctctttggatgcgcttgcgcgttcggcgtgtgttgaaacgggcagagcactaaaagatcgcattgctcacagcgagcgtctattggtacagatttccgatcagcttttgtctgcaacgcaagcgttgccaaacatgacgcatatgtgcactccccatggtcgatcagacagtgataatctcgaaatcaagcgctgtggggtgcctccatgctttagtttttcgccacgtgatcacgtggaattagcgcgcttgctggatatagttgattttgaagcggggaaaaaggtctcggggataaagttttattatctgaagcgtgaaggggtgctgcttgaacaggcattgattatgtttggtttgcagtttttacaagagcgcggttttgtgccatttctcactcctgacattgctcgtgagggtatggtgtgtggtttgggttttaatccgcgggggagtggatcgaatatctatcgtattgagggagaacaccgctgtttagtagcaactgcagaaattacgctgggggcataccatgcaggcgaggttcttgaagagcggagtttaccgcgtttatacgcagggctctcgcattgttttcgtaaagaggctggtgctgcaggccagttttctcgcggtctttatcgcgtgcaccaatttaccaaacttgaaatgtttgcgtactgtacaccgagtgattctgagtgcctgcacgaacgcctgcggtcgcttgaggaagagatttttactgcattggaaattccttttcgtgtggtggaagtgtgtgcgggagatttgggtgcgcctgcgtatcgcaagtgggatttggaggcgtggatgcctggacgccagggtggttcgtggggagaggtgacttctgcgtcgaattgcacagactatcaggcgcggcgcttaaatgtccgctataaggatgcagaagggaagaagcattatgtacacatgttgaatgggacggcgcttgcaatttctcgcgtgttaattgcgctgctagaaaatgggcaggatgcggaaggtcgcgtgcgcattccgcaagctttggtgccgttttgtggttttgagtatctctatcctcgtgtcctgtag

SEQ ID NO: 40378 - DNA, 798 bp, Treponema pallidum
atgggagtcatagactggttgaggcgcaggcacgctgttacccatatttttcagcaaccgctgaatgaagaaaagcaggatatgatccgcggtatagtggatctttctgacacttcggtgcgcgaggtgatgataccgcgtattgacgtggattttcttgagctttctatgagcggtgaaacactcgttgaaaaggtaaccgagagtggacactcacgctttcctgtctacgaacaaactattgataatgtggtgggtgtgctgtacgtcaaagatttaataaagctgtttggaaggccacaggaggtgcggttagaaagactgctgcgtaagcccttctttgtccccgagtccaaacgaattgacagtcttctgcgagagtttaagcgcaggcacgtgcacattgcgatcgcggtggacgagtacggcggcgtttcgggtattgcgtgcatggaagacattattgaagagattgttggggatatccaggatgagtttgaccacgagcgggaggatatcgaaccgctcggacagggcgtgtggttgtgcgatgcgcgtgtggatttggaagatttgtctgagtgtttgcatactgtttttccttctcaagagtttggaacgttaggtggatttgtatttaatctttttggaaaaattcccgtaaagtacgagaaggtttcgtggggtgccttcgattttattatccaagacatggaagcacataagataaatactataaagattgtatctgtcctgcggggtgattccgagcctgcatgtgtatctgagcggccatag

SEQ ID NO: 40379 - DNA, 1047 bp, Treponema pallidum
atgaaacgtttttgtgtgagcagttcgcgcattctttctctcctttttctctccctctggatgggatcatgcctgcagacacgacaggatgtcctgtacctgtataactggacgtactacaccccgacgtccctcattaaaaagtttgaacaacagtataacgtgcaggtagtctatgatgattacgcttcaaatgaagatatgtttgcaaaactgagcattggtgcaagtggttatgatttagtggtcccttcgggtgactttgtcagcatcatgaaacgcaagcatctgttggaaaaaattgacctatccaagattcccaacgtacagtttatcaaagagagtgtccgtgctcgcatagcctacgatccaaaaatggaatattcggtgccgtattatcttggagcggcaggcattgcggtaaacaaaaaagcagttccgtcatacgcgcgcacgtggtctatcttctcacgcaaagacctggcgtatcgtatgagcatgatggacgatatgcgcgaagtaatgggtgctgcacttgcttcacttggctacaacgtaaacacaaaaaacgaacaagagcttgcgcaggcagcaatacttgtcaccgaccactggaaaccaaacttggtaaagtttgattcggacggatacgcaaagtcatttgcatcgggagactttgttgtagctcatggctttgcagaggccttctttgcagagactcctgaggcaatgcacgaacatatagacttctttataccacaagatgtcgccagcccagtgtacgtagacagcttttgcattcccaagggggcacgcaatcgcgaccttgcccatgcgtttatcaacttcttcctagagcctgcacactacgcggagtttttggacacctttggattcccttcaactatccaccgggaagcggcagcatatcagaagaagactccatactacagcgagcatgacctcgagcgaggaacgctaaaaacagatgtgggggcagcaatcgaacactacaatgcgcactggaacgcggtgcgatttaggtga

SEQ ID NO: 40380 - DNA, 222 bp, Treponema pallidum
atgttgatcctttcgcgcaagacaaatcagaaaatctttattggggactcgattgaactgactattattgagattcgcggcgatcaggtaaaagtcggtgtggaagcgccgcgttcggtgaaaatattccgacaagaggtatacgaagagatccagagagagaaccgcgctgcgtccgactccccctggtctcctaactcattgcctcagttgcctgtgtag

SEQ ID NO: 40381 - DNA, 999 bp, Treponema pallidum
atgactagttacaaggcactcggtttggtgaataccaaggacctgttcgcaaaggcagtaaagggcggatacgcgatccctgcgtataattttaacaacctggaacagctccaggcaatcatacaggcgtgtgttgaaacgcgttctcccgtcattctgcaggtttcttccggtgcgcgcaagtacgcaaatgcgacgctcctgcgcaatatggcacgcggcgcagttgagtatgcccatgagctcggcgttgatattcccattgttttgcatctggaccatggtgacagcctagagctgtgcattgactgcatagagagtggcttttcgtctgtgatgattgacggttcggcgttgccgtacgacgagaatgtagcgctaagcaggaaggtgtgcgagtatgcccatgcgcgtgcggactatgtcaccgtggaaggggagcttggggtactcgctggtgtggaagacgatgtagtggcagagaagagccactacactatgcctgacgaagttgaggactttgtgaaaaaaacgggggtggattcccttgccatctccatcggaacaagtcacgggagagcaaagtttacgccagagcagtgtacgcgcaatgctgatggagtgttgatcccccctccgctacgttttgacatcctcgcagagatagaaaagcgtattcctggctttcccatcgtgctgcacggtgcttcgtctgtgcccgttgagtacgtacgggaggttgaaaggtacggtggaaatctgccggattctgtgggtattccagaagagcagttgcggaaagctgccaaaagcgcggtgtgcaaggtgaacattgactcggacggtcgcctcgctatgactgcagctatacgcagggtgctgaccaccaaggtagatgagtttgatccgagaaagtatttgggtcctgcgcgcgatgagcttaagaagttgtacatgcacaaaaacaaggaagtgctcggaagcgccggccgcgcatag

SEQ ID NO: 40382 - DNA, 3513 bp, Treponema pallidum
atggcgcgcatgtcttttgttcatttgcatgttcactcaaattattcactgttggatggagcttcttcattgcagcggctagtgcgtactgcaaagtcgctgggacaagaagcgcttgcgcttaccgaccatgggaatatgtttggtgcgttgcattttcaaaaagtttgttctgctgagggtatcaaagcgattatcggatgtgagctctacgtggcacccgaaagtcgctttgatcgcagtgagcatactatcggtcgcagatactatcacctcatcgtgcttgctaagaatgagacgggatatcgaaatctaatggttctatcctccaaagcctatatcgagggtatgtactacaaaccacgtgtggatgacgagcttctggcccagcatgcagaagggctcatttgtctttcttcttgtcttgccggacagcttccttatctgttattgcagggcagaaaaagggaggcagaagaacacgcgcgcaaataccgagcgctcttcggtgtagataattactttattgaggtgcaagatcatggacttgatgaagagaagaaagtagcaccgcttttgattgagcttgcatgtaggctcggcattccgttggtggttacaaacgacgtgcattatgcggagcaggaagactctgttgcacaagacattctgctgtgcattggaacgaagaagaatcgctccgatcccaatcggcttaaatttaaaacagacgagttctatttaaagtcttctgaaaaaatggctcagctgtttccccactatcctgaaatggtgctgaatacggtgcgcattgcacagagatgtaatgtgcggattcctcagcctggcccgctgcttccgctctaccagattcctcatgagttttccagcaaggaacactatattcgccatctggtccatcgaggtttgtatgatcgctatgcagtagtgagcgaagaaattaaggcgcgtgctgattatgaactagatgttatcgtgaggatggattttgttggctactttttgatcgtgtgggattttattacgtgggcaaaggagcatgatattcctgttggtccggggcgggggtctggagcaagttctattgttgcatatgcgttaaaaattaccgacatcgatccccttagatataagttgctttttgaaagatttatgaatcctgagcgtatttctatgcccgattttgacatcgacttttgttttgagcgcagacaagaagtgattgagtatgtgcgtgcgagatatggaaatgacaatgttgggcaaattattacgttcggaacacttaagccaaaggcggcgattcgtgatgtagggcgcgtgttggatattccgctttcggaagttttgatgattacaaaactgatgcctgatgatccaaaactgacttttaaaaaagcgtatgaatctgaacaattagcgcaaatgaagcaggagccgcgctatgctgaattgtttcaaatagcagaaaagcttgaagacaccaatcgaaacactagtttgcatgcagcaggtatcgttattggtaaaacggcgctcactgattatgtaccgctctacaaggattctaagacgggaaaaattagtacccagtttggtatggatttaattgaagactgtggattagtgaagatggactttcttgggctaaaaacacttacgctcatccaacggacgcagaatctcgtacgacgtaaagggggtaagtacacaacgttttcgatatcggatatcagtgatcaggatcctacgactttttctatgttggcggaaggaaaatctgctgcagtgtttcagtttgaaagtcgcggtatgcaaggcatcctcaagcgtgcaaagcccagtaagatggaggatctaatagcgttgaatgcattgtaccgacctgggccgatggcattcattgatcaatatattgaatcgaaacgtgatcctgggaaaataaaataccctgatccgtgtttggaagacatcctttcagaaacatatggggtaatagtataccaagagcaggttatgcaggtggcacagcgcattgcaggtttctcgctgggagaagcagatattctgcgccgtgcgatgggaaagaaaaagcttgcagtgatgcaggaaaagaaaaaggagtttgctgagcgtgcagagaaacagggttttgataaaaagcatgctgagaatatttttgaaattcttattccttttgcagggtatgggtttaataaaagtcacgccactgcatattcagtggttgcctatcaaactgcatttctaaaagcaaattttcccgccgagtttatggctgcgaacctttcaaacgaaattaattctgcagaaaaattaccactctacatggctgaagcagaaaagatgggtctgtccattcagaaaccggatgtcaatgcttctgaaccttattttagtgtttgtgaagggtgcattgtgtatgggttgttgggtattaaaggtttgggtgagcaggttgcgtttgacgtttttgatgagcgtattcgcaacggtccttacacctcctttgtagaggtgctggatcgagttcctgcaacctcgttaaataaaaaaaatgccgaaataatgattaaggctggatgttttgaccggttcggggtaactcgcgcaagtcttacagcgcacctcgacgatgcaatgaaatatgttgcgcgaaaaaaggcggttacaagttctagacaagcaagcctttttgacgaaacggatttaggagaatgttctgaatacacctttccggttatggaagaatggtcccagagggagagactccgtatagagaaggaactgatggggtattatatttctggtcatcctcttgatgaatatcgaagtgtgataggagaaaaggcgacattggatttaggacatattgaaaatgctcgttctgaaaataaatacctgattgtgggagtgctgaatgctattcacccgtatacaactaagtcaggaaagaatatggcttttggctcttttgaggatctccatggctctgtagacatagttgtgtttcctgtgctgtgggaggagcatcgcgcgcagttcttgccagaaactattatggggttggtgggaactgtagacttttctaaagaaaccccggcgttcttggtagattctgtcattgacttggaacaattacggtttgctcaggttaaaactattctggctggatcggagcataggcgtgtatcgtcaggagagaaaactccactgcagaaacgtggcgtttcgcaggaagtgcacatcgaggtgagttctcacgttcgtgcgcatgcacagtttaaatcgttgtatgagattttgagtgcacatacaggaggctcgggtgaagtgtttcttcacatgcatgtggatgaccgtacgtacgtggtgtacgttccttcgtgtaaggtatctgccactgaggtatttgcgcagcaattaaaaggtaatgagagttttgtccaaattctaaaggagtgcgtgcaatga

SEQ ID NO: 40383 - DNA, 1191 bp, Treponema pallidum
gtggtgcatgtgacgcttttgtacggaggccgttctgcagagcacgatgtttctgtacgttctgcacgttttgtggcgcgcacgttgtgcttacaacacaccgtaatgctcatcggtattacccgtcgtggcgtgtggtatgcgcagcctgcgtgtgcattagagcagttgtgtaccggcactgtcgcgctcagtattcaggaagatgaaaagaggcgcgtgtgtcttgtcccgggaggtggtactgcaggcgcttttgtcatagcggggatgccgtgtgtcacggatgtggtattccccgtattgcatggcagttatggggaagatggtacggtgcagggtttgcttgagatgctgcaggtgccgtacgtggggtgtggagtgtgtgcaagtgctcttgcgatggataaggtaaaggcaaagatgctatggcaggcggcgggacttcccgttttaccgtttgtctttttccgtaaagatgcatggcgtatgcatatgcaagaatttgttgcgcagcttgaaacacgccttggctatcctctttttgtaaagccagctcaagcaggcagttccgtaggagccagtgcagtgcagacgcgtgcaccgcttatccctgcgattgaagcggcttttcagtgggatgaagtggtgttggtggagcgatatgtgcgcgcgcgagaaattgaatgtgcgctcagtgggaacggaccctatactgtacatggggcaggagaggtgattgcgcagggagccttttatgactacgaggaaaaatatgctgatgcaagtgtcgcgcgtgtactcgttacggctcctcttgagactgcccagtacgaacagattaccacacttgccctgcgcgcatacgaagcattaggactcacgggtctggcgcgggttgatttttttctgttagaaacgggagaagtatatgtgaacgaagtaaacacgatgccgggttttacgtcgatatcactctttccccaaatatgtcaggctgcaggtgttgcaccgcaggacttaatggcacaactcctttcttgcgcacgagagcgctttgcagcgcgcgccgcactgagcaccgacttgcacgcccacgtgtgtgcgccctcggtgactgctgcacatgaccccgatgcgcaaggggacgactgggaccagagggactcgaaccccctccctactgcttag

SEQ ID NO: 40384 - DNA, 1389 bp, Treponema pallidum
atggagaagattgtcggtctctgcaaacggcgtggctttgtgtttccatcttcagaaatttatggtggccaaggaggtgtttgggactacggccctatgggcattgcgctaaaaaacaatattgcccatgcctggtggcaagatatgacacgcctacatgatcatatcgtcgggctggatgcagcaatcttgatgcatccaaacgtatggcggacgtctggccacgtcgatcacttcagtgatcctttggttgattgcacggtgtgtaaaagtcgctttcgcgcggatcaggttgccgtgccgtctgccgggggaccctgtcctcagtgtggtggggccctcacgggcgtgcgtaattttaacctcatgttcagtacccacatgggtcctacggatgagcgtgccagtttgctctacctgcgtcctgaaactgcgcaggggatttatgtaaattataaaaacgtcctgcaaactacacgcctgaaggtgccttttggtattgcccagatcggtaaggcgtttcgcaatgagattgtcacaaaaaactttattttccgtacgtgtgaatttgaacaaatggaaatgcagttttttgtgcgccccgcagaggatactcactggtttgagtactggtgtgcacagcgctgggctttttaccaaaagtacggggtgcgtatgaaccacatgcgttggcgtacccatgctgcacatgagttggctcattatgcacgggctgcctgtgacattgagtatgcattccctatgggctttagggaattagaaggggtgcataaccgtggtgactttgacctgacgcgccacgcgcagcactcgggtaaagacttgtgctatgtggatcctgatccaaacctggatgcggcagcgcgtcggtatgtgccttgtgtcgttgaaacgtctgcaggattgacgcgctgcgtactcatgtttctgtgcgatgcatacacagaagaatatgtgcaggcgccgaatgtcgcgttttcggaaacgacacagacagctgatcaagaaggtgctgcacgtacgggcgagatgcgaatagtgctgaggttgcaccctgcgctttctcccaccactgttgcttttttgcctttggtaaaaaaagacggattggttgaccttgcgcgtgcggtgcgcgacgagctgcgtgaggattttgcctgtgattttgatgcagctggcgcgattggaaagcgctaccgccgtcaagacgaggtgggtactcccttttgtgtcacagttgattatcagtcaaaggaagatgatacggttacggtacgtctgcgcgacagcatggcacagcgccgggtctctcgtgcctttcttgcagagtttttgcgcacagagataaaacactaccggcgtccctag

SEQ ID NO: 40385 - DNA, 1614 bp, Treponema pallidum
gtggaggtgagagttcggtacgcaccgtctccgacggggctccagcacatcgggggtattagaactgctctcttcaacttcttgttcgcgcgagcgcatgcaggcgtatttgtcctccgtgtcgaggatactgaccgcagtcgctgcactgcagcgtttgagcagaacctttacgatacgctccgttggcttggggtctcctgggatgaggggggagggtgcccagaaacagcggtgaagcagggcgcgcggggggatggccgctctgttgctcacgctggtggggcctatggcccttacacgcagtctgcacggacagatctctaccgcgcgcaggtggcgcggctcgttgagacagggcaggcgtattattgtttttgcgatgcgtcgcggctcgagcgcgttcgtaagatccgtacgctcaacaggatgccccccggttatgaccggcattgccgcgagctcctgcctgaagaagttcgggaatgtctcgcatccggggttccacatgtgatccgctttaaggtccccttggaagggagtactcatttccgcgatgcgctgctcggtgatatcgagtggcaaaatgaggagatcaatccagacccgattttactgaaaagcgacgggttccccacttaccatttggctaatgtggtagatgaccatgctatgcgtattacgcatgttttgcgcgctcaggagtgggttccctccaccccgttacaccttctgttgtaccgtgcttttggctggcagcccccgctcttctgtcatcttccgatggttatgggggcagatgggcacaagttgtcaaagcggcatggagctactagctgtgatgagttccgcaacgcggggtatttgcctgaagcgttgctcaactatgttgcaatgctcggttgctcgtacggagaaggtcaggatctgttcacgcgagagcagctgtgtgcgcacttttctctgtcgcgtttaaataagtcaccggctgtttttgactataaaaagcttgcgtggtttaacggtcaatatatccgtgcaaaaagtgacgagcagctgtgtgcgctcgtgtggcctttcattgcaaacgccggtgtgtgtggccacattccggcagatgtggaagcaggagctgtgcgcacacgacgttttgcagacgaggcgccgtgtgcgcctacagaagcgcagcgttccatgctcatgcgagttatcccgctgattaaggagcggttgcggtttctaaccgatgcgccggagttggtgcgttgtttttttcaagaaccgtctctccctgaacaaggggtgtttgtgccgaagcgcttggatgttgcgcaggtgcgcgcggtactggtgcgcgccaggggcctggtgcacgaaatagtgagtgccagtgaaccggatgttgaggtgctcttgcgtgctgaggcagaaaagtttggaataaaacttggtgattttctcatgcccattcgcgttgcgctcaccggtgctaccgtgagtgcccctctggtaggaactatccgcatcctgggggcgtcacgatcctgtgcgcgtattgaacacgtcattcgtgaacgcttttcggatgacagtcaaggagtgggaggaggctga

SEQ ID NO: 40386 - DNA, 1059 bp, Treponema pallidum
gtgaatgtcctcggaattgagacctcttgtgatgagactgcagttgcaattgtaaaagatggcacgcacgtgtgcagcaatgttgtggctacgcaaattccttttcatgcgccgtatcgtggcattgtcccagaacttgcaagtcgcaagcacattgagtggattttgccaacggtgaaagaggcgcttgcacgcgctcagctgacgcttgctgatatcgatggcatcgccgtaacacatgcacctgggctgaccggatctctcctggtaggcctgacgtttgcgaaaacactcgcatggtcaatgcaccttcctttcattgcggttaatcaccttcatgcacacttttgtgccgcgcacgtggagcacgatctggcatatccctacgtgggcttgctggcgtctggaggacatgcgctcgtatgtgttgtgcacgattttgatcaggtagaagcgcttggcgcaacgatcgacgacgctcccggggaagcctttgataaggttgcagccttttatggctttggatatccgggaggcaaggtaattgaaacgttagcagaacagggtgacgcgcgtgccgcgcgttttccgcttcctcattttcacggaaaagggcatcggtatgatgtatcatattcaggattgaagacagcagttattcatcagctcgatcacttttggaacaaggaatacgagcgcactgcgcagaacattgctgcggcgtttcaagcgtgtgcaatcaacatcttgctccgtccgcttgcgcgcgcattacaggatacagggctgccaacggcagtagtgtgcggaggtgttgcagcaaacagtttgctcagaaaatctgtagcggactggaagcatgcgcggtgtgtgttcccttcgcgtgagtactgtacagacaacgcggtgatggttgctgcgctcgggtaccgctatttgatccgtggtgataggagtttctatggggtaacagagcgttcgcgcattgcgcacttcagtaagcgcgggggagatcgtctcgctgcacagagaagcgctgcttctcagcctcttttttga

SEQ ID NO: 40387 - DNA, 1074 bp, Treponema pallidum
atgagccgtacacgcgcgcgtgtgtgtctacctgttaaggcggacgcgtatggacacggtgcgtgtgacgtcgcacaggcggcgctttcgtgcggggtgcactcgttcgccgttgcatgtgtgcaagaagcgtcgcaactgcgtgcggcaggtgttcgcgcgccgattttgtgtttaagtactccaactgctgaagagatttctagtcttattgagcatcgtgtgcacaccgtgatttctgagcgcgcgcatattgcccttatcgcacgcgcgctccgtcagtctgctgatacgggtgccacgtgtggggtacacgtaaagattgataccggaatggggagaatcggctgtgcgccggatgaggcctgtgcgctcgtgcagatggtgtgcgcaacaccgggtctccatcttgagggggtatgtacgcatttttctgtcgcggattctgtgcgtgctgaggacctgcagtacactgagatgcaacgtgcacattttatgcattgcgtacagtacatacggaaaagtggcatatcgattccattggtgcatgcggcaaactctgcagcgctgttgtgccatccgcgggcacacttcgacatggtgcgtccgggattgttggcatacggctatgcccctgagtctgtgcatcctgctgtgcgcagtgtgttccttcccgtcatggagcttgttacccaagtccgtgcaatcaaaaaaatacctgcaggcgcgtacgtttcttaccagcgcttgtggcgtgcgcatacagaaacacatgtaggtattctgcctatcggatatgcagacggagttatgcgcgcgctgtcgccgggtttgcaggtgtgcattggggggaagtggtatccggtggtgggggcaatttgcatggaccagtgtgtagtggacctaggtaccccgctgcgtgtgacagttggagatagggtgacacttttcggtcctcaggacgcaggtggcccaggacagggggcagatgtgctcgcctcgcatgcaggcaccattccctatgagcttttgtgcgcgattggtaagcgtgtcgaacgggtgtacatccggtga

SEQ ID NO: 40388 - DNA, 1095 bp, Treponema pallidum
atgaaacgtgcacttgctcaacgactcagaaatattgaacgagcactcgccgatgcacttcctgcgcaacctacgcgctcgtggatgggaacgcggctccgtgtccttgcgtccgaagatacgcgcgtcctgcgcaccgtgtgcaacgcgtgtgtcagctgcggcggaaagcgctggagaccgttgttactgatactttctgcagaacttgcacacgcgtgtgtgcagtgcacgcatcggaaactccaaggacacaagaggaagaaaatttccgaacgcgaatggtacacactgagcgcggtagtagagctcattcacacagccagccttttgcacgatgatattgaggaccattcgtctacgcggcgtggtaagccatgtgcgtatctgcgctacggtactgactgcgttcttaatgcagcaagctggttgtattttcatgcacacgcactcattgacacgctcagcatagaacctgcccttaaggcggctcttttttctgccacgataagtgcaacgcgtgctcttcatatgggtcaggcgcttgatattgcatggcatcgcagcccagaacttattccctcgcgtgcgcagtatctgcgtatggttgcactgaaaactggcgcactcatcgctctatcaggcgaattggggtttttgtgtgcaggttattctgcgcgtgaggcgcgctcctttggagcgcaagtcatgcctattgggataggatttcagattctcgatgatgtacaaggcattgacggaggtgtttcaggcaaagcgcacgctgatgacatcgtcgaaggaaagaagagctttcctgttatccttcacgtgcacacgcatcctcaagacgcacctacatttgcacgtctttttgctgccgcacgcgcagaaggactgcactctcctgcagtcaaacaggcacaacggatactgtattcttcagaggcacttactcacgcgcgcgcgtacggcctgcgcatgatagagcgcacactcacacgggtgcacgcacattttccttgcaatcctgcatgccagctgtggtgtactgcagtgcagtatggggtacgcgcgcacctgcacgcgcactaa

SEQ ID NO: 40389 - DNA, 1491 bp, Treponema pallidum
atgtgcgatgtactcaccataagggatctttctaagtcttttgcgaggaacagggttctcaacggggtgaacttccgtatgggaaagggtgccgtggtggggcttatgggagaaaatggtgcgggaaaatccacgcttatgaagtgcctctttggaatgtacgctaaggacactggtcagattctcgtggatggaagcccggtggactttcagtctcccaaagaagcgctagaaaacggtgtcgccatggtccatcaggagctcaatcaatgccttgatcgcactgtcatggacaatttgtttctcggcaggtaccctgcccgtttcgggatagttgacgagaaacgcatgttcgacgactccctcactctgttcgcttccttgaaaatggacgtaaacccgcgggccgtcatgcgcagcatgtctgtctctcagcggcagatggtagagattgccaaggcgatgtcctataacgcgaagattatagtcctcgacgagcctacttcctctctcacggagagggagattgtcaggctctttgccattatacgagacctgagcaaaaaaggagtggcattcatctatatctcccacaaaatggatgagatctttcagatctgcagcgaggtgattgtgctgcgggatggtgtcctcacgctctcacaatccataggggaagtggaaatgagcgacctcatcaccgctatggtcgggcgcactttggacaagcgctttcccgacgctgacaataccgtcggtgacgattatcttgaaatacgaggtctttctacaaggtatgctccgcagctgcgggatatttccctttctgtgaaaaggggcgagatttttggcttgtacgggctggtcggtgcggggaggagtgaactgcttgaagcgattttcggcctgcgtaccatcgcagacggtgagatctctttagcaggaaaaaaaattcgcttgaagagcagcagggacgcaatgaaactcaatttcgcctttgtgcccgaggaacgtaagctcaacggaatgttcgcaaaggggagcatagagtataacaccacgattgcaaatctccctgcgtataagcgttacggtctactctcaaagaaaaagctgcaggaggcagcggagcgggaaataaaggccatgcgcgtgaagtgcgtttctccaagcgagcttatcagtgcgctcagcgggggtaatcagcagaaagtcattattggaaagtggctcgaacgcgatcccgacgtcctcttgcttgatgagccgaccagggggatcgacgtgggtgcgaaatatgaaatttatcagctcatcattcgtatggcgcgtgagggaaagacaatcattgtggtttctagtgaaatgcctgaaattcttggaatcaccaacaggatcgcagtcatgtccaattatcgattggctgggattgtggatacaaagagtaccgatcaggaagccttgctcagactttctgcgcgatacctgtag

SEQ ID NO: 40390 - DNA, 1383 bp, Treponema pallidum
atgaaaggtcaagatgtcatcctgtgcgacgggggacgtcatttttcatataaggtacttcctcgtgtggtcattgtgggaagaccgaatgtaggtaagtcgacattattcaaccgcctgctcggtagacggcgctctatcaccagcaatacgtcaggggttacaagagattcgattgaagaaaccgtgattctgcgagggtttcctcttagacttgttgacacgagcggttttaccgttttttctgaaaaaaaggcatcgagacaacatatcgatactctcgtgttagaacaaacgtataaatcaatacagtgtgcggacaaaatccttcttgtgcttgatggaacgtgtgaaagtgcagaagacgaggaggttatccagtatctgaggccctactggggcaaactcatcgctgcggttaataagacggagggaggagaggaggtgcattataattatgcacggtacggtttttctacccttatctgtgtcagcgccgagcacggtaggaacatagacgcgttggaaagggcgattatccaaaatctgttttctgtcgatgagcgccgggaactgccgaaagatgatgttgttcgtcttgcaatagtgggtaagccgaacacaggaaaatccactttgatgaattatctcatgcgccgtaccgtttctctggtgtgtgatagagcaggtactaccagagacgtggtaaccggtcatgttgagttcaaacagtacaaattcattatcgcagatacggcgggtatcagaaaaagacagaaggtatatgagagtatagagtactactcggtaatacgagcaattagcatcctgaatgccgttgacattgtattgtacatcgtcgatgcccgagatggattttctgaacaagacaagaagattgtttcgcaaatctcaaagagaaatttaggtgtgatcttccttttgaacaagtgggatttgttggaaggaagtacctctctaatagctaagaaaaagcgtgatgtacggactgcttttgggaaaatgaattttgttcccgtggtacctgtatcagctaaaacggggcacggtatttctgatgcattacattgtgtatgtaagatctttgcacaactaaatacaaaagtggagacttccgctctcaatactgcattgaaagattgggtaacgtcgtatcctcctccaagaaagtatggacacgtttcgttaaagtacctggtgcaggtatcggttagacctattgaatttttgctttttgcaaataggccagatcgtataccggaaaactacgttcgatttttacagaatcgtattcgtgaagacctaggattagactctatccctgtgaagctaaccatacggaaaaactgtcggaagcgatag

SEQ ID NO: 40391 - DNA, 1224 bp, Treponema pallidum
gtgtcaaaagcccttaaaggggatgttcccgttagttcttcttttgaagaaaagatgaaggcgttggaggcggcgcgcctccagatcgaaaagcagtttggccaaggttccctcatgaagttagggaaggatgacgcagtccaaggtgttgaagttattcccacgggaaatattttgcttgacgaggcattaggtatcggcggttatccgcgcggtaggattattgaaatatttggtcctgagtcgtctggcaaaacaacccttgcgctgcacgcggttgcagaagcgcaaaagcgtggaggtatcgcagcctttatcgatgctgagcacgcgcttgacccacagtatgcgaaggatcttggcgtgtccgtcggtgatctgtggatatcgcagccagatacaggggagcaagcgttagagattgccgaaagtcttgtgcgttcaggtgcggtggatattatcgtggtggattctgttgccgcgctcacgcctcaggcagaaatacagggggatatgggggatgcccacgtaggtctgatcgcgcgtcttatgagtcaggcgttgcgtaagcttacttctatcatcaataagtcgaagtgtacgctcatttttattaatcagctccgcatgaaaatagggattatgtttgggaatcctgagactactaccggcggcattgcacttaagttttattcctccgtgaggatagaggttaggaaggtggaaacgctttcaagaggtgatgaggaagcgtggggcaataaggtaaggatccggatagtaaagaataagatggcaccccccttccgcaaggtagaaacggagattctctttgggaagggtttttctgccttttcgtgtttgctggatgcagcggttaagcaggaaattatcgaaaaaaaaggggcgtggtacgcgtaccgagaagaaaagatcggacaggggcgtgacaatgccgtgggctttctgcagcagaatatggacatcaccttggagatcgaacgggcagtgcgtacgaagctttttcctaagcaggcgtttatatccagctttcaggaacatcgtcctgctctctctcttgaggcgtctccggaggagtcggacgcaaaaacgttgcggcgttktgcaagcaggggtgcgggcgcgtcgagtagtcgggtgcaggagggatctgcagcgaatgaccattttcaggacgaatcgaccacggcgaaactcctttag

SEQ ID NO: 40392 - DNA, 678 bp, Treponema pallidum
atgaacgcaaagcaaaatgcccgtcgcatcgcttccgcacggctgcgcgccttccgcgcctcccctaccgctcctgcctatccagcacactcccttttcactgcacagacagcgtaccagcgtgcacgcactgtgttcttctatgcgcccctgcccctagaaatagacccctacgcccttgcatacactgcagaaaacgcaggaaagcacgtagctcttcctcgcgtatcgggaaacgacttgcactttcacgcagtcacgtacgcgtgcactacccgcccctctgtttcctgcttcaccaccttgtgccctaggaccaggggaattagagaacccgatgcacacagtccacgcctctaccccccgcacccttcgcccaatactcctgcacaaagaacacttgccctaccgcttttgatcgtagttcccgcactggcattcagcacaaatggcgcacgcctcggccgcggcggaggacactacgatcgcttcctcgcccggatcgccgctaccataccagcagggagctactacacgctcggcctctgctttgattgccaaatcatggctgtcattcctcaagaagcacacgaccaatccgtacacgcggtgctcaccgaaactcgtctcatttcctgtgccacggcgcgtgcaccagcgccaccgttctctttatag

SEQ ID NO: 40393 - DNA, 2121 bp, Treponema pallidum
atgaaacggtggcgtgcaaaggcacttgacgaagggcgtgtccgcgagcttaccgcgcggtatagctgctcggcgcttgaggcggccatccttgtgcgtcgcaaggtagtggatgctgacgcactcctttttcattttgagcgtgatctacgctatctgccaggaccgttccgtttccatgcgatgagcgctgcagttgaccgtttgcgtcttgcgcatgagcggaaagaaaaggtgctcatctttggtgatcgtgatgcagacggtattagcgccaccacccttctttttgaggctctctgtgcatttggcttgacggtgtgctggcgcgtgccggttgccgatgagccctatgggctctcgtgcaatgcagtagatgagcatgcggccgcagggggtactctcattgtgaccgttgactgcggtatttctaatcgcgcagaaattgcgtatgcgcgtcacagaggtattgacgtactggttattgatcaccatgcggcccctgagacactccctgatgcaattatcattaatgcaaaagtgccaggtgcagggtatccgcacgagtttctctcaggctgtgcaactgcgtggaaggtggtaacggcgctccgtttcagtaccagcggctggtatcagcggcctgtggtgcttctacacgttcgtccggtgactggggcgtatacgattgaggctgtaaaaatgtgtaatatggaggtggtggaccgtctttcggaaacggtggtcccacgtatgctcctgccatctcatacgcgtcttggtgccttcctggagggtcaggaagttttcgtatgggatgagcaggtggtgcgcacgcagttggccaaagtgtttggtggagagtttccctggcgttttaccgatgtgcggccgcgtatggccgcgttttttccccaatgtgaacgcgcaagccttttaaggatgaaggacttttctcgcattgggcgtgcgcgctcaaaaccgatggaggaaatcgaaagctttatcaatctttttataacttttgtgcagaaagatacccagctctaccggggcgcggcggatgaattgcagcttgtggcaatttctacgctttctgatcttatggtgttggcgggggagaaccgtattatggtccgctacggtctgcaggcgatgaatgaggcgccacgtgtgggtttgcgtgagttgtttgcgatacagcgtctcatggggaagaagttaggaaccgtagaggtagggtggagtattgtgccgcttatcaatgcaacggggcggttagggtgtccgcaccgtgcagtggaactgtttttaatgcgcgaagcttcgcagcgcgcgctgcaggcacgaaaaatggtgcaattgaacgaacagcgaaaaaagttaggaaggagtgctcgtgcacttgttgagcctcttgcgcgtgcaagtcttgagacgtacagcaaccgcctggcagtggtttgtagcgataagattcatcggggcgttacggggattcttgcaaactgtttgagcgaggcgctgcgcgtgccttgtgtgatcatttgtataatggcagacgggcacgcggtaggatcgttgcgttcggcgcggggatatcacctattttcgctcttagatccccttgcagacttgttctctgactatggggggcatgcatttgcggcgggtttttcaattccctctgagcgaattccccagctattgcaccgtatggaactgtatgcggcaaccattgagtttgctgatgaaagcgcgcaagagtgtggagaatttgatgcagaactggatgctacgcagatgacgcgggggcttttgacccttgtcgatcgctttgagccgtacggagaaggcaatcccccgttgtgctttttggcgaagagattgaaaattttttctgcatcgctttttgggcgtacagaacgtgtgcacgtaaaattgaccttggatgcacaggtgcataaatggcccgcaatttactggggagcaggggaaaagttggcacaggagtttgcagtgggggatgtagttgacgcggtttttcaagtgacgcgtaacacgtttcagggaacgtgcacaccgcagctggtcattcaagatttgtggaggagtgagtga

SEQ ID NO: 40394 - DNA, 2655 bp, Treponema pallidum
atgcgtcgcgtttgttacctgtatctggtgttgctgtgcggtctgttggtggggggagctgcgctctttgggttcttgcttgcctccattgaaaacattaagcagagcgaacggttcacccgctttaatccggcgcttcccaccagaatcctggacattcggggtgatttgatcactgagttttcctcagacgaaaagcgcgaaatcgtttcctttgctgacttgtcttcacaccttgtgcacgctctactcacccgcgaagaccgctccttctatacccaccacggctacagcatcaaggctattttccgtgcccttgtcggcaccctcaccggtcgcgccttagggggcgggagtacgctgacccagcagatagcaggtcttctctattcagaccgcagcgaccgcagtctcaggcgtaagatcaaagagttgtggtgggcactccatatggagcggcgttattccaagaacgaaattatggagttgtatttgaaccgcgtctacttcggtggcggcacctacggcgtaggagcggctgcccgcttctactttggccattcggtacgtcagatgagcgcagcagaggcggcgctcttggttattttgctttctaacccggcacactacaatccctttgaatatcctaaccgcgctcaagaccgtcagcgttacgtactccatgaaatgacgcgccttggctatctcagtgaacaagaacgggatgagtcctacgagcactactgggcgcatttcgattacactcgcaccacaagttctgcgttctatgcccgtgcggataaggcgcgttggttttccgagtatgtgcggaggcagctggaccgcatgatgtacggcacgatgaatttgtaccaggacgggtataccgtgcataccacgtgcgatttgcgtcatcagttggttgcagagcagcaagttgagcaaacgctggagcaggccaatgcacacgtgcaaaaatcttctctcacacacgttgcgcgcagagaactgtacagcaatatcagcgagctattggggttggtgttcaacgttccgcagttgcacgtcggtgaccggcgcatgaaggcaaaaagcggcgcgtattaccgcagtacgctcagtcccctggtgaatgttatggcgctgatgttcggcctcgacaatcttaaaacgttgtctgacaaaggcgcctctctggtgcgcgacgaaattgcacgtaagcgggtggaaggtgcgctcatcgcgcttgagaacgataccggatacattacagctctcgtagggggcagcagattcggtgcttctaaccaagtgattcgtgcaacgcaaggattgttgcagccaggcagtgtatttaagcctctggtgtattctgcggcgttggatagcaaaaagctcacgatggcaacgcagttgcacgatgcaccgcaggtgttcagccgcaatggtgtttcgtatattcccaacaactatgggggaaaatggcagggggtagtgcttgcatggaaggcgcttgcgcagtcgctcaatattcctgctattcgtgtactggatatggtcggtttcgacgcggtaatccagcgtgcggcgacgctcctgcatataaccgatcggcaggagattgagcgcaccttcccacgcgtctatccgcttgcgttgggcgtagttgccctccggccgattcagcttgcgcgtgcatttgcagcgtttggaaatgggggcaaagcggtagaaccgattgcagtgcgttcagtggaggatcgtttagggcgggtgattttggatccagaacgggaagtgcgggcccgcctgcgcgcgcagggtgcggcaacgcaactgatctctgcggagaacgcggcgctcatgacgaatatgctagagaaaacggtaacgatggggacgttggcggtggcctctgagcgggggcgcgcatttacataccaagaccctgcaacggggcgatcgtttgttatgccggttgcggggaagacggggactacgcaaaactggtctgatgcgtgggcggttggatactctccttattacactgcagtgttgtggtttggctttgacaaaggagaccgatcgctcggattgcatagcacgggcgcgacgcttgcaggtcctccgtgggcgcgttttatgcgggctattcatcaggataagccgcaccgggcatttgttcgtcctgaaacagggttgatgtaccaggcggtgtgtgcaaaatcaggattgctgcctaccccgtactgtggggatgagcttgtttctctgtcatttttgcctggcacggtgcctgagcgcttttgttcgtaccatgaaagtgggaagatgcttgaggaactggctaaagaacggttgaaggaaagtggatacagcactgggttctggccggcagtgagcgaagaagggctgcatatagacccgcgcgtctttgaagatccgccactgggttcaccgggcgtgcagggggaggtgcttgtcccgagcaatccttttgcgccggtgcatccgcaggaagcgccgctttttgatgcgccgcatgtgcctgtgccgtctgcatccgacccgtcgcgtgacgctccagaggaggagtcagaagacgtgcaggacgatcctgctcgtggtgtgcagagtctggataccggtccgtaa

SEQ ID NO: 40395 - DNA, 927 bp, Treponema pallidum
atggtgcgcgcagcggtgtgctcctgcctatgtgtgtgtgtggcacatcctgcggtgtgcggtccctatccgttgatagcgcagctgcaagggcaggatgcgctctttcgtcagtatagcgatgacgtgcgcgctgcgcgcgtggcattggcgcaaggcaagcggggaaacgatttacccttgcgtttttatgcatatcgcgtaaaaaaggcagacaccatcatccgtatcgccgcgcgctgcggtattccctatgacgcggtggctagtttgaaccgtattgagacgctgcataccccccttgaggggcgtacgttgcttttgccaaccgttccgggactgtacgtttctgcggatccgcaccttcccttggagcggctcatttacgcactgataaaaaagggtcaagggccgtctttttttctttcccttccggggactgcgcagacaacgcatacgcgagaaaagcgggaggtagtgtgcgcgcctcaggccttgtttgacggaacggtgcgtgccttctttcttaagccgttttatcgttttccgttggcatccggaagactcacctcagggtttggcgcacgcaaaagcccgttcaccgggcggctgagttatcatccaggtatagatcttgccgctcccatgggcgcgctggtgtatgcgtgtgcgagcggacaggtggcgacgattgcgtacaatcgtctgtatggcaagtacgtgattttgcagcacacagacggaaggcacagcttatacggacatttgagtgcagtgcgcgtccgtgtacagcaaaaactgagtgtgggagcggtgatcggcaatgtgggatcgacaggcgcatcgaccgggccacacttgcattttgaggtacgggaagcgggggtaccccaaaatcctgagcgattcatggaaaagttccgctga

SEQ ID NO: 40396 - DNA, 1131 bp, Treponema pallidum
atgatagaacaagaaggaacatttccgcttcctctttttattattgatttgcagtggtttgccgctgaggatgaagggaggtcagaggatcctaccgaaacaaaactccgtaaagcacgagaagaaggacgtgttccgaaaagccaggatctaaatggagcgtttgtgatgctcttcacatcaacttccttgttcttgcttgcaccatttatattgagagagtgcatcggtgtactcaggtttttctttacgcgtgctactaccgcgtccatccagaatactggatggttttttgtatttgtgcggtattttatgaaacttgcacttccgatatcctttgttgcgctggtctctggcgttgcggcaaacattgtacaaaacaagaccgttttattttcggtaaagtcgattcgaccgcagtttaagaaaatatctccagatgtaattcgttttttcaaacgctcatttttttcaacagaagggcttttcaatttacttaaatctctcataaagattacagcgatattttttgtatcgtattttactatacgtaatgatctttttatgtttgtttctttattgggtgtgagtcttacccagagtattttctacattacatcccttgcgggtaaagttctcctcgaagtaagtttgctgttagtggtgttctcgcttcccgattatttcttccaaagaaggcaattcatcgattcgttaaaaatgtctcggcaggaagtgaaagaggagttaaaagagcaggaaggggacccgctcgtgagaagttatgttagaaagcagatgcaatctcttgttagagagtctgctcggaataccactgacgctgatgttgtgatcactaatccgactcattttgcagttgcggtgcaatatgagcctgcatacatgactgcgccgactgtggttgcgaaaggatctgatgggactgcataccgaatcaaacggttggcaaaagaggcaggtatcttgatagaagaaaacaaaccgcttgcacgtgcgttgtacacgcaggttgctatcgggagagaagttccctacgaatattttaatgctttagtgctgatttttaccaagctggataaatttaaaacacatgcacagcgtaagaggtaa

SEQ ID NO: 40397 - DNA, 462 bp, Treponema pallidum
atggtacagaacactaatatgcggtttgaaatgaccgccgctgagcgtacgcgtttagaaatggatgtgcgcgttataaacaagcagcttgaggcaggcgcgcgcagtgcgaagcgggagttaggaaaggacgattttttgcatctccttattgcgcagcttacccatcaggatcctactgcgcctatgcaggacacgcagtttattgcgcaaatggcgcaattttcctcgctcgagcagatggccaacatgagtgcgcaggtagagaagctcggaacgctgtttggcaatactgaagcgctgcaggcggtgggaaaaatggttgaagtcactgaggcggataacactgttcgtgggcttatcagtgcagtcacccgtgctgacaagccccaggtgcgggtggggtcgcactggtacgaatgggagcacgtcaaggtgattgcagatccgagtgcgtcgtag

SEQ ID NO: 40398 - DNA, 1644 bp, Treponema pallidum
atggaactgagaggactgctggcacgggccattggtatcggtgtggcggagtctgcgcctgctgcgcaggagactatttcagtcggtacgtcgtgtgcggcagcaccgtgttcttttgctcagtcgttgcatgaccacatgcgtggcgctgcgccacagagagtctctctttcccctgcgtcggctgcagtgcacgaaagggtgcgcgaggaagctgatgagcagcaaaccggttcgggtacccaacaggacgttttcacagaagagtctctttcggatgtatttctcgtggcgtacgagactggtttgcgtgctgcgcaggaggcggcgtcaggagtgcggccctttgattacgtgcgcgcggcgcaggaagcttcgggtggtgcgtcgtggccgtccgcgccggagtttcttgtagtagagcggcaggcaacttccgtaacgccgcggtctgttgtgccagagcagccctcatccggggaacgggggcgtgcggcgcgtcctgcaggactgtctcgcgcgtacgcgcagcgtgtgccggagactgcaccgcacgtgcaggacctgtgtgggcaggagtctggggagcatctgcgggaaagcgctggtgcgcgggggttgcgcggagggtctcttccttctggcgctgcccctgccctgctgcgtgagcaggggagcgaagccacgtacgcggcatcgtcggagtctgaagtctttgacgttattttcgatgcagaggtgcggcagcggttggtggcggctgctatccgtggtgagcctgttttgcagtctgggggagcaggcagctcctttggaggaaaggcaggtgcgtctcacgcctctgctgctgcaggggtgagcgccggtgcggcgttccagggggcgactgcgtacgggcagattcggcatggggattctcctcaggagttgggatctttttcggacgcgcgctttactgtgctggacgcgcgtaggcattcgcgcggtgcagggtcgggtgtgtcttcgcacgcgggcgccgtacttcctgcggcgcaggcgcagctgtcggctgcggacgtggatgcgggggcggaagagcacggtacggagtcgctgcgtgagggggagcgtgcaggcgtggagcgtgcgtttgaaggagttgcgcacgcgcgtgaggagacagcgcagtcgcaggggatccgaggatttgctaccactcaggcggctctttcggcgcacattcgtgcgcatagtgcagagcttgcgcaatctggacgggttgtgctgcgcgatcacggacgcggatacatcgacattgcgctgaagccagagcaccttggtgcggtgagcatacgtcttgccctgtcggagaataagcgggtggtgggtactattcacgttgcttctcaggaggcgtttgaagcttttcaggaaaatctgggggatttggcgcgtgcattcgaggcaaatggttttgacgctgcgcagtttgatgtgcagtggtttggcgctggtgcgcacgcagaggacgggcatttggcatcgcagacggcagcctacgctgctgcacagcgtcttgggggagcgggcgttgagcctgttgtgcaagaagtccattggcatgcgcagggagctgcgctcacgattgacgtgtttgcctaa

SEQ ID NO: 40399 - DNA, 1557 bp, Treponema pallidum
atgacatctgtacaaaatgtcgtaagcgatgccaagacgtgtgacgtaccggttgagtcagaaccagaagcgcgtacgtatcggccgcacgcactgctccaggaagaagcgtgccagcgcctggcgcagctccagggtaaagagctgaagatgaaggatcgcacgcagatccctttgcagcgtatgcgtatgctgccgccaaaaaagcggtcgctcctcatgcaggaggcggcgctgggttttacagagcagcaggcactggttgagtctcagcgttgtttgaattgtaaaaccaagccgtgcgtaaagggttgtccggtaggagtgccgattcctgagtttattgcgtgtgtccaaaggggagcctttaaggaagcagttgatatcattaagacgacgagtttactccctgcaatttgcggtcgtgtgtgcccgcatgagcgtcagtgtcaattgcagtgtaccgtgggaaagatgtttaaggatgtgtccaaggcggtgtcgattggtgcgcttgagcgttttgtcgctgactgggagcggcagcatggtcaaattacagttccgtactgtgcgccgtctacgcacaagaaagtggccgtcatcgggtcagggcctgcaggtcttgcagttgcctcagatacggcgcgtgcaggccattcggtaacggtgttcgaagcgctccacaaaccgggtggagtggtgacctatggtattcctgagtttcgcctgccgaaagaagtggtagtgacggaaattgaaacactcaagaaaatgggggtgacgttccggatgaactttttggtgggcagaacagcaacgctggaacagctgttctcgcagtacggttttgatgcagtttttatcgggaccggtgcgggattgccgcgctttatgaatattgagggtgaggaattgtgcggggtgtttgcagcaaacgactacctaacgcgtgcgacgctgatgaaggcgtatgacactgcgcatgcggacacgccggtgtatgcggcaaagtcagtggtggtagtcggtggagggaatgtggcggtagattcctcgcgtacggcgctccgtttaggggctgagcaggtgcactgtctgtacagaaaaacgcgtgcggatatgaccgcctgtgtggaggaaattgcacaggcagaagatgagggggtgacgtttcactttttgtgtcagaccacccgcattttgggggatgaagaggggaacgtgcgcgcggtagtgttccgcgattgtcaggaacagattgatgcaggagaacgtgtgtttctgccctgcggcgatgctgagtgtaaacttgctgcagacgcggtgatcgttgccgttgggaatggttcaaatccgctcatggcaaagacaacgcgcagtcttgcagtgagcgagcggggtactatcgtggtggacgaggatcaacggacgagcattccgggagtgtgggctgggggagacattgtcttaggagcggcaacggttattcgtgcgatggggcaggggcggcgtgcagcggcgtctataaacgcgtaccttgcgcaaaaagcgtaa

SEQ ID NO: 40400 - DNA, 843 bp, Treponema pallidum
gtgttcagcattctagaaaagaaacaattttctccgcaggtgttttacttgaaggtgcatgcacctgatattgcaaaaaatcgtgctgcaggacagtttgtgcttgttcaacttgatgacgaatacgctgagcgcataccgctaacgattgcggacgcgcatgcggatgaagggtggattgcgctagtgatccagactgttggcgccactactatgaggctgtgcgaaaaggaagtgggcgattccatctctgtagttctcggtccgttgggaaatccaactctcattgaaaatgtaggaactgtcgcctgcgttgcagggggtgttggggcagctccgctgtatcctattgcccaggcgcataaaagggctggaaatcacgtcattgtaatccttggggcgcgcaatcgggatttaattatttttgaagaggagatgcgcgcgcttgcagacgagctggtcattgtcacagacgacggctcatatggacgcaagggcttagtgactgagcccctgcgtgagctgtgcyagcgcgcgtcctgtccacaggaggtggttgctatcggtccgccgattatgatgaagttttgtgcggaaacgacgcgcccctttgggatccgcacggtcgtatctttgaacaccattatgattgacggcactggcatgtgcggtggctgtcgggtgaatgtaggttctgagataaaatttgtttgcgtggacggacctgaatttgacgggcatcaagttgattttgagagcatgatgcggagaatgagggcatttcaggcaagggaagcgcatgatgtccactgctgtaagatgaagcaccacgcggggaggtag

SEQ ID NO: 40401 - DNA, 1197 bp, Treponema pallidum
atgaaagtgttggatatgggaagacatgggctttttttactcctcattttttttatgctggttatcaccgtctttgcagtcttctttggtatgaagcgcgatccgcttgaatcctcactttctagcgacaatattctcaaggtgttgtttgtcattgaacacgagaacgttccaatctccagcaatgttgttgcgtattatcctgcaacgaggcgcgcggcaatgtttgatattccccataatatgggacttattctgcagagtcttggccgtacggatggcatcggttcgctttacagcgagcgtggtattgaggagtataaaagggaggtagaaaagttaacgggaattaacgttcctttttctgtagtgtgctcgctggataacttttctaaattgacagatttactctctggtctgtcggtgtttatccctacgcccatcgacgtgcacacagaacgtgcagggcatgtcctgttaccgtcaggatcagtgtctttggatggggataagatgcgtgattatcttttatacgaagacgaggatgagggagaaggggagtcagcatcgaggaaacagaaagctattttagctttgttgcgtagtgttaatgatcacagtgagttttttgttcattcaactcgtgctttttccttgaacaggctaatacgttctaacgttcggcgtgctgacttaaaaaagcttataggtgaattatctaagttggattcagaacgcctagtgccgcagcgtttttcagggactaaacgagtggtagacggcaaggtactcctttttccatctcgtgatggacagcaaattaaggaaatcgtgcgccagacgcttgcggtgcttgcgtcagagaatggtacggcctttgagcgtgtgtatgcgttggaaattcttaacggaactgaatcgcacggtcttgcgcgcacgacggcgaatatttaccaaggatttggttacgacgtagttcgcgttgataatgcattggagcaaagtgtgcaaaagacggtgctcgtcgatcgcattgggaatcctgcagtggctaaagtggtggcgcaggtgattcgttgtcagaatattgagacaactagcgcctcgcttgatgagtatggggtggaaacgggcatcgattttacgcttatcctggggaaggattttaatggatatctggtaaaggagggaacgtga

SEQ ID NO: 40402 - DNA, 567 bp, Treponema pallidum
gtggacgcgtacgcgcgcgcagtgctttcgccacctaggtatgagcattcgcgtcgtgtagcggagtttgggtgcatgctggtacggcggtatgcgttggaagcgcagcttgagccgcacgtttattgcgcgggtattgcgcacgatatgtgccgggagcattcggaagtgttcttgttgcgtgctgctgcgtgcgatggttttcccattgatgtaactgagcgtggtacgccattgctcttgcacgggcgcgcagccgcgtgtgtgttagcacaggaatttggcgtgcaggatgaggtgttgttgtctgcggtgcgctggcatacctttgggtgtgaagactttggtgtgttaggaaagattctttttatatcagacaaaattgagccagctcgtgcttgggcggcgtccttgcgcggtgcagtgtcaacgttaacgttagatgcgcttgctgcaaaagtagtgagtgcgagtattgtgtgcgcagagcgaaaacgtaccacgccccatccgcgtacgtgtgcgatgttgcgtgcactgggaaaggatgtaagtcaacccgcgtaa

SEQ ID NO: 40403 - DNA, 1131 bp, Treponema pallidum
atggccagttttgttgatgaggtgctgattcgtgtttcctctggtcggggtggaaatggctgtgtggcgtttcggcgggaaaagtatgtcccgcgcggcggccccgcggggggcgatggagggcgcggcggggacgttgtgttccaggtacggcgcaacatgcgcacgcttgtgcacctgaggtatggacgcgtgtttcgtgcaaagaatgggcaggatggagagggggcacgccgctttggtgcaaaggggcacgattgtgttataccgctgcctccgggttgtcttttaagggatgcgcagactcatgaggttttgcacgattttggtcatgcccatgaaggttgcgtgacgctcctttcgggtggaaggggtggttgggggaattatcatttccgtggcccagtgcagcaggctccgcaacgcgcgcattctgggcagccggggcaggaacgtgtggtgcacgttgaactgcgtattgtggcagacgttggctttgtggggctccccaacgcgggcaaatcttctttgctgaatttttttacccacgcgcggtcgcgcgttgccccttatcctttcactacccggattccttacttgggggtgctgcgtacgggggatgggcgcgacgtgatcctggcagatgtccctgggattctcgaacgcgcctcgcagggtgtcggcttggggttgcgctttctcaagcacttgacccgctgtgcggggcttgcatttctcattgatcttgcagatgagcgtgcgctgcatacatacgatttgctttgcaaggaattgtacgctttctcccctgtctttgagacaaaggcgcgcgtgctcgtaggtaccaagcttgatttgccgaatgcgcgtgagtgtttgcagcagcttcgtgcacagcacccatccactgaggtttgtggagtctcggtgcacaatcgctggggtttagatgaattgcaggaggcttttgtgcgtctctctgacgcaggtgcgggcgcgttgcgttcccctgtgtggcggaaccaagctcccagttttatgtacgctcagcttgaggatccggtgtgtcaggtgcgtgatgattttggggcaacggtgagcttgagcagaaaacgaaaagtgcgcggatga

SEQ ID NO: 40404 - DNA, 264 bp, Treponema pallidum
atggctcgaaagagaggtggcagtggatctaagaacgggcgcgattctaatccgaagtatttgggagtaaagttgttcggtggtcagcacgctcgtgctggttcgattttggtgcgccagcggggtacccgaattcacccgggagaaaatgtgggaagggggaaggacgatacgttgtttgctcttgctcctggggttgtgacctatcttcaaaggaaggggaggcgcctcgtttctgtgtgcgtggaaaaccggccttcttga

SEQ ID NO: 40405 - DNA, 327 bp, Treponema pallidum
gtgttgcttgaagtcggtgaccgagggcagtttttatctgcagttgcctctggtcatgctgcgcgtggaacacgaggcggtgatgttgtgtgtgcggcagttagtgtgcttttgcgcactgcggtgcttgggcttgagcgtttgggtcctcagatagaggcggcggatcggggttttctctcctttcgcgtgggggggtgtccggattccgcgttggctctcttgtgtttcactgcggagtttctagaacgtggtttacgtacgttgatgcaggagtatcccagttcggtgcatctttgcgtgcggaggggagtggtgtgtgcgtag

SEQ ID NO: 40406 - DNA, 318 bp, Treponema pallidum
gtgtacgcgctgattgaatacaagggcaagcagtataaggtggaacggggtagtagtatcgttgtagataatatctccgaagttgcgccgggcgggtgcatcgatgtgcgtgaggtgttgatgattggtggcgagggtttgacgcggattggttctccttatcttgaaggagtgggtgtgcgcgcggtggtgggggaatgttttcgcagtcggaagattaccgtgtacaagtataagagcaagaaggattaccaccgaactatcggtcatcggcagtggtacactcgcttgaccgttagtgacatcttgggggtgtag

SEQ ID NO: 40407 - DNA, 2706 bp, Treponema pallidum
atgaacattgccaaatccattcattttctgagcaataaagaggctctcgataagaggcttgaccgagggcttttggggattcggggtcgtcaggcggatgagttgtcaagtctggggttgcccgtgcttccgagcgtggttattgatgcgacagtctctcgtagtctgtatggggagaagcttcggtccgcgctaagtccgtatttaaggaagtttacgcttttaaacagaaaagagtatgcggatgcaaagaatcctatgctcctcaaggtggttttatcccccaatttggccatttcgaattatccggtattacataactttggtttgacacgggatactttcgcggggtttgccgagcgtgtcggggagcattttgcaacgcacgaggtgttcttccttttgaagggtgtatttggggtattgcttggtatcgcagaaagtgaggagaacaccaagggtgcttcggagtttgtcgaaaccctgaaggaaatagaggtttttttgcagggaggaaaatcttctccctctgggcgcgaggcgatgaatcggtatcgagccttgcttccagacggctttttcgatgatgcctacgttcagcttgaagaagcggtaaggcttgttagtaaactgctgtcgtttgaggaggatggggaagatggagttgccatccttattcagcctatggtctacgggaattatgggggaggcagctactcgggtcggtttttcagtaggaatattataactggagagaagaaacttcagggtcagtattttgaggagcggttcgacgaatgcgatgccgaaggcagtgatgtaaatgcgataaagccggcttatcttaagcagttgcaggatattgcgtggaaactggaggatcacagccgagagattcgggaggttcgctttactatcgaggcgggcagtttatggcttattgagcaaaaacctgtcgaagcgaagagcacaatctctttggtacggttgctgctcgacctgtacgagcgcgaggtggtggatgctgaatacgtggtcaagtcggtaaaaccgggtcagctgaacgagattttgcacccggtcattgatatgacgagtgtgacaggtttgaaatcctcgcagggggggattattggtgttcctggtgcggcggttgggcgagtgtactttaccgctgattccctcatcgaggcgtggcgtgtggcgaagatgggcggacaagatacacggtgtatcttgtgtatgcctgcaacgtacgcgggggacgttaaggcaattgaggtggcaactggtgttctttctaacgagggggggtactccgcccacgcttcggttgttgcccgtcagtatgggaagatctctttggtccgtccagatatgaagatttattcggacaaagcggtcgttgacggtatgactatcaacgagggcgattttgtaacgcttaatgttccttactacggggaatccaccctgtatatgggagctgcgcagctcattgagcctgatccagagacgtctggcctagtgagcttcatcgagcttgcgaagggttttgtgcgttcgtttcacgtgcgggcgaacgcggacagtccacacgatgcagagctcgcgctcgcctttggtgcgcagggtatcggactgtgtcgtacagagcatatgttcttcaaagaagatcggataaatgtgttccgccgtatgatcttctcggagaatgctgaggagcggacgggcagtctcaagcagttgcaaaagatgcagggagaggatttctacggcatcttcaaggtaatgcagggacatgaagtgactattcgccttctggatgctcctttgcacgagtttttgccgcacggggagagtgaagttagcaagtttttggagtatctcgagaaggtttgtggtaaaggtctgtcccgggaggagttgcaggagcggatctccatgctatctgaggtgaatcccatgctgggtcaccgtgggtgccgtattgcgatttcatacccggaaatctacgccatgcaggtgcgcgccgtgttcgaggcagtgtaccggttgcagaaagagaagatctcggtgtacccagagataatgatccccattgtcatgaattgccgtgagttaaagcagattgtgtatggtaaaaagattgaggggcacgcataccagggtatcggctcgatagaggaagaggtacgtcttgcgctcaaggcaaaggaggttgactataaggtgggtgctatgattgagctgcctgcagctgcgttgagtgcagacgagattgcgcgctacgcgcagtttttctcgtttgggactaatgacttgacgcagacaacgcttggactctccagagacgatttcaatacgtttatgccggactacacgatgtatgatttggttgacggaaacccctttgcgatactcgatgcgcgcgtgcgcgagttaattgaggttgctatgcagcgtggacggctggcacggccggatattcagctaggtttgtgtggggagcacggttcacggtcagaaaatattcgtttttgtatggaagtaggactagattacgtttcgtgttcgtcttactcggtgcctatcgctttacttgcaattgcacaggcggagattgaaaacgcagaaaaggaaggcaggaagcctgcatggcggggaaggtcttccgcgaagtcaggcggtaggcgcgctaggtaa

SEQ ID NO: 40408 - DNA, 210 bp, Treponema pallidum
gtggctcacataacggtggatgattctgagaatttagagaaggcaattaagcgcttcaagcgccaggtggagaaggaaggtattattcgcgagtggaagaaaaaagaattttatgagaagccttccacgcttctgaatcgcaagaagaaggcgttgcggcgcaagctgatgaagaaggggcgcaaggtcagcgactcaaggctgtactag

SEQ ID NO: 40409 - DNA, 1959 bp, Treponema pallidum
ttgtccgcaccgacctcctttcgagtgcatccgtgggacgctagcctaccctgcacaggcgtccacccctcctgggaagaggcccgacctgccgtgaacattacccgaagccgcgttgcggtctttatctcctccctgaccgctgtgcttctgctgctcaccgttcagtgcgcgcggtatatgctcatgcgtggcaacgagacaaaggaactgaacacactcactgaacgcggcgcgatcttggaccgaaatggccggtttcttgccgttggaaccaccgtctacaacctcagtgttaacaaaaatcttgtctcagacccacgcactgcagcccacgtgttagcacaggtccttgacctttcagaacaagatattgaagaaaaattccgcaccgcgcgcgctcacttcttttacctcaagaaaaaaatgagtgaaacggaaaagaaccttgtcgctcacgctcttaaggagcactccctgaaaggatttcgcctagaggcagtgcgcaaccgcatctatccagaaagtagcctagcgtccacggtcatcggatacgtaggtgatgacggaaggggactgagcggtatcgagtacaccttgcaggatgttctttctcctgccccgtaccacaccgggtatacgggcaaggggcatactgtcaccctctcgatcgaccgaaccatccagtacatgatggaaaaaatcgcagatactacgctccggcgtacccaggcagaaggactcatgttccttgcggtggaggcaaagacaggtcagattctatcctacgtcagcaagccgtctgctaacctttcacacttttcccaaagtacccctgccgaacgcttcgatcgccccgcccttttcatctatgagcctggctctgtgttcaaaattttttccatcgctgcactgttagaactcggggtaacttacacccacgacacgctccactgcgacggttccttctcctttacctccccctttttaaaaccaggtcaaaaaggccatctcatccgctgcctgcgcccacacggcaccatcagcgctgaagatatcatccggctttcgtgtaatgacggcatggcacaaattgctgaacgtgccgacaaccacagctttgagcaactattgcgcgcttttggatttggcgcgaaaacagaaattgagttgccgggggaaaccgtcggtctcttctctccctcagaacgctggtcccaccgcagcaagcacaccatcgcaatcggccaggaaattggcgtctctgccttgcaggttgtggctgccgctaccgcgctcgccaacgagggcgtaccgctcggcctctccctcctccatgaggtcactaccgccgaaggtaccgtggtgtaccggcacaaaaagaaacccaaaacacgcgttatctccgcagtaaatgcgcaaaaggtgttgcgatacatgcgcaccgccgcagaacttggcaccgggaaaaaggcgctcgtagacggggtgccgatcgcagtcaaaacaggcactgcgcaaatggcgcacagaaatggtcgtgggtacagcgacaccgactaccttgcaagttgcatcggccttttccccgcgcacgatccagaaattatcttatacattgccatcatccgtcctatcggacaagcctatggagagctcattgcagcgcctgtcatctctcaagcggcaaacgagattatcgactaccgcggtatggtccgtgccaacgccccgttaatccaacatagcggtctcatccatacgtcagaacggacacctccacggttaggaacccatatgccagacctcaccggtcaacctaaacgtttactcctggatattgcaaaacgcaccgacgtgcaccttgtccttacaggagaaggttatgtgtacgagcagcatccgcctgcgggcacacctctgacaaaaggaatgaccattgaactcaaactcaaataa

SEQ ID NO: 40410 - DNA, 1830 bp, Treponema pallidum
ttgcgcatcatcccgttctcggaatttaaagatcgcattgcaagtggggaaatcgtaaaggttgttgtcggttccccttactttgtcgggtacacttccgcgcgccctgcgccttctgcgcggggtttctcgttgctctctgagcgggaggctcctacctatcatgccatcggtgtcctctccgattcctttttgagcatgctcgatgagcggcaggtggtctacagtattaagccgcgcgagcgcaattacctcatagagacatttcaatatctctttccgctgctcatcctcttttttgtctggcgctttttctttaagcggatggcctcaaatgtaagcgggctggggagcagtattttctcagccggacacgcgcgctctgcggcggtggaagaaggaaaggtcaccacacgctttgcagacgttgcaggggtggatgaggcaaaagaagagctgatggaagtagttgattttctcaagttccctaaaaagtatactgaaatcggggggaaaattccccgcggggtgctgttggtcggtcccccagggacgggtaagacgttgcttgcacgcgcagtggcaggtgaggcgtcagtgcccttttttcgcatcagtggctcagacttcatcgaaatgtttgtggggattggcgcctcgcgtgtgcgcgatttattcaaacaagcgcgggagaaggcgccagggattatttttatcgatgagcttgacgcaattggaaaaagccgcctgaacgctatccattccaacgatgagcgggaacaaacgcttaaccagcttctggtagaaatggatgggtttgataacaccaccggtctcattttgcttgctgctaccaatcgccccgatgtgttagatcctgcgctcctacgccccggtcgttttgaccgacaggtttgcgtagatcggcccgatcttaagggaagagaggcaattctgcgtattcatgcgcagaacgtgaagttagcgccagaagtggatttgaaggcagtggcgcgcatcaccggtgggtattcaggtgctgatttggcaaacgtggtgaacgaggcagcgttgctcgcggtacggtctgggcgtgcgcaggtgattgaaacggatttggacgaagcggtcgaaaagacaatgataggattgcagaaaaaaagtcgggtaattcgagaagaagagcgccggattattgcgtatcacgagacaggacatgcccttgcaggtaccttcacgaagggtgcagacaaggtgcacaaaattacaattattccccggggcacctctgcgcttggatatacttttcacattcctgaagacgatcggcatattgttacggagcagcagttgttggcagaagtagatgtgctgctttcaggacgcgcagcggaatttgtagcctttggggaagtttcaactggtgcagggaacgatatttctcgcgcaacagacattgtccgcaagatgattacagattatgggatgagcgaaaagtttcaaaacgttgcacttactcgccgcggaaccgggtatctcgcggagccgcagttagcgcgcgagtattcggagtgcacacagcagtacgttgatgaggaagtggcgcgcgttctagctgagcgctaccgcgcggtggtagcactcttgacggagaaaaaagagctccttgagtacatcgcaacgcgccttttggagcgagaaaccatcgagcgcgacgagtttgaggaagttattcgctgcgaacacgacctagaggggctaaaaaagcgtctaagccagcagcaggaaggggcatctgcccctgcgcagggtcagtcgccaccttcctga

SEQ ID NO: 40411 - DNA, 2088 bp, Treponema pallidum
atgagtagaggtatttctaccttcaggaatatcggcatcagcgcgcacatagattctggaaagacaaccctttctgagcgcattctcttttactgtgatcgtattcacgccatccatgaggtgcgtggtaaagacggtgttggcgccaccatggacaacatggagcttgagcgggagcgcggtattaccatccagtctgcctccacccaggtccagtggaagggacacactataaacgtcattgacactcccgggcacgttgacttcaccatcgaggtggagcgctccttgcgcgttttagacggtgccgtcctcgtactctgttcggttgcaggcgtccagtcccagtccatcactgtcgaccggcagctccgccgctatcacgtgccccgtatctcatttatcaataagtgtgatcgtacgggtgccaaccctttcaaggtctgcgctcagctgcgcgaaaagctctcccttaacgcgcatcttatgcagttacccattgggcttgaagaccgtctagagggtgtcatcgatttaatttcgctcaaagccctttatttcgagggagaaagtggcgcgcacgtgcgtgaggcgcccattcccgaacagtatcaggcagatgtgaaaaagtaccgggatgaactcatcgatgcggcgtctttgttttctgacgagcttgctgaggcctaccttgaaggaactgagaccgatcaattgattcgagcggcagtacgtgcgggcaccattgcagaaaagtttgtcccggttttttgcggttctgcgtacaaaaataaaggtattcagccacttttggacgctatcacatactacctgccagatcctaccgaggtaactaataccgcgctcgatctggatagagccgaggagccagttaccctctccaccgatgcagacgcaccggtagttgcgctcgggtttaaactagaggatggcaaatacggccaactcacctatgtgcgtgtatatcaggggactatcaaaaaaggggctgagctttttaacgtccgcgcgcgcaagaaattcaaggtgggccgtttggtacggatgaactctaaccagatggaagacatcagtgagggaacccccggagacattgtggcgcttttcggcgtggactgcgcgtcgggagacaccttttgcagtggagatctgaattacgcaatgacttcgatgtttgttccagagccggtcatctcgctttccatcactcctaaggacaagcggtccgctgaccaagtttccaaggcgctgaaccggttcaccaaggaagatcctaccttccgcagcttcgtagatcctgagtctaaccaaactatcatccaggggatgggggagttgcacctggatgtgtacattgagcgcatgcgacgcgagtataagtgtgaggtggagacgggcatgccgcaggtggcgtatcgggaggcaattagtgcgcgcgcggattttaactacacccacaaaaagcaaaccggcggttccgggcagttcgggcgtgtggccggctttatagagcccatcgccgggcaggactatgagtttgtagatcaaatcaagggaggagtaatcccaaatgagtttatcccttcgtgtgacaaaggctttcgcacagcggtaaagaaaggaactcttattggttttccgattgtgggggtgcgcgttaccattaacgatgggcagtctcacccggttgactcctcagacatggcgttccaggcggcagcgattggtgcctttcgtgaagcgtacaatggggcaaagccagtagtcttagagccaatcatgcgagtgtcggtggaagggccccaggagttccaaggcagtgtctttgggttaattaaccagcggcggggagtggttgtatcgtcagcggacgatgaacaattttcccgcgtggacgcggaggtcccgctgagcgagatgttcgggttctccaccgtgctacgttcttccacacaaggtaaggctgagtattctatggagtttgctaaatacggcaaggcaccgcaaggtgtgacggactcgctcataaaggaataccaagagaaacgaaaagcagaacaaaggtaa

SEQ ID NO: 40412 - DNA, 1950 bp, Treponema pallidum
gtgcaaggggcgtggttgggagcccatagagaaagagctcccagagcgctggaacgctacggtgtccagcgctctttgtgtgtttttgtctctacaagaaagttccactttttgctacacttcccttctatggacgtgtcctttgaagagcttggtttgaatgaacaatcgcttgcagcggtgcgactcaaggggtttcggtgcccaactcccatccaggctgctgccattccccgactgttggcaggggatgcgaatatcatcgcaaaagcccgaaccgggactggaaaaacggccgccttcggcctcccccttatccaagaactgggaagcccgtgcgaacacccaggggccttagtgcttgttcctacaagggagctcgctgcgcaggtcgcaagcgaactgagctccctgaggatacaaaaaatacctcggattcacaccgtgtacggtggggtctccatcgcggagcagctgcgtaatctcgaacagggtggagagataatagtaggaacgaccgggcgcgtcatcgatcatattgagcgcggttctctcgagctgtcttatctgcgctacttcatattagacgaagcggatgagatgctaaacatgggtttcgttgaggatatagagtctatcttctctcatgcaaataaagacgcacgcgtccttatgttttctgccactatgcccaggcagatcctttctattgcctctaccttcatgggaagctacgaggttgttgaagaagtcactccagaagaggcgcgcccgctcattgaacaatttatgtgggttgtaagggacgctgacaaaatcgaggcgcttgtgcgccttattgatgtgagcgacaacttttacggtctggtgttctgtcaaaccaaggcggacgccgacactgttgcgaaatctctagacgaacgccattaccatgttgctgcacttcacggagatattccgcaaagccagcgagaaaaaattctcgagcgctttcgtacaaaacgagcgcgtatcctcgtcgccactgatgttgccgctcgcggcattgacatcgaaggaattacgcacgtggtgaactactccattcctcatgatagcgctacttacacgcaccgcgtcggcagaactggacgcgcaggatcacagggtatcgctatcagttttgtacgcccacacgagacacgacggatggagtatctgagtaaacactgtaatggcgaattgaaagctagtacggtacctttggtggagcacatccttactcaaaaggaggggcgtattttctcgtccctcaagactcatctttgccaattactctctgaaggggtgcacggaacctttacccgttttgcgcagcggctgctccaagaagaccttaaagctcgcgtggcagaagccctgggtacttccgccgacgttcctcaggaaccgaacgtgtcgcttgtcgccgcgctcctgcaaatccactacggtactgcgctggaccccaggcagtaccgggatattaaaacgattacgccagagacggcccgcgcacgtccccatgacgcggaaaaggcgtatgtgcgcattgagtacggaaaaaaaagctacctcactcggaaacgtgttgtgcagttcatctgtgccctggtaaaaatccccggtcatcttgtagatcgcgttgacataaccgaacgttgcgcgtttgcgcgcataccccgacgcgcagcggaggaagcagttcgcttatccaagaagcgcaaggacctgccgcgcgtttccttcgttgggcacgccagtcgcctaagaaataccgctacccctgcagaaaagtctacctatccaaggcgcctcccttccggagaaggcctaagggagcagatctcaaggagaacctcttcctctaagaaggcttctgggaaaccggaggattctcttccccctccccaagaacatcgccttgattga

SEQ ID NO: 40413 - DNA, 1782 bp, Treponema pallidum
atgtcacggcgagactatttgagaaaagagagattgactaataaacatacgtccgtacggcgcagtgtcccgcttcggacaattgatacgtatcccctgtttttgctatggtgggcgccgatgcaccttgtggctgtccttttgcagggtatcggaagccttggcttcatgctctttggtatgaagctgatgagtgacggtatccaaaagggtactggagaaagcctccacaaaattctccaagtgatgaccagtaactgtttcttcgcggtgctaaccggcatggcagttaccgctattgtgcagtcgtcaggggctacgacggttatgacgatttcttttattaacgcgggagtgctttctttgacgcagtcaatcggcgtaattcttggtgcgaatatcggtaccactgttactgcttggattgttgcgcttgtgggttttcagtttaagcttgcgtcaatcgctgtccccgcctttgggattggctattttctgactttttttaaacacttgcataaaggacatttgggcgagagcatcatgggctttggtcttctctttaccgggcttggtttgctctcttcgctcattcctccactttctgtagaagagctttccttccttaaaattgcagttgaggatcgtgcgctcagtgtttttgtaggactcctatcaggctttgtgttaacggtcatcttgcactcctcgtctgcaaccactgcgatcgtgttgactatggcgttcggtggtgtcatcggagtggagttcgctgcagcaagcgtattaggaagtaatgtgggctctaccattgatgctgcaattgcagccattgggagtaaattgaacgcacggagagctgccgcagtccacgtgctgtttaatgtgtttggtgcattggtttttttgatgttttttcatccagttttggcactcttgtgtgttttgactccaaagaattcgggttttgataacatcacagtgcggcttgcgctctttcacagtatgtttaacatcgtcaacactattattgtgtttcccttcactaagcaccttgcagcgtttgtagagtggttaattcgtcctcggtatgacgacgctccagaaaggtatcagcttgtttttcaagaaactgcggtaaaagagagcgctgaggcacatatttttcgtgcggaaattgaactgaaaaaaatgttttcaatagcacagggtatgcttgttactatccgtaagtccattcagggaacgtgtatgctttctactgatgagatcgtaacacgcctgacaaaggaagaggattatgcagatcaaatgcaggaacagctttcgcgctttctgattaaaacatcgcatctttctttgagcgagaaagcaaaacataacgtgcaattaatgttttccattgcagacgatattgaaaatattactgaccatttgtgtggtatagggttgtacttccataagagcatcaagggaaatgtaccgctcaagcgtgatgatatcgaggagttagtcccgtacgtcggcatggtggatgagtgcgttgactttgtgtattcgcacttgaaccgtccactggaagataagcaggtgttgcacgtaaaccaaatgacgcactctatcgaaagcaagggggcccatctaaaaggacttgtgcgcagacgtcttgagcagggtgcagatgtaaaggcggagctcctgtatatggacatcgtgcgtggtatagaagccgtcggtaactatgcccttagtatctcgcgctggcttgcacgaatgctgtag

SEQ ID NO: 40414 - DNA, 912 bp, Treponema pallidum
gtgatgagcacgtgtgcgcaggctttttatcgcttgtatgaaataattgtgcggttgcgtgcgccggacgggtgtgcgtgggatttggcacaaacgccggtaagtatgtgttcgtcctttttggaggagacgtatgaagcgcttgaggctatcctcgaagagggcgaggcacagcattcgtcgtatgctcacgttcaggaggagttgggggacgtgctgatgaatgtgtgtatgattgcatacatgtatgaacagcgaggggtgttctcgcttgcagatgttgtaactgcattaacggaaaagttaattcgacgtcacccccacgtatttgggcaaacagaaggatttcctggaccggaaaatccgaagcgagcacaaacagcacaggaggtgtttgatcagtgggaacggattaaaacacaggtggagcgtcgccgtgcagcttctccgttagagggcattcctcgaacggttcctcccctcatgcgcgcgtccaaaatgcaaaaaaacgcgtcgcgtgcgcgtcttttttgtccaacacgcacggaggtggtacgagaatgtgcgcgtacctttcgtgcactccgtgcgatgtcagagaattctgccgaacaatccgccactcaagcagcgcatgttgcagtaggtgcgctgttgactgcagtgatatcgtttgcacatcttgtgggggtagatccggtgctcgcccttatccgcgcaaatgcggacttcgtgcgccgcttttcgtgtgcctgttctatacctgccatttctggaggtacttctgtatttttgtctcgcgcgtgccataaaccacgtcgcgcacgcacgcgggcgtctgcggtgcgcaggcgcgcacggtcacggcgactgttttttactcgacacaagctggggaatatgctacggtag

SEQ ID NO: 40415 - DNA, 2040 bp, Treponema pallidum
gtgagggggtgtggtgtggataggacgggtggatacgtgcggcttgcgcttgcagcccctgcggtgcgtgttgcggactgtgcatacaatacccagcgtatgattcagacggtgcgtcgtgcagcttcatgcggtgtggacatactattgtttccccgtctttcgcttacagggtgtagctgtgcgtctctttttgctcaggatacgctgctttcggcagtctgcacgcacgtatctgcactgtgtgctggcactgctgattgtcagctgttagcgcttgtgagtgtgccctgttttttgcgcactcaggtgcgcgtgtgtactgcgcttgtcgcacgaggtcgtgttctagcactggttgtgcaggataccctggcggcgtgtggcgcgcaaaaaatgcaagtgccctgtgaggtcctgtacggtggtgcaccggtgccggtgtacgatgtgcagacgtgttttgaaagtgcagagggtcttttctctttttgtgttggtgctatggatggatcggtacctgccacgctggtgttgcaggcctacggtacgccaagtacggcgcagacaccggatatttttgctgcgcacgctgcggcatacagtgcacagcaccaatgtgcgtatgcgtacgtaaatgcggggtggggggagtctagtgctgatgcggtgtatggcgcggaaagtggtatttttgagtgtgggcagtgtgtggtccaagactcattgcaggagatgcgagaacggggggagcgtccggcgcacgcggtgcgtggactgcatgttagtgcggacgtagatgtgtctttggtacactttcgtcgtcgtgcgcgtagcggacataccactctgggtgcatcggctccctgcgtcacgcttcctgcaggcatatttgcagcgtcaaaggcgcacgccacgctgcggcgtcctcgcgtaccctgtcctttttttccgcctgcttttcaaaaatcgcaggatgcggtgcccccgctcacgggtgccgtgtgcctcgctgtttctgcaccgtcagacacgcaggacggttttttgcaaagaacgatagacttagccgcgcagggcgtggcactccgtcttgaacacatgggctgtaggcgcctggtggtgggtgtttcaggaggtgttgattcggcgtgtgcattgctaatatgcgcgcgcgcgttagattttctctcgattgcgcgtacacaactttatgcgctaacgcttcctggctttggtactacgtcaggaacgaaaggtgcggcgcaggagtttgcgcgtgcgctcggttgcactgtgcaagaaatttctattagcgcggcagtgacgcatcatctccatgatattgggcatacgatgcagcagtgtgacggtacgtatgagaatgcacaggcgcgcgaacggacgcagattttgttagatcgtgctaaccagcttgatgcgctcatgattggtacgggagatgcgtcagaaggtgcgcttggttgggaaacctttgggggcgatcacctttcgctgtacgcagtgaacgcatctttgcccaaaaccgtggtgcgagccttgatttcctatgctgggcgtgtacctgagcgttttgtgtgtgaaactgattctccctatgcaccgcgcggtgctgccttttctcgcgtttgtgcagctatagttgcacagccggtgagtcctgagctcatacctccttgtgatgatcgtattgtgcagtgtaccgaggagatgctcggtccttatgaattgcatgatttttttctgtatcacataacggtgaacggttttggtcctcgaaaactttttcgtgtggccgcgcatgcgtttggaaktgcgtattcttgcgcgcagctatgtgcagcgctgcgcgttttttttacccgcttgttttcacagcagttcaagcgttcttgtgtgcctgatgggcccggtcttacggaagtgaacctttcccctcgtgtgggtttttattttcccagcgacacttccggtgcgctatggcgcgcagagcttgagcagctggcttgtggggaatag

SEQ ID NO: 40416 - DNA, 1191 bp, Treponema pallidum
atggagacgttttttacctcagagtctgtgagtgagggtcatcctgataagctgtgcgaccagatttctgacgctgttcttgatgcctgtctttcgcaagatcctcacagttgtgttgcgtgcgaaacttttgcctccacgtcccttatcctgattggaggtgaaattagcacgcgggcgcatattaatcttacccaaattgcgcgtgatgttgccgctgacattggatatgtaagcgctgatgtcggtcttgatgcagcgtccatggctgttcttgatatgactcatcatcagtcgcctgatattgcgcagggggtgcacggtgcaggactgaaggagtttgcaggatcgcagggggcaggggatcaggggattatgtttggttttgcgtgccgcgagacgccggagtttatgcccgcccccctcatgtgcgcgcacgcggttgtgcgctatgctgccacgcttcgtcatgaacgccgtgtgccgtggctgcgtcctgatgcaaaaagtcaggttaccgtacaatacgagggacatcgaccggtacgtatcagtgcggttgtgttttctcagcagcatgatccgtcaccttcatacgaaaccattagagaaacgctcatagaggagatagtgcgtccggcgcttgcacctacaggtctgttagatgaaaacacgcgtttttttatcaatccaaccggtcgttttgtcattggcggtccctttggggacactggtttgaccgggagaaagatcatcgtagacacgtatgggggaatgggccgccatggaggaggctccttttcaggtaaggatgcatctaaggtagatcgttctgcagcgtatatggcgcgttatattgcaaaaaatattgtggcagccgaccttgctgagcgctgtgaggtgcagcttgcatacgcaatcggcgtaccatatccggtttcgctgcggatagaaacatttggaacggcgcgcgcatctgagtcacacatcacacacgcggtgaaagagatttttgatttaaccccagcgggtatcgtgcgcacgttggacctgtgtgcgcctcggtaccgctcgactgcagtgtatggtcactttgggcgcgaacagtttccttgggaacgcacagactgcgtgtgcgacttacagcgtgcggtgcgcccgttcgcgctctctggccagataaaagagtag

SEQ ID NO: 40417 - DNA, 2436 bp, Treponema pallidum
atgacgcgaaaattaatcaccgccgcactcccctatgtgaacaacgttccacatttgggaaatcttatccagggtctttctgcagacgttttcgcacgtttctgtcggatgcgcggctatcacacgtgttttgtatgtggtaccgacgaatacggcacggcaagcgaaacccgtgcggcagaacaaggtctcagtcctgcacaattgtgtgcgcactaccatgcactgcatcgcgacatctatcagtggtttgatctgtccttcgattattttgggcgcactacaagcgatgcgcatactgagcttacgcaagcgttgtttcgtcatttggatgcgcggggttttatcagtgaacatgaaagtgcgcaggcgtactgtctgcactgtgcacggtttcttgctgatcgctatttgcgcggtacctgtccccattgccgtaatgctgaggcgcgtgctgaccagtgcgagcactgtggagtgctccttgagccggaaacgctcctgaatgcgcgctgtgtgagctgtggcacggcgccggagtttcgccctacgcgtcatttgtatttaaatttgcctgcactggaaaaagcctaccgctcgtggttttgcaccacgaatcatctgtggactaaaaacgcggtgcgtatgactgaaggttggctacgtacgggattgcaggagcgtgcgatcacgcgcgatctgcgctggggggtgccagttcccaaagcaggatttgagcagaaggtattttatgtgtggttcgatgcgccagtcggttacatttccattactaagtgcggcacagaggcagcttcctcgcaagaagggggggggaccgacgatggcgtgaaagaaaaatggcagtcttggtggcttgatcagcaggatgtggagttggtccagtttgtggggaaggacaatattccctttcatacgctgtttttcccctgcatgctcatcggttccgggcagcggtggacgatgcttacgcgtctttctgcgacggagtatttgaattacgaaggggggaagttttctaagtctttaggggtgggcgtttttggttcggatgcaaaagaatcgggcattccctcagatctgtggcgtttttatctcctgtaccatagaccggaaaaaagcgatgcgcactttacctggcatgagtttcaggagcgtgtaaacagtgagttgattggtaatctgtgtaatctggtcaatcgtacgctcacctttgtggcgcgtacgtacgggggcgtggtccctgcgcaagatggagcgcgcagcacccgtgcgcaggtgatggaagaaacgcttgcgctccgcgaagcggtgcggaatactgcaaagcgcatgacagatttaatggagcaggtacagttgcgagaagcgtttagagaagtgtttgcgctctcagcgcgtgcgaataaggcgttgcaggatggtgcaccgtggaaaacgcgggcgcaggaccgtgaacgtgcagacgccttgatgcgtgagttatgctatgtgattcgggatgtgctgattttagcgcatccttttttgccgtggtacacgcagcaagcggcccgatttttgggtgttcagttgtcttcctgtgcaccagaggggggaggagctgtgtgtgctgcgaagaaagacgcggatacggcgcagccggacacagtgcaaccgaccctccgatggtcagacgtgggagaacgcaagggtttaacgcaggtgcatccgccggtgattttattccgtccgttggagacggaaactattgctgcgtatcgtgcccgctatgctggaacagccagggatggggcaggagtgagcgtaccgcgcactgcacagatgcccacgggaatgaataagaaagagacagacgctcaacaaaagaaggaggagcgtgaaatgccccctccctcagatactgcacggttatctgcatttttttctgagcgcgttgtactgaaagtagcacgagtgttgcaggtggagcgtcatccgaatgcggatatgctttttgttgaaacattagatgatggctctggcgttgagcgcgttattgtttctggtcttgtgccttatatggctgcagatgcgttgcgtggtgcgcacgtgcttattgtggataatctgcagccgcgctcactgcgtggggtacggtcttgcggcatgctgttggccgcagagtatgtagatgcgcagggcacaaaggcaattgaattggtgcaggcgccatgggctctgcccggtgaacgcgcaacacttgcgagtgcgccgccggtcattacaccgcacgggtctgccgttatcgatgcggacgcttttttttctgtgcctattcgtgtggtaaattatgcagtagaagttgcaggtgagccgctcatggttggaggaaggccactggtaatgcagcgagtgaaagagggaactgtcggctag

SEQ ID NO: 40418 - DNA, 237 bp, Treponema pallidum
gtggatgagttgttcttaagaatgagggcattagtggcagagaaattagaggtggaggaggcgtccatcacgcttgattcctccttccgaggagatctcggtgctgatagcctagatacctacgagttggtctatgcgatcgaagaggagatggggattactatccccgacgaaaaagcaaacgagttcgaaacagtcagagatgcgtacgagttcatcaagtccaaagtgacatga

SEQ ID NO: 40419 - DNA, 1299 bp, Treponema pallidum
gtgagtgacattgcatgcattgaagcgcgcgagatcatcgattctcggggaaaccccactgtcgaagtggatgtctcgctcagtgacggtagctttggccgtgcgtgtgttccttcaggggcgtctaccggagagttcgaggcgctcgaaatgcgtgatggagacaaggagcgctataacggtaagggtgttctcaaggccgttggaactgtcaacacgctcattgctgatacgctcgaaggtatggatgcgctcaaccagggtgagatagatcacgcgatgcggaatctggacggcactgacaataagtcaaagcttggtgcgaatgctatgcttggcgtctccatggcttgtgcgcgtgctgctgcagactttctgggtgttcctctctaccgttacctcggtggtgtgcacacttttcgcatgccggtccctatggccaacattatcaatggggggaagcattctgataataaaattgactttcaagagtttatggttatgcccatcggcgctgcgtccatgcgcgaagcggtgcgcatgaccgcagaggtgttccacgcgttaaagggcctgcttgccgccgacggcaaagctacgtcagttggtgatgaaggtggttttgcgcctgatttggataacgagcaagcccttgagtacattatgaaagcgatcgcaaaagccggccttgcgccgcggaaggatgtgtgtattgcgcttgactgtgcgtcttctgagttattcgatgaaggagatcggagagggtacaagttttggaagtcgaatccggggaagctgttcacagcacaggaaatgattgatctgtacaagaagtggattgctacgtatccgattgtgtctatcgaggatccgcttgaccaaaacgactgggcaggttacgtgcagctcacgaaagagttgggagacaaagtccaaattgtgggagatgatttttttgtaaccaacactgggcgtctggcccgaggtatcaaagaaggatcgtgcaattcgattctgataaaacttaatcagattggcacggtcacagaaactgtcgacgcggtgcgtatggctcagaacgcaggctacgcggcggtgatttcacatcgctcgggtgagacagaggatgcgtttatcgcagacttagcagtggcacttgagacaggtcaaatcaaaaccggctcgatgagtcgcagtgaccgggtggcgaagtataaccagttgatgcgcattgaggaagagttgggtgcacaggcgcgctactacggggcaaagacctttgagcggtttggttgttag

SEQ ID NO: 40420 - DNA, 807 bp, Treponema pallidum
atgaaaggaaaaacggtgagcgctgcgctcgtagggaaactcattgccctaagcgtaggggtggttgcgtgtactcaggtgaaggatgaaacggtgggggtaggggtgctgtctgaaccgcacgcgcgcttacttgagatcgcaaaagaagaagtgaagaagcagcacatcgaactacgtattgtagagtttacaaactacgtggcgctgaacgaggcggtaatgcggggggatattctgatgaatttctttcagcatgtgccccatatgcagcaatttaaccaggagcacaacggggacctggtaagtgttggaaacgtgcacgtagagccactggcgttatactctagaacgtatcggcatgtgagtgatttccccgccggcgcggtcattgccattccaaatgattcgtccaacgaggcacgtgcactcagacttttggaagcagcagggttcattcggatgcgtgcgggttcaggactgtttgccacagtagaggatgtgcagcaaaatgtgcgcaatgtggtacttcaggaggtggaaagtgcccttctgccgcgcgtctttgatcaggtagatggtgcggtgattaatggaaattacgcaataatggctggtctttctgcacggcgtgacgggcttgcagtggaacctgatgcctcagcctacgcgaatgtgctggtggtaaaacgaggaaacgaggctgatgcgcgcgtgcaggcggtgctccgtgcgttgtgtggtgggcgcgtgcgtacgtatctgaaggaacgctacaagggtggggaggtggcgcctgctttgtag

SEQ ID NO: 40421 - DNA, 906 bp, Treponema pallidum
gtggtgtcgaggcgtgcacaagcggggaatatgcgagaattggagcatttcgtgcagtctcttgctacggctgcttgcgcgctgggcgcgggcctcacgcaggttgcgacgtcagagcgcgtgtggtatctcctgcgcttcgttgccgtgctgtgcatcacctctgccttctttcgaatgctgaggcgcggtgtgcgccgtgttgttgcaaggcggttatccgcgcagacgcagcattttgtgttcaaaacactaaactatctctcgttcacggtgatgacgtttaccgcctttcactggttggggatcaacgtgagcgcgctgctaggggccgcggggatagcgggagtagcgcttggatttgcggcgcaaacgtcggtttcaaacgtcatatcagggctgtttgtcatgaccgaacgtgcttttcgaattcaagacgtgatagaaattgacggtatcgtcggtgcagtgcagtcaattaatttgctttcggtggcgctcaaaacgctcgatgggcagtatgtgcgcgtgcccaacgaaacgatcctcaaagcgaaccttgttaactattcgcactgtcctcatcgccgagtgaaaacggaagtttccgtggcgtatggaagtgacctgcgccgggtgcaacagctcttgctagatgttgcgacacgtaaccggtttgtgctttcggatcctgcgccggcggttttgtggaatgccttcgctgactcgggtattgacgtaacgctcctgacctggactcacattgagcatttcaatgatttgcgcaatgctatcttcgtggatatcgacgaatgcttcaaacaggcgggcattgaggttccctttccgcatgtggacgtacgggtgcagggggcgtgcgatgcgccacgtgcggaaacggtgtga

SEQ ID NO: 40422 - DNA, 1893 bp, Treponema pallidum
atggatttgtcgctgcttcgctccctcactgggccccacgatcttaagagtctctcccccgagcaggtgcgcgcgctcgcgcaggaggtacgccaggagatcttgcgcgttgtcagtgccaatggtggtcatcttgccagtaacctcggtgtcgtcgagctcaccatcgcactccaccgcgtcttttcctgtccccacgacgttgtcgtttgggatgtcggtcatcagtgctacgcgcacaagctcctcactggacgcgcagggcgcttccataccctccgccagaaggatggtatttcggggttcccgcggcgcgatgaaagcccgtacgacgcttttggtaccggtcactcttccacggcactttctgccgcaagtggtatcctcagcgccctacgataccggggtaaatcaggtaaggtagtcgctgtcgtaggagacggcgcactcaccgcgggcctcgccttcgaggccctcctgaatgtgggccgttcctgcagtgatctcatcgtcatcctcaacgacaacaaaatgtccattagccccaatacggggtccttttcccgctacctgagtaccctcacggtaaaaggtccataccagaagctcaaaacgcggcttcgccgcgcgctccagactgtcccactcgtcggtcgccccgcctgccgcgccctcagccgcctgaaacgaagtgcaagaacgcttttgtaccagtcaaatattttcgcagactttggattcgagtacgtcggtcccttaaatggacaccatatcgaagatcttgagcgcgtactcaacgacgctaaaaaactcacccgtcccactctcctccacgtgcagactgtaaagggaaaaggctacccctttgcggagcagaatcctaccgatttccacggcgtaggaccgtttaaccttgcagaaggaatagtagaaaaaaaggatgcgctcacctttaccgaagccttctcccataccctcctaaatgcagcgcgtactgatgaccgtgttgtcgctatcaccgctgctatgactggcggcaccgggcttggattgttttcccatatataccctgaacgcttcttcgatgttggcattgctgagcaacatgcggtcacgttcgccgcagggcttgcatgcgccggcgtaaaacctgtcgttgccgtctacagtacgtttttgcagcgcgccgttgatcaggttattcacgatgttgctgtgcagaatctgccggtcatttttgcgcttgaccgcgcaggtgccgtaccccacgatggggaaacacaccagggcctgtttgatctcagcattcttcgcgctgttccgaacataaacatcctgtgccctgcgtcggcgcacgagctttcgttgctctttggctgggcgcttgcacaggacacccccgtagctatccgctatcctaaggcgttatgtccacctgaagaagacggattcagtacacctgtacataccggacgcggcgtccttatcacccgagagaatgagtgcaatgtactgttagtgtgcacagggggcgtttttcccgaggtaaccgctgcggccaacactcttgcgcgaaagggcatatttgcagatatctacaacgtgcgcttcgtaaagccggtagacgaagattactttttagatcttgtaggtcgctaccgttccgttctttttgtcgaagacggcgtaaaaatcggaggaattgcagaagcgctccaggcactcttgaacaccaggcacccggctccgtgcagcgacgtgcttgcttttcaggacatgttctacccgcatggttcgcgcgcgcaggtactcgccgcagcaggcctttctgcaccgcatattgccgcacgcgcagaatggctgttagcccattcagttgggcagattcggtga

SEQ ID NO: 40423 - DNA, 378 bp, Treponema pallidum
atgatcattggcgtgggaatagacatagtagaaatagaacgattcgtatcttggacacacaacgtgcgcctgctccgtcgcttctttcatcaagaggagattgtagacttttttaaaaaccacatgcgagcgcagtttcttgccacgcgctttgccgcaaaggaagcatttggaaaggcactcggtacgggactcagaaacatggagctaaggaatattcgggtgtgtcaaaatggatggggtaagccgagactagaagtctacggtgctgcacaggctatgttggctgcaacaggaggcacgcatatacaggtgtcgctaacgcatgagagagaagtcgcctcagccatcgtgattatcgagggagaaccgctatga

SEQ ID NO: 40424 - DNA, 843 bp, Treponema pallidum
atgaatgatgtgcgcaaaattctcttgcgtatttcgtacgatggaacacgattttgcggatggcaaaaacaggtctcaggctcacgggaacgtgctccctctgtccaaggtgagttggaaaaagttgctgagaaaattcaccaccaaaagatagcagtcatcggttcagggagaacagactctggcgtacacgcagtaggacaggcagcacatttttgtacccccatgagaaatatactcgcgtatcgctttatccctgcatttaattcgctgctcccgcactccattcgcattacagacgcacgcgaagtctcctctcaactccacgcacgcttctctgccgtcatgcgcacgtaccgttaccacctccactgcgcacccgtcgcatacgcgcacgaactgccttactgctggcacattgcgagaatgcccgatatacacttgctcaatcaatatgctgcaacactcaagggagaactagactgcacaagctttgctgctgcaggagataaaagtgcgagtaaatcgcgttatttttacgacacacacttttctttcaaccatcgcgtactgaccttcgaaatctctgctaatgcctttctctggaaaatggtgcgctctcttacaggaaccctactacactgcgaaaagaagcggtgctccgtgcgcgaattcgtccgcattttgcacgcgaaagacaggcgcttgcagggcccaccgcaccgccgcatgggctattcctatggaacatccgttaccccgaacacttactccgtgcagaataggaacaccctcgcacgtgaactggcatccacaggcaatgcaaggtggaagacgtattaa

SEQ ID NO: 40425 - DNA, 1770 bp, Treponema pallidum
gtgcaggatctgtgtgagatgtggcggcacgccgtcgcccgggtgctttctcaactgcaggggcctgccgttgagccggtcgaaggtgcgcagttagttatggaagagccgccggagccgggtatgggggacatagcttttcctctattcctttttgcaaagcgtgtgcgcaggagtcctgcacagcttgcacagcagttgtgcacactgcttgaagaagacacgtccatgtgtgcgtatggcacgccgcaggcgcgaggaccctatcttaatgtctttttaaataaggagtgtgtagctgcgcatacgcttgatgctatctttgcgcagggggagcgctatggccacacgcagtacttacagggcaaacgtatcatggttgagttctctagtcccaatactaacaagccgttgcatgtaggtcatctgcgcaataacgcgattggggaaagcctttcgcgtattattgcgttctgtggtgcggatgtgttcaaggtaaatatcatcaatgatcgcggagtacatatctgtaaatctatgtgcgcgtatcaaaaattcgcccatggaaaaacacctgcgcataccggcatcaagtccgatcgctttgtgggagattggtacgtgcagtttaaccgttacgcacagcagtacccggaagaagcagagcacgatgtgcgtgacctgttacagcgctgggaaagtgcagatccgcacgtgcgtgcgctgtggagaacaatgaacgaatgggcgttgcgcggtatcaaacaaacatatgagcgaacgggcatatcttttgataaactttattttgaaagcgaaacttataccaagggacgtgaagaggttagacgtggtttggcctgcggcgttttttatcagatggaggacaactctatttgggtggatttgtcttctctaggcttagacaaaaaggcgttgcttcgctctgacggcaccactatgtacattacgcaggatattggcacggcgatttttcgcgcacaggactggccctttgatcaattgctgtatgttgtgggaaacgagcagaactaccactttaaggtattgttctttgtgcttaggttgctcggttatccgtgggcgcagcagttgcatcacgtctcttatggcatggtcaacttgccccatgggcgtatgaagagtcgagaggggacggtagtagatgcagacgatatcttggatcgtctgcacagtgcggcagaagaggaaattgcaaaaaagggacgggaaaatgcactgaaacacgcacagtgtattgcagagaatgttgccatcgccgcgcttcattattttttattgcaagtcagtcctcaaaaggatatggtgtttcaccccgaagagtctttgtcttttaacggaaacactggtccctatttacagtatatgggtgctcgcatctcttctcttttaaagaaggttcaggaagatgtggagcaaaagggacctcgtgaagtccggtgtgaccctgcattgctcacgcacgaagctgagtgggagttggtgaaggcgcttgcacgtttccctgcgtgtgtcacgcgcgctgcacagggacatgatccgagcgttattaccgggtatctctatacactctcaaaaagcttcagtcgcttctatcatgattgtcccattctgtgtgaagcacgaccggactacgcgtgtgcaaggcttgaacttgtgcgtgcggtgcgcatagtgctgagaacagctatgcgtctggtgctgattccttttcttgaagagatgtaa

SEQ ID NO: 40426 - DNA, 1251 bp, Treponema pallidum
atgcgcggtataatcggctccatgaatcctgcgcttgcgcgtcttcaggcgcgtggttttattagacaatgtactgatctttcggcgctttcggcgcgtatggatgcaggcccactcaccttttatgtcggtgtagatccaactggcagtagtttgcacgttgggcacatgctccctatgtttgcgctaaagcatttgtgtgatgcggggcaccgcggttgcgtgctcatcggtggaggtaccgcgcgtattggggatccctccggcaaaaccagtatgcgcaagatgctcgattatgcaacgctcgatgcgtacgcgggagcgatagttgcgcagctggatcattttctttccttcgatcacaggcatgtgttctatgtgaataatcgtgattggttggcacatttgaattacattgatttcttgcgagaggttggggcgcatttttctgtaaacaaaatgcttacctatgaggcgtacaagaaacgcctggagacaggactttcctttcttgaatttaattatcagctattgcagagctatgattttttaacgctcagtgatcgctacgcggtagagttacaaattggcggcgatgatcaatggggcaacattgttgccggggcggatttggttcgaagagtgcgcggaaaaaccgtgcatgggttgacctttccgctcattacccgggcggatgggcaaaaaatgggcaagaccgagcaaggtgcgctcttcttagacccggctttggtgtctccctatgactttttccaatactggcgaaatactccggatgaagatgtgcggcgtttcttgctcctgtttacctttttgtctgtgcgcgatgtcgaggcgatattgactcagggaattaattgtgcaaaggagctgttggcatacgaggtaacgcgcctcatgcacggaacggctgtcgcgcaggtggcgttgcagggagcgcgcgcggcattcggcgggtgtggcgataagtgtgcattgccgacgttcgagctgacacagtgcacgttgcaagttgggatcaaagtgactgatttgtttgtacaggttggattgtgtactacgaagagtgatgcacggcgcttgattgcacaaggaggagcttttgtcgggctccagcgcgtggcagatatcggtgcggtaattgaccagtcagcgttggatttggacgggacggtaatagttcgcgcggggaaaaaacgcgtggtgcgcatcgtcactgacgtgcttgagtag

SEQ ID NO: 40427 - DNA, 1779 bp, Treponema pallidum
ttgggcctctgtgtagaagagaatatcaccatgctgcaaaaacgctcagataccctcgaccgtctgcgtcacagtctggcgcacgttatggcagaggccgttcaagctctcttccccggcaccaagctcgcggtggggccgcctatcgattacgggttttactatgacttctcacctccccgtcccctgtgcgatgcagacctagcccccattgaagagaaaatgcgcgccatcttgcgtgcggggtgtccctttgtcaaagaggtggtttcgcgtcctgacgcgcttgctcgttttaaagacgagccattcaagcaagagctcatcgaacgcatcagcgcagacgacacgctcagtctctaccactccggcgcgttcactgacctgtgccggggtcctcacgtgcagtctatgcgagacattaatccgcacgcctttaaactcacgagcatcgctggggcctattggcgcggtaatgagcgcggcccccagctgacgcgcatctacggcactgcctgggaatctgaagaagatttgcacacataccttcgcatgcaggatgaagcaaaacgccgagatcaccgtaagctcggtcctgcactcggtctctttcacttggacgaagaaaatcctggccaggtcttttggcaccctgaggggtggaccctctacgtggccatccagcagtacttgcgccgcgtcatgcacgaagacgggtacgcagaggtgcatactccctttgtcatgccccaaagcctttgggaacgctcggggcactgggacaaataccgcgccaacatgtacctgaccgaaggcgagaagcgttcttttgcgctcaagcccatgaattgtcccggacatgtcgaaatcttcaagcaaaaaacacgcagttaccgtgatctcccgctccgtctttcggagtttggctcgtgcacccgcaatgaaccgtcaggctccctgcatggagttatgcgcgtacgtggctttgtacaagacgatgcccatatcttttgtactgaggcgcaaatcgcatcggaggtcacccgtttctgtcgcctccttgcgcgggtatatgctgactttggctttgcacaggagcagatccgcgtcaagttttctacgcgcccagagcagcgcatcggagacgacgccacctgggaccgggccgaacgcgcattggcagaagcatgtgaagcagcaggcctttcgtacgagcacgcaccgggagaaggagcgttctatggaccaaagttggagtttgcacttatagatacactcgaacgcgagtggcagtgcggcaccattcaggtagactatcagttgccctcgtgcgagcgcttgaacgcagagtatgtgggggaggacaaccaacggcacatgccagtgatactccaccgcacggtgattgggtctctagaacggttcatcggtattctcattgaacactacgggggtgcattccccccatggctcgcaccggtgcaggcagtggtgattccggttgcccctgccttcctcgaatatgcgcagcacgttgcacgggagctgtgcgcccgttcgctccgcgtgcaggcagacgtgagcgcagagcgcatgaacgcaaagatccgcactgcccaaacgcagaaagtgccctatctgctcatagttggcgagcgggagctgcgcgcgcagcaggtagcggtgcgtccgcgcacagggccccagcactcaatggggctctcagccttttccacctttttgctcgcgaagctagagacgcgcgcgctgcacgcctag

SEQ ID NO: 40428 - DNA, 1665 bp, Treponema pallidum
atgcgccgcatgataacagtgacgggtatgagtgtgcagttttctgacaaacctctttttaaaggtgttgatttaaagtttgttgcagggaattgctatggagtcattggagcgaacggggcaggtaagtcaacttttttaaaagtcctttccggtgaactcgaacatcatcagggaagtatcgctatcgcatccggcgcgcgcgtcgcagttctgcgtcaagatcatttttccttcgatcagcacacggtgaaagataccgtatgcatggggcatcctgcgctctatcgagtgatgaaggagcgggaagctctttacgcaaagagtgattttagtgaagcagatgggttgaaggcttcagaattggaaggtgagttttcggatttgaatggctgggaggcagaaaattgcattgaacaaatgctttctgggttgggtgtagatgaggcacaccatgatcggatgatgtgcgaattggacgaaagccagaaggtacgtgtactcctagcgcaggcgttgtttggtaatcccgatgtgcttttgctcgatgagccgacaaacggtttggatttgtactctattgcgtggttggaagaatttctcattgaattccccaacactgtgattgtagtttcgcatgataggcattttttaaatagcgtgtgtacgcatatttgcgatatcgattatgggaagattcgtttgtactcgggcaattacgatttttggtatcagatgagtcagattatgcagcggcaggttaaggatcagcagaagaagcgtgaagaaaagatgaaggacctgagggagtttattttgcgcttcgcttctaacgcagccaaaagccggcaggcgacgagtcgtaaaaagatatatgacaaattggtgctggaagagattgaggtgactggtcgaaagtttccctatgtgcattttaaaccacggcgtgaaattgggaatcacgtattgtcgtgcgatggactgcgctatgccgctgaggaccgaatgcagggaggttcatgtgagctttttacagacatgagctttacagttgggcgcacagacaaaatcgctttcgtcggtcaagaacaccgcgcgaagaccatattgtttgatattcttgctggagaaaagcaggcacatgccggctctttccgttggggacagacggtatctgttgggtatatgggaaaggatacggcgcggtattttgattgtgatctttctatcacggattggttgcgccaattctctgatgatcaagatgaaacctacgtacgcggttttttaggcaggatgctttttacaggcgaggattcgctcaaatctgtgcgtgtactttctggaggggaaaaagtacgctgcatgcttagtaaattaatgctttctgggagcaatgttttgatattggacgagccgaccaatcatttggacctagaagcaattgcaagtctgaatgaggcgttggtgcagtttcccggcgtgattttatttaattcgcatgaccatgagtttgtcagctctgttgcaaaccgcattgtggaaattacgccgcgcgggattatcgatcgtatgatggactttgattcttatgtaaagagtgaggatatcaacgccacgcgcgcgcagctctacggcggtagcgtacagcagctacggatatag

SEQ ID NO: 40429 - DNA, 1458 bp, Treponema pallidum
gtgccctctgcagacacgatagctcggcgcgttgccggagacagtgggaacgctggggggcggacattacttcctgtgggggtttcgcgtgaatcggtgcagctgttagaacggctgcaaaacgcgaaccgtcaggtaactgccgaagtgctgccttcagtagtgacgctggatgtggtggagaccagaaaggttcgggtacgtgatccgtttggcggttttccgtggtttttctttcgtggtcctgaaggtccgggtgcggggcctggcggtggttctggaaacaaaggggaagctgaggaacgggagtacaaaacggagggacttggttctggagtcattgtaaagaagacagggaagacgcattacgtgcttaccaactatcacgtggcgggtaaggctaatgagatagagattaaactgcacgatggcagaatcgtaaaaggtaaacttgtcggtggtgaccagcgcaaggacatcgcgctggtctcctttgaggacgcagacccaaatatccgtgttgccgtccttggtgactcggatgcagtacgggtaggagacattgtgttcgcagttggctctcctcttgggtacacttccactgtaacgcaggggattatcagtgcgctgggtcgctttgggggaccgggcaacaatattaatgattttattcaaacagatgcggccataaaccagggcaattccgggggaccaatggtcaatatttatggcgaagtgattgggattaacgcgtggattgcctcctcaagtgggggatcgcaagggattggtttttcaattcctatcaataatgtgaagtcggatatcgaatcatttatccagtacgggcaggtgaagtacgggtggttaggcgtgcagctggtggcaacggatgcggacaccgtagcatcgcttggtattgcaaagggtacaaaaggggtgcttgcggcggaaattttcttaggttctcctgcgcacaaggggggactgaaaccgggcgattactgtgtaaaactgaacggaaaagaagtaaaggatgtaaatcagtttgtgcgggatgtcggcgcgctgcgcattgggcaaacagcagtattcgatttaattcgcggtggtgtgccgatgacgctttcggtgcgcattacggagcgtgatgaaaaaatagtaaatgactactcaaagctttggcctgggttcatcccactgccgcttacggaggccgtgcgtaaacgtttggatttgaaagcgtcggtgcgtggtgtgctagttagcaacgcgcagagcaaaagccctgcggcgctgatgggattgaagtcggcggacatagtagtggcggtcaatgatcaaagagtctcgagcgtgcgtgagttttacgcggtgcttgcacgtcagacgagggaggtgtggtttgacgtgttgcgcgatgggcaaacgctttctaccgtgcgatttcggttttag

SEQ ID NO: 40430 - DNA, 1053 bp, Treponema pallidum
atgagagttgcaatcaatggttttgggcgtatcgggcgtctcgtactccaggccatggcggagcagaagctgttggggaaagagttcgacgtggcggcagttgtagacctttccaccgatgcgcgctactttgcctatcagctaaagtatgactccgtgcagggcaaaatgggttctagtctcagtgctcctgccgaggatatcctcgaggtgggcgggcatcggatcaagtgtgtctgcggtcgcggcttaaagccttcccaacttccctggaaggatcttggtattgaggtggttattgaggccaccggcatttacgcgaatgagtcttcatacggtcaccttgaagcaggagcaaagcgagtcatcatcagtgctccggctaagagctcggatgcgtctaagccggtgaagactattgtaatgggggtgaacgagcatgagttcgatcctgctgagcacaaggtcgtctccaacgcgagctgcactaccaactgtctcgcgccggtagtgcacgtctttctcaaagagggagtcggtattgaaacgggactgatgacgactatccactcctataccgcaacgcaaaaaactgtagatggggtttctttgaaggactggcgcggaggccgcgctgcagcggttaacattatcccttccaccactggagctgcgaaagcggtaggcgaagtgctgccgtctacgagaggtaagttgacggggatggccttccgtgtcccgacaccaaccggttccgtggtggatctaaccttccgcacggaaaaagagacgagcgttgcggacctcaacgcgatgctcaagaaggcgtcggagtcctatctgcggggtgtcctgcagtattgcgacgaggatattgtatccgcggacgtcatccacaaccagtactcctccatctacgacagcagggcgacgctgcagaacaacctcccgaacgagaagcgcttcttcaaggtagtgtcctggtatgacaacgagtggggttactcaaaccgtgtggtggatttgcttaagttcatctcgcagaagcggtag

SEQ ID NO: 40431 - DNA, 369 bp, Treponema pallidum
atgtctcgatcgttgagtagtaacggcagagtgcgccggagaaagaggattttaaagttagccaagggctttcggggtaggtgtggcacgaattacaaggcggcgaaggatgcggtctcgaaggctcttgcgcatagctatgttgcgcggagggataggaaggggagtatgcgcaggttgtggatcagtcgcatcaatgcatcggttcgtacgcaggggttgagctattctcgctttatgaatggtctcttgcaggctgggattgcgcttaatcgcaaggttctctccaatatggcaattgaggatccaggtgcgtttcagacggtgatcgatgcttctaagaaagctttggggggtggagcgtgctaa

SEQ ID NO: 40432 - DNA, 201 bp, Treponema pallidum
atggctaagatgaaaacgaaaagcgcagcagcaaagcgttttagtgtaaccggggctggtaaggtaaagttcaaaaagatgaacctgcgtcacattttgacgaaaaaggccccgaaacgcaaaaggaaattacgtcatgcgggttttctgtcaaaagttgagcttaaagtggtgaagcggaagctgttgccttacgcgtag

SEQ ID NO: 40433 - DNA, 540 bp, Treponema pallidum
atgtactggggaggatcgttggcggataacaaaagcttgcggattaatggaagtattcgggtacgagaagtgaggttggttgacgctgtagggcagcagtgtggggtggtgcccacccctgaggcgctgagaatggcacgggatatcaatcttgatttagtagaggtcgctccgcaggcgagtccgccggtgtgcaagatcctggactatgggaagtatcgctttgagatgggcaaaaagttgcgtgactcgaaaaagcgacagagattgcagacgctcaaggaggtgcgtatgcaaccgaagatcaacgaccatgacatggcgtttaaggccaagcatatacagcggtttctcgatgaaggggataaggtgaaagtgactatccgctttcgtggaagggagcttgcgcataccgatctgggttttaacgtgttacagaatgtgcttggccgtctggtgtgtgggtatagtgttgagaagcaggcagcaatggaaggtcggtctatgtccatgacgctcactccgaagtcaaagaaatga

SEQ ID NO: 40434 - DNA, 1908 bp, Treponema pallidum
atgtgtggaatcgttgggatggtggcggggcgtgatgtctcaggtctcttgcttgaggggctgcgtcgtcttgaataccgcgggtatgattctgcagggatcgctgtcgttggctcggactgtgcgctccgccttttacgctgtgagggtcgtgttcagtcgctctgcgcgctattaggtcagagtcctctttgcgggaccatgggcattgcgcacacccggtgggcaacgcacggcaagccgtgtgcagcgaatgcgcatccgcattgttctgaatccgttgcgatagttcacaacggtattgttgaaaaccatcggtctttgcgtgaaatgctagtgacccgtggctatttttttcattcacaaactgatagcgaggtgctcgcgcatcttttgcactgggagttgcggtacacggcgcacctcctgcttgcggtaaaaaaagtgttgacgcaggttcggggtacctacgggttactttgcatggacgctgcatctcctgggcggttgattgctgcgcgttctggcagtccgttggcggtaggactcggctgtggggaaaattttgttacgtcagacccgcttgcgcttgcgcatgttacgcagcgttttttgtatcttgaggaaggagacatcgcagacgtccaccgagatagcgtgtgcgtccacgacgcgcagggaaacgttgtggcgcgtcctgttgttacgtatcagatgcagctttgtacgcaggataagggtacgcaccgtcaccatatgcatcaagaaatatggcagcagccacacgctatacggcatacgctgaatgcctatatgtcgttttcttcgtcttctcgcgcacaggtgcggacgttcggggaggaccgggtcttggacggtacctcgtgtaagacgtttgagcggctgtttagacggataacacgggtgcgcattatcgcgtgtggtacctcgtaccatgcagggttagtggcgcgttactggtttgaggcatttgcaggggtgggatgtcaggtggagattgcctcagagtaccgctatcgcacgagcgtcgtgcacgcgcgtgaaatagtactgacgatttctcagtcgggagaaacggctgacaccattgccgcactgcgcctggcaaaaacgcaagggtatctctgtgcgattgccatttgcaacggggcacgttccacgttggtgcgtgagtcggacgcagtgctgctcacccacgcggggtcagaaataggggttgcttcaacgaagtcttttaccacccagctggtgtgcttgctcgtgctcacccgcatgattgcgcaggcaaaaaagatactcacgcaggagcccgaggacgcgctctctgcggcgctccagcgactgcctcaggatgtggagcacgtgcttgagtgtgaggcagacgttgcgcggtgcgcgcggcattttgtgcatgcgcagcatgcgctctttttggggcgtggggaattgtatccgattgcaattgaatcggcgctcaagctgaaagaaatttcgtacatccatgccgaagcatacgcagcgggggagctaaagcatgggccccttgcattagtggacgcgcagatgccggtggttgcaatcgcgccggcgtcacctggcgtcctgtttgaaaaaatggcctcaaacatcgaggaagttcgcgcgcgcggcgggatgctctacatctttacggacgtgccggagcgttttggcccggtatgcacgcccgaggcggacgcgccggaaggggcgtgcagtcagatagtcaccgtaccttcggtatctccccttaccgcgccgattttttacgccgtaccgctgcagctgttggcataccacattgccctgctcaaggggactgacattgaccagccgcggaacctggcaaaatcggtgacggtcgagtaa

SEQ ID NO: 40435 - DNA, 1482 bp, Treponema pallidum
gtgagcagaaaacatcatataccctgtaccgtgatgattctgaatataatgatgagcgtgtttgtgacgttctgtacacctgtccggtgtgatttaacagcacagagagcatattccctttcggcacacaccattaagctttttgagagtgtcgaaagtactgtggaaataacgtggttttattccaccgatgtagataggtacattcctaccgtcatatatgtgagagatttgcttaaagagtacgctcatcagctgagtaagcagtgtgcagtagcgatgaaggatattaatctcctttctcagtctttgaggaaagaacttggatttgttgctcggcgcgttacgtatacgcgtaacactgccagcatagcgtacgatgcgtattctgcaatacttgttgaatatcgtggtatggctcgtgccgtaccctttgtgtctgacaccaaaaggctggagtatgacatcgcgcgtttgatcatccagatgcagcaggaaatgagtgcagatatgatgtcccgtgggatatatgttcttgctccaccagaaagtttaagtaccacatatgcccatgtattaccgcgtttgcaatctgaaggattgctcccagagattctctctatttctttgcctcagctagatacccgtattccacttttgattttaggttctggctacgtggatgaacacgccgtaaccttacttgatgcttttttgcagaagggaggaaacgcattgtgctttgtatcaggaaatagcgtgcaactcaatgatcaatggactgttgaggaaaagcgccatgattttcttattaatctcctgagcacgtacggaattactattaactcagatctcattctcgacgagcaaagttttgctgtatcgttaccttcagtttacgaaactcaatacgatagagtgtcttatccgttctggccagttgttactttgaaaccgtatacgcacggagtacctgtaatggtacaagcgggaattcagttccttcgattattttggccctcgtcaatacgagtttcttttcctgcccgtgtatttgagtctacgagtaatcattctctgtgtatgactgcgccttttaatattgatccttctgttgatcacctgaaagatcttgcaaaaggtaaaatgcccgctccccaggcatttgttgcatttcgtgattaccctggaaagctcatggtagtgtccgatgagtacatggtcagtgcaattgtggaacatacgcacaacggagaaaatcttgatttcatgataaactgtattcagtggctgtgtggtaacgatggtttacttatgctgaaaagcaagaatcccgcgtggcttccattgaaatctttccgtgatgaacaaaagttcgcacgcattgtgcaccgtgcgcgctatctgaatatcgtagctatccctgtgcttataggaatgctgtttgtggtgatgcagattctttatcggagaaaacggtga

SEQ ID NO: 40436 - DNA, 807 bp, Treponema pallidum
atggaagtacttcgtgtaaccagtttaacgaaacattatggctccaggcgccatccggtacgtgggtgtgaagacgtaaccttttgtgttgaaaggggacaggtgtgcgggatattggggttgaacggtgcagggaaaagcactgtacttcgcgtgattggtgggttgattcatccgtcttcgggggaagtgtatgcgtgtcattgttctttatcacgctacccggtagggtatcggcgtcatattggtgttctgcatgagcagaatccgctatacgcagatatgacggttgagcaacatattctttttgttgcccgcatatttcaacttgccgatggggaggcacgcaccgctgaaatgatagaattattccagttgcagtctgttgcacacagacgtgtgcgcaatctttctaaaggatataaacagagggttgggcttgcgcaggcattggtacaccgtcccaaactccttgtcttagatgagcctctttctggtttggatattgtatatctgaaggaattccataaagagattgttgcgcaaaacaataatcttgctgtggtgttttctacgcacgcggtgcaggagatcgaagcgttgtgcgacgtgtttgtcttattgcatgcaggacatgttcttttctcaggaaatagagcgcaaatagcagcgcgcatcgtgcgagaatttcctgagaaaaagcaaacagtagcattgcaccttgaaacaggaacctttatcgcttttgtatttgagcagtatatgcaatggcagagtgcacaggatgctgcgtgctatgcagtgtaa

SEQ ID NO: 40437 - DNA, 1089 bp, Treponema pallidum
gtgtacgtgtgcgaggtagtgttcaaacacatcctggtgggcgtgctgtgctttttcttggttttttttgtgaacaacgtactgctttttgcgcagacattacttaccaagcacgtgagcgctgcggacgtggtccggctgttgctgtattccattcccgctgcgttgatttacgttactccttttgccgtgttggtcggttccctcttggggttggggcggctgcgtaacaaccttgaactgcttgcgctgcaagtgctgggcgtttcgccgcggtttttgatattccctcttttgtcgattggtttgtgcagtgcgctttttgtatttgtttttagcgacgtggtggtacctgcaagctttatacgattaaggcaggtgtattggcgcgtactcagttccgtgccatccttgggatttgaatctcacacaactagaaaacacaatggggttatactgtcggttggtgaagtatttcactccgttatgtatcaacttttaattgtcgacaaaagcgattcccgtagtttgaaggttgtgagtagtagaaagtccgtactcgaatcgagcgcagatcaaactgtaccgtttacgatacgaatgcatgatccttgtatgctcattgtatatcgcacccgcccccgtatttgcgatctcatttacggtggaagagctgactatcacgtgcatacgcagcaaacacaaccagagtattttatgggattggggccgggtggcttttcgacctgtagtttataccgggagatacaggaaaaaataaaagcaaaggaaaacccgagacatatcgcgacgtaccaattggaattccaaaaaaaattttctcacccgataagcgtagtgctttttatttttttgtcttttggtttgagtacacttagcaatatttcttcccaggggaaaggatttgtaggagggcttattgttgtactagggtattggattatctctatcggaggacaagaacttgcgttgaggcttagtattgttccttcccttgcactgtggattccaaacgccgcattgttttttactgcattgattttgtcaatgagaaaatctgcagtatga

SEQ ID NO: 40438 - DNA, 2109 bp, Treponema pallidum
atgaaacacagcataaccggcactattggggaccacccccttctccttgaaagtgggtatctggcgcggcaagcgaacgggtccgtgtatttacagtgtgaaggtacggcgattctcgcgaccgtatgctcctctgctcagcgacaggaagggctcgactatgtcccgctcactgttgacttcaacgaaaagtattatgcggtggggaagatgcctggcggcttcatcaagcgtgaaggccgtccgaaagacagagagattctcatttcgcgcctcattgatcgtccgatgcggccgctctttgaaaaggagtttggacgtgatatacacgttgtccctacgtgcatatcgtcggatatggtccatcctcatgacgtcttggctattgttgccagttcagctgccgttactctttcggatatccccttccatggaccggttgctgcagtccgcgttgcatatctgaacggttcctatgttattaatcctaccttttctcagattgatgccgccagtatggaggttgtcgttgcaggcactaggcagggcattaccatggtggaaggtggtgcgcgagaggtgtccgaggacctcatgctcggcgcgctcgaacaggcacaagagcatattaaagccctttgcgatatgcaggagcgtctgcgtggactgtgtggcaaggagaaacagacggttatcccttcttctgcgcagcttgtaggtcgcgatcgtatttatgagctcgcctatccgcgtcttgcgcaggctttgtatgcacaggggaagggtgagcggcgcagtgcctgcgacgcggtgaagcgtgatgttgcacagcagtatgctgctcagcttgagaacgatgtgcagcgcaggttgttcgacgcgttgttccacgagatggagtatgagatactacggctgaacattcttgacaggggtttgcgcatcgatggccgtgccattgatgccattcggcccatcgcctgtgaggtcggggtgttgccgcgtccgcatgggtctgcggtgtttacccggggggagactcaatcgctcgcggtggtcacgctcggtgctatgtcggacgggcaagtgtacgacgacatcgaaggggatagacgggagaattttatccttcactataattttcctcctttttcagtgggggaaatagggagaatgggggttggtcggagggagattgggcacgggtgtctagcgcatcgttccctctcggcagtcattccggatccagaacagtttccttacaccgtgcgtgtggtttcagaaattttggagtcgaatggatcttcctccatggcgactgtgtgctcagggacgctttctcttctccatgcaggggtcccaatcaaaaagcctgttgcgggaatcgcgatggggctcatcaccgatggcgtgcgatatgcgattctttcggatattttgggtgaggaggaccatctcggtgatatggatttcaaggtagcaggtacgtgtgacggcattaccggttttcagatggatgtgaaggtagaggcggtgtctgcgtctctgatgaaggaggctttgcagcaagctcgtgtaggtaggctccatattctttctgtcatgaatcagacaatcagcgcaccgagcgtgcacatttctcgctatgcgccgcatattgagagttttaaaatagcggttgaaaaaatcggcgcgctcatcggtcctggggggaaaaccgttaagtcgctttctgaccagtatcgggtgactatcaacactgatagtgacggtaccgtaaccgtctccggaagggatgcgcagtccgttttcgacgcaaaggtcgccgtggtgggccttactgaagatcctcgggtagggagggtgtatcagggtgtagtgaaacgaatcgtagagttcggtgcttttgtggagatctttccagggaaggaaggactctgccacgtttcaaagctgtcgcgcagccgcgtgtccaaagtcagcgatgtgctgcaagagggtcagcggatatgtgtgaagttgattgatatcgacaggatgggtcgtttgaatctttcctatatcgatgctcttgaggggaagtctggaggtctggacacgacgaaatga

SEQ ID NO: 40439 - DNA, 270 bp, Treponema pallidum
atggcactgacaaaggaacgtactgcttcggtagtgcagcagtacggctcaggagaaaaggatacaggatcttcgagtgtgcagatcgctcttctcactgagaggattaggcagttgactgaccactgtaaggttcatccgaaggacaaaagtagcaaccgggggttgctcgttctggtggggcgtcgtcgtcgcctgttgagatattcccggcgcgtgagtatgggggcgtatcgttcgcttgtcaaaagcctcggtttgaggaagtag

SEQ ID NO: 40440 - DNA, 828 bp, Treponema pallidum
gtgcgcatttttcgttggtctcagttgcaggagggtgcatgtatagcgtgtgatcggggagcagcaatatcggtgggggggtttgacggtcctcaccggggacatgcttttctcttcgataaggtgtttgccgctgcgtgcgctcctgtggccgatcgggcgcggtgcaccgggctgatcacctttactcatcctcccaggaagcacaaaacctcttcttacgagggggatctgtcaacgctgcgtttgcgactccgttattttcgtgcgcgcggctttgatttcgtcgtgctcattgacttttccaaggattttgctagaatcccgggtggtgtcttcttcaacaccctgttgcgtgcagtgagggtgtgctacctcgcagttggtgtcgactttcggtgtggacatgggctggacaccggggtccgtgagctgcgtcggcttggtgatgcgcatagctttgtctgcgacgcggtgggtcactacactctcgagggagttcgggtgagttcgagcgcggtacgccgtgcggtgcgctgcgcagactttgagagcgcgcggcgtctgctggggcgtgcgttttcgcttgacggggaggtaattccctggcagcagagcggggggtgtgcccgcacgttgtgcgccgagcgtgggcgtgtgagtcagacgcttccacctgagggcgagtatgcggtacgccttgtacaggggagtggggtgggtctgcgtgcgcagcttagtgtgggttcctctctcgtgcagctgaggctcggtaccgaggcgctgtcgcatgggcgggaggcgcttgactctatcgagttcgagtag

SEQ ID NO: 40441 - DNA, 1101 bp, Treponema pallidum
gtgtgcagactgagcatgcctgacgctattgttcctttcgcaaaggtttccggtcttacgagttttgcggcactggcacaggtcaggcgtcttctgggagtaaaaaaggtagggcatacggggacgcttgatcgctttgctgatgggctgctgttgcttttggtagggggctttaccaaactcgcgccggtgatgactcgcttggaaaagagttacgaggctcgtatccagtttggggtacaaacagacactctagatccggagggggctgtcgtgcggtgctccttgttcccaacatttgcgcgcgtgcgtgcggcgctgcctcacttcactgggagtattgatcaggtgccgcctgaatattcggcgctaaaattcggaggtgtgcgtgcgtccgaccgggtgcggcgtggggaagcagtgtgcatgaaggctcggcgtgtgttcgtctttgacttgcaggtactaggttgcgaggcggatctgggtgaattcaaaaagacgcaggcggggaggggggctgcgattgctgatcttgatctgacgcgcgtgcgtgctgtaacgctgtacgtacgttgttcggcaggcttctacgtgcgtgcacttgcgcgcgacatagcagccgcttgcggctcttgcgcgtatgtttcacatttacggagaacacgcattggaccctttgatcttgcacaggcggcgggtgtgtctcgtctcgggtcctggacatggggcaaagagcgtgcgtcttgcggtgccgcttgctttgatgtgggtgctccaccgcctccgtcctcaggcggcgtggcgaccgattcagtctctttcgggtgtgaagacttgacggtgcgtgagattaagcaggcagtggttagctgtgatgtggactttgcgaatcgtattggacttacggcgtgttcagtgcatgcgcagtatgcgtcgcggtttttgcatggggaaagaatacgcgcatgttggttccagtcgtttggtacgcgaaggcccggggaacgtgcgttggtgttttccgagggtcgctgtcttggattaataaggaaagcggcgaatgggttttcgtatgatgcggtattttgtacggagtga

SEQ ID NO: 40442 - DNA, 2529 bp, Treponema pallidum
gtggttgccaaagttactgctgcgcggcgtgtgtcgtgcgcggatgaaaatcgcacgccgggcgacgcgagtcaggcgactatttctgccgcgcccgaagataaaaagcaaggtttccctgacattcgggaggatggcgttgcgcgtggtgtatctgcctcgtgtggcgctgtgcagaacgctgcgtctgcacaggttcccggtgcccgtactccgggggttataggcgttcctgttgccagcaaaacggtggaggaagcaaggggtgggggagctaagcgggtaatcactaagcgtgtgggtggggttttcgtgcttgatgactctgcggcacgccctaaccgaaaggcaggaaaccttgcatctggcgcgcgcctttctcggtttagccgcagtgatcgtcagcgcagcgatgggttttctggtactcaagcgcgtgctaacgcaggtggtgtgcggcgtggagagggccgtccgtttgctcgcgatttcagtcgtgggtccacgggtgggtatcggcccgcagtgagaggtccggctcggccggctggacgtgttggttcgggtccaagagggccggcgcccctgcaagtaggtgctggtaagcctgcccagaacaaaaggtctttccggggcagaaagcagcagacatatcagtatcagcataaggatcgtcttgaactggaagaaaagcttctccagcagaagaagaaaaataaggaaaagcttgcggcggtcccgcgctctgttgagatcatggagtccgtttcggttgcagatctcgcaaagaagatgaatttaaaagcctcagagcttatcggtaagctttttggcatgggcatgatggttaccatgaatcagtctatcgatgcggacaccgccacgattcttgcttctgagtacgggtgtgaggtaaggattgtcagtctttacgatgaaacaattatcgaaagtgtaggtgacgagcatgcggtgctccgcgcacgtccgccagtagtgactgttatgggacatgttgatcacggaaaaactaaaacgctcgatgccatcagaagtacgcgcgttgctgagggggagtttggcggtatcacgcagcatattggtgcttatgcagtctctactccgaaaggctcaattacctttttggacacgccaggtcacgaagcttttaccatgatgcgcgcgcgtggagcagaaattaccgatattgtggtgctcatcgtagctgcagacgatggggtaatgccccagacgatcgaagcgatcaatcacgcaaaggcttcgaaggttcccattattgttgcaatcaacaagattgaccgtgcggatgcgaacccgaataaggtcatgacgcgccttgctgagcttggcttagctccagaggagtggggtggtgataccatgtacgtgagtatttctgcgctgcaaggtattgggttagatctgttgctagatgccatcatgctgcaggcggaggtgatggagcttcgtgcaaattacgggtgttgtgcagaagggcgcattatagagtctaggattgatcacgggcgggggattgtcgcgagcgttatcgtgcgtcgtggggtgcttcgtgttggtgacacgtacgttgcaggtgtgtactcagggcgtgtgcgggcaatttttaatgatcaaggggagaagattcaggaggcgactcctagtatgcccgttgaaattttagggcttgagggaatgcccaatgcgggtgatccttttcaggttacggattctgagcgtattgcacggcaaatttcgcttaagcgtcaggagttgaggcgttacgaaaatgcgcgcaacgtgaaaaggataacgcttgacaagctgtacgagtctatcgagaagggttcggtttcggagttcaaggttattattaagggggacgtgcaaggatcggttgaagcgctcaagcaatcgcttgaaaaactttctaccgatgaggtgcagttgcgtgtcattcattcgtcggttggtgcgataaatgattctgatgttatgctcgcagctgctgattcaaatgtgaccattgttggttttaatgtacgtcccactccccaggctgcggttcttgcagaaagggaaagagtagaaatcaaaaagtatactgtcatctaccaggcggtggaggagatggagcgagctatggagggtatgctcaaaccatccctcaaagaggtagtgctcggttcggcggaggtgcgcaaggtgttcaagattcccaaagtgggaagcgttgcaggagtatatgtgcttgaaggggtaatgaagaggaacgccattgttcacgttgtgcgcgatgggattgtcctgcattcggggaaggtttcctcattgcggagagaaaaggatgatgtgaaagaggtacacagcggctttgagtgtggggttggagttgaaaattattttgattttagggagcgtgatcggcttgaatgcgcggagatgaaggaggtgtcgaggaaactgaaggatgccgctctttccgatgcggcgcgcttacagggatga

SEQ ID NO: 40443 - DNA, 1458 bp, Treponema pallidum
atgttcggcgtcagtaacgatgacattagaaagtatgcgcaggagaaggggcttgatgaagactttgcctttaaaatcgtcgagcaaacactgaaggccgcttataagactacatttaagacagatgaaaacgccgtcgttacctttggtgaggagcgggtgtgtatctatgcgcgcaagcgcgtggttgaagaggtgtacgaccgcgtctcggaagtggatttgtctacggcacttgagcttgatcccactacttctttagatagcgaagtgctggtggagcttgagtccgaagattttaagcgtggatctgtgcaggctgccgtccagcgtatcactgagctgagcagagaaattcaaaaggacgctctgtatgctgagtacaagagcaaagaaggagagattatcgttggctactaccaacgcgcgcgaaacgagcatatctacgttgacctaggaaaagttgagggcctgatgccaaagtcgcaccagctgccccaggatgattatcgtcaaaacgaccgcattaagtcgcttgtgcgtgaggtgcgcaaacatccaaagtcgagcgttgtccagctcattctttcacgaactgactctgcttttgtaaaagagctgctcgccgtggaggtgccggagatctacgacggtattgttgaggtggcaaaaatagtgcgggagccagggtaccgtacaaagatcgccgtcaccagtaggcgtgatgatgtggatcctgttggtgcctgcgtaggtcctcggggcatacgcatccgcatggttattaaagaattgaatgacgagaagatagatgtgcttgagtattctccggatccagttattttcatcaaaaatgcgctttctcctgctgaggtgctgaacgtcgtggtacttgatgaggagaagcgttctgcacttgccattgttgctgaaagccagctgtctatcgcgataggaaagcaaggtttgaacgtgcgtttagcgaatcggcttgtggactggaatatcgatgtgaagacagagagtcagtttgaagagatggatgtgtacactgacacgcgtcgtgcggcagaaaatctttttgataacgattatcaagaagagtctgagttttcttcatacgtgggatttacgccggagctcattaagattctgcaggacaacggtatccaagacgtacagactttggtagatttgggcgaggaaggcttgcgtgcgcttgagggcatggacgaggcgcacgtacaagaattgctcgccgccattgaggagaattttgaagttgtcgaggagggggaggaggcttcagttacatcttctcccgggactggtggtgatgaggatcaggcgttgcagtgtcctgagtgtggggtgcgcattactactgacatgagtgagtgtcctcactgtggtattggcctcagctttgagtttgaatacgaagagaacgaggaatag

SEQ ID NO: 40444 - DNA, 471 bp, Treponema pallidum
gtgaacttcagtcctaatacgctgggatcctttgaaagctgcgctgaggttgtgaggtcgctcgggtgtgcccttgtcgatctgcagtggagcgtttccgctgtttctcggcgtgtgcagcaggctcagggaagggcgcgtgccgttatttacagcgcagggggagtgacgctcgacgtgtgcgcgcgcgttcatcgaatactggtgccgcgccttcaggctctcggtggtgtgcgcactgtttttcttgaagtcggctcccccggggagcgggttattcgcaacgccgcggagttttccatctttttaggggagactgtgaaggtctggttttgcacggggcagtttcaggttgggactcttgcgtttgcggatgagacttgccttaccctgaccgccggcggagtgcccgttactatcccgtatgttcagctaacaaaagcgcagttacatcctgcagtccgcgcttga

SEQ ID NO: 40445 - DNA, 3720 bp, Treponema pallidum
gtgactgattttcttttttctttttttcaaagtttgaatgcagagcagcggcgtgcagttttttcttcgcataatgcagttgttaccgcaggtgcaggttcgggtaagacgaaggttattagcgcgcggtatatacacctggttgtggagcgggcaattccggttgaacggattgtggtgctcacctttaccagaaaggcggccatggaaatggcgcgcagaatttatgaggacctccgtctgtgtgtacagagtgcgtctgcgcagccggagccggggcacgaagcgtatctgctgcgtgcgcgtgaggcgcttgcgcggtttggggaagcgcgcattatgacgttagatgccttttcgcacgaaattgcgcgggtaggcgcgcgctttttcggtatcgcgcctgatttttctctcagtgaggaagagaaccgcgcgctggcacacgagtgtgcagaagatttttttcttgagcatcgggaacatccagtggtactgcattttttgcagcaggagcacgccgaagactgcgtgcgagaacttttttttattcccttgcaggatcacggcatacttacacatccctgtgactttcgtgcagggcttgcgcatcaaattgctacagcgcgtgggttattaaaaacggtgctctgcgatatacacgcagcattgcacgccattcggcaccatatgcaagaggcagatgcgcagaatgcgctcattgcgcgctgcgttgcgctgtttgcggcacaggatactgccttttcctacacgccggctgcagaagcagatgcgattgccgacgcgtttttggcacgtgggtacgaggaatatgcagctaaacctgatgagttttctgtgtctgaccctgatgagggagcgcggcgcgctgcacacgattgcctgcggtattgtgcggcggtaaaaacgcttttttgtctgaagggtaatttaggggggcgcgcgggtgcagcacaggcgataaaagcacaggtaaagcagctgcgtcttcaacttgtaccgcaaatggaacggctgcacgcgttttttgcgcaggtaccgttccttgtggcactcagctcgttgctcgagcttctgcaggcgcgttttatccggcaaaaacgggaacggaattgtctcagtcacgccgatgtggcgcatcttgcggtgcaggtgttacgtcagtatccggaaatacgcgtttcttacaagcggggtatcgatgcgttcatgattgacgagtttcaagataacaatgccctccagaaggaacttcttttttttcttgccgagcacgaagcgcgcaccgcgcacttcctccctcctgcacatgcgttgtgcgcacacaagttgttttttgtgggagatgaaaagcagtcgatttatgcgttccggggtgcggatgtgcgggtatttcggtctctggcaggcgtactcaccccgcaggtcagtggcgcgtcccagcaggagcttcctctttccgctgctgcggagctgcagcccacacttcagacgttgcgtatcaattaccgaacagaagcggcgctccttgagcgcctcaacatactgttttcacatattttgcgtgggccgtctgagtctgccgagaacgggtacgaggttgggtttcagtatatgcagccggcccggtgtactgccggtattgagccgcagtttcgggtgattggagtggatcgtcaccgtttctccagaccggagcacgaagcgcagcactcagcggcgcgcccaactcctcaagcagggaggacaggcgcgtctgaggactcggaggattctctatcggcgcaggagacagaagcgtgggcgcttgcgcgtgctatccgtgccatggtggacggcggcaccctggtgcgccacaagggggaggcgccgcgcgcgtgcacgtgggcggacgtagtgattctgttgcgttctgcagacaagcaggcgcggtacgagcgcgcgctgcgtctgtggggtattccgtacacgtcgcttcaaacgcggggtatgttttgcgatgcgccgctgtctgatctccttgccccgctgcgtttagtgctcgagcctgccgatcggcatgtgtacgcgcaagtgctccgcggtccgtttgtacgggtcgatgacgacacgctttctctgttgctgctcccacccgcaccccccgacgcccctttttcgtatatccccgcggagttatcggcgcctgcggcgcggtgtgtacgtgcaggcgcggacttttttgcgcgcgtgcagcagcaggtgcggcgcctggcgacgaataccgagctgctgacctatctgtggtacaccgaggcgtatggaacgctgcttgcgcaagaccccctggcgcgtccgtaccatgtgatatacgactatgcgtttgagcttgcgcggcgggcagatcggcagggaaaggggataggagaatttttagattttgtagatgcgtgtctgtctgcccaggagcgggtagaggagctggagctgccttgcacggaccgcgcgtgtggggcagtgcagattatgagcgtgcacaaaagcaaggggcttgagtttccaattgtgtgtgtgccggacgcggggagttctggaccgcgagtgatggcgcgcgtaggcgcggtacactccccgtacggatacattccccgatttttgcctcaccctgagggggtgcatccgatctttgtgcaggaacaagacacgcgcgcccgggcgtaccgcgcggagctgcgacgcgtgctctatgtggctttcacgcgggctgagtgccacgtgattgtcagcggggtactgcctatttctgacggacatcctgctcctgccgtttctcggtcgttggcggacatctgctctctgctcccctctggtgacgggagtgagcctccttcctccctctctttcttttcagagctgctccctgcgcttatgcatgcagccccccttcctccccatccttctccctctgtggtgcccgcaccggtgtcgtttgatgagtgtctgccgctggcgcgccctcaggcgtatcagcgcgccctcaccgggtcagctcgccaaagcgtgccgcaagcatccgcccctcgggattggtacgctgcagtgcctgttcgcgcaccccattattatccccgtcttgttcagccggtgacgtccctggtttctccggctccggggcaaaactcggcttccgcttctccttcgcccttgaccccgcagtccccccgtggcgtggagtttggcacgcacgtgcatgagcttttggcgcaggttttccagtccccggcgccgaccgttgcactccatagcgtacaacgtgttgattcccctgcggcacgccttgtggcctgctttcttcactcccccttgggctgccgtgcatgtgcagcccccgctcaccagcgttttgcggagttttcctttctcacccgcgctccaggtaatacgaaacccccacatggagcggagtaccaagccggcaccattgatctcctcttcctttccaatggggtgtggcaccttgtggactacaaaaccgattacgaagagcacccggcgcgttatctcccccagttgcagcactatgcacgggcggtgcaggatctcttctcggaccacccggtgacggcctttctgtattacctccgaaccgggcatgaattttctttggaagcgttagaatctcattttctgaaaaaaaacgcagttccggattctgaatga

SEQ ID NO: 40446 - DNA, 1599 bp, Treponema pallidum
gtggagcaggcgcgcgcacttcttcaaggcaaaacggtaaccatcatgggcctcggcgtgcacggcgggggctgcgcggcagcctgcttttgtgcagaagcgggagcgcgccttacggttaccgacctgcgaaatgctgatgcgcttaccccttccctgaaaagacttcgtgcgtacccgtccatccgctttacgctcggtgaacaccggctggaagattttgaaaacgcgcatgttgtcatcaaaaatcccatcgtgaagggtgcacacaacatctacctttccgctgctcaacgcgccggcgcgcgcatcgaaacggatatctcccttttcctacgcctttctcccgccccgctgctagcagtaagcggcagcaagggaaaatcctccactgccagcgccctgtgctacagcttgcgtgcgctgggtttccccgcctttctaggggggaatagcacagtcagcccgctggaatttgtgcgtcacacaacgcctgcaacaccagtggttctggaactgtcgagctggcagcttgcagacctacgcgcagtcgatgcacaggaccacactgtacaccacgccggtctgctgcgcccggagattgccatcatgactcccattatggctgaccatcaaaactggtatgcggatatggaaagctacgtggcagacaaacaggtgctatacgcacaccagggaacgcacgatacactgctgtgtaacgcagatgacgggtggggaccccgctttgcctgcgaagcgcagaaaaacggagtgcgcgtcttttggtatacggcccagtcgcctgagaccgcttgccgcgcgtgcaccccgcgcctcatggagagagctctatggagagcgacggacggaacctactgggcacgttttgcagaaggtgaccgcgcctgcatgctcatcccaccgcagctgcacgtaccgggccgtgtcctccaaacgcaagtggcgagtgcagcgcttgcagcgctcctgttcgcgcagcggcattctctacctccttcctcctgccccccgtgtttttgcgcacactcccattcccccgcgtacgcgaatcacgcgtcccccccagactacgcttgtccgtccgctcacagtcccttccaagagcacacccggcgtcttgcacaagcgctggagtcctacacgggcatcgaacaccgactagagtttttttacgaaaaggggggactgcgtttttataacgattctgcatccactgtacctgaggcaacaattgcagcgctggaagcctttgatgaaagcgtggttcttatcgttggcggcactgataagaatgcagactaccaacccttggcacaggcagcagccaaggcgcacgcattgtacttgcttgcaggaagtgctacggcacggttgcaaccacttcttcatgcagcacaggtacctttttacggaccgtttacttcccttgaggtactcctgcaggatctccgggcgcggcagaaaagcccaggcgtgatcgtgttctctcctggggcagcgagttttgaacttttcgcccacgagtttgagcgaggtactacctttaaatcccaggtgcgtatcatttttgaataa

SEQ ID NO: 40447 - DNA, 372 bp, Treponema pallidum
gtgagtttacggatccgactgaaaaaattggggagtaagaagcgtccgtactaccgaatcgtagttcaggacgcgcgcgagccgagagatggcagggcaatcgaagaactgggtatttaccagcccatagccccaaagggtaccgaggtgtctttccgccttgaccgtgcgcgcttctggcttgagcgcggcgcgcagccctcggatacggtccgcaggctcttgcagtccaggcgtggttctgtcctaaacgcagttgcctcagatgagcgccgtgttgcttcttcacagcaggctgccgatctggcgcacgtagagtccgtttcctgcgccgctccaatcccttcttccccaggggggcagggcgtctag

SEQ ID NO: 40448 - DNA, 243 bp, Treponema pallidum
atggtcacgatggaagaagagctaatcgcctatattgcgcgggcgcttgtggatcgtcctggggaggttaccgtcaccaagtctccaggggagggattggagatccttcagttacgtgttgcctctgaagatgtagggaaggtcattggcaagcacggcagaattgcgcgcgctctgcgcacgctcctttctgcgtctgcgcacgcttctcagacgcgttacgctttagagatcatcgactag

SEQ ID NO: 40449 - DNA, 525 bp, Treponema pallidum
gtgactgcacgcatcgtgagcacctttggggttgcgggtttactcaggctcaagagcttctcgggtgagtatgcacatcttgccacactaaagcaggtttgtcttgctcctccacggagcagatcctcaggcaccctcgcttgtgctctcccgcgtgaggccgtccacatggtagagcacgttctcctacgtgcgcaggacgcgctgctcaagctccaccgcgtagatacggtagagtgcgctcggacgtttgtaggagcagagctgcgggtaccgcgtgccgaggcttgtccgcttagcgctggggagttttacctggccgatctgtgtcgttgtgaactcgttttcgagggctcggcggtgggtgttgtcttgagcgttgtcgaagggggcggtagctcccttttagaggttcaaaggacacatggtggcgtttgctatgtgccttttcaccggaccttcattggggacgtggacgttggtcgaaaaaaaatcgagttgttgcagcggtggattctcgaatga

SEQ ID NO: 40450 - DNA, 753 bp, Treponema pallidum
atgaacattgacgtactgactctctttcccgccatcccgcgggtttatttctccacctcaataatggcgcgcgccgtgagcgacgggatcattcactacaatattgtcaacatccgtgactttgcgcacgacaaacacaaacactgtgacgccccgccctacgggggcggacctggcatgctcatgcgctcagaaccgttagggaaggccctggattcagtagacgctcccaaaaagcgcgtcgtgtacgtcactccctctggaaagctctttgagcaaggctatgcgcgctcactcgcacaggaacgtgccctcgtgctcatctgcggcagatacgagggaattgaccaacgtatcatagacgagtatgtcgacgacgaagtttgcatcgggaactacgttctctcctcaggagagatcgccgcgctcgtgctcatcgatgcggtgagccgctgtgttagcggtgtcatccgccatgaatctctcgaggaggaaagttttgtaaacagtctcgtggagtacccgcagtacaccaggccgcgctgttttcacaaccgggacgttccccctgtacttctctccggtcaccacgcgcatatccgcacgtggcggcttgcgcgccagatcgaaaaaacacgaaggaatagacctgacctcctcagcgctgcgcgtgcgtctgcagcctggactcaagaggctgagtcccttcttaaggagttagactatgagttgccacctcatccaacaaattga

SEQ ID NO: 40451 - DNA, 372 bp, Treponema pallidum
atgagttgccacctcatccaacaaattgaaaaccagcagcgaaaggaaccagctgaaacgttccgcgtcggggacaccgtacgtgtgcatttcaaaatagtggagggaaaaacagagcgcatccaagcttacgaagggctcgttctgtgttttaaaaatagcggcgtcaggcgcacctttacggtgcgcaaaaattcctatggcgttggagtggagcgtatattcccgctccactccccccgtatcgagcgggtcgacgtagtacgtgcaggaaaggtgcgacgcgcgaagctctattacatccgagaaaaaataggaaaggccgcccgtatcaaagcacgtattgttaaaaagccgtcgcccagcgcgtga

SEQ ID NO: 40452 - DNA, 1350 bp, Treponema pallidum
atgaacgagaactttgaaaaaatccagacgcttctcgagcacaagcgttacgtaccacttattgcaaatctaaacgagatgaacgaggtggacgtcgcgcatgtcttggacatgcaatcacctgcacaggcgttgttgctatttagaatgctgcccaagaacctcgctgcaaatgtgtttgcgcagctttcaagcagcaaacaatctgcttttctcgccaccattacagacagagagcttgcacctattcttgcagaactcgccatggatgatatagtcgatttggtagaagaaatgcctgcaaatgctgtgaaacgcattctcgcacaaacgggtgaaacagaacgtcaagttatcaatcaacttttaaaatatccagaggattctgcaggaagcctcatgacaactgaatatgtagacttagagaagcagatgaccgtgcacgatgccctctgctgcattagggaaaccggattaaaaaaagaaaccgtgtacacgtgctatgtcattgaccaaaaccggtttttgcacggtgtcatttctttaaaaaagctcgtgcttagtcagggagatctgttgattgagaatctgtgtgaacgtgactgcatctttgtacacacccatgatgatcaagaagcagtcgcggcggtgtttaaaaaatatggcttccttgcactccctgtggtggatactgaaagacggctcattggcattatcaccgtcgatgacatcatggacgtgatgcagcaggaagttaccgaggatttccagatcatggcggccatgcagccttcagatgaagcatacctggaaactgaggtcttcaccctagtgaaacaccgtatcggctggctactacttcttatggtgtctgaaacgttcacgggaaatctcatcgccggatacgaggatttgttggtgactgccaccgcgcttaccacgtttatccctatgctcatggacaccggggggaattcaggcagtcagtcttctacgcttattatccgaggccttgcaacgggtgagattcagctacacgattggctccgggtgctgtacaaagagctgcgagttgcgctggcagttggcggcattctaggcacaacaagcctggcgaaaacgtacttcataaatggcaagccgcttgccctatgtgggagcgtgggaataacactgatgattaccgtagtagcggcaaagctgaccggagggctccttcctattcttgctaaaaagctctgcttagaccccgccatcatggcaggaccgctgatcaccacaatcgtagatactaccagtctcttcgtatttttcaatgtagcgcgcgtagtactgcgctggcccctgtga

SEQ ID NO: 40453 - DNA, 2337 bp, Treponema pallidum
atgactttagaccaggactttgtggacgcactcagcgtgcaagaggacgagctcgcagaacgcgtagcgcgcgaactgcacatccgcaccgcgcaggttactgccgtgcgttccctcctcaaagaaggctgcacggttcctttcattgcgcgctaccggaaggaagcgcatcactgcctcgatgaggtgctcatccgcgactgcgaacgcctcttccacacccaccttgcacgcgaaacacgcagactcgagattatacgcgccgtcttcaaagaaggcatgctcacccccacgctctacgagcacctcaggagcgctcctacccttgcagcactcgaggacctctgggctccgttcaaaaaaaagaaaaagacacgcggcatgcaggcgatcgaaaaaggactcgagccgcttgcgcgtttgatagaaacgcagtgcgccacgcaggcagaaatcgagcgcgctgccgcagcgctcgtcgctcctgctgcagattctgatcgtgccgtctccagcgctcaagacgccatcgcaggcgcctgcgatatcctcgcagaggagaccgcacactgcaacgccaatcgtgccgcactgaagtccttttacctttctgcaggcgtcgttacggctaccggaatcggggacgcgcacgctgcgcacacgtccgtctaccaaatgtattgggattacgcagaggcagtgcgcgacatcaaggcgcaccgcgtgttagccatcaatcggggggagcgtgagggaatccttgacgtaaaaatcaccgtcgatttagacgccgctgtcgagcaggttcaagaggcggtgcaccccaacaacaggtatcatcgcgatgccattacagatggcgtggtgcgcctgctcagtcctgccgtcctgcgggagatacgcgcagaccttaccgcttcggcagagcaacacggtatcaacgtttttagtgaaaatcttacgaatctgctcatgacccagccggtcaagggcacgcgcgtgctcggcatagaccctggcatccgcacagggactaagtgtgcggcactggatgaaacgggccaatatctcggctcctttgtcatatatccgcacaacacggaccatgcacgcgccgctttgacgcaggcgcttgatcgctaccgcattcagctcgtagccgttgggaacggcaccggctcccatgcagtgcaggagcttatcgcctccataattagcgaaacacactctgccgttgcattcaccgtggtagaggaagacggagcttccgtatactcagcaggagatattgcgcgagaggagttccctgacttagatctgaccatccgtggtgcaatctccattggacgcaggctgcaagaccctctagcagagctggtaaaaattgatccgaaatccattggggtgggactctatcagcacgatgttaatcaaaaaaagctatctgaggagctccacgcggtagtagatgctgtagtcaatagcgtaggagttaatctcaatacggctagcgtatctctcttaaagcacgtatctggcgttaatagcgcgttggcaaaaaggatcgtgcaccatcgtgccacctacggcatattcactagccgcgaacaactgaaaacagtcagtggtatgggacaaaaaacctttgagcaatgtgcaggatttttaaaaatccccgaaagcacaaacccgctggacaactcgtgggtgcacccagaaaactatgcaacgggaaagataatttttgatatactgcgcgcaggcggtacagtgagcgcagcgcaaaaggcacaggtgcagtcgcaatgcgcagtcagtgatcgaaccgtcgaagatatcattacagagctgcaaaaacctaatcgtgacccgcgcgaggattatccaaaaccggtgctgcgccaaggtctgatatcctttgcagatttaaaagtgggggcaaccgtacagggaaaggtaaaaaacgtggtggactttggggcctttgtggacattggaataaaggaaacggcgcttctgcacgtgtcgcagatgagcgaccactttgtttccaaccccctcaaaaaagtgaaggtaggtgacgtgtacacctgcaccatcatcgggcttgacgaggcaaggagacgtatttccctcagtctcaggcaggagcagcgtgcacctgcggatcacacggcgacaccttcacggagagcaccccgtccccgggctcctgaagggaaaacctcccctgagcgcgcaaagacacggggcacatcccccgcgccgggacaggatttcgcgcgataccagccgtttgcccagttcttcaaagggaaaacaccccacccgaagtga

SEQ ID NO: 40454 - DNA, 1623 bp, Treponema pallidum
atgctgtaccgtaaacccattactgtctgtcttgcctcctgttctgtgcaagaaacgcacggtagtgcgtgcgacgtttcttccatagcgtatgattcacgcgcagtgcgtgagggttcggttttttttgcgttgcgtggtacgcatgcgcacggcgcgcagtacatccacgcagcaattgatgccggcgcctgcgcaattgtgcatgattgtccattagatacgtatgtcgtcggcgtgtactatgctcgtgtaccagatgcacggtgtgcgctttctagtgctgctgcagctttctacgattttcctacgcgtgctttgacagttatcggggtcactggcacggagggtaaaagcagcacggttagtttcattgcgcagcttttgcgtttatgtggtaaacgagttggttttatctctactgtggagtattcgttaggagatgatattctcccgaacgcagagcatcaaaccacaccggagtcgctaacagtacagcggctcctcgctgagatgcgggagcacagctgtgaatttgcagtaattgaagcgtcgtcccacgggctttccacacgtacggcacgtttgcaggatgttgcatttgatgtggcagtatgtatgaacgtacgccatgaacatttagaatttcatggttcgtttgaacaatatcgctttgataaagcaaatgtatttcgtgcgctagatgcgcatgatcacataaaagacggacggcgcgttccttcttttggagtactctgggcggaagacgcatcggctgtgtattttcgcgaagcgacgcacaaaccctgttttttctttaagagaggaaccggcgctgagcaaaggacagcagcctgcctggaaaggatgccgtgtaccctgctatgggtgcaaacacttcctcagatatctcaggccttgcgattaaggtttgtgttgtcaactgttcaggaacctgcacaaccagcacaggacggagcacatgatgtatcggtgccgcttgaaggagctttcaatgcctgtaatatagcagcgtcttttcttgtactgcatggattgcttggtacgtcgcttgcggcttttgcacagcacgtgcagtacgtccagccaatccaggggagaatgcagcgtgtggatatgggacaggattttgaggtgctcattgactatgcgcatacaccctcttccttcgaggagattttgccaccgcttgcagcgcgtgtgcgcgcgcgtaagaggcgcatgttggtattgttcggctcggccggggagcgggacacgcaaaagcgtgcaatgcaaggcgcaattgcctctcgttatgcgcacgtaattgtgctcacagatgaggatccgagaggagaggatccaatgggtattctgtgcatgattgcggcaggttgtgagcacaagaaattgggtaaaaccctgtttctgattccggatcgtgtcgctgctctgcggcacatattctctcttgcgcgtgcgcaggaccttgtgctgctgctgggtaaggggcatgagcattcaattatttatgcgcacaccgtgcaaccgtatgatgaagaacgtacggcgcgtgaattattacgtgccagcttatcctctgacaccttactatcctag

SEQ ID NO: 40455 - DNA, 669 bp, Treponema pallidum
atggtgactccgagccaacacgcgctccttgcagaaggcgtagcacacctaacggacgcgcgcaccgcacctgctctttgcgctctcctgaaacagtatttggaagaacttattctctttaacacgcgcgcacacctggtgcatgtaacacacacagaggaacttatcacacaccacctattagacagcctcagcgcctggccacatttcaccaacgcgcgcgctatcgccgacatcggatctggcgcgggcttgccagggatcccgcttgcctgcgcactcgcgttgtatgcaccagaaacagaactgacgctcatcgagcggcgtgagaaacgcatagcattccttgaaaatgcctgcgcgcgtctggcgctcccccaccttcgtatcgtgcatgcggacgcgcacgacctcactccctacacgtatgacgcaatcacctttcgcgctctgtgtcccctcaaccacccaacggtatatatgctcctgaacaaactgcgccctggcggcgtaatactcgcgtacaaagggaagagaaaactcatcgaacaggaaacgcgtgatttcctcccacagtcttgctctgtcttccccctccatgttcccttcctccacgaagcacggcacctcgttgccatacacacaccctgcgcagcgcctccccagtga

SEQ ID NO: 40456 - DNA, 1998 bp, Treponema pallidum
atgtgtatggggtctttttcttactgtaaagagagttgtacgttgtcatccttttgctcgaggtggttacgacccagtaccaacaaaggacgtactcccattgcaaacagacgcgcaggagtgttcgtgatgaaaaaaaatatgtttattgcagtcgtattgtcggtgttagtgcttgtgggagcttcgttccttcaggaacttttgtatccgtctgcatcctcctcgcactctgctgcggaacacaccctgtcggccgtacctgaggagacgcgcactcaaagtgctcacgggggtgcagcagatacgcaagagaccacgcagcctgctgcgcatccttccggccaggtgctggtgtttcccgaatcagaaactgaagagcgtgtagagcgcacgtatgtggtacgcaccccgctagtgcaagtgacgtttaccaatcgtggtggagatattctttcgtatcagttgcgtgagcactatgcggcgcaacgacgtgagtacgtagaaatggtggaacaggcacgtccagaccatcgagctttctcgctcgcgctgggggacgagtatgctccgaatgtgaatgcacttttccaagtaaagcaggagataggcgcgcgtggcgtgcattccataggtttttaccgcagtgttgccacgcagcatgctgacggtacacggactcctttcgtgctggcgaagcgatacgtattctatcctgataattatatgtttgagttgcacgtttccctgagtgcagacgttctagaggagcgggaagacagccggcaaggggcgaaggtgcgcgcggtggcggagacgaatgctggcccagcgactactgttcttgcgcgggcgaatggctttgactttgggacagcaagttataccctgcgcacaccgcctgagatcgggcctgagcggaatgcggcggacaagtatgagtttcgcaccttcatggtaggtgcaggtggcaaggcgaaaacgtatgctctgaaaggagatggacgtgaacaggtagatacgcctgtctcttgggcgagtgtctcgggtaagtactttgcgctcatcgttttgcccaatgatgcggacagtctgaaaagactagtgctatcggctccccaagctgaaacagctgtgcagcatcacatcgcgtttgtgcgccgcgctgttgcgcagcctgcggttgcagatgtttatcgtgtgtacatcggcccgtgcgcagagcagtatttgagtgcgtacaacgttgcctctcgaaatccctatgggcttgagcgcacgtatatcgatgcggtggcagtaagcggtggtattctctatccgcttgaggtgctccttaagtggctcctgcgtttgttttacaccctcattcctaattggggcgtggcaattattttggtgacgattgcaataaaggtgctctttttcccgctgacgaaaaggagctttatcgctatgcaaaagatgcaagaactgcagccacacatgcagcgtatccaagagcggtacaaagggaatacgcagaagatacatgaggaaatggcgaaactctaccgggaagcgcagtacaatccgctttcaggctgtctcccaacgcttgtacagatgcctattatttttgcgatgtatcggttattcaataactacttcgagttccgtggtgcgatgtttatcccgtattggattcctgatctttcgttggcagacagcgtgtggacactgccgttcgcattgccggtgacacagtggactcaaatgcgtatgctgccggttttgtatgtagtctctcaaattatgtttagtaagttgacgcaggtaccgcacacagagcagcaaaaaacatccatgacgattatgacctatgtgatgccgttgttctttttctttttcttttatgatgcgccctcgggtcttctagtgtattggacggcaatgaacggagtgacgcttgtacagcagttggtgatgaagcgtacggctaacaagaataaaacctga

SEQ ID NO: 40457 - DNA, 156 bp, Treponema pallidum
gtgaagcggacctatcaaccaagcaggcggaaacgcgtgcggaaatttggctttcgcgcgcgcatggcaacgcgtggtgggcgcgcgatactccggcgtcgtcgtgcgaagggacgacgcaagctcaccgtttctgacgagaaaaaaccttactag

SEQ ID NO: 40458 - DNA, 1038 bp, Treponema pallidum
ttgctatgcttgtttctgtgcgggtgtgtgatgaaaaaatggtgtgggttggcatttagtattttcttctcgtttttcttgcgtgcgcaggatcttactttccaagaagtcttcgaagtggcggcgtgtaacgatgatgtctcccttctgaataaaatgcacaagcgtactgtgcgtgataatcagtttgatgagcaactcactgaccgagtgcacctgcgttatcctgcctcggtgtattatccagcgcatcagggtacgtatccgcttatcatgctttcgcgcggatggaatagcacgcaagattatcagcgtgcgttagcgcgctttctggctgcacagggatttgtcacggtggtgtttacgtcgcgagctcagcggcggccacccgattttttgagtacgtttgatagtgtctatgcacttatgcagcgcgtaaatgagcaggagggctctcctctgtatcgaaaggttgattttacgcgtgtaggggtgttgggacactcgatgggtggtacagctgccctgcactatgcaaatcggtaccctgagcgtattcgaacggtagttgcgttgcatccctttaacgggggcgctgatatggtgaacatggttgggggaaaaaacgagcaactgggaactgatttgcgctcggtacgtgctgcggtgctgattctgacgggaacaaaggatatgttggcatatcctgaacggtcgtatgagttctttcagagtttaccacaggatgtgcctgcgtgctttttgtcgctaaaaggtatgggacatggggcggggacggataaatattttgaagtgtggggatttacgtacaacaaaacgctgagtgtggaatcgttcgcgttgtaccgtcgcctgatatcagcctggtttcgcctttttttgcgggaagaagaggaatatcgcgccttatttaatgaacatgggagaccgttccggaatttaaagcctcacttatcgcaagaaacagggcgcgcacactcctatccctttttctgtgagcaaaacatttcgaattaa

SEQ ID NO: 40459 - DNA, 1029 bp, Treponema pallidum
atgcgaacgtactttttcatgagtgtctgctcggtactcacctgttttggcctctatgcaaaagaaaaagtggtgttgaagatcgcttccattgcccctgcacgctccatctgggaaacagagctgaaaaagctttcagcagaatggagtgaaattactggcggtctggtgtccatgaagttttatgacatgagttcgctcggaggagaacgagagggaattagaaaattaaaatccagtcgtcctggtcaggcagctcctcttgatggagctgttttcagttgtttaggtctgagcgaactcgcgccagattccggtatctatacgctctcggtcccctttctcattcaaaatgagaaagatttagaacgagttctgcatgagctgcgcgaagatttagacagacccttccgcgcagcaggttttcgcgtcatcacgtggacgaacgccggttggctttctttttacacacgcgcgccgtacgcatcgttaggacaattaaaaaaacagactatcgccctttccagcctagacagctcggtcctcggtacctgttttagaatatgcggttttgacatcaaagatgcaccgaacgcgcgccttgcaccgttactgaaagcaggtagcatcgacggttttctttcagtgcatttgttcacctgggcaaccggtttttaccggtacatttcgtacgcgctcgacactaagatttgtcctgcggtaatcggtatgctcatctcagacgggtcatgggcgcgaatcccatcgcgctaccacgacgctatgctccaggcagctacacgcgtaagacagcgcctagctaataaccttgagacacttgatcgcgaatgcagcaacaatatacagaaagccggggtctccatcgtccatcttaccccgcaggaaatacaggaatggcgtaccgagttcgctgcagacgtcaagcgcatccaggcgcgcttacctggcatgttgaacatgactttgtacgagaagatcaaacacctcttgtacagcgcacagcgctga

SEQ ID NO: 40460 - DNA, 1233 bp, Treponema pallidum
atgcttgaagatatcgtgaacaccctgttgtatttcaggcagcgtgtgctgcggacgaccctttcgttcctcggtattgcggtaggggttgcgtcggtagtggtaattacctcgatcggcgagtctctctacgcgagtcttgcccagagtgttggcgagggcgagcgccgactcattcgagtcaggccagagtgggattatgtgaagaacgaaatcatgtttcagccgactgagtcgtatcggacgcgacttgtacaaagtagcgaggatatagagggagtgttttacaattcttccctcaaggcacttatttcttctcctcacacagggggaaaggaacggaacattacgggagtagagccgcggtggctggagttaaaagattttaagcttgagtatgggacgttcttttctccagcggactttaagacccatcgtcactgtgcggtgattggcggtttgcttgcgcaagaattatttcctgaagggaatgcattgggtaaacgtatgactgtgaccatactttcccgggcgtcgggtgcagaacgtgcactgtctttcccatttgaaatcgtaggcgtcttgcaggaaaaggggagtttgattagtggcattccttcgtatcgggtttttgtcccccgtgagtttatttctctagaaatgggtgcaggtcgtgtggcagacgcggtggaggtgtgcgtacgcgatgtgcaggttattgccgcagcggaaaaacgtatccgggagttttcggactttttctctaacaaatcgggttctgtgagcctttggtccggtgcgggggaaataaaaagttttcgcagcgttctgagtatggtgagtgtagtgctgtcggttgtggctgcagtctcgctgattgtcggtggcataaatatcatgaacattatggtagtaaccgtaaccgagcgtcgcagagaaatcggtctccgcaaggccgtcggtgcgacgtgcgcaacaatagttcagcagtttttgctcgaggcggtgcttttaaccctggcggggtgcgtgtgtggccttattcttgggatggtgctcagttatgggctcttttccgtgttttctccagaggggataacagttgttttcagtctgagcactgcgggtatgcgtacagccttctttatgtcattgggagcggggattttctttggattaaaaccagcgctgcaggcctcaagactcgatcctattattgcacttgctcagtga

SEQ ID NO: 40461 - DNA, 1230 bp, Treponema pallidum
atggtgggtgaggattttttgtatgcactccacacctttaatgcgcgcaggggacgtactgttctttcgcttctcggtattgtagtcggtatcacttctgtggtggttgtggcaacgttggggagctcgctgggagcgagcgtggaaaagttgttcgaggaagacaataacaacataatatctgttgcgcccgtagccgcgcacgacgatggggtgccgcgcgggcagcttgtgctcaccgagcacgtccgccaccatcttaaagagcgcgtggcaggagtgcaggggtttttttatctgaattatttgcaggcttctgcgagtcggcggagcttgcacgcgggagccgtcagtgtgttgggggtggaacacggttggcttgccgcctccggtcttacggtttcctatggctctgacgtaagcgttattggttacgctgtgggcacgcacagcgttattcttggtaaacaaacggcggaggggcttttccctgaggggaatgcggtgggaaagaccataacgctctacgtgcctattggccgaaacaaggtcttgccgatggtcgtgcgcgttgctgcagtgctcaaagaaaaggatgattttagtttctcctccgcagcgcaggtgcttattccacggagtgtgctgacaagagagttctctcggcgtattgccgatgcaatggatttgaaagtatacgattctggatcgatcgcgcatgttgaggacaaagttaagtcagtgctaaccaatctgaccggtaacgagaaggcctttgaagtttcttccctccatcttatcgttgaacagatgcggagttttctccgggcaatgaatatggtcttgacgggcatcgcagctatttcactgattgtcggtggcatcggtattatgaacatcatgctggtgacggtcgccgaacgacgccaggagattgggttgcggaaggcactgggtgcttcgcgcatgcacgtgcttcatcagtttttggtagaatcggccacgttaacgttcgtaggtggtttgtgcggcgttgtgcttggccttttactgagcgtgattgttatcgccggattgaatgcgtttgattttcaaatgacgttttctcctagcgtagtcggcatgtttattgcctttgcagggtcagtagttattggggtgtgttttgggtcgtatccagcattccaagccgcgggtcttgacccaatccagtctttggaagaccgctag

SEQ ID NO: 40462 - DNA, 1347 bp, Treponema pallidum
atggaacgatcctgggagggtattgacagaggtgtgcccgtctatggtatgggttgcaccatggttgctcctgggatgcccgcagcttttgctcgctcggtggttcgcgcgtctgcgtgggtgggtgtggcgcttatgtgcgttgcgtggtcggtctccgccgcggagggcacgcggtcgggtgggcaggctcaggaacgcttaagttcctggcgccaggttgtgcagcgcatggaggtacatctacgtgcggcgtacaccttttttgagagtggggatagtgatcgcgcctatgagcagatagataaggcgtactttcgctactatgaggcgaagggcatggagaagatcaccatggggtatctgtccggtgcgcgtaaggcggcggtggagaacgcgtttttcgcgtatcggcgttcggtgcggggtgcgcgtgatttggcgggcgttgccttctgcagggacaagctggttaccatgttgtatgaggacgcgcgtgcgctggatggggttgcgcgtggtcgggcgggctttgcggcgcatatcgccacgtttgttgcctcgtgcgtgttggtgctgcgcgagggaattgaggcaattttggttatcgcagcgattgttgcgtatctggtgaagactggtaaggagcggtgctgcgctgcggtgtatgcgggagcgggcgcgggtgttctgttcagtgtcgtgcttgcggtgatgatagtccgggtgttgggttcggaaggtggtgcggcgcaggagattatcgagggtgttggtatgttcttcgcagcggcgatgctcttttacgtgagtaactggatgttgtccaaggcgagggcatgtgcttgggatcgctatatccgtcagaaagttgagcggtcggtgtctcggggtaatcagtgggcgctcgtggccactgccttcctcgcagtggcgcgggaaggggcggagcttattcttttctttcgaggcatcccagttgcggggccatatgggcggctggctgtgtgggcagcggttactgtttctgccttggttctggtgggtgtgttcgtggcgatccgttttctgtcagtgcgacttccgttgaggcctttttttgttgccacgggcgcggtgatgtacttgctatgtttctctttcgtgggtaagggtgtcagcgagctgcaggaggcaggtgtggtcagtcgaagtacggcaccgtggatgcatgggtggagttttgattttctgggcatctacccgacctatgagggtctggcccctcaagcgtttgtggtggcgttggtggtgctttcggcggtatggtggtgtggtggtctctgccgtggcgcatccagcacgtag

SEQ ID NO: 40463 - DNA, 1662 bp, Treponema pallidum
atgatgccgcgcatgacaggtaaagccgatctgaacacgcttgtgcacaagctgcatccccttgagatcaaagtcctcaagaactgcgcaatggatgagatcctttcgacttcgttgctcatctcccggctaggctttaaggaaggacacgcaaaccaagcgttttcctggcttcgggcaaagcgaatcatcgaagagcaccagcgggaacagatgcggtcctttgaactcaccccctgcggctatgctgccgctagcgacggtactgcagaggagcgtatgctcaccttcttgtcttcccccccttcccttaccgctattgcagatgcagccgagcacctacaccctcgccccccactttgcaacgggctcagtctccctgagcttgcccatgcgctcacgctcgcaccaaaggatgtaggttcagcgttcggtatcctagcgcaggagggtatcctccgtatggacggtgaaaaacgcatacacatcgtttcaccgcacgtaagtgatcgcatgtccctcacgcgcaccttgcttcagcgcgccgctgcacgcgtcgcttccccgtcagaggcctcggacactcctccaggcaccctctttgaatctgagctctctgatgatgagcgacgtgtaatggaacgcatagcaaaaaagcggggcgcaagcgacagcctcttcaaagtcagtgtacgcgagagggtaacgttcacctttacccccaccgcccgtgccgtgcaggaggcgctgcataccgcagggcttaccggaaacgagataggtgcactcaccgtcgagtgcctaaaaagtggcgcgtggaagacacaacatctacgccgctacaacgttcacattccccctgcccgcatcatccccggccgatctaatgcctacgcagatttcctcgaacacatcaaagatcgtctggtggcacttggctttcaggaatttgacgggccactggtggaaacagacttctggaacgcggacgcgctgttcatgccacagttccatcctgcacgggacattcatgatgtgtattacctcaaacacccaacgcacgcacctacaatcccagagccgttcctctcccgcgttgcggcgacgcatgaacgcggagcagatagcgggagcctcggctggcgctactcgttcgatcgggattttacccgccgactgctattacgcagccaaggaacagcactttcagcgcgccacctgccaaccgcccacataccgggtaagtattttgggatcgcacgctgcttccgtcacgaccaagtggatgcgacgcaccttgcagatttctaccaaacagaaggaatcgtactgggtacggatgtgaacgtctgtacccttctaggcatgctcaaaatcctcgcaacagaaatcgccggtgcacaggaggtacgctacgtgggcgggtactttccgttcacggagccctctatcgagctacacgcactccaccccgcactcggctggttcgaactgggaggagcaggtctcctgcgcccagaagtgaccgacccgctcggcgtgcacgtccccgtcatggcctggggactaggagtagaccgcatggcgctcctggcgctcggtatctcagacgtgcgagaactgttcagcccagacatcgagagcgtccgcctgagggtataa

SEQ ID NO: 40464 - DNA, 825 bp, Treponema pallidum
gtgggtaccttgtacgtggtagcaacgccgattggaaacttggcagacatcaccctccgtgccttagatgtattgcgaacggtggatgtagttgcctgtgaagacacgcgtaggacgcgtgcgctcctgtctcattttgggatccataagcgtcttgtttcctgtcgtgcacacaatgaggcgcaggcggcgcgtcgactcatccattttttgagcacccctatttctgcttttctctctccagagaaggggaggggcaggcagagcgcgcggcgcacgcgtgcacgtccgggtgagacggtagggacagctgcgctgcagctcgctgcagaagcaacgggggaacaggaagtgtgtggatcgccgcacgcacaggtagcctatgttagcgatgcaggtacgccgggggtcagtgatccgggagcggttttagtgcgcgcggtgcgggatgctgggcacacggtggtaccgattcccggtgcttctgcactgactactttgctgagtgttgcaggcgtgcgagacaagaccgtgctattcgaggggttcctttcacctcacccgggtcgtaggcgtgcgcgcctggtgcaattgtgcgcgcagcgtgtagcttttgttctgtacgagagtccctaccgggttcaaaagcttctagaggatctggtggcggtggcgccggagtcgcaggtggtgctgggtcgggaattgaccaaggtgcatgaggagctctgtgtggggactgccttgcgcgtcatggagagcttctgtgcgcggacgcgcgtgcggggggaatgcgtgttgctggtttctgcagaaaaattttag

SEQ ID NO: 40465 - DNA, 774 bp, Treponema pallidum
atgcagatcttcgatactcacgcccacatcggtcttattcacccagatcccgtagagcggctgcgggtagtacaagaggcacgacgagcttctgtcacccgcatcatgagtatttgcaacagccttcatgactttgccgccgtatacgagacgctccagttctcaccctctgtctatcacgccgtaggtgtctccccttctgaggtcatggccccggggaaggattggatagatactattcaaaaaagcctacaactccctcaggtagttgccttaggcgagaccggattggactactgtaaaaagtacggtgataaacgctcccagattgggctttttatcactcaattggatattgcttcaaaggcaaaaaaaccagttatcatccacaaccgtggtgcgggccaggatatcctggacatcctcagcgagcgcattcccgaccaaggcggtgtgttccactgttattctgaggacgcagagtacgcacgtatggcgctggatttacctgtgtacttttctttcgcggggaatttaacttaccggaatgcacgaaatctccatgagactgtattggccctcccgcttgaccgaattctagtggaatccgaaagcccgtttatgtcccccgccacgtaccgcaacaagcgcaaccgaccggcgcacacagttgaaaccgtggagttcatggctgagctccttgatatggacatgcttgagcttgccgaccagctgtggaaaaacagctgtgcgtgttttcaccttcctgagtga

SEQ ID NO: 40466 - DNA, 1023 bp, Treponema pallidum
atgcaacaacacgccttatatcatccggtttctattggcccgttgtctctcaaggggaatgtgttttttgctcccgttgcaggctattctgacagtgcgtttcgttcaattgccattgaatgggaagcaagcttcacctacaccgaaatggtttcgtctgaggcgatggtgcgcgattcactcaataccaaacgtttgattcggcgcgcgtcaaatgagacgcattacgctatccagatttttggttctaatcctgcagtaatggcagagacggcaaaactaatcgtcgatagcgcgcagccgtcctgtatcgacatcaacgcgggatgtcctatgcctaaaatcactaaaacaggagccggagccgcactcacccgagaaccgacgcgcctctatgaagtggtaaaggcggtcgccgatgctgtgtacgcgcaagacgcgcgtatcccagtgacagtaaaaattcgtgctgggtgggaagaggcacacctgacatggaaggaagctgcgcgtgcggcagtagacgcaggagcacaagcgcttgcgttgcacccgcgcacctgcgcgcagtgttacgcgggagaggcaaactgggacataatcgcagacctcgtgcagtgcgcgcgtgggtggggagaggttcccgtgttcggctcaggggatctgcatgcgcctgaagacgcacgggcaatgttagaacacaccgcatgcgcgggggttatgtttgcccgcggtgctatgggcaacccgtttattttcagacaaacccgtcagcttttaactgaaggatactacacgcccgtgacgtttgagcaaaagctacgcgcagcctggcgcgagcttcaccttctggcacaagacgtgggagaaagctcagcctgcaagcagatgcgcaagcgttttgtttcgtatgcaaagggtgagcggggtaaaacgcaatggtgtcagcgcgcggtgcatgcgtcttccttcgcagactttgcagcagtcattcgtgacgcgtgtccatgtattggtttataa

SEQ ID NO: 40467 - DNA, 1164 bp, Treponema pallidum
ttgtcctacaggacgcgcagctccctcgatagaaagcgtgactatatctgtcctgcgtgcaacttgtacaaagccggttcctgtgccagaatcgtgcatccgcggtggcagggaatcctggtgaaagaatgtgtttctaaagaaaagcgaatctatgacctcaagcagctcctagagatttctaagagtttgaattctctccttgagtttactcacctggtagaagccatcctctacgtcgcgatggcccagaccaagacgctgggggcagcgcttttcaccaagaaaaacgccggtatgaaaaaattgtctttgagccgcaatgtgtgcggctttgacgtttcccaccatgcacagctgataatctcggaagaggaccctattctcagacttctggacgaaaaggcctgttgtctttctcccgaagaggtacagagcgcgctcgccccctcaaagagcgtacgttcgctccttgacttgcaaccttcgctctttgttccactaagagcaaaggaccaccttgttggtcttatccttttaggcaagaaaatcaacgtacacgaagcctacactccctacgatcagagcatcatcatggatattgcacagcttgctgctattgccatcaacaatgcgttactgcttgagcaagctaccactgacatgatgacccagatgaagctcaaacactacttctttgccatgctcaccgcgaagctcgatacactcagtacacaagagaccgtatctgttctcatgcttgatatcgactttttcaaacagatcaacgacacgcacggtcatctgtgtggcgatctagttctccaacatgtggcagaaattattcgatcctgcacccgtccatgcgacatcgcctctcgctatgggggagaagaatttatgctcatgctatccaacaactcgtctcgggaagctgcgcacgttgcagaacgcattcgcgtggcaaccgagcaattgaccatcccctaccatgaggtatcaattcgagtcactgtttctgcaggcgtcgcagaataccttcctaaccaagaatccgccgaaacactgataaagcgtgcagacagtgcgctgtatcaagccaaacaaaatggcagaaacaaagtcgtcatctcagagaaaaacatgtgctcatctcaggaataa

SEQ ID NO: 40468 - DNA, 1920 bp, Treponema pallidum
atggctcagtacgagtttcaaactgaagtgagtcagctgctaacgttgattatccattctctctattcccataaagagatttttctccgggaacttatctctaatgcgtcggatgcgttagataagttgaagtatgaggcacttgttgatggtacgtacaagcagttgcattgcgaagcgcgtatagacatcgcgtttgaagaagatgctcaacggcttgttgtgcgtgatacgggtattggcatgaacgcagaagatctgagggccaatctaggtaccattgcgcgatccggtacaaaggcgtttctcagtacgctgacgcgtgatcaaaaacaggattccaatctgataggccagtttggcgtagggttttactctgccttcatggtcgcttccaaagtagaagtaatcaccaagaaagctgcagagaacaccgtgtggaagtggacgtctgaagggcaaaatgcctataccttggatgaggttgatgcggctgccttcccagtacttgaaggggttgctgagggtagtgccggtacctgcgttgtgttgcacctgagccaggaaaattccgagtttgcaacgcgctggcgtcttgaagaggtaattaagaagtattctgatcatatcgcgtttcccatctatctgcattacctgcagaaggagtacgacaaggatggagcggtaacggatactcagaagaaagtagatcaagtcaatgacgcgggtgcgttgtggaaaaggccgaagtcagaattgaaggaggaggattatcatcgtttctatcaaacgctgactcgcgacagtactccgcctctcttgtacgtacacacgaaggcagagggtacacaggagtacgtcacgctcttttatgtgccggcaaaagcgccctttgacctttttcacgcagattataagccgggggtaaagctcttcgttaagcgcgttttcatcactgatgacgagaaggaactgttgccagtgtatctgcgttttgtccgcggtgtaatagacagcgaagatctgcccctgaatgtaagccgtgagattctgcaacaaaatagagtccttgcagcaatcaagtcggcttcggtgaaaaagttgctcggggaatttaagagactcgcggagtgtgacgggaaaaagtacgatgagtttatcacgcagtataatcgtcccttgaaggagggtttatacagcgactacgagcaccgtgagcagctgctggaacttgttcgtttcaggactctaagtgagtctgttccagaagacggatggacgagcttcgccgaatacgtttctcgcatgaaaccggatcaaaaggcgatatactacattgcgggaaacgacgatcgtgtgctgcgtcagtctccccatgcagagtcttatcgtttgcagggttttgaagtgctcgttatgtcagacgacatagatggtatcgtgatgccctctgtttcgaaatacaaggagtgggagttaagggcaattaatcgtttaggttcagaggaggagttgcgtcccaacgaagaaacagacgccgccgcgcagagggaacagggttttaagccgctactagaaaggttgacgcacatactgtctgattcggtgaaggaagttcgtctttcaaaacggctttctgactcggtgtcttgcattgttatcgatgagaatgatcccacggtgcagatggagcgcttgatgcgcgccacgggacaaacgcataaatcaaagataaagccaattttagaaattaacgcaagtcatacgctggtacaaaaactaaaagaaagtacggatgaggcgtttgtggaagatcttgcgtttgttcttctggatcaagccttgctcattgaaggcatggacgtaggttcgtcggttgattttgtgaagcgggtgaaccgtctgctcgcacgcgggtag

SEQ ID NO: 40469 - DNA, 1809 bp, Treponema pallidum
ttgtatagcgctcacaccccatggtatgatgggcaggtcatggattatccgagaaggactatagcttgtggcgagctgcgcaggtgccacgtcggaacggtagttgtgctcaatggatgggtccaccgaaagcggtcgcacggaaccgttagtttctttaacatgcgcgataggtccggaatagtgcaggttatagtgagccaggaggaaaacgctagcctgtggtccacggtaaaccgcatacggttggaatgctgtcttgcagtcgaaggcgtggtgcgagagcgacctccttcaatgataaatcgcgccctgcataccggggaggtggaggtgcacgctcgcacgctgtacgttctctcggagaatgctgtgcttccgttccgcgttgatgatgttgtgcatgcgcacgaagatatacgcttaaaatatcgctacctcgacctgcgctctcagcgcatgcaggagcgcattgcactgcgctcacgcgttgccctggccatacggcagtttttaagtatgaaaggtttcatcgagatcgaaactcccaccttcatctgctctacccccgagggggcacgtgactttgttgtcccttcccgagtgtgccccgggcgtttctatgccctgccacagtccccccagctgtacaagcagcttctgatggtggcagggtttgaccgctatttccaacttgcccgttgctaccgagacgaggatgcacgaggcgatcgtcagccagaatttacccagatagaccttgagatgagcttcgtttctcgagacgatgttatgcgggtgaacgaggatatgcttcggtacgtgtttagaaccagcatcggtgtcgaactgcctaccttttttcctcggcttacctacgcgcaggcgctagaccaatatggaacagataagccagacatgcgcttcaaaccggtcctgcagaatgcagactttatgggaatgcttggcacgttcaccccgtttgaagaagtcgtcgcacagggtggcagcatcagagcactcgttcttccgggcaaggcacgttgctacagccgtaggcaaatcgaagcgttggagtctatcgctcgagcacatgaggcgcaccaccttttttggcttaaggcaaccggtggaggcctcgaggggggtatcgcaaggttttttgcaggggtagagtccgaagtacgccggcgactttctgctcaggatgaagacttgttgctctttgtcgccgattgccggcaccgcgtgtgctgcgtcgcactcggcgcagtgcgcagcgctcttatcagggacgagtcgttcccagagaaggagttgttttctttcgtgtggatcgttgattttcccctctttgaatggaacccagcggaaaacaagtgggaccctgctcatcacatgttctctgctcctcaggaacagtatcttgagacgctcgagcaagatcccggttcggtaaaaggtgacctctatgatttggtgctcaacgggtatgagctggcttcaggctcaattcgtatccacgacacacagctgcaaaaacgcatctttaagatagtgggattagatcctgaagaagcgggggaaaagttcgggtttctcacagaagcgtttaaatacggcgcgccgccgcacggcggcatcgcacacgggttggaccgcctcgtgatgctcatgacaggaagcgagtcaattagagacgtcattgcttttcctaaaaatacactcgccgccagccccctggacaattgtcctagcgtgctcgataagcgtcagcttgacgagttacacctcactgtacacgtctag

SEQ ID NO: 40470 - DNA, 837 bp, Treponema pallidum
atgctctgcatgctcgaaatggacagtgcaaggcagcgcttcgtacgagatgtggaacatatccgccacgaagatatgcacgaaatgggtatctgcgcgcggcgcggttttacatgcagcgacacacacccccaccgtaagcgccacagccagaaaaaatgctgcacgcgcgctgtacccacacaaggtaacggagattgccgcacgcgaggttcttctcgtatactcacccctcgtatgagtacttggacacacatctggtctactgcgtttaccttgctgtttattatcgatccgattgggaacataccggtggtactgtctgtgctgcgcaccgtgccagctgagcgtcatacccggatcatttttagagaactgcttctaggactggtgctcatgctctccttccttttttgcggaaaagttttcctatctttgttccagctagaaacgggagtaatgaaaatggccggaagcgtcattctctttctcgttggcatcaagatggtatttcctgatcaacacgcgctcccctccaccacagaagaggaaccgtttattgttcccatcgccactcccatgatcgcaggtccttcggcgttcaccacgctggtaattatgggagagacgaaggggacatcccgtctcgccacctgtgctgcgctgcttgttgcgtggacgctcgcgtgtcttattatgataagcgcaccgtgtctataccgtcttcttaaagaaaagggaattaccgcgcttgagcgaatcacaggtatcttgctgctcattctttccatccagatgtgtgttgagggagcccggggcattattgccacttcctag

SEQ ID NO: 40471 - DNA, 3102 bp, Treponema pallidum
atgccgagtgcacaacacctgtcagagtttgctcgcgagctcaagactcttgggaatgagccagacaccctcaaatcttggggtactctgtacgatgacctaccacctcctgaatctacccccgacggggcacagcctgcgcccacgcctgagcggcagtccgcgcctgcatccgcgtcagcttctggccctgtgtccgcacatgggcagcgcccctttgagcctgacacagaagcatcgagcgttgcctcgggagaggaggtcgtgcaggaagatgcgcacgcaccacagactcgaatgcatgactccgcacaggagccagcggcggagatttctctcttttctgaagagcggacaccggaaactatgccgactgctgcctggagtgcaccaccggatcctctttttgaaaccgagcatgctgtcccccccctacctcttgacccggaagaaacaccagtgcccggagaaaaaggtctccaggagtccgccgtgcaggaggaagacgccggatttaaccagatgcctgcgacaggagggcaaaccagcgagaatcaacaacactttgacgcattgctcgcctctcttgatcttgattcggcaaatggcgaacgcgtggtccccgagaatgcagatgagttcgccgctcaggtacctgaatcccttctagaagggttgcatccagaagaccaagagacgaaacgctcgcaagaggaacctgtatcctatgacttccctgcgtttgatctggaccaggtagcgcctcctacaccagacgcccctgattcttctaactctgctctcactgagattgaaatcaccccagcgctctctgagcaccccacgcagacgcaggaaacgggtaccacctcgccacaatcgcagactgtgcacgctgatgcgtctgccctagggcctagtgcctctgatcctaatttttcccctgggtctgcggataacttggtcgcccaattccccattgaagaaagcgtgcagatacctcctttccccgctgatggctttgaacttcccggtaaattccaagaatttgcgagagaatctgagagcccctatttcagtcctgatacaaccgccgacgcagaccaagcacagaccataagcgaaacggaatatcaacgctttctccagcggctcgacgccctcccccttcctgtacgtattgcggttcaagaatacctgtcctcagaggagacctcggacaaagagggttatgcgctcattagcagcattgcaaacaacgcctcgccaaaagcggttgctactcaactcgagcacattctaaaaaagccgctgcatattcccagaaagtttgaacgcaagtcagctgccgcacacgaacgcgagaagtcttcccttccctacatcgcgaaacacacggtgcttcccctgacggccagctcagcggccatactcattttcatcctttcgcttgcagtcctctcctggcactttctgtacaaaccccttcatgcgcacctgagctaccgcgcagggtaccatgcattagaactggaccgctacgaagatgcacacactaactttgaacacgccaaacagtactggaagataaaacactggtactttcgttatgcgcgtgccttacgtgacaaaaaacaatatacacgtgctgaacaaatttacaccgagttactctttgatttccggcatcccaaacaggggagcattgaatatgcgcacatgctctgcaatgagctgcgcaaatacgaacaggcagaaacgacactgcgtcggcagggactcgaccatcatccaaatgatcctgatatcctcagcgcactcggagacgtatatctagagtgggcagaagaggaccctgctcaatacgagcaggctcgaaaaacataccaatcactcatcgcttcccacggcacgcgcgatgcgtatcttgcacgcatgatgcgctattttatcagaacagatcagctcgcgcaggtacttcctcttaaggcacactttaccaatacgcgcgctaggatcgctcctgaagatttgacagaactcagtggataccttttagagaaacgctatgaatctcaacccagtgactcccttacattgcagtcaaagattgaggatctgcgcgcattacttgagcgggcctttaaggcggatcctatgtctgcggatgcggcttattaccttggaaaattctttgtctacaatcaccgcaaggacagcgcgcgggaactccttcagcaagctgtcaaccgttacccgcacatgccacattccacagtcaggcgtacactgcgtgaaattgacgcgatgcgcctgctcggtacgttactcctggaggaaaagggacacgctgctgcccgcgaaatattcacccaggcacttacgcgctatcgcagctatatcgtaatgcgtgacctaccgccgcatcggactattggaaaactgtaccgtgactatgcagatatggactactttatctacaaaaactatgactctgcgttggagcactaccagcatgcgcgggcgcagttacttgatactcctgaggttcaatacaaaatagggtatattcagcacaaaaaaaacaactaccccgaagcgattcgggcaatgaatgcagcgtacgagcacaatcctcaggataagcaccttttatatggattcggcaccctgttgtgtaaacgtggtgactactttgcttcccaggggtactacgagcagttacttgaactgttagatgcgcagcgtacaagacgcggtgtcatgctcccccacatagaaaaggcggacgccgcgtttgttgatttgtacatgcgcacgtgtaataacctgggcgtagtattgcaccgtttggcaacgactcatggagattcgcggaaaaatgcacgggcgttaactctgtttgcagaatcctctcgtgcatgggacgcactcacccgtcaccctgaaaccagggtgcgctcacaagctaccggtctttcatacctaaacgtccatcacatgacacgcccctacacagagtttcagccagaactgtacgacgacattcctctcctacttgagcacgaagaaccgcccatccaaaaggaacaagagaactag

SEQ ID NO: 40472 - DNA, 2400 bp, Treponema pallidum
atggaacgatcccctttacctagaattatcgctcttaccttcggcacactgctattcgtcagtgcagtgctcctgaccctgtccacgtttcttcccctttttaccttgcaccgagcatcacactggttcttcgtacctggcactctcctttacgaaacgtacgctttctcctccttgctcgtgccgctgttactcttgcacacagcgctcctcttgtttgtcggcggacgttcgttacgggcagaaagcgcacttgttgccttcccactcttgttcattactgcagtgtgtggagaacacggtctctacgcgctacgacgcgcactcgctgcacggtcaatttcaccgtcaacgcggggagggatagacatcgtatgcgtcctttgcctcctcgcattgctgggagcagagctctatgctgcactcatttacggggaaaggtgttacgtatggtttcatgcacgtatccctcgcgatttcatcgctgatggattccaagacccctccttccctccctccaccgccgatcatcctgacaccgtttcccctccccccgctccctcctgcgccaccgcagatgtgcagacgcccgaagcaagcgcgcccccagaggggcaattctccacggaagttcccctccaggggggagaatttttgatttctgaggcagaggtgcagcctgccacgcaggtggcagcgtgtggcggtgtgtccacgccaactgctttggcgccatcggtgccttctcaggctccattccccctgctcccagcgcccgggctcattcagagtaaccttccctcagacgttcacgcccccgcgtcacccgggtctttgccgtctgtcatccctgcacaggcaccgtgtgtcatggccctctctcctatctctgctccctcagtcgcccccgctgaaacccttattcctgcgcaagacgatgaacagggaccaccgcgtcctattcctgcctcagcagctccgcttcggcacccttgccgcggctaccaagtaccgtacgacttgcttgaccagtactcagaggacacatatgaaggaattgacgagctcaccaagaatcttgcactcctgcttgaggaaacattctctgaattcaacattcgagtagaaatcaccggtatcaagaagggtcctgtagtcacaatgttcgagcttctccctccacccggcatcaaactgtcaaaaattacaaatctgcaggacaacgttgcgctcaagcttgctgcttcaagcgtgcgcatcgtcgctcccattcctggaaaacacgccataggcgtggaagtccctaacaaaaaacgatccctcgttacattcaaagaactgctccatacgcgcacagctggcagcaaccgtatggccatccctgtcatccttggcaaagacgttaccggcgaaccacaggttatcgaccttgcccaaacacctcacctgctcattgcaggcgcaactgggtcgggtaaatcagtatgcgtaaacgcgctcattctctctatcctgtaccacaagtgtcctgacgaaaccaaacttctgctcattgatccaaaaatcgtagagttaaagctctacaacgatatcgcccaccttctcactcctgtcatcactgagcccaaaagagcactccaagcactacagtacatcctgtgcgaaatggagcgacgctatgcgcttcttgagcaattagaatgccgcgacattaagacctacaacaaaaaaatacaggaaaaaagcatcgccacgcagcctctcccattcatcgttattatcattgatgaatttgcagacttaatggttgcctctggcaaagaattagaaacgagtgttgcgcgtttgtgcgcgatgagccgtgcagtaggcatccatttggtacttgccacccagcgaccgtcaatcgatgtcatcaccggccttattaaggcaaatattccaagcagaattgcctttatggtttcatctaaaatggatagccgtattattttggatgagatgggcgcagaaaaattgctgggacgaggggatatgctgtacatgaacccgagtcagtcttttcctacgcggattcaaggtgcgtatgtttccgagcgagaattagcgcgcgtgatcgcccatgtacgcgcgtggggaacgcctgagtatcttgatgaagaaattttctttgacgatgacgacgcgagtatatctggaaattttgtggatgaaagcgatcctttatacgagcaggcagtgcaggtagtgcaatacgcgggtaaagcgtccacatcgtatgtgcaacgtaaattgaagataggctacaatcgcgccgcgcgcctaatcgaagaaatggaagcaaggggggtggtcggtccgccgaatggatccaagccacgtgatgttttgcgttcgtag

SEQ ID NO: 40473 - DNA, 606 bp, Treponema pallidum
atgataccggcgattgaagaagtagtggagcatttatctcgtctcccgggtattggagtaaagctggcgacgcgccttgcctatcaccttttgaaacgtgaccccgctgaagcgcaggttcttgcgcgcgggattgcgtgtttgcatgagcgcgtatatcggtgtgtgtgctgcggtgctttctgtgaggggaggacctgcgcgttgtgcacggatgcgtctcgggaccgaggcatcatttgtgtagtggagcgtgcgcaggacgtggaaatgatggcgggtgtgggggagtatcggggtttattccacgtgttaggaggagtcattgcaccgcttgagggggtcggtcctgaccagctccgtattgcggcgttgctgaaacggttgcaagagagttcagtacgggaagttattctggcgttgaatcccaccgtggaaggggataccaccgccttgtatgtgcaaaaaatccttgcaaactttccggtaatagtaacgcgtctagcgtctggtatccccgtagggggggacttagaatatatcgaccgaacgacattggcgcacagcctgcgtgggcgccggccacttgattgctcggaggcttag

SEQ ID NO: 40474 - DNA, 1719 bp, Treponema pallidum
gtggcgtatcaagtgacggcaacacggtatcggccgcaacgttttcagcacgtgttgggtcagaagtttgtagtggcaacactgcaaaaatctcttgaggagaacaaagtttctcctgcgtatttgttttccggcccacatgggtgtggtaagaccagctgtgcgcgtatccttgcaaaggcattgaattgtgtgcaaagagaagcgtctgaaccgtgtggagagtgtccgtcttgtagagagattgccaccggtactaatttaaatgttatcgaaattgacggtgcgtcacacacaggggtgggcgacgtacgtcagattaaggaagagattctctttccacctcatgggacgcgttacaaggtttttattattgatgaggtgcatatgctttcaaacagtgcctttaatgcactgttgaagacaatcgaagagcctccgccgtatgtggtatttatctttgcaacaacggaggtgcacaggattcctgcaacggtaaaaagtcgctgtcaacaatttcattttcgtttggtagatactcagacgcttgtttgtgcgttggcgcaagctgcccagcagatgcagattgcagttgaagacggagtactgtcttggattgcgcgtgagtcagccggtagcatgcgagacgcatatactttgttcgatcaaaccgtggtgtcttgcgcagggccggtaacacttgagaacattcaaaaaaaactcgggctaatgactgacgactcacttgcagcactgttttcacattgctgccgcaaagatgctcgcgccgccttggaattggtagatgctttggtaagttctggtgtctccgttgaacagtgcgtaatcgactgtgtccgctatgcgcgtgcactgttgcttttcacgcagggaattacaaatgagtcactggtaggaatagcggcaaaccaagtgcctgagtacgtgcgtaccacatggaatgcgtcgcagattgagcgggcgcttggactgttactgcaactgtttcgcgacattcgtttttcagtagatccgcggtatgaattggagctcgcaatttcgcgtttagcgtggttgagtgagtatgtctcaattcaagaagtacgcgttgcattggatagtgtgcagcagatactggacacgcatgcagttcccggggtgtgttctgcgtctgtaggttcggacgatggggaaacaggtgtcgtctccccacacggtatacgtccccctatgtcaacatcagtatgtaccgtgcgtgcgttacaagatgccttggtagaaaagttgcgcgcgtcacaccagatgttggcaacagcgcttggttcttcatattcttggcgcgaggaagatacttctgtgtgcatgtgcgtacgcacgcattatgagcgcagcgttatctctcagcacgcgtcgctgctcaaggagtatgcgtcagaattactgggacgggaggtatgcgttcgcgtacttctggattcggtgccttcgtcaaaagtcgcgccctcccatcttcctcagagtcctgccccatctgctctctttacaacttctttgcttatctctgggcaggagtgtgatagggtgagtggagatctgcctgcacaggtgaagcttctctgtgattgtgtgcaagggcacgtggtgcgtgtgtatgaaggtactgcacggtgtgtacctggggaggggaaaatagcaggggctgtgcgtactccgtattga

SEQ ID NO: 40475 - DNA, 1914 bp, Treponema pallidum
atggggattgagtactcagcgagtagcattactgtattggaaggtcttgaagcggtacgcaagcgtccggggatgtatatcggctctaccggtcctaatggattgcaccatctggtgtacgaggtggtggataactgtatcgatgaagccatggctgggtactgtgatcgtatcaccgtggtgctcgaacaaggaaacgtcgtgcgtgttgaagacaacgggcgaggtattcctgttgacgtgcaccctcatgagggggttagtgcgcttgaggttgtacttactaagttacatgcgggggggaagtttgacaagaaatcgtataaggtgtcgggtggactccacggagttggagtttctgtggtcaacgcgctgtcgttgtgggtagaagtgacagtgtatcgtgatggtgctgagtattatcagaagtttaatgtggggatgccgcttgctccagtagagaagcggggagtgtcggaaaaacgtggcactattatccgctggcaggcggacccatccattttcaaagaaacggtggcctatgattttgacgtactcctgacgcgtttgcgtgaacttgcttttttgaatagcacggtagttattcagttgcgtgatgagcggttggcgaccgctaaacaggttgaatttgcgttcgaaggaggtattcgtcattttgtcagttatttaaaccgcggtaaatcagttgtgcccgaacgtcctctgtacattgagggatcgaagtcggatgttttagtggaagttgcgttgcaatatcacgatggttatacggaaaacgtgcagtcatttgtcaatgatattaatacccgtgaggggggcacgcatcttgaaggatttaagtcggcacttacgcgtgtggcgaacgattttttgaaaaaaagtccaaagcttgcaaagaagatagaaagggaagaaaagctcgttggggaagatgtgcgtgctggattgacagtggtgctttctgtgaaaattcctgaaccccagtttgaagggcagacaaagacgaagttgggaaacagtgaggtgcggggtattgttgattctttggtgggggagcgtctgacgctctattttgagcaaaatccaggtgtgcttacaaagattcttgaaaagagcattgcagaggcgcaggcgcgtcttgcagcacgtcgtgcaaaggaagctgcgcgcagaaaaagtggaatggatagttttgggttgccgggaaagttggccgactgttcgctcaaggatccggcgaagtgcgaagtatatattgtggaaggggattctgcaggaggttcggcgaaaaaaggacgggacagcaagacacaggccattttgcctttgtgggggaagatgctgaacgtggaaaagacacgtttggataaggtcttgcataacgaaaaattacagccaattatcgcaacgctcggtacaggtgttggcaaggattttgatttaacaaggattcgctatcataaagtgatcatcatggcggatgcggacgtggatggctctcacatccgtacgcttcttttaacgttcttctttcgatacctgccgcaaataattgaagctggttacgtatatcttgcgatgccgcctttgtatcgcattgcgtggagtaaaaaggaactgtatgtgtatagcgacacagagcgtgacgaagcgctagaaagtatcggtaaaaaaagtggtgtcgctgtgcagcgttataaaggtctgggggaaatggatggcactcagctttgggagacaactatgaatccagtgcgtcgcaagatgatgcaggtggtgctctcagatgcggtggaagcagaccgggtgtttagtactctcatgggtgaagatgtcgaaccgcgccgtaagtttattgaagagaatgcaatatatgcgcgtttggacgtatga

SEQ ID NO: 40476 - DNA, 1071 bp, Treponema pallidum
atggcttcgattgcaatactcggtggaggggcatggggcacggcgcttgctgcgtctctcaccgtaaacggtcacaccgtaatgctgtgggcccgtcgtaggcagacgtgcgatgctatcaatgcacgaaacgaaaatgttcagtatctgccgggcattacgttgcccgcagccttgtgtgcctctcccgatatggcatatgtctgtgccggcgcggatcttattgtattagcggttccttcgtgctatttggctgaagtagctgcgcttatgaataccactcctcgttttcagaggttgcgtactgctgccgtaggacaggaatatccccttattggtattttgacaaaaggatttattccggatcaggaagggatgcctcatctaattaccgatgcgctgggtgcgttgttgccgtctggggcgcacgggcagctcgtgtatatttcgggtccaagccatgcacaggaggtagcgcagggaaaggtgaccggacttattgcagcgagccaaaatcctatggcggccattcgggtgcgggaattgctgcgctcgaagagggtgcaggtgtattccagtcttgatgttgttggggtgcaagtgtgtgcagcggtaaaaaacgtgattgccattgcatttggtcttttggatgcgatggctgagcattctgaagcttttggggacaatacagagtcgatgctgctcgcagcgggcttgaatgaaattcaaaccattggaaaacagttgggttctacacatcctgaaacattcacatcgcttgcaggaataggagatttggatgtgacgtgtcgcagcgcgtatggacgcaaccgacgtttcggacgcgacatagtgcataaggggatccttgattccttttctggaatacaggatctcgtgagtcgtttgcccgaagtagggtatctggcggaaggggtagttgcctgtatgcatgtgcagcgcctggctgagcgggatcggttgaaggttccaatttgcgcgggactgtacgctattttaaatcgggaaaagggtgctgacacctttatgcaagagattcttggttggtag

SEQ ID NO: 40477 - DNA, 426 bp, Treponema pallidum
gtgagtgaagtattcccaaagatagggaggaggcgcgctcggattctggcttttcaggctctctttgcctgggacgcggcgggcatcacgccggagacgttaactcagtttacttggttgcggagaaacccgcctccttctacccaggatttggggttttcccgactcctctttctcggtacgctcgagcacctgcgggaaattgacggttgtgtgagttcacggttggaacactgggattttgtgcgtttgaacaaggtggacaaggccatcctgcgcctaagtgcgtattcgctactctttcaaaaagacattccccccgtcgtcgttatacacgaggcggtcagtatcgctcgggatttcggtacggacgactccttccgctttgtaaatggtgtgctcgataacattgctaaaagtgcgtag

SEQ ID NO: 40478 - DNA, 1818 bp, Treponema pallidum
atgagcattcctattcgcgccgatcagctacgctcgcgttatctcgccttctttagccagaaggctcatgtggttatctcgggtaagtcccttgtgcccgagcacgatcctaccgtgctttttactactgctggcatgcatccgttggttccctatcttatgggtgagccacatccggctggtacccgcttggtcaatgcgcaaaagtgtctgcgcaccggtgacatcgatgcggtgggcgataactcgcatctgacctttttcgagatgttgggtaactggtcgttgggcgattacttcaaggaggaggcaatcgcgttcagctttgaatttcttactggtgctccatggctcggcatatcccctgaccggctttcggtgactgtttttgcaggggatgaggctgttgcgcgtgatgaggaatctgccgctatctgggaacgacttggtatcgcgcgcacccatattcattttttaccacgtgcggataactggtggggacctacgggggaaacagggccatgtggtccggataccgagatattctttgatactggagttcctccttgcagtgtgagctgtcgtccgggatgttcttgcggcaagtacgtagagatttggaatgacgtgttcatgcagtatcgtaaggacgcagacggcaggtaccggccgcttgaacgttattgtgtggacaccggtatgggtattgaacgcaccgtcgcggttttgcagggcaagcggtcagtgtatgatacggagatctttaccccgctcctggagcggataggtcagttatgtgggaagaggtatgggtgtcagggagcgcacgacgtatccatgcggattgtatgcgatcatatccgtgcggccacttttatcctcggcgatcctgtccctgtacgcccatctaacgtgggtgcaggctacgtactgcgcagaatcattcgccgttcagtccgccacggaaggaagctcggtatcgatggggagttcctgtcctccctcgcgcgcgtggtgattgggcaatacgctgcggtatacccggaactggaagagaaagctacgtgtattgcgcaggagcttgcaaacgaggaacgtaagttcctcgacgccctcaggaagggtgaggcagagtacgagaggatgatacccaagtttttacaggggacagagcgagaaatacctgggtcagttgcctttcggctatacgatacgtatggattcccccttgagctgaccgaggaacttgcgcgtgaatcgggtttacgggtggaccgtgcagggtttgacaccgcgtttcaggcgcaccaggcgtgctctcggatcggtgcacagcgagtatttaagggtgggttggctgatcattcagcggaaacgacagcgtaccacacggcgacgcatctgctgcaccaggcattgcgagtggttcttggtacgcacgtgcagcaaaaaggctcaaatattacggcagaacgcctgcgtttcgacttttctcacccaagaccgatgagtgcgcaggagaaggtgcaggtggaacagttggtgaatgagcagatccgggcagacttgccggtgtgctgtgaagtgatgtcgctcgaagatgcgatgaattctggtgccgtggcgttgtttggtgagaaatacgaatcaactgtaaaggtgtactccataggaactttttctcgggaagtgtgtggcggtccacatgtagcacgtaccgggcagctcgggcggttttctattcaaaaggaacagtcgagtgcggcgggggtgcggcgtattcgcgcgattcttgagaaaagcggggaaaagtcgtaa

SEQ ID NO: 40479 - DNA, 1515 bp, Treponema pallidum
atgaccacgtctattgtgatcggtgttgtccttgttactgtcggtttaaccttcggatggaccattcgctggctctacgccagatttcacttatccgcctgtgagcaacgtgcagaacgtatcctccaggaggcacaaaaagaagctgaatccaaaaagaaaagcattctccttgaagcaaaagaatatgtccttcgcgaaagaaatcagcaggaacgagacgacagagaccgaagagctgagctgcagcgtgcagagcgacgccttcttcaaaaagaggaagccctctctacgcgcgcgggggagcttgattctcgagaacgatcgctaaaacagcgggatcagtccctctgtcaagaagaggcccgctatcgccaggagctcgagcgtgtctctggcctcactcagaatcaggcacgggatctcatcatcaaaaaccttgagaacgaggcgaagcacgacgcacaggctctcatcaacaagatagaggaggacgcggctttgaacgctgagcgtcgcgcgcgcgacatcctcgttactaccatgcagcgtattactgctgatgtcaccggtgatgtgaccgtctctacggtgaatctacccagtgaagaaatgaaaggacgcatcattgggcgcgagggacgtaatatccgcgcgttagagacactcactggtgctgacgttgtcgtagatgacacacctgaagctgtcgtcatttcctgtttcgacccggtacgcaaagagattgcgcgcatctctcttgagcgtcttgtacttgacggtcgaatccatccggcgcgcattgaggaaattgtgcagaaggtgacgcaggaagtttctcaaaaaatctatgaggaaggggagaaagtgctgtttgacctcggtattcacgatatgtgtcccgagggggtacgggcactggggcgcctgtatttccgtacaagctacggacagaatgtactctaccactcaaaggaggtggctctgctcgcttccatgctcgcctcggaaatcggcgcagatgttgccattgccaaaaggggcgcgttgctgcacgatattggcaagggagtggaaactgattcagaccgcaaccacgcagaaattggtatggagatggctcgcaaaatgaatgaggacccgcgagtggtaaacgccgttggttctcaccacaacgacatagagccgtgttgtgttgagtcttggctcgttcaggtagctgatgctatctctgctgcgcgtcctggtgctcggcgtgaaatggtggatcactacgtcaagcgtctagaaaacctcgaggcgattgctgaggggttctcgggtgtagagaaagcctacgctattcaggccgggcgcgagttgcgtgttttagtgaacaacgataaaatccccgacagggacgtgaaggcacttggacgtgacatcgcaaagaaaatagagagcgacttgaagtatcctgggcgtatccgggtcactcttattcgagaaacgcgcgtcgtggagtatgcccgctga

SEQ ID NO: 40480 - DNA, 1521 bp, Treponema pallidum
atggacgcgcatgctattacctgtgcaagctggaatatgttaaaggctcagcttgaagccggtgcaatcagctctttgcagattgtgcgtgcgtttcgcaacgtatacgaggaagacacacgcagcgcgtccccgcttggggctttggtcgagtttttctctgatgcggaggagcacgcgcgtacggcagacaatctccgtgcctcgtgtgcccagagtactaaaacagctggagcaaacggggggagtgtctcaggtaagcctttgttaggtctaccctttgctgtcaaggacaatatttcagtgaaaggaaagcactgcacgtgtggcagtaaactccttgcagactatagggctccgtacgatgccaccgttgttgcgcgcctgcgcgccgcaggtgctatcccgctcgggagaacgaacatggatgagtttgctatgggctcttccaccgagtattctgtttatgggccgacgcgtaatcctcgggatcggagccgcaccagcgggggaagttccggcggttcggctgccgccgtcgcaggcggtcaggcaccgtttgcactcggtaccgaaacgggaggctcggtacgcctgccagctgcttactgcggcctctatggcctgaagccgacctatggtctcttgagtcgatatggggtggttgcctttggctcctctctagaccaaatcggcttttttgctacctgcattgacgatattgccctcgccctctccgtcacctcagggaaagacctgtacgacagcacgagcacttgcccccctcctgcgacggggcgacacgctgtgtctcaccatcttgcccctttttctgcccacgagtgctctatcctgcgtgctgctgttccccgcgaattagtagatgctcctggcgtgcatcctgacgtgtctgcgcaatttcaacgcttcctcacctggctgcgtgcccaaaacgtacaggtagaagaagtgacgcttcctgcactacaggcggcagtgcctgtatattatcttgtcgcgacagctgaagccgccagcaatcttgcgcgttttgacggtattcgctacgggcagaggggagacactgatgctcttttggaaaattactaccgcgccgtccgtacctcaggctttggacccgaagtacagcgaaggatcattgtggggaattatgttctttcacgccatttctccggtgattattaccgaacgagtgtgcgcgtacgttcgcgtatagaacaagaatgtacgcagctcctctgttcctaccactttattgtttgtcctactgccgctaccggtgccttcccgcttggagaacgcatacatgacccgctggccatgtattgctcggatttattcaccaccttcgttaaccttgcccgcctaccggcgctatcagtaccagtgggaacatcaggcactggcctacccatcggaatacagattatcggttctcagtggcaggagtgtgccgttctccggctagcaaaacgttgggaggaggcacctcatgtctga

SEQ ID NO: 40481 - DNA, 1530 bp, Treponema pallidum
atgtctgacctccaaacaggcacagttccctccattgcaggcgccacagatgacacacatgccgcaccctttttctacgaggtaattattggctgtgaaattcattgtcagcttctaacaaagaccaaagctttctgtgcctgtgcaaatcgctcaggaggaatgccgaatagccgtgtgtgtcctgtgtgtcttgggttgccaggagcgttgcccgttgtgagtgaagagtacgtgcggctcggggtgcgcgccggacttgcgttggggtgcactatccagctttggtccgcttttgatcgcaagcactatttttatccagatctcccaaagggttatcaaattacccagtacgacgctcccttgtgtacggatggtgcagtggatgtacagggagttgacatgcccgtgcagcggcgtgtccgtattgaacggatacatttggaggaggacgcaggcaaaagcctgcatgctgcagacgcttacagctatattgatttcaatcgttgtggggtgccgctcattgaaattgtatctaggccggatctgcgctctgcagaggaggccgcatgttttatgcagacgatccgcgagattctcacctttatcgaggtaacggatggtaatttagaagaaggcgcactgcgatgcgacgcgaatgttaatgtgaggattctgtacaaagggcaagaacaccacactcccatttctgaaatcaaaaatatgaactcgtatcgtatggtgcgggacgcgtgtacgtatgaggtacagcgtcaattgcaggagttttggcaaaagggtcctgcgagcaaagaagagatgcagagaaaacgcacgatgggctgggatccggtcgaaggggttacgcttttacagcgtacaaagcactcactgcgcgattatcgtttcatgcgcgatccagacttacctgacctgcacttgacccctgcatatgtccagcatctctcttacacagtcggggaacttccggcagcgcggcgtgcacgtttcaaacttgaccttggcttgtcggcgtttgcagcccaaacgcttaccggcagccgcatgctcgcagactggtttgagaaggcagcgcatgcgtctaagaatgcgcgacgagtggcaaactggattctgtcggaggttcttgcggtagtaaacgagaagaatatctgcattgcagagctcaatctgagtcctgaagcaattgccgaactaatggatgcagttgaagatcagcgcattaccggaaaacaagcaaaggatatatttgcacaaatgcttgccaccggtgcgcgagcgcaggacattatctccgcacagggtctggcacaactttcagatgaggaagaaatcgcaacgttagtgcagacggtgtttcaagaacatccaaaggcactgcgtgattggcaacacggtaagacaaacgtggctgcctggctcatggggcaagtaatgaagcgttcccgcgggcgcgcacaccctgcgcgagtggcgacgctcgtccaccaagcactctctcagctgtaa

SEQ ID NO: 40482 - DNA, 1368 bp, Treponema pallidum
gtggctaaaaagacggaacgtgccttttcctgcgtggggtgtggttacgttcatcctaagtggcttgggcgttgccctgagtgcggggagtggaattccttcgaagagacaccctcgttgtcctccggcgatgttcgtgctgtaaaaaaggcatcttcttctcctgtacaggcgttcccgctgtgtgctgtgcgcgcgcaggatgcgcagcgtattagttgtggtatcgcagagttcgatcgtgtcctcggcggaggcgccgtaagacgctccgcgatcatgattggcggggaaccgggcattggtaaatctacattactgttacaaatcgctgcagcctgcgggaaatcggttctctatgtttcgggtgaagaatctccggggcaaattcgtgggcgtgcggatcggctgaatattccaattcagaacatcgagttgctttgtgcgacgcgggtcgaggatgtcgagcgtgttttaaatacacgatgccctaccttcgttattgttgattcgattcagacagttttttcccccgaagcaggtgccattcctatgactatcaatcagctgaaatattgcgcaaatgagttgatagcgtgggtaaaggaacgggactctgttctcttttttactgcgcatgtaacgaaagatgggaatattgccgggccaaaagtagtggaacatatggtggacactgtgatttcttttgaacggaatgaagaggatattcgttttttacgtgcattgaaaaatcgatttggttctgttgatgagctgggtatttttaccatgggtgaaaatggactttccgctgtgcaggacactgcaggattttttattagtaccaggcagggaatgtttcctgttgggtctgcaactgtgcccgtgtgtgaggggagccgtgtttttatggtagaaatacaggcattgaccgttcctgcaaaaagtagtgttacgcgcgttttttctgatcgtatcgactcggcccgcgtcagtcgtgttgcagcggtaattgagaaacgtgtgggtttgaaattctcagatcaggatatctacgtgaatgtggcagggggtatccggttatatgagcctgcggtggatgtggcgttggcaatggccttgtattcagcgcggcaaaacaccccagtgaaaacaaatgccgcgtttatcggtgaggtaagtttatcaggagaaattcgacctgtgcgtcggctaaagacgcggctaaagacggcgtatggtctgggattttcaacgatatatgtacctataggggttgaacacgacacaccgcctccttataccctacgggtggtgggtacgctcgcacagacaattgcggagatatttagcaaggcgaaggcgtag

SEQ ID NO: 40483 - DNA, 390 bp, Treponema pallidum
gtgaagaatcttgggatcggaacagggagaaggaaaacggctgtcgctcgcgtgtgtatccgtatggggaacgggaatgttaccgtcaacagacgggatgtcggcgcgtattttcctacggcggagcaattgcgtcgggtgcgcgaacccctcttcgctaccgcgaacgagcggcgttacgatgtgattgtcaatgtgtatggcggcggacttgacgggcaggctggtgcgtgtgcgcatggtattgcgcgcgctctcgtgcgtgctgacgcttcaaatcaggcttcgctgcgtgcaggtgggttgctcacgcgtgattctcgcatggtagagcgcaagaagtatggccagcgcggtgcacggcgtagatttcaattcagtaagcgatag

SEQ ID NO: 40484 - DNA, 429 bp, Treponema pallidum
gtgaggacaatctttgttaatgagcgcgaggctgttcgcgcttggcacctgattgacgcagcggggcgccccttggggcgtgttgccgcgcgcgttgcgtgtctcctgcgtggtaagcataaagcatcgtacacgccaaaccaggaaatgggtgattacgttgtggtaatcaacgctgagaaggtgttcctgagtgggactaaaccgaaggacaagatgtactaccgccactcaggctatcctggggggctcaagagcgtgtcgtttagcgcgttggtcaagcgccggcctgtcgaaccgttgcgtcacgcggttaagggtatgctacccaaggggcctttgggacgcaagcttatcaagaatgtgaagatatacgcgggatctgtgcatccgcacgagtcgcagaatcccgtgccgctgtcgtgttaa

SEQ ID NO: 40485 - DNA, 2871 bp, Treponema pallidum
atgacccaaaaactgcaaaaaatagtgctgcctcctgtctatgggcctgcagattttgaagcgcgtgtctacgcatgctgggagcagcggcaggcatttagcccgcgtgcgcgcgggagtggaacgtcggatagcgaggggtgcgatgggcatagcagacagatagaagggggtgcgcgtacctttgtcattgctatcccaccgccaaatataacgggcgtactccatatggggcactgtctcaatacggtgttgcaggatatcgttatccgctaccagcgcatggccggtgcgtgtacgctctggattccgggaactgaccatgcaggtattgccacgcagcatgtggttgaacgcgccttgaggaaggaaggcatccataagcgtgaggtgacgcgcgaacaattcgttgcacgaacgcagcagataaaggattcccatcaagacactattcgcatgcagttacggaagatgggggcatcttgtgattggacctgtgagcgctttacgcttgatgcaggtatgtcagcctccgtacgcgaagcgttcgttacgctttatgaacgtggcttgctctatcgtagcatgtacttggttaactggtgtcctcgctgtggcaccgcgctgtctgacgatgaggtttttcatcaagaaaaggatggcgcgctctattatgttcggtaccctcttttaccccgtactgaagaagaaggaaacggcgttccccctccattagggactgctcaggtgggggaaactatcatcattgctactacgcgccctgaaaccattttggcagatgtggcagttgcggtgcatccagatgatgcgcgctaccaatctttgattggacgtaaggtatgcgtgccaatggtgaaccgcattgttcctattattgctgattcatatgttgcgcaggattttggaaccggtatggtaaagattactcctgcgcacgatccgaacgactgggatattgggacgcgccattcgcttgaagcgattaatatgctcaatccagatggctcgctcaatgatcaggtgcctgctgcgtatcgggggctttcgtgtgctcaggcacggatacaaatcgttgccgatttgcaggcgcatgggctcctgtcccgtgaggagcgcatagtgcattcggtgggagtgtgttatcgctgcgaagcagttattgagccgtatctttctctgcagtggtttgtcaaaatgaaaccacttgcttctcaggccctggctgcgtggaagcgtgcggacgtgcagttccatcctaagaaatgggaaaatacctatgtgcggtggcttgagcacattcgcgactggtgtatttcgcgccagctgtggtggggacatcgcatcccggtgtggtattgcgcacagtgtgcacagcaaacggtgagtcgggtggatgtgcagcgctgtgctcattgcggcagtgcggatataacgcaggatcctgacgtgttagatacgtggttttccagttggctgtggcctttttctactcttgggtggcctcaggaaacgcagaagctgcgcgcgttttaccccacgtctgcggtcattaccgcgtatgacattattttcttttgggtggcgcgcatgataatggcggggctggagtttacgcaaacggttccttttcgagatgtgtacctgcacggtttagtgcgtgacaagcagggaagaaagatgagcaaatcactcaacaacggggtggacccgctgcacattattcgcacgtacggtgccgatgcactgcgttttacgcttgcctttatgtgtgcgcaggggcaggacgtgttgatagaaatggattcgttcaagatgggttcgcggtttgcgaataaggtgtggaatgcttctcgttatattttgggcaatctcgaaggcaggcgggtgtacgctattgcgcacgtgtctctaactgaactggatcgctggatctttcacacatttaatgaaactgtgcagcaggtgcgtacagcacttgaagcgtaccgttttaatgatgcggcacaggcagtgtatgagttcttttggaacagcttttgtgattggtatgtagaggcaagtaaatgctcgtttcagaaacctgatgaacaggagaaggatcgcgcagcttcagtgctctgtacccttctggaagagacgctgcgactgctccatccttttttgccgtttgtaacagaagagatttaccggtcgctgtcgccttctgtgcacgataccacccaagcaattccgtctggggcgcacgcgttgctcatgtgcgcgccatatccggtgtatgtgccgtcgcgggtagatgcgcgcgcgtgtgcgcatataggtgcggtgcaggaaatagtgcgtgcggtgcgtacgctgcgcgctgcgtgtggtattgatccgcaaaaagctgtttcagtcagactgcgtccgagttctccggcgcaggatgcgaacgccgcagcgcaggtgtcctgtgtgcacgatccgggagcggtggcgcgcacatatgaggaattgatttgtgtgttagcgggtatttcctcgcttgtgtatcttgaaagcgatgcgcctaaaccgcaggttgccgttgcaacagcggggacagggtttgagctgttcttagtaacgacggaaggaattgaccggacgatgctgtgcgcgcgtcttcaaaaagcgtggcagaaggcgcggcaaaaagtgcagcaggtggagcgtaagcttgcagacgcgcagttttgcacgcacgctcctgaagaagtggtgaccgcagagcgcaagaaactggcagaggcgcgcgcaacgtgccacacccttgcaggatatcttgcggacatgaatggaaagcctggaccgctctctgactccgattag

SEQ ID NO: 40486 - DNA, 2379 bp, Treponema pallidum
atgcaagtgtcatttgttgttcacggtatatcttgcactgcgtgcgtgcggcgcatagaggaagcagtgcgccacgtgacaggcgcatacgacgtttacgtaaatcccaccaccagccatttatacgtacacactgatcttcaccctactgagcacaccctgtttgctcagaccatcatcgatgcagtttcacatgcaggattcaaagccacgcttttagatacgcattcgacaaccgcaccgcttgctgcaacccagccggtacatccagattttgtgacgctcaaaaggcgtgtccgtacttctctctgcttactcgtgccccttatgtatctgtccatggggcacatggtgcacctaccgatccctgggttcttgcaccccctgaaatatgcgctttcctttgcccttgtacaggcgtttctgacattacctgtcctgtacgccaatcgctctctttttcgtgcaggacttattgcgttgtatggtgcaattctgagacgcaacactgcaactatggattcgctcatctctctcggttccctgagttcttttacatacggtctctttgccacggcgcgtatagcaatgggcgtgcatgccaacgacacggcacttgtatcgcactatgtggcggatttgtatttcgaatcagctgcaatgatcgtaacgctcgtcacggtgggtaaatacctgtccgccttgtctaaagggcgcacttctcgcgcactcacacaactgctagacataaaacctaaaacggctcgcgttatccgtcaggtatctgttccgcgcggagcatccccttcttccccaacaactgcaagcgctgcatcagcccatgagacccatgaaattgagatagaaattcctgcacaggacgtacttgtcggagacaccgtacttgtaaaagcaggtgagctagttccggtagatgggatcatcacatccgggcaggccacgctcgatgagtcaaacgtcacaggggaaagtattccggtagaaaaaggacgcggagattccgtcatttctgcgtccttagtcagcacggggttcctcaaatttcgtgctgaacgggtaggggagcataccacccttgcgcaaattatctcattggtagaaaaaactgctgcgtctaaagttccggtcaccaaactagtcgacgctgtcagcgcatacttcgtaccatcaatcgtagcactctccttgctctctggctgcgcgtggttatgcgcaggagcgtctgcagaatttgccttttctatcgcagtcactgtcctggtcatatcatgcccgtgcgtgttaggacttgccgtccctaccgcgctcatggttgcaacgggtaagggtgcacagatgggtattctcataaaatcagcgcaggtattccagcaaatggcacgcacgaaagtaatagcgttcgataaaactggcaccctcaccttaggacgtcctacactttcacacatacacacgctccatccaacctataacgaagaagacatactccaccttgcgtacagcttagaagtatgctctggccatccgcttgcagctgcaattagcgtagctgcacagcgtaaaggaatgacaccgcttgctataaccgatttcaactcagaacaaggactcggtctacgggcgcgcttagtgcatacctcgtatgcaaagaccgtcatggtaggcaatgcacgtatgatggtcgcacacagtattgatggcatggacacatatctctctccatcacacaatctagaggaaacgcccttatttgtagcagcggataaaaatctcgtaggagttctttttgtttcagatcccgtaaaggtacattcttctgcagcgattggtgccttgcacaagcgtgggatccaaacgctgatgctaacgggagacgtcaaacacgttgcacacaccatcgctgcacgctgtggtgtcaagaaaagtaaagcggagttactccctcatgataaggaacgagaaatttccgctttaaaagcgtccggaatgatggtagcgatggtaggagacggcgtaaacgacgcgcctgcactggcatccgccgatgttgggatcgccatcggtgcaggttctgatattgcagtagaaagtgcagacgtagtcctgatgagaaactgcatacgggacgtggtaacgttggtagatctcagcattgcaacggtgcggaacatgaagcagaacttattttgggcatttttttacaacacgctcggcgttcctctagcagcaggactcggatatcccttcttcggattacgtctcacacctatgcttgcagcagcagcgatgagtttaagctcagtctcggtgttatgcaatgcgttgaggttgaaccagtttcagtcttcatcaccataa

SEQ ID NO: 40487 - DNA, 717 bp, Treponema pallidum
gtggaaaaaattgttaacgcagacggatcggatgctatctgtcctgcgtctgcggcctgtgctaagtccatacgatcttaccaggagagctattctcttggtgaggaaatcgcaaatgcagtcacccacggtatcggtgtcggactatccatcgttgcactggtgctcctggtggtgcgtgcagtgcactatacgccggctgacttgacggctcgctatgttgttggttttagtgtctttggctcctcactcattgtgctgtacctgtgctctacgctgtaccatgctctgcctcgtggagcgaagtatgtgttcggtgttattgatcactgttgtatttacgtgctcattgcaggtacgtatactgcgagttgcctgactacactgtacggcgcgatcggatggactgtttttggggttatttggggattagcgtgtagtgggagcgtaatatactccgtgtttgggcatcgggtacggtggctgtctctcgtgatgtatatagcgatggggtggctggtagtgtttgtagcaaagccgttgcgggaacggctccctgagattagctttctgtttttggtattaggaggcgtgctctacacggttggttgtgtattctacgcactcaagagaataaagtggacgcatactatctggcatatgttcgtcatcggcggtagcgtcatgcattttttttcgctgtatttaagcttttaa

SEQ ID NO: 40488 - DNA, 534 bp, Treponema pallidum
atgaacatgtgtacagatggaaaaaaataccacagcaccgccacgagcgctgcagttggagccagcgcccccggtgtaccggacgctcgtgccattgctgctatctgcgagcaattgcgccagcatgtagcggatctgggagtactgtatatcaagctacataactatcactggcacatctacggcattgagtttaaacaggtgcatgagctccttgaagagtattatgtatcagttactgaagcctttgatacgattgccgagcggttgttacagctgggcgcgcaggctcctgcgtctatggctgaataccttgcgttgagtggaattgcagaagagacggagaaagagatcactatcgtctctgcgcttgcgcgcgtaaagcgggattttgaatacctaagtacgcgattcagccaaacgcaagtacttgcagctgaaagtggggatgcagtgactgacggcattatcacagacatactgaggacgttgggaaaggccatttggatgcttggtgctaccctgaaagcctag

SEQ ID NO: 40489 - DNA, 1056 bp, Treponema pallidum
atggataccgaatctgtcctctttcgcgcgcagtgcttgcgtgcagtgcgtgattttttccttgaacaccactacatagagctcgatacgcctgcactcgcccgtgcgctcgttccagaacggtgtcttgaggtgtttcaaaccgagtactttacgtcagtgcatgctaaagatacacagaagttatatctcgttccctctcctgaggtttttctgaaaccgctcatcgcgcaactgcaacgttcggcttttcagatctcaaagtgctatcgcaatggagagtccatgggcgccttgcataggccggaatttactatggtcgaatactacacggtgtacgctgactacaagacgtcgctcgatgtaagcagcaaactctttcgctttgtggttgaacaagtacagagtcatccgctcgcggacccatattcgtgtgcttgtttttgtgctcccttcgagtacgtgacggtcgaggaagcttttctccgctatgcaggcttttccctttcgcacgcgagtagtgtacagacgcttgcgcaggaagtattgcgctccggaatagacctgggagcacgtgcgggggtcgattatacccagtggtcatgggacgatttgtacgaactgttgctcgtgcatattgttgaaccaaagttgaggtcaataaaggatcgttgcgtcgtgctgtatgactatcctatacagatatcctgcctggcgcaggaacacactggacgctcagggatacaatctacgtcacctaacaagggtgacgcacctcactgggtggtaaaggaacggtgggaactgtacgtccgcggtgtggaactcataaactgttacacagagcagcgggatgcgaagcatgttacccggtactgcagggaagaacaaaccgcaaaacagggatctgcgcgagttgtgcatcctgttccagagggctttgcgcacgcgtgcgcacgcatgcccccttgctctggagcagcactcggatttgatcgcctggttgcgctgctagccggtcggcactcattagatgcgtttgtgtatgatcagtga

SEQ ID NO: 40490 - DNA, 1374 bp, Ureaplasma urealyticum
atggctaataattatcaaactttatatgattcagcaataaaaaggattccatacgatcttatttctgatcaagcttatgcaattctacaaaatgctaaaactcataaagtttgcgatggtgttttatatataattgtagccaatgcctttgaaaaaagtattattaacggtaattttattaacattatttctaaatatctaagcgaagaattcaaaaaggaaaatattgttaattttgaatttattatagacaatgaaaaattattaattaatagcaattttttaattaaagaaactaatattaaaaatcgttttaattttagtgatgaacttttacgttacaattttaacaatttagtaattagtaattttaatcaaaaagcgattaaggcgattgaaaatttattttcaaataactatgataatagttcaatgtgtaaccctttatttttatttggtaaagttggtgttggtaaaacgcatatcgtggctgctgctggtaatcgttttgctaatagtaatcctaatttaaaaatttattattatgaagggcaagatttttttcgaaagttttgttctgcttcgttaaaagggactagttatgttgaagagtttaaaaaagaaattgcttcagcagatttattaatttttgaagatattcaaaatatccaatcacgtgattcaacggctgaattgttttttaatatctttaatgatataaaattaaatggtggaaaaattatcttaacatctgaccgtacaccaaacgaacttaatggttttcataatcgaattatttcgagattagcgtcaggtttgcagtgtaaaatttctcaacccgacaaaaatgaagctattaaaattattaataattggtttgaattcaaaaaaaaatatcaaattactgacgaagctaaagaatatattgctgaaggttttcacactgatattagacagatgattggtaatctaaaacaaatttgtttttgagcggacaatgatactaataaagatttaataatcacaaaagattatgtaattgagtgttcagttgaaaacgaaattccactaaatattgttgttaaaaaacaatttaaacctgaacaaataattgaaattgttgcaaaagaattaaatataaaaacagatttaattaaatcttctattagaaaaaataatatagtttgagcgcgtgatattgtttgttatattctaaaaaataaactaaatttaactttaacagatattggtaaattactaaacggacgagaacacactacaattagtcatagtattagtaaagttcaaaaaattcttgatgatgaaaatagtcaagaagcactacaaattaatctaattatcaataaattttaa

SEQ ID NO: 40491 - DNA, 1080 bp, Ureaplasma urealyticum
atggaatacaacaaaaaactttatgaagcaattgaacgagtcgctattaaaaatgacgctttaaaaaaagaattagaaacggttgtaacagactttaaaaaaattaaagagattaatatacagttaaaaaaaactactaaaattgctgaagcctttgcaaaatataaacaaaaattggatactggtatagctgctgaaaaaatattaaatacagaaaaagatttagaattaatcgaattagcacagatggatttagatgaagctaaaattaatattccaataattgaaaatgatttaaaaattatgctgttgccaactgatcctaatgatgataaaaatgttattgttgaaatgcgccctgctgctggaggggatgaatcatcaatttttgtcggcaatttgtttgatacatatcgtgcttatgctgaaaataataattgaaaaatgaaaattatagaaatgactccgaatgctgttggttttagttttatttcttttatgatttctggagaagaagtttattcacgaatgaaatttgagtcaggagttcatcgagtacaacgtgtacctgctactgaatctaaaggaagagtacatacgtcaacaattacagttgctgttcttccagaacaagatgaagttgatgttgtaattaatccaacagaattaagaattgatacttaccgtgcaagtggggctggaggacagcatgttaatagaacagaatcagctgtaagaattacgcatattccaacaggggttgttgctgcatgtcaagagggaaaatcacaaattgaaaaccgagaaacagctatgaaaatgttaagagctaaattatgagaagcagctcaagaacagcaaaatgcagaatttgctaatttaagaaaaaatcaagttggtacaggggatcgttctgaaaaaatccgtacttacaattatccacagaaccgcgttactgaccatcgtattaacctaacattaaataaattagaccaaatcatgatgggtgagttagatgagattattgatgcattaattgctgacgaacaaactggtttaatggctaatttagatatttaa

SEQ ID NO: 40492 - DNA, 465 bp, Ureaplasma urealyticum
atgataaaaaaaatttattttggtaatgatcatgctgcttatgaaattaaagatcaaattatcactcatttaaaacaaaaaggttatcaaattattgatgaaggtgcacaagccgcattaggttctgttgattatagtacatatgcattaaaagttgctaatgacgttgttaatgatactaaaaatgatagcataggtattttattatgtggcacgggaataggtatgaatatagcagcaagcaaagtgcatggaacgcgggttgcgttagtgtataacgaaagcagtgcaaaactagccaaggagcataataatgctaacataattactataggagcacgtgaaaatagtttaaaccaaattcttaaaatgattgatgattttttaacaagtaaatttttaggcgagcgtcaccaaaaacgtttagatataattgcaaaatatgaaaaagagcaaaatagttaa

SEQ ID NO: 40493 - DNA, 1623 bp, Ureaplasma urealyticum
gtggaaaataaacaaagtacattaaatttaaataacaacacaaatattaatcaaaattttctaacacaaaatattttaaaaacttacgaacataaagatattacaggacttaaaaaattactaaaatcaaaacggattgataaaattgttgaaagtcttgaaactattaatgatacacaaattattttatttgtattagttgccacaaaagatggaatttgtggtgatatttttaaatatttaaatactgaattaaaatcaaaaatcataaatgacgcaagtttacagcaattaagaatcattttatttgaactttataatgatgatgtgattattttaaaaaatgattttcctatgtatactaaaaaaatcttactttcattagacagccaacaaagagcagctattaagcaattatctgaatttgatgaagatgaagctggttcaatcatcaattctgacttttttacaatcaatcaaaatctttctatcaaagaagcactaattgaaataaaaagaatgtataatgactttgaacaaagtaatattatatatgtagtagataattataatcgtttaaaaggatatgtaacaattcattcattactttttgcagattcttttgaattgaaaatttctaatgttattcaagaagatgttttctatgttcgtagtgatgaagatattgatgctgttttagatattttcagaaagtatcaaattgaacaattagcagttgttgataaagataaccaattaattggttatattagtgataatgatattttacccgtaattaatgctgaaacaactactgatatttataaaatgtatgggattagcgaattagattttccttacattaaatcaagtgtttttgttttatttaaatcacgtctattatgattggctgtattaatgatttcagctacatgtactggttttttaattgataaatttcaagatgtaggacaattagtcacagcaggtttatcaacattagttatcgtaccaatcattccagcaatgacgggaacaagtggaaatgctggatcacaagctgccgcctctgtgattcgtgctttatcagttggtgaaattactttaaaagaatataataaagtccttgccaaagaatttttggttggtgctttaattggtttagttttagcaattattaattttgctcgtttgattatatattttgctattattaaacctgatttacaacaatacaatgttttatacgaaaatattactaataatccacatactaaaatgattgtaggagcaattgtttcagctggatcatcagtcgctttgttttttgctattgtaatttctaaattgcttggtggaacactgccacttttagcaacaaaattaaaaattgatcctacaattatgtcaacaccaattttatcgacattacttgatatggttacaactattatcctatttggttttggtattatatttttattaattattgttgataaagttaaagtcgaacaactaaataatatccgcgagcatattcatgctattaaaaatgttaattcatgattacctaatcaaaattttttattaaataatttgaattattcaaaacattttgcttaa

SEQ ID NO: 40494 - DNA, 501 bp, Ureaplasma urealyticum
atggcaaatgttagaccaagtgttgtttttaaacaacaagaagtcaaccatatggcagatatactaaaaaattcaaaatcttttattgtttttgaatatcatggattaactgctgctaacattttagcgttaagaaatgttttacattcatcaaattctaaattatatgttttaaaaaataatattacagcacgtgcttttgaaaaagctggtgttagtggatttgaaaatcaattaacaggacctaacgcagttgctgttgcaatggacgatgaaattgctgcgattaaagcagtaaatgatgtagctaaagaatttgattttgtcaaaattaaaggtgcatatcttgaaaacaaatttgcagatactcacaaaatcgatcaacttgctgcaattcctggccgtgaaggtctatactcaatgctactttcttgcttcacagcaccattacgtaatgtgatgtatggtttaaaagctgtagctgagcaaaaaggtgaataa

SEQ ID NO: 40495 - DNA, 366 bp, Ureaplasma urealyticum
atgtcaaaattaacaattgaacaatttattgctgcgattaaagaaatgtcaatgctagaattaaacgatttggttaaagctatcgaaactgaatttggtgtgtctgctgctgctcctgttgccgctgctgctgctcctgttgccgctgaagctccaactgaagtaactattaaattagttgaagctggtactaataaagttggtgtaattaaattaattcgtgagattacaggattaggattaatggaagctaaaactgctgctgaaactgcaggcagtgtaattaaagaagatgttaaaacagaagaagctaacgaaatcaaaaagaaatttgatgaacttggtgcaaaagtacaacttgtttaa

SEQ ID NO: 40496 - DNA, 2211 bp, Ureaplasma urealyticum
atgttgaaatttaaaactcttttaagttacgatagctttcttaaaggtcaagagcgaaaaacaatcactaaaaaattcttatcgacagtttttgccatttttgtagcgatagtagtttcagctattttggttggaatattaggctataacatacgtgatttctttataagattatttactaaatgaattggttcgccagatatttatttaacaaaagtagcaattttaggaattgccgcattatcatttattttcgcttttaaagcgggattatttaatattggtatttctggacaaatgttaggttcaggtttgattatgttattagtcgtaaaaaacatgcaaattgccaatattaatatgcctaatgttttaggtcaatttttcttattaatcattgcaatgttagcaggagcaatgtttgcagtttttataggaattttaaaagtatttttaaagattaatgaagttgttagttcaattttattgaattgaataatgttctatattacgcgttatgttgtttttactgcacaaagtaaaatgtataatccaacaccagatcaagttggatcacgatcaattccttttgctgataattattctttatttcatttagcatctggatatggttatttatttgctttattgatctttatttctttatctattattatttgagtaatcttaaaatacacagtttttggtcacaaagtcttatctgttggtaaatcatttgatgcagcaaaatatgctggataccgaacaaaaattatttcattagcaacttttgcgatctctggtgcattagctggggctttagcaatggttaattatacttcaacaacaacaaatgcgattgttattagtcaagctgctgatgccttaccaacccaaggatatgatggaattgcgatgggattaatttctctagcacatcctttagcaacaattcctgtctcattcttaatgggattattacaacaatctgctgataatttaggaggaagttttccacaagatttatctggaattattatttcatttgtaatgttaggggcagcaatgtttattttatttgaacgaataagtcccgtttattgaatttatcatttaatctatacttataaaggtaaggattattatcgagattatgaaaataaaaacaataacattatttctgaatataaagcaatctatagtgaaattaataaaaaacgtaatcaatatttacaagagttaaagaaattacgtaaagaattagatcaatttaaaaatcatgaacaatataacaaagttaaccaacaatatgaatatactattagttacattaaaacaacatataatgcttgattaaaagttgaatatgataaatatttgaaacaattgaaaaataatgcaatgcaacttaaaaaacatttaattattgaaagagcaacacttgtttattatccagaaattaacacaacaagaaaaattaaaaataaactaaaacattttgaaaacataagcgctaaaaaactaagtcgtattaaagacaaaattcataatgaagattttttaattaaaaatttagtggctaaagaaattagtaaatatgctcaatcaaaatcgtttgattataataagctaaaatatttattacaagaatatgaaaataacaattcagtgttaacaaccgagttagttaatgagttatctttagttctaaaagatgaacaagcacaattaatgtttagtgaatttaaacaggcaagttttgagaataatttagatcacatgattgatttaaaaaatcaaattatgacatacattaattctttattagattctcgattagaacaattgtcaataactttaaaatcaaagaatttagttcatgatgaacaaatggataagattattttattactaaatccaaatgataaaattcttaataaaattattatttcgcgtaataaacatttagaaaattacacgaaagaaattacaaaattagaattaagaaatatttcgcaagatgatgaaattaaaaagaatacaaaacaacgctcatcatcatacttgacaaaacattatgaaaaaactaaacaacatattaataaaattaatctagatcaagaacaaaaattattattagaagattgattaacaactgcttatcaaaaagcaattattaatcaacaaaacatgaaagaggtgattagttaa

SEQ ID NO: 40497 - DNA, 798 bp, Ureaplasma urealyticum
atgttagaaaaaataaaaattattgatactcatactcatcctaatattgaaccattaattgaagaatttgatgacattatctttaaatgttatgaacaaggtattggattaaatattgttggagtagatttaaaaacttcacagacagccattcaacaagctaaaaaatttaaatttttgacttgtagtgttgcaatccatcctaatgatttacataatatagaaaatgattttgttgcattagaaaaattgatagcagaaaatattgattacataagttgtattggtgagtgtggtttagactattatcatgaacaaaattatgatcatgattttcaaaaacattggtttaaaaaacatattgaattggctaaaaagtatcataaaccattaatgttacacatccgtaatgcacacgatgacgcaattgccatcttaaaagaattagctgttcaagatgtaataatccattgttttacagataaaaaagagtatgcacaacaatatattgaaatgggttattatatttcatatcctggtgtaattacttttaaaccaacaaaaaataatcaattacatgaactgtatgaggcgattaaaataaccccacttgataagattctagtagaaacagacgccccatatttaacaccagttcctaaacgagggcaaactaactatccttattatgtattatatacatcagcatttattgccaacttattaggcattacacatgaaaaaatgcaaaaaatcttattagaaaattcattaagaattctaaattttaaaaaataa

SEQ ID NO: 40498 - DNA, 1317 bp, Ureaplasma urealyticum
atgtcaacaattgttgctttagcaaccgcgcctatgaattgtgccattcacattattcgggttagtggtccaaaagcttttgaaataattaataaaatttcaacaataaaaataaaaaaagaaacttttaaaatttggtatacaattctaaaagatgataatcaaattttagatgaagttttaataaatacatttgtagctccaaaaacatttactggagaagatttagtagaaattaattgccacggaggaatagtggttgctaatttaattattaaaacattaattaaatatggttgtcaaccagcacaacgtggagaattttctcgccgtgctttattaaataaaaaaatggatttatcaaaaattgaagcaattaacaatttggttaatgctaaaaatgaattaagcgttaaaggtgtaattggcgctctattaggacgtgtttcgcaatcaattgctgaatttaggcatgagttatttatgataattgggcaaattgaagttaatattgattatcctgaatacgatgatgttgaacaagttgatgctattattttaaaacaacgtttattatctttagataaaaaaattacaaaaattattgatcaatcaaaaaaatttttaccaatcaataaaggcattagggtgttaataattggaaaaccaaatgtaggtaaatcaactctattaaacgctttatgcaatgaacaaaaagcgattgttacagatattcctgggacaacacgtgatgttattgaatcctcaattaatattgataatattactttaaatatcttagatactgcaggaattcatttaacaaatgattttgttgaaaatttaggaattaataaagccaaagcattaattgataaagttgatttaattttatatttaatacctgcaaacgaacaacaagatttggagttatatgatttaattaaaaaacaaaaacatttattagtttatacaaaaaaagatttagttgatcaatacgatgataaacaaatatatattaatgcaaaaaataatgatattcagtcattgattgatgaaattaaaaaacttttttatgttcaagagtttgacaatgctaacattgatgttttacaatcccaacgtcaaattggtattttagaaaatgttcattatttaattaataacgcaattcttaatttagaaaaaggggatacacttgatttaattgtcgctgatttagaattttgcaatttacgtttaaatgaactcttaggcataagtagcgaatatgattttttagatgatttatttaaaaatttttgtataggtaaataa

SEQ ID NO: 40499 - DNA, 702 bp, Ureaplasma urealyticum
atgataacaatgatattaacgaaaaatagtaatgaaaaaaaaccgcttaaaaaaggattatttattgtttttgaaggaattgatggtgcagggaaaacttcaatcttaaaacaacttttagaggttttaaaagaacctaaactagttaataaaatttttttaacgcgtgaacctggtggaaaaaacaataatgcagcagagatgatacgtgagttttttttaaaaaatttagaagtttttgatccgttaacactagcttatttatatgcaagcagtcgtgctgaacacgtaaaaaaaacaatcaatcctcatttagaaaaagatcatattgtaatttcagatcgttttgttcattcttcatatatttatcaaggtattgttcaaaatcaaagtttagatgttatttaccaaattaatcaacaagcaattggtgaattagaaatagattatgttttttattttgatgttaatgttaataatgcattaaatcgaatgaaaaatcgttttgacaatacaaatgcattcgattcacaaaataaacaattttatgaaaagttattaaaacaataccctagtgtttttaaagtttataatcaacctaaaaaaattatttttattgatgccaataaaaatgaaaatgaagtattatgtgaggttaaagaacaattattaaaaatttttaaagaacataaatatatataa

SEQ ID NO: 40500 - DNA, 870 bp, Ureaplasma urealyticum
atgattatggaattaattaagactaacacacttaatttttattttgagccatctaaaagcgaactaaaaaaaggttcgattgtttttatacacggccttgatgcatctccacattatttttttttaattaataaagatttatctgattatgattgttattttgttggattacctgcacatggtttaacacctattaataacaaaaaagatttaaatattaaagtttttgctgagttatttattaattgaattaatgaaattgatttaaaagaatttcatttgttaggtcattcattaggagcggggattgctagtttggttagttttattatcccccaacgcattgaaaaattaattcttgtttgtccatatcattatcaatatttaaatccgtttttaaataaaaaattatttaatgcttgggttttatttcccaatccatttttaaaatttaaaacagatgtcgttttaaaaaaattatatattgattatcgtaataattataaaaccttaatagaaactcgttgggagtcaatttcaagagaatatccacgaattgcacgcgatgtcttatttttatgtttatcgttattaaatattaaaatcaatcatgaattaaaaatggcacagcgtaatttaataatgccaacattaattatggtttcaagacatgatcaattaattgattttaatttagctattaaagtgtttaaaaacaacaataaagtaaatcaatatatttttaataattctggtcatattccttttattgaagaaccaaaattatttactaatatattactaagttttttagaggatagatttgtagaacaagaggaaaatgataacaatgatattaacgaaaaatag

SEQ ID NO: 40501 - DNA, 1413 bp, Ureaplasma urealyticum
atggttttaataatgaaaattagttttaaatttagattaattaatgtaatttcaatgcttggattaagtattatttttacaacattaagttcatgtaaaaatcttcaacaacaaaaaccgtatgatactaattgattattcaaaaataaaaattggagattgaataatttttttcgtgatccttataaaattcatttagaatttgctcgccaattagataatgttttaaattttaatgaattaaaaaaacgtctaccaaaaccaatgcaaaatgtacattcatttactgaatgaagtctaaagatcgcacgtttattaaaaaatgatattaataatgtagcaatgctcgatagcatccaaaaaatgcgcaatcataaagcaactgttttagttatagaaaatcgtaatgaattagttaataataaagaaaattataataaattttctattctaacaccttcagattttccactaatctattctaatccttatacagaagttccaggattgggattgaattttccaaaaccaattaataatgatattagtgatattattgatcgttatcaatcaattggttataatgcattaagaacaaacccgctcgaatcagtcttaaaacaaacatcttcattttataaaacagctgattatgttttttatatgtatgattctaatttatttactaataataaatacaaaacagatggtcaaaaacgtgaagatttatttaaagaaattttatcaaacaaaaatttttatgctcataaattcttacgcaattctcgttcaaaaattatttttattgatcgttcattgttttgatgaggttcttttacaatggttgggcaatcactaattattaaagaattattaaaaattttcacaaataaaaaaacaataaaaaaacaatgaagttatctcccatttaataaagaagaattaataaatttatttgatcacaaaccaactattaaagagcgtaatttaataattaaacctcattatataaataaaaattttaagctaacttatggttataaaattgttgggacatgagcagatagtattgatcatttaatttcattcggtttaaaacctgatgcaatagttgattatgaaagttttaataatattaatttaaaaacccaaggtgttggtaattatttaaaagagttgattaattatgataaattagaaaaaattaataaggctcctaatgatagtgaaaaagcggaatttgttgataaaaattttgcaatttatatgggcccatcccatttattaaactcaatgaataaattaattatgattaaaaatacaggatcttgaataattagtagtacacaaggaattaatgatcccaaaacccaatttaaaacaagaatcaacacggctaaatcagatttttaa

SEQ ID NO: 40502 - DNA, 1050 bp, Ureaplasma urealyticum
atgtctcaaatggaaaattcgacgaaaaaagttgaatcggtagctaacgttgaagtagttactactgaaaatgcaaaagtagaacaaaaacctacatcaccggctgatgcaattcagcttaaagtcaatgcaaattcaactataaaaaatcttaaaactttagtttcaattgtaaaattaactgaatcaggtgctcatattgggttaaatcctaagaaatgaaatcctaaaatggctagttacatccatgctaaacgttcaaataaccatgtaattgatattttaaaaacaattctatttttagatcgtgcatacaaattcttacaagaggtttctcaaaacgggggcactgtgatgtttgtgggtacaagaggtcgtgttgttaaagaattaattaaagcagaagcagaacgtactaattcattttatgtaactcaaagatgattaggtggaactttaacaaactttactaacatctcacgttcattaaaaaaatttaatagtaatttagctttattagaaagtgaagagattaataaatattctaaaaaagaacaaattgcaattaataaagaaactgctaaattagaaaaattctatggcgggattaaaaatatgaaacaacgtccagatgttttaattctagtagatcctgttaatgatgttaatgctattaaagaagcacgtaaattaaacattccagtaattgctttagcaaatacgaatgctgatccacaattgattgattacattattccagtaaataattattcagttaaatcaattactttgattttaggtgtgctagcagattcaattgctgaattgcacggtgaaccaacaaaaattgttggacgaccagatagcgaaattgttttacctgaaacaaaatcaaattgaaaacaaaataattatgacccaagcaaacgtggttataatccaaaatatgtaaatcataaatctacattcaataaatttaataacaaaaaaccagttgattcaacaaccaatgaaataaaaacaaacgttattaaagcagaaacaaaataa

SEQ ID NO: 40503 - DNA, 2121 bp, Ureaplasma urealyticum
atgattgatttaattattaaaacactagttcaaaaattaaaaattgaggcaaaatatataacaaatgttttgaatttattagctgataataatactattgcattcattgctagatatcgtaaacatttgactaacaatatggatgaatttcaaattcaagcaattgcacatgaatatgaatatcttacaaaattaaataaacgtaaagaagtaattattaaaaatttagaacaaaaaggtttattaactaatgacttattagaattaattaataattgtcaacggcttgttgatcttgaaaatctttatgaaccttatgcctcaaataaaaaaacaaaagcatcaatcgccattgaaaaagggttagaaccattagcattattaatattaaaaaataatcctaattctaatattaaagaagttgcaaaacaatatttaaatgaacaagttttaagtgttgatgaagctattgctggagcttgtgatattattgcccaaaaagttgctaacgatacaactttaagagaaatgctttatgaaacaattaacaaacatgctaaattaatcacaagaattaataaaataacaaatgacccaactaaaaactttgctttatattatgagtttagttgcccaattaaatatttaaaagcatatcaattaatggctattgatcgagctaatgaattaaaaatcattgcatttaaacttgattttaaaaaagaatttcttattgattttgctgtcaataaatatactagaaaaatcaaaagtaacagctatgactacattaaatcagctgttaatgatggttttgatcgtttattaattccttcagtttcaaatgctgtttacaaagaaaaattagaggaagctcaccaacaatcagcacaaatttttagtaataatttacaacaattattattacaaaaacctttaaaaagccatgttgttttaggatttgatccaggatatgtgcatggttgcaaattagcaattgttaataaaaacaatcaattattacatactgatattatttaccctcacaaaccacagatattaattacacaagctaaaaatacgttaatatccttaattaataaatacgaagttaatacaatagcaattggcaatggaacagcatcaaatgaaagtgtaatttttattagtgatttaattaaggaattcaaattaaatcttaattattgtgtaattagtgaagatggtgcttcaatttattcagcatcatcaattgcaagtgaagaatttcctaacttaagtgttgaaaaacgttcggcaattagtattgcacgaagaatcattgatcctttaagtgaattaataaaaatcgatccaaaaagtattggtgtaggtcaatatcaacacgatattaataaaaacattcttcaacaaaaagttgatttttgtattgattattgtgttaatcaagttggtgttgatgttaatactgcttcaattcctttgttgtctaaagtatcaggtttaaataagcgaagtgcaaaaaaaatttttgaatatgttaaaaaacatcaatttattgaaaatcgtgaacaattaaaaaccattccttacattaccgataaagtttttgagcaagccgctggttttttacgaattaataatgctaataattttttagatagaacaagtattcatccagaagcatatctagttgttaatgaattatgtaaatatttacaattaccaattaataaattaataaataattatcaagttttaaatcaattaaatcctaatgaattaactactattctaaaaacagatatttatactattgaaaacattattaataacttaaaaaatcctttacaagatgttcgtgatgattatgatattcctattttacgttcacaaatggttgatattaataacttgaaaatagggatgttagtacaaggaacaattcgtaaccaaacagagtttggtagttttattgatattggtttaaaaaatgatgcattgttacatatttcaaactattgtgaagaagataatttgcatgttaataaaaatattaatgtttatattgataaaatagatacaattactcaaaaaatttcattaaagttaaaattatag

SEQ ID NO: 40504 - DNA, 2244 bp, Ureaplasma urealyticum
atgaatctaaaaacaaaattttttttaaaagttataagtgttattgctccaattgttataattccaactattttagctaattgtgcacatataaattctaatgaacttgataatgctaaaacaaacttgaaaggaagtgttgaagttgttaatattaatccttataaaacaaaacaaatgttagcatcaaatatcaacaaagaacaaattaattcttattttatttttatttttaatttaattaaaacaaatcaaaaaattgaagaaaaaattttagataaaaatgattatgaaattcttaattgagctgctaatgataatgatggaacgttaggtattaacatttacattaaaaccactaaacaaagttatttaattaatactaagcctgtttttttaacagataaacaaaacaattatctacaagaattaaaatataaaacacctgctgtttatagtattgatgaaatcttaaaattctcaaacaacccttataatttaattcacaataatccatactatagagaacaattattgcgtgcaaaaatttattttaatcaaaatgaagctaatgttgatgattctaaactttatatgaacaaaatcggttattctgaatttggtagtgatgtccaaaaaagattagaaaacgcctttaaaattcgttatgatgagcaaaatatttatcaaattaattctccgcaaattttagctaaagaaacaaaaacgcttacatcttatattgataaaaaaacaaacaacaattatagtattaatatagaattaatcaaaaaattaatccaaattaatccttttggtaaactccccaaaaatttcgctcaactaattaatttaattaaaaaagaagaatatcctaaattcttgacaattactaaaaacgaatctgttgacaatattgttgttaaagatatttattatcggattattgatcgttatgcaaaattagaatttattttagaaatttataacaaaaaaacaaaacaaaccgtatatttaagtgctaattttaatcaaaagaattcaggattattaaaaaatgaagattattttcaatatatttttgatcgtaccatctcacttgatttactaacaacaaaagatggaaaaaatgttgaattaaattctggaactggttgaattgttgatcgtattattgacgatagcttacctaaaaataaaattaaattacttattgcaactaataatcatgttatgggctgatcgaatttagcaatctcaaaagataacagaatgaaatcacgctggtttaataaacaagaatatataaattatttagaaaataacgctggtttcatatcctcaaacatttatgaagataaagaccgttatcaatatttactatgggggactgcgcctctaaaatctccagtaagtaataaatataattcattaagtggtattagtttttcaaatttagcaaaggtttataatattacaaatcaaaatttcattaatcgagcatgatatataccacaattaagtgctaatggtataaaaatcaatgaaaatttaagaacatgatatcaaattaatcaagaagatattaaatcaattaaaaatggaactttagactttgttttggtcccaatggtttttgatattgaagatattaaagaaaaattaccaaattattataaagtattaaatacaaaagatgaagcaaattgatatattggattaggcaattcaaaaaaatacttgccacaattacaactatttagtggaggatatcctggtgatgttaatcctaatagttcagcgattgtttcatggcgcggttctaaatcttatggttcactaattcaagcatttgatcgtgaaattaaaaatgaatcaattttagattattatggtccaaagcaaattaataatattgatggttatcaaaaggttggcgaaggttatttaaataaattatttaatgttggaacacgagttattacctctgatgaaataggtgatttgggttctggttcatctggttcaatgattattgattctaactttaatttagtaggtattcattttgcttctttaaattcgcgtgcttatggtgcgccaaatgattcaatgattggtaatttatttgttgctcaatcccaagacttaagtggtgatattgatgtaagagctgcggtgataaaaaaactaaaagctgaaaatatttacacttataaactaaaccctaaagttagttcttaa

SEQ ID NO: 40505 - DNA, 765 bp, Ureaplasma urealyticum
atggccattgttgctaaaataaacggaaatgcatcagaatgatatcacgcaccaatcgctttagctttcttcttacggttttcattaattaataaaatttttgcaattatactatcttgtattttttgcgtaagcatttatcgttttcgtaaaaaattagtacaatatgaaaattttaatgaaataaaatcaattaaaaataatgcgattcttactgtaatttttagtgttgttgcaatactttcattaacactatttattaatttaatgattgtttttattaatcaaaattactattacattaaacgtattcataatttacttataccaataagaattgatgaaattaaaattttagaatatagttacatttatttattacgttgtggattttatattttattaacagtatttatagcaaaatttattcatgataaaagaagtatgataaaggttttatcattatatttattcgttaattttatattaatgattattggaacttcatttacttttttagaacatacaaacttttataatggtatgttaacttattgaacaacttttagttgtggattattatatccagaaattattaatgataattttcagtgaataagtagttttaattacaatctaaaaaatactatttatgaaaataactttattgcttatttaccttatttttgctcatttatcgttttaataatcttaattaaaaaagttagttgaaaatcaattactattagttcaaatagttattaa

SEQ ID NO: 40506 - DNA, 1845 bp, Ureaplasma urealyticum
gtgaaaaaatatgatgtaattgtcattggtgctggacacgcaggattagaagcagcttttgcaacttctaatcttaatttacaaacagcattaattacattggatgaaaaagggattgggatgatgccatgcaatccttcaataggagggccggctaaaggaattgttacacgtgaaattgatgcccttggtggtattcaaggtaaggcagctgatgctacaacaatgcaaatgaaaatcttaaattcatcaaaaggaccaggtgtttgagcgattcgtgcacaaattgataaaattgcttaccaacgatgatttaagcaacaaattaaacaacaaaaaaatttagatttaatcattgctgaggttagtgatctattagtagaaaataacattgttaaaggtgttgttttaagtgatcaaaaaatcatccaagctgattatgtaattattacaacaggaacttatttaaaatcaattactcatcgtggttcggtttgtgttgatgaaggagcagatggtacaaaaaatgctaaatttttaagtgatgcattagtgaaattaggatttgagttaattcgtttaaaaacagggactcctgcaagaattaaaaaagattcgattgattttacaaatatgattcttgaacctggtacaaatcaaaaaattgcttttagtcactatcaccctgtttataaaccttatgacgaacaacttccttgtcatattatttatacaaacgaacaaactcaccaaattattcgagaaaatttaaataaatcagcaatgtatgggggtatgatttctggaattgggccacgttattgcccttcaattgaagataaaattgttaaatttagtgaaaaaccgcgtcaccaaatttttgttgaaccagaatcttatgaattagattcaatgtacttaggtggtttttctacttcaatgccaatcgatgttcaagaaaaaatgattcgtagtttaccaggattagaaaactgtgaaatactaaaatatgcttacgctattgaatatgatgctattgatccaacccaactatatcctagtttagaatcaaaattagttaataatttattttttgctggtcaaatcaatggaactagtggctatgaagaagcagcggcccaaggattaatggctgcaattaatgttaatcaaaaatatcaaaataaagaacctgtcattttaggtcgtgatcaagcatatattggcgttatgattgatgatattgttaccaaaggcgttgttgaaccatatcgtttactaacaagccgtgcggaacaccgattagcattaagaaatgataatgctgatgatcgattaatgaaaattggttttgaaattggtttattaaaaccagaagtatatgaccaatacttaaataatttaaaacaaattaaagaaatcttaaactgattaaaaacaacaactgttggccaaattgatgacttaaaatttacaactctaaaaacaaatagttatttaatcgattatttaaaacgtcctgaaattaaattaaatgatttattaatttattgtcctataaaaattgaagatgaacaaattatcaataaggtacaaattcaagttaaatttgaaggttatattaaaaatcaagaagaaaacttaaaacaattaaagcgtttaaataatattaaacttcatgcaattgttgattataaagaagtgccaaatatttctttagaaacaattgataaattaaataagattaaacctcttgatcttgaacaagcaagtcggattagtggggttaatttaacagacattgcaatgattaaatattatttagaaagaattaaaaatgactag

SEQ ID NO: 40507 - DNA, 645 bp, Ureaplasma urealyticum
atgagttttgaaaagtataaaacaattattcaaaaatataatcaaatttttaatttgacaagacttgatagtgatgataagatttaccaaaatttctttttagattcacttgcaccttataaagaactagatttttttacacaaaatactaatcttaaattaattgatattggttctggttctggaattccaggggttgttttaaagattatttttaaaaatttaaatttaacattattagaagctaatcaaaaacgatgtgaatttcttaaaatattaactcaagaattaggtttaaatgatgtcttaatttgaaatatgcgtgctgaagatttaacacaatcgatgcgtgaatcttttgatattgcaacttcaagagctgttgcatcattagataaaattttagaaatttcagccgcatttgttaaagttaatggttatttaattcaaccaaaatcaataaaattttatgaagaagaactaaaagcaaaaaatattataaaaactttgtatttagaaagaatcgctttaaaagatttttgagaaaatgattatcatcatttagttggtgtttatttaaaaaaacaaatcactccactacaatttcctcgtccttgaaatctaattcttaaaaaaccactctaa

SEQ ID NO: 40508 - DNA, 915 bp, Ureaplasma urealyticum
atgcaattaaaagatttaattaataaaaaaaagaatttaaataatattaatttaaaagtgagtaacgaacgtaatatttttttaattaatattatgaaactaaatcagcgattaactttttttagtaaaaatgcttttgaaataaaagaatcaattctaagtttaaagcgtatttataatattaaacatgatatgttaagacatgaggaacgaaagatttttaagtttttaaataaaattaatgatcgtgttttatggatttatttaactgaagagcaaaaatatagtactgattcatattcgcgttatgaacaaaaaatcttaaaaacgattaaatcaaatcgtgatgattttattttgatcggtcaaggagcaattgaatttggtaagaatcataatttaaatgttctgcaaacatttaatgactcaaatattaaaaatttaactacacaattaactaaaatgattatgattttatatacttttgataattataaaaaagttaattttgttattaattctaataaaaactatgatggacactttactatattaccaatgaatgaatttagttttgataaatttattaatttacaaaaatgcgattctaatattattgattttcaaaaagtaaaaatttatccaaatttaaatgaatttattaatgtccaaattaatgttttcttagttaatattattaatactttaattactgaatcatctttttataaaacaaaaaatggactagtagctactaataatatcctaaaagaactagatgataacctttcaaaaattcaacgtaaaattacacgtgtaaagacagagttgcaaattgaagaaataaatttattagcaagacaaaatatgaatgaagatgataatgataacgatggtggtgtttatgaatcataa

SEQ ID NO: 40509 - DNA, 426 bp, Ureaplasma urealyticum
atgattgtatcaaataaacacgcacgtcgaaattatgaattactagatttttttgaatgtggaatcgttttaaaaggaactgaagttaaatctatttcacgtgctaattgctcaattaatgaagcttatgtccaaataattaaaaatcaagctttaattttaaatatgcatgttgcaaatttttttgagggtaataactttaatcaagatccataccggaatcgaaaactattattacacaaaaaagaaattattagacttcaacatttagtgaaaacacaacatatgacaattgtgccaaccaaaatttattggaaaaataataaactaaagatagagattgctttaggaaaaggtaaacagcttcatgataaacgtgaggatataaaaaaaagagatttagcgcgtgaaacgcgtttattttaa

SEQ ID NO: 40510 - DNA, 1797 bp, Ureaplasma urealyticum
atgagccaacaactacaaaccaataaacctgtaagtaaactttatttaatttattattattttaaggattttaaaaaagtatttattggtttgtcaattgccattattttttgattatcaacaactattgcagcaacttttttattacaagaaacggttgataaatatgctattgctaatggtattgttgatacagtagttaaaatgtgtgcaggattgataggaatttattttttctcatttatatttttactaattatcaacgaatttgccattcgaatatcttttaagattgaatcccatttatcaatgatggtgattaatcgtattcgttatttaccaatgaagtattttgatattaataaaagcggagaaatttttactaaaacactaagtgatccaacaagtgtacaagatggaattgttaatttttatattgagttaaataaagctatatttggcgcaattggttttggaactgctttattaataacaagtccttatattgctttaattggaattgtcatttatgttctagtaatgctatttaatattttgatatttaaaaaatcccatcaattaatgcgcataaaacggcaaaattttggtgaaatgaacggatatattgaagaaatgatttatgggcaaaacgttgtagctaattttaatgaacaagtttttttcataaaaaaattagataatatgattaaaaaattatataaaaattgaattaaagctcaatatagttctcaaattatttttccttgaagtatcttttctatgcgattaatgaatgccgttttaattgtgtcttatttattaatttctattaaaggaattcatttgccagggcttataaataatattgatccaacaacgaatattatttcttttggtggtttagttagtatttcattatttggtaatttcttttgtgataattttagtcaattatcaaatactattcctatttttatcgttgctagaacatcacttgctaaaattgatgaaattgttaaaactcctaatgagataaattgaaatgaaaaattaataattgatgcctcccaaggcattgaagtgcgttttgaaaatgttaattttaattatttaaaaaatacacctaccttaaaaaatattaattttgttgccaaaaggaaccaaagaattgctattattggacccacaggtgctggaaaaacaacaattactaacttaattaataaattttatgatattaataatggctttatttattttaacgatgttgacattacaaataaatcccgtgaaagtgtacgtgaacatatttctattgttttacaagatccttttttatttagtgaaagtatttatgagaatatcaaaaaaggtaaaatgaatgcaacaaaagaagaaattattgcagcagctaaaaaagctcaagttcatgatttgatcctttcatttccaaaagattatgctacagttattgatgaaaaacaaaacttatcacaaggtcaaaaacaattaataactatcgctcgtgctattatttctgatgcgaaaattattattttagacgaagcaacaagctctgtggatacgcaaaccgaacataaattacaattagcaattaataatttactaaaaggacgaacatcatttattattgcccatcgattatcaacaattattaactctgatttaattcttgtaattaaagatggtgaaattattgcacaagggaatcatgattatttgattaagaattcgcctttttatcaagaactttactatgcaaattttaatgaataa

SEQ ID NO: 40511 - DNA, 1482 bp, Ureaplasma urealyticum
atggaaagaaaatttagtgatcaagaattaatccgtcgtacacacttacaagaattaaaaaaccaaaataaaaatccttttttaataacaaaagttgatagaagtatgtttttaaaagactttgctgaaaaatataaaaattttagcaaagaagaattacataatatggatttagagaaattgacacttgctggtcgtttaatcggaatacgtcaaacctttgggattattcaagatttttcagcaaagttacaaatttatattaataaaaaaaatgttgctccagaggttttttcaacttttaaatcattagatattggtgatattattgaattagaaggtgtagcaatgaaaactaatagtgatgaaattactttaaatgttacaaacattcgattagttgctaaaagtctaaaagttctccctgaaaagtatcatggattggttgatgaagaaattaaagcacgtcaacgttatttagatttaattgttaacgatgagacaaaaaatacttttataaaacgatctttaattatacgtgaaatgcgtaattggttagataataaaggtttttttgaagttgaaacgcctgttttgcaagatattttaagtggtgctgctgctcgtccttttattacacatcataacactttaaataaagaatattatttaagaattgctactgaaattgctttaaaaaagtgtattattgggggttttgaaaaagtatatgaaataggtagaatttttcgaaatgagggaatggatagtactcataatcctgaatttacttcagttgaattatatattgcatatgttgatttatgatatattatgcaactaactgaagatttaattcgtcatattgctactaaattaaacttattaaatcctacatttagaggttttagtattgatttaaataaaccttttaaaaaagctcatatggttgatttaattaatgaatatgttggtgttaatttttttgaagttaaaagcgatgaacaagcaattgaattagcaaaaaaacaccatgttaaattattagatcatcaaaaaaactttggtcatatcgttaatgctttttttgaaacttttgttgaagaaaaattagttgaaccaacatttgtatatggtcatccgttacaagtttctccacttactaaaaagaatcagagtgatcctcgttttgtagatcgttttgaattatttatttgtcaaaaagaatttgctaatgcttatagtgaaattaatgatccaattgatcaatatgaacgttttatcgcacagttagaagaagctaaattaggaaatgacgaagcaagtgaattagatatggaatttattgaggccttagaatatggtatgcctccaacaggtggtttgggaatcggtgttgatcgtttagtaatgctgttaacaagtaatgatagtattcgtaatgttttattatttcctcacatgaaagataaaacaaaataa

SEQ ID NO: 40512 - DNA, 882 bp, Ureaplasma urealyticum
atgttgagttctataaataagttaaaaaataaattaaaaaatctagcaaaaaaaccaataaaagttttatttattgaacaaagtttagaaattgataaagcaaaaaaaatgttaagtcaagatactttaattaatatcgtagatttgtcatcttttaaaacaccagaaattattaatgaatgcgaagagatttgatatgaattacgaaaattaaaaggtgagagtcgaaatgatgcccaaatagcagttaatgacaatttaaattttgctgtttgtttaagttatttaaaaaaaatcgatgttttaattgtgggtgctaacttgtcatcaaaaacttgttttagtagtatcttaaagattttgaaaaatcctaacggttcgatcgcatatagtacaatggttatgattaataaacgagaattaatttttatgagtgattgtgctttaaatttaaacttgaataaacaacaaatgattgatgcagcaaaatattcatgcacaattagtagaaattattttgatgttttaaacaatcatgtgggatatattagttatttaagtcaaaatgatgttatttatcaaaataaaaattttgattttattggcccaattcaattcgatgctgtagttgatttaaaagttcgtaataaaaaagtacctaatatccatcaataccatattaatcattatgtttttgataatataagtattgcaaatactgtttttaaaatttatcaaacaaaacttaattatttaacagtcggtacatatattagtaatatcttaacaaaagttagtgttattagtcgttcagcaagtagtgatgaaattattgcaacaacttatttattatgcgtggcttttttaacagatttaacttaa

SEQ ID NO: 40513 - DNA, 876 bp, Ureaplasma urealyticum
atgtttaaaatttttgctaaatacttttgcaatcatcaattagatcggaatcaaattattaatgcaagtaaaaacgacgctttaattattaataatttatcttatagatatcacaaaaaacttcctgaagttttaaaaaatttatcatttagtattaaaaaaaattcatttacaacaattttaggaccaaatggatgtggtaagtctacaacagcgaaagcgattgttaaattattaaaacttaaaaaaaatattattaaagtgtttgatagaaacattaatgaattaagttttaaacaattagcacaattaatttcttacattcctcaaagtattgaaattccccaaggcactcgtgttattgattttattacgtttggtcgtaatccatatttaggatttagtggtattttaggaaaagaagataaattaattattgatttagtaattaatgaaatgcaactgcacgatttaaaagaaaaatttatgcaagaattatctggtggtcagcgccaaaaagttattttagcattgtgtttagttcaagatactccaattattttattagatgaaccaactacatatttagatattaaaaatcaatatgaattacttgaatcactaaaaaaattacaaattttacgtcaaaaaacaattattgcaattttacatgatattaatcaagctattcaatatagtgatgaagtttttgtcttaaaaaatgggcaaatctatgcaaatggtaatccaaatgaagttattactaaagagttattaaaaaacgtttataacattgatgctcaaattgatattgttgataatcaaaaaattgttcataagattaaagttaaagattatttatcaaatagtgaataa

SEQ ID NO: 40514 - DNA, 1071 bp, Ureaplasma urealyticum
atgaaaattaatcaaaaaacgaatttaaagcaaaagcatttttatttaattaaaaatcttaattataaacaatctgtaatcattaaaatggcaggactaattctcattgccatttgttttgtttttttaacattagcaatttattttgataccactaatggttttgaagcatcgatcaatcaatttaattttaatattcgtggtcctaaaactttaatggcctttttttcaggaggagcaattgctgtagctggattattattacaaaaagttacacgtaatcatttagcagatacgtcagttttaggtattggttcattaaacatcattttaatgacagtatatttaattcttattaaagataaaacaagcagttatttaaatcctgaaatgcgaattttacccttggtgatgtttttatcatcaatttttggaacaagtattgtttatacattatcaaaattaggaagagctaataatgaaaaatttattattatcggaattgctttgaattttttatttgaagcgatttccgtggttttaattaatcctgctaataattcattgttctccaatcaagataaaaatttaatgattgcttttgaaaatatcaaaaattatactttaggaattattccaaattcgcaatatattgatttatcattagtaatctcttgctcagtattaattgcattaacattgattccaatttgatttttacgtaaaaaaattgatttatacgaaacaagcgctgctttagcatcaacaacaggaattaatattgagcgtttaaaaattagtatttatttactagtggctttattagcaggattagaaattgttttagttggttatatagctttattaggagttattggcgctagcgttgcacgtcaattatttggtaatagaacaggtattacaatgtttgcagcatttttaatcggcgcaactttagtgtgttttgcgttattaatttcggttaattttaatacacaagtaccagttggttttttatcaacaacaattattacaccttattttatgtatctaattgtgagaggaaaataa

SEQ ID NO: 40515 - DNA, 993 bp, Ureaplasma urealyticum
atgccaaagagtacattacaagaaataattgataatgattctaacaaattcacgtttagtgaatttgttaaagaagatatttatactaacactgattattcatccacagactataaagttattttatattcgttttttcgtaataatttaaccattaaaattggtcaaaaactaacttgaattattaaatctcaaaatttacaaattattgaatttattttaaatggtttagattattttaataatttaaatattgaatatgagattatgtttgagcctgaccatttaaataaaactcgtactaattattcgctattactttgaggtgatttggataaattagatgaaattttaaaactatttgatgatgcgaataatgaaaattttcataaagaccgctattgttcaaattttttaattggtgcaatgttgtctggtggttcaattgcacacccacttgaaaactatcatttagaaattcgctgtgattcaaataattacatcccattattaacaaaggctttagcccgttatggtttagaatataaaattatttatcgtaataaaaaaaccattgtttattttaaaaaatcagagataatcagtgattttttaaaagcgatccgtacgcaaaattcgttatttgaatttgagaatattcgtatccaacgtgattttaataatcaacaacaacgtttaaataatttagatatttctaacctttctaaaagttctaaagcaggggttttgactaaagaaatgattttagaaataaaaaaaaaccacgatgaattttgcaaacaaagtactaaatttttaaagtattgtgaactacgagtacaaaatccagactgttcattaaatgaactttcttgtttattaaaacagatgtttaatattgaaatttcaaaaagtggtttaaatcattttaattctcgtattaaagaaatgtatgaagaattaaaattaaaaaaactagtttttaaaaactag

SEQ ID NO: 40516 - DNA, 927 bp, Ureaplasma urealyticum
atggaaattcgtggtaaattatttgttagtcaagttgttagaaagtttaatttaaacgttgttgcaaattctgactatattgatcgtgagatttctacaacaggaattacacgtgttggatttgaattagctggcgaaattttgtttaaagagatttgaaatattgtttattttggttcaaaagaaagcaattattttaataaattttcagaaacgatcatttctaaaaaattaggaaaaattttagatttaaatccaccattaattatttttggtaaaaattttaaacatgctggaattttgttaaaattagcagagcgctataaaattccaattgtagaggttaaatatagtttttatgaattaaattttacaattaatagttacattagtcaaaaactttcacaccaatcattagttcacggaacattattatctgtttttggaatcggcgttattttaatgggggaatcaggtgttggtaaatctgagttagcaattgaattagttaaaaaaggtcatatttttgtaggtgatgatgctattttagttaatagaattggaggtaatctatatggaagagctgaagattcgactaaagattttattgaaattagaggtttaggtattatgaatttttcacgttctttcggtattgaacgaatgattgaatcaacaaaaattgaaatagttattgaattaataaaaccagctaaacatgaaaaaatcaagtttgaacgttttggtcgtgaaattcaacacaaagaatttttagaaacaaaaatagcccattattatattccggttatcgaaggaagaagtatttcagatatcattgagacagccattactgattataaattaaaaacatcaggttataattcagctgaagaatttattttacaaattaataaaaaggggatttaa

SEQ ID NO: 40517 - DNA, 1002 bp, Ureaplasma urealyticum
gtgaagattttgataaagttatgaacaaatttaattaatagaattagtaataaaaaatacttagctgctgtttctggtggtccagattctatggcaatgttaaatatgtacaaaagaaatattcgtgttgtttgtcatgtgaattatcataaacgcgaatcatccgatcgtgatcagcaaatagttgtcgatttttgtagaaaaaataatttaataattgaaattttagatgttgatgaaaaagtttatgaacgttatggtcatattgataattttcaaacaaaagcacgtttaattcgttatgattttttcaaagaaattggtaaaaaatataatattgaaaatttgtatatagcgcataattttgatgattttttagaaacggcatatatgcaacgagctcgccaatcaaaagccttattttatggcattaaggaaagtaatgttattaatggcataattgttaaacgtccggttttatttgtgcgtaaacaaacattacaacgctattgtgatgaaaataaaattaagtatggtattgacgaaacaaatgaattagatatatacgaacgcaatcgtgttcgtaaaataattagttcttgaagtttaaatgaggtttatgattttaaaaaattcgttattaaatataataaagaacatagttcttttgctaattttatagatttatcatatattgaatttaaaaaaaataaatacaaatatgactactttattcgtcaagacgatatggttcaatattatttaatttactactttttaattgatcataaaattattaatccaagtgaaaataaaatcatttcattaatcaaattctttggtaaacaaattaataaagaaaaagcttatcgtgttcaagaaaatatttatatgcatgttaatgatgatgaattaattagtttaatatcatacaataaaagcgataatattagcaactctaatgttgatattatcgatgatcataatgttattgagaaatag

SEQ ID NO: 40518 - DNA, 1140 bp, Ureaplasma urealyticum
atggaagtttttatttctataaaaaaattaattgaagcaataaaatttagtacaacaattgctaatacaaacaatgcaaatgctttattattaggtgttttgattgaagttagtcaaaataaaattagttttaagacgacaaataatcaagtgagtggttataaagaaattactgaaggatttgaatattttaatagtggaaaagttttagttacagctaagattattttaggattaatttctaagcttaaagataaatctgttttattaaaacaaattgacacaaatattttattaattaaaactgaaaattttgaaactcaaattaatacaatgaatattgaaggctttcctaatttaaactttagtttagaagattacgttaaaatcagtttgccgcatcaaattatgcaagagattaatacaaaggttttacccaacgttttgaacagtcaaggaattgaaaaaattcaaccgatttctggaattttgattgatactcaaactttagaaaataagttgattgctattggtacagataaaattaaagcttcatgtttaataagagaatatatgggtgaaaaatttaaatttattgtctcttattcaacaatgaaattgattatcgaaatccttaaaaatgttgaatatagtaataatcaaactgttgatttttatgttcgaagtagaagtttaatttttaaaattaatgatgcaattttacaaacaagaatgattgatggtgtttatccaaatatttactcaatttttgatgaaacaaatgaagaaaatacatatgtttttgatcgtcgtttattgatagaaattattgaacggggtatgaatattgttatgcaagaacaaaaccctaaaattagtattagaatagacaaaaatgaagcagaaatcagtttaacaacttttgaaattggtaatatgaaagaaaaaatgtcaatagttaatttaaacaataaaagtgctgagtttattttaaaccctagtttgctagctcatgttttaaaaaattttgataacaacgatgtaacttttaaagttaaagatgaaattttaagacctattatttttatcgataccaaagatgttggatttaaacagattttatcaagaataaaaaattaa

SEQ ID NO: 40519 - DNA, 1953 bp, Ureaplasma urealyticum
atgaacgattctaataaagaaaaaaaatacaccgccgaaagtattaaagtactagaaggtttagaagcagtacgaaaacgtcctggtatgtacattggttcaacccaatcagagggtctacaccatatgatttgagaaattgttgataattcaattgatgaggctatgggcggatttgcaacaattgttagagttattctaaaaaaagacggatcagtacgtgtagaagatgatggacgcggaattccaattgaaattcacgaaaaaacaggcttatcaggtgttgaaacagtattaacagttttacatgctggtggtaagtttgataatgatagttataaagtgtctggtggattacatggtgttggtgcctctgttgttaatgctttaagtaaaaattttaaggtttgagtaaacaagaatcatgttcaatattatgttgaatttatcaatggcggtcatgctattgagccactaaaaccgattaataataaagatgttaaagaaaaaggaacaacaattgaatttattccagattttgaaattatggaagaaaatgagtgagatgagcttaaaataatggctcgtttaaagcaattagcttatcttaacaaaggtgttaacattgaatttgaatcagaattaactaaccgtaaagaaaaatgacattatgaaggtggtttaaaagaatatataacagatttaaatgctgaaaaagaaccattatttgatttaattgtttatggagaagaagaaaaagaagttagagttccaggacataacgagcaaacttataacattaaatgtgaagttgcatttcaatataataattcatacaataactcaacccattcattttgtaataacatcaataccactgaaggtggaacacacgaagaaggttttaaattagcgattacgcgtttattaaataaatatgcggtcgataaaaaatatttaaaagacactgatgataaaatcactaaagaagacgttagtgaaggattaacagcaattatttcagttaagcatcctaatcctcaatatgaaggtcaaacaaaaaagaaattaggtaatagtgaagttcgtccttatgttaatgaaatcacatctattatttttgaaaaatttttaaatgaaaatcctgaagaatcaaaaaaaattgttgctaaggttatgcaagctgctgaagcacgacgacgttcacatgaagcacgtgaagctacacggcgtaaatcaccttttgaatcaaattcattacctggtaaattagctgactgctcaaatcgtgattcaagtgttactgaaatttatattgtcgaaggagattcagcgggtggttcagcaaaaacaggtcgtgagcgtgaatttcaagcaattttaccactgcgtggaaagattattaatgttgaaaaagctaaaattgataagatttttgctaatgaagaaattcaaaatatgattactgcttttggagcaggaataggtcctgaatttaatattgaaaaattaagatattcaaaaattattattatgactgatgcggatgttgatggcagtcatattcgaattttattgctaacatttttttatcgatacatgttgccattgattcaaaatggaaatgtttatatagcgcaaccaccattgtataaagtaagttatgctaaaacaattaaatacgcatattctgatcaagagttagaaagaattaaatcaacaatatcaaatattaaatataacattcaacgctataaagggttaggtgaaatgaatcctgatcaattgtgagaaacaacaatggatcctaaaaatagacttttattaaaagttaatattgaagacgctgcaattgctgataaaacattttctctattaatgggtgatgatgtagctccaagaaaagaatttattgaaaaaaatgcaaaatatgtaaaaaatattgatgcttaa

SEQ ID NO: 40520 - DNA, 2523 bp, Ureaplasma urealyticum
atggcattaaaaaaaccaaaaaaaagtcgtttaaccaccgaagaaattaagcaacaattagaaggttcaacgattaaagaacaatcaattacaaaagaagtcgaaacatcatttttagattattcaatgtctgtaatcgttgcacgtgctttgcctgatgtgcgtgatggatttaagcccgtgcatcgccgagctttatttgctgctttcgaaaacggaatgacacatgataagccttataaaaaatctgcacgttgagttggggatgtaattggaaaatatcatccacatggagatcaagctgtttatcaaactattgtaagaatggcacaagacttttcaatgcgttatttattagttgatggtcatggtaattttggttcgattgatggtgatagtgcagctgcgatgcgttatacagaagcacgattatcaaaaatctcttatgaattattaaaatacattgataaagaaacagtagattttgtacctaattatgatgcatcagaacaagaaccaagtgttttaccatcaggttttccaaatttattaacaaatggaactacaggaatagctgttgggatggcaacaaatattccaccacataatttaactgaagtttgtcaagcaataaaagcttatgctaaaaaccataatgttactatttctgaaattatggaatatctaaaaggtcctgattttccaacaggcgctgaaatttatggtgatagcggtattattaaatattttaatacaggtcgtggttcagtaacaattcgttcaaaatatgaaattgaagatattgggcaaggacgtgtagcaattgttgtgacagaaattccttatatggttaataaagctaatttaattgaaaaaattgttgaattagtaacaaacaaacaaatcgaaggaatttctgatttacgtgacgagtcaagtcgtgatggaattcgaattgttattgaagttaaacgtgatgttatacctgaagttttattaaacaaattatttaaaacaacacctttacaaacaaattttagtgttaataatttagctttagttaatggtgtaccaatggtattaaacattaaggaaatgattaaatactattttgaacaccaaattgagattttagtaagaagaacaaattttgatttaaaaaaagcaaaagaacgaattcatattgttgaaggtttagtaattgctgttaataatatcgatgaagtaattaaaattattaaagcctcaggtgatgatgatattgcttcaaaatcactaattcaacgtttcgatttaacagaattgcaaacgaaagcaattttagaaatgcgtttacgcgctttaacaggactaaatattgataaattaaaaaaagaatatgaagatttaatattagttattaaagatttagaagatgttttaaacaactacaatcgtcaagttaatattatttgtgaaaatttagattatttaattgaaaaatttggtgatgagcgtcgtacagaaattatgtatggagttagttcgcatattgatgatgaagatttaataccagtcgaagatattgttgtaacaatgtcaaaacgtggttattttaaacgtttgccaattgatacatataaaaatcaacgacgtggtggtgtaggtgtacaaggattaaaaacgtatgaggatgatgatgttgaaaaaatcttagttgctaatacccatacagatttattattcttttctgatttaggtcgtgtttatcgattacgaggacatgaagtaccattgggatcacgacaatcaaaaggaattccagcaattaattttttaccaattgaaaaaagtgaaagcattttaactattttaccaatagataattatgatcaaggttcattattctttacaacaagtaaaggaattataaaacgagctaatctaagtgatttcgagtcaattcgtgctaatggtaaaattgctattactttaaaagatggtgataaattattttcagtaatgcaaacactaggtaatgatgaagtatttatcggcgcatcaaatggtaatgtaattcgtttcaatgaaaatgatgcacgtgaaatgggaagaattgcgacaggtgttaaaggaattaatttagaaaatgatgaatatgttgtaggaacagggttatctagtcatggagaatatgttttagctgttggttctaaaggattaggtaaattaactgacatcaatgattatcgtttaactaagcgtggagcaaaaggtgttaatacactaaaagtaaatgataaaacaggtaacttagtaagtattaaagttgttaatcgtgaagaagaagctttaattattacaactagtggaaaagttattcgtttatcgattaaagacattagtgtaattggaagaaatacatcaggagttaaattaatttcattagaaaataaagaagaagtaaaatcaattgctatctttaaaaaagaagaaattaatgatgaacaattattacaagaaaatgattacaatctaaaataa

SEQ ID NO: 40521 - DNA, 1005 bp, Ureaplasma urealyticum
atgaaagaaaataataatcttgagaaattagatccaattgcaacacttgaaacaaaatttgctaaatcatcttattttattgctgatgaaataaaagatgaaaaaattaatgcaatatctacaggatcaattcatatagatcaaataacaggaattaatggaattccagtaggaaaaattacagaaatttatggtaatgaatcatcaggtaaaactacaattgctttacaaacaattgctgaatgtcaaaaaactggtgggacagtagttttgttagatcttgagggctcatttgatattaattatgccaaaagtctaaaagtcgatttaacaaaattaatcattacgcaacctcaaacaggtgaacaggcttttgatatgattgaaacattgattaaaacaaattcaatagatttaatagttattgattcagttgctgcaatgctcccagaaagcgaatatcaagcaaatatgaatgaagcattgatgggagcacacgctcgcttaatgtcaaaaggtttacgtaaaattcaaccattaattaataaaagtaaaacagccattatttttattaatcaattacgtgaaaaaattaatactttttttggcaatcctgaaatgaccacaggcggtaaagctttaaaattttatgctagtttgagaatagaaaccaaaaaagcagatttaattaaagagggtattaataaaattggtataaaaacaaaagtaacaacagttaaaaacaaattagcaccaccgttacaaacatgttttattgatattttttttggttctggtttcgattataataatgaaattatagattttgcaatccaatatggcgtcttgaaaaaaaacggttcttgattttattttaatgataataaaatagggcaagggcgagaacaattaaaaaatacactatcaaaaaacaatgaactttttatacaaatttcagaaaaaactttggagtttgtcaataatgaaaaaagcaattgacaataa

SEQ ID NO: 40522 - DNA, 1422 bp, Ureaplasma urealyticum
atgggttatttaatagcatttattatattactaatattatttgtattgctgattaccattgttccagttgtaatggtagtttatcttaagaaaaaacaactgaaattaacttttgttccaaaaagccaaacttcttttaaaaaaatagttcaaaaaactaaagatttagaagaagaatgtgaagatttaaataataaaaataatgaattaaaaaaagcaattagtgatcaaaatttacaaattgatttactcaaaaaaaacaatgaaaattttttactaaatgccacaagtttaacagctgaacaagcgaaaaaagaactttttaatttattaaaaataaaatttaaaaaagagcttgctcaagaatatgcaaaaattaaacacgaatttaatgaagcccaagaaatttatgctcaaaacattctagtagaaacaatggagcaaattgctgagcctttaattgttgaaagatctttatttaatattgacattattgatgaaaatctaaaaggaaaaattattggacgtgatggacgtaataaagcagtttttgaaaatgaaggcggagttgatctaattgttgatcgacaacagccaattgtaggaatatctactccaaatccaattcgtcgtgaaatagcacgaattgttatgcaaaaattaattgattcaaaaaatattgatattaatcgtattgaattactttttaaagaagaacgtgaaaagtttgaaaaaaaagtttttgagattggtaaaaacgtcgtagaacaaacattaggtttttttgatttacctgaaggaatttattcttatatagggagaatgaaatttcgtaattcttatggtcaaaatattttatcccattcattagaagttgctgaatatgctgaacgaattgctaaattaattaatattgatcctataaaggcaaaaaaagctgcattttttcatgatataggaaaaacgattgattttgaaagtgacctagatcatgtagaagcgggattattgattgctaagaaatttaatttagatgattatatttataatgcaattgaatcacatcataacaaagtaattccaacaacaatttatggtgcattagttaaaatagttgatacgctatcagcagccagaccaggagcacgtgttaattcttatgatgaatattacagtcgtgtaaaagaacttgaaacaatatgtatgcgattcgaaggtgttaaaagcgcctatgtcattaaatctggtcgtcaattacgtgtaattgttgattctaacttggtaagtgatgagcaattagaactcttaggtcacgagatcaaagttgcaattgaagaaaatgatttattaacaaattataaaattaagatcgttttaattaaagaaaaaaggatttcaattgacacaaatattattggatag

SEQ ID NO: 40523 - DNA, 1794 bp, Ureaplasma urealyticum
atgagcgaatcaacattgtaccgtaaatatcggccacataaatttaaaaatgtaataggtcaagatttaattaaacaagcattaatgaatgcttgtttaaacaacaaaattacacatgcttatatttttagtggaccacgaggaattggaaaaacatcaatagctagaatttttgcgtctagtattaattgtttaaatcctaataaaggtgattgttgcggcaaatgtagtgtttgtgaaagtattctcaaagaacaaagtgttgatttgattgaattagatgctgctagtaataatggtgttgatcaaatacgtattattactgataatataaattatttaccaacattttttaagtataaagtctatattattgatgaagcacatatgctatctacatcagcatgaaatgctttattaaaaacagttgaagaaccaccacaacacgttatttttatttttgcaacaacagagtaccaaaaaattcccttaacaattattagtcgttgccaacgttatgattttaagcgtttaaataacagtgaattacaagaattaatagactctatccttacaaaagaagatatcaaaattgataataatgcaattgataaattaattcaattagctgatggatctgggcgtgattgtttaagcattttagatcaattaacaacggttaaaaaaaatatagatcttgatttaataaataaaacttttggtttagttgacaactttaaagtaatttctttaatcgaattaattcaaaaaaacgacattttattattgcgtgaatttatttatgaattatacaatcaaggtgttaatttagaagctttttgtgtgcaaataataaatgttttaattgattatttaatttatttaaaaacaaacgatataaataatcttaaaaaagtatcagttgatgaattaaaaaaaatgttattaattaattttaatggtaattatttgttaaataattttatttctttatttaataatttaaaaaaatcattaaatcaagtttttgaatttgaaatttatttatataaaataatcaatgctaataatgataaattagaaaataaaaaaatagaattgtcaattaaccctgaagaaaataaaattaataattcccaaataataacgacaaaaaaaatcgattgttttgaagaaataaataaaaatactgttgattttgataagttatacaaaacaaaaattttttatcacaaaaaaattaacaaccagaatgataaagaatcaggtattaatcaaaaagaagaattaagtacagaattagttaatgataataaattgatttgcaattctaatgatatattagataattatgaactagccaaacaagctttttttaataaagacattaaactttcaaaagaaatgagtcaaaaatttaaagattttaaaaatgaagaaaccattgaaaatagttatattgatattattaaacaagctgatttagtactttggtgctcacctaatgcactagttttaggagtagagtttttaggattaattaatcgtatcaataaagttacgcattcatttgaatttattaaagaatttgttaagaaatttgattctatcaagttagttattgctattagcaaaaaacaagcattaaatattattaatattaaaaaacaaggtttaaaaactaatataattaatgatgttttaattgatgatattaaaatgttattaaaacaagaagaacaacgaaaacaagaacaaacagcgttattaaatgaaattgaagatgaggagtaa

SEQ ID NO: 40524 - DNA, 300 bp, Ureaplasma urealyticum
atggactttcaaaaacttgcacaagaattaaaaaaaatgcaaaacactttaagtaaaaaacaaaaagaatttgaagaaaaagtgtttgattttgattataaaggatatgtacttgttaaaatcaaaggtgatttaaatattgaagcaattgaaataaaaacagaaatagtggatcctgaagacaaagaaacattacaagatattttacgtgcagcgatcaatgaagcaatctctataacatgtaaagaacgagatgcgattatgaatgctacaatccctaaaggaacaggtcttttttag

SEQ ID NO: 40525 - DNA, 606 bp, Ureaplasma urealyticum
atgagtaaaccagtagaatttgaaatgcttgttgatgcacttaaatcattacctggtgtaggaacaaaaaatgctaataaatgagcattttttttgttacaacaagatcaaaaatacattgatgatcttattaaaagaattaaagaagcaaaaacaaatattttaaaatgtaagtattgtgctaattttacaaataaagacgaatgcgatatttgtttaaatgaatatcgtgattttactaaattaatgattgttaccacaaacgaggatttagaaagaatcgaatcagctaacatttataatggcctatatcatattacaaatggtgaaatctctttaaggaaaaacgttgttattgaacatacaaacattaagactattaaagagcgtgttttaaatggtagttttaaagaaataattattgctacaagttatacccatgatggggaagttacggctgattatattataagaatgcttgaagacattaaagatttacaaatttatcgtattggctttggtattcctttaaattcaagcattgattatgcagatgatgaaactttaaagcagtctcttattaataaacggaaaataagaaattaa

SEQ ID NO: 40526 - DNA, 1347 bp, Ureaplasma urealyticum
atgttcaaagcaatgataggtagtattgtaagtaaacaaatgtcaaaaaaattaaaaaatgcgacaattgttgaagaagatattaaagaattattaagcgagataagaatagcattattagatgctgacgttaatttattagttgttaaaaaatttattaaaaacatcaaagaaaaaacaattggattgtatgttgaagcaaaccaaaagccagcagatcttgttttaaaaataattaaagatgaattagttgaaattttaggaaaagaaaataagccagttaacacagctaaatcacaattaaaaattatgatggttggtttacaaggttcaggtaaaacaacaactactggtaaattagctaattattttaaaaataaatacaataaaaaaccattattagtggcggctgatatctatcgtccagcggcgattgatcaattaagaacattagcaaaacaagttcgtgtagatttttgagaagaaggaacacaacgccctgatttaattgtaaaaaatgctttaaacaaagctgatgaaaatgaaaataatttgataattgttgatacagctggacgtttacaaacaaacgaagagttaatgcaagaattagtaaatgttaaaaaaacactaaatcctgatgaggtttttttagttgttgatgctatggcaggccaagacattattaacgttgctacagaattcaataattgattaaaattaacaggtattattgttactaaattagattcagatgcacgtgctggagctgttttatcattaacatcgttattaaatataccaattaaattcacaggtactggtgaaaaaataggatcaattgatagtttctatccagaacgaatggctgatcgaattttaggtcttggtgatatcatgactttagcagagaaagcagctgatgttattgatgaaaaacaagttcgtggttcgatgcaacgaatgatggcaggaaaaatggatttagaagatttaatgcgtcaaatgagtcaaattagtaaattaggtagtttttcaggaatagctaagatgattcctggattgaacaatatttctgaaaaccaaattggtgatgctgagagcaaaatgaaaatatgaacaattttattatcaagtatgactttaaaagaacgtcgtgatccgcgcgtttttaaaaaagaaccatcaagacgcatacgggttttaaaaggatcaggacgttcgcctgatgaattaaataagttattaaaacagtgggaagtgtcacgtgataaaatggcagaacttggtaaaatgttacaaaaaggaaaaaatccttttagtaaatctggtgggttatttagttaa

SEQ ID NO: 40527 - DNA, 711 bp, Ureaplasma urealyticum
atgaataatgaatttattttagaagttaaaaatttaacaaaaatttataaaaaatcaaaccaaggggtttttgatttaagttttaatgtaaaacgtggcgaaattcatgcatttattggtgaaaatggatcaggtaaaacaacaactattaaatcaattattaatgcatacacaaattacaaaggatcaattttaattgatggttttgataataaaaccccaaaaagtcatgaaaaaattggttatgtgccagaaattgctttatttcctagtgaattaacaacttttcaatatttatattcatttgctcgtttatcaaatttaaataaaaaacaagctattgaacgcattcataattttttagaaaaatttagaattagtgatttaaaaaataaaaaaccaatcaatttttcatctggacaaaaaaagaaagtgattttaattcaagctttattacacgatccagagttaattattttagatgaaccaacagcgaacttagacccatcagcacgtcatgaattcaataatatcttaaaagaattgcacgaacaaaacaaaaccatttttatttgttcgcatattttaaaagaaatggatacttacgttgatagtttgactttaattcacaaaggaaagctagtatatagtggtcataaatatgatgcattagagaaaatctactatgacagtgttttaaaaaataaataa

SEQ ID NO: 40528 - DNA, 3138 bp, Ureaplasma urealyticum
atggaaaataaggtactattagcagaacatgaaaattcaacggttgttgctgaatttaaatcaattaaagttcattcgaataaatttgaaagtgaagctgaattagaagaaacatttattaaattattaattgcacaaggttatgaatacttacctattaaaaataataatgatttaaaaaataatttaagaaaacaaatcgaaaaacttaataattatcaatttactaataatgaatgagaatcttttttaagtacttatttattaaatcctaatgatggaattgaagcaagatcaaaaaaaattcatgaagattatagctaccctttaaaaaaagataaagatagtatcaccaaaaatataaagataattgataaaaataatattcataataattctattcaagttattaatcaatatcaaaataacaatttagataatcaacaaaaaacacgatatgatgtgtctattttgattaatggacttccattagtacatattgaactaaaaagacgaggaactaatcttaaagaagcttttaatcaaattaaaagatatgcaaatcattcgtttacagatttatatctttacacgcaaatttatgttatttctaatggtacacaaactaaatattattcaaatacaactagagaaacttctataaaagaaagaaataatacaaactctaaaaaaacaagtaattcttttgaatttacatcatactgagctgattcaaaaaataatcaaattcttgatttaatcgatttttgtcagaccttttttgctaaacatactattttaaatattttgacaaaatattgtgtttttacaagcgataatacgttaatggttttaagaccataccaaattgttgcaactgaaagaattattaatcgaattaagatttctttaaatgataaaaaattattaggaactacaggcgctggtggttatatttgacacacaacaggaagcggaaaaactcttacatcatttaaaactgccgctttagcaaaagaaattgaaggtgtggataaggttctatttgttgttgatcgaaaagatttagactatcaaacaacaaaagaatatgaaaagtattctaaaggatgtgttagtgctaatacaaatgttaatgaactagctaagcaaattggaaatcaagagaataaaattattattacaaccattcaaaaacttggcatattcattagtaaaaatccaaaacatcctatttattctaaaaatgttgttcttgtttttgatgaatgtcatcgttctcaatttggtgatttacataaaaaaattactaaaaaatcttttaaaaaatatatgatttttgggtttacaggcacacctattttagaagaaaatagtaatgtcaaaaataaaaatattttctttacaacagagcatctttttggagcttgtttacataaatatacaattgataaagctattcgtgatggtaatgttttaggttttagaacggagtattataaaacacttagcgaaaaagatgacattgacgatgaaacatcatcaactggaatagataaaaaagaagctttggaaaatccgattcgtatttctgaaattgttgattttattttaaaaaactataatcgtttaaccaaaagaaatgaagaattttttgaacataataagattgctaatataaatgaagttattactagcagaaataaattaagcgaaaataaagtattaacaacactaaatggatttaattctattctagcttgctcttctattaatgcagctaaaatatattattcagaatttaaaaaacaacaacaaaaatttcctcaagaagaaaaattaaaaattggattaatttatagttatttaccaagcgaacaagaaagtaatgataatgaactttctaattttgaactattagatgagaataacgaaaacactaatcaacttgatttagattcacgtaattttcttgatgaagcgattaaagattataatgaaatgtttgggacatcatactcaacagataatgctaattttaataattactataaagactttagcttgagattaaaggatcgaagcttagatatagcaatcgttgttaatatgtttttaacaggttttgatgcaacaactttaaatacattatgattggacaaaaaactaaaatatcatagtttaattcaagcaatgtcgcgaaccaatcgaattcttaatggtgttaaatcaaatggtaatattgtctttttcataaatttagaagatgaagtgaatgaagctttaagattattttcatcagagagcaatattaattcttcgatcgctattttaagatcatttaaagaatattatgaaggatattataatgaagataatcaatatatacaaggttatcgaaacttagtagaagaattaaaaagtaactttaaaattccttttaatggaacaaaagaagaggaaagaatttttattaaactttttggtgatattttaaaatataaaaatttgctttcacaatttagtgaatttgaacaaaacgatgatcttattggtacagaaatgcaagattatcaaagtatatatatcgggttgcgtgataaatatcaagataaaaaacgtatggaaacagatagcattgttagtgatcttgattttaaaattgaattaattagtcaacaagatattggtgttgattatattcttaagttaatgaatgaaaagctcaaaaaagatctaaaagaagttaaatatcacgatctagaaagagatattttatctagtctaaaagcgcgaaaaaagaaagatttaattattgaatttgttaatgaaattaataaactacctaataaggatgaaattgatatttttaatgaatggagtaagtttattaaaaataaaaaagaaagtgagcttataaaaataattaatgaaaataaattagataacaaaaaaacatttgaatttatgaaaaaagcatttgaaaataatgaatttaatgaaaatggagtagatattgttaatttaatgcctcctacctctttttttaaaaaaagtaatcagaatagtaataggtctaaaataaaagaaaatgctactgaaaaattactcgaatattttgaaaaattccgtggttaa

SEQ ID NO: 40529 - DNA, 1047 bp, Ureaplasma urealyticum
gtgttcggtgatgcttatgaatacttaatgagtatgtatgctgcaaatgcaggtaaatcagggggagaatttttcacccctcaagaagttagtgaactattagtagaattaacattaattgattttaataatgaaaataaagatgttagaagaaaaattggaaaagtttatgatccatgttgtggttctggatcattacttttaaagtatgcaaaattaaatgaaggagttaaattttatggtcaagaaattaatcttactacgtataatttagcaagaattaatatgtttttgcacaatataggttatgataaatttgatatcaaattaggtgatacattactagatcctaaacataatgatgataaaccttttgatgcaattgtttcaaatcctccatattcaacaaaatgggagggaaaatcaaatcctttattagctaacgatgagcgatttcatgttactcaattagcacctaaaggaaaagctgattttgcttttgtattgcatatacttcataatttatcttctagtggaacagcagctatagttatgtttccaggaactttatatcgagatcatgcagaacaagatattagaaaatatttagttgataatgttaatgttgtagatagtgtgattcaattaccagataatctgttttttggaacaagtatttcaacatgtattatagttttaagaaaaaacaaaaacaacaatgataatgctaatggtatcttgtttgttgatgcatcaaaagaatttgttaaatctggtatcaaaaacaaattaaccaatgctaatattaaaaaaatagttgatacgattcgtttcaaaaaagaagtaacttatttttcaaaacttgtatcacgagaagaagttaaaaataaaaactataatttatcagttaacacatatgtggaaaaagaagacacgtcagaaaaaattgatattaaattattaaatatgcaaattaaagaaattgtggctaaaatcgaaaagttaagaaaagaaattgatgaaattgttttagaattagaagaataa

SEQ ID NO: 40530 - DNA, 2832 bp, Ureaplasma urealyticum
atggacaaaattatcattaaaggcgctagagaaaataatttaaaaaatattgatctagaaattcctaaaaataaactagttgttattacaggtgtttcaggatcaggtaaatcatcgcttgcttttgatacgatttttgctgaaggaaaacgtcgttattttgaatcactttcaagttatgcccgccagtttttaggtggaaatgataaagctgatgttgaaagtattgaaggtttatcaccaaccattgctgttgatcaaaaatcaacaaatcaaaatccaagatcaattgttgggacaattacagaaatctatgattatttacgagttttatttgctcgtgttggaacacctttttgtccaaatgggcatggtcaaattaaatcacaaactccaaaacaaattgctgatttcttatttagcttatcacctaaaagtaaaatacaaattcttgcaccaattgaaattaaaaaaggttataaaattaatgatgttttaaataatttaagaaatcaaggttatttaagagttttagttaataatgaagtttatcaattagatgaaaatttgcctcaatttttagataacaaaaaaacagatgttgcaatcattgttgatcgtttaattttaaatattgatcaccaaacaaaaacacgagcactagatgctattgaatttgctttaaattatagtgggggagaaattgcatttaaggttaatgatgatattcattactttacacaaaacgatgtttgtcaagtttgtggttttaaaattaaagaaattgaaccaacattattttcatttaattcaccaattggtgcttgtgaacagtgtaaagggctaggatataattatgttcctgatgagcgtaaaatgatccctaatccaaatttatcaattaacgaaggcggtttagattattttaaaaacactgttaatacaactaatcttgattgacaacgttttaattcaattattaaacactataaaattgataaaactaaacctttaaaagaattagatcgtaaagaaatagatttattactatatggatcagatgaagcaattgagattgatataacttctgcaaataataaaaagtattcatcaatagattatgttgagggggttttagaattagttaatcgtcgttatcaagagacatcaagtgaattagcccgtgaacattacaataaatacatgagtgaaaaagtttgtaaatcatgtaaaggcaaaaaactatcttcacaagctttatcggttttaattaataaaattaacattattgattttattgaaaaaaacattgatgaggcgattgattttttattacacttagatttgaatgaagcacaaacaaaaattgccaatccaattttaaaagaagttttagatcgtttaggatttttaaaaaatgttggtttagaatatttaactttagctcgtcctgcatcaagtttatcagggggcgaagcacaacggattcgtttagccactcaaatcggctctaaactaacaggtattttatatgtacttgatgaaccatcaattggtttgcatcaacgcgataacgataaattaattaatacattaaaagaaatgcgtgatttaggtaatacagttatagttgttgaacatgatgaagaaacaatgctagcagctgattatttaatagatattggtcctcaagctggagttaatggtggttatgtaatagcagctggaacaccacaagaagtaatgcaaaatcctaattcactaacaggacaatatttatcaaaacaaaaagatattttagttcctaaaacacgaagaagtggtaatggtcataaagttattttaaaaggtgcaaaacataataatttaaaaaatgttgatttaacaattcctttaggtaaattcatttgtgttactggagtttcaggatctggtaaatcatcactaattttagaaacattagttaaagctattgaatacactaattttaatccttttgtaattccaggcgagtataaagatttaattggcgcatcgaatgttgataaaatcgttgtcgttaatcaagatgcaattggtagaactacgagatcaaatccagctacttatgttggggtatttgatgatattagaacagtatttgaaaatacaattgaagctaaagcacgtggctatagtaaaagtcgtttttcttttaatattaaaggaggccgttgtgaacgttgttggggggatggtacgattcgcattgagatgcactttttaccagatgtttatataagttgtgaagaatgtcatggaaaacgttataacgatgaaacacttcaagttaaatttaaaggtaaatcaatttatgatgtactaaaaatgccaatcgatgaagctttagtattttttgaaaattatcctggtattcatcgtaaactacaattattagttgatgttggtttaggatatttagagttaggagcctcttcaacttcattatcagggggcgaagcacaacgtattaagttagctaagtttttacaacgtaagccaacaggaaaaacattatttgttttagatgaaccaacaacaggactgcatattgatgatgtagctaaattaattaaaattttagataaaattgttgatggaggagacactgttttagttatagaacacaatcttgatttaattaaggttgcagattatattattgatattggccctgaaggtggtaataaaggtggtaaaattatagctactggtactccagagcaattactaagtaaaaaggacatatcttatactgctcaatatttagaaaagtatttaaaaaagaactaa

SEQ ID NO: 40531 - DNA, 2166 bp, Ureaplasma urealyticum
atgtattttttaaaaaaaatagtaaatttatttagttcaaaaattgaatcagaagataataatgttaaaaaagacgacttaactcaaccacgtaaacaatcgccagaagcgcgcaaacgaagaaatcgaagaattatattttgattaattattttattaattataggaacaattattggagttattatttatttttctgttcgtaaagaatatgataacgtaattgttaaaagtgctcaaacagaagttgttaataacaaaaaagttttatatttaaatactattaggcctaatagcactcaaataacacgttatacaattgatgaagatcaactacttactgcacgtgttaatattttaaataatactaattttcaaataatttctaatgcatcaagtttagggctgtcaagaatctcatttaatattgtgcgtgaaggtgttgaaaagtttaaacttggtgaaacaaatatctatgcaccaatttctgggaatactaataatcaatgaaattggttaacatctattattactcaaaatgcaggaattccatcttctggctttaatccacaagttattatttctccattaatttcaattattttcttcataattttcttatacattattttacgtgtttctaaagcacaaagcgactctttattaggaactaataaggcgaatgctaaactaacaaaatctggtgttcgctttagtgatgttgctggaattgctgaggttaaagaagaattaattgaaattgttgatttcttaaaagaacctaaaaaatatgttgctgctggtgctagaatcccaaaaggtgtaatgttatatggacctccaggaacaggaaaaacattaattgctaaagctgtagctggtgaagctaatgttccattctttcaaacaacgggttcatcttttgaagatacttttgttggagttggtgcacgtcgtgtgagagaattatttgaaaaagcacgtaagagtgctcccgccattatttttattgatgaaattgactcagtagctaaaaaacgtggtaattcattaactgctgtacaagaccaaacaattaaccaattattatcagaattagatggttttgatacttcaagtggtgtaattgttatggctgcgacaaatagattagacacattagatgacgcaattttacgtcctggacgttttgaccgacaaattagtgttaacttaccagatattttagaacgtgaacaaattttaagaattcactcacgtaataaaaacttatctgcgaaagttagtttagaagatattgcacgtcgtactgctggatttagtggtgcacaattagaaaatgttttaaatgaagccgcattactatcagttagagataaagcaacatcaattcatatgaatcatttagatgaagcgattgatcgtgttattgcaggaccttcacgtcctaataaagttatttctgaacgtgaacgtgaacaagtttcataccatgaagctggacatgcattaattggtttatattcaccaggtgctgatgttgttcagaaaattactattgttgctcgtggtcgagctgctggttatacactacaaactcctgaaagaaatgaaaatattttacaaaataaaactgaattaattagtcgagtgcgtactgcattaggtggtcgagctgcagaagagttaatttatggacctaatgaaattacaacaggtgcagcaaatgacttttataaaattacaaacatcgtaagagcaatggtagcttcttttggaatgacagatgtgggtttaacgcaatatattgctactgaaggtgttgataacccttatcgaaatagttattcagaacaaacagcattagcaattgatattgaaattgaaaaaattattcaacgtgaatataaaattgttaaagaaatgattaatgaacatcgtgaagaattggaattaatcgttcaaacattattagaattagaaacaattttaaagccacaaattgattatattcaccaatacaaacaattaccaccagaggtaattgctaataaaaacaaacgtgaagcttctcaaaaacaagcaaatagtagtgtagaagaagcaaaagttgttgacgatgaagaatcaataaaagataaagaaaaagatcaaaaatctaactaa

SEQ ID NO: 40532 - DNA, 1257 bp, Ureaplasma urealyticum
atgtttgatattaatttaatacgaaaagatattgcaactactaaagaaaagatgttaaataaaaaggtgccaagcaatttgtttgatcaaatttttgatttagatgttttagtacgaagtttaatgcaacaagaacaaaatcttaatgctaagaaaaatcaattatcaaaagaaattggtattttagctaaaaacaaagatcctaaattacaacaaacattagatttagttaataatattaaaaacgaattgcaagatatttcattaacattatcaaacaaacaagatgaattaaataaattattattagtaattcctaatatgccagatgattcagtgcccattggcaatgatgaaaatgacaacgtcgaaattaaaaaagtttttaaaccaaaaaaatttgattttttaccccttgcgcattgagatttagcagtaaaaaacaagttaattgattttgataaatcaacaaaaattactggtagtcgttttattatttatactaattttggtgcacgtttatatcgtgctttacaacaattttgtttagatatgaatgtaaaagcaggttttagtgaaatttgagcacctgttattgttaatcaagaatctttaattggttctggaaacttacctaaatttgcagatgatttattcaaattagaaaattcaaattattatttatcaccaactgctgaagtgcaattaacaaatttacatcgtaatgaaattttaaaagctagtgatttacctttatactatacagctctaacaccttgttttcgtagtgaagcaggatctgcaggacgcgatgttagaggtgtaattcgtcaacaccaattccataaagtagaattagtaaaattatgtaaaccagaagatagttttaaagaattagaatcaatgacaagacaggctgaaagtattttagaagctttagaattaccttatagaagaatcgttttatgcacaggcgatttaggttttagttcagctaaaacatatgatttagaagtttgattaccatcatataacgcttataaagaaatttcaagttgttcaaattgcactaatttccaagcgcgtcgtgcaaaaattcgttataaagaaacaattgatgcaacaaccgaattagttcatacattaaacggatcatcattagcaattgatcgattatgggctgcaattgttgaaaattatcaacaagaagatggtagtatcaacattcctaaagtattaaaaaaatacatctattaa

SEQ ID NO: 40533 - DNA, 471 bp, Ureaplasma urealyticum
atgttaaagttaatttgatgtcaaacattgaatggtggtatatcaaaaaataataaattaccatgatatataaaagaagaattagatcatttttataaaacaacaaaaaaccataaaattataatgggtaaaaacacttttgattcattagatcaaaaaccattaaataatcgaacaaatatcattttttcttcaattatgcaaacaccagaagacgaatcgtattttgtgacaaatgattttcaacaagtattaaacgatgctaaaaaagaggatatttttattattggcggcaaggaattatttgatatttttttagcttatgcagatgttttaattgtttctgtattaaaagattattatgattgtgatctatacatgaaagttgattataataattttaatttagataaacaagatgtttatgataattttattgttaattattattcaaataagaaggaaaaataa

SEQ ID NO: 40534 - DNA, 624 bp, Ureaplasma urealyticum
atgcataaaataattaatcacccattaattaaagataaactaacacgtatgcgaaaagtttcaacagtttctactgtttttcgtacaaatttagaagaacttacacaattgatggtttatgaagcaacaaaagatttagagttaaatgaaatagaaattgaaactcctgttgttaaggttgcaaaaggttataaattaaaaaataaaatttgtttaatacctattttgcgcgctggaattggaatggttgatggtgttaaaagtttaattccaacagccacaatcggtcatatcggtttatatcgtaatgaacaaacactaaaaccagtagaatattttaaaaaatttcctaaaaatatttctgaatcagatgttattattttagatccaatgttagcaacaggaggtagtgttgttgaagctgttaatattattaaaaaatacaatccaaaatccattaaatttgtatgtattgttgcagctccagaaggtcttaaatatgttcaagaagttcatcctgaagttgatgtttatatcgcagcattagatgataaattaaatgaaaatggatatatcactcctggtttaggtgatgctggtgatcgaattttcggtactaaataa

SEQ ID NO: 40535 - DNA, 1248 bp, Ureaplasma urealyticum
atgcatagtttaattaaggatttaaaagcacgaaacttaatcaataatataactaatgaagaaaaattaataaaagctttagagaaaaataaaggaatttatgtaggttttgatccttcagctgatagtttacacttaggtaattatattatgataatgttattaaaacgctttcgtttatataacattaaaacattagcgcttgttggtggtgctacaggaatgattggtgatccaagtggtaaatccgctgaacgtaatttattagataaaacaattttagaaaaaaatattgcaaaaataaaatttcaacttgaaaaatttactaattctcaagttattaataattatgttttttatgaaaatatgacttttttagattttttgcgtgatgttggaaagttaatcaacattaattatttattagaaaaagaaattattaattctcgtttatctgttggtatttcatatacagaatttagttataatttgctacaaggttatgattttttacaattatataaaaatgataacatagccattcaagctggtggtagtgatcaatggggtaacattacaactggaattgaaatgattcgaaaaaatttaggtgatgacaatatcgcttgtggattgacaattaatttattaacaaattcagaaggtaaaaaatttggtaaaagtgaaaaaggtgctatttatttagacgaaaataaatcaactgtttatgaaatgtatcagtttttaattaatcaaagcgatgctgatgtagaaaaattacttaattttttaacattaattgatgttgaagaaataaaaaaaataatgcaagctcataaaaataatcccgctttacgagttgcacaaaaagcattggctaaagctgttgttgttgatatacatggacaacaaaaatatgaacaagcattacatattagcgaagtactatttaatggtagtattagtacattaaatcaagaagaattagaaatcgcaattaagagtttacctgcaacaaaattagacaaagatgaaattaaaataattgatttattaaatttagctaatatttcatcaagtaaccgtatagcacgagattttttaaatacaggatcaattttaattaatgatattaaaataaatgatgaaaattttttagtcaagaaacaagatgctattaatcaaaaatttagtattattagaaaaggtaaacgaaattattttttaattttatgaaataaagattaa

SEQ ID NO: 40536 - DNA, 2514 bp, Ureaplasma urealyticum
atgaatttaatatcaaaaatatccccccaaaaccgaatcttaaatcgcgctcgattgattgctgaagaagttttaaaaaaagaagaagaatacgaacattttagcgatcaagaattaattaataaatctgatgatattattgaatatttagcaaataataacccattagatgataaattagtagaagcattatgcattattcgtgaagtgatttatcgagttcataataaaagagcttttaaagttcaaattattggtgcaattattgtttattttggtgattttgctgaaatgatgactggtgagggtaaaacattaactttagttttagttgcttatttaaatgcactttataaaaaaggtgttcatatggtaactgttaacgaatatctagttaaagttggagcagaatttgcaacacctgttttaaattttttaaatatgtctgttggccaaattacagctaatatgaatgagtatgaaaaacgaaataattataattgtgatatcacatatacaactaattcagaattaggctttgattatttacgtgataatatggtaactaattatgctaataaagttcaacggggcttatgatttgctattgttgatgaaggtgattctgttttaattgatgaagctcggactcctttaatcatttctggtgaacctcaagaagaaattggaaattatgttaaagctgatcgttttgtaaaaacattatatccacaagattttactttagatccagaatcacaatcagtagcattaacagaaagtggcgttgaaaaagcacaaaagtttttcaatactaaaaattattataattttgaaaattcagatattatccacaaagttactaatgctttaagagcaaattttactttttttaatggacgcgaatatattgttaaaaaagatgatgatggtgaggatataattgctttagtagatcaatctactggtagaattatggaaggaagaagttatagcgctggattacaacaagcaattcaagctaaagaacaaattaaaattgaacccgaaaatttaacagttgccacaatcacttatcaatcattatttcgtttatataaaaaattagcagcagtttcaggaacagctattactgaagcagaagaatttttaaatatttataatatggttgttgttacaatcccaacaaataaaccaattaaaagaattgaccatcctgattatgtttttgataataaaagaacaaaatggaaatatgtaattgctgatgttattcgtcgtcatgaaaatggccaaccaattttaattggaactgctagtgttgaagattcagaaattttacatcaattactagaacgagtcaatattcctcacgaagttttaaatgctaaaaatcacgcacgcgaagctgaaattattgcttgtgcaggagagtataaagcagttacaatagcaacaaatatggcaggccgtgggactgatattaaattatctccagaatcattagaagctggaggattatgtgttattggaaccgaacgaagtgattcacgtagaattgataatcagttaagaggacgtgctggacgacaaggtgatattggcgaatcacgtttttttatttcaatggaagatactttatttagtcgttttgcaaccgataatttagcaaaagctgatgataaattaagtgaagatgttatttcaacaaaattctttacacgattgctaaataatacacaaaaaaaagttgagtcgttaaactatgacacaagaaaaaatctaattgattatgatcatgttttaagtaatcaacgcgaattaatttacaaacaacgggataaaattcttatttcatcagataataaagatattttatatcgaatgttagatagtgtaattgatgatttaatttatcaatcacacaataaaccaaatgaagacattattgacataaaaaaattaattgatttagcaactcaaaacattttttatgacaattatttaaatcaggacgaatattatgggcttaagtttgaacaaattaaaactaaattaaaaaaagactgtattaatttttttgagcaaaaagaacaactaatgacaccgacaatttttaatcaaatcttatcagaaattatgattagtaatattgatgaagaatgaactaaacatttagatattacttctaaaattcgtgagggagttaatttacgtgcttatgaacaaaaagcaccattaaatatttatgttgaagactcagataaattatttgaaaaattaaaacataatgttgcttgaaaaacagtatgttcaataggaaaaataaattatgttcatcaagattatagtgatttaaatagtgaatttattgtaaatgataatgaaattaatgaaaataataattcaattgattttgaaaatttcaacgaatcaataccaactgatcaaacaattcaagaatcatttgatgataatcaatcagataatgaagatgataaaaataataattaa

SEQ ID NO: 40537 - DNA, 2022 bp, Ureaplasma urealyticum
atggataaaataaaagctaaaattgacgaattaaaacaaaaactagaccaatgaaactatgaatattatgttttagatgatccaagtgtgccagaccatgtttatgatcaaacaatgcgggagttaatcgaacttgaaaataattatcctcaatttaaaactaacaattcaccaagtgtaaaggttggcggctttgtttcagaaaaatttaataaagtaaaacataaaagaccaatgttatcactttcaaatgcttttaatgatgatgatttaaaaaaatttgatcaagataatcaaaatgctagtgtcgatttaaaagggtacgtagttgaacctaaaattgatggtttaagcatttctattatttataaaaatgccaaattacaccaggcaattacaagaggagatgggattaatggcgaagatgttacttccaatattttaacgattaaagacattcctcactatattgatcaaaaatataaagactacgaaattgaagttcgtggtgaagtctatatggcttttcatgatttttatgaaatgaatgataatttagaagaaagtgataaaaaatttgctaatccaagaaatgctgctgctggaacattaagaagtctagataattcaattgttgcagaacgtaaattaagtgcttttatgtattatttggttaatgcacaagaactaggaattaaaacgcattatgaaagtattcaatttttaagagataataaatttaaagttagtgatttaattgttaaagtcgatacaattaatgaagttattaatcaaattgattgttatactaaagtgcgtgataaactttcatatatgattgatggtattgttattaaaattaataatttagaagtttatgatgagattggttatacttctaaatttcctaaatgagcaattgcttataaatttccagctaatgttgttagctcacaattactagaaattattaacgatgttgggcgtacaggaaaaatctcatatgttgctaaaattaaaccaattttattagatggtagtatggttgaatacgctactttacataactttgattttattaaagaaaaagacattcgaattaatgatgaaattaaaatttataaagcaggggatgtaattccttatgttgatggtgttgatttatcaaaacgtttagcaaatagtgtaccttatgaaccaattataaattgcccttcatgccaatcagttttagtacgtgaaaatgatgaagttgaccaacgctgcttaaatatttatggatgtaaaaaaatcaatattgaaaaaatcgtttattttgtttcacgtaattgcatgaatattgagggaatgagtgatgccattattaataaattttatgatgctaatttaattaaaaacattgcagatttatactatttgcaaaaacacaaagaatttattttaactagtgattttaaaattaaagaaaaaagttttagtaatttaattaatagtattaataattcaaaaaaatgttctttagaatttttattaacagcttttggaattcgtcatgttggaccaaatttagctaaaaaaatagctaaacaatttaaaacaatgactgctttaatgcacgctaattttgatgaattaactaatgttgatgcatgtggggaaaaagcagccttatcattaattaattggtttaatgatgagcataatgtttctttagttaatcaattacaacaagttggtgtaaatatggaatatattgatgattttatttatgatgataacatcaatataattgatgaatataaaaataaaacttttgttattactggttcatttagtattagccgtgatgaaattaaaactattttagagaaatattatcatgcaaaagttaaaaacagtgtttctaaaaaaacagattatgttttagttggcactgaagcgggtacgaaattagaaaaagctaaattattaggtgtgaaaattattgaaaatgaattttgaaaaaaggataataatttttaa

SEQ ID NO: 40538 - DNA, 1311 bp, Ureaplasma urealyticum
atgaaattatatgattcttattctaatcaattagtagaaattaatgatgaattaatttcaatttataattgtggaccaaccgtttataatcatatccatattggcaatgctcggcctttaattactatggacgtgttatatcgttttttaaaaaaacataatatcaaaactaaatatgttttaaatattactgatattgatgacaaaatcattaattatgctctagctaataacctaaaagaattagaggttagtgaatattattttaatgaatatttaaaaattaaaaaagctttaaatacactagaaatgattaatcctaaagtatcaacacatatggataaaattattgattatatccaaaaattgattgataaacaagcaggttattttattggtgatgatgtttattttgatacaaaaaaagctttaaattacggacaattatcgaaacgtgatttagaaaatgatattgttggtatgcgtattgaaagcgcagctaataaacacaatcctaatgattttattttatgaaagaaaacaaataaaggtattatgtgaaatacaccttgaggaatcggtcgcccaggttggcattctgaatgctcatgtttgatcaacacttatattggtgaacaagttagtattcatggtggtggaattgatttaaaatttccccaccatgaaaatgaaaatgctcaaaatcaagttttatataataaaaatttagcaaaagtatgaatgcattttggattagttaatattaataatgagaaaatgtcaaaatctttaaataattttattttagtaaaagatttattagctgaatacgattatcaagttgtgcgttggtttttttatcaagcagattataagcaaccaattaaattttcgcatgaaatcatgaagcagaacgaaaaagaaattcttaaaattaaaaatgctatttataacgcaaaaaactatttatacttcaataatcaactaaaatcattaacacaaattgatcattttgagctttttgatgaacgcattaatgatgatttagattttgtaggtattgttgatctaattcatattagtgttaaaaaaataaatattttaattaaagaaaataaggatatgaatgaattaaaactgaatttaactcaattattatatatgttagatatattgggtattaattttgttgatttgcataatgatgagaatttagcattattaaatacttgaaaaaattacgttgataaaaaagattatgttaaagctgatgaattaagaaaacaattaattaatataggaattttataa

SEQ ID NO: 40539 - DNA, 1185 bp, Ureaplasma urealyticum
atgaaaaaaaataaatataaacttcttattaaatcactagttattacatcttttttagttactacttcaagtgttattgtagcttgtactaataaagaaaaagagcaacatttaactgaattaaaaaaattatctcaacatgcaaaacaaatatataatgaaattaaaactaatgaattatttaaaaaggaggcttctgttttaaatgatcaaattaataaagttttaaaaattaatgaacaaaataatttagatgtcattactaaaaattataatgatttaaaaaaattattagatgaaattcaagagaaaatttctaaagaaaaagaaaaagaaaagcaacaaaacgcttatcttaataaagaaattaacattaaattagaaaatttaaatcaaatagttaatcataatttattaaaaggaaataaagaatcattttttaatcaaattattaatttcactccaattacaacagaaattcaaactattatcaatcaaaatcaaaatcttttagatttcaaaaatgaagaacttgaattaaaattaaaaaatttagaccttttcattaaagaattagatcataaatttaaaaatataatagatcaactatttaatattgaagattcatacattaataagtttctaaaatttattaataaccaggactttattaaggatcaaaaatatcaagaaagagaaaagtttaatccgcaagaatatttagaattaacaaaatctattcaaagtagttttaataaattaaaaaacgttactatcaattcaaacctagaccaatacctaaattcacttaatttagtgttattatctttaactaatgaaactaaagccttttttactaaatttgaagatcaaattaaaaaatattttaagtgaattgtatatggtagagatgatacactaacaaaagcctttaatcgaattgttgaagaacaaaaaagaaatgaatttatagagcaaacagaaaaagctttattaacttttcccatggaaattaatcaaaaatttaaaatgttcgttgatttttttacattaaaaaatgataaaaacgaaactgaatatcaaaaaatctgaaagtcaaaacacaacgaagttaataaagtctgatttggtattgcagagtgttttgcaactggaaaatgtacagacaaaaataaaccatcataa

SEQ ID NO: 40540 - DNA, 2400 bp, Ureaplasma urealyticum
atgacagataataaaaatcattcattaattagtgatataaaatcacaaattaagaaattttctgaaaaagctttaaccttagaggtcggcaatgtaatttcgttaggtgatggaattgtattggttgatggccttgataatgtcatgttaaatgaaattgtacgttttgaaaatggtgttgaaggaatggctttaaacctagaagaagatgctgttggtgttgttcttttaggtgattattcaaatattaaagaaggcgatcgtgtttatcgtacaaaaagaattgttgaagttcctgttggggatgtaatgttaggtcgtgttgttgacgctttaggtaaggcagttgataataaaggtaatattgttgcaaataaatttagtgtaattgaaaaaattgcacctggtgttatggaccgtaaatctgttcatcaaccacttgaaaccggaattttatcaattgatgcaatgttcccaattggtaagggccaaagagaattaattattggtgaccgacagactggaaaaacaacaattgcaattgatgctattattaatcaaaaaggccgtaatgtaaattgtgtttatgtagcaattggtcaaaaaaactcaacaatcgcaaatgttgttcgtgaacttgaagctcatggagcaatggaatatacaactgttgttacagctaatgcttcagaattacctgctttgcaatatattgctccctttacaggagtaacaattgctgaagagtgaatgcatcaaggaaaagatgttttaattgtttatgatgatctaagcaaacatgctattgcttatcgtactttatccttattattacgtcgtccgcctggtcgtgaagcatatcctggagatgttttttacttacacagtcgtttattagaacgtgcatgcaaactaaaagatgaattaggggcaggatctattactgctttaccaattattgaaacacaagctggtgatatttcagcttatattccaacaaatgtaatttcaattactgatgggcaaatttttatgatgacatcattatttaatgctggtcaacgtcctgcaattgatgcagggcaatcagttagtcgggtaggttctgctgcacaaattaaatcagttaaacaaactggagcatcattaaaattagaattagctaactatcgcgaacttgaagcatttagtcaattcggtagtgatttggatgatgaaactaaacgtattctaaaacttggtaaagcagttatggctgttattaagcaagctcctaataaaccttataatcaaactgatgaagcgatcattttgtttaccgttaaagaaaaacttattcctcaagttccagtagaacgtattcaagattttaaagagtacttattaaattactttaaaggaacaaaactacgtgctgatcttgaagataagaaagcttttgataaagaaaataccccagcatttagatgtgctatacaaaaagcaattaacagtttcttaaataattcacaagattttaaaccttgtgaagaagctgaacaaacagcctttgataaattctttaatgagaatgaatcaattgttgttgatggtgaaaatgattttaattttattaatgaagaagttagtttaaaacctacaacagaaacatctgaagctgttcaaatagaagaaaaagttcaagatttcgttgaaccacaagaaattcttgaaactaataaaatggaagaaaatcatatttttgaagaagttgagccagaaaaaattatctgtgaacatcatgaatttgaaatagctgaaaaccaagaaaaaatcgaaggtcaacaagttttagaagatacaaaccatgaatattcaatttatgaaaccgttgaacaaagcggtgaggtagataatgatgaatctaaagatgatgatttagaagtcttagtaccagttgctgaaattgagcatgatgaagcaattctagatgaacgcgagaatcgtaattgagtcttctcagattcagctgtttctgaagttgaaaaacaaacaattatgatttcaatttcatcaaatgaagcagaacaattgtttgataatgctaaaagtgttgttttctttaaagtaacacctaaatatccagttgaaaaagtattagtttatgtcacaagtccagtacaaaaagttgttggtgaatttgatttattaaagattgatgttaattcagtaaacacttcttgaaataaatatcgttcaagttcagtaatttcatcacgtaaagaatatttagaatattttaactcacacaaagaagcacatgctttattagcttctaaagtttataaatatcgtaagccaaaagatttagcaagttttaatatgaataaaggaccaagtggtttcacttatcttaaataa

SEQ ID NO: 40541 - DNA, 540 bp, Ureaplasma urealyticum
atgaaatcttcattaaaaccagttgaaaaatacgcttattcaatttttgaaattgctaaagaagaaaaaaaattagatttatacaaacataatttggaaacaattaattctatcattgaagaggttccagctttttttgaagctgttggtgatcctgctcgtgatcgtaatgaaagaaaacaaattgtgattaaaaatctagaaggtgagattgatatttatttaattagtttaattgatctactaattgatgttaaatcggttaaactacttaaaaaaatagttttaaaagctttggattttgttaatgaagctttaagtgttaaaaaagttttaataacaactgcttatgaattaacaaaaaatcaaattgatcgccttctgcaatctttaaaaaagaaatatgtgtgtgaaaaaatagaaccaattgttgttgttgataaatcaattattggaggactttcaattaattttgaatcgcaagttttagataatagtttaaaaactaaattatttaatattgtaaaaaaggtaaattag

SEQ ID NO: 40542 - DNA, 618 bp, Ureaplasma urealyticum
atgaaattaaataaaaagcatttagtagctatattatccgttctttctttatcaattatagttgtaccactgttgacttcatgtactggtgatattccagaattaaatccagcagagattattaatacactattccctaatgtatgagtatttatagctcaagttattgcaatgtgtgtcgttttttcattagtattatgattggtatgaaaaccaacaaataaaatgctagataaaagacgtgaatatattgctaaagaaattacagatgcagaaaatgctaaacaagaagctttacaatatttagaaaacgctaaatctgaacatttagcagcacaagcacaaacgttagaaattattgcaaaagctaaaagtgaatcattaactttacgtgaatcattagaaaaagaagcacgtgaagctgctgataaaattattagttctgctaaaattagcattgctaatgaacgtagagaaaatcttgaacgtttacaatctgaagctcgtgaagctgcttatattgcagctgaagcattgatgaaaaaagaattgtctagagaagataatgataaactagttgatcaattcattaaagaattagaaaataatgaaaaataa

SEQ ID NO: 40543 - DNA, 828 bp, Ureaplasma urealyticum
gtggaaaattatagcccgcttgatataatgattgcacttccacatattgctgcaatcattatggtaactttaattattggaacagtttcgttgatttattttagtatggttaaaaagttaactgtacatgatgtgccaaaccgttttgtaattattattggaatgattgttgattattttagaggactagttgttgatacaatgggcgctaaacatgttaaattagcaccttatgtactatttacattttgttatatttttacagctaacttagtttctttatttggtttcaaagaagcaacaactgcatctgccgttccattagcaatggctcttggaaccgtgatcggtggtcaaattgttgccttaaaataccaaaaagcttcattctttttaaaatttgcttttaaaattaaaggttttccaattatgataaaccctttggaaatcgtttctaaattaacccctattatttcattaacattccgtttatgaggtaatatctctgctgctgcaattttattaaacataacatattgagcatttgcaggttttacaaacgtagttccttgagttggtgtatcattaattgctgcagtagtaattttaccaatcttaattggttattttacttgttttgcaggaacaattcaagcttttgtatttacattattaacaagtattaactgaggtcttgaaatcaaagaaggtgaagaacaccacgctcatcttgcgcataaaaaagccgaaaaacttgctgctaaaaaattagcagaacttgatactcaaaatcaaattcaaaataatgaggctcaagtagttttataa

SEQ ID NO: 40544 - DNA, 2946 bp, Ureaplasma urealyticum
atgatttttttaaagaaaatagaagcacatgggtttaaatcatttggggagccagttgttattgaatttaaacacccaatgactggaattattggtgcaaatggaacaggaaaatcaaacattattgatgctcttaaatgagtaattggtgatcaatcattaaaaagcatgcgtgctcataaaaatgatttattgtttagtggtggaagatatgcaccgaaagcccatattgcacgtgttaatttatattttaataatgttaataatgttttatatacacaacataaagaaattaaaatttcacgagtgttgaatattaaaacaaacgaaaatacttattatattaatgatgaagttgctcttttaaaagatataacagatatgtttttagatagtggattatcaaaaggttctttaggaattattagtcaaggtgcagtgtcatgatttgctgaagcaaaaccgaatgaacgacgaaaaatgtttgaagaggcctctggaatcgggcgctattcaaagcgaaagcaagaagcgttaaattcactaagtcgtgcaaacgaaaatttagctcgtttaaatgacatagttgctaatttaaaaaaagaattggcgaaattacaaaagcaagcaatgcgttttaatgaatataaacaaattaaggacgaattaacaaaattagatttagtgattatagtacgtgatatcattcactgacaaaaacaattgaatgatattcaagaaaatttaaaagaatataaaaaagaatataataaacaaaaaccattaattcaaagtaaaaaaaatgaaattgaaagtttacgagtaatttcagatagatatgcaaaagaatacactaatttagaatttgaatataaaaaattagaagatacaataaacgatttgaatcttaaattatctctaactaaaaatacacttgaaacaaccgcttttaatgcaacaaatacacaagaaaggattgatgcttttgctactttaattaaaacaacggaaatagaattaaataataataaaaaaaatattaatgaaaaaaaagatcaacttaaagatattcaaaaacaaaaattagaacttgaatctcttaaaacaaaacaaaaaaataatttggataccatcatttgagaaattgctagtaagaatttaaaaaaagaaatgttagaagagcaatttaaacgccaaactgagaatgaacgtggtgtaaaaacaattattgattcacaaaaagcattagttggtgtttatggaacagttgcgcagaatatttctacaaaaacagaacacgaattagcaataagtacagctttagctaaaggaatcaataatattattgttaaaaacaatcaagcagctgaaaattgtattaattttttaaagaaaaataatgcaggtgttgctacttttttaccgattgaaaatttgcaggctaaaagcattaaaccagaattttatgatgtattaaaagaattagaggggtttgtaggagttgctaatgaactagtaaaaattaatgtaaattataaaatttctattgattatctattaggaaatacaattattgctaataatttaaaaaacgctatcattctaagtgaatacacatataaaaattataaagtagtctcattagaaggtgacattgtttttggtggtggtgccatttctggtggaagtaatagtaaaaaaaatattattttaaatctagaagaaaaaattaaagaattagatttaaaaataaaaaaattaaatgaagaacaaattgaattaaataatttacataaccaaacaaaaaagcaatgacaagaatattataatagtgaacaaattataaatggtattttaaataatttaattactactaacaatagtctttctgataatttaaataattataaaagtcaatatgaggctttaagcgctacaaaattgtctaaagaagagattgaatcaaagataagtgataattgaaatgaatataataaaaaaaagaatgaattaattaatttaaaacaaaaaatccaaactttaaaagcaaatttaaacactgctaatcttaataagaatgaattagaaataacatataataaggagcttgaagatttttataatcttgataaaaatattacttcgtgtgaaagtaatatagataatctaaattattcgattcaaaatgtacaaacaagattagtagataattataaattaagtgttgagaatgctattgaaacatatcaaaatcaagaaattgatatgagtgaatcagcagcacgtttaagaatcgaaagtttaaaaattgaccttgaaaaatataatgatattaatttaaatgcgttagaggaatacgaagaaaaacaagcagaatatgattctaattttttagagtatgaaaattgcaagcaagcggttgatcaaattagtagttcaattcaagaattagataaaaaagctaaagctgattttatgcgtgttattcgtgaaacaaataaattaatgccagagatttttgaatatttatttggtggaggatcttgtgcaattagtcttaatgatcctaataatattttagaatcaggtgttgagataattgctaatccaccaggtaaacgtgatgttccattatctgcactttcaggtggggaaaaaacaatggtagtattggcagttttatttgctttattaaaaattgcaaaatttccattagttattttagatgaagctgaagcagctttagatgcaagtaatgttgcaaaattcggtgccattatcgctaagtatagtgatgaaacacaatttttagttattactcaccgcgaaggaacaatgaaaagttgtggttatcttttaggtacaacaatgatgaataacggagtaacaacattactagaagttgatttaaatgatacaaaaataaaatatgaaagtgaattataa

SEQ ID NO: 40545 - DNA, 1056 bp, Ureaplasma urealyticum
atgggtttttttaaaaaaatattcaataaaattctaggaaaaaaagacacagaacaaatatcacaagagatttcacaaaaaaatgaagaaaatcgtattttaaaattagaggataattcgattaataaatttaatgaaggattaagaaaatcatcttctgctttaactgatgctattaacgaattagcagttaaatatatagatattgatgaacgatgatatgaacatttagaagaagttttaattagttatgatgtaggctatgttgcaactaataaaattattgaatcaattagaaatgaaatgatttaccaaaaagttaatgatcctgatttaataaagtctattattattgataaaatttttatttattatattcaagatacagaaattaatacagcaattaatttaaaagaaaatcaaactaatgtagttttggtggttggggttaatggcgttggtaaaacaacatcaatcgcaaaaatcactaaaaaattcattgatgaaaataaaaaagttctcttagtagctggagatacatttagagcaggtgctgttgaacaattaaaagtttgagcacaacgcttaggtgttgacattgaattacctaataaagagggtcaagatcctgcttctgtcatatacgctggagttaaaaaaggttatgaacaaaaatatgatttagtaatttgtgatacatcaggtagattacaaaataaaattaatttgatgaatgaattaaaaaaaattcatgatgtaattcataaatttgatgaatacgctccgcacgaaactttattagttttagatgccactcaaggccaatcaggaattaatcaagcaaaagcatttaacgaagtaacgaaaatttcagggattattttaactaaaatggattctacaagtcgtgggggaattgtattagcaatcaaagatgcttttaatatacctgtgaaattgattggtttaggcgaaaaattagaggatttaagtgtatttgatttagaaatgtatgttgatagcatagttttaggaatgaaattagatgttaaataa

SEQ ID NO: 40546 - DNA, 300 bp, Ureaplasma urealyticum
atgttaaataagaataaacgttgatatttgattgctttatatgatatttatcaaggattattaacaacaaaacaatgtgaatattttaatttacattattttaaagatttgtcgttttctgaaattgctgaactaaaagaaatttcaaaaagcgctattagtgattgtttaaacaaagtgtgtgaccaattattaaaatatgaacaagcacttttaatttatgaaaaaaacaaaaagcgtaatgatttatatacattaatcaacgattctgaattagttaaaaaattaaaagatatataa

SEQ ID NO: 40547 - DNA, 783 bp, Ureaplasma urealyticum
atggagcgacaaagtatgataaacaaatttctacaaagtattaaaaaacgtaatttatcaaaaaatacatatttaacttatgaatcacatttaagaaagtttaaggtacaagaacaaagttttaaacagattattaagcaattattaaataacaattacaaaccaaaaagtctaaaattagctaagtcaattttaagtgagtattgaaaatttagcaaacaataccagtatgttcaagaattagaacaaataaaattaagtaaagaacaaaaaagttataaaaaagtttttagtttagatgatattaaaaaatgtttaaaaattaataaacaagatactaaacagattaagttttataaaacgattttattattctatgccacaactggaattagagcaatggaaatctatcaacttaaacaaataaacaatgacttattcgtaatcagtggtaaaggtaataagaacagacaaatttgctatattgaacatctgtgaaataacattaaaaacaaaaaactaccatcaactaaaacattacgtaaatatctaaaagtattttttgataataaaaacgtttcattacatacgctaagacgtagttttattacaaactttttaactagcaatgaaaattataaacgtggagatatgctaaagattgtacaggatttagttggtcatgaaaatatccaaacaacactacaatatgtacaaatcacaaaagaacaagtggacgacgtttataaagaattttttaaggaatttgaaaatgataaataa

SEQ ID NO: 40548 - DNA, 549 bp, Ureaplasma urealyticum
atgatgaacaataaaaataagtttaaaaacaaagaatggaagttttctaaaaaacaagtacagctgatttatttaacaagttcaattatttcagggttatttttaggattagctttattatctacttatttaattgctggactaccaaatgataacgcatttgtgttatttgtaaaagaacaaaagttttattttccattctttatgactattggatttattaatttaattatttcaatgttaacacttttaccaacattaaaaacattatggcgaactgttgctaaaatgcaccagtacggggatttaagtaaagaagagttcgaagccttagatatactagttgaacaaatacgtaatcgttatattagtgttgaaaatattaaagcagttataagttctaacaattacaaaacattggatgaagaattaaaaaaactagaacaacaagaaaagcaattaaaaatacaagagcaagaacaaaaagttaagcgattagaacaggagattataaaagatgacaaaacaagagttcaaagcgattactaa

SEQ ID NO: 40549 - DNA, 876 bp, Ureaplasma urealyticum
atgggaaaaaacaacaaatatttaattgcttgtgatctagatggaacacttttaaataatgatagtgatatatcagaaaaaacaattgagggaattaaaaaaatcatcaatcaaggccatattttctgtattgtaacaggtcgtcccttacgtggatcaatccatatttatgaaaaattaggattaacaactttaatggctaattataatggctcttatatttcaaacccttccgataaaaaattcgcgccaattaatatgacatttagtaaagatattgtaagcgcaattttaaaaaatcgatttattgctaaaaatattgttaatgctgttgttgaagctgataatgttgctaccattttaaacagtaatatggatttaaatatttgaaaatcatttattgatatatttcacgtgcccattcgtgatatgaatgaaaaaaataaattgactaaggaaaatgatattaacaaccttattagagatgctaatgcccttttattaaatgtcaacgataaagctttatttgattctatggtttatcatattaaacaaattgctcccactttagcggttcgtagctgatcagcgagggttgatgaccaatttgaagttattgaaattaattcatcatttgctgataaagcaatggctatgcgctatttatcctcatattatggaattccattagatcgttgtatagctttcggcgatggtgaaaatgatttgacaatgctaaaccatgctggatatggctttgccatgaaaaatggtacacgtcccgctaaattactagcacgtcacattactaaacacacaaacgtagaaaatggtgttgtttgagaattagaatatgttttaaatgaaaataaataa

SEQ ID NO: 40550 - DNA, 1002 bp, Ureaplasma urealyticum
atgaaaagactaatttcaggaattcaaccaactaataatttaacattaggaaattatttaggtgcaattaaaaactttgttgatttacaagatgattatgaagtgtttttatttgttgcggatttacattccttaacaccaaatatttttgataacactgatttttctactactaaacgtcagattatcgcgacatatttagctgctggtattgatcctaaaaaaacatgtctattttaccaatcagatatcttatcgattccattattagctcacatattattatgttcaacaagtattggtgaactaacgcgtatgacacaatttaaagataaaagtattaaagcaacaaagatggctaataacactgaaatgattccttctggtttattaacatatcccacattaatggcagcagatattttaacttttaatgcagatgttgttcctgttggccaagatcaaaaacaacatttggaattaacaagaacgcttgctgaccgttttaataaaagatatggtaatacttttaaattgcctcaagtttatattcctaaaataggggcaaaaattatggatttattagatcctaatattaaaatgtcaaaatcttctaaaaaccttaagggtgtgatttttttaaatgattcaaaggatataatttttaaaaaaattaaaggagctttaacagataatttaaacaaagttaaatatgatttaacattacaaccaggagtaagtaatttaatgacaatttatgcttgtttaacaaatctaagctttaaagaaatcgaactaaaataccaacaacaaaactatggtgtttttaaaaatgatttagccaatatcgttgctgattttttagaaaagctgcaacaaaaaatttcttattgattaaatagtccagaattagatataatgatagacaatagttgcgagcgtgctaacgatattgcttatcaaaatgtacaactagttttaaaacatatgcaactaaaataa

SEQ ID NO: 40551 - DNA, 813 bp, Ureaplasma urealyticum
atgaaaaataataagccaatttgtttttatgatatctattgttttaaaccacaagaatgttttaaaagaaatgatattaatttgttagaagataaactaaaaagatattcaaaaataacatttttacgaaataaagaaaatcctgaaattatttttttattaggtggagatggatcgtttatcaattttattaaccaacaatgaaaaaaaaatgtaaaaattgttggcattaattatggacaattaggtttttatagttcatatgatagtattaaaactataaatttagacgaaattattgatgaaaatatgtattataatcctttattacttaaagtaagtattaataaccaaaattttttttattgtttgaatgagttaagtttattttctaatgagttagtgtcttttgatattagcataaatgattatccatatgaaaaatttcgtggctctggtttgttatttgtaacaccaagcggatcaactggcaaaaacaaaacagcttttggtcccattatttttaataatcatgagaattttattatgacagagatttttcctgttaatcatttaaaatattcaagtttaaatgcccctgtggtttttagaaaagattataaaatcagtttaacaaatattaaatttaaaaaatcttttagtgttgctattgatgggaatatcattaattttagcgataaaattaatgatattaaagtagaaacaatccaagcttcatcaaaaattcatggtttaaataattttaagaaatacattgataaattaaacaaatcttttattaaaggagaataa

SEQ ID NO: 40552 - DNA, 480 bp, Ureaplasma urealyticum
atgatgataaaaattataagtgtagggaaattaaaacaaaaagcttttgttgatctaattaatgattatttaaaaagaattaaccattatttaaaatgccaagaaattgttgttagcgatgaacctgaaccagttcaaatttcaaataaatccttagaacaaattaaaagtaaagaggcctctaaaatttttaaaaatattaatcaaaatgattttgtaattgctttaattattgaaagcaacattataagtagcgaaacattagctaaaaaaatacaacaatgactaaacacattttctcatgatatttgtttcattattggtggatctaatggtttacatgaaagcatctatgagcgtgctaattatcatttatctatgtcaaaaatgacttttgctcatggcttagcaaaagtcatgttatgtgaacaaatatatagggcacttagtattttaaataacggaaaatatcataaataa

SEQ ID NO: 40553 - DNA, 1323 bp, Ureaplasma urealyticum
atgaaaataattaatttattagcttatcaaattcttgattcgcgcggccaaccaacagtagctgttaaattatttttagagaacgatcaaagtgtaattgcaatggttccatcaggcgcttccactggagcaaaggaagcattagaattaagagatggtgatgtaaattatttttttaataagtctgttaaattagcaattcaaaatattaataatattattcgccctcatctaattaataaaaatgttttaaatttttttgaattagataatttattaattaatctagatggtactgaaaataaaagtaaattaggtgctaatgctttattaggtgtttctatagcgattgttaaagcgggagcaatagccgcttctaaacctttatatcaatatattaaagaagacttaatgcataattatgatgtaaactattatgctccaattccgttaatgaattttattaatggtggggctcacgcagataatgatttagatattcaagaatttatgattgttccattaaatgcaatttcattttctcaagcgattcaaattggatcagaaatttttcatcaattagataaacttttaaaaagcaatcatttaagtacaacaaagggtgatgaaggcggttttgctccaatgttaaaaaataattatgtgactttagaactattagttcatgctattaaaaaagcacattaccttccttcaaaaacacaaggagtttgtcttgccttagatgtcgcagcttctgaattgtatgaaaacggaaaatatttttttaaaaagtcttcatctcataacattactcttgaacaaacatcattcagtagtgatgaatgaataaagtattgaagtaaattagtatctatgtttcctatcatttcgatcgaggattgttttgaggaaaacgattgaaatagttttgcgttatttttaaaaaataacccacacattcaagtggttggtgatgatttatattgcacaaacttaaagtatctacaaaaaggaattgattttaaagcaacaaatgctattttaattaaacctaatcaaattggtacaattagtgaaacgttagatgttattaaatttgcacaaaaaaacaatattaatactatcatttcgcatcgctctggcgaaactgaagacacttttattgcagatttagcgattggtgtaggtgctgggcaaattaaaacaggttcattatcacgttctgaacggatagcgaagtataatcgtattttagaaatcgaacaagaattaaaggataaattaatttatgaaccaagtaaattttttaaatttagataa

SEQ ID NO: 40554 - DNA, 966 bp, Ureaplasma urealyticum
atgaaccaagtaaattttttaaatttagataaaaatattttaattattacttcaggtggtgatgcaccgggtatgaatgcttcattaatttcattaatccatagattaatgaataataattttaatgtttttataggaattgaaggattattaggactgtacaataatttaattgaaccaattaaagataaacgtgtttttgatgtttattttaacgagcaaggaacagtcattaagacaagtagatttattaaattagatattaatgataaaaaaacacaaattattaaagataatttattaagtcataatattcaaaaaattattatcttaggcggccaaggtagtatgcaagctggtttagtgttaacaaaaatgggctttgaagtctttggaatattacacactattgataatgattttagtgaaacacaaatgtgtataggggccttaagtgctgcttcttttaatcaaaaattattaaagtgcctaaattacacagcaaaagctcattgtgcttttaatttagttgagcttatgggtcgtgaatgttcatgattagtcaataatagtgttggtaaattaaaacctattttaatgttaactaatcaagataataaatatactgttgatgaagtaatagatttaattaaagataaaataaactcaataaaagaatacgatcctttaatcattgttcaagaattaatctatgatcaaaaatgatacgaattattagtaaaaacttttgagcaaaaattacataaaagtttacgaattacaattttaaattatttacaacgcggagctccagtaagtgattttgatttacaattagcaaaagatagtgcgaatgtattggttgattttattgttaatcaaaatgatataaaaaacacaaataatatgtatgtagttattaataagtttgataataagttagaagttattaaattcaataaatag

SEQ ID NO: 40555 - DNA, 1425 bp, Ureaplasma urealyticum
atgttttcaaaaacacgcattattgctacagtaggtccagcaacaacaaaattgttttctaattggttagaatttaacgatttaaataatataaatgatgctcaacaagtatgcataaacattaaagatttaattttaagtggtgttaatatttttcgtatgaatttaagtcatggcgaccaaaaaatacacctttttcgtacacaattaattaaaaaaattgcggatgaattaaagatcaaagttgaaatattatttgatacaaaaggaccagaaattcgtgtttgtgaaatgagtgataataattttattattaaaaatagtgaagttataatacattgtaaagaaaaagttttaggtagttttaatgagtttagtgttactgatgctactggacaatacaatatgattagtgatgttaaaattaatcaccgaattttaatcgacgatggaaaattaattttaattgttaaaaaaattgattttctaaaaaacatcatttatacaaccgctaaaaatagttattcattaaaaacaaataaacgcttaaatttaccagatgccaattatagtttgccgtttttgtcaaagaaagatattgatgatataaatttagcagttaaattaaaaattccttatttggctttatcgtttatttctaatattaaacaaattaatgaggttaaacaacttttaaaaaagtcctcatttataccaaaattaattgcaaaaattgaaactcaagaagcaattgataatctagaagaaattattaaaaatactgatggtatcatggttgcgcgtggggatttagggctagaagtacctttttataaaattcctatttatcaaaataaaattgttgaattatgccataaatacaataaatattgtattatagcgacacaaatgttagattcattagaacgtaatattatccccacacgagctgaagtcacagatgtttattatgccgttaaacaaaaggttaacgcaacaatgttatcaggcgaaacggccgcaggaattgatccaattaatgctgtacaagttatgaaatctattattttagagacagaaaataataatatagaaaacgaaataacatttaaaaaaaatgaattattaattcctaaggaagttaaattaaaaattttatcatttcataaattaaaaataaataaacataaattattagttgttaatttaattagtaaaaattctaaacatttagtttatgatatattaaaatatgattttaattttaatattttatttgttatagataaaaatcaagaacatgatttattattaaaaaatgctaattttattattagtgaaaataaaatgttaaaacaagaagaattattaaaatcatttaatattgattttaataatcatgaatttttatttatttcaatttaa

SEQ ID NO: 40556 - DNA, 4305 bp, Ureaplasma urealyticum
atgcaaaataataaaaattatactgagaaatttattactgataaagtaatgcgaagagattattcaaaaattaaatctaattttgaaggaccaaatctacttgaaattcaagttgaatcttttaaacgctttatggagaaagatttaaaagaagttatttcaagtatttttccattaaaatctcctcagggtaagtatacgttagcatttaaaggtttaaaaattaagcagccaacaaaagatgaaagtgcttgtcgtgacgaaggtaaaacatttgaaacaccaatttatattgatttggaattaacagataactacacaggtgaagttaaacgtgcacaacgaaatactaaaacaggagaagatggtatttatttaggagcaattcccaaaatgacagaaaaaggaacttttgttattaatggaattgaaaaatttgttatctcacaaattgttagatcaccaggaatttatgtacttggtaaatcaagcatcaaattgaacggttcacgtaagcgtttatttgaaggcaaaatttgtgaaatttatccttctaagggtactttgatgcttggttatattcctaaggatcgtcataatattcaaattgttgcacgtgattcatctggtgataatgcgcaaacattttcagtaactactttactaaaagcttttggtttaacaagtgctgaaatcttaaaaatttttaataatgaaaaagagattcgtgaatcattagaaattgaaaaatatgcgccagaatatatttttgaaaattcacaagaaaatgaaattatttttaaaatttatagtgatgctcatgatattcatgagaaagccgatcgtcgagaatcaaataataagttaaaagaagaatatatagaacaaggttcaccacttttatcaaagttaaaacaactaatttttaattatgttgaaaaaaacgatgaaattgatgcattattacatgaaaataaagatgttgaagatgctagtttcattaagaataataaaaaattatatgatgaaagagaagaaatcattaattgcatcattagtgaaaaagcagctaaggatatcgttgaattattaggtattaatattaaaaatatagaaacactaagacatttaggcaaagcttcttatcaaatagctttacaacaacatttttttaataagcgtttatatgatattagtagtgctggacgctataaatttgaaaaaaaattattattaagtgaacgtttatatcaaaaagtaattgcgaatgatattattgataaaaaaaataatattctaattcctaaagatactttaattactaaagaacatatcgaactaataaaaaaagaatcacgtgataaaaacattaaatgaacaaaaaaaattaatttattaccaacagcattagaatcagaaattgaacaatttttagaatatgaaagtattgcagtttataaagataatgatttaagagatgaaacaacagagattgtcggtctagcatcaggttgcaaacttcaaactttaaccgtggctgacttagttgctacaacaagttatatttataacttgaattatgaaattggtgaatttgatgatatagatcatttaggtaataaaagacttaaattgattcatgaattattacgagcaagaattgctacaagtatggctcgtattgagaagtttattaatgaaaagttggctatttctgatggttcaagcaataacattacaaatgttaatgataaaggtattgatactgaacttgatcgtgaaattgaagaaagcgatatgagtgatgaggaaaagaaaaaagcaattagtgttaaatcaattattaatacaaaacaattccaaagtttagttaaagatttttttaattcacatcaattaattcaatttattgaccaacaaaatccattagcagaattaactaataaacgtcgtatttcagcgatgggtccaggaggaattagtcgtgaagaccctaatttagatattcgtgatgttcatcactctcactcttcgcgtatttgcccgattgaaacaccagaaggaatgaatattgggttgattatgtctttagcatcacttgcaaaagtagatgaaaatggttttattgtagcaccttattatgttgttgaggatggggttgtaaaagaagattataaatatttaacagcccatgaagatgataactatattattgctgaatcatcagtccaattagatgaaaataaacgaattttagatgaacaagttgttgctcgatatcgtggctcaacaggtttatttagtcctaatgaagttgattttattgatattgttccaaaacaagtagtatcaattgctgcatcagcaattccatttattgaaaatgacgatggggcacgtgctttgatggggtcaaacatgcaacgtcaagcaacacctttaattaaaccatatgcccctattgtagggacaggtacagaatttaaaattgcacacgattcaggaatggctgttgttgctaaaaatgacggagtggttgaatttgttgatagtcaaaaaattatcattagaaatgataatgataaattagatgattataaattaattaaatatcgtaaatcaaatcaagacacatgtaataaccaaattccaattgtaaaagtaggtcaaagagttcacaaatctgaaacaattggtgatggacctgcaatgcaaaatggtgaattagctttaggtcgtaatattctagttggttatacaacttgacgaggttataattttgaagatgctattattatttctgaacgtttagttgatcaagatgtatttacatcaattcatattgatgagcatacaattcaatgtatgaaaacaaaaaacggtgatgaagaaatcactcgtgacatgcctaatgtctctgatactgcaaaacgttttttagataatcaaggtatcgttttagttggcgctgaagttcatgaaggagatgttttagttggaaaaacaactccacgaggtaatgttgaaactgctccagaagatcgtttattgcaaacaatttttggcgataaatcaaaaacagttaaagattcatcactaaaagtaaaacacggtcaagaaggaattgttgctgctgttaagcgaattaaatcaagtgatgaaaatggtagtgaattaccagatgacgtaattgaaattatcaaagtttatattgttcaaaaacgtaaaattcaagttggtgacaaaatggcagggcgtcatggaaataaaggaattgtatcaaaagttgttcctattcaagatatgccttttttaaaagacgggactccattagatattatgttaaatccattaggtgtacctagtcgtatgaatattggtcaaattttagaattgcacttaggttatgctgcggctgaaataggtaaaaaacaattaattcaaattgcaattgatcaattaggttatgaaaaatatatttcattgtttggaatcaatgaaattattgctaaaaaactttatgaaaatattagtaatttaattaaacacaaacaagcaaaacaggcaaaagatatagatttaattgatgtgacaattattctaaaagaattgggattatcatatgatgatattggaattaaaatttcaactcctgtatttgatggtgcaaatcatgatgatattgtttctattatgaatgaagcaaacattgatattgaaaataataagggtaaacaagttctatatgatggaagaactggtgaaccattcgatggtttaatttcagttggattaacatacatgttaaaactagatcatatggttgatgataaaattcacagtcgttcggttggtccatatagtaaaattacacaacaaccattgggtggtaaatcacaaaatggaggccaacgttttggtgaaatggaagtttgagctttagaagcttatggtgcagcttataatttattagaaattttaacaattaaatccgatgatgttcaaggacgtaatcaagcttacaatgctattataaaaggtcacgatgttgttgctgatggaatgccagaatcatttaaattattaacaaaacaaatgcaaggtttagggttatgtattaccgttgaaacaaaagatgatcgtatggtagatattaatgaatatacactaaatcaaaatcgtttaaataatgacgatgatgaggttattttagatgaaaatctaaaagagatcaatgattctaatgaagaaatatttaatacaaactttaataataatgactatgatgatgaagagaacttctaa

SEQ ID NO: 40557 - DNA, 3918 bp, Ureaplasma urealyticum
atgagtcaaaaagggattaaatcattaacgatttccattgcttcacctgaacaaattttaaattgatcaaaaggtgaaatcactaaacctgaaacaattaattacaaatcattaaaaccagaacctaatgggttgtttgatgaaagtatttttgggccttcaaaagattatgaatgttattgtggaaaatatcgtaaagtaaaacataaaggtaaaatttgtgaacgttgtcatgttgaaattactgaatcaattgtacgtcgtgaacgaatgggacatattgagttagctgctcctgttgcccatatttgatttacaaaagaattaccttcgccatcaaaaatctcattattattagatattacatataaagaagttgatcaggtagtttattttgttaattacattgttttagatgaaggaaataatgtatatgatggtaaatcaatttttaataaaaaagaagttttagatttaacatcaccaaaaaattcaattcgatcacgtaataaattacgtcgaacattacgtaatattcaagaacgaattgaagatgaattaaatcatgaacgtgaagcattaattcaagattttgattatcgtttagctgtaacatatgatcaaatgttaaaagattctaatattcctttttcagtgaaagatgtaatggcttttattgaaaaacatacaggcgttcgttttggtattggtgctgaagctattcgtgaattattagaaaaactaaatcttgaagaagaacatgaaaagattaaacaagcaattcaaaattcacctaatgcttatgatcaaaaaacaaaacgcttattgcgtcgtttagaatgtgtaagatgaattaaggattcaggttcaaaaccagaatgaatggtaatgacaagaatccctgtcacaccatctgaaacaagaccaattatttctttagatggcggtcgttttacgacctctgacacaaataatttttatcgtaaaatcattattcgtaatgaacgtttaaaacaaatgcaagcaacagatgctcctgaaattttattagataatgaaaaacgtttattacaagaagcagttgattcattatttgataataattcacgtaaaaaaccagttgtaggtaaagataaacgtcctttaaaatcattgtcaaatcatcttaaaggaaaacaaggattatttagacaaaatttattaggaaaacgtgttgactattcaggtcgttctgtaattgttgttggtcctgaattaaaaatgtatgaagtaggaattcctgctttaatgattttaaaattatttagaccatatattatttctgaattaatacgtaaacgtgatgaattaggtaatgaaattcaaccaatttgtgccaatattaaattagcagaacaaaaaattcttgcgcaagataatgagatttgacccgttgttgaaaaagttattaagcaacgtcctgtaattttaaaccgtgcaccaaccttacaccgtttagggatccaagcttttgaaccaaaaatggtggacggtaaagctattcgtttacatcctctagttacaaccgcttttaatgcggattttgacggagaccaaatggctgttcatatccccttatccaaagaagcagtggctgaagcacgatcaattttattagcctcatgacatattcttggtccaaaagatgggaaacctatcattacacccacacaggatatgattttaggtatttattatttaacaaaagaaaaatttccacaagtaattgaagaaatgatggctaaagatccaacgcaagcgagagttgaatttattaataattttcacattttttcaacacaagacgaagctattcgtgcttataaattaaaaacaattcgtattaatgacgtaattggaattacaacaaaagcttttaacaataaaacatttagtaaagaaggtattttggttacaacggttggaaaaattatcttcaaccaagcttttcctgttaattttccatatattaatgatgttaaaaatctatatggcgaaaatcaatttgaaattattggaatgcatgaaagtattttagattatttaaaagcctataatttaaaagaaccattaactaaaaaaactttatcaacagtaattgattatttatataaagtttctgaaatcgaagtcgtaccacaaacaatggataaaattaaagctttaggatttaaatattcaatgatttcagcgacaagcatttctgcctttgatattccatcttatgatcaaaaatatgaatattttaaagaaactgatgaattggtttcaaaacttcgtgaattctatttagatggtaaattaactgatgatgagcgatatactaaagttgttcaagcttgatcacaaacaaaagataaagttactcatgatattgaaaaactaattaattctaatgaatataaagataatccgattgtgattatggcaaaatcaggagctcgtggaaacacgtcaaactttacacagttagcaggaatgcgtggtttaatgtcaaaatcatataactatgaccaaaaaaataataatggtgttattaaagatacaattgaaattccaattaagcattcatttattgaaggattatcagttagtgaatactttaattcatcatttggagcacgtaaagggatgactgatacggcgatgaaaaccgcaaaatcaggttatatgacacgtaagttagttgattcaacacaggctgttgtaattaaagatcatgattgtggcacaaaagaaggtattattgttcgtgaaattcgaaatacaaaagataatacatcaattgaatcactaaaagatcgtattgttggaagatatagtattaatacaatttatgatacaaaaaataaattaattatcgaaagtgataaattaattacaagcgaaatagctaatatcattcaaaattcaggtattcgtgaagttgaggttcgttctccattacattgtgcatcactttatggtgtttgtcaaaaatgttttggtttagatctatcaacaaataaattaattgaaaccggtacagcgattggagtaattgcagcgcaatcaattggtgaacctggaacacagttaacaatgcgtactttccatactggaggggttgctggtgatacgaatattactcaagggtttgaaagaattaaacaattatttgattgcattcaaccacaagaaaatgagaaagcagttatttcacaagtaaaaggaactgttgaacgaatcgaaaaagattcaaacaccaatggttataatgttgtaattaaatataataaagataattatgtaaattatccaacacgttcgaatgctgtattacgtgttaaaacaggagatgaaattattgctggtcaaaaaattactgaaggatcaattgatgttaatgatttactaaaatatgcaggtattgaaaatgtgcgtcattacattattaaagaagttcaaaaagtttatcgtatgcaaggaattgagatttcagataagtatattgaagtaatcatttcacaacttacaaataaaattacaattacaaatccaggagattcaggattatttgttggagaaacaattagtattaatgaatttactgaagtggctcaaaatatgcttgttaataagaaaaaaccaccaagtgcaattaatcaagtatttggtttagaccatgcgccaagtaaatcaggttcattcttatctgctgcttcgttccaagatactaagaaaatattaactgacgctgctgcgcgttcacaaaaagatatgttaatcggcttgaaagaaaacgttattctaggaaatttaattcctgctggaacaggattaaaggatgttgaagaagtgattgcttatggtgaagaaatgtataaaaagcaatactaa

SEQ ID NO: 40558 - DNA, 594 bp, Ureaplasma urealyticum
atgtatatttattataataaaacaagtctaaacgatacgttaatttttttaaaaaacaatcagcaatatgatcatcaagtgtttttaaacgatgacttattgcttttttatcatggtgatgaactaattggtttaaatttatttaatgcaagtgaatatttaaaaaatttaaatgaaggatatttatatcctacgactcaattaattcaaaaattaagtgatttaataaaaataaaattatcattagataatgcttttaaaggttttgtggtaggtaaaattttagaagttaatttaattcccaatactcatttacatatttgcttagtagatataggtgatcaacaaatacaaataatatgtggagcacaaaatgtccgtattggcttaaaaacggttgtagcgacacctaatttattaatgccaaatggaaatgaaattaaaaaatccaaattaatgaactatgattcatttggaatgttgtgttcacaaaaagaattaaatattaataattttaattcacaaggaattgtcgaacttaatgatgaatatcaggttggtcaattgtttacaaaagtttatagtaatttataa

SEQ ID NO: 40559 - DNA, 993 bp, Ureaplasma urealyticum
atgtcaaaaaatgatgatatattattatttagtctttcaaattcacatcaattagctaataaaattgctaatttactaaaaattgaattatcaccaattagaattgataagtttgcagatggtgaattaattgttgcacctcaagttccagtgcgtggacgtcgagttattattattcaatcaacatctaaacctgttaacgatagtttaatggaattattaatcgctattgactcaattaaacgagctagtgccaaagcaattagtgttgtaattccttattatggatatgcacgtcaagaccgtaaagctaaaccacgtgaaccaattacagcacgtttagttgcaaaaatgattgagagtgcgggcgcaactagtgtattaacttgagatattcattctttacaaacacaaggtttttttgatattccgtttgattcattagaggctgtatgagttttaatgaaacattattttagtgcttataaagattcatcaaatataactattgtttcaccagattatggtggtgtcaaacgtgctcgtgaaatttcaatagctacaggtgcaacattagcaattgttgataaacgaagatctggcaaaaatcaggtggaaattaataatgtattaggtgatgttaaagatcgtgattgtgtaattgttgatgatatgattgatactggtggcacaattttaggtgctgctaaaattgtgcgtgaaaaaggcgctaaatcaataacaattattgctacacatggtttgtttaataataatgcacgacaacattttcaacaagcaattaaagatcgaattattaataaaatttgtatagctgatacaattgaaaatgaaccttttgatggtcttgaaattgtaagtatcgctccagcaattgccaaatgtattgaaatttattcagagggtacaggttcgatgtcgtttgtacatgatgaaaattcaaaagttttatttgctaaaaaaatatattaa

SEQ ID NO: 40560 - DNA, 540 bp, Ureaplasma urealyticum
atgaataaaccaattatcaaagaagttattattgtagaaggtaaaacagatgcacaaaaaattgatcaattagtaaatgcacaaattattactactaatggatcagaaattaataaaaagactttagctttaattaaacaagcacaattatcaaaaggaattattttatttttagatcctgattatcaaggagaaagaattcgtaaaataattactaattatttaaaagatggcattattaaacagtgttttattagtaaggacaatatgaagaataattctaaaaaaattggaattgctgaagctaataatgatgctttattgaaagctttgaaatctcaaggaacattcgttattaattcaattgaatctattacttgattagaatacttaagtttaaatttaaataacaaaaaaatacgtttaatgctttgtgattatttaaatattagttattgtaatcacaaacaattatttaaaagattaaacatgatgcaaaaaacatttaaagaaattaaaataattattgaaggattttaa

SEQ ID NO: 40561 - DNA, 840 bp, Ureaplasma urealyticum
atgaaattatgtgataaagaatatattttatctgttattgctacaccaattggcaatcttgaagaagttagtgaacgtgttattaaatgtttaaatgaagcttatgttattttatgtgaagacactcgagttacagctaagctgttgcatctattaaatatttatgattacaaaaaattaattagttatcataattttaatgaaattcaaaaattgaatgaagcgattaattatattaaaaaatatccaacagctttagttagtgatgcaggctatccaacaatttcagatcctggttataaattaattaatgaatgtcatcaacaaaatattggaattcaagttattaatggtccctcaagtttgatgcatgctctagttgctagtggaatgtgttcgcaagattttatgtttttaggttttttaggtaaaacgcaaaaacaacgtgttgaaaaactaaaattatataaaaacttgcaaacaacttttgttatttatgaagctgtgcaccgaatagaaaagactttaatggatatatatgaaatatgaggagatattttaatttttatcgggcgcgaactaacaaaaaaaaatgaaagtcattattatggttatctttcacaactacccccaattactgaaaaaggagagtttgtaattgttattgataataagatcaatcaagatgttattaagaataataatattaatgaatgtctaattaaaattagagatttaatgaaacaaaattttaaattaaaagatgcttgtaaagaagttagtaaatcttctaattttgatagtaaagaattatataaattaataattaatcaaaaataa

SEQ ID NO: 40562 - DNA, 1227 bp, Ureaplasma urealyticum
atgttagataaattaattaaaactctaaaaaatcctcatagtattgatgacattgttggtcaaaaatatttattagatgaaattggtataattagaagaatggttaatcaccatcaagtatttaatttaattttttatggccccccaggtgtaggaaaatcatcgcttgctaaagttttagcacaagatttaaaagttccatttgcttttttcaatccagttgttgattcaaaaaagcaattaatgcaaatcattgaacaagcattagatttaaataactttattatcattattgatgaaattcatcgattaaataaagataaacaagatattttattaccaattattgaagcaaataaaattaaattatttgcgacaacaactgaaaatccgttttttgttattaaccctgctttaagaagtcgttgtcaactattatcattaaaaccattaacgagttcacaaattagtgaacgaattaaaactttgattaatgttgaagaagtttttgaaccacaagcttttaatttattaattaataaaactaatggagatttaagggctgttatcaatacattagaaattatttatttattatataaagaacataaagttgattatgtattactaaaacgtattatgcaagaatcatacgcattaggtagtagcgatggcgatgaaattcatgacttaaaatcagcttttcataaatcaatgcgtggaagtgattgtgatgcagctttatattatttagcacgtttaataatcataggtgattttgaagcgatttatcgaagagttagtgtttgtgttcatgaagatataggtttagctaatcctaatctatgtttacgtgttgatcaaggaattaattcttgtcgatttttaggatatccagaaaatcaagtaattttagctaatttagttttacaaatttgtttatcaaataaatcaaactctgtatatcttgcctatcaaaaagcatttgaagatgctgctaatggcaaacaatattcaattccaaatcatgtccgtgatgctcattatgcatcagcaataaaattgggtgttcatggttataaatatccacacgattttaaaaataactatgttaatcaacaatatttaccacgtgaattaacaaacaaaaaatattatgttccccaaaacaacgaacaagagtttaaattaaaccaaaatcaacaaaaatttaaaaataataattaa

SEQ ID NO: 40563 - DNA, 1566 bp, Ureaplasma urealyticum
atgttaaaacaaaagaaattttttatctctactcccatttactattcttctggaaatcctcatattggtcatgcttatacaacgatcattgctgatgttttagcacgttataaacgcttgtttggatatgatgttttctttttaacaggaatggatgagcatggtcaaaaaatccaacaaaaagcttttgaagaaaacatttctcccaaagctttggtcgatcgtaattcaattatttttttaaatttatgaaaacgattaaatattagtttttcaaaatttattcgtacaacgcaaatggatcatgaagagtctgtacaaaaagtttttagttatttatataaacaaggaaaaatttatttaggccaatggacaggttattattgtgtatcatgcgaagaaaattataatcctgctgaaattattaaaagtcaagataatataatgttatgtcgcatgggtcataaattagaaactaagtctgaagaatcatatttttataaaatgagtgatcaagcaccatttttaaaaacttactatcaaaatcatccgaatttcattattccaaatgaacgtgcaaatgaaatggttaataacttcttaaataatttagaagatttaagtatttcacgtactacttttgattgagggattcctattgctgaaaatccaaaacatgtaatttatgtttgattagatgcattaatgaattatttaactgcaactggttatttatcaaataatgaggaattatttcaaaaatattgatgtgataatgaaactgaaattgttcatttattatcaaaggaaattgcgcgttttcactgcatttattgaccaatctttttaaatgatttacaaattcgttttccatcaacaattttatcacatggatgaatcattacaaaagaaggcaaaatgtctaaatcattaggcaatgtaattgatcctaatgttttaattgatacttatggtgtggatgcacttcgttattatttaatggctgatttaagtttatttagagatgctatttttagtgaagataatttgattgaaacttataatactcaattagcaaatagttatggtaacatgatttcaagaacattgggaatgttaaaaaaatatcgaaataatatagttccaaaatatgttggttgtgttttaaaaaatgatgaaaaattagaaaatttaattaataaaaatattgaattagttcaagaaaacattaataaatatagtattgataaagcacttaattgcattcaagaaattttagttgaagcaaataaatatattgaagataataaaccttgagaattagctaaaaatcaacaagagcaagaattagattcacttttagttcatttagtaaaagttattcaagtaactactactttattatcaccaattttaattgaaggaagtaaaaaagcagttgaacaattaaattttgatgaatcttttttaactttagctagtttagcatcttatgatatattcaactaccataaagttaatgattcaaaaccaatttttgcaagaatcattgtagaaaaacaataa

SEQ ID NO: 40564 - DNA, 990 bp, Ureaplasma urealyticum
atgaatgatcaaaaagacaataaagaaattcaaacaattgttcctttaaatcaaaaaactaatttaaatgaattggatgctaaagcaatttatgatgaatttcaaaaattaaataaataccaaagagcttttgcttgactaaaacttccaaaacaaaaaaaagctgaattaaagcaatttttaaataagaaaaaaacgcaagttgatttgctaaaagaagattttaatcacgcaaatgtttttgaaattcgaaactttaatttttgatatatgaatcgaacaaaacatgttctacatgatttaaatttggatattaaaagaaataaagtaacagcatttattggcccaagtggttgtggtaaatcaacttttttaagaaatttaaatcaattaaacgatttaatagaagggactagtcacgaaggtgaaatttattttttaggaactaatacacgttcaaaaaaaatatcatcattagaattaagaacacgaatcgggatggtttttcaaaaaccaacaccatttgaaatgagtatttttgataatgttgcatatggtccacgaaataatggaattaatgatcgtaaaattttagaaaaaattgttgaaaaatcattaaaaagtgcagctttatgagatgaagttaaagatgatttagataaagctgggaacgctttatcaggtggtcagcaacaacgtttatgtattgcgcgagcaattgctttagagccagaagtgttgttaatggatgaaccaacaagtgctttagatccaattgcaacagctaaaattgaagaattaatattagaattaaaaaagaaatattctattattattgtgactcactcaatggcacaagcccagcgaataagtgatgaaactgtgtttttttatcaagggtgaattgaagaagcgggagaaacaaaaactatttttatccatcctaaaaataaaagaacaaaagattatatttctggaaagattggttaa

SEQ ID NO: 40565 - DNA, 225 bp, Ureaplasma urealyticum
atgacttatatgctattaacatctagtgacttacattgcgggtcatgttcttcaaatttatataatgtacttgaaaagattggcgcacaaaatattagtgtaaatattttaaattcagaatttgcttttgaatttgaagaaaataaaattgctgatcaagatgtaattaaagaaatcaataaaaatggtttcaaaacaaatattttagaaaaatacatatactaa

SEQ ID NO: 40566 - DNA, 2130 bp, Ureaplasma urealyticum
atgttaaagaataatttaattaaaaaatttcaattactacctattaataaaagaagatatttaatttctttaatgaaaacatcaatagcacttctaattagtattcctttaatggtttttgaaatgctatttatgtttaaaagtaatttaattttaagcattgatggttattttatatatggatgaattgtttttgttttaagtattttcattgtctttggtttaggttttagtttttttaagggtgctttttttgaagtttttaaatgaaaaaaacctggaatgtctttacttgttgttatttcaacatgtgttgctttcatatatagtacttatagtttaatttctaacacaattatttatgaacctaaactacatggtttttttgaaacagcttgcatgattatagcgacaatgagtgttggtcaattagttagtgatcgtattaaactaaaagcaaatcaagatctacaatctttaaataatttacaagtcaaaaaatataatagttatgatttgaacacaaaacaagttagtgaaaaagttgtttttcaagctaaaattaacgaatacgcactagttaaaaaaggtgaaattgttccattagatggcgtattatattcacaaattgctgaagttgatgaatcatcattaactggtgaagctcgtccaattctaaaaacaattaataatgatattattgctggatcaattaatgttggagataattttatttttaaaattactaaactttataatgattcaacgattaaaaaaattattaatggtgttaatcaaattgctagtagcaagccaaaaattcaagttgttgctgataagatttcgttatgattcactccatttatcttattaatggccattctagcttttttactacaagcttttgtaccaagtattcaagagttaccaattgcttttttaaatcttcatggatcaaataatgattctaatttatatgaaaaagcagcatatgtagcagtttctgttctagttatatcatgtccatgtgcatttggtattgctgtgcctttagcagttttaattggtgcagggcatggtgctaaaagtgggattacatttaacaatagtaatatttttgaaaagattaaaaaagttaatgcaattgcttttgataaaacagggacattaacttatggaaaattacaattaaaacaagttataggaaatgatcaatttttagatttaatttatcaaatggaattaatttctttacatccactagcaaaatcattcgtaacttatgccattattaataatatcgtcatgagtacaaaattaattgatattaaagaagttgcaggagtggggattattgctaaagatgttgatggtaatatttatgaattaacatcagaacattatgcaaatgaaaatcaatttgatttttcattgattaatcaaaaatcttctacttctactaatttattagcttcaaatattatttttagtattaacaaaaaggtgcaatcaattcttgtttttgaagatgaaattcgtgctgatgcttatgaaacaattaaggtattgcatgaaaataatattgaaacttatatgattactggtgatagttttaatgttgctcaaaaaatcgcaaaggaattaggaattaaacatttttatgctcaagttaaaccagaagaaaaagctaacattattaaaaaaattcaaaatgatcaaaaaactgtaatgtatgttggcgatggtattaatgatttattagctttaaaacaagctaatgtttctatatcaattggtgaaactaataaagcaactaatgcagttgctgatattagtttaatcaaaccagatattttaaatatttacaaagtaattaaactaacaaaaattactaagatgtttattgtaagtagtttactatgagcgtttggttataatctaatttttattccactagcattaattggtattattccaccatttatttctgttttaattatgacaactagtgatattgctgttgtattaaactcattaatttttagattattaaaaatgcgtctagttaataaaaagcaaattcataaacttaatttaaaaattatcaatgaggctatgttacataaataa

SEQ ID NO: 40567 - DNA, 270 bp, Ureaplasma urealyticum
atggcagtaagcaaacaacaaaaacatgatttaacagttaaatttggtggttctgcatcaaatacaggaaaaacagaagttcaagtagcaatcttaagtgctgaaattgattcattaacaacacatatgattgaaaataaaaaagataaagcttcaaagcgtggtttatacaaaaaagtagctcaacgtaaaaaattattatcatacttacaacgtgttgatattgaacgttatcgtgctttaattaaagaattaaacttaagaggataa

SEQ ID NO: 40568 - DNA, 195 bp, Ureaplasma urealyticum
atggcaaaaagagatcaattaacaggcaaaggtcctttaagtgggaatacacgttcacatgctatgaatcattcaaagcgtcgttgaaatgttaatttacaaaaagcaactattaagactgaaaacgggagccaacgtgtattagtttcagctaaaacactaaaaacacttaaaaagcataatttattagcctag

SEQ ID NO: 40569 - DNA, 303 bp, Ureaplasma urealyticum
atgaataaattatactgattaactgacttacaactttttgcttctaaaaaaggggtaggttcatctaaaaatggtcgtgactcaaatcctaaatatttaggcgcaaaacttggtgatgggcaatctactaaagcaggtcaaattatttatcgtcaaaggggcaataaaatctaccctggattaaatgttggacaaggtaaagaccacactttatttgcaaaaactgctggtgtggtaaaatacactaaatttatgggagataaaacaaaagttagtgttcttccaaaagaagataataattaa

SEQ ID NO: 40570 - DNA, 309 bp, Ureaplasma urealyticum
atgattaaaataaatcattatccaaacgctttattagtaaaaggtcatgcaaattttgatgagcatggcaaagatatagtatgcgctggagtgagtgctattattatgggtgcacttaattgatttgatcaacaaaaaacaacaattaaggttgagcaaggatttatattaataattattgataataacaatcaattgtatcgtcaatatctagaattaattataattcaattaaaagcaatctattttaaatatcaatcttatattgaattacacgaatataaacaacaatataaaagaggtttataa

SEQ ID NO: 40571 - DNA, 303 bp, Ureaplasma urealyticum
atgtttgctatttttcaaacaggcggaaaacaatacaaagttcaacaaggcgaaaaaatctatgttgaaaaactagatttagaagttggtagtaaaatttcatttgatcaagttattatggtagaaggtagtgttggtactccttttgtaaaaaatgctgtagttaatgctactgttataaaacaaggaaaacaaaagaagatcaacattattaaatttaaatctaaaaaacaccatttaaaacgtcaaggtcatcgacaaccatatacacaattagttattgattcaattagtgttaagtag

SEQ ID NO: 40572 - DNA, 1161 bp, Ureaplasma urealyticum
atgcgtgaagaaataaaaacaaactcaattcttaattataaatataaagttgttaaacacctagcagatggtggttttagtaaagtttatttatgttgttttttatcagatgaaactaagtttattgttattaaagttttagatattaatgatgagaaacaacaaatggttgtttatgatgaattaagaatttcaaatttaattaaaaattctgattctgataaaaaaaactatattatggaatattatgaatattttgaaaccggttcgttagaaaataatgataaaaggatttatattgtttttgaatacattgaaggtttgacattgcgtgaatatcttgatgaatttaaaacaattacttatgttaaggctgttgaaattattcgtcaggttgccttaggtgtaagtttttttcatagttgtaatccacaaattattcatcgtgatttaaagccagaaaattgcatgattaataaaaccttaacaaaaattaaaattattgattatggtgcagcatcggttttttacaatcgtgaagatttaacaaaagatcaagaaattaaatgtacaattatttacgcttcaccaaaattattaagtcttgggcaaaaagttaaagaacaagctaataagggtttaaataaaagagctttaagtttaattaatgacgcattaggtgttagttatgatattcattctttaggagttatgttatatgaattaattactggaactaacccttttagtgaacatacaattacagatgatcgtgattatttagaaaaatgaataacatatgatgttgaaccactatcgttaattaataaaacaataccaaaaggtattgataatattttaatgcgttgttttgcttgaaaaaaagaagataataagttgttatacaaagatatctacactttaattgatgatttaagtaatgttatggatccagagtcaaatcttaatcaagaatacattaaaccattaaataagttacgaatttatcgtaaaaatctagcaggcttatatgaaattaaagaaaaagatcgtaaatgatatttacaaaaatgatttattattcttattagttgtttatcggttattctaatcattttattaattattattttattttttaaaaaaagtggggcaatctaa

SEQ ID NO: 40573 - DNA, 753 bp, Ureaplasma urealyticum
atgaaagattttattagatatactaaaaaaagaaatttaagtcttaacacaattcgtacttatgaatcagtattaaaacattatgaacctgttttagattcgtgaattaaaatacgaaataaaattattaatagtaactttaaaccacgaacaattcatttacacaaaaacgttttattaagtttttttgaatttaaaaaactaaaaagatatttacaaaatttaaaattattaaaattaccacaaattgaaatgaaatattttgatgtaattagtaaaaataatttatataaaaaaactgatatcttagatgatgattcattagaaattaaaaaatataaaaccattattagattcttgtttgaaacaggaattagagctcatgaattattttttctagaatctattaataatcgtttgtatgtgttaggtaaaggaaataaaaaacgacaaattttctttgtaaaacaaacttttgaacaattacaaaagttttatgagaatctaaaaggatttgaaacaactaaaacattacgtttatatattaaaaaaattattggcaagaattttactccccattcattacgtcgtagctttgctacttttatgttaattaaaggggcaaatcccaaaactgtaatgttacaaatgggacatgcaaacattcaaacaacgtttagttatttaaatttaaatgaacaaacaaatcgtcgaatttataacaaaattatgtaccaaaatgatgcagaataa

SEQ ID NO: 40574 - DNA, 2280 bp, Ureaplasma urealyticum
atgggttttgttttactaacagcttcagcaattattgctttttatacattcccatcactttcaacagctggttgaattgcaattatctttgcttttattacagctatgtgttgattcattccaattgggattgcagccgctgaaatggcaacaattaaaggttgggccgaggggggaatatttacctgggtacgaaatttattaggtccacgaaatgggtttattgtaacctgattacaattccaagtcacatttggatttgtggctatgatcttattcgtcctttcatccttttcatttgctttcgcaggtgctgatggatataattattttaatacacttaagttgggaacaactttaaatcaagctacatcagtcaacttttcaaaaaactttagcaatggggcattatatggaattggtattgttgttgtcgcaggtctaatctttatgagtttattaggccaaaaacgaactcaccaatttggccaagttgctttaatcattggtattttactaccattctttattattttaggattccaaatttatacagtggcaacaatgccagatccattatactttattggaaaacacttccaaaaagaaccacatttagacccaagtgtaactggtacttcttatgaattaaataaaactttcatgtcatcagttgttatggcatctttcatggcatttagttttagcttacatggtgtagaagtttcagctattgctgctaatcgaatggataatccttctaagaaatatccacaagccatgatgattgttgtaatttctgctttagtttgcattattattggatcaattatgatttcaatgactgtaccaacttcaacattatcattcaatggtggattagtacagacaattatgttcaacttatctgttggtggaattgatgttaaactaccagatggcacagttgctcattataaaacactagcacatgcatactcagtaattgaaactcaatatggcacagctgccgctaaccaagttatgtatcaatttgtgtatggtcatccaattaatacaggtagtgacttagcacgttctgatttattaacactaacatcagaagttaacgatcctttaaaaaacccatctttatttatttctgttatgaatatagaaacaaataaaatggctatgcaaggattacaagctattactttcttcattggaataggtgtatttgttgaagtttctgtttgaatgtcaaacctttcaactggattaaattatgcaatgcgtaaagcccacttcccagcatgggttacatatcgtttaaagaatgggtcagcgttaacagtagcaattttatgaattgtattactaatgtgcatttttgcaatttacatgtttggttataattcattaatgcaatacaaaggtcaaacaattagtgatattttagctaatgaaattcgtattaaccaagatcaaaaagaaccaatggctttattgtctaatcaaaatttagatgaaattaaactaatggctcgttcaatttacgaacatagtcatgctcctggagcacaagctaatgttttacattttgattttaataaacatgctaacagtgaagtaaaagcaatttatgataaaatcaaagattatattggcattaatgccgtagcatcgggaacaccagcatcaattactaatatttcattcatttcaaacgttgtttcacaaatctcaatgtattatattggatataacattttcttaattggatatctaagatatgtctttaaagctaattgattacgtcgtgaatttagagttaaatgatcatgattacaaattagtttagctttattagcaatgggcgttaatacatttgcagttgttgcaacttacttaccagctgctccagaactatatcctggacaagaagcttattatgtatttatttcaattgcattaccaatgtttatatgcacattattacttggattatttatttatctaattaattatgcttgaaataaaaaacgaggtattaatttatcagaacattcaaacttaacaaacgttgatcaaaatgttttagatgtaattaataattgacatttatacaaagatcaaaaagaatttgctaaatttgaacgtcatgtgcaattattacaacaaaaacaagtaattgtaagaacaacaaaagataaggcacaaagagaattagttgcgaatgaaatgcaatatttagcagctgaaatcgcaacaagatttgcaccagaagaagaacattaa

SEQ ID NO: 40575 - DNA, 537 bp, Ureaplasma urealyticum
atgtcatcaaataatgatgcacgtaaaaatcaacctttaattaatgatcaaattcgttttcgaacaatggttgtaattgatgaccatggtaataatttaggtgaaatgaatcgtattgatgcccttaatttagccgcttcaaagaatttagatttagttgttattgctaaaaaaggaaatattcctgtaacaaaaattttagattatggtaagtacaaatacgaacaaaaacgtcgtcaaaaagaatcaagaaaaaatcaaacaattattaaggtaaaagaaatcaaaattaaaccaatgattggtgaacatgatttaaaagtaagagcagaaaatgctaaacgttgattagaagataaagacaacgtgaaatttgtgattgaagcacgtggacgtatgtgtacaaaagatgaatttattgtacaagcttatgaaaaattcattgacttaattaaagattatggtacagttgttcaagctaataaaaaagttagcaattatcgatatgaaacaattattgaaccaattaaaaaataa

SEQ ID NO: 40576 - DNA, 195 bp, Ureaplasma urealyticum
atggctaaaattagacaaaaaacaaaaagagctgttgcaaaacgttttagtattacaaaaaatggtaaattaaaacgtaaacacgcttatagatcacatttagctctaggtcgttcaacaaaagctaaacgtcatttaagaaaagacgcaattatgagcacatctgacacaaaaagatatactcaatgcttatag

SEQ ID NO: 40577 - DNA, 363 bp, Ureaplasma urealyticum
atgagagtaaaaggtggaagtgttacacgtcaacgtcgtaaaagatgattagaaaaagctgaaggttcatgaggaacacgtaatacctcatatagaattgctcgtcaaacagtaattcgtgctgcagagtatgcatatcgtgatcgtcgtaataaaaagcgtgattttagaaaattatgaatttcaagaattaatgctgcagttcgtgaattaggatatacatattcacaatttatgaatgcattagtaaaagctaatgttgttactaaagatggtcaaggtttaaatagaaaaatgctatctgaattagcaattaacaaccctgaagcatttaatcaattagttgataaagtaatgaaataa

SEQ ID NO: 40578 - DNA, 306 bp, Ureaplasma urealyticum
atgaatcaagaattaagaattagattagaatcttatgaccacagattattagatgatacagtaaaaacaattgtaaacatttctaactctacaggttctaaattaagaggtccaattcctctaccaactaaaaaggaaatttttacaattttaagatcaccacatgttaataaatcaagtcgtgaacaatttgaaagaagaacacacaaacgtttaattattttagaaaatccacaacctaaaacaatggaagctttaaaacgtttatcagttccatttggtgttgaagttactttcaaaatttaa

SEQ ID NO: 40579 - DNA, 702 bp, Ureaplasma urealyticum
atgaaatcattattaggaacaaaagttggcatgactcaagtttttacagaaacaggtaaagctgtagctgccacagttatctatgttgaaccaaataaggttttagctgttaaaactaatgaaaaagacggctacagtgcaattcaaattggttatgaaacagtaaaagaaaaagcattaaacaaaccattattaggtcaattcaaaaaagcaaattcagatccaaaacgtcacattaaagaatttagagatgttgttgctgaagttggtgctgaattaacagttagtgaatttgaaccaggacaattagttaatgcacaagcatatactaaaggacacggatttacaggttcaattaaacgtcataattttagtatgggtccaatgggccatggtgctggttatccacatcgttatgttggttctattgctaaaggacgtgggggtagtcaagctcaacgtgttttcaaaggaactaaattacctggtcattatggacatgaattagtaacaactaaaaacttactagtattagatgttaaagcaaatgaaaatttaatcctaattaaaggtgctattccaggaccaaaaggttcaattgttttattaaaatcagctaaaaaagttggccatatcgtaagcgatccacaagttgttaactacttagctaataaagcatcatcaagtgaagcaaacgaataa

SEQ ID NO: 40580 - DNA, 636 bp, Ureaplasma urealyticum
atggcaaaaattaaattattatctattgatggtaacttcgcaaaagaacttgaagtaacctctgatctttttgttgaagtacctcacaaacaagcaatgtttgactcagtgcttgctgaaaatgcagctgaacgtcaaggtacacattcaaccctaacaaagggtgaagttcgtggtggtggtaaaaaaccatgaagacaaaaacacacaggtaaagcacgtacaggttcaacacgtaacccacattgaacaggtgggggtgtggtatttggtccaaaaccaaatcgtaactacaatttaaaagttaatgcaaaagtaagactattagctttcaaatcagcattaactattaaattgaatgaaggaaaaatgctaggtttagtagcaaatagcgatttagaaacaccttcaactaaaaaaatggtaaatttcattaataatgctaacttagaaaatcaaaaagttttattagtaatagtcgacaattttagtaatattaaaaaatcaacaaacaatttacaaaaagttacaacaaaattatgataccaagtttcagttcgtgatttaatgcatgcaaatgttgttgttgtggctgaagaagcatttacaaattacgcaagaaaggtaagtaaataa

SEQ ID NO: 40581 - DNA, 318 bp, Ureaplasma urealyticum
atggaattaacaagagttattttacatccatatacgacagaaaaaacttattctattcgtaataaaagcgagcatgaaacattaacttttattgttgataaaaatgctaataaataccaaattcgtgaagcatttattgcgatttttggtttaaaaccacttaaaattcgtactacaaatcgtcgtcctgcaaaaattcgtacttcaacagctagaccaggatatacaaaagcaaaaaaaattgcttatgtagtaatgccagtaggtgttaaagtagctgtaagtaaagaagaagttgaagcagcaaacgcaaagtag

SEQ ID NO: 40582 - DNA, 840 bp, Ureaplasma urealyticum
atggcagttaaacgtattaaaaaccatagtagtggtaaaagacaaactgttgttgttgattacaaatcgattttaacaacaagtaaaccagaaaaatcattgcttgttactttacctaaaaaagcaggtagaaacaatcaagggaaaattacaattagacaccatggtggtggtcataaacgtaaatatcgtattattgactttaaaagaaataaagataatatttatggaactattaaatcaattgaatacgatccaaacagaacatcatttatttcattagttgtttacgctgatggagaaaaacgttatattattgctcctaaaggaattaaagtgggcgataaaattatttcaggaaatgaaaacattgatattttattaggtaattcattaccacttgaatttattccagaaggtacattagttcacaatattgaactatcaccaaatgctggtggtcaaattacaagaagtgctggtgctagtgcacaaattcttggttttgatgaaactaaaaaatatattttagttaaattaaactcaggcgaagttcgtaaatttagaaaagaatgtcgtgctacaattggaactgtttcaaatgatgaacacattcttgaaaatttaggtaaagctggtaaatcacgtcatttaggggttcgtccaacagttcgtggttctgcaatgaaccctaatgatcacccacatgggggtggtgaaggtcgttcaccagttggtatggatgcacctcgtacaccttgaggtaaacgtcacatgggtgttaaaactcgcaacaataagaaatcatcaacgagcatgattgttcgtcgtcgtaaataa

SEQ ID NO: 40583 - DNA, 267 bp, Ureaplasma urealyticum
atgtctagaagtttaaaaaaaggtgcttacgctgatcctagtttattaaaaaaagttgaagcagctaatgcatcagtttctaaaaaaccaatcaaaacatgatctagaagaagtcaaatttttccaaactttgttggattaacatttgaagttcataatggtaaaactttcttaaaagtttacgtaacagaagatatgattggtcacaaattaggtgaatttgcaccaacacgtaatttcaaaaaccatacagaagctaaacgttag

SEQ ID NO: 40584 - DNA, 936 bp, Ureaplasma urealyticum
atgacaaataaagttattcaaagaaatattcatatttcgcaccgtaaagcttctcttgtaattgatttagttcgaaacaagccagtacatgaagcaattcgaattttaagtaatacaccaaagaagtttgctccaatcgttttgaaattacttaactcagcaatttcaaacgttcaacataactctaaagatatggatccaagtaaactatatatttacaaaattgtagctaatcaaggtccaacaatgaaaagaacactaccacgtgctaagggttctgctgatcaattatttaaacgtacaacacatttagaaattgttttatctgatgatgttaatgaacgtgaaaaagaattagcagctattaaagctaaaaaatcaaaaaaaccattagcagttgaaccgattgctaaagttgaaactaaaaaagttgctaaaccaagcaaagtagaaataaaaccagttgaaaaagacgaaaacgttgatccagaacttttaaaacgtgaacaacaagttttaaaagttgttgaaaaaactgcttcacaaaaagaagaagaaactactgaaacaattatgatttcaacatcacctaagaatgcacaagttttatttgatgatttagaaaaaaatgtaatcttttataaaacaacacctattaataaagttttacgtgtactagtttatgtaactagcccaactaaaaaagttgttggtgaatttgatttagaatcagttgaaattggtgcaatttcatcaatttgaagaaaatacagcaaacaatctgtaatttctaaaaaagaatatgatgcttactatgaaggaaaagataaagcacatgcacttgtaagcaaaaaagcatataaataccgtaatccaaaagatcttagcgaatataacatgactaaaggtccaagtggattccaatatttaaaatag

SEQ ID NO: 40585 - DNA, 774 bp, Ureaplasma urealyticum
atgggtcaaaaagtaaatccaaatggactaagatttgggatcaacaaacaatgactatctcgttgagtgccaactgatcaattacaaatggctaaatgattagttgaagatgataagattagaaaatatttatcaacaaaatataaaaatgctggtattgatcatgtagaaattgaacgtgaccaacaacgggtaaatgtttatgtatatgctgtacaaagtggtttattaattggaacagaagcatcagaaaagaaattaattgaattagcaattaacaaaatcgttggtcgtaaacaattagtatctttaaaagtagttgaagttcaaattccagaattacaagcttcattaatggcacgtgaaattgccgacgcaattgaaaatagagtttcatttagaattgctcaaaaaatggtaattaaaaaagttctaaaagctggtgctagaggtattaaaacacatgtttcaggtcgtttaggtggcgtggaaatggcacgtgaagaaggatatacacaaggtgtaatgaccttacatacattacgtgcagatattgattattcaatgcaagaagcacatacaacttatggaattattggtgttaaagtttgaattaatcgtggcgaattatttggtaacaaattagtaaacagtgttgcgcatgctgcaaataaggaatttagtcgtagttcaaaaccaaaaaaaggatcatttaatcgttcatcaagatcaaaaaatactaaacctgctccaaaacaagcagttagcgaatag

SEQ ID NO: 40586 - DNA, 417 bp, Ureaplasma urealyticum
atgttacaaccaaaaagaacaaaatttcgtaagcctcataaagtaagctacgaaggtaaagctaaaggaaataaacaagttgattttggtgaatttggattaatggcactagaaggtgcatgaattgatgcgcgtcaaattgaatcagcacggattgcaatttcaaaacgtttattaaaaactggtaaaatgtgaattcgtattttcccacatatgtcattaactaaaaaaccattagaagtacgtatgggttctggtaaaggtagtccagaaaaatgagtagcagttgtaaaggctggaacagtaatgtttgaaattgctaatgtttcagaagaattaatgtgtgaagctttacgtgctgctggaaataagttaccaattaaagtaaaaattgttaagaagggagaagctaactaa

SEQ ID NO: 40587 - DNA, 228 bp, Ureaplasma urealyticum
atgagtagtattgcacaagatcttcgtaaaaaagatagcttagaacttgaaaaaattgttattgagcttaaagccaaattattagaacttcgttttgcagctgcgaatggggaagcagaaaaacttcatacagccaaagaaattcgtaaaacaattgcacgtgcattaacaattttaaatgaacgtgaattagcagaaaaattaaacaacaaggaggctaataaataa

SEQ ID NO: 40588 - DNA, 255 bp, Ureaplasma urealyticum
atggaaagaagccgtcgtaaagttttagaagggttagtagtttcagataaaatgcaaaaaactgttgttgttagtgttgaaactaaaagcaaacacccaatatatagaaaacttgtaattagtcataaaaaataccacgcacacaatgataatgatgatgccaaagttggtgaccttgttgaaatcactgaaactcgtccattaagtgcaacaaaaaattgaagagttagcaaaattttagaaagagcacgttag

SEQ ID NO: 40589 - DNA, 369 bp, Ureaplasma urealyticum
atgattcaacatatgacaagactaaaagttgcagataacacaggtgctaaagaagttggagtaatcaaagtgcttggtggctctaaaaaacgttatgcatcagtgggcgatattgtagttgtctcagttaaaaaagcaacacctgctggtttaattgctaaaggacaaatggccaaagctgtaattgttagaacaaaaaaatcaattcgtcgtgagtctggtttattaattagatttgacgaaaacgcatgtgtacttattaaagaggataagacaccaagaggatcacgtatttttggtcctgtagcaagagaaattcgtgatcgtggatacacaaaaattgcttctcttgctcctgaagtattatag

SEQ ID NO: 40590 - DNA, 333 bp, Ureaplasma urealyticum
atgaacagaattaaaaaaggcgatacagttgttgttatttcaggtaaaaacaaaaataaatctggcgtagttattcaagttaaccctaaagaacaaacagcacttgttgaaggcgttaataaaattaaacgtcatcaaaagaaagatcaaacgcatgaacaatctggaattattgaaaaagaagctccaattcgtttatgtaaattagcattagttgatcctaaaggaaaagataaaggtaaagcaactaaagttaaatatttacttaaagataacaaaaaagttcgtgtagcacgtaaaagtggttcagaacttgatgtaaataaaaaataa

SEQ ID NO: 40591 - DNA, 555 bp, Ureaplasma urealyticum
atggcattcttaaaagatttatataaaaataaagttgctaaagatttgcaaaaagaatttgcttattcttctgtaatgcaaattcctaaaattgaaaaagtagttattaacgcaggaattggaaatgctgttgctgataaaaaacatttagaagcagctatttcagaattaactttgattacaggacaaagacctgttgaaacaaaagctaaaaaatcaattgcaacatttaaattacgtgctggtcaaagtattggtgctaaagttacattacgtggcgatcgtatgtgagcatttattgaaactttatttaatattgctttacctcgtgtacgtgattttaaaggaatttcaaataattcgtttgataaccaaggtaactacactttaggtattaaagaacaaattattttccctcaagttgtttatgatgatgttaaatcagtgcgtggttttgatgtaacatttgttacaactgcaaaaacagcccaagaagctaaagcattactagtgggactaggtgctccatttcaaaaagtaagaggagacaaataa

SEQ ID NO: 40592 - DNA, 186 bp, Ureaplasma urealyticum
atggcgaaaaaatcattaattgctaagcaaaaaaaacatcaaaaatttgcagttcgtgaatacactcgttgcgtaagatgtggtcgtccacatgctgttaatcgtaaatttggtgtatgtcgtctttgctttagagatttagcttacgctggtgcaattccaggaattaagaaagcatcttgatag

SEQ ID NO: 40593 - DNA, 399 bp, Ureaplasma urealyticum
atgtatttagatccaattgctgaattaattacaaaaattaataatggtcgtaaggcccataaagctgaagttagttttgcaacttcaaagcttaaaacagcgattttagaattattggttaaagaaggatatatcaaatcttatgatattcgtccaactgaaaacaataaatctgaaacagttgttaaactaaaatacaaaaaccaaacaacatcttctatcaatggttttaaacaaatttcaaaaccaggattaagaatttattcaacacacttaaatttaccaaaagtattaaatggtttaggaattgctatcatcacaacttcaaaaggtgttatgtcagataaacaagcaagaaaggaaaatgtaggcggggaagtaatcgcttacgtttgataa

SEQ ID NO: 40594 - DNA, 549 bp, Ureaplasma urealyticum
atgtcaagaattggaaatcgtaaattaactattccagctaatgtaaatgttagtgttgaatctggtaaagtacatattgttagtcaaactgcaaaattaagtgttgattttccagtaaatctaattagtgtagatgttgttgataatactgttaaagttagtcgtgcaaacgatgaaaaacaaacaaaaatgtttcatggaacagtaaatgcaaatattgctaatgctttagttggtgtaactactggttgaaagaaagaattagaagttaaaggggtaggttttagagcaaaagttgaaggttcaaaacttaatttaggattaggtttttctcaccctttattaattcaaattccaacaggtttaaaagttgaaacaccatcagctactgaaattagtattaatggagcagataaagctgctgttggtgcttttgcagcagtagtacgtgcttatcgtaaaccagaaccttacaaaggtaaaggtgtgatgtataagggcgaaagaattgtgcgtaaagcaggtaaaactgcagataagaaaaaatag

SEQ ID NO: 40595 - DNA, 366 bp, Ureaplasma urealyticum
atgaaaagaattaattttagtcgtgctaaacaacgtgcacttcgtgctaaacgtcttcatgttaaaattcgtaaccttcaattagctgcaaacaaacctgttttagttattacaaaaacaaatgcacacatttgagcacaattaatttgctataacaaaaatattactttagcttcatcatcatctgtacaattagatttacaaaatggtaataaagataatgcacgtttagtaggtgttgatattgctaaaaaagctttagcacaaggctttaaacaagttatttttaacaaaaatggtgctaaataccatgggcgtattaaagcattagcagatgcagcgcgtgaagctggattagaattttaa

SEQ ID NO: 40596 - DNA, 612 bp, Ureaplasma urealyticum
atggaaaacaatgttaaaaaagaaactattgtagatagtgaaaaagttgaaaagcaacaactagtaactgcaccagtagttaataaaaaagaaaatacagaaccaaaagcaaaaacatttaaacgtgaaacaacaacatcaaattttgaagaacgtgtagtgaaaattaaacgaatttcaaaaacaacaaaaggtggacgtatgatgcgttttagtgctttagttgttattggtgataaaaatggaactgttggttttggtatgggtaaatcaattgaagttccagatgcaatcaaaaaagcgattaaaaacgcaaacaataatttaattaaagttaagcaaacaaaaaaaggttcaatttaccatgatgtaaatggtcgtcatggagctgctaaagtaatgttactacctgctcctgaaggtactggaattattgctggtggacctgtacgtgctgtggttgaattagctggatttactgatatttatacaaaatcacgtggtgctaatgcgccaatgaatgttattcgtgccacaatcaatgggttattacaacaattaacaccaaaagaaattgcacgtttacgtgacaaaagtttaagagaaatatag

SEQ ID NO: 40597 - DNA, 447 bp, Ureaplasma urealyticum
atgcaattacataatttagaatataaaaaaggttcaagaaaccacaaagaaaaacgtgttggtcgtggtcatggttctggtttaggaaaaacttctgggcgtggacaagatggacaaaaagcacgtaaatcaggaatggtacgtttagcttttgaaggaggacaaacaccactttatcgtcgtgtgccaaaagttggttttaacaacgatcgttttgcaaataaatataacgttgtaactttaatttcattagtaaaatatgaaacaaaagaattaacagttgaatttatgtatgcaaataaaattgctaaaaatgaagatttaccaattaaggttataggtaatgcagttttaccaagtggcacagtagtaagtgctcacaaatttagtaaaggcgcattggaatcaattagtaattcaaaagcaaaagcacaaattttagagtaa

SEQ ID NO: 40598 - DNA, 1416 bp, Ureaplasma urealyticum
atgactaacaaacagaagaaaaaaaatgcttttagacagttgttaatgatctttaaaaataaaaaagttttagttgcattaattgtaactttaagtatattaatcttgtttagaattggatctgttatcccaatgccatacattaagttaaatggtaattttggcaatcaaggttcattcttttcaattattaacttattaggcgggggagggctatcacaattttcactcttcgcaattgggataggaccttatattaccgctcaaattattatgcaacttttatcaagtgagcttgtgccaccactcgccaaattatccaaatcaggtgagcgtggtcgtaaaaaaattgaagtgattacaagaatcattaccttgcctcttgcagtgatgcaagctgtcattattattaatttaatgacaagagcaaatggatttatttcaattgtttcaaatgcaccatttgctattggttcaccattattttatgtaacatacatttttttaatggttggtggcacttatatttcgttatttttagctgatctaatttcgaaaaaaggtgttggtaatggaattacattattaattcttacaggaattgttgcttcattatttaatcactttattgcaattttttcaaatttaggtagtttaacaagcagtaaagtttcacaaattatcggtttcattttatacattttattctatattatgatcttaattggtgttgtttttgttaataattcaacaagaaaaattccagttcaacaaaccggtcaagctctaattttagatcatgagaaactaccatttcttcctattaaaattatgacagcaggagtaatgccagtgatctttgcatcatctgttttagccattcctgcacaagttgctgaatttttagataaacaaagcatgggttattatgtgattcataattacttcattgttgattcttgaacgggtctagcaatttatgttgttttaattttattatttacattcttcttttcatatgtacaacttaatccaccaaaaatggctgaagatattaaaaaagccggtcgttttattccaggtgttcaagttggaatggatactgaaaaacatattacaaaagtaatttatcgcgtgaattgaattggtgcaccaattcttgcttttctagcatgcttgcctcatttggttgctttagtagctaaaacaatcaatcatggaattcctgtaattcaaccatcaacaatttttggaggaacttcaattattattatggttacagcaacgcttgaattatgaaatgcaattaaatcaacatcaacttcaacatcatacgcttaccaaagaaaagaattagaaacatccattacagtaagcgctgaaagtgacaagagtagtaagtcacaaatttgatag

SEQ ID NO: 40599 - DNA, 642 bp, Ureaplasma urealyticum
atgaaaatccttttaattggccccccagggagtggtaagggaagtgttagtgaattattaactaaaaataatacattaaaacatgtttccacaggtaatttatttcgtgcaattctaaaagaggatagcgaattagcacgtaaaattaaagagattaatgtttctggtggtaaattagtaccagatgaaattactaatcaagttgctaaatcagcaattgatgaattaattaaaaatgaacaatcatttattttagatggttatccacgcacaattaatcaagccttagcattagaacaatattgtaatttagattatattttttatctagatattgatcatcaagaattaatgaaacgtttaactgggcgttgaatgtgcccaaaatgtgcaggaatttataatattcattttaaaaaaccacaagttcatggtttatgtgacaatgatcaagctactctttatcaacgagctgatgatcatgcagatgctgtaagtattcgattagatgaatatgataaattaaccctacctttgattaagcattatgaaactaatccacgttttattaaaatcaatgctaatcaacctattgaagatgtttataaaaacattaacaattatttaaaacaaaataagtaa

SEQ ID NO: 40600 - DNA, 225 bp, Ureaplasma urealyticum
atggcagatacagaaaaattaaaaatgcttggtaaaattgttgaagttttacaaggcggaaattttagagttcaattagaaaatggcatcacgattatgagccacgtatcaggtaaaatgcgtgttaataaaattaacattttaccaggtgatactgttgatgttgagttaagtccatacgacctaacacgtggaagaattacatatcgtcatcgtgataactaa

SEQ ID NO: 40601 - DNA, 114 bp, Ureaplasma urealyticum
atgaaagttagagcttcagttaaagcaatttgtaaagattgcaaaatcgtaaagcgatcaggtgttgtgcgtgttatttgtgctaattcaaaacacaaacaacgtcaaggttaa

SEQ ID NO: 40602 - DNA, 399 bp, Ureaplasma urealyticum
atggcacgtattttaggggtagatattcctaatgataaaagagttgtaatttcattaacatacatttttggtattggaaaatctacatctcaacaaattttaaaattagctaatatagatgaaaatattcgtgtaaaggatttagctgatgaacaaattgctgaaattcgtcgagttgctttaaattttgttaaagcaaatggcgaaaaattacaattagaaggtgatttacgaagaactgtagccatggatattaagcgtttaatggaaatcggttcatatcgtggaatccgtcaccgtcgtggtttaccagtgcgtggacaaagaacaaaaacaaacgctcgtacacgtaaaggaccacgtaaaacagttgctaataaaaagattgaaactagataa

SEQ ID NO: 40603 - DNA, 366 bp, Ureaplasma urealyticum
atggcaaagaagaaaaaacttagttttactaatggaattgcatatattcatgcaactaaaaataatacgattattactttggctgatgaacaaggaagcgttttatcttgagcatcatctggttcaatcggttataaaggaacaaagaaaaaaactccatattcagcaggtattgctgctgaagctgcagcaaaagctgtgattgatatgggattaaaatctgttgaagttcatgttaatggaacaggtgcaagtcgtgatacagcaattcgtagcctacaagcagcaggtttagaagtaacaaaaattaaagatgttactccaattccacataatgggtgtcgtccacctaaaaaaccaagatag

SEQ ID NO: 40604 - DNA, 984 bp, Ureaplasma urealyticum
atgcgtaaatttttaaaataccaacttgatgtgccatcaattaatagcgaagacaaaaatcgtacagttgttaaaattgccccacttgaaattggttttggtgacacattaggaaatgccttacgtcgaatttgtttatcatcaattcctggtgcctcaatgttcgctgttaaatttgggggatattcgcatgaatttcaaccatacgaaggtgttaaagaagacattactcacatcattttaaacttaaaaaatttagcaattaaaattgatgaattaatttatagtgaagactatttcaacaatttattaattgataaatgaccaaaaatgaaaattaatttcaaaggacctggtgtgattacagctaaagatattgtatgtccagtaggttttgaaattgttaaccaagacttatatattgcagaagtaacaaaaccaattgatgtagaaattgaaatttttgcaaaaacaggacgtggtcgtgtcgattttaatacaaataaggattttgtttcaacactacatattatcgcaaccgattcaaattattcaccagttctacattacgcttataatgtagaaatgattaaagattcaaaatcatcaatgtctgagattttaacaattgacattgcaacaaatggtacgatatcaggaagcgaagcaattgcgattgctgctaagattatgcaagcgcatttagaaccaatcgtgaacattgataaaacaattaatgaaatgattattatgcgtgagcgtgaggaagaagaaaaacgtcaaaacgcttcaatttcaattgatgatttagatttaacggtgcgtgcatataatgctttaaaacaatcaggtattaataccactgctgaattaattgaattaacaaaatcacaacttgaaaaaattaagaatttaggacgtaaatcagttactgaaattattcaaaaattaactgaacgttcacttgagttaaaaaaagattaa

SEQ ID NO: 40605 - DNA, 360 bp, Ureaplasma urealyticum
atgagttacattaacaaaccaggtaaaacacgcgcatgaagaaaaatggtgagtcgtcaacaagtatctgatgttataagtcatggttcaattgtgacaacaaaaacaaaagcaaaagaatcacaacgtcatgttgatcatttaatcactcttgctaagaaaaacacacttgcttcacgtcgtgcagcagctgcgattttattaggaacaaatcaacactcagcggatgatttattacgtaaattatttaacgaattaggtcctaagtatgctaatcgtgctggtggatacactcgtgttattaaacttggtaatcgtccaggagataatacagaagaagctgttttacaattagtttag

SEQ ID NO: 40606 - DNA, 2949 bp, Ureaplasma urealyticum
atgtcatttgatccagaaaatataaatccatcaacaggtctaaatgatgagcaggttttaaaaagtcgtcaaatttatggttttaatgaaatcaaaaagaaaaaaaaatcccacattattacaaaatttttaaagcagtttttagattttatggttattttacttgtaatcgctgctgctgttactttagctttagtgattattaaacctcctcatgatacagctgaattagttgttcaatatgtagaatttggaataatatgttttattttattgttaaatgcaatttttggtaccattcaagaagtgaaagctgaaaaaaatacggatgcattgtctaaattagcgtctcatcaggtcaaagtattacgtaataatcaaattagaattattaattctaaccaagttgtaatgggtgatgttttgattttagaagctggtgatcaagtcccagctgatgctttattagtgaacagctcatcacttgaagtagatgaagctattttaacaggagaatctttaccagttgtaaaaaatgccaaggcaattgttaaaaaaaatacagtaattggcgactgtttaaatcaaattttttctggaacatatattactaatggaacagcaaaagcaattgttactaatatcggtatgaatactgaaattggtaaaatagccaaattaattaatgatcaaaaaactaaattaacgcctttacaaaaaaaaattaataagttatctaaaattataggtctatttgcttctattttatgtattgcagtatttattatttatatttatttaattggagatggaaattgaaatattagttgacatcccgctttaataatggctatttcattatctatagcagctattcctgaaggaattgtggcaattgtaacaattgttttatcattcggtattaaagaaatggcaaaacaaaatgctttaattaaacgtttgccagctgttgaaactctaggaagtgctaatgttatttgttctgataaaacaggaaccttaacacaaaacaaaatgactgttactaaagttttcactaataaattaaaaataacagatttaattgataatgagagtgtttttaatttaattaaatgagctactatagcaaataatggaattaaaaattttaatgaaaaaaaacaagaatatgagtttattggcgaccctacagaaacttgtatcattgaagctgctttaaaattaaacatagataaatataaattagatcaagaatttattagaattcatgaatttccatttgattcaactcgaaaattaatgagtgttgttgtaaaacatcaaagtgattattatttaattactaaaggagcaattgatgctattgacaaaattgttcaaaatccaattacaaaagatgtttatgaagcaaatgattttttaagtaaacaagctttaagaattttatgtgttgcaattaaaaaactatcatctataccaactaattttaaccaagatgaacttgaaaaatgtttagaatttgttggtctaatcggtatgatagatccgcctcgtcctgaaacacaagaggcagtaaaaattgctattaaagctggaatccgtccgataatgattactggcgatcatattaatacagcatcagccattgctaaacaagttggtattttaaacgaaggacaagaagttttgaatggtaatgaattgaatatgatgagtgataatgaattaataaataatattgatcgttatagtgtttatgcccgagtttctccaacagataaaatccgtattgttaaagcttgacagcaccatgataaagtagtaagtatgactggagatggtgtcaatgatgcacctgcactaaaagctgctgacattggatgcgcaatgggtataactggaactgatgtttcaaaagcatcaagtgatatgatattaattgatgataatttcgcaacaattattaatgctgttagtttaggacgttctattatggacaacattaaacgtattattgttttattattgatcactaatttatctggattagtttcattaatatttggaattattattctaggaattaatcctatgtcatcactacaaatattatgaattaatgtaattgctgaaactttacctggaatagcattagggttacatttagcggatgttaatttaatgcgacacaaaccattaaaaaaatcagcaccgattgttaataaaagaatgtgagctactatttttaccaatggtttttttgttggtttaatttctattttattattttatttaggagcttcttcacactttaattttgactttatgctaatgagaaacgagtttaaagaacttactaatcttgaaaagatatatcaagacacatgaagttgatttgggcaaaatcacgaaatttccaatattattcatgaaaaaattttaaccataaaaacagcgattatggctggttcgtctttaacatttgtttttatgggaatgagcttaacgtttaatgcattaagcttaagaacaaatcattcagtattcgttaatttttgagaaaactgtaaatacgttgtttattcaatattaatatcaatagttatgattattgttatcgcttatactcctcatttaaatcaaatattcaatatgaatccatacaacataaacggttatgagtgatttaatattcttccatttgttctttttgcaatacctttaagtatttttgaaattatcaaatattttagatatttaaaactacgtagtacttttgattataaaaataaaacttatgcattattaaaccaagaaatacaatcaacaaatttaaaaattaataatacaaaaattagttatgaaaaacagtattacaaggcattgttgaataatttaattattaaaagaaaaattttaataaataaatgccataaagaaatataa

SEQ ID NO: 40607 - DNA, 2625 bp, Ureaplasma urealyticum
gtgaagaagaaattaagtaagaagtattcattcaaagaggttgaagctaataaattattgttttgacaagaaaataatttatttaaagctcaaataaatagtacaaaaaaacctttcacaattgttttgccccctcctaatgttacaggtcatttacatattggacatgcctatgattttaccttatctgatattttaatgcgttataagaaactaaaaggatatgattcctttattattcctgggacagaccatgcagggatcgcaacacagacaaaatttgaaaaaaatttaaaagtaaacgcacaaaccaatcgtttcaatttagggcgagaactgtttttagaaaagttaaaaatttgaaaagatgaacaaattaattatattcataaacaatgaaatgctttaggtttgggtttagattatagtaattatttatttacattagatccaatagttgttcaaacagtgcgcgaagtttttgtaaaaatgtttaatgaacatattatttatcgtgataaaaaattagttaattgagatattcaattaaaaacggcaattagtaatattgaagtgattcataaagaagttgaacaaaaactgtattatataaaatatttaagtcaagatcaaaaggattttgttgttgtagccacttcacgccctgaaactatgtttggtgataaatatttagttataaatcctaaagataaacgttattttcatttacataataaaatttttattaatccaattaataatatagaaatgactgttattttggatgattatattgatattgaatttggaacaggagtgatgaagtgtacgcctgctcacgattttaatgactatgaattagctaaaaaacataatttagaaattattaatattatgaacgctgatggtactttaaatgaaaaatgtggggaatttaagggtttagatcgattagaagctcgttctttaataattgataaattacagaaaaataatcatttattaaaagtagaatcttatcgaaccagcgttggttttagtgagagaactaatgaaattgttgaaccttatttatcacatcaatgatttattaaaatggatagtttaataaaagatacaatcaaaatgcaagatgattgtaataataaagtagatttttatccaaatcgttttaataagactttacttacatgattaaaaaatacagaagattgatgtatttcaaggcaattatgatgaggtcatcagatacctgtttgatatcataaaaaaactaatcaaatttattgtgacactattcccccaaaggatttagaaaattgaattcaggatgaagatgttttagatacttggttttcaagtggaatgtgacctttattaacgacaaaatgaaattataatagtcatttttttgaccgttatttccctacatctttaatagttacaggtatggatattttatttttttgagtctcaagaatgatgaactttagccaatatttggttgaaaaaaaaccttttaaggatgttttaattcatggtttaattcgtgattcacagggacgtaagatgtcaaaatcattagggaatggtattgatccttttgacattattgataaatatggattagatgctatgcgtttattttttgcatcatgtacaacaattggtgaagatttaaatttttcaacagaacgattaggcgctaattgaaattatttaaataaaatttgaaatattgctaaatatattgaaaatttagatgaaattaacgataatcttaattttgaagatgttgataaattttgtgacgtcaataaatgaatattgactgaattatcaaaattaaccttggaaattaataaaaatatggataaatataatctagttgttgctacaaaatatttatatgattttatctgaaatacttttgcgagttattatttagagtacacaaaagttttattacaagatttaacattaaaaaatgaaacaattaaaacaattcgctatgtatttaataaaattttaatcatgctacagccttttgctcctaatattagcgaagaaatttgattatgtttaaatcaaacaaataattcaatattattacaagaatatccaataattaattttgagtttgaaacaataattatagataagattgcgaaaattattttagaaattagaaagctacgattagaagaaaatattaataatagaatcaatctttgttttgaattaatatcacccaatgatgcattttataaatcaaagataaaattagttaatttgttattaatcttagttaatgctgaaataaatgaaattaaaaaaacaagttctaataattatacttatgagctagttattgatgattttattcttaaaacttcgtatgaaaaaccgattgattatgtttttcaaatgaaaaaagctagtgaacagttaaactatttggaaaacgaaattcaacgagcaactaatttattaaataattcaggttttatcaacaaagcccctgctcaattaataattaaagaaaaaaataaattaattaatttaaaaaaagaacacgcaaatttattaaaaactcttactgacttaaaacaaaaggtgaaataa

SEQ ID NO: 40608 - DNA, 519 bp, Ureaplasma urealyticum
atgttaaatattgttttatttgaaccagaaattattttaaacactggtaatatcgctcgtatgtgtgtaggttttgatgcaaatttacatcttgttagaccatatggatttattttagataaaaaacgttttcacaaagattttatacgtgcctcaaccaatcatttaaatgccttaaaattatatgaatatgatgattttaatgaatttattaataaaaacaacattagtggtgatgaaatatatttttttactagatatggtactaaaactccgtgcgattatcaatatcaaaatataattcaacataatgtatatttagtttttggtaaagaatcaacagggatagatcataatattttaaaaaaatatcctcataattggatccgtattcctacaagcattaatttgagaagtttaaatattgctaatagtgttgctatgggaatctatgaagtagtgcggcaaaataattttaaagatttattcaaatatgaacctcataagaaatttgagtaa

SEQ ID NO: 40609 - DNA, 672 bp, Ureaplasma urealyticum
atgatcaataaaaacaaaaaatttcattttcagtattttaaaaaagataacgatcaatcaatttctactaaagaaacattaaaaagatattttaattttaggtctcaaagtgtaaaattgattatttttaatttagttttaacagcattttttcttgcattatttttaattggtcgttttttaactaaaaatttagattttttaaatggttttagttgacaattgcaaatgggaatttttgttttagcaatcgtttgtattcccaatttttattataaattaatgtattatattattgcgccgttagtgatgttagcaattggttttagtgctgagcccttctttggatatttaatgccacattatggttttggtttaattttatttacggatgtcattttaattattgttaaaaagtcatgtcagtcaattaaaaagcaaatatttttatcctatttattaatttttagcttttcaatcattggttattttattgtttgaatgggctatagtattcaaggaacacttttttacaatactgcttttattccttctatgatttataattctttggtaacttttggttcaatggcaattaattttgtattatatataatttcaattcccgctattgttgccttaaaaaacaaatatttatgtaaattagtttaa

SEQ ID NO: 40610 - DNA, 756 bp, Ureaplasma urealyticum
atggaacaaattagaaatttaattgatttacaaatcaaactaaaaccaatccaaaaagcattttatgatgcgtgatcaaaaacatttattaatggaattgataataataaagaaactcatgaacaaaacaaaaaaattattttagaaatttatatgattttaaaagtttttttaaacaaaaaccgagatattatttctaaaattccattaaatcaagttaaaaaaatagctaatgacattttagaaaaagaaattattttagaacagcctttagttgattattattaccaaagttcatcttgttttattttaataccttatttgattcaaattctttatcaatcttatcaccttaataaaccaatttataaaataatgtgtaaatttattattagaaataatttagcattatttaaagaatgagatttaattgaacgtcaaacattggaaattattaaattaaaaacaaatttaattgaagataacaataaggcaatcaatttatttagttgtgaacaacgagaattacaacacaatcgttttgtaaaattatttaataattttattttagtgtattgaactaaacgagaagttaaatacatagaggcaattcgttttttgatgtattttatttgaattcctatcatttttattgttttattaattttgattttaggtttatattttggtttaagtaatagtgaatccttaaaaagttcaacacaattcttactagatttgtttattattaattaa

SEQ ID NO: 40611 - DNA, 1092 bp, Ureaplasma urealyticum
atgggaccaattattccaaatacacgtttaattgattttaaatttgatcgagacttattaaatagtgcctatactgctcattattttattaaaacatgcaagataattgaattgcatgcaccaaatcattcagttattatgcaatttacacactttagcaaaacaccgatcatggtgtgtggaacaagtgaggttttagcattattagagttttgtttatctaaaaaagaactaaaacaattaaaaatatattatgttccagatggacatgttattaaaccaaaagaagctttatttgttatcgaagggccatatgaaatttttggctgattagaaaatattattgactcaattctagcacgacgtagttctatagcaacgaattgctataatgttttaaatttaattaatgatgaacaaaaagtaatttatatgagtgatcgttctgatgattatagtttacaaccatatgatgggtatgctgctgctgttggtggaatgcaatactttgttacgcaaaagcaggttgaatttttaaaagatattaattatgaatgtaaggtaattggctcaatgccacatgctttaattcaacaaaacaatggtcggattgatttagcatgtgaaatgtttgcacaaacttttcctagcgatcctttaattgctgttattgattataataacaatgttttaaatgatcttgaacaactacgatatatgtttgatcgtttgtttgcagtacgaattgatacagctaaggatttaattgatgaaagtttattatcgacttttaataatgttggtaatcgtgatttacatggttgtaatccttatcttattgctttagtacgtgaatatttagataataatggaggaaaacatattaaaataattgcttcaagtgggattgatttaaatggtattaaaaattttaataaacacaattctgcaattgatttttatggaataggcacatatttaagtcacttatcagttcacatcactgctgacttggtttgtttagataatgtttatggtgctaaagttggccgtaaaatcgctaagaatttttctgaaatgattttatattaa

SEQ ID NO: 40612 - DNA, 168 bp, Ureaplasma urealyticum
atgtcaagaggtgtaagcgttgaaggcgatttagaaaaggctcttaagaaatttaaacgtatttctaatgaaacaaaaaaagattctaaacgtcacgaatattatttaagtccaagaattcgtcgtaaagaaaaaattaaagaggctaataaatatcgtagtttctaa

SEQ ID NO: 40613 - DNA, 1653 bp, Ureaplasma urealyticum
atgattacacaaaaaataagtgaagaattaaataaggctttggcgaaaatgggtattcatgatacacaggagacaaagattctcgttgataaaactaaaaatattaaatttggtgatttttatactaacatagcaatgattttaagtaaaaaaaataataagagttctttagaaatagctaaagaaatagctaataattttgaacaagatttgtttttagaagttaatttgcagccacctggatttttaaattttaaattaaaagcaaaagatcatgaaaatttattgaaacaaatttattatgaaaaagatagatttggtcaattctctaaaaagaatatcacttataatattgaatatgtttcagctaaccccacaggttatttgcatattgctcacgctgctaatgctatttatggtgatattttagctaatttattaaaaatttatggatatgatgtagaaactgaatattgaattaatgatgctggaaatcaaattgataaattagcaatgtcagtgttagttcgttatttacaattacaaaatattaatattcaattaccagcagatgcctaccatgggcaagaaattcatttagttgcacaaactttataccaaacttataaaaatcaatttattaatgtacgtttaaatgaaaaatatgaaattgatgatgatattgctaatcaagaaattaaaaattttgcagttaaatacttattaaatgaaattaaaaacgatttagcatcaattaacacattcattgatacttatacttcagaaaattgaattcgaaattcgggacgtattttagaagttttatcaaaaataaaaccttacacttatacactagatggtgctttgtgattaaaaacaactacttttggtgatgataaagatcgtgttttaattaaatctgatggttcatatacatatttcacaccagatattgcttatcatgactataaatttaataagacaaatacaactaaattaattgatgtgtggggtacagatcatttaggttatattgcgcgtttaaaagcggcaatgaatgctttaggttatgatccaaataatttagaaattgtttgtgctcaagtaatgaaattagttaaaaataatcaagaatttaaactttcaaaaaggagcggacaatcattaacaatcaaggatttagttgaaattattggtaaagatgcattacgttgatttttagggtcatcatctatgaattcgcatgttattattgatgtagatattgccttatcaaaaaataacaataatcctttatattatgttcaatacgcacatgctcgtgccaatcaagtattaaataaacaagtttatgaattagattttaaaactgatctattaacagaaacacgtgaacgtgaattgttgaatcaacttcatttctataaacaaacaattgctaatgctgcaaataatcgtgaaccacaccgaattagtaattatttatatgacttagctcaaatttttcataattattatgcaaatgttaaaattaataatgataataataaagttctatcagcacaacgttatacattagtatgatgtgttaaacaggttttagctaatggtttggcaattatgaaaataactccatatgatcagatgtattaa

SEQ ID NO: 40614 - DNA, 1269 bp, Ureaplasma urealyticum
atgaatagtttaaataaaaaaagtataaaagatcttgatgtaaatggtaaaacaatagttttacatttagatttaaatgttgttgttgattatgaaaataaacgcatattaaatgatcgtaaattacgagcatcactaccaactattaattatttaattaatcataacgctaaaattgttattttaagtcatttaggtcgaattaaaaccttagcagataaacaaagtggtaaatatagtttagaaattattgttgatgaactccgtaatcgtgtatccaagaatgttaatcgtgttgtattttcacctttaaattatggagaaacggtcgtacaaatggttaatgatttagaagaaagagacattttaattttagaaaatacgcgttattgtgatattagtgatgaaggtgaatatgttgggcttgaatgagatggttcagagattttaggacagttttggggaatgctaggggatatttttattgatgatgcatatggagttgctcatcgacaattatcatcaaattatcaaacagctaaatttgctaaaaaaagtgcattaggttttttaattgttaatgaaattaaccatctagatattgctttagaagttcctaaaagtccgtatttagctttaataggtggtaaccgtgttgctgataaaattgcagcaattgaagtattatgtgaacgggctgatcaagttattattgggggaggattagtctatacatttttatatgctcaagggtataacgttggtttaaatttagtagaacgcaatatgattgatgattgcaataatatattagaaaaatacggtaaaaaaattttaatttgttttgattttttatgtaacaatgattttagtgatacaagaccgatttatcgtaaaatagatgaaggtcttgaagggttatatggtttagatattggtaaaagaagtttaaaatttattaaacatgaaatttatcgttctaaaactattttactaaatggtccctttggtgttattgaaaatattaagaattatgcacaaggtactactgaaatatgtaaatcaatggcaaaacaaacaacacgtggcgcttatacaattatatgtgatatcgatacttcgagtcatgctgaatacctaggattagataaatatattaattttatatctactggtgggggcgctagcttatcatatattgaagaaggagttcttgatggtcttgaaaccattgataatgttcctttaaatgttttaaagaaggagtaa

SEQ ID NO: 40615 - DNA, 393 bp, Ureaplasma urealyticum
atgaatgcaaaaattaaagccaaaacacgttcacaaatgatagatgaattatcaaaaatgttaaatattgaaaaaaaacaaacaaaagcatttatggatacttacgaagcttttttaattcttgaattatcacgagctaaagaagttcgtttaggaaatattggaaaattcaaggttagtgtacgtgcagaacgtaagggaattaaccctaaaacgggtgaaactgtaattattcccgagaaaacaattcctaaatttacttttactaaaggaattaaagaaattattaatgctggtatttcaattgataatgaaagagtatcgattgatgataatgattttgatgatgacgatgaatttgtagaagagtacattgtatcagaaaataattaa

SEQ ID NO: 40616 - DNA, 2157 bp, Ureaplasma urealyticum
atgaatgaattagttaaaaaaaaattagatgatttatatgattttcttaaacaaaaaaaatattcaagccaaaccatcgaattagtccataaatcatttgattttgcaaactattatcatggtgatcaaacaagaaagtcgggagaaccatatatcattcatccaattgcaactgtacgaattttagcttcatgagatatggatgaaagtacattagtagcaggtatgttacacgatgttttagaagacacaaattgtccagaagaagttatggaaaaaacttttggtaaagaagtgacgcaacttgtttgttttgtaacaaaagtatctctttattcaaaaaatcgacgtaataaagtttcacacaccaatcttgaagaaaagtattcaattcaagtgtttatgtcaatgacacaagacattcgtgctatgattattaaaattgctgatcgttatcataatatgcaaactattcaatacttacgtttagaaaaagcgaaaagaattgcaacagaaacactagaaatttacgcaaatatttctggaagattagggatgtatcgtgttaaaacagatttattagatatgtcttttaaaattttagacccacaaaattatcaattagtaaacgattcaattaataaattggttgaaaacaatcaaaaaaaatgaaatgaaattttagctcgtttaaaaaatattttaatagctaataatattaaggctgaatttgaatggcgtcttaaaggtatttactcaacatataaaaaaataactagtggttatgaagttaaagatattcatgatatctatgctatacgtgtaattttagatgatgtatatttatgttatcaaacattaggtttagtacacatgaattttacgtatattattaacacttttaaagattatatttcaacaccaaaatgaaatttataccaatctattcatacaacaatttcgtatgaaggaactttagtagaaattcaaatcagaacaacaaaaatgaatttatttgctaataatggtttagcagcacactgaaaatataaagaacaaaaagataataaaactgaaattttattaacagttaataatgttttattgcgtgattttttattgagcacagataaaggaattaaaactattaaagatgtcacaaccggaactatttttgatgtactaattcttaattctaataaatgaatcactgtttcaaatggttcaacattattagatgtagcatataaatacgatataaataattttttcaatattttagcaatttatcggaatggtgagcgttcacattttgacacgcatgtagaaactggcgatacaattaaaattagttattcaaatggaattgaaacaattagaccaaactggattacattagctaataatgatgttgttaaattacatattaacaatcatttaaaaaaatatgaactgaataaacaaattacaaaagaacaatttttagctaatgctgaattttttttagaaggcaaaattatgagtgaagagcatgctattaaaagactagaaaaagaatttcaagttaatagtatcaatacttttttagataatattgctaatactgacattgatttacaaacaaaatataaagtattttcagaaaataaacaagtttcacgtgaagcaattaatacaattaaaaatcaagcatgaaaatgattagctgattcttcatattttagtggtctagagaacttgtattttacagattttgaaatttcgccttgttgttctaaaattcctggaattaattgtgttgctaaaattgttcgcaataaagtagaaattcaccgcaatgattgttctaaagttaaaaattctcgctcaaaaacaattgtaattgaatgatcaaaagaaaaacttgagaatcgtccgcgttattttaaagttaacttaacattaaaaggcaattgaagtgaatctgttggaaatgttttatgcaacacattaatacgcatgaaagcaaatatttcaaaagttgatattagtaaaaataagactgcacgcactcatgatacttttttaaaaatttatgtaaaaaacttagatcacttacaaaagattattttagaacttcaagctaaaaatgttattaatgaatggagattgatctaa

SEQ ID NO: 40617 - DNA, 1629 bp, Ureaplasma urealyticum
atggagattgatctaatgaaacatatacaaaaaacaaaatttatttttgtaactggtggtgtttattcatcattaggtaaaggggttagtgctagtagtattggtcgaattcttgttgaattaggatatagtgttgcaatgcaaaagcttgatccatatttaaatattgatcccacttatttatcaccattacaacatggagaagtatttgttacaaaagacggtaaagaagcagatttagatttaggtacttatgaacgttttattaatgctgatttaaataaatatgcgtcagtaacttcaggaaaaatttattatgaaattttaacaaaagagcgtgaaaatggttttgacggtaaaactgttcaaactattccacatgtcacatctgcagttattgattacattaaaaaaattaaagatagtttaaaaactgattttattattgttgaaattggaggaacaattggagatattgaatcgcttccatttattgaagctattagtcaatttaaaacaatttatggtgtaaataatgtaatgtttattcactgttcaccgcttatttatattgaaaaagtaggtgaattaaaaacaaaaccaactcaacatagcgttaagacgttacgttcattaggaattaatttagatttattgttattaagaactaatcaaaaattagatgaagtaacgattaaaaaattagcatgatcttgtggattagatattgatatgatttttgctgcttatgatgttgagtcagtttatttattaccaaatgttttgtttgagcaagggattcataaaactattttagatttttttagtctacctttaaaaaatgataatattaattcatgaatagattttactgataaaattacaacctttaaaaaacataatttagttataggtttagttggaaaatatgttgaattacccgatgcttataaatcagtattagcgagtttagaattagcagcaattgaattaaatattgatttaaagattaaatatattcaaccccaaaatttaaatgaaaacaacataaatgaagaactaaaaaaaataaatggtattgttattccaagtattgcaggttcaataaaaggctgaccaggagctttattagctgcatcttatgcaagaaaaaacaatattccatttttagctgtgggaactggcgttaatattggtattggtgaattcattaataatgtactaaaacttccaattgaatttattaatttaggcaatggtgattttagttttttaaaagacgctttcgttaaaaatgaaattgaaaattatcgaattggagagtattgttctaatattcaagctaacactataacaagccaaatttatctcaaacaaaatcaattgaacgagcgccatcgtcatcattttgaatttaacaatcattatattaataattattttttaaatcaaaattgaaaaattggagcaatttcagtggataataattatattgatgttttagaatacacaaaaaatcatttttatgttttaacaatttttaatccagaatatacatcaaaaccttcaaaggcaaatccttattttattaatttattaaagatgagtttaaaaataaaagaaagttag

SEQ ID NO: 40618 - DNA, 1263 bp, Ureaplasma urealyticum
atgattaattacagtaaaccacgaggtactatagatttatataataaagaaatgaatgattttaaattacttgaaaattttttattatcaactactaaaagatatggctttcagcaaattaaaacacctgtttttgaatttgcagaactctttatgaaatcagctggtgaaagttcagatttagtttcaaaagaaatgtatttatttaaagataaatcagatcgctgactagcgttaagacctgaaggaacagcaggtgttattcgtgctgttgttgagaataaattactattaaatcatccactaccattaaaattaatgtattttgagccttgttttcgttatgaacgccctcaagctggacgtcaacgccaatttcatcaatttggtgttgaagtgttgggaacaaaaaatatttattatgattttgaattaattgctttagctgatacaattttaaaaaaattaatgatatctaattatattttagaaattaattatatctcatctcctcataatcgttcattatgagttaaaagtttgcaagaatattttcatttacatcgtactgaattaactccattaagtcaagaacgtattacaaccaatcctttgcgtattttagatgataaattagaatctcaaaaactagttgtaaaacaagctccaaaaattagtcattttttatcaaatgaagaaaaagaagaatttaatctaattaaaaaaatgcttgatgattataacattaaatattatgttaacgaaggattagtaagaggtttggattattatagtggattagtatttgaatttatttcaacttcacctaaattattaggtcaatcaacaattataggtggaggccgatatggtgaattaattaaacaaacaggtggccctaattatgaaggtattggttttggtataggaattgaacgtttattaatagctttatctgaaaccaataaaaatattttaaacactgatgatgataaatatttaattgcattttttgataaagaattagagaatgaagctataaaactaactcaaatattacgtatcaataatcaattaaatgttgacattatcttaagttcaactaaagctgacaaaatttttaagttagcacaacgtttaaatgtaaaaaagcttataatattagctaaaaaagaatgatcagataaaaaaataattttaaaagatttacttaattttaaacaagatttattaagtttagatgaaattaaaggaataaggtaa

SEQ ID NO: 40619 - DNA, 1737 bp, Ureaplasma urealyticum
atgaaagtttattgtggttatattggtgaagaacatttagaaaaaaatgttattttaaatggttgagtaaaaaaagttcgtaaaatgggtaatttagtttttgttgacctaaaagatcgatttggaattgtacaaatttttgcaacaaaaagtgatggtgtttttaatgaattaacacaactttcacgtgaggatgtaattaatgttgaaggtttagttttgttgagaaaaaaccctaataatgatttaaaaacaggtagatttgaaattcatgtcaaaaaaatacttatttattcaaaagcaaaaacaccaccattaattattgaagatgaaactgatgcaaatgaggaaattcgttttagatatcgttatttagatttacgtcgtgatgttaatttaaaaatttttgaattgcgaagtaaagtttaccaagcttttagaaattacttatattcacaagactttattgaaactgaaactcctattttagcaaaaccaacgccagaaggtgcacgagatttttatgtgccaacaagaactagaaaattttatgctttaccacaatcacctcaaacttttaaacaattattaatggttgcgggttttcaaaaatattttcaaattacaaaatgttttcgtgatgaagatttaagaagcgatcgtcaaccagaatttactcaagttgatatagaattatcatttgctgatgaaatagaaattcagacattaattgaaaatttattaaaatatgtttttaaacaaaccattaatgttgatttaacaactccttttatgcgaatgagttatgagcaagcgataaatgattatggtagtgataaaccagatttacgttttgatttgaaaattaaaacacttaacacatattttgaaaattcaaaaacattattttttcaaaaagcacttttaaataatcaaagtattcgtgcaattttagtacctaatattaatttaaataaaaaacaagtacaaactcttgaaaagtttgccaaagacaaaggtgctaaaggtttaagttgaataagtattaaagatgaaaaaattatagatggttcgttattatcaattcaagaagatcatataatttataaaacgatttttaaagactttaatttatcaactggatcaattttattagttgctgatacttttgatattgcatctcaagcattaggtttagtacgtataaatttagcatctattcttaatttaaaaaaacccaatatttttaaatttgtttgaattattgattgaccattatatgaatatgataatgaggctcaacgttttgttgctgcacaccatcctttcacaatgccaactttagaaacattaaatacttttgatgtaaataaaaaagacgctagaggtcgtagttatgatattgttttaaatggttatgaattaggtggaggatcagttcggattatagaccaacaaattcaacgccgtatgtttaaatcaattaatatgagtgatgaagaggctaatttaaaattcggttttttactaactgcattcgaatatggtgttccgccacattgtggaattgctttgggtttagatcgtttgatgatgattttagtgaatagtgaatatattcgcgatgttgttgcatttcctaagaataacaacggcgttgatatgatgttagacgcaccatctaacatgaatgatgaagatttaaaagaattaggtttaaaaataaaaaatgattaa

SEQ ID NO: 40620 - DNA, 384 bp, Ureaplasma urealyticum
atgaaaactcaatgagctaaacgtgttaaattatttcaatttatctatcattgattaattacaaaaaaaaataaaccgatagcattaaaatgtgctttagttgactttgatttagatcttaattgaataaatgttggtgaatatattttggataattatgaacaattaacaaaaatgattaaacctcttattagtaaagattgaacatttgaacgtttatcatatgttgagcaagctttattgctaagcgcatatggtgaatatctggttttaaaaactcctaagaaaattattattgatcaaactttaattacaacacataattattctaacaacgaatcatataagtttattaatgcaattttagatcaattattaaattaa

SEQ ID NO: 40621 - DNA, 705 bp, Ureaplasma urealyticum
atgcaacgttactttgtttctaaaattaaagacaaaaaagtttatttttatgattctgatgttcatcatatcaagaatgttatgcgtatgagattacatgataaagttattgttattaataaaacaaaagcatttgttgctgagattattaatcttgaaccattacatgcaacaattattaaaccatatactcttaattgtgaattagctactaaaattgatttatttcaagcaagcattaaaccaaataattttgagtgaattgttcaaaaagcatgtgaattaggtgttaatagtatttatcaaacaatttttaaaagaacttataatcattcactaattaaaacgaatcgtattttaacaattattaaagaagcgtgcgaacaagcacgacgtaatcatcttgttaattattacgctcaatttagttttaatgaattattaaaatatttaagagattatgatctaattttaatagcatatgaaaatgaaaaacaaaatcttttaaataatgcttttaaagaagaattgacctatcaaaaaattgctttagtgattggaccagaaggtggttttgaacaaatggaaattaatttattaaaacaattcgataatgctatttgtattagtttgacaaaaactattttaagatcagaaactgcaagtctttatttacttgcaaatcttgttaataagcttatttag

SEQ ID NO: 40622 - DNA, 912 bp, Ureaplasma urealyticum
atggataaatataatttaattataggtagtcatgtaagtttaaaagctaaagatttcttttatggtagtgtaaaagaagcattatcttatggttctaacacgtttatggtttatactggagctccacaaaatacaaaacgtcaaccgattaaatcatttaaaattgaagaagcacataatttgttaaaaaaacataatattaatttggatgatttaattgttcacgctccatatattatcaacccttgttcttctaaaaagaatgttcgtgaacttgctaaagaatttttaattcaggaaatccaacgaacagaatctatggggatcactaaacttgttttacatccaggatcacgtttagaacaaaatgaagatatagctttagaacaagtttatacaatgttaaatgatattttttcaactattaatactaatgtaattgtttgcttagagaccatggctggtaaaggttctgaaattggggtaaatataaaacaattaaaaaccattatagacaatgttcattctaaaaaaaatattggcgtttgtttagatacttgccatatgaatgatagcggtttgattttagattattataattttaatcaatatttaaaagaatttgatgcacaaattggtattaattatattaaagtattacatattaacgattctaaaaacccttgtggtgcaaacaaagaccgccacgaaaatttaggatatggaacgataggttttgcaaatttaattaatattatttaccatcccttattaaataacatccctaaaattttagaaacgccttggtttaatgttaatgatgaattaattcctttatataagcatgaaataaaaatgattcgcgactgcaagtggtatgacattaaaaacaaattattatcgaagaaataa

SEQ ID NO: 40623 - DNA, 1146 bp, Ureaplasma urealyticum
atggatatagtaattaagaaaaattgtaattttgttaaaaatgatgaccatttatattctttttatacaccactaattggtatgcaagcagtagctttatattcttgattcgttaatagagaaaatatttttaataaaaagggtacaattaatttaactcatgaatatttattagatgaacttaatatttcaattaatacatacaacgaattaattactaaattaattaatgttgatttaattaaaatttattcttttgaaaataattcccaacaagtaattgaagtttttcgaccattaaaatttagcgaatttataaatattgaaaaatttaatgaagaattaaaaaataatgtttcattaaatcattataatgttttaaatttattaaataaagagaataatattgatactaatcgtttaattgatttatcagctcaatttaagacaaatcattttaacaatctcgaaaataaattagataaaattaaaaaaataattttaaaagaatatggattatcacttcaaattgatgaatcaacaaagttgtgcttaataaattttttcaaaaaatataaatttagtattgatcaaatgttaaatttaatcaaaaataatttaattaataatattgattttttaacaattgatttaaataaattagaattaacaattttttcaaatatggaattcgaaaaaaataaaacaaaatttcaatattacaatattgaacgtgattttaatatttttaataaaaacagtaatttagatcgattcaaaaatgtaattaatgattataataattttaaaccttcagattttttaaaacatattcgtaaagaaaaattaagtttaaaagataaagaggctatcaatttattaacgtatgacaaatcattaagtgatccaattgttaatgttatcttagattttgttttatttaaaaatttagggcgtttaaatgtaaaatatttaaaacgtattaaagaaacagtactgggaatcaatattaaagatgagtatgaaatgattaaattttttcaaaataaaaagaatgatcataaagaattaatttgtgaagatagtgataatgctaatactttcaaaaatactaattttattgaagtaaaatttggagatttataa

SEQ ID NO: 40624 - DNA, 561 bp, Ureaplasma urealyticum
atgtttgaacaagtattttttttagcatccattaacgacaaaaagattattagatgattatatgaacgttatcataaaatttttttaaaatatattaatgagcaattgaattttaaattttatactttagagattgaagcaaatgatttaaaaactattatttatgaaatatttttaaaaatatttcaagtaactagaattaaaagtttaaatcaatttataggatttgttaaacggcaaatttatttttatttagtatatttattacgtaaatctttatctaataaaaatttagttaatcatttaaataataataattttgaaaattatgaattaattagtaccaattcagatgaagttggtgctgaattaaacaacagatttttaatttatgaatttttaagaagtattcagaaagaaaatttatttttatatcattttactattttaattattaaaggatataatacaaaggaaattagtgaaattttaaaaattaattctgcaaaaatttattattataaagcacttttaaaaaaatatataaaaaaattattataa

SEQ ID NO: 40625 - DNA, 255 bp, Ureaplasma urealyticum
atggcaaatattgtttcaaatgaaaaaacatacagacatacgcaaaaagtacgtaaggaaaatcatgctaaaatgtctaaattaagaacaattgttaaaaaaacaagaagttcaaatgaacaagctcaacttaatgaagcttacaaagtcattgatacaacagcttcaaaaggtgttattcacaaaaataaagcaaatcgtttaaaatcaagaacagcaaaagcttttaaaacaaacttagaagtcacagcataa

SEQ ID NO: 40626 - DNA, 1377 bp, Ureaplasma urealyticum
atgtctaactcatttaaatcaaaagaatttattgaatactttaaagatacagcaaaacaaaatgaaattgaatttgaagttttatcttcaattattaaagaagcatttgaaaaagcttatttacgaacacatcctggtgaaaattttgaaacaaatattgatcttaaacaaggaacaattaattgttttcgaaatttagtggtcgttgagaatgaaaaagtacataatgaagatttagaaacatgtttggatgatgctgttgaaattttattagatgatgctcgtaaaatcaatgcaaatgctcaaattggcgatcttattaaacaacatatttcaattgataattttaaaagtattgaagtaggtcaaattggaagtttattgcgtcaaaaaattactgaaattcataataaaagagtagctgatttttgaaaaccatctttaatgaaaatgattcgtgcaaaagttgcagaagttaattataacaaacaacgtaatgaaattactggagtaaaagttgaactagatgaccaatgaaaaacattaggttatttaagtcgtaaagatcgtattggtgatgaaaagtttaaggttggtgaaacttatgattttcttattaaagaagttaaagaacaaagccgtttatggccaattttactatctagaacagagccagaattagttgaagaaattttaaaacgcgaagttgttgatattaaaaatggaaatattgaaatcaaaaaaattgctcgaatagctggttttaaaactaaggtagctgtaagcactaatttattaaatattgaaccagttgctgttgttgtcggaaataaaggtttaactataacgtcaatttctaaacaattaaataatgaacgtattgatattattcgttatgctgatgacaaacgtatttttattgctaatgccattggtttagataaattaaaaggacttttagttcaagaaaatgaaagtggtcaacgttctgcaattgctattgtaagcaaggatgatttaccaagtgttatcggtcgtggtggagcaaatattcgtttaattgctaaaattactgaatgaaatattgatgtaaaaacaattgagcaagcattcgaagaaaatattttatacgaaaaatttgatgaaaaaatttatcgttcatgaaatattgaatcaattaataaaaaaaatgtcacaaatgatgaaatgttagctttaattgatagtatagaagatgataaaattgaacaagatgtccaattaaatcacccattaaaacaacaagaaaaaaaagttgtttcttcaaatgatgaagatggtgaaaatgatgaaacacaattagaatatcttgaaggattcgaagattttaaattctaa

SEQ ID NO: 40627 - DNA, 1845 bp, Ureaplasma urealyticum
atggcgaaaaaaaatatcaaacaaaagaaagataatcggatagcaatcgatgtaaaaaaacacattaaaaaagttgatgttggggtttttgatggtacatttgttttcacatcacctcttagtatttcagaattagcaccaaaactaaataaaagtccaaacgaaattattatgcgttatttcaaaaaaggtgttgtttataacttaaacactattttagatgaagaacaaattggtgagttatgtttagaatatgatttagattttaaaattgaaaagaatgttaacactgaaaatcttttagaaaatatttattttgatgatctagaaattgatttggttgctcgtgctccaattgtaacaattatgggtcatgttgatcatggtaaaacaacacttttagatactattcgtaaatcatcaataacagcatcagaagctggaggaattactcaacatattggagcttatcaaattataaaagacaatagagcaattacttttattgatacacccggacatgaagcctttactgaaatgcgtgctcgcggagcaaatttaacagatattgtgattttagttgttgctgctgatgatggtattaaaatgcaaactgaagaagcaattgatcatgctaaagctgctaatgttcctattattgtttttgttaataaaatggataaatacgaagcaaatcctgaaaaagttttaaatcaattaagtgctaaagaaattgttgctgaagagcttggtggtgatgttgtttttgttaaaggctcagcattgaaaaatgaaggaatttctgaattattagattcaattttattgattgctgaattaaataattacaaagctaatcctaatcgtttagcttatggaactacaattgaagcaaatttggataaaggtcatggtcctcttgctacattgttagttcaaaatggcacattacgaaaaggtgattatttagttgttggttcaacatatggaaaaattcgtaatatgtttgatgaatatgacaacgaaattgaaatagcattaccttcaaaacctgttaaagtttctggatttgaagaagtaccaacagccggtgataaatttttagctttagctgatgaaaaacaagcacgtgcaatagcaaatgatgttaaacaaaagaaaatgcgtttagaacgtgcaatgttacaaagttcggatattcgaacaaaaattgctaatggtgaattaaaaaatattaatttaattattaaagctgatgttcaaggttcacttgaagctttaaaaggaatttttagtagcattaacattgaaggtgtgactacgacactaatacggagtgcaattggaacaattagtgaaagtgatgtgcgtttagcacagacttctgatgcaataattattggttttaatgtccgtgctagtcgaattattaaagatttagctgattcagtcggtgtacaaattatgaattatgacattatttataaatttaaagaagatttagaattatgaatgaaaggtacattagacccaattattattgaagaagtgattggcgaagccaaagttcttaaattatttaaacacagtcaagttggaacaatttgtggttgtcgagtaattaatggtaaaattaaaagaaatgctttggttcgtgttttacgtgatggtattgttatatataattcaaaaattgcgacattacaacacaataaagatagtgttaatgaagttattgctgataaagaatgcggattaacaattgcaaactttaatgatattaaagagaacgatattattgaagtttatattaaagttgaaaagaaacatgatgaggttaaataa

SEQ ID NO: 40628 - DNA, 774 bp, Ureaplasma urealyticum
atgttaaaaattattacatctaataaaaatgaagaaattattcatttttatcgtttaattcatgataaaaaatatcgcgaagctaataaattattcataattgagggttttaaattattagatgaagctttgcaaaatcaacaaacaatagtttcaattattattaatgaacatgtttataataaagaatttgaaacgatttttaaatatacattatatgacaatattcaaatttataaagttagtggaaatattattaaaaaactatcagttaatatcgaaccaagtccaattttagcagttgttaaaataaaacaagaaatgtgtgatattaacgataatattttattgttagataatattcaagatccaggtaatttaggaaccattttaagaacctgctttgctttcaatattaaacaagttatttttaataattgtgttgatttatataatcctaaaacaattaaagcaagtatgggggccatttttaaaattaattttttacgttttaatgattctaaactagcattaaattttttattaaaaaataaattctatttaattgctactattttagataaaaacgcaatttctttaaacgaaataacgattaaacaaaaatattgtttaatggtaggtaatgaaggtcatggtttggtacaaacttttattgatcatgctcacattaaaacaatgattaaaatgaatcaaacagaatcattaaatgttgcagtagcagcagcaatttttttatatgaacttaataaataa

SEQ ID NO: 40629 - DNA, 984 bp, Ureaplasma urealyticum
atgaattcaagatttaaatttaactatgatataaataataaattagcattatcctttacaaaggatttaattgctaataaaaagcaaaaaaataaaaaaaaatttttgctttttttatttcccttttatcctttaaaactttttaaaacgattaatttaatcgtggtttttgctgttttagttgcaattcgtttaggaatgggatttttacatattaaaattcctggttttaatatggttatttcttttacatgaatggcattaatggttttagggtggtattttggaccattaattggaatatttgctggatttttagttgatactttagcatgattaattagtggtggaatttggttttgaatgtatgctattcaagaacctattgtaggctttattgctggatttctaggatctgtagctacattaagaaaaaaaactaaacgaccaataattgatctaatagttaatcaaatctttattttattttttagtatattaacattgtttatgattttgaccttagttaatgatggtaaaaactccttatttagcattcttaaaaaacgtgataaagaaattaatgaagattgaattagtatttttaaatatttagcaatcgcttttttagctacatttgttttgcttgttgaagcttttgttatcatttattatttacgtaatagaaatcgttcaaaagtacagttaattaattttatttattgctcattattagtaattttttcaacaatgttattttcgtttgcactaggaccttacgtaagtgtagcgtatttaaaatatataaaagtcccaattacgaattatttaaaatacggagttaattactatttattaccacgcattattaaagaaagcattaaaacaccaatttatatcattttattatcttcaataattagtgcatttgattatgtctttctaaatattaagcaaattaatatgcacaaatgaaaacattaa

SEQ ID NO: 40630 - DNA, 1812 bp, Ureaplasma urealyticum
atggcaaaagaaattattttaggaattgatttgggtacaacaaattcatgtgtagccgtaattgaaaataaaaaaccaattgttttagagaatccagaaggaaaacgaacagttccatctgtagtttcatttaacggcgatgaagttttagtaggtgatgctgcaaaacgtaaacaaataactaatccaaatactatttcatcaatcaaacgtttaatgggtacaaaagaaaaagtaactgttttaaataaagattatactccagaagagatttcagcaaaaattttaacttatattaaagagtatgcagaaaagaaaattggagcaaaagttaataaggctgtaattacagttccagcatattttgatgatgcacaacgtcaagctacaaaaaatgcaggaattattgcaggattgagcgttgaaagaattattaatgaaccaacagctgcagctttagcttatggaattgataaattagataaagaacaaaaaatattggtatttgatttaggtggtggtacatttgatgtatcagttttagatatggcagatggtacatttgaagtattatcaacaagtggtgataaccatttaggtggtgatgattgagatcaagttattattaattgattattaaaatctattgctgatgaattcaatattgatttaagtaaaaacaaaatggctatgcaacgtttaaaagatgctgctgaaaaagctaaaattgaattatcaggtataaacacaacaactatttcattaccttttattgcaatggatagttctggtcagccaattaattttgaaaaagaattaaatcgagcgacatttgataatctaactaaaaatttaattgaaagattaaaaaaacctgttttagatgcaatgaaagaatctaaattatcattggttgatattgatcaagttttgatggtaggtggttcaacacgtatgcctgcagtacaaaatttagtgaaagaattaacaggtaaagaaccaaaccattcactaaatcctgatgaagttgttgcaattggtgcagctattcaaggtggagtattagcaggagaaattgatgatattctattacttgatgtaacaccacttactttatcaattgaaacaatgggaggtgtagcaactcctttaattccaagaaacacaaagattccagtaagtaaatcacaaattttttcaacagctgctgataatcaaccaagtgttgatataagaattgtgcaaggtgaacgttcattagctgctgataataaattattaggtaattttgaattaagcggaattgaaccagctccacgtggtgttccacaaattgaaattaagtttaatattgatgctaatgggatcatgagtgttaacgctaaagatttaaaaacacaaaaagaaacatcaatcacaattaaagattcacaaggattaagtcaagatgaaattgacaaaatgattaaggaagctgaggaaaacaaagaaaaagatgctaaagtaaaacatgaacgtgaacttgtaaatcgtgctgatagtctaattaaccaattagaacaagtgtcaaaaactgaaaatgttccacaagaacaaaaagatgtatttaacaaacaaattgaagatttaacaaacgcacgcgatgctcaagattatgtaaaactagaagctgaagttaaaaaagttgaagatttattaactaatgctgctaaatttgctcaacaagctcaacagcaaaatccagataatcaaaacaataataaagatgatgttactgaagcaactgtaactgatgattcaacaaagaaataa

SEQ ID NO: 40631 - DNA, 675 bp, Ureaplasma urealyticum
atgaaaaaatatatcagtatcgctattgatggaccttcaggttctggaaaaagtacagcagcaaaagaattagccaagaaattgggatttttatatattaacactggtttaatgtatcgtgcttatgcttattttttatctattaataaattagatattaatgttaacgaaatggattgtattaatgccattaaaaatgctaattttatttttaatggtgataatgtgaaaattaatgacaacgatgttagtcttatcttaagaagtaatgatgtggcaatgattgctagtgttgtatctgctaatgaaaaaattcgagatttagcaactaatgaacaacgcagaattgctagtgaaaacaacgttgttatggatgggcgcgatattggaagtattgttttaactaatgctgatcttaaattttatttaaatacgagcattcaaacacgcgctaaacgacgtttgtttcagaataaagatattgaaaatttggattatgaatcaatatataacgatattaaagaacgtgatcatcgtgatatgactcgcaaaattgctccacttaaaaaagcaaacgatgctgttgaaatttttaacgataacatgaaattagatgaatgtgtacaacatttgtatgaaatttatttaaaaaaaataaaaaagctaaatttttaa

SEQ ID NO: 40632 - DNA, 2376 bp, Ureaplasma urealyticum
atgaaaaaacctatcttaatatcacgagcaattgttgttttaccttatgaaacaacaacaattgaagtaggacgccctaaatcaatccaagcgattgatttagctaaacaatcttcaagtaaagaaattattattatttcacaaaaagatattgatactgatgaagttgttaattttgatgaattgtataaagtaggaacgttagttaaaattaaatctattattgataattttgatgaaggttattcaattgaagttgaaggattaaaagctgtttacattaataatgagaatgatgttattgatgctattgaatatgaatatgaagatgtcattacaaaccctattttatcaaataaagatgaaatagcaatcaatggtattaattctgaaattttcaatataattaacaagcgttcaagacataaaaatatcaattttgataatatgcacgctttaatttcacttgaaaaagaaaagtttgcttatttagctgcggcaacttatattaatgattatgataatgaaattagtgaaaaaactattgaagatcgaattaatatcttattgcaacctaatttattattagttcatgagacaattttacatttattatttgatcaattagtagataagcgcgttattgaagatgaagttgaaaaaactattactgataaaattaataataattttcaaaaacaacaacgtgagttctatttacgcgaaaaattaaaagttgttaaagaacaattaggtgaactaagtagtcgtgaagaagacgctgataaaattcgtgcaaaaattgaagatttagaattaccaccaaatgttaaagaacgtgctttagctgaattaaatcgttttgagaatgctatgtcatcaaatgaatcatcagttattaaatcatatcttgattgattattggatttaccatgaactcaacagggtgttgataatactgatttgatgtctgtaagaactcatttagatgataatcactatggtattgaaaaggtaaaagaaagaattttagagtatttagcattacgtatgcgtaaccctaatcttaaaggtccaatcatttgtttagttggccctccaggtgttggtaaaacatcacttgttacttcgattgcacaagctttaaataaaaaatttgttaaagttagtttaggtggtgtgcgagatgaatctgaaattcgaggtcatcgtaaaacttatgttggagctatgcccggacgtattattaagggtatgaaaaaggctggcgttatcaatcctttattcctattagatgaaattgataaaatgacatctgatcaacgaggagatcctgctgccgcaatgcttgaagtattagatcctgaacaaaataaaaatttttcagataattacattgaagaagaatatgatttgagcaaagtgatgtttatggcaacagctaattattatcaacaaattccttatgctttgattgatcgtttagaagtaattgaactatcgagttatacagcaattgaaaaacgtgaaatagcaaaatcacatctattaaaaagaatttttatggatgctaaattaaatgaaaatgaacttatttttactgatgatgctttagattttattattaatcattatactaaagaagctggagtacgagaattagatcgtcaattaggtcatattgtacgcaagtacattgttgaaacttataagaataaaaataatcaatcacctttgaatttaaaagttgatgaagccatgattattaaatatttaggtaaaattaagtttgattttaataaaaaagaagagacaacaattccaggaattgttaatggaatggcttatacagcggctggtggcgatttattgcctattgaagttaatcattcaaccaatggaaaaggtggaaatgtaactattactggaaatcttgaaaaaacaatgaatgaatctgtatctgttgctttaggttttgttaaagcaaatgcagataaatatggcattgatactaaaaaagtttcttttaaagaaattgatattcatgttcatgttccaagcggaggaattcctaaagatggaccgtctgctggaattgcgattacaacagcaattattagttcattaagtcaaagaccagtgcgtacaacactatcaatgacaggagaaattatgctacgtggtaatgttggaattattggtggtgttaaagaaaaagttatttcagcatatcgtgctggagttcgtgaaattattttaccaattgatgacgaacgttacttagaagatgttccaaagtatatattagatgatattaaaattcatttggtaaaacactatgatgaagtttataatattgtttttggagaaaaataa

SEQ ID NO: 40633 - DNA, 1347 bp, Ureaplasma urealyticum
atgtcaacaaaacaaaatgaaccattatttgtaaatctagaggatttaaaacaaaaagttaaattatcatttactgaagaattctcattttcgtatgcactttctgaacttgaagcaggaatttttgaaagtcgtaatttaaaaggtgcagatgctggtgatcctgaagaaattttattaaatgtggttttagatgttagtaagaaaaaacgttctcgaaatgaaattaaatttaataaacttcaaaattattttattcatatgaatttacgtgaagaacactttagtgaaattattgatgttctagaagctattggaattcgtgtgcctgattatgatttggtgatgcaatcaaaatcaaagacaaacaccaaaaaaaaggatgaatatggtattgatgatactttagaaattagcacatcaaaaattggtttttcatcaacaacaaccgaaaaagttgatgatggtattaaagcttatttaggagtacttggagaatcaaaaatgttacgctctgatgaggaaactgaatatgctaaaatggttattagtgacgatccatctctagttaaaattggtaaaaatcaactttatacatcaaatatgcgtttagttacttctattgctaaaaaatatttaaatcgtggattagacttagaagatttaattcaagaagggtcatccggtttattaaaagcaattgataaatttgatcatgaaaaaggacataaatttagtacatatgcaacatgatgaattcgccaatcaattacgcgcgcaattgctgatcaagctcgacaaattcgaattcctgttcatatggttgaaacaattaacaaattaactaaagccgagcgaaatttaattcaagaattaggaagggatccaacggctgaagaaattgcgcaagctatgaacaaagtttcacaagcaaaaaatcaaaaagaacagttaatcactgcacaaaaagttgttgagattaaaaaattaaatgttgacccagtttcattagataaacaaattggtcatgatgaagaatcacaattttcagatttcatttctgatgatgaaattatttctccagaaaaatatactgaaaaaaaagcattaaatgatcagattaatgaaatgtttgaaaaagttttaaacgataatgaacaacgtgttattaaaatgcggtatggtttattacccttcgaacgtccttatacacttgaagaagttggtgaatatttaggagttacacgcgaacgtgcacgtcaaattgaatcaaaagcaattcgtaaattaaaacatccatcaaaaaccgcaaaactacgttcatttattggtgaatccgaaaactag

SEQ ID NO: 40634 - DNA, 684 bp, Ureaplasma urealyticum
atgagtgctattagtaaaaatattattatcattaacaaaccaataaaatgaacttctaatgatgttgttcaaaaggttaaacgggttattggtgctaaaaaagttggacatgctggaactttagatcctaatgcttcaggtgttttagtattgggaattaatgaaggaacaaaactattaacaaaattaatactagataataaatcatatattgctgaaattaaatttggaacatcaacaaatacttatgatgcagcaggtgaaattgtttcatctacaaaccgaatggttacattaactgaggttactaaaatagttaaagatttttataaaaatgattattgacaaaaacccccacaatttagcgctttaaaaatcaacgggcaaaaagcttatgttttagcacgtcaaaaagttgattttgaaatagcaccacgattagttaaaatatttaaatatcaaattatggatttcaattatgaaaaacaaattttaaaaatttctttacatgtttctaaaggtttttatgttcgttcttttgctgttgatttagctactaaaattaataatctagctcatttattgacattaataaggacgcaaagtggaccttttgagattaaagatgcaattgaaattgaacaagtctatgattattgaaataacatcaacaaatatttataa

SEQ ID NO: 40635 - DNA, 852 bp, Ureaplasma urealyticum
atgattattgaaataacatcaacaaatatttataaaattaagcaacaattcgtcattaatgaattaattattggtttttttgatggaattcatttaggtcatatgaatttattatcagatcctaataaccaaactattttaacttttaaaaatatcccacgtaaaataaaaaaattatatgattttaatgagcgaattcaacaattagaagatttaggatttaaaaggatttttatttatgatattgatcaaaacaatttaagtggggaagaatttattgatcaaattttaaagccactaactccaaaaaaaattattgttggtgctaattttacttatggcaataatttttgtaatgcatctagtctaaaacaatattttaatgttgaaattaaaattattactaatgatgttagtacaactaaaattaaagaattaattataaataaacaggttgaaatagctaataaattattaattaaaccatattatcgtgtgggaaatgttgtacgtggcgatcaaatagctcgtaatattggttttaatactgctaatattttatgtgataataatttaattgatattgctgaaggtgtttacaaagcacaagtaatttttaataataaaaagtatgatagtgtagtttatttaggaatccctaaaacaattaatactcgctctttttcaatgattgaagcacatattttagactttaatcaaaatatttatgacgaaagaattaagattgtttttttgaaatatttagctcctaatttaaaatttaataatatagatgaattaatcactgcaattaaaaattatattaaattggttcttgataaaacaaattag

SEQ ID NO: 40636 - DNA, 1104 bp, Ureaplasma urealyticum
atgaaaaatccatcacgatttatatttataataaaaaataatattttaaataccattaacaatgcatcatttattgaaaatggaaatttcaagaaaaaatttcgggtttatgcacgcaagcaacatttagcagcttgagttattagtattgttacaattctttttttatcgttattagttatgtttattaaaattaataaccaaggtcaattattaaataatcggactcctttagatttgtttaaagtaaattatgaaacaatcttacaaatttgaattacaggagcatcattaggagcatcagcttatatgttccaacggattactaaaaatcgattagttgatacatcaactcttgggataggtaatgtttgtttgattgggttattttttttagcaatatcaattaattttgaaaattatggttctcaaaaactttttgaaaatttattaccttttatttttataatatcaggagtatgtgccggattaattttgtattgattttcaaaaaaacgaaccggttttagccatacaaagttaattgtctctggtgtattcattaattttattgctattgctttatcaattagcttaaaagacaatttaactctagttgcatcaaattatattgacgatcgtttgttaggtaatttttcaaaccgtaatagtactgaaaaatatttaagttatgctgtttttttatttttaatgatatgatgctttttgcgttctgctaaatttaaagttgttattacagatacaatgattgctgaacaattaggattaaaagtaaaattattgaatttagaaatgatttttatctcatcttgtttaacagctgtttcatatattatgggaggaaatgtattatttttaggaattgctgcagcaaatttagggtatgcggtttttggtaatcgctttagttcatcaataattttttcaagcttcatcaccattatctttttaatttttggtcaatttattttagataatatcgttcaaaatttaactagtttggtatttgacgcccctattgtaactcctttattagtagctccaatatttacatttattatcttatttaaaaataatatttaa

SEQ ID NO: 40637 - DNA, 1428 bp, Ureaplasma urealyticum
ttgaactataaaacattaattaatggagcatttgttgatgctaaagaaaaactaccagtttataatccatctaataatcaaattattgcttatgttcctaacattcataatgaaaatgaaattaatactatttttgaaaatgctcatatagcatatctaaaatttaaggacacaccaattaaatatcgttgtgatctacttttaaaattagccgataaactagatgaacataaacaagaattagcacaaattattagtactgaaattgcaaaaggattaaaagatagcctaattgaagttgaacgaagtgctgattatttacgcgaaacagtttttgagtatcaaaaattaatgcaaaaaccaattatttttgatgaaacagttcaccatgttaaaaacaaagtggcaacatattatcgtattccagttggtgttgttttagcaatttgtccttttaattatcctattaacttattgatttcaaaattagcaccagcattagtttctggtaatagtttagtttataaaccatcaacacaaggttcattaattggtattcgaattagtgaattagttcatgaagtaggttttccaaaaggagttgttaactgcttaacaactgaagcacgtataacaggtgatctactagttactaataaatatgttaaagcgattagctttacgggcggacctaaagtaggcaatcatattgctgaaataacatcaaagatttctttagttttagaattaggaggaaaagatccagcccttgttttagatgatgcggattttgaactagctgctaatgaaatagttaaaggtgcttatggctttagcgggcaaagatgtactgcaatcaaacgagtatttgtttcgcataaaaatcatgatttattagttaatttaattaacaaaaaagttgacgctttaacagtcggtttaccacaacaaaatcccataattactccattaattaattctaattcattaaaatataacttatcattagttgaggatgcaatcaaaaaaggagcaatagtacaccaaaaaatcgtttataatgaaaaaaataaccttttgcatcctttagtaattgataatgttacaaaagaaatgcgcgtagcttgagaagaaccattcggtcctattttaccaattataacttataatagtatacaagaagctattgatttaattaatcaatcacaatatggtttacaagcttgtatttttacaacaaattatgcaagtattgaacaattagctttacaaattgaatcaggaacaattaacattaataaatcaagttcacgtggtccagatattttacctttttttggtgttaaagattctggatttggtgttcaaggtattgttgatgcaattttatcaatgacaacaatcaaaggaataatcattaataaataa

SEQ ID NO: 40638 - DNA, 657 bp, Ureaplasma urealyticum
atggccaaattgaattttaaaaaaaacatctcatcatcacctttttttagaaacattcctaatattatcactatctttagaatttttttagcacttatttgcatcatcttattattagttgatttttacacaaaaaatttaaatattgtctatgaagttttagatgccaatattagtgcattgcgtttaagtgcaacaattatttttattattgctgctttttctgatttcttagatggatatatagctcgtaaatataatttagtttcaaatttagggaaaatcttagatcctatttctgataaaatccttgttaatggtgttttaatttgtttaacactagatcatacagcactagcttatttaacaattattaatatcttacgagatatttttattgatggtttacgaatgtttgcttcaagtaagaaaattattattccagcaaatatttttggcaaaattaaatccattctactatttattagtatttgctttattttatttttactaagcttaacctcatcatgaaaaaacgtttatttatttaatattcctttattttttgcaacatcattatctgtaatcagtggtattatttactacattaatttttacaaaggagttaaaaaacgtggatcaattacaaaaagctaa

SEQ ID NO: 40639 - DNA, 1365 bp, Ureaplasma urealyticum
atgcaattaaaaattaaagaaatttttaatcaagactatgtaaaacttgaaggccaaaagatacaaattaaagcttgagttcgttcaaaccgtgattcaaaaaaaattggttttttagttctaaatgatggtagttctttaacaaatttacaagctgtatatcgtgttgataaaattgacaattatgaagaaatagctgcagcacgaatgtgagccgctgttgttattgaaggtgtaattaaattaactccaacagctaaacaaccattagaactagaagtattaaatgctcaaattttaaaacaaagtgatgaagattttttattatcaaacaatgatttaaatttagaaacattgcgtttaaatgctcatttaagaccaagaacaaatttatttcatgccattatgaaagtgagggcaacacttgcttttgcagttcatgaatttatgaatcaaaacgaatatagttgattagctgcaccattgtttacaggaaatgatgctgaaggagctggcgaaacttttagtattcaaaaatttgataatgaagaattttttggtaaacaaactcatttatctgtaacaggtcaattacaagctgaagcatacgcacaagcttttggtaatgtttatacatttggtcctacttttagagctgaaaaatctcacacaaatcgtcatttagcagaattttgaatgattgaacctgaaatggcttttgttgatttaaaaggtatgcaagatattgttgaagatttagttaaacatgttattaaggctgttttagaaaaaaatcaacaagaattagaatttttagctcaaagaaatgatgaaaatttaattaaaaaactacaaaaagttgttgagtctaaatttgaacgtattgaatataaagatgcagttaaaatcctagctgatgctgttaaaaatggtcatcaattcgaaaataatgaaatcttttttggaatggatttaggatcagagcacgaaagatacatgtgtgaaacatatcatcaaggtcctgtgttcttacaaaattatccaaaggatattaaagcattttatatgaaattaaacgatgatcaacaaactgtagcttcaacagatttattaattccaggcgttggcgaattagtgggtggatcacaacgtgaagatagttatgagaaactattaaaacgatgtcaagaattaaaaatgccaattgaaagtttacaatgatatttagatttacgtcgtttcggatattatatgtcatcaggttttggaattggttttgagcgtttagtgatgtatgtaacaggagttaataatattaaagatacaatcccattcccacgaagtcatggccaaattgaattttaa

SEQ ID NO: 40640 - DNA, 2721 bp, Ureaplasma urealyticum
atgctgaaattaagtacgaatgagattagaaaaaagtgaattgaattttttgagtcaaaggatcatttatttattgaaccaaagtcattaattcccaaaaacgaccctacactattatgaattaattctggtgtttcaaccttaaaagattattttagtggtaaggttaaaccaccacataaacgtttagttaattctcaaaaagctattcgtacaaatgatatttttaatgttggattaacgagccgtcaccatactttttttgaaatgttagggaatttttcaattggtgattattttaaaaaagaagctattgattgagcttatgaatttttaattaacgttttaaaaattgatgtaaaaaaactatgagtaactgtttttgaagatgatcaatttacgaatgatgaatgaattaaattaggaattattaaagagcaaattattaaatgcaatcgtgatcgtaatttttgagatgtaggtaatggcccttgcggcccatgtactgaaattcattatgatcgtggtgaacgttttgacccaaataaaataggatcaaaattaattttagaagatattgaaaatgatcgttatgttgaaatttgaaatattgttttctcacaatttaataatgatggccataacaattacactgaattattacaaaaaaatatcgatacaggagctggcttggaaagaattgcttgtatttcacaagatgtaccaactaactttgatagcgatgtttttatgcgaattacaaaaagtgttgaacagttttcagaatataaatatgacatgaatgaatactttcatcccaatgttactcaaaataaaattaatttcgcttataaagtaattgcagatcatatgcgtgcaactgtttttgcgattgcagatggtgcaattccttcaaataaagaacgaggttacattttacgtcgtttaattcgtcgaactatggttttagtgcgtcgtttaaatattaacaatcttttatgagttgatgcagttgttgacgctatcgcttcaacaatgggtgatttttatacttatttaaaagatgaaaaaacacttactaaaattaaaatgattttaaataaagaagtgcaattatttgaaaaaactttacaattaggtttaaatatttttgaaaattctattcgtaatcaagaattagataaagaaattacttttaaactagttgatacatatggttttccaattgaattaattaaagaaatttgtgaacaacgtaatgttaaagttgatttagaagcttttgatgctatgtttaaacatcaccaattaatttcaaaagcaaacaaagctaatttaaaagtaatggaatcacaaaacgaatcactaatgcaattagatgttgattcaacctttcactatgaaatatttagatgagaaaatgctaaaatcattactttatttaatgaggattttgaattggttgatggtttagatcatgaagatggttatgttgtttttgataacacatgtttttatgcaacatcaggtggtcaacaacatgacacaggttatattattaaaaatgatcaacaattttttgttgatgatgtttttaaggcacctaatcgtcaacacgttcatcatgttaaaaatgctagtttatcaatgaatgagcatgttattttacaaatcaacgagcaagatcgtaaatcaattacagcaaaccatacagccgaacacttattacactattgcttaaaacatgttttaagtcctgatattaaacaagaaggagctgctaaatatccacataaagtaacatttgattttacttatcatgctcaaccaacaaaagcacaattagataagttagaaaatgtattaaatgaaatggtacaaagtaattttgatgtacaagaattacacatggatttagatgaagctaaagctgttggtgctgctgcttattttgaagatgtttataaaaaattaaaaggcaaattacgtgtaattaaaatgggaccttcaattgagttatgtgggggtacacacgcacatcatacatcagaaatcgagcgaattaaaattgttgaatgtgcttctaaaggggctggctcttgaagaattactatggtaacaggtcatgataatttagcaaaatacattcatgatttatatgtagactacttaaatgaaatcaatcacttaaaagttaatttagatattaatgatcataaattaaatgatttatataatgcttttgcaaattgaaaaaatctatcaattgatgattatgatttattaaatgaaaaatttgctgaactaaaacaatcattaattaattttaaaatcgaatttgataaacaaaatgccaaacaagctattattgatattaaaaacacttttaatacacaactaactaataaacgtgtacacgtttttaaaaacactgataataaaaatatcttcaatgctttaaatgaattaattaacgaaaatcaagatacattatttattagtttcaacttagatgataataaaattcaatatttattagcaattaatgaaaagtttgctactacaaaccaaattaatttaaataaatatattaaagaattaaatactatttctaatggtaaaggtgggggcaagccatattttgttcaaggtggaacaagtgaacaagaaaaattagatgagttattaactgttgtagataaatgagttattaatgcgtaa

SEQ ID NO: 40641 - DNA, 444 bp, Ureaplasma urealyticum
atgcgtaaattagcacttgatttaggaacaaaatcatgtggttttgcaattagtgatttattaggaataattgctagcggacttgataattttatttatgaagaaaatgattttacagctgttttagctaaaattgatgaaatcatgattaattatcatcatgaaattgacacaattgttttaggttatccaactaatgtttatgatggatcaaaaaatgaacgaacatatttaatcgaatcattttatgcattattaaaacaacactttttaaaccatgaaaaaattaaaattgtttatgaggatgaacgttttagcactaaaattgcaactcaacgtttaaaaaatagttgtgttaaagcagctaaaatcaaaaaagttaaagataaaatgagtgctgttgttattttagaaagttatttaagtaaaaatcattttaattaa

SEQ ID NO: 40642 - DNA, 2421 bp, Ureaplasma urealyticum
atgtataatcacaataaaattgaaaaaaaatgacaaaagtattgactagataataagacttttaaatttgttgataatcctaacaatcctaagaaattttatgtattagacatgtttccatatcctagtggaaaaggattgcatgttggtcatcccaaaggttatacagcaactgatgtaattagtcgttttaaacgtttgaatggttatgatgttttacatccaattggttgagatgctttcggtttaccagcagaacagtatgcattagaaacaaataatcaccctcatacttttacgcaacaaaatattaaaatttttcgtaaacaattacaaatgattggttttgattttgactatgataaagaagttgatacaaccgatcctcaattttatcaatgaacgcaatggatttttgtgcaattatataaacataatttagctgaaattcaagatattgatgttaattgatgcgaaaatttaggaactgttttaagtaatgaagaagttgttttaaatgataaaaacgaacgggtaagtgagcgaggtggtcatcctgttgttcgtaaaccaatgaaacaatgagttttaaaaattgtagattatgctgataaattattagatggtttaaatgaagttgaatttagtgaatcattaaaatcgttgcaacgtaattgaattggtaaatcaatcggtactagtgtgcaatttaagattaaagattcacttttaacacttgatgtgttcactacacgaattgatactatttatggggtacaatacttagtagttgcaccagaacatccaattcttaaatctattactagtgagcaacaaattaatgttgttcaatcatatattgaacaaacaaagaaaataagcgatttagatcgcattgctgatactaataaaactggtgtttttagtggtgcatatgctattaatccaatcaatcaagaaatcattccaatttgagtaagtgattatgttttaatgaattttgcaactggagctgttatgggtgtaccagcacatgatgaacgtgattatgcttttgctaaaaaatatgcattaccaattaaaagtgtaattgatacaaaacaaaaattaccatatgcaggtgatggtttacatattaactcagcaatgattaatggtttaaatattaaacaatctcaaaatgttttaaatgattatttaattaaaaatcatctaggaaaaaaagttgcaaactataaattgcgtaattgaatttttagtcgtcaacgttattgaggtgaaccattcccagttttattcgatgaaaataatcaaataaagattatcgaagacttacctgttttattaccaaatttaaatgaatttaaaccttctaaaactggtgaatctccccttgcaaatgcccaagaatgattatatgtagaaattgatggtaaaaaatatcgtcgcgaaacaaatacaatgccacaatgagcaggctcatcatgatattttttagcttatattttaaaaaatgaagatggttcatacacaccattaaatagtgaagaagctaaaaagcgttttgctaaatgattgccagttgatgtttatattggtggacaagaacatgctgttttacatttactatattcgcgtttttgacatcgttttttgtatgatattggtgtagtgccaacaaaagaaccattttataaagtaattaatcagggaatgattttaggcgaaaataatgaaaaaatgtctaaatcaaaagggaatgttattaatcctgatgatattattgcttcgcatggtgctgatacattaagaatttatgaaatgtttatgggaccattaacagcttcattaccatgaaatccggatgggttagatgcgatgcgaaaatgattagatcgcgtttatcgtttatatcataatttaagtgaactagaagttgtcgaagatcttaataaactaaatgaagaaataattattgcctatcatactttaattaaaaattacacaaaagcaattaatgaacaagcatttaatattgcgattagtgaaatgatggtttttgttaatgttttatacaaaaataaagttattaattatgaattattagataattttttaattttactttcatgctatgcaccacatttagcggaggaattatatagtttaaaccattcagaatctgtttgtttacaaaaaatgcctatttatgatgaacaaaaaattattgctcaaaatattacaattccaattcaaattaatggtaaattaaagcacacaatcaatgttttaagagatacaaatgctgaagagttagttaatttagcattggcttgtgaacaagttaaacaagaaattggggatcaaccaattaaaaaacaaatcgttgttgttaataaaattattaattttgttatttaa

SEQ ID NO: 40643 - DNA, 624 bp, Ureaplasma urealyticum
atgaataaattgggtttgctatgcgaaataagaagaagcaaaagaaaaagagaaataaagaatgttaatgcaacattcaaaaacttagccaatagagattatgatggccaaatgaatgatatatatgctaccgatgtgacatatattccttcacccactgatgttatagaaaatcatgtatatttatcggttttattgcatcataaaacaaagaaaattgtgagctggaatttatcaaaatataatgatactaatcttgttttaaaacattttaaactaactaaatttcctaaaaaattcattgtacattcagatcacggatatcaatattcctctaaggaattccttgattacatagattcaattaatggcactatttctatgtcaagagttggaaattctttggataatagagaagtagaatatttcttttctattctaaaaactgaaatattttcaaatttttttcaaaaagcaaaaagtttaacatttaatgaattgcaaatagaaatagacaaatttattaatttgtataataatgaaagatttatcaaaaaatttgatttaaaaacaccccaacaaatgtgggatgtttatatgaacaataaatctatttgagtctaa

SEQ ID NO: 40644 - DNA, 1248 bp, Ureaplasma urealyticum
atgaaattattaaaaaataaaaaattctgagctatgacattaggtgttaccttagttggagctggaatagttgctatagcagcttcatgttctaattcaactgttaaatctaagttaagtaaccaatttgctaaatcaacagacggtaaaagtttttatgcggtttacgaaattgaaaactttaaagatctaagtaatgatgataaaaaatcattaagtaacattgaatttaatgctgcacttacatcagctgaaaacaaaacagaaagtacacttgaaaaaggtcatttagttggtgaaaaaatttacgttaaattacctcgtgaaccaaaacctaatgaacaattaactattattagtaaaagtggattaatcaagacttcaggtttgttaatatctgataatttgaattatcaaacagaaaaagtgaactttgaaactacacaaccaggtaaagaacaaccagcaggtaaagaacaaccagcaggtaaagaacaaccagcaggtaaagaacaaccagcaggtaaagaacaaccagcaggtaaagaacaaccagcaggtaaagaacaaccagcaggtaaagaacaaccagcaggtaaagaacaaccagcaggtaaagaacaaccagcaggtaaagaacaaccagcaggtaaagaacaaccagcaggtaaagaacaaccagcaggtaaagaacaaccagcaggtaaagaacaaccagcaggtaaagaacaaccagcaggtaaagaacaaccagcaggtaaagaacaaccagcaggtaaagaacaaccagcaggtaaagaacaaccagcaggtaaagaacaaccagcaggtaaagaacaaccagcaggtaaagaacaaccagcaggtaaagaacaaccagcaggtaaagaacaaccagcaggtaaagaacaaccagcaggtaaagaacaaccagcaggtaaagaacaaccagcaggtaaagaacaaccagcaggtaaagaacaaccagcaggtaaagaacaaccagcaggtaaagaacaaccagcaggtaaagaacaaccagcaggtaaagaacaaccagcaggtaaagaacaaccagcaggtaaagaacaaccagcaggtaaagaacaaccagcaggtaaagaacaaccagcaggtaaagaacaaccagcaggtaaagaacaaccagcaggtaaagaacaaccagcaggtaaagaacaaccagcaggtaaagaacaaccagcaggtaaagaaactactggaaaataa

SEQ ID NO: 40645 - DNA, 4329 bp, Ureaplasma urealyticum
atggaaacaaagaatgcattatttaaaaagattgtaaaaatttctgatcaattattaaataaaattagtatcaaaaaattaactaaagataaaaaaaataatttatttgtttattttgacgaatttgttgatgtaacaattattgatgaattacatcaattatcaaaaacaacattaatgcatgatttacaaatttgatatattaataatttaaaagaagttgatcataaaaaaatattaactttttttaaaaaaattagtgaacaaaatgctaatttaatctttttagaacaaataaatgatttaaatacaaaaatagaatataactctaatttaaattcattaattttaaaaattaatgataaattaatttatgatcattttatagcaaataaattagaaattttaaacatcttaaaagtttgatcactaccttatagtaattttgaaattcattttgaaaatcttagttcattattaaatgaaaagcatgaacaagcagtaaatgaaattattagtcatcatattcaacaacaaaaacatttagaacaacaaattagtcagcagcaaaatttttataataatcaaaaggcaaattttaattattataaaaatccttcaaataaaacaattacaaaattaattgatattaatcctttaatgaataatgcaaaaattcgagcttatgtttttttaaaaaagattgatatattaaaaagtggagcaatagcttataaactaaatgttattgatgatagtgaaaccttaacaattatgacttatttaccaagcggtgaacatcctttaaaaaagtttttagatgaactgaaaattgatcaattaatcgaggctgaaattgatattgttttagataatatgagtaagagtggtcaagttcctattggtaaaattaaaaaaatttgttgcgttgaagataaacatgtaaaaaaacaaatcacacctcgtttagaactaaattttcatacaaaaatgtcatcacttgatgcaattatttcgacacaagaattaattgattttgcggttaagaatcaattaaaaacaattggcatcactgatcgaaatgttgtacaagcatatcctgaaatcgctaaattttctaaaaaacaagatttaaaaattatttatggtttagaaacagaagaattagaagatcaaatcccattagttttaaatgttcgggatcaaaatttagataatgctacatatgttatttttgatattgaaacaacaggattatttcctaattttgatgaaattattgaatttggggccgtgattatgcaaaataataagcaaattggggaaaaaattcaattttttataaaacctattcaacaaattaatgagaatgttactaatctaactaatattagtcaagaaatggtcaataatgcaattgatgaaaaaacagcattattaaaaattaaagaaatttttgatgaccatattttagttgcacataatggaattaattttgatattaattttattaatcagagactgttaaaatgaggattagaacctcttaaaaatcctagtattgatacattaatgatatcacgagcaataaatccatttaaaagtcatcgattaggagcgatttgtaaaaaatatgaagttgattataatgatgaaagtgcacaccgtgcagactatgatgccatagttttagctgatgtttttaaagttatgaaaaataacttatttaatgattttggaattactaatttaagtgaaattaatactaaattacaaacaacaatgttaaaaaatcgtagttttggtaattgaattaatctttatattaaaaatcaagcaaatgttaaagatatgtatgaattagtgtctatatctcatactgatatgtattatacaagaccaacaattacgacaagctttttagcaaataaaaaagataaattaattatttctaactcgattcacgaatcagatttaatcaatgctttatattcaaaaaacgatgaagaaattaaaaggttaattcaacgttatgattttataacattaccatcattaggttcacaaaaacacttagtatatgctaaaaaaattacaattgaaaatgtacaaaaagcttttaaaaaattgatctatttagctttagaattaaacaagattattatttattcaagctcgccttattatttctttaaagatgataaaaaattttatgatgtttatgttaatacgaaaggtctcgaaggtaaagcacaccgatttgctaatgaagtttatgttcctgatttagaatatattgatcaaaaaaatgccattgatgaattagcttatttagaagatgaaaagttaattaacttgattattaatgagaatcctgtgcatattaatagttgatttgatgatagcatacaacctttaaaagaaggattgtatgctccaaaaatggaaggtgttgatcaaaaaacaatcgattatgtttatcatactgctaaaaaaatatatggagagaatttaccaacaattgttgaacagcgcattaaaaaagaattaaattcaattattaaacatggttttagtgttgtttattgaatttcacatttattagtagaaaaatcaatgcaagatggttatggtgttggtagtcgtggttcggttggctcatcacttgtcgcaacgtttttaaatattactgacgttaatccgcttacaccacattatttatgtcctaattgtaaaaaatgtgaatttataacaaacgctgatgatggatttgatttagctcctaaaagttgtgagcagtgtcaaactccaatgttaactgatggacataatattccttttgaaacttttttaggttttgatggggataaagtaccagatattgatcttaatttttctggagtttatcaagcagttgcacataattttattaaaagtatttttggagaaacacattcttatcgtgctggtacaattggtactatggcccaaacaagcgctgaaaatacggttaagaagtattttgaaaaccgttttaatgaaaataaaattattcgtgattcaacggttagtttatatgtacaaaagtgcattgattctaaacgcacaactggtcaacatcctgggggtattattattgttcctaaagaatatagtatttgggatttttcaccttataattttccagctaatgatattaatgaaacttgaaaaacaactcattttgcgtttgaatatctacatgatagtttattaaaatttgatattttaggacatgataatccaacaattttaaaacttttaaaagattatacggggattgatgaacgtgatgtaccaatgtatgatccattagttatgaaatcatttagcgatattagtgcgctaaatattaaaccgtctgatgttttaaatgaaacaacaggagcaatttctattcctgaatttgggacacgctttgtacgtggtatgctagtggatactaaaccaaaatcatttgctgacttaattcgtatttcaggattatcacatggagaaagtgtttgattaggaaatgcacagtcattaattaaatctggtaaattgctaaaggatgttattgcttgtcgtgatgatattatgacatatttaattcgtcaaaatgttgaaccaaaaactgcctttttaattatggaagatgttagaaaaggtaaaaagatcaaaccagaacaccaaatcattttaaaagaattaaaggttcctgaatgatacattgaatcagctaataaaattaaatatatgtttcccaaagcacatgccacagcttatgttatgcatgcatgaaaatttgcttgatataaaatttattatccactagaatactatgcagcattttttagtgttcgtgctgataattttgatttatttgtaattaatcaaggtaaagaatttattgaaaaaacttataatgatatcgaacaacgttctaaatcacgcgatccacaaaaaaaagttagttcacgtgaacttgctttacaaccaatttatgaaattgtgattgaattattagctcgaggttttaaaatttcaaatattagtattgaacaatcacaggcgactagttatgtaattgataaagaaaacaatgctattattccaccatttattgcgattcaaggattgggtgaaacagtagctaattcaatcattgaagctcgtaatcaaaaagttttttcaacaattgaggatttaaaaaaccgtacaaaaatttcgcgtacagatttaaaaaatttacgagtattaggcgttttagatcatttaagtgaaactgaacaactaacattattttaa

SEQ ID NO: 40646 - DNA, 975 bp, Ureaplasma urealyticum
atgagtaaaattttaattgttggaagcggagcttttggaagtgctttaacacaagttttagtttcaaattctcatattgttgatgtttatggaattaatgaaaatgagcttaatgatttgaaagaaaatcaaaaaaataagaaatattttcaggatcaaaaattagatttaccaattaataatacatatttggatattaatttagcacttcagaatcaatatgattttatcatcattgctattccttcatttgctattaaaaactttgttgataatatcaaaatttttaatttatcaaaaactattgttgttaatgcagcgaaaggattaaatcttgaaacaaaatcatcatggtgtgattatattaaacaaaatttaaaaattaaagccttagttggattagttggcccttcatttgcaattgatgtttttttaaaaaaaccaacagtcgttaatttagtaggcaataattcaaacgcccttataaaagttaaagaagaatttgaaaacaattgatttaaatgcattttatctaaacagtttgatgctgctaattatatttcttgttttaaaaatgcattagcaataggttgtggtatcatttatggattacaaaattcaaataattctttagtagcttttttaactaaaggaatcaatgaaatgcaactaattttagagaaaatttttcacaaaaaagtcaatccgttagaatacttttttattggtgatacaattttaacttgtactgatcaaaaatcacgtaattttagttttggtttactgattgcacaacaaggcgtacaagaagctttagtaaataaacaacagactattgaaggtttaaataacatcaaagttatttatgaaattattaaaacaaatcaaattagtgctccacttttccaaaatttatataaggtaattattaacgccttaaatccccaggatttatttgataaaagtttttgttaa

SEQ ID NO: 40647 - DNA, 1329 bp, Ureaplasma urealyticum
atgcgaactattgctattgtcggaaagccaaatgttggtaaatcatcattatttaatcgtattttaatgcgccgtaaatcaattgttgacgatcagccaggagtaacaagagatcgaatatatgatattggtaattgattaacgcgaagctttatgttgattgatacaggaggtataattagctcaaaagatacttatcaagataacatcaatgaacaagttttatttgcgattaatgaagcaaatacaattatttttttagtctcagcaaaagatggaattaataatgatgataaaaaaatagctaaaatgttaaaagaaaaagctaaagataaaaaaattattttagttataaataagatcgaatcagaaaaatattatcttaatgaaggagaactatattcgtttgggtttggtaaattttttaaaatctcagctgagcatggaataggaatgggtgatcttttagatgaattagtaaaagatatgcctatacaaaataatttagaaaaacaagaacgctttaaattttgcattattggaagaccaaatgttggtaaaagttcactaacaaataccatcttaggtgagcaaagagtaattgttaatgctgaagcaggttcaacacgtgattcaatcgataatgattttaattactataataaaaaatatacaatcattgacactgcaggaatacgacgaaaaggtaaaattgtcgaatctgttgaaaaatatgctgtattacgaactaaaaaagcaattgaaagatcccaattaattttattagtacttgatggatctgaaccttttaaagaacaagatgaagttgttggtggtttagcatataatgcaaatattccaacaattattattgttaataaatgagataatattattaacaaaaatagtcatacaatggaaatggtaaaaaaacagattcgttcacaatttaagtatttatcatgagcaccaattgtttttgttagtgctttagacaataaaagaattcacactatttttgaagcaattgaattcgttcgtgagcaagcaatgcgcaaaattgcaacttcattattaaatgatgttgttattaaagcaaatgcttttcaagaaccaccaccatttaaaggagggagaatcagtatttcatatatcgttcaagtacaatcacaaatccctacttttgttttaaaatgtaataaccctaaatttttgcactttagctatgctcgatatattgaaaatgaaattcgtaaagcttttggatttgatagtgtaccaataacattatattgacaagataaaaataaaaaattacgaggagaataa

SEQ ID NO: 40648 - DNA, 438 bp, Ureaplasma urealyticum
atgtttattggtacttataatcattcaattgattcaaagaatcgtatgttagttccatcaaaagttaaagcaacattaggtgaagccatttttgtttatttatcacttggttttgatggaaatatagatatgagattagagagtgaatttaatcaattcgttaacaatattaataatttattaattggttcaaaagaagcgcgaaatcttacaagattaatattaagccaaacttataaaatagaaatcgatagtgcgtcaagaattttaatacctcaaaaccttattgataaagctaaaattaaaaaagatatttatattattggaacaaatgatcgatatgaaatttgggctaaagaagtttatgatgattttagcttaaatcaagaaagtacgctaagtgatttagctgaaaaattattaattaatggaatttaa

SEQ ID NO: 40649 - DNA, 927 bp, Ureaplasma urealyticum
atggaatttaatcaacacattaccgttttattaaacgaaacaatcgaattattaaatattaaaccagatggcatttatgttgattgtacatttggtcgtggcggacattcacaactcatcttaaaaaaactctcaaaaaaaggtaaattaatttgtttagatcaagatcaagaagcaattaattttgcaaataatttatttaaaaataatacaaatgtaattgttattaaaacaaactttaaaaatttaaaatcagcattaagtgcacataaaattttttatgttgatggctttatctttgatttaggtttatcaagtccacaacttgatgatccaaaaagaggttttagttatcataagaatgcttgattagatatgcgaatggatcaatcgcaaaacttaaatgctcactatattgttaataattattcttttgcaaaattagtaagtatttttaaacgatatggagaaataaaatatccaaaaattattgctgatgcaattgttaaagaacgcagtattaaagagattaatacaacattggaattagttgaaatcattaaaaaatattctcctaaaaaaaatttatttgaaaaaaaacatcctgcacgtttattttttcaagcaattagaatagaagttaatgatgaattaaacattttagaaaaagcatttaatgatgctatttcaatgttaaatcccttaggtgttgtggcaattattagctttcatagtcttgaagataaaattgttaaaaaggtctttaataattatgcaaaaattaaattacctaaagaagtcccaataaataattatgtaaataaatatagtttattgaatcaaaaaattatgccaagcacccaggaactaaatgataacaatcgttcacgatcatctattttaaggggattaattagaaattattaa

SEQ ID NO: 40650 - DNA, 3855 bp, Ureaplasma urealyticum
atgcaagatcaaggagtaaataacaaggcaattaagcaaaaagtcttaaatttactatcaactgatacgcgtgatagttgtataagaacacgcttaacaaaataccatttagatattagtcacacttttaataaatatgaacttcaagattttattgaaggtaaaattaacattcttaaaattagaaattttattaacatcaatacgtttgaaaatgatgttaaaaatataaattcaatggatgaattgattgattatttacaggatttcaatttaaaactaaaagatcttttatcgacacgtaaaattaatgaatggagccaagactttgtattttataaaaatgaacgaattgctgatatgattaaagcgattgaaagtcaaccaaaaaaatttgaatatttaagtcgtgaagcacgcaatatttatgcgcaaacaggtgtttgacctttatatatagctaaaaattttttgattggtacaacacctaaagcttcaaatattaacgcgcccttaatttttgttgatgttgagattaaaaaatataatggtgaaatttttttaaaacgaaaaaatactaattttattgttaacgaaaaaatactatcttttttaaaaaatgattataaaaataatatcgtttctttaaatgaaattaaaaactttagttatttagaaattcaaactctaattaaaaaaataatactaaaagatcatttagaatcgattattaataataatgaatttctaaacttaaaacaaaatgaaattaatgagcaatttaataacttttttttatatgatgcatatgttttaggaatttttgagccccatggaggagcgattaaaaatgacttagaagtgattattagtaataatattgatccttttgacgaagaaataaataatgttaatcaacaaatttattataaaaactatcattttttagcagaagaaaataagcttcctttaatccaaattaatcgtcctttaaatatttttcaaaagtatgctattcattcaggattagttaaaaatactttaatatatggaccgcctggaacgggaaaatcagaggtgattgcaagtattattgcaaacgtaattaatgatttaaaatcgattttaattatttcggagaaaaaagctgctttagatgtattacatgaaagattagctaaaattaattttttcacactttttatttatgatacaaataatgatgatcaattttataataacatttttaatttaattgaaaaaataggaggattgcgttttattgagaatcaagatttaaaccaattcaatgattttaaatataaaaataatattatttcaaacatttattataaaaagattcatgaattaaaaaaagaaattattaatattacatctttaattaaaaatttacataatgaaaaagataataatgataataattttgctaattatttgtattgattatcacgctttaatgaagtagaaattagatttattaacgatccattattgatcaatgaaattaataatttaattgagaattattcttataattttgatgaaattattacacacgttaaagctagttatgatttttttaaaaaatataattatgaattttctaaaaataattttttaaaatttaaagaagaaagcgaacaattaaataaattacaaattgattttaatttaattacaaaatctttatatcaatcacaaacttttctaccacgtattaagttgttagaaagctttttagttaaaaataatatgactttaacaagtcttatatatgatgatgttaacttgttaagtaatacatatgttgaagctaatgagttttatacaaactttaatcatcttttaaaagatgattttaaaaaatttattgaagataatataaaaagtcattcattgttttttagtcatttaaatactttaaaaaataatgaatgaacttatgcttttgagcaatatttattaataaataatccatttgctaaaaaaggtttatttaaaaaaattaaaggtgatgaaaaaaaattatgaaaacaacttgatctacttaaaatatatattaataatccttttttatcaaaatttagctttgattttttagaagatttaatcaaacaaccaatagagattttcaatgttgaaaatcttgtttatttaaataacaaacatttattaaataaagcatacgttaaagatttatatgagaatgcttttgataagaatttatcatatgaactaatttatggccttaaagatttaaaattaaatagtgagcaatatgatattattaaaaatttaattaaatatcaaaacgaagttttagttaattatcaattcattaaaaatactgatttttttaatttgtgtaaaaaattaagagatgcaaatattcaattttctaaaaatgctgatgaaattatttacaataactatttagattatttgcaaattaaattagttactgctcctaaacaaatccaaacaaaaattaaagaaattgcgcaaatttgtcgtttagcaaaaaaacctaatattgtgaaatttattttaaaatattatgaaattttacgttttcttttccctatttgaattagtaaaccagaacttgttagtgagatgttaccattaataagtaagagttttgattatggaatttttgatgaggcttctcagatgtttttagaacgttcttatccttcaatctatcgttgtaatattaatattgttgcaggcgatgataaacaattatgccctactaatttttttattaatcgtcaagaaaatgaaaacgatgagtttgaattagcagatgtagatgttgcagaaagtttattagatcgtgctaaaactgctctatggtcagaatatttattaaaaaaccactatcgttctaatcgagaagatttaattagttttagtaacgataatatttataatggcgatttacattttgcatctaaaaatgggttatttgatccaggaatggaaattatagatgttgaaggtgtatttgaaaatgaaaatgttattgaagcacaaaaaattatggaggttttaaaagaacgagcagccaattatcaaaaaattattgttataacttttaatatcaaacaaagtgaattaattgaaaatttaatactacaaacttttagttttaatgatgttgtttatcaacgttttgagaatgatgaaattattgttactaatttagaaaacgttcaaggtaatgaagctgatttagtaattttatcggttacttatgccaaaaataaagaaggaattttacgcaataattatggcccattaatgaaaaaaggtggtgctaatcggttaaatgtagcgattacaagagcagcagataaaatgattgttgttaaatcaattaaagctgtggatatgatggttaatattaataatgataatattaggacttttaaaaattttattggttattgtgatgaaattgttcatttgactaatcaaaataaatttaatgattgtagtcattttgatgaagaatttttaacaagtttagaaaaaaccatattgaaaattttaaaagattataaaaaaacaaatcaacaaattttatataaactaaaaattggtaattttaaaatcacttttgctttatataatgaagaaaaacaaaaaatcgatttacttatttttatagaagagtttaatgaatgaaaatcatataatcttttagaaatttatgatcaatttaacttcttaatggatcgtggttataaaacaatcgttattaatgattatgaaatttgtttaaactataatcaagttaaaaataatattattaaattaattgattaa

SEQ ID NO: 40651 - DNA, 2115 bp, Ureaplasma urealyticum
atggaatttaaacaaaaaaactcaaacaatccattagaggaatttggacgtaatttaaataaggaaattttagataataaaattgaccccattatcggtcgagatgaagaaattagaagaaccattgaaattctaagtcgtaaaactaagaataatcctgtcttaattggtgaacctggtgttggtaaaacagcaattgttgaggggcttgcataccgaattgttcataaagatgttccttcaaacttattagataaaacaattattgaattatcattatcatctttaattgcaggcgctagttatcaaggccagtttgaggaacgaattaatagtattttaaaagaagtcaaaaaagcagatggtaatatcattttgtttattgatgaaatacatcaaattgttggtatgggtagaaatcaaggttcaaatatggatgttgctaatattttaaaaccaatgatggcaagaggagaaatcaaattaattggcgccacaacgcttgatgagtatcgtttatatattgaaaaagatcaggcattagaacgtcgttttacaaaagttttagttaacaaaccaacaattcaagaaactttaacaataatgcgaggtttaaagccacggtgagaagcctttcatgggattaaaatccatgataatgcattaattgctgctgttaatttatctgaacgttacataaatgatcgtaatttgccagataaagctattgatttaattgatgaagcagctgcaaagattaaaacgcaaattaattcacaaccaatatatttagatgaaattaaacgtgatttacaacatttacaaactgaaaaagccgctttagaaccagaaaaagatgaaaaatcaattaaacgtttaaatgaaattttagaaaaaattaaattaaaacaagatgaatttaacaatttaaatgatttgtatttaaaagaaaaaaagcaaattgacgatttaaaaaatttacggcaaaaaattgaaagaattcaacatgatattgaattttatcaatctgagggtaagtatgaaaaagcatcaagattactttattcagatttaccattatttgaaaaacaacgagaagaattagaaaataaaattaatgagaataataatcaaaaaatgattattgattcattaacagagaatgaaattgctgatgttattgcgcgtgctacaggaattccattaagtcatttattagctgatgaaaaaacaaaattattatcgctaaacaaacgaattgctagtcatgttattggtcaagatgaagcagttaaattaataagtgatgcggtaatccgtggtcgtgcaggtattaataatcctaaccaacctattggttctttcttatttttaggacctacgggcgttggtaaaacagaattagcaaaaactttagcaaaagaattgttcaattcagaaaaagccttaattagatttgatatgagtgaatatatggaaaaacatagtgtatcaaaattagttggtgctccacctggttatattggttatgaaaatgctggagttttaactgaatctgttaaacgcaaaccatatagtattttgttatttgatgaaattgaaaaagcacaccctgatattttaaatattttattacaaatattggatgaaggtagcattaaggatgctaaaaataatgaaattaattttaaaaatacaattattattatgacatctaatattggagcagaagctttattagaaaataataaaacaaaggcattacttgatttacaaaaaacttttaaaccagaaattttaaaccgaatttctgaaattattttctttaataagttatcaaaagaaatcatttttaagattagtgaaaatttacttaaagaattagaaaatttattagctaagcaagattatttaattaaatttgatgataatattgctcaaatcatggttgaagatgcttatagttcaaattatggtgcaagacctttaaaacgatgaattacaaaacatttagaaaatgaaattgctaaattaataattgaaaatcgtattacaaaaaacataaattataaaataaattatgatcgtgaactagatcaagttttaattaaataa

SEQ ID NO: 40652 - DNA, 348 bp, Ureaplasma urealyticum
atgaaattagttcatggaattgatattattgaatgaaatcgtgaagaattaaataatcctttatttgcaaaacggattttaattgataatgaattagaatactattttcaacttaattcatcaagggaaaaaaaacgctatcttgcaagcgtttttgcctgtaaagaagcagttatgaaagctttaaaattaaaatatggatatggagatattttaattctgaaaacagagaatcaacgccaagtttatcttaataaaattttaataaaagagttagaactttcaatttcatacacagaaacttatatagttgcttctgtagtaggtttaattaataatatgaactaa

SEQ ID NO: 40653 - DNA, 300 bp, Ureaplasma urealyticum
atggtaaatgataataaaattaatgagtataaaaataaaaaatttgttgctaacaaagttggttacgatcctgaaagtgtagatgtttttttagacgaattaattaatgaattagaaatatttataaatgaacataaaaatgcaatattaaaaatagaagaacttaatgaatataaaagaaaattcgaaaaagaacgtgaatacacaacatcactaaataattttattgatcttttagaaaaagttgttgataaaaaaagcacttttgatgtttgagagaaacgtccggtaaggaaataa

SEQ ID NO: 40654 - DNA, 951 bp, Ureaplasma urealyticum
atggcaattgtttctgttaaattaacatctaatcaagttgataaattcttaattctatgaagaccatatttagtacataacaaccataattatgctaaatatacttttaagatcgatggtactttaatcattatttacaatactaacacatgtactattaatactcatgatataaattcttttttaaacacatttttaaaaagagaagatttaacactatttaatgttataaaacaacaagtaaacactaaaaaaaataatcaaaatgttatgagccaatcagaaatttatgaaagtgcccaagtaattattgggtctgatgaggttggagttggcgatttatttggaggtatagttgtttgcgcagtgagtttaaaaaaaagtgattttaaaaaaataaatcatttaaaaatcatagattctaaaaaactcaatgatcagcaaatgcaagaaatatatcaacaaattaaaaatcagatttcatatacaattgtttcttataatcctaaagaatacaatgaattaattaaagaatacaataatgcacatattcttaaaactattttacattataaagcattacaaagtgaaattcacaaacacgctaaatattcaatttttagtgttgttgatgcttttagttcattaaaaaactgaaatcaatatttacaaaaagtcaattttcaaccttatgaaccaaacttattaatccctaaagccgaatcaatttatacaagtgtagctttggcgtcaataattgcacgtgttatgtttttaaaaatgattgcaattattgaagaacaatttaacgttaaaatcccgttaggaagttcaaatcctttagttaatgacgtcgctagtaatatttttcaaaaatttggcttaaaaattttaaaacaagtcgctaaagaacactttagtaactttcaacaaattattaaaaataaataa

SEQ ID NO: 40655 - DNA, 1158 bp, Ureaplasma urealyticum
atggaagttaaagtaaaaaaacgtgtcgttgttggcttgtctggtggcgtagattcttctgttagtgctttattattaaaacaagaaggctatgaagtgattggtttatttatgagtaattgggatacaattgcaaattttgaaaataaccatgaatttaataaaacgcatcagggttgtgagagtgaattagattaccaagatgctcaggctgttgctcaaaagatcggtattccattatatcgtgttgaatttattaaagaatattgagataacgtttttgaatattttttaagcgaatatcaaaagaaccgtacacctaatcctgatattttatgtaatcaatttattaaatttgattcttttttaaattatgctaaaaatgaattacaagctgactatattgcaatgggtcattatgcaagagttaagcatgataggaattcatcttttttactaaaagctattgatacaaataaggatcaaacttattttttgtgtaatttaaaccaaaatcaactacagaatgtgctatttcctattgggcatttaactaaactacaggtgcgcgctattgctaaaaaacacggtttgattacagctaataagaaagattcaacagggatttgttttattggtgaacgtaattttaaaacttttttacaaaattatattcctaaccaaccagggcaaattataaatattgtcaataatcaaattattggtcatcacataggaacaatgtattatacaattggacaacgaaaaggattgaatctaggtggcatgaatgagagaatgtttgtttgtgataaagatatcgataaaaaaataatctacgttgccccttcaagttttgaaaaacaatatttaatttcaactcaagcattaattgaaaatataaattttattgaaccatataatcctcaaattccaattatggtacgctttcgtcaccgacaagatttaataatagtaaacgattttttacctattaaaaataccaaaaatgtactaataaattatgagtcagctagagctattactcctgggcaatatgctgtcttttaccaaaatgatcattgcattggcggtggaattgtttctaaaactaatattggacatcaaaaagtggattttttggtatataaatcatag

SEQ ID NO: 40656 - DNA, 774 bp, Ureaplasma urealyticum
atggatcaagtatataacattgtcatggcttatattcttacattaatcatatctcctttatattcgtatttaattggtagtttaaatgcaagcatcattttatccttagtttttaaaaaacaagatgttcgtctttttgcttctaaaaatgcaggcatgactaatatgatacgtgttcacggaaaaaaattaggtatattaacgctttttttagatattattaaaccaatcaccacagttagtttaacttacattatttacaaatatgctttagacgctccatttgatttaagtaatggttttaatcaagccattttagtttattttggtggtattttcaccattattggtcattgttacccaatcttctttaaatttcaaggcgggaagggagttgcatgttatggcggttttttaattacagttgatccaatagtagcgctaattggaatcattacactattggtcattttactaattactaaatatatgtctttatctgctatgattactgcaactttcacttgttttttagtattagttccaggaattaattacataccatactataatcaaaatttcactacgtatttttttgatttaaattatgttataaaaggaatctgatatgtttggtttttcttattagttagtgcaagtttattaatatatcgacacaaaacaaatattttaagcatcgctacaaaacaagaaagaaaaacaattttatttcacactaagtcaaaagataatcttagtgatgttaataaataa

SEQ ID NO: 40657 - DNA, 2703 bp, Ureaplasma urealyticum
atgaaagattataaaagcacccttaatatgcctactacaggttttgaaatgcgtgctaatttaaacgttaaagaaccaaaaattcaacaattttgagttgaacaccaaatttatgaaaaattgctaactaaaaataaagacaagaagccttttatcttgcatgatgggccgccatatgcaaatggaaatattcatattggtcacgctttaaataaaatactaaaagattttgttgtttcatatcacaatatgaataattattactctccttatattccaggatgagatacacatggtttaccaattgaggttgccttatctaaaaaaattaaattatctaatctaagtgttaatgaacgtcgtgaacaatgtaaaaaatacgctttagaacaagttaataatcaaatacaacaatttttaagattaggaatgatatcagattttaaacaacgctatttgacattagaccataattacgaaatagatcaattaaaactttttacttatatgctaaaaaaaggttttatttatcaagactttaagcctgttttttggtcatgatcatcacaaacagcattagcagaatcagagatcgagtatgctgatcgtcaatcttcagctatttacgtaaaaatgaaggtagttgatcataatgatttgtttactgataaaccaacatcattagtgatttgaacaacaactccatgaacattaccagctaatttagcaattgcaattcatccagaattagtttacagtttaattgaatataaaaatgaaaattatataatcgctaaacctcttgttgaaacttttgtaaaaaaagttgggtttgaagattataaatgaattaaagattttaaagctaatactttagaaaaaataaaatatatttcaccaattagtaaaaagcatgcttttgtgatcatggatgagtatgttagtgctaatgacggaacgggtttagttcataatgcgcctgcttttggtttagaagactattatgcatgtaaaaaatatggtattgaaacagtagttatgatagaccaatttggtaaatacaatgcattagtaaatgatttagaattagaaaatatgttttatgaagatgctaatcaagttattttaaatcgtttgatgaatgaacatttattaatccatcatgaagttatcactcatagtgttgcacatgattgaagaacaaaaaaacctgttatgtatcgtgccacaaaacaatggtttgtttctattgaaaaaattttacctaacattttgcagaccctaaataacgatgttaaatcaactagttttagaggaattgaaagaatgcatgaaatgattgttaatcgtaaggaatgatgtatatcacgtcaacgcgtttgaggtgttcctattcctatgatttttgatgagaatcataatgcaattatggatcatgaattagtagaaaatatcattaatgttttaaatgaaaaaggtgttaatgcatgatttgatttagatgtaaatgcttttttaacacctaagtatttaagtatgaaaaataaaactttttataaagaaaaagacattatggatgtttgatttgattctggtagttcatataatattttaggacactataacctaaattatccagcagacgtttatttagaaggttatgatcaatatcgtggttgatttaattcttcattaattacagggacaattttaaacaatcgcgcaccttataaatatttagtagcacatggaatggttctagatggtgaaggatataagatgtcaaaatcaaaaggaaatgttgttgatccattagatgtatgtaagatttatggagcagatgttttaagattatgaattgctaattcagattatcagaatgatacaagaatttcagaagagatattaaaacaaaatgctgaaatttaccgaagaattagaaatactttatttaaatattcattatcaatcttaaatgattttgaaccaagtgttgattttagttttaatgttcgtcaagaagagcaatttgttttaaatgaatttaatgagttacatataaaagttattaaagcatatgagaattttgattatcaaaccgttgttaaactatttaacaaatttatcttagatttatcatcatgatattttgaaaatattaaagatgatatgtactgtttggcaattaatgatccaattcgcaaacaaattcaatcagcagtttattgaattttaaaaaattcattaattgatttaacaccaattattccacacacaactgaagaagcttactcgtttttaaaagatgctaataaaaaagaatcaatccgtttagaggatttttatgatcaatcccaatttcaattcaaaaaaggcattgctcatgttaaagcattctttagtattaaagatcaaatttttaatgaacttgaaaatgcacgaaaaaataatattttaaagaaaaataatgaagcttttgtaacaattgcaaaaaatttgattttagatgattatttgataaataatccaaaactattagcaaaatggtttggtgttgctaagattgaatttgctaataacacaaatgtggctaatgctaattttaaaaagtgcttacgttgttgaaatcatttccctgatgaagaaatgtacaatgatgaattatcaatgaattgttataaagtaattaataaaataaaatag

SEQ ID NO: 40658 - DNA, 963 bp, Ureaplasma urealyticum
atgaatgataattatttaattttaagcattgaatcaagttgtgatgaaacaagtttagcgttatttgaaaataataaattaattgctcataaaattagtagttcagcatctatacaatcacttcatggcggtgttgttcctgaattagcaagtcgttatcatgaacaaaatattaatcacctatttaatgaaattttaaatgaaacaaaaatcaaccctttaactatcactcacgttgcttacactgcaatgcctggtttgccaggttgtttacatgtaggaaaagtttttgcgaaacaattagctgttttaattaatgctgaattagtgccaatcaatcatttacatgcgcatgtttttagtgcaagtattaatcaaaatttgacttttccatttttgggattagtggtttcaggaggggaaagttgtatatatttagtaaatgattatgatgaaatcaaagttttaaatcaaacacacgatgatgcaattggtgaatgttatgataaaattgctcgtgttcttggttgaaaatatccagggggtccaattattgataaaaattatcaagaaaatttagcaacattagaatttattaaatcacagcccgctgctaaagattttagttttagtgggttaaaaactgctgtaattaattacattcataatgctaaacaaaaaaagataagttttgaccctgttgttgttgcttcaagttttcaaaaatttgcaattaatgaaattataaagaaaattaaatattacttaaatttatacaaattaaatcatttagcaattgggggaggcgtatcagctaatagtttactccgtaaaaaaattcaatctttagatgttatatcatatattccagaaatgatttatacaggtgataatgctgctatgattggggcttatgcttatgctttaattaaaaatcataagaaatcaatattaataaaataa

SEQ ID NO: 40659 - DNA, 1131 bp, Ureaplasma urealyticum
atgaaatataaaaaaattataacgagcgaatctgttggtgcaggccatccagataaaatatgtgatcagattagtgatgcaattttagatgaatgcttagcacaagataaaaattcacgtgtagcttgtgaagttttagcttgtaatcgtttaattgttattgctggggaaattaccacgcatgcatatgttgatgtagtaaaaaccgcttgagaaattattaaacctttaggctataatgaaaatgattttacgattatttctaatgttaataaacaatcagtagatatagcgcaaagtgttaataaagcaaataaagatttaattggagctggtgaccaaggaattgtttttggctatgcttgtgatgaaacacctcaatatatgccattaacaacagtgttagctcatgaattactaaaagaaatcgaaaaacaaagacgtaataaagaatttgttaaaattcaagctgatatgaaatcacaagtaagtattgattattctaattgtacgcctgttattgagacaatgttggtaagtattcaacatgatgaagattataacattgaatattttaataaaaaagttagcacaattatggatcaaattgctataaaatatggtttaaataccgattttaaaaaaattattaattcctcagggagatttgtaattggtggtccaattggtgacactggtttaactggaagaaaaattatcgtagatacttatggaggaataggtcatcatggtggtggtgcttttagtggcaaagaccctactaaagttgatcgtagtgcttcatactttgcacgttgaatagctaaaaatgttgttgcagctaagcttgctaaacagtgtgaaattcaattagcttttgcaattggagaaccacaacctgtggcaatgtttgttaatacattcaagactaatttggttgatgaaaagaaaatttttgaagcaattaataaaagttttaattttgatatcaaaacgtttattaatgatttagaattgtgaacaactaaatatttaccagtagcaacttatggtcatttcggtcgtgatgatttaaacttaagttgagaaaaattaaataaggttcaagatttaataaaatatagtaaataa

SEQ ID NO: 40660 - DNA, 828 bp, Ureaplasma urealyticum
atgccagagctaccagaagtacaaacgattgttgattatttaaatcatcatgttctcgatatttttattaaaaaaactattgttcatttacctaaaattttaaaaaataaaacaccacaagaatttgaaaaactgttaattaatcataaaatagtcaaaattaaacgtcttggtaaatatttattattttttttaagtaataatttagtattaagtgtacatttgcggatggagggaaaattttattatcaagcaaaagaggaatgatttaatttagcacatactcatattattattgaatttaataatggtatgcaattaagatataatgatacgcgtcaatttggaacttttcacatttatgagcaacaatcttttttagattcaaaagaattaaaaaagattgctttagatccgctagataataatttttcagcgcagtatttgtatgaaaaattaaaaaaaagtaataaagccattaaaacagccttgttagatcaatctgttgtttcaggaattggtaacatttatgctgatgaaattttatttgcagctaaaatttttcctacaatattagctaaaaatcttactttaaaaaattatgaaaagatcacaaaagaagcacaacgaatcttattattatcaattaaaaataaaggaacaacaatccacacttataaatttggtaatgatgaaacaggtttgtttcaaaagatgttattagttcacacacacgctaaagaaccatgccaaatttgtggaacaattattcaaaaaacaaaggtcaacggtcggggaacttattattgtccaaattgtcaaaactaa

SEQ ID NO: 40661 - DNA, 870 bp, Ureaplasma urealyticum
atgaaaaaagcaattgttattgatggaaattcattgatttatcgagcctttcacgctacttataaacaagctgaatgagcagttgaaaaacaattaatgcctactaatgccattaaattagtagcctcaatgatttttaagattttaaatcaagaacaatttacttatggtttaattgctatggacgcttctaaacaaacttttcgtgctcaagaatatgctgcttacaaagcgacacgtaaacctatggatgcaaaactaattgttcaattaccctatttaaaaaaactattcgttgctatgggttttcgaataatttcacaacctggaattgaagctgacgattttgttggttcttttagtaatttaatgaataagtttgatgttgatacaactatttatagttcagatcgtgatatgttgcaattaattaacaaaaacacaaaacttaaactcttaaaaacagggacaagtgttatgcaagaaattaatttaacaaatttttcattattaaataatggcattttaccgtatcaaattattgaatataagggtttagtgggtgatagtagtgataatttaattggcgtgaagggaatcggccctaaaacagctattaatttacttttaaaatatgataatatagaaaatatttatactaatttagaaaaaatagcacctagtgttaaaaataaattaattgaacacaaagatatggcttttttatcaaaaaaattagcggcgattcaaacggatttattgtttgatgaaaaattagaaaattttgttttaaaaccatataatactcaagaattagatgagttattcacatctttaaaaataaataatatgcaaaattattataaataa

SEQ ID NO: 40662 - DNA, 2910 bp, Ureaplasma urealyticum
atgtttattaatttaaatgtgcattcacattattctttacttaatagtactttaagtattgatgatttaattaaatacgcattagataacaaacaaccatacgtttgcttaactgatttaaataatatgtatggctgtatcgaattttatgataaagcaaaagcacataatttaactcctattatcggattagaatttgaatatcaaaatgctactttagtagcttatgctaaaaattataatggctatttaaaattaatcaaatgatcatcttgaattatgacaagtaaagaatttgaaattcaagatgattttgatgacttaattattgtttgtaaaaaaggaactatagtttttaagagtcctaatttttatcaaacgcatgatcaaaatgctcctaatgcgattgcattacaaagtgttttctatgctaacaaaaatgataaaattgtttttttagcaatgttagcaatcaaaaatgatttaaagttagaagattttaaaaattgttgcgattttgataataatcattttctaaatgataatctagcacaatcatttttttcaccaattgctttaaataatttaaataaagttttaaatgaattaaaagtacaaattcatgatttaccaattaatattccggtttatgataaacaaaattcaattatttcaagtgaaattttaaaacaattatgtattagcggattaaaaaaacgcttaaatgctaacgatggccaagttaataaaatttatgttcaaagattaaaatatgaattagatgttattaatgaaaaacaatttgatgattattttttaattgtttatgattttattaattttgctaaaagtaatggtatcattgtagggccaggacgtgggagtgctgctggttcgttagtagcttattgtttacatattacagatattgatcctattaaacataatttaatttttgaacgttttttaaatcctaccagaaaaagtatgccagatattgatactgatattatggatgaaaaacgcgatctagttattgaatatttatttgaaaaatatggcaatgatcatgttgcttacattttaacgtttcaacgtttaaaagcgaagatggctattcgagatgtagggcggattttgggaattgatttaaaagtaattgataaaatttgtaaaaatattaaacctgaatatgatgaagatcttgatttagcaattaaaaaaaatacgattttaaaagaaatgtatcttttgcataaagagttgtttgaaatttctaaaaaattaattaatgctcctcgccaaataggcacacacgctgcagggataattttaagtgatagtttaatttcaaatattattccaattcaactaggtattaatgaccgtcctttatcacaatattcaatggaatatttagagcgttttggtttaattaaaatggatttattaggtttgaaaaatttaacaattattgataatgttttaaaaatgatttatgaaaatcaaaataaaaaaattgatctctttaacattaactataatgataaatttgtctttgaagatttagctaaagcaaggacaaacggaatatttcaactagaatcgcccggaatgaaaaaagtactattaaaggtcaaacctcagaatattgaagatatttctattgtttcagctctttttcgtcctggtccacaacaaaatattaaaacatttgttgaacgtcgttttaaacgtgaagagtttagttattgaaacgaagccacaaggaaaattttagaaccaacttatggaattattgtttatcaagagcaagtgattgaattagttaaaactattgcaaattttgatattgctacttccgataattttcgccgtgcaatatcaaaaaaagatgaaaaaattttaatccaattaaaagatgattttatcaatggtgctttgaataataattataaacaaccattggttaatcaaatttttgaatatattttttcgtttgcacattatggttttaaccattcacattcactagcatattcatatattagttattgattagcgtatttaaaacattattatacattagaatttttaagtgtattattatcacatactagtgcatcaaaagataaattattatcatacttaaatgaagcaaaagaatttaatattagtatcaagggccctgatattcaatattttagtaatgattttgttattgatactcaaaaacaaataattcgttttggtttcaaaacaattaagggttttggtgatgaattacttaaaaaaatcaaatctgctctgcaaaaatcaactttaagcgattatatttcatacattgatgctttaaaaaaaggcaatgttagtttaaaaaacattgaaattttgatacgagtcggcacttttgatagttttggaattaatcgtttatttttattaaataatttgaatgaaatttttgaaaaaacaggattgaatggtcatttttttgatttaaatttagtgggtttagattatgcaaaagatatgagtgttaatgatcgttatttagatgatgaaattcagtatttaggaattgatttgaatagtttaaattacgcaaattataaaactgaaattgattataataaactaaaatatacaattaaagacttttatgaaataaacacaaattatgaaacaaacattcttgcacaagttttaaacattaagcaatcaaaaactaaaaacgggaatgatatcttttatttagaaacactaattgataataaaaaacaaacactaacaatttttcaaaatagtaaatatttaattgatgaaattagtattggaggtatttatgtttttggagttaaattattaaatcattttaattttattgtaaatattaagcaaaggatttag

SEQ ID NO: 40663 - DNA, 621 bp, Ureaplasma urealyticum
atgaaaagaccattaattattggtgtaggtggacctgtaggagcaggtaaaacaatgctaatcgaaagattaacaagatacctttcaacaaaaggttatagtatggcagcaattactaatgatatttacactaaagaagatgctagaattttattaaatacttctgttttaccagctgatcgtattgctggtgttgaaacaggaggatgtccacatacagcaattcgtgaagatgcttcaatgaactttgctgcaattgaagaaatgtgtgataaacaccctgatttacaattattatttttagaatctggtggggataatttatctgcaacatttagtccagatttagttgatttttcaatttatatcattgatgttgcacaaggagaaaaaattcctcgtaagggtggtcaaggaatgattaaatcagacttatttattattaataaagttgatttagctccttatgttggtgctaatgtagaagtaatgaaagccgatacattaaaatcacgtggtaataaagatttctttgtaacgaatttaaaaacagatgaaggtttaaaatctgttgctgattgaattgaaaagcgtttgcaattagctttactagaagaataa

SEQ ID NO: 40664 - DNA, 753 bp, Ureaplasma urealyticum
atgaaagaaaaaaaattaaacttaaagaagcatttaaacactgtagtgacgctaaatagtgactatttaaatttattagacctaatgcagatcactaacgcaaactttccaattggaacatttagtcattcttttggagttgaaacttatattagaaaagatattgtttttgatggagaatcattaattaaagcgttacttctgtatatgaatgaacaattgttacatggtgatttattggcaatttatcaaatttttaaactattgccaaaacaaaaaataaatgcaatttgagaaattgatcaaatgataaactttcaaggtttagcaagagagactcgtgaaggtcaacgtcgaattggacaacaaatggtaaagatatataatgaactttttaattgtgaacttttagttgaatatgctgaaagaataaaaaataaaaaatcttatggaaatcctgctgttgcgtttgctttattagctatgcatttaaaaatagatttaaaaactgctttatatacgcatctttactctacagttgctgcattaacgcaaaactgtgtacgtgcaattccattaggacaagttaagggacaaaaaataatttatcaacttaaacatgtttattttgatgatattgttaataaagtctttacattggattttaaaacagatttttgcaaaaatataccaggccttgaaattgcacaaatggaacacgaagacacacctgttcgattattcatgtcataa

SEQ ID NO: 40665 - DNA, 1797 bp, Ureaplasma urealyticum
atgtttaaaatttcaagaaaaaattattcagatttatacggtattacaactggtgatagcgttagattaggagatacaaatctttgagttaaagttgaaaaagacttaactacttatggtgaagaatctgtttttggtggtggaaaaaccctacgtgaaggtatgggaatgaattctactatgaagttagatgataaattaggtaatgctgaagtaatggatttagttattacaaatgcactaattgttgattatacaggtatttataaagcagatattggtattaaaaatggaaaaattgctgcgattggtaaatctggaaatccacatttaacagataatgttgatatgattgtgggtatctcaactgaaatttcagctggtgagggtaaaatttatacagctggtggtttagatactcacgttcactgactagaaccagaaatagttcctgttgcattagatggtggtattacaactgttattgctggtggtacaggtatgaatgatggtacaaaagccacaactgtttcacctggtaaattttgagttaaatcagctttacaagcagctgatggattatcaattaatgccggttttttagctaaaggtcaaggtatggaagatccaatttttgagcaaattgctgctggagcttgtggacttaaaatccatgaagactgaggggcaacaggaaatgcgattgatttagcattaacagttgctgataaaactgatgtagctgttgctattcatacagatacattaaatgaagctggatttgtagaacatacaattgcagctatgaaagggcgaacaattcatgcttatcatacagaaggtgctggtggagggcatgctccagatattctagaaactgttaaatatgcccatattttaccagcttctacaaacccaacaattccttatacagtaaatacaattgctgaacatttagatatgttaatggtatgtcaccacttaaatcctaaggttccagaagatgttgcttttgctgattcacgtattcgtagccaaacaattgcagctgaagacttattgcacgatatgggtgcaatttcaattatgtcatcagatacattagctatgggacgtattggcgaagttgcaactcgtacatgacaaatggctcacaaaatgaaagcacaatttggatcattaaaaggtgatagtgaattcagtgataacaatcgtgtaaaacgttatatttctaaatatacaattaacccagctattgcacatggtgttgattcttatattggttcactagaagttggtaaattagctgatattgttgcttgagaacctaaattctttggtgcaaaaccttattatgttgtaaaaatgggtgtaatcgctcgttgtgtagcaggtgatccaaatgcttcaattccaacatgcgaacctgtaattatgcgtgaccaatttggaacttatggacgtttgttaactaatacatcagtaagttttgtttcaaaaattgggttagaaaatggcattaaagaggaatataaattagaaaaagaattattaccagttaaaaattgccgttcagtaaataaaaagagtatgaaatgaaactctgcgactccaaatttagaagttgatccgcaaacttttgatgctgctgttgattttaatgatttagaaaattgactagaacaatcagcttctgaattagctaaaaaattaaaaaagacttcaagtggcaaatatatacttgatgctgaacctttaacagaagcgccattagcacaaagatatttcttattttaa

SEQ ID NO: 40666 - DNA, 306 bp, Ureaplasma urealyticum
atgaatctatcattaagagaagtccaaaaattattgataacagttgctgctgacgttgcaagaagacgtttagctagaggtttaaaattaaactattcagaagctgttgctttaattactgatcatgtaatggaaggggcaagagatggtaagctagttgctgacctaatgcaatctgctcgtgaagtactacgtgttgatcaagttatggaaggtgtagatacaatggttagtataattcaagttgaagttactttccctgatggtactaaactagtttctgtacacgatccaatttacaaataa

SEQ ID NO: 40667 - DNA, 1164 bp, Ureaplasma urealyticum
atgagtttttttaaaaaaaagaatgatttacaaaaagaagaacacaaacacgttagtgttgtagatatgaatgaaattttaagctatgaagatagtgaagaatttaaaaacgatgaaattgattctaatgagccaatttttaaacttaataatgtttcattaggttacggaaaaaaaatgattattaaaaacctaacggcaacaattcatcgcaacgattttgttgttgtattagggcctaatggttctggtaaatccacattaatcaaaggattgtgtcgtatcaataatccttcaagtggttatataatgtatagagataaattgatatcaagaccattattaccatttctttgattagaaaaagcatgatcttctattgttaatatatttacaaaagatcgtaaagaagttattgaaacaattgattgacatattcaaaattataaaaaaattcatgcctataagtcaaaggaattagctttaaatttagcatatgtcccacaacttgctgtattcccagaagctacatcaatttatgattttgttaaaatgggtcgttttccaagttcaaatgctttgggaattaatacaaatacagaacgtgaaaaacaaattattgatgaagctttgaaaaatgttggtatttatgaattccgccacaaaaatcttgaagatttatcaggtggtcaaaaacaaaaagcattaattgctttagcacttgctcaagatactgaaacaattgttttagatgaacctactaaccacttagatataagaagtcaattagaaattattgaacttttacataaattacaccacgaaatgaaaaaaacaattgttttagttattcatgatattaataatggtttaaaatatgcacataaagtcatgattatgaaaaatggtgaaatggttcgttatggaaaattaaaagaaacaatcgatcatgaaattttattagatgtttttggtgttgaatcaattattgtgaaaaatgaatcgacatatccacaagtttctgtaacagattttagtttaccaaaagactataaaattaatgaaatcaaagaaaacgaaaaaactaattcaatttataatgatggtgatgaagtagaaattgaaaatgaattagaaaaagaagttgataaaacaaaaaaataa

SEQ ID NO: 40668 - DNA, 450 bp, Ureaplasma urealyticum
ttgataaatttaaatattataactagagataattactattatgagaagataggtaataataaacctaaaaaacttgaaaatctaccatttaatatacctaataattgaatttgagtaaaactaaataacatatccaatgtcataagtggatattcttttaagtcatcaaagtatactagttcaggtataagaataataagaatttctgattttgatagtaaagaagttgataataatgaacctattttttatgaatataatgaaaaatttaattcttacaaaattgaaaataacgatattattttagtcatgactggcggtacagttggaaaaaatataattataaaaaaagctaatgattattatttaaatcaaagagttgctagaatcagaacatttaatgtaaattataattatatttattatttaataaatactacttatatataa

SEQ ID NO: 40669 - DNA, 1419 bp, Ureaplasma urealyticum
atgagtaaaaaattagaaaagattacaacaagaaaagaaaattttgctgattgatatacaagtattgtaaataatgcaaaattaattcagtacactgatattaaaggaatgatggtttttcaaccaaatgcttgagcaatttgagaagcaattaaaaaccaaattgatgtcgaatttaaaaaacacggagtacgcaatcttgccatgccaactttaattcctttaagtgaatttcaaaaagaaaaagatcatattgaaggttttgctcctgaattatttatggttaatcaaattggtgataaaaaattagataattcttatgcaatacgtcctacgagtgaaattttattttgtaattattttaaaaatattgttaatagttataatgatttaccgattaaaaataatcaatggtgttcagtaatgcgtgctgaaaaaacaacacgtccatttcttcgaaatgctgagtttcattgacaagaattacatgctatttttgcaagtgaaaatgaggccgattcttttgctaaagtaattttagatgtgtatacagattttgttcaaaattatttgtgtatacctgttattaaaggattaaaaacaccatgagaacgttttgctggtgctcaaaaaacatatacaattgaagctatgatgcaagatggccaagcattacaatctgcaacaagtcattatttagggcagttttttgcaaaagcttatgatattaagtttcaaggtcaagataatcaaatgcattatgtacatcaaatgtctgctggattatcaacacgaattattggagcattaattatggttcatgctgatgatcagggtttgattttgccccctgatattgcttttaatcaaattgctattttaacgattttttctaataaaaatccccaattattaaaaattagtcaacagatttgtgaacaattaaataattatcgtttgtttgaagatcatagtgataaaggaattggttataaattagcacaacaagaaattgagggaacgcctatttgtatattagttggtgctaaagaattagttaatcaacaagttgttattgtgcgtcgtgatactcatgaaaaaattaatgttgatttaactgatttgaaactaatcatcccaaaattattagcagatattaaaagaaatatttatgaaaaggcaaaaaaagatttagaggattcgattgtttttgtaaataatatcgaggaattaaaacaagttattgcacaaaataaaatggctaaggcattctttgatggtacaaaagaagatgatgaacaaattaaattattaactaatgcttcaacacgttgtatttttgatgaaactcaaaacgggcagtgtttttatacaaataaaaaaacaaacaaattgactttatttgcacgtgcttattag

SEQ ID NO: 40670 - DNA, 468 bp, Ureaplasma urealyticum
atggcatcttataatatcaatgacaatcttttattacgtaagattatcatgcaacactatgaacaccctaaaaataaagtttgttttgtacaagatgaaataaattatttgtcatatcataatacaacagaaggatgtggtgatgacattacagtttatgttaaattaaatcatcaaaaaataattgatgtcgtttttttaggtacaggctgtgcaatttccatatcatccactgatattatttgtgaacttgtaaaaaatctagatcttaataatgcgttattattaattaataattatttaaatatgattgaagggctagattacaataaagatattatgcaagaattaattgctttttataatgtaaaaaaacaaatgaatcgtattcgttgtgcccgtattggcgcaagtgctttaaaaatgtgtttaaagcaatttacagataaacacaaaacaattgtttaa

SEQ ID NO: 40671 - DNA, 2319 bp, Ureaplasma urealyticum
atgattttaagtttaaatttattacataagattagtccaaaactaaaaaagattcctttaaatgaattatgcgcagctttaatggatttaggttgtgaagttgaaacaattaatagcattaaaccatctactaatttagtttttgctaaagtattagaaaaaactagacatcctaatgctaatcatttaaatttagttaaagttaaagcaaaccaaaaagtttatgagatcgtttgtggtgcaaataattttagtgttcataattgagttgttttagcaaaattaaatgccgaactagcaaatggtttaaaaattacgccacgtgaattaagaggatatgtttcaaatggaatgttatgtgcttacagtgaaattaatccacaagctactagttttttaacatcaacagatttagatggaattttagttttagatgacaattatgaccattataaaaccccaaatcaaatttttaatttagatgatgttattttagatttatcaattccatcaaatcggaatgatttaaatggttatttttgaatagctaaggaattatgtgcttattttgatttcgaatatgttgttgatgcaacgattaatcatcgcccacataaagaaattattgacgtgcggattttatctgatgatgttaattcgtatggaataatcgaggttaaaaatattcaaaattatattttaaaatggaatactaaaagtatattgattaataatcaaattaaagttcttaataatttcgctgataatatgaattttttaacattattaactgctaatccacttcatgcatttgatgcacgaaaaattagtggtcaaattgttgttaaaaatgctgaagaagatgcaattttattgggtttagatcaaaaagaatatttaattaaaaaaggggatctaattatcgttgatgatcaaaaaattttagcacttgctggaattattggttctaatgattctaaaattgatgcaacaagcacaactgcttatattgaatgtgcaaattttaatcctatgttgattgcaaatacagcgcgtcgtttaaaaatcaataccgcagcggctatgcgttttagcaaacccttaactaattatgttacaaaagtaacattaaaaaaattgttagctaattttaaatcagatgcaaaattaatttattattttaaacattcagttcataatgtcattaaaaataaaattaatcaagtaagtgattttgtgggtgcagaaattgatttagacactgctcaaacatttttaaaacgcttaggttataaaattaataagtctaatttaattactccaagtcatcgatatgatgtattaaatgagtttgatgtttatgaagatattatgaaaaaaattagtattcaagaaatcaaaccacaaccaatcagttttgatattttaaattttgaaaataatctagcttatgattttgaaaaaaaagttagtgattttttagttgatcaaggtttgtttgagtgtaaaacttataatttaaaaaatcaaacacaagcacatgagtttaatttttttaattttaaacaagcttatgaaattaataatccaacttcaaatatgcgttcgcatttaaaattaaataaccttaactccttacttgaagtattagaatataaccaaaaccaaaaaaatgaattagaaaatatctttgagatttcaaagattaatccagttgattcaagtcaacaaacagttttatcaatcattttatgtaaaccattaattaattcaaaaattaatgattcattaatagttaataattttgtgacaacaaaagctttactacatgctttattaacaaaattaaatattgattatgcatatgataaaaatcatgttgttaatgaattatatgataataaccaattagctttaattaatgcaaacaaacaagtatttggttttattggtcaactaaaaaatcaagtcaaaaaaacatatggtttaagtaatgatatttttattattaatttaaatttaactagttatttaaatcaaaaacaagtaatcactaaagttattaagccaagtatgtatcatgatgtcatacgtgatattagtgttaaattagcttctgacgttgacttaaataatataattgctaatattaaaaaaattaaaaatattagaaaagttgaaatcagcgatctttatataaaagatgatggaattatttatacttttaaatattatattaatgatcatttatctaatttaagtagtgaacaaattataatcattgaacaagaagtaaataattatttgaaacaattttaa

SEQ ID NO: 40672 - DNA, 1002 bp, Ureaplasma urealyticum
atggatgttattaatctaattaaaaatttaaaacaaattttacgaacagcaaataatgaacgtcatttgattgaattaaaaaatatttttgttaaacaacatttattaccactatatgatgaattaaaaaaaagcgctaataaaaaagaaatgggtttattaattaataatttcaaacaacaaattgaatttgttactgatcaaattttaaaagaattaaatgataaagatgatcaagttgatttaaaaaaatgaacaaataagactttgtttgctccttttattaataatgggcatcatcatattctcaatagtattattgatgatattgcatctttttttaaaaaattaaattttgaaattgtaagtggttcagaagttgtttcacctatttataattttgatcatttaaatattgatgaaaatcatccagcaagagcaagtgctgattctttttttattaattcaattaaaatgttacgtacgcattgcacaactacaaccgcacaatttttagaaaataacgtaaacaaggacattagaattatgtcttttggtaatgtttatcgaaaagatgatgatgatgcaacacatagccaccaattcaatcaagttgattttgtatgagttaaagaaggtttaactgttgctaatttaaagtgattaattgacagtttgattaaatatttatttggtcaaaatttaaaaacacgttatcgtttaagtttttttccgtttactgagccttcgtttgaagttgatgttcaatgttttaaatgcgatttaaaagggtgtgcagtttgcaaaaaaagtacatgaattgaaattatgggaactggaatgctacatgaaaatgttctaaaagctgcgaatattaacgatattagaacagggatggcttttggtgtgggtattgatcgaattgcaatgttaaaatatgaaattgatgatattcgttatttatattcaaataattttaaatttaatgcccaaattaaataa

SEQ ID NO: 40673 - DNA, 768 bp, Ureaplasma urealyticum
atgaataatgatttgattaaatatctacaatggttgaaaaatgattttataaaatttttaaatgacgcacaaacgaataatgttattttgggcatttcaggtggtattgatagcactttaacattagctattttaaatgatttaaaaaaagagtatgatcttaatatttatgcttattttttagatattcataattcgagtttagattatgaatgtattaatgaattaaaaaatatttatcctaacattgaagttatcaatcttgttgatatctatgatagctattgtaaaatgattaataaaaaaacaaatgataaatatgttctttataatttaaagcctaaaattcgtacaaattatttatatgcaatggcgaatgcatacaagggtgttgttgtgagtaatttaaactatgatgagtacattttaggtttttttactaaatatggcgatagtgccgctgattattatatgttaattggtttactaaaaaaacatatttatgaattaggtgcttattatcatttaccaaataaaattttaaaccgtgctcctactccagcaaatgaagatgatgaacacaaaactgatgagagtttttttggttttacatataacgatcttgatcaatttttactttatcgtaaaattaatcctaaaattgttagcatgattaaaaaacgttatgagactaatgctcataaacattttgtttttgataaaaagaaattatttttaaattataaattaggaaataaacatgaataa

SEQ ID NO: 40674 - DNA, 1308 bp, Ureaplasma urealyticum
atggcatttattgataaatgtaaaatcgtattgattgcaggtaatggtggggatggaattgtttcatgacgtcgtgaaactcatgttccagaaggtggaccagctggtggaaatggtggaaatggtgggtcaatctgatttgttggtaatcacaatgaaacttcattagaatttttaaaatataaaaaaattattcgtgcaaaacatggtgaaaaaggcgatattaaaaatcaacatggtgcgaatgcggaagatgtttttattaatgtgccactaggaacagttgtttataatcctatcactaatgaaattttggcagatattaatattgatcaacaaaaatatttagttgcccaaggtggtttaggcggtcatggaaatacacattttaaatcgccttttaataaagcaccaaatttatatgaattaggagaattaggtgaaaatgttgaagttttattagaattaaaaactattgctgatattggaattataggattaccaaatgcaggaaaatcaacattaatttctacatttacaaatgctaaaccaaaaacggcaaattacatgtttacaactttaaatcccgttttaggtacaatttatcgtgatcaaaatcgtatcatttttgcagatattcctggtttaattgaaggagcacatacaggagttggcttggggcatgattttttaaaacatatcgaacgttgttttttattaattcatttaatttctttagatcctaatgataatcctgatattattaatgcttatgaaacgattgttaatgaattaaaacaatataaacaaaatttagttaacaaaccaattgtattggttgctaataaaatagatcaaattggagcattagaaaatttgcagattctaaaagaatatttaaaaaataatcaagaaattaaaattatatctgcgttaacaaatttacatgtagataatatgttagatgatgttattaaaatttactttgcacaaaaaaagatttatgagcaacgacttaaagaacaattaccagttgatcaaattttaaaatgaacgagtgatattcctaaaagtaaagaattagataaaactattgaaattataaaagttgatgatcatatttttgaagtctttggtgaatatttaaaatattgagcacatcgcattcccttaaaaacgcaagataatttaattcgttttaatcaaaaacttcaaagcatcaattttaaccagcaattactacaagctggagcagtagcgggggatagtattaaaatatatgatattacattagaatttgaagagtaa

SEQ ID NO: 40675 - DNA, 1929 bp, Ureaplasma urealyticum
atggcaaataaatacgatgggaatgctattaaaatcttagaagggttggaagctgttcgtaagcgtcctggaatgtatattggctctacaagtagcactggattacatcatttaatttgagaaattgtagataattcaattgatgaagttatgaatgctaacgcaaaaaacattaatgttattttgcatgaagataattcaattagtgttttagatgatgggcgtggtataccagttgacattaattctcaaacaaaaatttctactgttgaaactgttctaacagttttgcatgctggaggtaagtttgatgaaagtgcatacaaaactgctggtggtttacatggtgttggttcatcagtagttaatgctttaagttcttgattaatttgtgaagtttatcgtgatcaaaaaatttaccaagcgaaatttattaatggaggtcatattaatcaatctttaaaagtaattggaacaactaaaaaaacaggaacattaattcatttcttacccgatcctctaatttttaaaaatttagtttttaatcctaacataataaaagagcgtctacatgaatcaacttttttaataaaagatttaaaaattatttttgaagataaaattaataaaaaaaagtacgaatttattaataatcaaggtttaattgattttattaaatttattaatgaagctaaaaagaccttttctgatgttatttattttagaagtaatattaacaaaatagatgttgaaattgcttttcaatatagtgatcaaaataatgaaattatggtttcatttgccaattctgtgaaaactagtgaaggtggtgtacacgaaaatgcttttaaaaacgctttaacaagtgttgttaataattatgcaagaaaacataatttacttaaagaaaaagacaaaaatttagaaggtgatgatatacgtgagggtttatcaagtgtaatttcacttcgaatccccgaaagcttaattagctatgagggtcaaactaaaaacaaattattcacaccagaagcaaatgaagcagtaaaaaaaacaattgaagataattttagtttttgattagaagaaaataaaacacaagctttagatttagttaatcgagcaattcttgcacgtgatgctaaattggctgcaaagcgtgctcgtgaagaaactaaaaaagttaaaaaaattaaagaagagcgaggaatgggcggaaaattaacgccagcacaaagtaaagatccagttttaaatgaattatttttggttgaaggtgattcagctggtggatcagctaaactaggacgaaataaaaaataccaggctattttgcccttaagaggtaaggttcttaatgttttaaaagctcgtttagttgatgttttaaaaaatgaagaaatagcatcaatctttacttgtttaggaacaggaattggtgcagaatttgatttaaaaaaattaaaatatcataaaattattattatgaccgatgcagataccgatggtagtcacatccaagttttattattaactttattttatcgttttatgcgacctttaattgaaaatggtaatatttacatagctttacctccgctttataaattaacaaataaaaataacaaaaaattcttttatgcttgggatgatgttgaattagatcaactaaaaaaagagcaaaaaaattatgaaatccaacgttataaaggtcttggcgaaatgaacgctgatcaattatttgaaacaacaatggatccaaacaatcgtttattattaaaaattaatattaatgacattttacaagctgaacggcaaatcaatactttaatgggtaatgacgtaagtattcgaaagcagtgaattgataataatattgattttagtgtcattgacgaattacaaatcaataatgaggagtctaaataa

SEQ ID NO: 40676 - DNA, 2553 bp, Ureaplasma urealyticum
atgagtgtaaatcatcaaaaaattattaatacacctttagacaacattgttggtgaaagttatgcaaaatatgcaaaatacattattcaagatcgtgctttacctgatattcgtgatggtttaaaacctgttcaacgacgaattttatacgcaatgagtgaattaggaatcttttatgataaaccttataaaaaatctgcacgtacagtaggagaagtaattggtaaatatcatccacatggagattcatcaatttatgaagcaatggtgagaatgagtcaagattgaaaaaataatctatgtttattagatatgcatggtaataaaggttcaattgatggtgataatgctgctgcaatgcgttatacagaagctcgattatcaaaaattgctagtgtaatgttagccaacttaaaaaaagatgttgttaaatttagtccaaactttgatgatagtgaaaaagagccatcaattttaccatctctttttcctaatttgttaatcaatggagcaacaggaattgcttctggttatgcaacaaatattcctcctcataaccctaatgaagtttttgatgctttaatttatcgtattgatcatccagattgtagtgtagaaaaactaattgaaatctgtcctgcgccagattttcccacaggtggggaaatccacgatttaaatggatgtgctaatgctcacaaaactggtgaaggtaaatttataattcgtgcttgcattgattttaaaatcaatgataataagattaatcaaattattattagttcaatcccttatgaaacaaacaaggctttaatcattaaagaaattgaagatattatttataataaagaagttgctggattaatcgaagttcgtgatgaatctgatgctaagggaattagtataattattgatactaaaaaagatattaatttagaaaatgttaaaaactatttatataaaaaaaccaacttggaaatcagctataatacaaaatttattgcaattgttcaccgaactcctacacttgtaaatctatctacatatttagatgctcaaattaatcatagtttagatgtaattaataaagtcgatttatatgatctaaacaaaattttgttacgtattgaaattgttgaaggcttaattaaatgcgttgatttaattgatgaaattattaaaattattcgtgctagtgaatcgcgtcaagatgcaaaaaatactttaattcaagtttttaattttacaaataatcaagctgaagcgattattatgatgcgtttacataatttgacacgtactgatatatttgatttaaaaaatgaatgacaaacgctacaagacgaagctaaaacgctacaagaacgaataaattcacttcaagttcgcaaaaattatttaaaacaaaaaatgattgaatttaaaaaaacttttggttttgaacgcaaaacaaaattatttgatgaattagtaaaagttgaaataaacgaagatcaaatgatcgaaaaacaaaatttgaatttagtaataagtcgtgatggatacattaaaactgtttctaaaaagtcatttgagtcatctaaatatgatgaattaggattaaaaactaatgatattcttttttatcataatatcattaattctcatgataaaatcctaatcattacatcaaaagctaaattaattaatttagttgctcataaaatcacttctatgcggtgaaaagatgttggtgaacacttaaataattatgtgaaatttgatgctaatgaaaaagttatagctgtttatatatggaacgaacaatttaaaattgatgaatatcaattagttttggcttctagattaaatctaattaaaagaattgaattaagcgagttggatataaataaaaatagtaaacaaattagcattatgaaattaaatgataatgataatttaatcagtgctaatttaatcaaaaaaggtcataatcaatttattattgcaatttctaaattaggattagccctgctatttttagttcatgaaattaattgcttaaatcgtttagctaaaggaattaaaattatgaaattaaaaccaaatgatgaggttagtgctattttaattactcctaataatggttataatgttcaactttttttagaacggggaagtaagtgttttaatattagtgaattaaaattatcaaaacgtgcggccacaccaacaaatttatatccaataacaaaaaaagtgcaaaatgttttagcagcttttttagttgctcatgaaaatgttttttatcttttagatcaacaacaaaaaataaatccatattacttatcaaaccccaaaccaacaaaactagatactaaaattagtatctatgaaaacgatcaaatgatcactgatgtagttaaagattgctttttaagtgatgaagcaattagtgattttaaaaaaattaatatgtacgcaaatgaatttgataatgaaatgctaaaaattaataaaaatcacgatgattcacaattagaattaattgatgaagaggaagaaaaaaaataa

SEQ ID NO: 40677 - DNA, 1086 bp, Ureaplasma urealyticum
atgataacaaataaaaaatgtaaaggctgtggagcttttttgaatgatcaaatcaatacaattggatataccccaaaaataaatgaaacaaaaaccaatttatgccaacgttgttttaaattaatacactataataaacttgaaaaagtaagtactaatttaaatcaaagtattaaagagacaattaacactttaaattttagtaatttacagatttttgctgtattagatattttagatttagaacacacaattattgatgaactaaaagaatatcaaaataaaattatttttttagttaataaaattgatttattacctcagcgctacaatagtgaattagttaatgaaaatgttgttaaaacacttattaatcatggatttattgatcctaaaattatctatgtttccacacattctaataccagtttaaaaaaagttatggattatattaaaaatgcaactaataaaaaacaaaaatccattttttttggaaaatcaaatgttggtaaatcaagtttaatcaatgctttattagcgctaaataaaattaaaactaaacttacaattagtagttatactaatacaacaattaatttaaataaaattaatatacaagaacatcaaatacttgatgctcccggagtttgttttgatgaaaacattttaaattatgtacgtgatgaagataataaatcaatcatgatttcttatggtgctaaagcaattaattaccaaattaatccccaacaagctcttatgatttctggattggttggaattcagtatttaaagggtcaaaaaacaacttttacattatatgtttcatcccaattagatattcatcgttgtaaattagaaaattttataatgaattttaataaacgatatttattagcgaagttcaattatctaaatcaagatcttgaatttgttgaccatctaataactttaaataaggatcaaaaaaccaatatttgtattgcaggcctaggtttgttagttattaatgctcatgctgaacaaatatgtatccgtttaccaaaaagtgttggtctaaaagtagcaaaatatgcgattatttaa

SEQ ID NO: 40678 - DNA, 357 bp, Ureaplasma urealyticum
atgattggtttaattgtggcattaaatagtgaaattaaaaccttttttaaacaaattaaaaagaaggtttatcaaattaataatattgatttttacttgtgcactcatcaaaatatagaatttgttttagtttttacggatgtaggaaaaactaatgcgagttttattactgcattattaattaataattttaaacctaaagtgattttaaacgttggtagttgtggtgcactaaatgatcagttacaggttttagatattgccattattgatcaatgccaatacttagatgttaacgttagcgcttttggttatttaaaaaatcaaataccgcgtttagataattttttattttag

SEQ ID NO: 40679 - DNA, 3942 bp, Ureaplasma urealyticum
atgaaagtaaataaaataattatgaaaaaaagagttaataaaatatataaacacaatatgtttattttgctagctactttaaatttagtgtgagcaggcgttatcacaggaattgttttaagactaaaaagtaaagattactcaaagcatactatcttaaaaaaatattattcatttgataaaaacggcaatttaattcttaaaggttatttaaaaccacatgataatactaattatgtttttgggatttttagcgatgaaagcaatcaagaacataaaattcaagcacttgttaatgataaaaaaggatttgaatttaacactaaatcattaccactaaaccatagttacaaacttaaaaaagttacaagtattaatgactataaccatgttttattaacaaatgatgatttagttagtcagcaaaaaatttgttttagtaagccagttgatgcaaaagttaactttattaataataaaaaagtttatcaagttaaactaaacacgttattaaaaaacactttaattcaattaacactaaaagacttagagcataacgtatataaaattacagccaaatcaaatgatatgggagaagttagttttgatgtttcacaattaaaaaataataatttatatgaggtaattgctttacaaacacaagaccaaactaaaatcgttaatgttaatgagattgaatacaacaataagatcataaataatttaaatattgatgaattaaatacaccataccaatatagcaaaaatggtcatcttaacttaattgctaagataccattacgctatgctaatgaacaagtctatggtgtttttgaagaccaaaataaccaaaaacatttaattcctgccgtaaataaaaatgatggaacaataatgtttgatactcaagttttaactaaaaatcccaataaaaaatatcatttacaaaaagttgttttagcaaaaaatcaaaatcaaattttaatacataattttgatttagtaagtaatcaaaaacaagatatcttcttaaaagaatataaagttattagtattagtgctctagaaaatgatgctgataaaactaaaagagaaatcaatttaaaactatctaacataaaaaatgactgagttaataagcaaattaaagttatttattcaagttcagatggttcagatgttcaaactcaacctttagttttagaaaaaaatcaaacaaactatgtattaaaactaaataatttaaaagcaaatcgtttatatacactaaaggcggttgaattaataaataacaatggtaaaactaatttaccattagatactaacttaactaatagttttatggttgaaagaactagtgctgtattagcaacaagtattagtgaaataagtaatcgtttgggaactgctttaacgaatgcacaagttaaaatcactttaaaagatgtggataatgttttattagctaatcaaaaagcgattattaactatggtaataatcaaaagagtgaagcaactgttattgttaacaatggtgttaagtatctaatagcaaccttaactaaattaacattaaatacgcctacaataattaaatccattacatttgaacaaaaaccaacatgtgctattgaaaatattgggttagataaaacaaataacattatttatcaaaatacacatgaagcagcaattcctttagtaattaataataattttgaaatcaatgggccattagcatcaagtcatgaaagtttaaaaagtattaatgcatctgatgctaaaaaggtaaatgcaattaatttaacccttgactttaataccaatgaacatatttataaaaatttattttttaaactaaaatatgtccctattgacgatcaaggtaatgaaaatatttatgacgcatcagaagcaatttatagtgatgttttaagtgcaaataatataattgctaataaaatccaatttagtttaggtaatttacaaactaatcgtaaatataaattaaaaacaatttattatttaacatcaaaaacaacacctttagatgatcataacgttgtaatgatcaaaccaaatgttaaatccgaaattattgttgcccctaatgatagtacgattgtaaaatatggtaattgaaatcaagattcaattactaatggatcaaaggctatttttaaaattaattgtaatgatggtgatattttaagtgaggatttaagtgctacacttgtttatgaatctaatgatcctcatgatttacaatcatacactacaaaactaaaaaaagttaacaatgattgggtgattgattttaatttaaataatttaaaaccacaaaccacttaccatttaaaatcaataacaatagcaaaaccaaataaagcatatactaatttaaaaattcaatcacttccacaagtggatattaaaacgcaattacctaatttaatcttgcatgatttaaaagccacaagtgcggttttaaaatgggattctactaacaatggtaaaaacaatcaccaaacaattcaagcaactttttctcatgtaagtgctaattatgataatcttaatgttaaattggtttatgaatataattatcggggtgatatcaaagcagttgaatctgatttaattactcttaaaaaagaccaaaatgtttatcaaataaatttaccaatcagcgttcctaaccgaaaatatacttttaagaaagttttaattcaagaacgcaataatttaaacaactatgtggatttaaataaaaagataaacttaacagattcatttgtagttagccctggaaaaacaacatttgaatgaacacaaccaactagtgatcaaattagtcaaacaaccctaaaagcattaaaaattaaaattctttcagaagataaaacgcttgataataatgttaaggttattgtgtgatttaaatcccatacagattcaaatgatgcacttaaatgaacacggggaacttgggaggttaatagtgatggatcagaagcgattattaatcaattaaataacttaagtggatttaaagcaggaacgcaatactatctttataaaattgcatttgttgataatctacaatatggaaatacgcaagcgaatgataataaagtaatttatgaatgaaaagccaatgatactaaagaatatgaatttacaatgaaaaatgcaccaacaattttacaatcaataaaatttgaaaattgtgatgctaatggtgtaattaataatgaagcggaaggaattgcagaattttcaatgacaacaaacaaggttaatgatgattttgctaaccgaaaagttaaattcatatatcatgacaataacaatgttgcttatgaaactgatggttttccattaagcagatcagaaacaagtcttcatttttctttatcaaacatccctaacaaccgcgactatacttttgaccatgctgaaattgaaactagtcctaatagtaataaatatgaaatttgacattctcaaaacaagataatatctaagttcaaacttaaaccagctcaaacttctgtaaaatatattgataaacaagaaagaaataataataatgtagattttgagcttcatttaggttcaagagactgtgcatttgaaaataaccaaaaatatcgtgttacactagtgtcagtagacgcactccaaaccgaaatttctaaggaatttttactttctgatgttaaattagattatcaagatggtaatattggaatattaaaatgccattttgataacttaataccaaacaccggatatacattaaaagaaattaaatttcttgctaacccaaatgaacaacaaagtgcaaaaccacataaggtaattaaaccttttaatgatgataacaatgttattatcgataaaaattattcttgaaaatgatatatttatccttcataa

SEQ ID NO: 40680 - DNA, 1851 bp, Ureaplasma urealyticum
atgaaacacaaaaaatacaaatcaatttgattgaaactaagtatgattagtgctatacctttgttagcaacaataattacaacttgtgcaaaagttgatacaaaacaaaaagctaaagaagaattacaatcaagtttaaataaagctgttttattaaaagaaatagttgatcaatcatcttatgaagattttaaaaagatatataatcaaactcttaaatcaaatttagaaaacattaataaattatcagagcaaaaattaaaacaagaacaacaaacaattaaaaatttaattacacaagttagtgttttaaatgaattagattcaatcaaaaacatgagtgatttaatagatgttgttgaattagaaaacactaaaaaacaattacaagattttttaaatcaatatgaaaaattacttaatcaagcaagtgttgatactacaataattgataaactaaaatctgatgctcatcaaaaaagattagacaccaaagctttaattcaaaaaacaattttagatttagctaataaaattaaaagcctaattaaaacatctggattaaataaaaacattgttgagcttgaaaatgatattcaaaaattagttaataatgacacaaaagctaattttaaaaaactatatgaagattttaaattaatttacactaaattaaatgatattaatgacttaattaacaaagaactaaaagctttaccttttattaaaaaattagatgatatagttaatgttattaatactatttatgaacaaaatcatcattttctatgatttgatcaaactaaattaacaaatttaagacaaattttaataaagaatataaatcatgtattaaatgttaaaaagacattagagatcaaagaaattaaaactttaactaatcaacttttggttgaccttcaaaattacttagaaggtttaaaaatgattgcgttagaaagtgaaaatagtgttaacaaattaatcagtattattgaatcattacaaccagatgattataatccttactatagtattgaaaaacaagaaaataagcaaaaagatgaaaacaattctcaagcaacatataatggtttagaacaccaaattaaaagtttaaaatcaatcattaacttatttgattttaacattactaatttatcaattgatgcaatctataatcttaatgatgaattaattaaaaaatttcaaaaagctaattcacaaattaatgatgttgtgattaaaattaaacaaaccattttatcaaattttaaacaaatttatttatttaagtacttcattaaacatttaaaagagtttaatattgaattaaataatgaaaacgatccaataaaaaaagctaatcgaattcaaaccattcaagaagtcttaaaaagttatgaaaaggatttatttttaaatactaaaattaatttaaaacttgctccaaacgaagtattaacagtaaataatcttgaaaaaattgatttaacatatgcttctgattcgctgcaaaaaccacaagaattaatcgcttatttagaattaaataataatcaagaaagagaatttagcaaagaacttgaaaatcttagtgttagagtttttactatcattgataaaaaactttatattcccaaagctaaagaattaattgatgaaagcaaaaaaattattcaaacaaaaaatgaacatacaaataataaagcaaaattacaacgattagaaaaattcactagttttgttgaacaaggaataagtaatgaaaatgtttcttcttatactcttaatctttatattcaaagattaacaaaactgattgaagaaattaaaaaaccacagcattaa

SEQ ID NO: 40681 - DNA, 14067 bp, Ureaplasma urealyticum
atgaataataaaaaaagtaaaaaaatccaaacaataaaaaacgataataataaaaaaagtcgtaagcaacgtcttttcttattgcttgcaacgctaaatttagcgtgagcaggagcaattattgggattgttttacattcaaaaaacaataatgaattaagtaataatgatttttatagttttaatgatgatggtgacttaatcattaaaggtcaattaccaaaaacttatattaacaaagatgtttatggtgtttttgttgatgaaaacaatcaagaatataaaataaaaactcaaattgattcttatgcaaaatttgaatttgatactaagtatttaccaaaaacaggtaaatataagctaaatcgaattattgatttaaataataacattgttcgtgaaaatgagaagctaaaacctgaacagaaaattgaagttttaaaaccagttccaactaatgtatatgaggatcaaaaaaacgaaaagcacattcaattaaaggtaaataaaatacttgctaataaaattttagtcgcaaaatttgtaaatcaaaataatgaagtttatagtattgaagcacatgttggattagatcaaaaaattgatattgatacaagtagtttaaaagatggcaatgtttattatttaaaagatctaattttaaaagattcaaatccattaacaaaagttgtaaatgttaatgatattgatgaacagtttaaaaaaattgataaaacacatacttatgataatgaaggtaatcttgttttaaaagttgatttaacaaataaaactaaaaaccaagccttgccaacagcagtttttaaagatgaaaataataaagaatatttaataccagcgttgagtgtaaaaaataatgttgggtattttaatactaaaaaactacctttaaatcacaaatatgaattaaaccgaattgttaacaataatgaattaaatgatgttttagtgccaaataatgaattaatgcttgaacataaagttagtgtaaataaaccaacaaaagctaaagttaattttattgataacaaaaaagtatatgaagttgatttaggtgttcaattaaaaaacactcctcttgaacttaccttagaagatctaaatcatcaaacatataaaattaatgcaaaaacagatgaaaaaggacgagctgtttttgatatttcatctttaggtgataataatttatatgaagttattggtattaaaaaaactaatgaagttgatgttgttaatcttaaacagattccataccataatcgatcaattaataatttaaattcaaacgcattaaataccccatatcaatatacaaaaaatggtgatattaatttaattgctaaagtagcgccatattatgttaaccaacaagtatatggaatttttaaagatcaaaataatcaagaacaccaaattttagcaaaagttaaaaaagatggaaccatagcatttgatacaggtgcattaaataataacagtaattattcactagacaaaattgtttcagtttcaaacccacaaaatgttttggtttcaaattttgatttaacttcaaaacaaaaacaattaattaaaaagccagctgctaatgcaagtgttgattcaactaaaaaaacccaaattttagaaaatttaaataatgatttaattaatcagaaattagtagcaacttttgttgataataatgataaagaatataaagtagttgctaatgtggatcaaaataataaaattatttttgatagtaatgatttaccaaaaggatatatttatcatttagctaaagttgaaaataacgatttaaataaagtcattaatcttaatgattttgaactaaaagataaaataattgataaacgagatttgaatttattagattcacatccagattttacgtacgataatgatggaaatttagaaattcacactcaattagcaaatgatttaaatgatgatttaaaacaaaaagctttaaataatgcaaatgtcaaaggaattgttgttgatcaagatggtatagaacatgagatagatgtaagtattgatgctaatggcaaggttattattccaacaaaaaatttagcaaataatgacccaactaaacctaatatatacacacttaaaaaagtcgttttaaaacaaaataatcaaccaaatattgatctaattagtgaagagcaattaagtggtgataatcatatttcatttaaaaaaccaacaataactgctaaaactaaagaaaatgatgattatgaaattagtttttcaaatcctagtttagcaaataaaaaaattaaattaacatttaaaaccgatgataataatactaatacaaaaacggttgaagctagtattggtttagatggaaaagctatttttaaaacaagtgatgatgcaatttttgcaccagatcataaatatacactaacaaaaattgaagctgataataaaaaagttgctaatattgatgaaatttcaccattagatcgaatagttaataaacaaaaaaatggtaatgttaatgctgataataagcatgagtttaaaataccagatcaaaaaaataaagatttaactgctgtttataaagataaaaataacaatgaaattcatgttccaatcaaaactgatgataagggaaaagttattgttaatccaaacaataatttatttgatcctaacaaaatctatgattttgataagattgtagatttaaatgaatatccaaacaaaacaatattagatagaaatagtattaacaaagatgttagtgcaattaatgatggtgtcgatcaagctcgtaagcttgttttaaaagcaccagcagtttctaacgtaacagtaaatgctattaatttccaagtaaacttatttgatttaaataaactatcttataatcgtcaatttgcactaacaattgctaaagttaatgatttaaatgatacacaaaaatacattgcaacttatgatccaaaaactaacaactataaactaaattttgattttacacacttagatgcaaacacaaaatataaagttgttgatgttgaattactagaattaaacaacaaagaaaaaccaataaaattaattaaagatgatgttttaaattttgaattcacaacaagctcagcaactactattaatccaccaatttgaactaaatttgatgtggttgttaaaactaataatgatacaactatcacctttgaaattgatgataaagataatattttaaaaaatgatcaaaaaatctatgcacagttagctttaatggatgatgatttattagatacagatgttattaaccctttagttaattttagtaaaactaataaaatcgcttcaattaatggtcttgatttaaaaggaaatagtaaatatagtattaaaaacttatattatttaaatgaccaaaaccaaaaggtgtatttatttaaaaatgatgttacaaaatatgaacaacattttattacaaaccctcataagatcaatttatcatttaataaaagcgctgtagaacaagatatttttgcagaccatgctaatttatttattgattataaagattatgatcaaaaattacgaattaatgaagatgttaaaatttattatcaaaatattgataacactaaaaacgaactacaaattggatatggaaaagttgttgcaaataataaaattaaattcaatttggttggtttaaaagaaaaaacaacatatgttattaaaaaacttgaagctttaaataagagtgcaagcagtattgttaatagtgaatttgatttactagatccaaatactaattttagtacatctaataaaaacacaacactagtgggtctaaattcaattgataattgaaataatgatcaaactcctataataaatgccaaaattaatataggtgatgattttcaagataatcaacaagttaaattaatttatgtatcaaatgataacaaagagattaaatcaaaagcagttactttaatcaaaggacaaagaaattatcaattcgaattttcaaatttaattaagaatcgtttatatactttttctaaaattgtttatgaaactaataatcaaacattacataagttagacacgttaactcatcaatttagcattaatccaagtaataatgcagtttctttaaaaaataacactaatattgaaatcacaaaacgtatattagttaataatgaccaatcattaatttcagcaaagattgaagttgatgacattgataatgttttaaatacagctgataaaccaaatattgtttatcaattagaaaatagtaatgatgccaataataatttaaaattagcaactaatgcccaagttgttgtagaaaacaataaaaaatttttaaaattcgatttagttagtttaaaaattaatcaaaattatgttattaaagaaattagttttaattcaaaaccaactaatgcatattttaattttactaataataaaactaataacattgtttattcatatgatgaacaaaataaaattagtttatcaaataatattaatccaacatcttataaaccccaaacaattaacaagaatgataaatcagtaaatattgatgttgatcttcaagttgataaacaattattagcaaaccaatatttacgtttaaaattaaagcagttaaacgataataaaactgtttgaactgatccgatcttattcaataataatgctaaaattagttttaaactttctaatttaattcataatcgtgcttatgaattagaaggtttgtattattttgatgatcaaaattcagtgaatgatatgacaaataatcaaattagttttaattcaaagattcataaaccaaaaattgaatttgaaccatcattaacaacaattaattatgatactaataatgctattaaaacagttagtgcacataatgctcaagtacattttaagcttaaaacaaatgatgaagcattagaaaacgatcaaattgtcgaagcagtttttgctccaactaataatttaaatgatcaaaaagtagttgaagcaaaattaaataatgtaactaattcatttaatgaaggtgaattagaatttaatttaagcggtttaagagaagaaacgacatatcgtttaatcaaagtaacatttaaaaataaaccaaataaagcatatgagttattaaataaaaatggtgttatttttgagtataaaaatggttcacaagcatatgaattcacgacacaaaaatttgaacataaagttattgatgtagtgtcaagcacatcaacaaatacaacacaacaagaaattactgttaaaattgatggtattcagcgagcttgaaataataaaaagcttgaattagtttatgaatcaaacattttaggtgatcctgaaattaaaacaacagttgataataacaacaatagtgttcatctaagttttgataaaaaagaatataatttagtattaaataatttaaaaccaggtcgacgttatagtttaaagaaaattaatattaaagaagttgacaatggccaagatcacgaatttgtaaaagaaatcaatgtaaataattcatttgatgttaatttacaaagcgaaattacagcatcaagcgtagaagaaattaatgatcgtgctcctgataaattaaatcaaacaactattaaaattaatttaaaagatgacaatgatattttaaaaacaaatgatattgcaacaattacttatgataacgaacaaaaagttgatgctattgtaaaaactaatgcacaaaatcaaaaatatttagaagcaataataacaaatttggtatttaataaaaatgtaattattaaaaaaattgaatttaaaaatttatctcaaacctttattaaagttggcaaaaataatacaaatgtaatttatgacgaaagtaatttaaataaattaattattaataatgatttccaaatcattggtccattatcaactgatgttaatagtacacaaaatatagtggctaataataaacacgtaatttcttcaacactagattttaaagttaatccacatattagtaagaatttgaaatttaaacttaaatttcaaaatatcaatggtgaagttgtttatagtccaattttaactaatagttcaattatagttaataacaataaaaacgtaattaattttactttagataatttaaaatcaaatcaattatatagattagttgatgtttattatattgatgataataatgatactattaatgacaaaaacaaagtaccaaaagcaaataatgttactcgaataattgacattgcacctggtaaaacaacaattagcaaatcaaataatacttgaaatactacatcaacaagttcacaatttgagtttgtaattaatagtgatgatggtaatgaagttttagataatttagaagcaacaattagttttaaaaaaggtcaaactctactaacaccagttaaagttaatattattaagcagaataataaatatttaattaagggtcaaattactaatttagaaccagaaaacaggtatgtacttgaatcaattctattagctaaaccaaataaaacaaagaagccattagtagttgaaatattaaataaagacgatatttcatttcaaacgcaagctggtaattataaagttattcaaattaaatcacaaaatccatcaacagtagatacaaaacaaagaattaagttaaaacttgatggtatacaaaatgcatgaaatgaaaaacaattagaaataacttatagtgcaaacgataactcaacaaaaaccgctataattaaattagaaaaaaataaattagaatatgagtttgaattaactaatttagagaaaaaccgaacttatacatttactaaaattgaattaattaatgataataacactaaaacaccatttaataaaagtgattcgattcaagataaatttattgttttaagtaataaccaagttggagttggtaatattattgaaattcaagatagagatgtaaatcatttaaatagtgcaaaaattcggtttgaattaaatgatttagataatgttttaagtaatgatgaacaagcaactattacttataataataatcaaactactagtgcaaaagtaattactgatcaaaatcaaaaatatttagaagcaacttttagtaatttagtcttaaacaaagatactatcattaataaaattgaatttaatacaaaacctaaaaatgcaagtaagaatattggtattaatgatactaatgttatttatgatgctactaatttaataattaataatgatttaaaaatcactggcccacttcatacactaaaagagtttgaagctaataataaaacaaatatttcagtttcattagaattagatacaaataatcatattagtaaaaacttatattttattgcaaaatttgacagtaacgatggtcagagtgttttaacaaacccaattgctgcagataaaattgttacaaataataacaataataaaaaagaattaacatttaatttaactaatttaacatcaaatcgtcaatatattttcaaaggactatattatgtaaattcatcaaatcaaactaatattgatgaaaataataaatttgaaaagaattcaaacgttgattataaaataactgttaaaccaacgattactacgattcaaaaaaatggtaattgaacattcccacaaccaaatgctcaaaaatttaagtttaatattaattcagatgaaaatgttgattttagtactgatctagatgcaactatcacttttagtgaccaacatgatactaaaaaaacaattacaacaaaactaaaacaaaaagataatcaatggtatattgaagatactattagtgatttggcttataatgatacatacaaattagatgacatctcaattactaaaccaatgaatgcttttgctaatttaaaaatccaaattgaaaataaagaacaaattagttttacaactcaaagtggaccaacacaattagttagcattacatctcatgatttaatgtgaaatgatcaacctaatgcatcaaatcaacaaacaattaccgctaaagtatcaggggttaatgatttatataataatcgtaagattaagttagtctatgaatatagaagtaataatcaaaaaagtttagttgaatcaaatgaactaactcttcaaaaagatcaaacacaatatatttttacactgccaattagtgttgctaatcgtcaatattcttttaaagaaataaaaataaagacttctaataataattttgaaacacttaataattcaacaaatgttacgaatagttttaatgtaaatgcatcaaagacacaaatagtcattgataatactaatttagcaacaaatataacaagcacaagtgcaacaattacatataaattaaaatctaaagatcacgtatttcaagtaggtgatagcattattacttatttgaaatctaatgatgatgaacgtcaagaaatatcatatacaaaaactatcacaagtataagtagtgatggaagtgaggcaacagttagttttaatactgatcaaacactaaaagaagaagcaaattataaactaataaaagttggctttgttagaaaaccaacattagcttacactaatattaataatgatgctaataatgtcatttttgaagacaataattcgaattataattttaaaaccttaattgttgatcataaagtaacaaatgttagttctaatgattctataaatactacaacacaaacagttaatattgatattgatggaattcaacgaacttgaattaataaaaaaattcaattggtatatacttcaaatgacggtgaagaaattttaagtgatcaaaaaacattgctttgggctaataaccactatagtttcgaattgtctaatttaaaacataatcgtaaatatacactaaaagaagtaagaattattaatgatgataataaaacatcaataattttccatttaaaaaatggaatagctgattgatttattgttaataaaacacaatcgattagtataagttcaataattgagccaattgcaagagcgaaaaataatttacaatcaacacaaattagatttatattaaatgatcctgataatgttttaagtaatgaagaagaagcaatcattaattatggtgagaatttatctgtaaaagcaaaagttaaaattgtagggagtcaaaaatatttagaaacaacattcaataatctagcattaaaccaagatactattattaacagtattacttttattaataaaccaataaaagctgctacgaatattggaatagataatagcaataaaatatataacaatacaaacaatataaatccattaaaaattgataataattttagtgtcattggtcctgttcaaagtgatactaataaacgtattactttggaatataataataaaactaatgtaaaagttaatttagaattaaaagctaatgataatattttgcaaaatttatactttatagcaacatttaaagatcaaaataatgaaaccgtaaaatcaagtattgtttcttatagttcaatcaaaaaagaaggtaaaaaacaaattattgaacttagaattccaaatctaaaatcaaatcgtttatatcactttgataatttatattatttattaaatcaagacgataaagatcttatagataataataaattaataagatctaataatgttgttaatgaaattgaagttaaacccggtaatacaacttttaaaaaaaataatgttgaatggcagatcaattcaaacagtgtaaattttaaattacaagttgaatctgatgatgaagacatattagataataatgttatggctgatgttatcttttcatcaaaatcaaatcaaaatgatacaaaatttgttaacaatgtaaaattaaaaaaagaaggaaacatttggtttattgaaggtatagtaaataatttaaaaccagaaacagagtatgagttaaagtctattgtattaactaagccactaaatgctaactctaatcttaaaactattaatccaactaatatttcatttaaaacaaaacctggtaattatggaattataaatattgaatcaaatcaaacactaacaaattcgcaaaatgtaaatgttacaattgatggaattcgtagtgaatgatttaacaaagaagctaaattagtatatatatctaatacaaatgatgaagtagaggcgaaagttaatttagaggaaaataaattaaattatgtttttaattttaataatttaaaatacaatcgcaaatatactttgaaatccataaaatgatttgatggtcaaaattgaattgattttccaaataagcaaaatcttcaaaattcatttattattaaaggaaaaacaccaattagtgtcaataagctaaatgagattagtgatcgagtaataaataatttaaatgtagcaaaaattcaattttcattaaatgatcctgaggatgtattaagtaacaacgaaattgctgaaataacatatgatacaaataaaaaaacaaatgcaaaagttattacagtaaataatgagaaatacctagaagttagtttatctaatcttgaatttaatcatgatacaattatcaataaaattgaatttataactcgtcctaataaggcagttgatagtgttggcattaataattcgaataaaatttatgaattaacaaatttaatagaagaaactagaaaattaaaaattaacaatgattttagaataagtggtccattatcatctaataatttacatcttgaaattaaaaattataatgataaagaaagcattaattcatcaattgaatttacaataaacaaacatatagctaaaaatcttaaatttaagcttaaatttagaaatgaatttggtcatgaagtatatagcgaattaattgatggtaataatattaataaaacaggcaaacaagaagttctttttagtgttaaggggttaaaatcaaatcaattatataaattagttgatgtttattatttagataatattcatcaaaatattgatgaaacaagaaaaatatttaaagaccataatgtatctaaggaaattgaaattaatccaggtgttacaatgattagtaaacatggaaattgaaaatcacctacagatacaacagctaattttgaatttaaaattgaaactcaagatgataatgatgttttaaataacattgatgcaactgttaaatttaaagatgaacataataatattaagcaaaaaatagttcgtataattaaagaaaataatgattgattaatcaaaggtcaaatcgataatttaaatccagaaactaaatataaattagaaaatattgaattaagtaaaccattaaaaactcacactaatttatctgtatcgattaatgataaagaaaatataagtttaattactgaaactggaaatccggttttaaaagttattcaaactcaaaatgatactattaatgatactcaacaaactattaatgtaacgttatcaggagttaactctaaatataatggacgtcagattaaagtagtttataaagataataataatgttatctatgaaagttctttaattacattacaaaaaggtaaaaatgactatcaattattgttatcaaatttaaattcaaatcgagaatataggtttgaaaaaattgaaataaatcatatttctaatactaataattttgaagatcttgaaaaattaaatggtgtgtcaaatacatttattactcaaacaaaaaatactacagttcaatgaaatgatagtagtgctacaattgttgggacgcgtggtgttaattttaatttcaaaattaaatcagaagataaaattttagaaaataatcaacaagtagttgcatgatttgctcctaaagaaacaattagagatactaatacatggttacaatacacaagaccattaaaagatgtaactagtgatttcaaagaaggaacttgagcgcatgatttaagtaatagtgttaattttaaagaagaaacaacttataaattagttaaaatccaatttgttaacaaaccaacaaaagccaaaaataatatcaataatagtgaaaataatgttattttagataacacaaattctattaattcaaattatgaatttacaacgaaagttggcgaccacaaattaataaatattacatcaagtaataacgttaacacaaattcgcaaacaattaattttacacttagtggagttaaaaaatcatgagttggaaagaaaataaaactaagttataaatcaaatgatactagtgaatcaattcatactaatgaggtattaattgaatctaataaaacacaatataatatattgttaaataatttaaaacgtaatcggacatataccttaattgatgtaaaattgattgataataataatgtttcagatttcccaaaagaaggtaatttaacaaatagttttattacaacaagaacaagcgccataaatgtattgaatattgaagaaattagtaatcgagcctcaactaatttaaaatctactattattaaaattaatttaaacgatccagataatgtacttagagataaagatcaagctactattgtttatggtaataataaacaagcaatgggatttattactgtaagtggtaatatcaaatatttaactgctactttagttgatttaaattttaatgataaagtaaatatagtaaatattagttttaataataaaccaagtatagcagctgaaaatattggaattgataaatctaataatatcatttataataatgattcaatacctaaattagaaattaataacgatattattgttaatggtccaataaataaagaaatagttgttaaaaacgctaatcaaaaaaacaatatcgatgtagatcttggattgcaaattaatcctaaaatagcacataatttaagatttatagctaaattcaaatcaacaaataatgatattattgaaactaatgttattaatgggtcatctttagtaaataatgacggaaagacatcaattagatttactttaaataatttaaaagctaataagttatattcattagttgatgtgtattatttagtaaataataattcaaatacaattgttgaaagtaataaattaccaaaattaaataacattaattatcaaattaaaataaacaaatcacacactataatttctaaaaatggcgaatgatcaaatccttcagatacaagtgctgaatttaattttcttctaaaaacagatgataatgatggagaattagatgcaaatgcaacagcaacggtaacatttaataaaaatggtggtactttaaaacaagtaaatgttaacttattaaaagaaaatgggaaatgattaattaaaggtaaaataaataatttagaaccaaattcaacatacgtattaaattcaattaatattacaaaaccaagcaatgtttatgaagatttagatgtttctattgaaaataaaagaaatatttcatttacaacccaatttgggccttcaattttaaatgaattgttatcaacaaatgaaattaatgttgattctcaaacaattaatgcaacattttctggagtaaatgatcaatataatgggcgtcgagtaaaattaatttatcgtgatcaaaataacgaattatatgaaagcaatatagttaatttaaaaaaaggtatgcaaaaatataattttactctaagtggtctgatagctaatagaaattacacttttattaaaatacaaattaatgatgataaaaataattctcaatatattgatttaaaaaaacaaaatactgtaaataatagttttaaacgaaacccatcaacaacaagcatcgaatggagcactccattaaatattacgtataatagtgctgagttaaatataaaattaaaatctgttgaatcaaatatttgaaactaa

SEQ ID NO: 40682 - DNA, 3312 bp, Ureaplasma urealyticum
atgaaattaattaagaaaaagttattatttttatttacagctgctttagttcctattgttgctacagcacttgcatcttgtagcaataaatcaaagttaaatgttaatgttttaatgaaagatataattcataccaagagtgaccattattatgttgtttatgaagttaatgaactaaatacttcgcaaggtatttataagaatttaactttaaacaccaatctttttaatccattgttaaataaaaaagttgaccgtttagaaaatattcatcctttgattattaataacaaaatttatttaagactagctcgtaaaccaaaaattaatgatcattttatcactaatttttcaaatgatgcatttcctgcactacatttaatttttgatcataatttaaattttatcgaacaagatattaatgaagatttaaatttacaaccatcacttcctaatacaccaaagattgatcatttagaaattaataatatttcgtttacaaatattaaacaaaaccaagttgatataaagattaagttaaaaacagtttcttttaaagacgatgctattcataattttagtttaaaaattatcaaaaaaactaatcaccaaatcattactagtgatgctgttttcaataagcaaaaaaatgaaattgatgctaccgtttataatttaacatctgattgtgaatatttattagataaacttaattttaataatcaaaaaattcaattaacttcaattccaaaccacacttttaaaacccttgatgatagtgataatcttttaaaaaatctagaaattacaaagattaatgataatggtgctaatttaactttaaattttaaagagttaaaaataaaagatgatagtgatgaagctttaaataatatccacattagtttagcatataatagagtttataaaaaaggtcaattagagcttaataagaagcatttttttattgataaattaaacaagagaattattgtttatgttgatgaattagaaagaggaactcattatgatattaaacaaattaagattaatgatcaagttttaaatttaaataatcaaacacatgattttacaacaaaaggcgattatgctaaagttgaagctattgattatgaaacagctgttgataaaattacaaaagcagttacaattaaagtaaaattatctgaagatcttgctttctacaatcctaatattcataattttaaatttttaattagaaaagaaaatgatcaaaacccaattgaattctcagaagttaaatacgatgaacaagaacgtttattaactgctgtaattaatggtttagatgttgacaaaacttatgaaattgataatattttactaaacggtaaaccagtatctttccctaatgatgatgactatgcaggtggatattatggacctattaacaaaacatttaaaatacgtcctgatcgatcaagtattgaaatttttaaagataaatcattctataattcttactatagtgcttttaatagttggttttgatatttatcagtttctaaaaaagatgataatgaaagatcaaaagaagtaaaaaaagattataaagaacaccttttcatttcggatattactaaaaatagtgcgattattaatattaaatgtgaaaaattacttttaagaaaagaaaattctttaaaacccaaaattaaattaagatatcatccattaaataatccaaatgaatgagcatataaggagtttagttttgaagataaaaattgcttcatgagtattgatgaagatcaaaaaacaattaaaattaaattattaaatttagataatcatattaattatgaatttgtaagttttatcttagaagatgttgatggtaattaccatagtgataattttaatgtaaatgtttatataggagatttttttgattctcatccatttcacttggatctttcatttcttaaatttaaaacaaatgagttcaaaaaagctgttttttcattcacaaatacaaaatcaacttcaaccgatctaaatgttgatttacaagacaatcaatatgctgatagtattgagcataaaataaaatatactttagaagatgaaaatcataataaatataagtttgttaaaaacttatcaaaatcagaaactactcaacttaatgcaacaaaaaacattattttacatctttttgctttagataaaaatcaaacatttaaacttatttcttttgaaatagatgatgacaattatttaactaataatattacagttaaaacacttaatgaatcatctccacatttattattaaatttagaatttaatgatattaaaaatacaaatagtactttaaaattaacactaaaccaagcagttataaatatgccaaaaagagttgatgttattttaaaaaataaaaaaacaaacaagctgttgtatttatttaaaacagatttttattttgataaaaaaacacaccaaatctcaactaaattagataacttaaacattaatactgattatgaaattagtgaactttttattgataagcaacagattaatttaaaaaatatcaataataagacttttaaaactttagattacggctttgatcaattttacttagataaaattgatcatgaaattaaccaacaacaaaaaaacattaaattcaagttgcattttagcgatttcatctttaaagataaaaacgcccataaaatgtcattagtgttagaagatgaaaacaaccaacaagaatgtattgatttaaatgctcataaccaattaaaaatcgactatgagcaccaaacaattgaatttgaattaaaatatttaaagcctgatattaaatatcgaattaattcaattcaattgaatgataaaaatttagatttaacttgagtagataaccaacgctattttaattttcctggaatcttaaatcccaatttaaaatgaaaagtagataatattaaatatgaagttaatggatctgatccaaaaattaatattacttttgatcaagatatatttttaagtaatttatcccaagataaagaatgtaatattgaattaaattatgtatataacaatagcgatggggatactttagagtcaaaaatagttgcaaaaattaataaaaataataataaaagtgttgaaattacactaactaatgaaaattgttattgattaaatgatttaaaagatatatgctcaaatcttgattcaaatcagatctctacacaatttttaaagagtattaaaattaatggtcataaaattcctaaagtaaactaa

SEQ ID NO: 40683 - DNA, 2118 bp, Ureaplasma urealyticum
atgataactaaaaaacatttaactaaaataattacaattttaacttgtagtactttaattattggtttatcttgcttaattggtgcatgcactaaatcaaaaagtaaggttgatgataaacaagtgctttttaaaataaaaaaatttaaaacaactactaatagtattgagttatttttagaaggtagtgcagttttagcatcacattcatacagtgttgttttaaaagaaaaagcaactggtgatttaaaaacaattaataatttaaaattagttaaggataatgatcttaataaattaattattaatgaattaaaaccaaatatgggttatgaattagtagatttattaattaataatcaaaaacagctaataactaaactagattttataacaagtacattaacacaagaaaatgtagatcaatttagtataaaaaaaattgattgaaaaaatattactaataatagtgctgatttaaatttagaatttacaaaatattttttagcgaacgaaaaccaaaatatttttgagattagtttattaaatttacaaacccaacaaattacaaaatttaagtttaattatcaaccaaattcgccatcgataacatttaattttactcaattagaaaacaacgctaaataccaaattcataggattgttttaaataataaagagttagtttttagtaaccaaaatttagtattatctaatactaataagcaaaactcaaacccgattattaaagatttaaacatcaccaaaattgaaaaagaaatttatgatactagtgcaaaattgattttttattttaaagataataagttaggtgatttaaataatcaaaaatttgttttaaaattagtttcagcacaccaaccatcaaatacttttagttttgaaaattatgtttacaataactctaaaaagaccttatcatttaatttaacgggtttacaaactagtacaaaatactcattaaattcattaactcttaatggacagccaatatcattagctaatttagatttaaatattttaacctctacaaaattaactactgttcaaagattagagaacttagaacatgaaagcagtgatttttgatttaatgatgaaaatttgagtgttaagattaaattatattttgaaaataacgttaattatttaaaaaataaatatttaaaattagtatacatggataatgcaaataacatcattgtatcaaaacctgttttatttgatcccacaaaaaaagagtacgaatttagtttcgataaagttttatcaaaccgaaaatacactttttctaaactagtttttgatgatctacaagattttagtgaaaaacaagctttagaagtaaatactcaaggattaaatggtagttttaatacacctcaagcaaaaattaaaatcaaaaagatttcttatagttcaaccgataaatccgctaaattagagtttcatttagaagatgattttgatttagttgatggtgataaagttagtgtcaaatatagactaaaaccatcatctaatagtattgatactactaataatactgttgagggtttggttcataaccacatattgaatgtaacaattaatgatttagaatcaaataaatcatatgaagttattgactttgttattaatgattataaaaataaacaattattaaacaaacctgaatttttaaaaaaaaatacaaatcatcataaccatccttttaatatcccgcttgattttgatactaaaaatagtgattataaaactaaatttaatgtaaatgaaattagtaaatcttataataaagaaactaaattaacaacaatcaaattaaaatttgataatattcccacaaatcccacttcatctaataattttacatttacaattaaaaaacgaacaggatacactactaatctgataagcccaaaaactttggaatatgatgtaaataagaaaactttaatagcaaaatttgaaaatattgaggaccaaattgtttatgattttgttgatgttaaagtaaataatcaaaatattgaatttaacaaatcattagataagtatttttctattattcatagtgctgactatcatgaataa

SEQ ID NO: 40684 - DNA, 915 bp, Ureaplasma urealyticum
atggtgctagaaatgattaaaaaatacggaatcgtagctattgttggaaaaccaaatgttggtaaatcaacattaatcaatgcgattatgaaaaaaaaagtctcaatcatttcaaataagccgcaaacaacacgcaatgctgttaaagagatttatgaagatgatgaatcagcaattatttttactgatacgcctggttttcatgaaccatcaaataaactagatttatttttaaatcatgaaattgaaatttcatataaagaagcaaatgtaatcttattcgtgacaactatggacaaggaattagatgccaatgattttgaaattattaatttaattaaagaagcaaataaagaaaatattattttagtcatttcaaaagctgaaatggctaaaaatcaagatcaaattgatgaaagaatccactttttaaaaaaacatatagcatttaaggatgttgttcaaataagtgctttacatgttattaacattgataaattaattaatacaatcaaaaattaccttcacaaagatgtggtaaccgattattttcgtcaaaaagccgaaaaagaagataaatttgttattactgaaattattcgtgaacaatgcttattaaatttaaaccatgaagttcctcacggtgttggtgtagaaattgatgaaagtaaatacaaccaagaagcaaatcattggataattaaagcttcaataataattgaaaaaaattctcataaacctattattattggccaaaatggtacgatgattaaaaaaattagcatgggggcaagaaagcagttgcatgaaatttatgattgtcatatttcattaacaatttttgttaaagttgaaaacaattgacgtgataataataatattattaaatcattagggtataaaattaaaaaataa

SEQ ID NO: 40685 - DNA, 1422 bp, Ureaplasma urealyticum
atgagatataaatttaaaacacaagaagacttagtaaatcatttaaaatctgttggttttgtttttgcaaattcagaaatatataatggattagctaacgcatgagattatggaccattaggtgtattattaaaaaataatttaaaaaatttgtggtggaaggaatttgttactaaacaaaaaaacattgtaggtttagatagtgccatcattttaaaccccttagtatgaaaagcaagtggacatttagataatttttcagacccattaattgattgtaaaagttgtaaaacaagatatcgtgctgacaaattgattgaatcttttaataaagatattcatattgctgaaaattctactaatgaagaatttatgaaagttttaaatgatcataagatcttctgtcctacatgcaaacaatttaattgaactgatattcgtcattttaaccttatgtttaaaacacaccaaggagtaattgaagatcctaaaaacatcgtttatttaagaccagaaaccgctcaaggtatttttgttaactttaaaaatgttcagcgatcaatgcgtttacacttaccatttgggattgcacaaataggtaaatcatttagaaatgaaataactcctggtaattttatttttagaactcgtgaatttgaacaaatggaaattgaatttttcttaaaagaagaaattgcatatgatgtttttgataaatatttaaaccaaattcaaaattgattagttacttgttgcggattagatttgaataatttaagaaaacatgaacatcccaaagaagaattatcacactattcaaaaaaaacaattgattttgaatataatttcttacatggtttttctgaattatatggaattgcataccgaactaattatgatttatctgtgcatatgaatttatcaaaaaaagatttaacatattttgatgaagaaactaagcaaaaatatattcctcatgttattgaaccatcagttggtgtagaaagattattgtatgctattttaactgaggctacatttattgaaaaactagcaaatgatgaagaccgaattttaatgaatttaaaatatgatctagccccttataaaattgctgtaatgccattagttaataaattaaaagaaaaagcagaagcagtttataataaaattttggatttaaatatttcagtaacttttgataatagcggaagtataggcaaacgctatcgccgtcaagatgctataggaacaatttattgtataacaattgattatgattcatttggtgatgaacacgatcctacttttactattcgtgaacgaaacacaatggctcaaaaaagaattaaattatcagagttatctttatatttaagccaaaaagctcatgaagattttcaaaagcaatgtcaaaaataa

SEQ ID NO: 40686 - DNA, 1926 bp, Ureaplasma urealyticum
atgtcaaaaataactaacaatgtttttttaacaattcgtaatgctataaatatttccgatgttattcaaaattacattaaagtaattaaaaagggtaataattattgagctatttgtccatttcacaatgatacaaatgaatcattgtcaatcaatgataaaaaacaaatctttaaatgttttgcttgtaatcatgctggtgatgtgattaaatttgttgctgaatataaaaagatctcctatgctttagcagcacaagagattgttcaattaatgaatttagatttaaacttattgaatcatttacaaaaaatttctccacaagaaattaaaaaaaataaggtttttgatttaaacaaacaaattcaaaaatgatttattaattttttaaataataaaaataacattcatgttattgattatttaactaaacgaaatttaaataaaaatgatttagcatattttaaaatcggttatgctccaaataatgatgaattattaaatttaataaaatctaattataataatctgatacaagaaaatgacgagtttgaattaaataaattaatagaaaattcctttttagtaattgataagaatggtaattaccatgatttttttaatgatcgtattatttttagtatttatgatcatctcaataacgttgttggttttagcggacgtataattacaaatgagaaaacaccaaaatatttaaatactaaaaccactgctgtatttaaaaaagatgaagttctttataattttcataatgttatcaccattgaaaataatcatcaattatttatagttgaaggttttatggatgttattacaattcataaatctaacaaaccaaacgttgtagcaacaatgggtgttgaattaactaataaacatttagaattaattaaaagctatggaattaaagatttaattttatgttttgataacgatcaagcaggttttttagctactaaaaaacaaattatgaaattaattaattccccattcaacatttttattgttaatcataaagataatgattgcaaagacatggatgaatatgcaaataagcacggttatagtgcaacaagtaagctattagaccaacaacttcatattagtgaatttttattattagaaattagtaatacaaacaaatctaccccctcactaaaacacagttataaacaagagtgttttacaatcattaaaaaatatggtgatattttttatgtagataaatatgttgatttcatgaaacaaacattttcaattgaagaaaatttattaaaaaaagttattgaagaattattaattaacaaacaatgtaattctattcaaaacaaaaagaacattcaatcatatcaaaaacaaacacaactaactaataaacttactacttcaaacccaaaagttatcctaacaaaaattgataaacattttaaccacttagtagtaattatattaatgaatcgggttttcttaaaccgtcttgatacgcaagttcgtaaccggttaactaaagagcaaagtttagtgattaatattatagaagacttttatttgtaccattttaagattaataatattttaaaaaacactgattcttttattgaatttattaataaaaactacagtaaatatactaatgttattaaccaacttacaaaaatggtgcagattattaaatataaccctaagtttgataatatagtggcatttgaactagctaaaaataattttatatatgaatgattaaacaaccaaattaaacgtttaaaactcatcaatctaaatttaaatatgaataataaccaagaacaaatcataaataatgaaaaattaataaagcaatataatgatgaaaaaattttattagacaatttaatcaatgcttctttatttcataaaaatcaataa

SEQ ID NO: 40687 - DNA, 15018 bp, Ureaplasma urealyticum
atgatggtcaaaaaagtaattaatgttgctgatttggatcaaaaacaaattattgttaacaaactaaatattggtaaaattgttaataaccaattagtttttgatgtgccaaaaaatgttgaagaaggcgaagacgtttttgttaattaccaagatgttgatggtaatttgataaaaattcctgcaattgttaataataaacaccaactacaaattgatctatcaaacaaccctaattttacaaaagataagatttatcattttgattcaattagcatagaagatgaatatcacattcctaaagaaacaattattagttcagatgatgttgataattcagttaaaacattaaataatgaagttgatctgggccgtaaaattattgttaaaaatcctagtgttattcaaaacaaacccacaactttaattttaacagttaatgaccctaataaattagctttaaatgaacgattaaaattaacacttgctttaaaaaacgatccaaaacattgtgttagtgcttatggcttaattgattataaaaataatagtttagtttttgattttaatcatttacaaacagatactgcttattacattaaaaatttagtttttaaaaataataatttaaatcttactgatttaaacgctgaagctcatagtcaaactaaaatcaatattattaaagatcaagttattggttatacatttagaattttttctactaatacattggtattagaggattatcatcaatatgatactgatcctaatgcaactaaattaaatttaaatattagtacaactaataagcaccccaaaacaattacttatcgtttattagatgaaaataataacgcattagaaccagatttagttgctaacctaaattatgatttagtgaaaaaaaattatgtagcacatttgcaaaatttaaaaggcaatagtaaatatttattgttgggttttaatgatgaaaacaacaataaaattcattattcaactccaattaaaactccattaatttttggtacaactccacatgctactatagttaattttgatgttaacaatcctaaacaaattattaaatcacaagatgcacgaatagcaattgattttgtagatcaagatcaaaaattaagaattggtaacccagttgaattaacttatttaaataagaataatcaacaagtttataaaacaatagggtatgttaaaggaattaacaaaaccaacaaaagtggtacgttagaatttgaacttaataatttagtatctaataataattatgaattgttagaattaaaggccttaggtttagcaaatgatgcgtatcaaaaagttgtatttgccccttttgatcaaaaacataatcaatttagtacgaaattaattggaacatatattgaatcaattagttcaaatgaagtaattaaaaaagatgaaaataaacttgatgttaatgtaaaaattgttttctcacaaaaagataaaacattaaataacgtttgagcccaattagtttatattagtaaagataatgaagtttgtttatctcaacctttattattaaatgttggcaatagtaactataaattcacattaacaaataataaaccaaatggttttttatcaaatcgtgtttataaatttgttaaattaatatatgcacaagatcaaaatgatttacaaagcactgatgcggtgataaaaaatagcactgatttaagtcatggttttaaaacagaaccaacaggaattattagtttaaaaaataatagtttacaagtaattaaacgtactgatgatagtattagattatcaattccattagttgataatgatcatgtcttagttgacagtgatggtagttcatttactattaaaattagtgatttagatgatcctaataatctttttgatgcagataatcaaaaaatagtgattgatcaaaacgggaatcgtaatttagagtttgatgttcctaatgtttcattaaaccataaatatcatattaacaatatcacgttgattaataaaccaatcaacgctgcttttaatcaaaatgaaaatcatgaacaagtttatgagttaaataattctcaaccacaattgagtgaatttggtaatgaattattagttaatacttataattatgagccaaatataacagatgtaaaaacaaatgttttaaattataaagttaaattaacccttaaacgttcattgaatttaatgaatgaatactatttaaaactaaagtatattgataataatggtgatgttgtttgatctgatcctgtttcaattaataatgttaataatgaatatgaatttaatttaccagacaaaaatgcattaaaatcaaaccgtatttataaatttgatgggttatattatttcaaagatgttaatactgttaagataacatcagctaataaggttaatatgaacaatataacacctttacaaattcaaacagcttcaaaaatcaatcttaattcaccaaaagtaactattaataacatcactcctgctagtgcggatttatatttaccattagtgtcaaccgatgatatttttgcaaaagatcaagttattgatgttactattggcaataaagataatacgaaaaatgatttaatgtttacatctaatttagaatatgatgatataacaaaaacgtgaggcgttaaaattcatgcaaataatttaagcccagaagttaattatcagatcaaatctgttaaatttagacaaaaaccagtattaggtgcttttaatgttaataatagtgatgataatcatgtattaattgattcacaaaaaacaccaggttttagtactccaaaagcaagttttgatttagttagtgttactgcaagtgatgtagtagatgcgaatgtaaaaactaatagtgttcatattgttattaataatgatggaacaagtttaaataattgtaaagctaaaattgtgtataacgatggggaacatgatttagtatctaataactttgttgttttaaattatggtgttaatgaatatgattttaatttagatgatttaaaacataatcgtatttattcatttaaaaaactgatttatactgaacctaatcaaaatgattataaatttagttttttaaataatcaaaaaattacaaacacttttaaaacagcatcagttaacgagcaattaacaatagatactaaactagttcgcaaaccagattcaaatttaaataaaattaatttaaaacttcaaataaatgatcctaatgattttttagaacaagatagtattttagaaattacattccatgatgaaaaagataaaacaactcataatgttattggtaaaatcaatgttgacgctaataataataaaacacttgaatttagtgtagaaaacactaacacatttaaaattcaaccaaatcataaatacattgttgataatattaattatgcaacaaaaaataaaattcaacctgccaatgctattagtaataattctaataaaaatagtatttatgatgctagttcaaatccaagtaaaattctaagttttacaaacgaattatttgttaacaacattaatgttaatcaacctaatacaaatttaaatcctactgcaagcattgatgttgaattaaaatctagtcaaaacttattaaaagaccaatatttacgagctttatatattgataataaccaccaaaaaatttgaagtgattatgctagtgtaaataatgttgatttagcacatattaatttaaatttcaatcatttaacacctaatcgtaaatacaattttgcaggaatttattattttaatgatcaaaatcaaaataatgatgaaacccaaggtaagaagatttttgtaaaagagcattcaaaaacttatgattttagtactttagcttcaactacccaactattagaatttaaaacacacaatgttgatgaagatcaatttaattatgattttaacattaataatgatgatcaagttttagaacctggaatgcttgttgaattatgttttgaaaatttagtagataaaaaccaaccagttttaaaaacacaaacaacattagttaaaaaagatgaacatagttttagtgcttcaggggtaattactaatttattagcagatcatacttatcgtttaacaagtgttagtttaaaacaaaaaccacaattagctaatgttaatattaataacaacaataataatgaaattcttttaaacaatattgaagataatcaaaaaactattcatacattatcaaaatcaattgttaatgaaattagtaatttagcagatgcttatccaaaaaataataatggcatatatgatgttaaattcaatattaatattattaagaacaataataagcttaataataaatatgttaaagtagtatttgaggacaatgaacaccaactaataagtacaaacgatcttttagttaataaattagaccaaactaatttaattagtttacaaaattttagttttagtaatttaaaaccaaatcacctttatcgtttattaaaagttgtttatggtgatgaacaaaattttgatgctattaatgaacaaaaaaatattttagctttaaatccctctttagttaattcaagctttagtactacgccagcaaaaattaaagttagcaaaaacgctattgatgtatgacaaaaccaggccttgattaaattaattttagatgatagtgataatcaactacatagcggtgatgaaattaatatcaattatcgtattaaaggaacacaaaatattatttcaaccccagctacaattagtgatcaagataaaagatatacaaaatgtatggcaactaatttaattgctggtcttgattatgaaattgtgagtgttacaattaagaatcaaaaaaccaagaatgtttctcctatcatttttgaactaccatcaggaccaattggtttttatactcttgcccctgtttttaaaataacaagtctaagtatggatcctgtttatcatgaaaataaaaacacagcagatttaaaaataaatttacgaatcgaaaacattggcgcttctttatttaataaagatatcaaatttattttcaaacgtaaaaatgatggtaagcaaatttcatttattcataaagttacatcagcaaatgacgcaaattatgaatgagaatttaaagatttattacgtaatcgcgaatacactttagagcgtgtcgtttatcttaaaaataaagattttaatcaaagcaacgttagtgaaagtgattatattgatctatgaatatatgaaaatcttaataaaacttttaaattattaccaactaaaccattagggattattggtgcaccaattaaagaaattagtgataatggtgcaaaagtacaactaaaatttgctatcaatgattttgatgatgttttaaaagaaaatcaaacctttaagtttaatattcaaccaaatgaaaataatggtgctaatttaaatgagattagcgaacatgaaggtaaagtagaaattattgatgggcaaaaattctttgttgctaatcttaataacattaaagttaacaaagaatataaagtttataaaatctactttgatgaaaaccaagatgttggtaatggtgtttataaaattaattttaaaaatgattataaagaaccaaacaatgttgtttatgatgctagtgttaatacaacacaaacatacgtatttacaaataaatttgctattgcaagttttagtaataacttaactgatgttgatgtagcaaataaacaaaatattagtattaatttagattcacgagttgaaacaattcaaggatatcattttaaagcaaaatatattagtaatgataatcgtgtcgtttgaactaatacaatccctgcgccaactaatataggtaataataaaaataatattgctttaaattttgaattaaaccaaaaccaacttatttcaaatcgtttatacacttttgctgctttatactattcaaaagatgttaatgttgatgaaaatcatgcaaatatggtagttattaaaaataatgtaaacccacaaacaataagcactaaaccatcaagtacgtatgttgatttaaaagcacaaaatgcagatgaaaataaaatcactttaagtttattgttacattcaaatgaccaaatttttgaagataagaataaccatctaaaaatcgctaaaatcagtattgatgaacttgatgcacatgatcaaataattaattcaacaacgcatgattatgatttaacattagaaaaagaaaataatgaatgattattaaaaacccaactgattaatttaaaacctaatactaaatatcgagtgaaaaaagtttggttcacaagcaaaccaagtgatactatctataatggcgttaataaggacaatatagtttatccaattaataatcataatactaatattgatttaaaaactttagaaaaatcaactttaaatagtgttaaaccaacaaaaacaaactttaacaagaatgaatcaattaagttaatggttggttttaataaaacaggttctagtttagaaaacaaatatgcgaaattagtttataaagataataataaccaacaaattgaatcagatcctgtattgttgaattcagatacaactacaaaaccatttaataaagaatttagttttaataataatcaaactagcttagttgctaatcgtgattttgaatttgttaagttaatcattagtgatactgctgattttaaaaacgctaatacacttgatttaacacctaattttaataaagatgatgctaaatttagtatcgaacctacacctattagtgttaataatgttattcaaagtggatcaaatacgtatgatgaaatccatctatcattcgattatgatgatcaagatcataatttagttgataatgaccaaattacaattacatatcgcaaaaaaggtgaacaagcttgaacaagttcaaaagctggtgaagttagtgttaaaaatcataaaattaatgttacattaaaggatttaacaccaaatacaacttatgaaattggtgctattagcacaacacatgttcattcacctaatgtaaaaacatcaccaattcaatataatgaaactactaaaaaacaattagaaaaactagatttaacaactaaggttgctcataatttcattaaagattttaaattagcatcaaactctaaattagtaaatggagtttatgaatgtgcaaaagacgaaaatgttaaatttagtgttggtttacataaagaaggccatgaacttgaaggatatgaaatttatgctaaatttgtagataaaacaaatcctaacaaaccagctattgaaattaaaagctctaataacattaattcaaattcaaatcaagtttatgaatttgaattgttaaaatcacaaattacacctaatcatcaatatgagttgagtgaaatttgtgcaattaaaaacaagggtgcaaacaatgaaattaaaaaagatttaaatgaaaatcatctatcattagctttagggttagcgccaaataaaatggatgtgcaaaaaccaacaattacaattacaaaagttcaagataatcaatctgttagtgcacatgttaaatatataattaatgatcctgatggtattttaaattcaactgattgctcaaaagaattattaaatgttaaatatgctttatttaatcaaacgcaaaatgctaatttaattaacaatattacaattaaatatgatcaacaaaataaacaattctattgtgaatttgatattgataatttaactttaaatcaagattatggtatttttgaaattagttttgctaataaaccaattcatgccgcatttgctaaaattaatgatacccaacatcctttagctcttttaagtactaataatcaagatataaatcaaaaaattgctttagattgtgaagttaataaagttacaattaataaacaagatcttgattatgatcaaaacaccaagattagttgaccgattgaattaagttctaatttattaaacaataagtacattcgtgttaaatatagtgtaagtggtcataagtttaaacaagatgaccaatttagtagtgcttttaaaattactaataataaagctagtgtggagattggtcatgacaaattaattgctaataaggcttatgaaatccaagctatttatttctcagaccaaaataatgattttgcatgcacaaacacaaatcaaattccaattaattcatcaattacaaataaaaaaatagttataaatccatcagcaacaacaattagttcacatgaagttaaaaatattacttcaacatcagctgatattaattgttctataagtacaaatgatggtgatatttttaaaccaaattcacaaattataggtcattttgctaaaggtgatgatttaactaagacttttgtagctaatggtgttgttgcgaatgtaaataaccaaacaaaacttagctttacgttaaataatttagaaccaaatactaaatatatattagttagtgttgaatttaaacaacaaccaaataatgcttataaacatattaataacaaatataatgatcagttttattcaaatgatcaaacacattcaattatttttacaacaagtacacctatttttgaaattaatagtattaaaactataaaaaatacttacgcatcaaataaagaagaaattaaagttaacgctaaatttaataaaattgatccatatttaaatgctaaaaaactaaaattagtttatcaatcacaaaataataacgaaacctttgaaactcaaccattattagttagcacaaatacacatgattatgtgtttagttttgataaaaacgcttcaaattcaattattggtaaccgtgaatatcatttagataaaattttatatttaaatgaacataaccaatggtgtgaattaaataagaataatcttgttgaccaatttaatgttgaacctacaccaattagtattgcaaaaattgttgaagatgattcaaaaagaacacaaaacgatgttaaatttagaatttattttaatgacttaaatcaagatcaaatctttaatgataatgataatgttaatgttaagttagtttatccaaatacaaacaatgtatgagtatctcatgattgacctattcattttgaccaacaagaaaataaatgatacactgaagtttgattaagtgttggtagtttaaataaccaagaatttgaagttggggctgtatcagttaataaaaaaccagcaaaagcgaaatttgatattcacaagacaaatcacggttatgataattttatttataataaagatattaaaaatcaaaattatcttgtaggaaacatatttaaagttaatagtattaatgttgcacacccttcaactccaactgatagtaatacgacagttcatgttaaaatgcaaaataacatgaagagtgcttttaaaggtaaatatttagcattaaaatataaacgtaatgatactaacgaattagtttgatcttcaactaaaattaaaatcgacgaaaatattcatgacgatttagattttacatttacaaatttagctaaaaatcacatatatagttatgttggtgtttattgtgttgatgatcaaaacaaagaagtttttgttgctaataatatcacaaatttaaatccaccacaaataaaagtactaacaaatgcaatcaatactataagttatattaatgcaaatgataagattagtaatcttagtgataacacagcaaaattaaaattaacacttaatgatcctgaccatatttttaaagttggcgatgaattagatcttgtgtttaatacaaaaataaatccaactactccaaaacaaaaaaacatacatgttagcgttaaagaaattcaaaataatgaagtaattttaaatgatgtagatcttagcggattaagtgaaaatacagaatatgaactaaaaacggttagtttaaatcaagaaaattgaagtcaaaaagaaacttatatttcttcaaaacctcattttgaaattaacaatgttcattttgcaactataaaacacttgtttattaataaaattgagattaacaaaaaagctcaagaaaacagttataccctaaaattaactttagatggtgattattctgaatttattaaacaagggtatttacgtttattattagtaaataataaaaacgaagagtttaattatacaaaatcacataaagatacagataaaaatcaagataataatgctgttaaatactttacttttgaccttaataatttaacatggggaatgcaatatacaattaaatgagtgggtttagcaaaaaataatgtgagtgataatactgattttaaaaaatataaattagaaaagggttatctaacaaagaaaacagatgatttagatcaatttacagttcgtgcaagtaaacctttaaaaattaagcaagtaaatgttagtgaaatcaaagcacatcatgcaaaactaaatctaaaacttgaagaccaagatagtgttttaaaaaatttaaattatgagcttgaattacgttttggagtaaaaaataatcaatcatctaattcatgaattactaaaaaactaaaaactaaaatagtaaataatgaaattgttttagatgaaattgtttttgataacttaactgaagatatgcaatatgaactaaaagatgctaaattaatatttaatgaagaagaattgaagaaatttaacaaggtaacagcagttgataatttaaatgttgattctgatcaaatagtgtttaaaacaatgaaaagtgcttatgttgaaactgcaacgattaattttgtaaataatactccaaacgctacaattgatcttaaactaaatggggatttaagtgtatttagtaaaagtcaatatattcgttttgagtgaaaattaaataatagtgatccaaatactaaaccactttattacactattccaatatcttcattagatcttaataatttaaattgaaaaaaagattttggtagtgatttattatgaaattcatcttatacattacgtattggatatggggatgataataaagccactgatgatagtaaatgaacatgattagcattagaaaaaactgctaaaggaaatattaaaacaccaaatgctcaacgtattagtattaatcaaatgcaaactccaactaattattcactattaacacaagaagttaatgaaaatggaaataaagttaaaaaagcattaggggctttagacttatgttttgagttgaatgatccaagtaatatattaactaatcaagatcaatttagtattaaatacgcaatgttaaataatctaaaacaaagcgtttcagctagtgcacatgttgaaattaaagaaaataaaaaaatagttaaatttcatattagtggaattgatctaaatcaagattataaagtttgtgaactaatgttgttaacaaaaccagctagaatgggtgaaaacatcaataataatgataaaaacaactattcatctatttatcaaaattcaacaaatgatgataatcaatataaatttaaaattctattagaaaataatgatttgtcaactaaggaacgtccatcaaaaacaggtgatgttgttaataataaaggtaaggttgatattacaattacacaagctccaaaattattagctaataaatgaattagtgcagcatatgttgataataatggggaaacaaaatgaactaaaccccgtttaataacaactaatgataataatcaaattctttatcaagctgagattgataatttaactacaaatcgttattataatttaaatggtttatattttggaaatcaacaaagtgattttgaacaaggtaatgctacatatttactaagtttatacccagcaaatttattagtgccaaccgatggtgtacgaattcaaaatattaaaacaccagctacaactgatgctgcaacagtttgatttcaattagaatcaaaagatcaagtatttgataaacaagtattacatattcaaattacaccatttaatgaagatattaataaaaaagatattccagcagaaaatattccagtatttgaacgtacatacacattaaatggaaattctaatagtgcaattgtacttttatctttaaataatttagagcctaatattaaatataaaattactaaaatgtgatttgagcaaaaaccaactaaggcctatgctaatttaaattcaaaagctaataacaatgtaatttatgaaaatactaatgataagacacaacctaatatttcattcaaaactaaaactgttgaaccaaaaattattagtttagttaaaaaagatcaaactaatgatggtataagttttgatttaaaattacagcatgatggaacttatattggtaaaccattcagattaatttacgaatcttcaaaaagaaaaagtgatgtgtgggatgaaaagaataataattgagaatctaatgataaacaactaatctattctgaaccaataaattttaaagcgggtcaaaaagactatttagttcaaatcattaaagatcataatgaatattttaagggtaatcgtgaatataaaatattaggaattgaatgagcagatcctagtttttctcaagataaacaccataaaaaactaatatctaaagatactgatagtgaagcattcaaaaatgtaaatagtaatgcactatcatttagtactgacgcaacaacaattaaatgatatgttgcaacccctaagattgtttataataaaaatcataaaaaaatgacatttcaaattcgatatgacgatccagatgacagtttatttatggggcaaagaataggtatagaaaaaattttactgccaaataaaagaaaacaaatacctttgaaccctccattagttggtgaagttgataacaagaaaaaaatcattgaatttaatattgataataatgatgatcattttaaaccaggtaatttatatcaacttattagcattgatttagtttatgaacctaagacactatcccataaggatttaaataaattaatgtatgaaaatccacaaacaaaaatgtataaggataaagtaacttttgaattagacaatagtcaatactcaagtattaaaattgaagaaaaccaaaatccttatgaagtaaaaagtgtgaaaaataaattagataataaaaatctaacactaaaatcaactgtgacatttaacaataaagatgaacatctttataataaatacatgtttgctttatttactaacactaaaacaaatgcagaagtttgatctaaaccaattcaattaaatactaataattattcaaaattagaatttgatttacctaataatggggctttagaagaaaatagtgaatatcaatttttaggtgtttattataatgaaaagcaaactcatccaaataaaaatgagattgaaaagcaaatttatatgatcgataatctcaaaataattaatattgataatcgcataacaaaaactattaaaacaggtattcatattgatgttaatgaagtgcaaaatcttgcgcaatttaaagatggaatttcaaaacaatttaaattagttggaaaaaatgatagtacagttttaaaccaaattttaaatggtgatttttctataaatattgaatacaaacgaaaagatcaacctgataatgaagctagttttagtactggagcatgtaaattatttaagaaaaataataatgacccattttgatatttcaatgcagattttaacaatttaaattttaatcaagattattatattaaaagtatttcatttgttaataaaggtattaatagaattattggatcaataaataatgctgataatcaaattatttacacaactaataattataattcatcaaaatatcacattaaaaccgtaggggctcaaattgaatttgatcaaactacagttgttaaaaacgatattgtctttacaaaaggtgattctggtggttacccagcatcagtggttaattttaaattaaaaggtaaagaagcaaatacttttgttgaaggacaaacttataatgtagttttatcaacatgagatgatccatttaatacacgtgattatgaaaataagattgataatcatctaaactatgatattaaaaaagattacgtgattgtttcaattgttgcacataataattgtttagaatttaaaaatattcaattaattccaaaccaaaattataatatagttaaagtcttacactatcaagcatcaaatacaatttcagctaaagatatgggctatagtttaaaaaatgcatttagtaccaaatcagtcgattgaaaagtatgaaaatttggtcatggaagaaataactttacttgaagatatcaagttgctttatcccttaaaggaccatttacaggttttggtggttatcgtaaaacaatctttgatttaggattagctaaatcacttggtgtttatgctcgaatttatcaacataatacaaataatttagcttttaaaggctatgatattgatggtattaatgaaggtgaagatacttcattactaacagattttgaaagagcttcacgaccaacaagtgctaacgtgttatcaagcagttgtacattagcaaattaccttcgaagaaattcagatagtttaaaaaatacaattgatattggtaaagtgtgatatgaaccacgaattaatccaaatcttccaaatagttcaaacgctacatattattcaggagaaccaaaagcatcaatctttaaaattgatgatcaacacaaacactacactgatagttttggtacaacgaataatgatgctatggatacaaataacgaaaaccaattttaa

SEQ ID NO: 40688 - DNA, 609 bp, Ureaplasma urealyticum
atgagtcgttatacaggtagtatttataaaaaatcacgccgtttaggattttctttattagaaaataataaagaatttaattctggtaaaaaaagaacatacggtccaggacaacacggtaataaaaaagttaaattatcaaattatggccaacaattagttgaaaaacaaaagttaatgtttttatatggattgaatgatcgtcaatttagacgtttatatagagttgcactaggccgtccaggcgtacttactttaaatttattacaagttcttgaatcacgtttagattcattagtttatcgtgctggatttgctccaacacgtcgtgctgcacgtcaattagtaaatcactcacacgttttggttaacaataaaaaggttaacatcccttcagcactagttgaagtaggtagtacaattgctcttaaggctaaatcattagaaatacctttaattaaaaatactttaaacaaaccagctgattttattgaattaatcgataaagaaaaaaaagttgcaaaattagcacgtttaccagaacgtaatgaattaccagcagatgtaaatgaagcttacgttgttgaatgatacaaccgattaatgtaa

SEQ ID NO: 40689 - DNA, 792 bp, Ureaplasma urealyticum
atgaaaattttagctattggagatattttttcaaaacaaggaagaaaagcagtggccaatgaattgcccaagctaaaacaagagtatcaaattgattttgtaattgctaatgctgagaatacaacacatggtcgcggtttgtgttgaaaacattatgaagaattattaggttatggaattgattgtattactatgggcaatcatacttgagatcatcctgatatttttgaaatcctaacaaccaaaacaaatattattcgtccatataatattattaatacgcatcagtatcacttagtaggttctggttcacgagttttttattgtaataaaaaaatgattcgtgtaactaatttattaggtaattctattgatatgaaaggtttacaaacaaatccttttgaatctttagataaaattattgcttttaatgaagcaccgattcatattgttgattttcatgctgaaacaacaagtgaaaaaaatgcactttttttagattttaaaagtaaattgtctttagtttatggtactcatacacatattccaacaaatgatgctagaattgtcgatcatacggcttttcaaactgatttaggaatgtgtggtgctgctaatagcgtgattggggcaaatccaagtagtattattcaacgatttcgtgatccaaataaacgttttatattagaaccaagtgatgaaaaatatgttttttgtgctagtttagttgaaattgatgatgaaacaaattttccaactaatattacacctattgtaatttatgaaaaataa

SEQ ID NO: 40690 - DNA, 2232 bp, Ureaplasma urealyticum
atgggattaggaattgattattcacgcttaaatcaagaacaaaaagaagcagttacagcagacttaggaccgcaattagtaattgcaggggcagggacaggaaaaacatctgttttaactttacgtattgcttatttaattactgaaaaaaatattcatccatcacggattttaggttttacttttactaataaggctgctgatgaaatgaaagaacgtgttggaaaaacaattggcgtttctattccttatttaagtacttttcattcaatgtgtgtaaaaattttacaacaagatattcattatttaaattatcataacaatattaaaattattgatacagacgatcaagaagttttgcttaaagaaatttttgatcaattaaacattgaaaaaaaatcgcaagttattaagaaaataattaaaacgattagtaaagttaaaaataaattttttgatcaaaacgatatgctaaatgaaaaaaatcacaagtatttagaattggttgatttaaatgatgcacaaagattagttgatatttataagatttattgtgatcgatgttttaaattaaattatgttgattttgatgatttgatcaatttaactcataagttatttattgagtttccagaagttttagaaaaatgacaaaataaatttgattatattcttgttgatgaatttcaagatactaataaaattcaatatgatttaattagtttattagcaactaaacatcaaaatttatttgtggttggcgaccctgatcaaatgatttattcatttagaggtgctgaacaatgaattattaataattttagtcaaaattttaagaatacaaaagtaacaattttaaaaacaaattatcgttcaactcagccaattttaaatacagctaatagattaatcgatgctaataacaacaattataaaaaaaatttaactgcttttaatactaatgacaataatttaccaatttatttacgagggcaaaacccaattgatgaagctaattgaattgctagaaaaattagagaattgttagaagaaggaacgccagctaaccaaatcgctgttttgttccgaagcaatcactattctcgtacgattgaacaatcaatgatgcgcgagagcattccttatacaattcttggcagtaaaaagttttatgaacgtgctgaaattaaggacatgattgcttatttaaaagtagttaatgatttagatgaactatcttttttaaggattattaatacaccacgtcgtgcgattggtccaactacttttgaacatgttaaacattatgcaataaataataatttatttttatttgaagcattagctgaagttgaaaaaaaccatttaataaataacacacaaaaaaagaatattttaaattttgttaatttaattaaagaaatccgtgatgaaatggaagatttaaaaattcatgagattttagaattaatttacaaaaaagttaactatgaagcttatttattagaaaacgaaaaagcagaagataaaatcgataatgtttatgaattaaaacgcgctatgaaaatgtatgttgatcgtcatccagatgacacgattaatgattatttaaattcgattgctttatatttgaataaggatggtaaagatagtaaagaaaatgttttattaatgacagttcataattctaaaggtctagaatatgaaaacgttttcgttgctggtatgaacgaaggacttcttccttctgatcgagcaattaatgatgatccaattaaaggagttgaagaagaacgaagaattgcttatgtagccttaacacgagcaaaaaaaaatctttatatttcatctgcttgttgttatgatccattagcaagaagacaagtatttgaaagtcgttttattaatgaaattggttttaataatttaaagattataaatagtagttttaaaaataataaaccagaggatatgccattaaaatcattcttaaaacaacaagaagaacgttcatggttcgattcaaaacaaaaacaaaaagaagttgaagataatttttatcaaacaatgaaaaacgattttgaaattggtgaaagaattgttcacacaagttttggtgatggtgttattattggaattgatggtgatatcttaacaattgctttcagtaaatatcgtcaaccaaaacaaattaattttaatcataaaacaatcgtaagaagaataggttaa

SEQ ID NO: 40691 - DNA, 234 bp, Ureaplasma urealyticum
atgtctattaatattaaagatttaatcatgaaaatcgctaaggaaaataaaattgctttaaatatggataatttaaatatcgaattaaaatcattaggaattgattcgctaagtgctatgaatttaataatgaaaattgaggatcaaattggcgttcaattgcctgatgaaaaattattaaaaatcaaaaatttacgtgatttaattaacgcgtttgaagatgtattaaaataa

SEQ ID NO: 40692 - DNA, 1368 bp, Ureaplasma urealyticum
atgacattaaatgaaaaaaaagaatttgtttatgaattaaaagctgttgaaaaaaatcacaacctaaaaggttttgaagaaaatacaactgaacatgttgtttttggaggtttatatcaaaaacaacaatacttaattttaacaccagattttgattctaatgaactatcaagatcattgattagttttttagaaaaatcacctaaatctgttagtgttgatttaaattcatttctatcacttgtcccagaatcaagacatgcatctttattaaatgttgttattagtgcattagaatatgttgaagtaacgccattttcactaaaatctaaaattgaaacaaaaaatatacataatttagtagttgatcaaaaatatcatgatttaattaataaattacatgtaattgctcaatcacaaacaattacaagaacattacaagatacgccagctaatttaatgacaccaggtgattttgaagaacgaattaaagaattatttaaagacttgccagaagttaaagtaagtgttttatatcgtaaagatttagaagctaaaggaatgaacgctcatgttggtgttggtaaagctgcagtaagtgataaagcacagcctcgtttagttgttgttgaatataataataatccagaaacaaatgaaaaatatgcttttgttggtaagggtgtatgttttgattcaggtggatataatgtaaaaacgggatcacatatgcgttgaatgaaatttgatatgtctggttctgctattgtaagtatgacagtgagagctttagctttaaataaagaaaaagttaatgttgtggctgtatgtccattagtattaaatttattagctccagaaggtcaaaaaccagatgatatagtgaaatcatataatggtaaaacaattgaattagataacactgatgcagaaggacgtttaattttagcagatgcactaacatatgctgttcgtgatttaaaagcttctaaattatttgatgttgcaactttaacaggtgctatgatttatgctttaggtgatacatattctggtgtatgagcaacaaataacgacatctgaaatgaagtagttgtagcagctgattatgctggtgaattagtttgaagattaccattccacaatgatttcttaaaaatgttaaattcaaatgttgctgatattgctaactcagtatctgatcctcgtggtggttcttcacgtgcagcatgtttcttaaaagaatttactgaaggcgttccatatgctcattttgacattgctattactgcagatgttggtcataaaggaactggtgtaatgttaagaacattttatcgtattgctcaaaatcaaaaatttaattag

SEQ ID NO: 40693 - DNA, 2304 bp, Ureaplasma urealyticum
atggttagtgacaataaaaacacattaaataaggaaacaattagtttttatagttatgacaatcaactagatgcacaaaaaacagaatcaaacggaaaagaacaagaaaaaagcaatttaaagacaaaaaaattcaaagttcaaaaaaattatttttttaataaaaaaaagcttattggaatttgtttttttatattaagctttttaattttaatacttgcttttttaaaagccccatatacaggagcgattttagacaatgttttagaatttttttttggatgagttaaatactatgtttatgtaattttattattatttttaattgttttttatattaaaaaagtcagaaggcgtttatttagtaaatgaatgattgttttttatattattacactaattttatttgctttaattattggtgcagttggttatggaattatcacaaattcattaacttataaattcattattaatacaaatcaacaaatgattaataaggaaatacttaatttacataaagataatttcgaatatattagtttagtaaatttacactcaaaaaaattacatttatgtgagtggtgagcttatagctgatcgcaagaatttttaaaagcgattgatgaaaaacattattattatactagtgtttttgcttatggtggaattataggatatgctaatttagatttatatcgtgctaatgcttgaatttttactattgtaattatgtttatggttttagttcttatttcttttattctaatcacttttggcacgaaaagtcatttaggattaaaattcaaaaaatgattagttaataaaataatcactaatatcaataactatcacaaaaaagattatcaattaagtgaacaaaactttttcgaagaaaaacttggtgaagatcaccacaatattgataaacaattggagcaaaaagaagttatccaagaacaaaatttacaaattaaaaattttaatgatcggcaaactaattcttcatgtatcacaaaaaatgataaactaaaaaccactattttagaaccaattgttaatgatattaaccaattccgagaaaatccatcaacaatcaagaataacaagtacaatttttatccacgaattgatattatagatggcaaaagtcaagattatttgcatgaacttaaatcaaaaggtgaaaatttaaaattaattatcgataaatttttagaaaataaccaattagaatatcattttaatgcaattaatccttatttttcaaatgttgaaattgtttatcagtttactcgttcatcattaaacaattttttaaaaaattttttaaatttaatgaaacaagcagttaatgatacagatgattatgaaatcaatatttataatgacaatgactttttaatcattcaagccaaagtcaaagatttaaatcctcaaattaatattaaagatattctaactaatttagaatacaatgataaattatgtttaggaattggaaaattaaaagaaagaaaagtagtttgattagaagatacacaagctggaagtattttaattcatggtagtcaacaattttctggaaaatcaatgttaatttctaacattattattagtgctttatatactaaatcacctaatgaattagaattatttattattaataatggttcaaaatcattaaaagaatttgctaaattaaagcatacaaaaaaaagcgttgatcatgatgattttgaaaatgttattaatttattaagggaaattatgaatgatattaacaagcaaaatacattatttgctgataataatgttgataatttagatgaatataatctaaaaaatcaaaatcaaaaattacctaaaaaattaatcattatttctgaatatgttgagatagtaagtagtcaatttaatacacgttttgataccttaattcgcaatatagcaaatattgctaaaaaacacggaatcgttttaataatttcatcaaatataactaacgaaagcacagtttcttttaaaaatgtatttgattataccattgtattaaaattaaataatccgtatgaaagtattttattaactgatcgtaattgatgtaataatttggttggttttggggatatgttattaattcgcaattttgataatttgccactacgattgcaaacagcaaaaattacaaatgaacagtttgctaatattattaatgaaatcaatagtgctgattatgatattgatgaatatcgtcatgaaacaagattaacatcaagaacccaaaatttttttaataaataa

SEQ ID NO: 40694 - DNA, 1137 bp, Ureaplasma urealyticum
atgattagtgtcaataaaatcaatgaaaaaacaaaaaacactttttttaaacggttttattcatcgatttttatttttttatacttattaatttattttgttttagcattattagcagatcgtaattataattgaacacctttaattaataatttatatattcaacaagggattgcaattgttttattaatatgattattaccattaatatgtattggttcgtatgaaatgaataaagtcatttttgataataataagataacattaatcatcttaacaattgtttttaatatttgcatttatactacaacgatttcttattttatatatcaatatgagtttttaaatattaaataccttttaactataaattaccattacgtcatcaaactatttggcgcatgtttaggatgctcgtattttgttacattagttattttatttttctttttagcatttctaaaaaaaattaatttcaaaaattgtttatacacaattttaatttttagttttttaagtggtttttttataggattactttattttacttttattagaagttgaattacttcattattgctaatgatgattgtttttttaagtgatacatttgcatatgttggtggtgttttatttggtaaaacaaaattagcaccaaaaataagtcctaacaaaacagttgaaggattaatttttggtttagtaattgcaacaattgttattatgttaataatttttggtttgtcatatgtgccaattaaacctaaaaacggcatagtgttaaaatcacaaaatgttttatataatatttttggtttagatttttctagttcaaatgaaaaaaatcttacattgcataaacaagcattatgatgaatttgcacaatagttgcttttttgtttttgagtttaataagcactagtggggacttagtatttagtgcgattaaacgtaattatcataccaaagattatagtaatttaattcctggccatggtggattattagatcgtatagattcacattcatttgtaatatcaatcatgttcatttttacacttcttattacaggcagtttacaagatgaaaatttatttcctaacattcaaaaattttttattcaattaattgtataa

SEQ ID NO: 40695 - DNA, 552 bp, Ureaplasma urealyticum
atgaattttaaaatttatgaaactaaaatcagagaagaatttgaattagtgttaaaatgaatgcacaatgaatttattaaattgcgaacaggaagagctacgcctgctattttagatggtattttagttaattattatggttcaatgatgccaattaatcaattagcaaatatttcagttccagaaccacgtgttttagcaattaaaccttatgatagaagtagtattaaagatattgctactgcaattaacgcatcaaatttaggtgttaatcctcaagtagatgttgatattattcgtttaacgttcgctgctccaacagaagaagtaagaaaaaatttagttaaaaaagcaaaacaggttggcgaagaagctaaaattcgtgtacgtcatatccgtcaagaagcacaagatttattcaaaaaagattcaacaactattgaagacgataaaaagttttttcaaacagaattagataatttaacaaaagaattaaataaggaaatcgaaacagttgtaagtcataaagaaaaagacataatgactgtttaa

SEQ ID NO: 40696 - DNA, 708 bp, Ureaplasma urealyticum
atgcgaaaacaacgaattgtaattaaaatttctggagcttgcttaaaacaaaatgatagttcaataattgattttataaagattaatgatttagcagaacaaattgaaaaaatttctaagaaatatattgtatcaattgttttaggtggtggcaatatttgacgaggtagcattgccaaagagctagatatggatcgtaatttagctgataatatgggtatgatggcaactattataaatgggttagctttagaaaatgctttaaatcatttgaatgttaacactattgttttatctgcaattaaatgtgataaattagttcatgaatcatctgctaataatataaaaaaagctattgaaaaagaacaagtaatgatttttgtggctggaacaggatttccatattttacaactgattcgtgtgcagcaattagagctgctgaaacagaatctagtataattttaatgggcaaaaatggtgttgatggtgtctatgatagtgatccaaaaattaatcctaatgcacaattttatgaacatattacatttaatatggcccttactcaaaatttaaaagttatggatgcaacagctttagctttgtgtcaagaaaataatataaatttattagtttttaatattgataaaccaaatgcaattgttgatgttttagagaaaaaaaataaatacacaattgtttcaaaataa

SEQ ID NO: 40697 - DNA, 876 bp, Ureaplasma urealyticum
atgacaaaagctgaattagttaaagaattaagaataagaacacaagctagtatgagtgaatgtattaaagctttagatgcgtcagaaaatgatattgaaaaagcaatagtatgattacgagaaaatggtgctattaaggctgctaataaactaaaaaatgcagcgacagatggtgttgtattggccaaaaaaataaataataaagcaattcttattgaggttaattgtcaaactgactttgttgctaagaatgaaaattttttagcttatgctaatcaaattttagaagaagcattagctaaggttgaaaataaagaagattttgataaattaattataaatggaaaaccaattgctgaatcaggattagatttaacagcatatattggtgaaaaaatcgtttttagacgtggagaaattttaaaagctaatgatgaccaaactttaggtgtttatactcacaataacaacagagttgctgctattattttagttgatggaaaagttgaagatgaagttgttcgaaatgtagcaatgcatgctgcagcaatgcgtccacgttatttaaatgaaaaagttgttgataagttatgattagcgaaagaacgtgaaattattgttaatcaattagaacatgaaggtaaaccagcagcttttgctgcaaaaattattgacgggcgtttaaataaaattttaaaagaaaattgtttagtagatcaatcatattttaaacaaccagaattaacaattgaaaaatatttaaagaataataacgctgttgcagtaggttatttctcatatgaagtaggcgaaggaattgaaaaagctcctcaaatgagttttgctgatgaagtagcagcacaaatgaaaaaataa

SEQ ID NO: 40698 - DNA, 1026 bp, Ureaplasma urealyticum
atgattaatttaaacacttgaaataaaactcattcttttaaaaaccctttaaaatatcaaaataaaatcgcatatttaaaaacaatgataacagtaattataagtattgttgtatttattattacattagcttgaacttatgattttaattttaaacaagacaatattgccttggcttatataattatgcaaatttttttatcaggttttattttaggattttgtgcatatttaattcaaaaattaacaaaaaaccgcttcagtgatacatcaattatgggaattagtagtgttaatattttaggagtaattattattgcatttcaggttgattttaataattttagtgctgataaattatcaacattagagcatactgaaccaataatattttttatagcaccaattattttatgtatgctctattattttacatgcaaagaacaaagtagttttaattataaaaaaatgctgatttcaggagttattgttaattttttaagcgttgcattaggagcaagtattgctaaaaatttacctaaattagctaatgcttacgtttcaagatacacatatggtagtattgaaccacaacaagagtctttttttatcgctttagttttaattatcatagggttattaatagttttatttaattttaaaaaaattcaaatagtttcatctaatcaagacttagctaatcaattaggaatcaacgtcaaattaacttctggacttcttttagttgcaatttgtttaatggtaggagcatcatatagtttgaatggaaatttgatatttataggattaatggctggaaacatgggttctgttattagtaacaaccgatttaaatccgctgctattagttcaggatgttgtgggtcattaatatatatgttgtcttttttattatttattaaaattttaaattttgatagtcaatgactaaatttagccattcccttaattatttctccttactttatttatattattgttaaaaaaaataaatcagatttatag

SEQ ID NO: 40699 - DNA, 1794 bp, Ureaplasma urealyticum
atgacatcatcgattgaaaaaacgccccttgtaattaaacgtcatgtttttaaaaaacattatggcatttttacaacattatgagaagtcataaaagatagctcatcgtttatagcttcaagtttgttctcatcgttagctttattattaattacaataataatagcgttacataattttagtggtgcatttgctgcgacaagtgttagctatattgttgttttccaatttagttttatacaattaggtggaaatataggtgtagttttagccttatgagctaaaaaactatatgatggaagtaaacacaagtttgttccatcacattcaacaactaacttagcaagtttttatgcattttcattcggtttaataatgttgggtgtttatttggcgacatcttatacttataatctttatgcaaacattcatgaaaataccttgtttgctcaactatttggtgaacaatacatatgatcaagtttggggattatcgttttagcaccagttcataattattttttaatttctatttgaacaaatgatcgtcgtaaaattctattaactattattttagattttgccacatgaacaatttgtttagtgacaagttttttattaggtaaatatagtattttagcttatagtgggtatggtttaggattgtcaattggttatattatttcaacaattgccattagtattattaaatttagtaaagattgaaggatatctaaattaggtttatcattaaatttattaaaaattagcattaaacaaatttgaaatcaaactttaatttcgatttttagttcaattataaaaatgtttgttctattagctttatatcatttaattaatcaaaaaatgacaaattctgttcctttaaatctacaaactggtcgaattttatgatatcatgcgatgttgtttattcaagggattggattaggttttactgattacctattttatatttttcaaaaacaaactattcgtgatcgtcgttaccattcgcgccaattatttatttgtgtttttggtttattgtttgtttatttaatgattgcagcaattatttttggtttttcaatcaaacctctatcagtcgtttatgctaaagaacaaaatgaagcatatattaatttagatgcagaaataccagatcatttttatatgtcaattcgtcaaggaattttaaataatcctcgattagtatactttttaggggcacaagcccatattgatccaagattgattttagcacacttaacaaaccataatcctgaggtatgaaaagttgttattaaacaattaataactccaatttgagcagcagggcctaactttaaatatttatatggtattgataatccaattaccacatcttttgtgcaaatttcagcagaggtagttaaaaaattattaattggtgataatacatatattcatttaacaatatttgcaattttttactcattgtcattaacattaatgcgttatcgtgatctaattgctaaaaagcaacaatcaccttttccaacattattattgcaagttttagtaattgcttttgttgttggttttggtgttgattaccaaagtagtgttaagtttgctggattattggcgtgatcaatgccattatcaatatctagtgctgtaattttaattatttctttattaatgtttacgattgtctactacaagtatttaaataaaaacgattataaagataatcaaattactaatcaatattcatttaaatgaatccgccatattttatgaaaatag

SEQ ID NO: 40700 - DNA, 1836 bp, Ureaplasma urealyticum
atggtgtttttatataaaagggggagatttaatttggaagaacagaaacaaatgaaagttattaaaaaatccgattcttattttaaaaaaaatcttaccgtttttagaacacttttagaacttttaaaagaaagctcgccatttatcgctgcaagtgtttttacaggactatcattaattttaattgttgtaattgttgctcatcataaagatattggtgcttatgcagcaactagtattagttatttaactatctttcagttaagttttttacaattaggaacaacctttggcattgtttttgcgatttggtcaaaaagatcatttaaagatggtaagtataagtttgaacctacaaatgatacagtaaatgctgctagtttttattcatttatctttggtttagtagttttattaatttattttacaacctcttacatttataatcattttgcaaatgatcaccaaaatacagtgattaatcaaagtgtaggtagtgcatatattgtttcaggattagcagttgttggtttagcacctttgcgaaactatttattgatgttaataagatcaaccaagtccattaatgttttattagcaattgttttagatttttgtacatgaacaaccgcattaattgcagcttttttattaggtagttatagtgttttaaattattggggctatggccttggtatgtcaattggttttgttttttgaactattattattggtatgactacaattgaaaaagcccaaattgttttacgtccattatatatttcaaaaagattatttgttttaagtattaaattattatgaattcaaacgattttatcatcattaaaatcagttggtaaaatgtttattttgttaattacatttgtggtaattaactcacgtgtagttggttcatcattattagattttcaatcaacgagaattctaatgtaccaatcaatgattttcatacaaatgttaaatttaggattgtcagattttttattttatttatatcaaaaacaagaagtcagagactgtcgttatcattcaagacaattatttttttgagtttttatattaggtattttatttgctttaattacttcagttatttttggtttttctgtaaaacaattagtccaattgtatacaagtgaacaaagtccatcttatatatttttagaaaagcaagttcccgaacatttctatcaatctttaagaaaaattttaattaatgatgaaaaattattagatattattactagtcatgtgaatattggtcgccaagaagttgttaatgctttatcatcaaatgataaaaatatttgattaccaatggcgcaaaaagtgattgatccaatatgaaaactaggtgataaatttgaaacgatatatcaaatgaaaaatccttttacacatcgatttgttgatatttcagcttcaaatatttatagttatttaattaaaaataatgcttatattttattatcattcttttgtacattcttttctttttcttctattttaagtcgttatgtaggattaattgcccgacgacaacgtcctccatatgtaatgattgttattcaattagttatggttgcgtttacttctggatttgggttaacacaccaatcagatccacatttcattggtttaatggcttgatcatttcctttatttatatcaagtatttttattttaggatatagcacttataaaattttacgtatttatcgtaaatatttaaagaatcataagtacaatgatgaaaaattatcaattatgcctaaaaaacaattagaacaacaaattaaggttcgtcaaaattaa

SEQ ID NO: 40701 - DNA, 1185 bp, Ureaplasma urealyticum
atggctaaagctaaatttgaaagaacaaaacctcacgttaacattggtactataggccacgttgaccatggtaaaactactttaacagctgcaattagtactgtacttgccaaaaaaggacaagctattgcacaatcatatgctgatgttgataaaacaccagaagaaagagaacgtggtattacaattaacgcttctcacgttgaatatgaaacaaaaacacgtcactatgcacacgttgactgtccaggacatgccgattatgtaaaaaatatgattacaggggcagcacaaatggatggagcaattttagttattgctgcatctgatggggttatggctcaaactaaagaacatattttattagcacgtcaagttggtgttccaaaaatcgttgttttcttaaacaaatgtgatttcatgacagatccagatatgcaagatcttgttgaaatggaagttcgtgaattattatctaaatatggatttgatggcgataacacaccagttattcgtggttcaggtcttaaggctttagaaggagatccagtttgagaagcaaaaattgatgaattaatggacgcagttgattcatgaattccattaccagaacgtagtactgacaaaccattcttattagcaattgaagatgtattcacaatttcaggacgtggtacagtagtaactggacgtgttgaacgtggtgtattaaaagttaatgatgaggttgaaattgttggtctaaaagacactcaaaaaactgttgttacaggaattgaaatgtttagaaaatcattagatcaagctgaagctggtgataatgctggtattttattacgtggtattaaaaaagaagatgttgaacgtggtcaagtacttgtaaaaccaggatcaattaaacctcaccgtacttttactgctaaagtttatattcttaaaaaagaagaaggtggacgtcatacacctattgtttcaggataccgtccacaattctattttagaacaacagatgtaacaggtgctatttcattacctgctggtgttgatttggttatgccaggtgatgacgttgaaatgactgtagaattaattgctccagttgcgattgaagatggatctaaattctcaatccgtgaaggtggtaaaactgtaggtcatggtagcgtaattaaaacaagtaattaa

SEQ ID NO: 40702 - DNA, 2067 bp, Ureaplasma urealyticum
atgtctaaagaattaaaattatttcgtaactttggaatcatggcacacattgatgctggtaaaacaacaacctctgaacggattttatatcatacaggaaagaatcataaaatcggagagactcacgatggtgctgcaacaatggattgaatggcacaagaaaaagaacgtggaattaccattacatcagcagcaacttatgcaaaatgaaaaggtcatagtttaaatttaattgatacaccgggacacgttgattttactgttgaagtagaacgttctttgcgtgttttagatggagctgtcgctgttctagatggtcaaaatggagttgaaccacaaactgaaacagtctgaagacaagctactaaatataatgttccaagaatcgtttttgttaataagatggataaaacaggtgctgatttttattactcaattgagacaatgaagaatcgtttaggtgttaaagccacagctattcaaattccaattggtgctgaagccgattttgttggaagtattgatttaattgaaatgaaagcttatatttatgatggaaaagctgatgaagaatataaaattgaagatattccagctgattacttaacaaaagcacaagtaatgcgttcacaaatgatcgatgatgtagctgtttttgatgatgaagtgatggaaaaatacttatctggtgaagaactaagtcatgaagatattaaaaaatgtattcgtaaaggagtaatttcaactgaattatacccagtattatgtggtacagcttttaaaaacaaaggtgttaaaaaattattagacgcagttgttgatttcttaccttcaccaattgatgttccaccaattaaaggtgttgatgatcatggtaatccaattgaatatcataatgatccaaatgaaccatttgctgcccttgccttcaaagtcgcaactgatccttttgttggacgtttaacatatattcgtgtatatagtggtaaacttgacaaaggtacttatatttacaatgcaacaaaagataaaaaagaaagaatttctcgtcttgtaaaaatgcattcaaacaaccgtgatgagattgattcaattagtgctggtgatatttgtgctgtaattggattaaaagacactactactggtgatacaatttgtgatgaaaaaaaaccagttattttagaacaaatggtatttgcagaacctgttatttctttatctgttgaaccaaaaactaaagcagatcaagaaaagatgagtttagctttatctaaattagctgaagaagatccaacttttagaacatacacaaatgaagaaacaggtcaaactattattgctggaatgggtgaattacatttagatgttttggttgatcgtatgcgtcgtgaatttaatgttcaagttaatgtaggtgctcctcaagttagttatcgtgagacatttactgaagttgctgatgctgaaggtaagtatattaagcaatctggtggacgtggtcaatatgggcatgtctgaattaaatttgaacctaatcatgataaaggatttgaatttgttgacaacattgtaggtggtaaagtaccaaaagaatatattaaagaagttgaaaacggcttgattgaggcattaacatcagggccaattgctggttatcaaacaattgacgttaaagcaactatttttgatggttcatatcatgatgttgattcatctggtatggcttataaaattgctgcatctcttgcttttaaagaagcagcaaaagtatgcaaaccagttttattagaacctattatgtcagttgatgtaactacacctgatgattattttgggacggtaatgggcgatatttcaaaacgtcgtggtgtaattgaaggacaagaacaacgtggtaatgcacaagctattaaagctaaagttccgctatcagaaatgtttggatatgcaacggatttacgttcaaatacacaaggacgtggtcaatatattatgcaattcagtcactatgcacaagcacctaagtctgttactgaagaagtaatggtagcacgtgcaaaaaaataa

SEQ ID NO: 40703 - DNA, 468 bp, Ureaplasma urealyticum
atgagaaaattaaaaccacaaaaaagacaagttttagctgatccagtatataactctcgtcttgtaactaaactaatcaatgctattatgtatgatggtaaaaaaggattagcacaatctattatttattcagcctttgagattgttgaacaaaagactggcaaaccagctttagaagtttttaataaggcgattgataatgtaatgccaattattgaacttaaagtaagacgtgttggcggttcaaactttcaagtaccaactgaagtaacgccagaacgtcgtcagactttaggtttaagatgaattacattatatgcacgtttaagacacgaacatacaatgattgagaaattagcacatgaaattattgatgcttcaaataatgtaggagcagcaattaagaaaaaagaagatactcataaaatggcagaagcaaataaagcttttgcacacctacgttgataa

SEQ ID NO: 40704 - DNA, 426 bp, Ureaplasma urealyticum
atgcctacaattgcgcaattgattcgtaataaacgagcacctaaagtaaaaaaaactaaatcacctgctcttttatttacatacaactcattacataaaaaaacaacaaaaaacccatcacctctaaaatctggtgtttgtactagagttggtacaatgacacctaaaaaacctaactcagctttacgtaaatatgctaaagttcgtttaagtaatggttttgaagttttagcttacattccaggtgaaggacataacttacaagaacacagtgtcgtagttattcgtgggggaagagttaaagacttaccaggggttcgttatcatattgttcgtggtgctggcgacgcatcaggtgttgaaaaacgtcgtcaacaacgttcactatacggtgctaaacgtcctaaaaaagaagcatctaaataa

SEQ ID NO: 40705 - DNA, 900 bp, Ureaplasma urealyticum
gtgactggtgagcagttaataaaaagtgttgggaacaaagggatagatttacttacttattcattcccttgtcaagacttatcaacagctggaagctttagtaaaaaagcttttggaatgaaaaaaggatccggtacacgttctggattactatgagaaattgaacgcattttattcgatttgcaaaaattaaatcaattaccacaatttcttttattagaaaacgttaataacatgttatctaaacaacataagctagattatgatatgtgaaccaaatctttaaaacaattaggttatagtacatgtacttttcaattaaacgctcttgattatgggtcagcacaacgtcgtaaacgagtatatgcaatttcgattctaaactatgatggattaattgatagtaatggaaatattttagatttagaagcacctatttttgatggaaaacaaaaacaattaaaggatgttttaaaaactaattataaaattgaaaaatattatcaagaagcatatttagctcaaccaaatcgcacattttcaagaataaaatatgtcattccaaaatatgatttattaaatcctaattgttattgtacttcaacaattacaacacgtcaagatcgttttcctaatggtggttatatcaatttaaaaaatacgattttaggtgatgattatcgtgaaaaagatcacaataatttacctaaaaaagcaaactttcgtttattaacaaatcgtgaagcctatctattaatgggctttaatgaaaaagattttgaagcgattcaagctaagggaatatcaaaagctaaaatgtatcaacaagctggaaattcaattgttgttgatgtaatggtttatttaatgaaattaattcaagaaagatttaataaataa

SEQ ID NO: 40706 - DNA, 756 bp, Ureaplasma urealyticum
atgaaaaaatttataaattatttaaaaaatgtaaaaggatatagtgatggtacaattgctatttatcaaaaatatgttaaagtactaattgataataatttagattatttaaaagctattaaaaaatatgaacataacgctaatgttactaagcgcgttgttttaagtgcttttaaagcatatttaaaatttattaatcataaagatgctatattgattgttatgcctaaaaaagaaattaaagtaaaagaatttttgacttgagataattttttaaaaattattaataatattaatcaagctacctttttaggttttcagaaatatttaattttaagaattttatttgaaacaggcattcgatcttgtgaattattaaaactagaaattaaagatatttatgaaaataagttaaaaattcatggcaaaggcaaaaaagaacgctttgtttatttatcaaacgatttacaaaataatattaaaaaatatattggtcaaattaaaacaaaatatttatttaattttagttataaaaatttgtatcaaaaagttactagaattaaaactaatattaggctaacgcctcatattttacgtcgtagttttgctaaccattgcattaataatggtattaatatttatgatttatcattagttatgggtcataacaatattaattcaacaagtttatatttaaataaggaaagtaaattagtagaattagatcatctttttgataataaaaaagttaattaa

SEQ ID NO: 40707 - DNA, 1659 bp, Ureaplasma urealyticum
atggaaaatacaaataaaatttttaattgttgattaaattcaccaaaaattcctcaagtaattaaagaagaatataagaataaaactcaaaaagaaattgatcatatttttgatgaaaattatcgatttaaattcggtacatcaggtgtacgttgtatttatgaagaaggaactcgttatttaaatgcaataacttatactcaattgacattaggttttattgaatatttagaaacgaaaaagaattttaataaaattattgttattggccgagacaaccgctttggctcacgtgaaaatttgaaactagttgctgaaatttttagtagttttgattatactgtttatattaatgaagattatgggatgttatcaactccaattacttcatttttaattaatcaattacaagcaggagctggaattatgatcaccgcttctcataatcctaaaaattataatggttttaaagtttataatgctaatggtgctcagccattagttgatgatactaatctcattgaatctttaatgccatcatatacagaagcattggattttaactttgaatttaaacaagataatattagatttttaacaaaagaacaaattcaaagttattttgatgcagttaaagcacaactaattaatactgatcctaatattaaaaaacccttcaaaattgtttttagtggtcatcatggaacaacaacaaaggacatgattccttttttagaatcacttggttatgatatggttagcgttagcgaacaaaattttgaagatcctaattttaatgatgacccaagttctaatccagaagaacaatgttcatttgatttaagtgttgaatatgcagacaatacaaacgcagaaataatgattgcatctgatcctgatggagatcgaatggccattgctgtacgtcatgaaaattattgaaaatttttgactggtaatcaaacaggtgttttaattgcgcattatttattagaacataaaaaatttactaaacctacatatattatttcaacatttatttcaacacgctatccagaattatttgctaaaaattttgattgtgatgttttatatgtagatgtaggttttaaaaatcatggtaatttaattgccaatcgtaaaaaaacacataatttggttgttggttttgaagaagcaattggttcattaccatctgatattaataatgataaagattcatatcaaactgcgtctattttgttagaaatgattaattattattatgaacaaaaacttgatttatttaccgttttaaaaaaagagatttttgctaagtatgggaattgatatagtaaaactactcagtttgttattgatggtgataactgaaaacaaaaagcacttattattttaaataacttaagaaattttgaatttaaaacagtaacccaatacaccattcataacattatttttcatgaacaaggatcttatcttgaatgaaaattagacgaatactcaacaatcaaatttagattatctggaacagaacctaaatttaaagtatatattgatttatatgattttagcaaagatcaaaaacgagatttttatcaagaactaaaaattaaagctgaagatattttagattttttaaaaaattatttaggtctttaa

SEQ ID NO: 40708 - DNA, 162 bp, Ureaplasma urealyticum
atggcgattaaacgaggcgttagattacaatgtaatgagagtaaaagtattaattacattactacaaaaaatgcaaaaaataatccagacagactttctttaaataaattttgtcctaaatgtcgaaaagtaacaactcacgttgaaattaagaaaaaatag

SEQ ID NO: 40709 - DNA, 1743 bp, Ureaplasma urealyticum
atgtataagtttgatcaaaaactaaatcacagtgctgcacatcttttagcaatggcactaacaaaattttatcctaacttaagccttgcgattgggccaacgattgatgaggggttttattatgattttaatctaaatgatccaaatacctcaattacccctttagatttattaaaaattgaaaaagaaatgaagaaaattactactcaagctttaacgtttgattatgaacaagttacttatgaaaaagcaaaggaattgtttaaacacaataaatataaattagatattattgaacaaaataaaaataattcactttcaatttatcactcaggtaaatggtttgacttatgtaaaggcccgcatgtacaaaacacaaaagagatcaaggcaattaaattattaaatattgcaggttcatattgacgaggtgatgcaaataatgatcaattaattcgtatttatggggttgcttttagtgatcaagatcaattagacgcttatttaaaagatttacaagaacgaaaagaacgtgatcatcgtaaaattggtaaagatttaaacttatttacttttaataatctagcaggccaaggattaccaatttgattacctaatggaaccattattaaaaatcaggtacaaaagtttattaatgaagttgaatttcaatttaattttgatactgttattacgcctatattaggtagtatagatttatataaaacgagtggacactgagatcattataaagataatattttttcaccagtacaaattgataatgaaatcttagtacttcgtccaatgacatgtcctcatcatacattagtttactctaatgaacttcgttcatatcgaagtttaccaattcgtttaagtgaacattcaattttacatcgttatgaatcatcaggtggattaacaggctttgagcgggttcgtgagatgattttagaagattgtcatgttttttgtcgctttgatcaaattgaacatgaagttattaatgcttttaaaatgattcaagaagctcaagaaggattgggtattaaaacatttgaaattcatttatctttaaatgatcctaatgataaagaaaaatattatgatgatcctcaaatgtgagaacaatcacaaaatgtgttacgtaaaatgttaaaagatcacaatattccttataaggagatggtaggagaagcggcattttatggtccaaaaatcgattttcaggttaaaactgttttaaatcgaattattacagtttcaactatccaattagattttttattaccaaaccgttttaatttaacttatattaatgaaagtaatgaacaaagcgtaccggtaatgattcatattggtattattggaacttatgaacgtttattagcaattttattagaacaaactaaaggtattttaccgctttgattatcacctattcaagtagttatcattcctgttaatgaaaatttacatactgattatgtaaaggagctaaatattaagttaagaaagcatttaattcgtagtaatgtagatttacgtaatgagcgtttatcaaaaaaaattcgtgaagctcaaattcaaaaaatcccttatcaaattgttattggtgatgaagaaattaaaaacaacaaaatggttacttaccgttgctatggtagtgaaaaaacgacaacagtttctattacagattttataaatatgttagaaaacaagattagattaaaaaaataa

SEQ ID NO: 40710 - DNA, 1317 bp, Ureaplasma urealyticum
atgagtgctaatgcttatgtgtttcgacgttcaccaattcatcgtttaaatccagcaattaaatttatttcttttattttattaattgctatgatttttttaccacttggcttttttgcgcaaatgattattggaatttttattttaatcgtcttttttgtagctaaattacctaagcgtactttatgaaatgtttttaaatccgtcgttatgttgttcattatcctactacttattaattgaatgacatataaagatcctattgctatttataatgtcacagatcaagctaaagtaattttaggtaataatagttgaattaatggtcctattaatagaaatttatcatttaatttattttataatgatatttcatcaactcatccccaaaatttagtttcgaatatttgaggtggagaaattaaaaattatattagtcctgagattattaaaaaactaattgataaacccgattataatgttgctaaatttttaaatgaaaataacgtaactgttaaaaaattagaaagtacttttaatgcgttaaaccaagatgttcgattgaataatttttatccaatttatggtaatagtaccttaaaatctggaaaacttgaagtgccattaagtcatttatcatattatatgtcaacgaatttatgaaagatcaatggtattaaatatcaaggtttaattttgtcaggtgtaggtgatcaattaggtaaggctcaaaccgctttattttatacacgaagtcctttcgctttaagtcctattgctattcaattagctgtttatatatcaataaaaatttttttaatgataaccttatcatcaattctaacagctacgacttcatctattgaattgacaaatggtttggaagatttgttaagtccttttaaaattttacgattgcctgttgctgaggcttcaatgatgatttcaattgcattacgttttattccgtcattattagatgaatcaaaaagaatattaaatgcacaagcttcacgtggtgttgattttaataatggcggacctattcaaaaattaaaatcattaatttcactagttgtaccattattttcaattgcttttaaaaaagcagaagatttagcaaatgctatggaagcacgttcttataaccctcgttatgcacgaacacgttatcgtacttttccattaaacctagcagattatgctttatttggaattttgtgtattctcgttggatttttaatatcattggccgtgattaaattttatttcactccatttggtgtatttgaagcaagtgcattgtttgctaagtaa

SEQ ID NO: 40711 - DNA, 1302 bp, Ureaplasma urealyticum
atgcaaaaattaatggattattttttcaaaagaaaacttaaagtaccacgaccaatatctaatgatattagtgttcgtgtaaaaaatttatatgctgtttatgatgaaaaacaagaaaatcaattagtcgcattaaataatatttcgtatgattttaaaaaaaataaaatctattttattattggaaattctggttctggtaaatctacgctagttactcattttaatggattaatgatctcgcgttatggtttcgttcaagtcggtgatattgtttctggtgatcattttgattttgaacgccaattattaggagtgattgattcatatgataaaaaaattattaatttattatgacggaatcaactagatcaatggacctttctagttttattttctaatgaagttaatattcaacaagcacggattttgtttgaagcaaattttaaacaaaaaccaattagtttaaaatttattaaaacaaaaaataatcatgaattaattacaaatccttatgtaagagaaaacactaaaatagcagtagttcgtgttgataaaaatgttatattagaaattaatgataagatgaattatgaagagttacaacgttttgaatttattaaaaaagaaattaagacgaactatcatttatcaaaaaaaataaagcggtttaaagaattacgtagacgtgttggttttgtattccaattccctgaataccaattgtttaaggatactattgaaaaagacatcatgtttggtccagttaatttaggtgtaaaaaaaagcgaagctaaaaaacgagctaaattttatttaaataaattaggtttaggagatgattatttagaacgctcaccttttggattatctggaggccaaaaacgccgagtagcaattgctggaattttagcaatccaaaatgatattttagtttttgatgaaccaacagctggtttagatcctgcaggtgaacacgaaatgatgcaaattattttagatgcgaaagcaaataataaaacagtttttgttattacccatactatggaacatgtgcttgaagttgctgatgaagtgattgtaatggatgaaggtgaaattattaaaacagggacaccttatgaaattttttttgatcaacacattattaattcaacttcaattcaagttcctcgtgtaattgcagttattaatgaattgattaaaaaagatcttaaatatgaaattctaaaacaaaaacaaccacgcacaattgaagagttagcagatgctatcatcgaatttaaaaaaggagaaaaataa

SEQ ID NO: 40712 - DNA, 885 bp, Ureaplasma urealyticum
atgagtcataatgataaaaatactcataattatcaaatttcatcattagataagattattaatgattcaagtgttgccattgaatttgaaaatgtttattttgcttatacagaagaacgaatgattttaaaaaatgtttcatttacaattaatgacaatgaatatgtttgtgttattggtcataatggttctggaaaatcaacgatatctaaggttttaacaggattattaaaacctaaaagcggtgtaattaaactttttggaattgagataagtgctgctaatttaaaatatttgcgaaataatatcggaattgtttttcagaatcctgataatcaatttgtaggtattacggctgaagatgatattgcttttggtttagaaaatcgtaaggttccgccaaataaaatgtgagatattattaatgatgcagctgttgcaacgggaattgaagatctattaaaaaaagaatcacttgaactatctggcggtcaaaaacaaagagttgcaattgcttctgttttagcaattaatcctaaagtgattatttttgatgaatccacaagtatgttagatcccaaaggaaaaaatgaattaaaagaattaatggtttcattgcgtgatgttgcaaaaaaaacaattatttctattactcatgatatggaagaagtagttaaagctgataaagttattgtcatgtcaaatggcgaagttcaatatataggtacaccacaagaaatttttgctaatgaagaacgtttattaaaaatgcaattagatattccatttacattaaaattagcaaaaaccttaaaggaaaaggggttaaaaattgatttaactttgaataatgaggagttaattgaaaaaatatgcaaaaattaa

SEQ ID NO: 40713 - DNA, 690 bp, Ureaplasma urealyticum
atggctaaaatttctaaaaaattatttgctgcttatgaaggaattgataagcaaaaagcttacccattatttgatgcaattaaattagcacaagagaagtcaattactaaatttgatggatcaattaatatcgctattaaattgaatttagatactactaaagttgaacaacaattacgtgggtcaatttcattgccaaacggtaatggtaaaaatgtacgagttcttgttttaagtgaagatattaccaaagaagaggctgcttcagttggtgctgattattttggtggagcagattacattcaaaatattgaaaagatgttaaaccaaattgatgtaattattactaaccaaaaaatgatgccattattagctaaattaggaaaagtattggggcctcgtggactaatgcctaatccaaaaattggaacagttacaaatgatgttctaaaagctgtagaagaatttaaaagaggtcgaattgaataccgtacagatacttatggaaatatccatatgagtattggtcgtgtttcatttgaaacaactaaaattgaagaaaatgctaatgcattattaaacttaattaaatcaaaaaaaccagcgactgtaaagggtcaatatattcaaaatattgctgtttcacctacaatgggtcctggaataaaagttgttattaataataattaa

SEQ ID NO: 40714 - DNA, 453 bp, Ureaplasma urealyticum
gtggctcctaaaaagaaagaagttacaagaatcgcaaagttaaatctaattggtggacaagctaaacctggtccagcattagcatcagttggtattaatatggctgagtttactaagtcatttaatgataaaactaaagaccaaaacggtaaggttatcccagtaattattacagcttataaagataaatcatttgattatgttatcaaaactactcccgtgacttttttactaaaagatattgctaaaatcaaaagtggtgccaaagatcctaaaaagcaaactgttgcaacaatttcaaaagaacaagctttagaaatagctcgttataaattgattgatatgacagcatatgatgaagaagccgctttaagaatgattgctggttctgcaaaacaaatgggaattgtaattgaaggcgtaagtgcatataaagaaaagaaaggtaactaa

SEQ ID NO: 40715 - DNA, 1434 bp, Ureaplasma urealyticum
atgcaaaattttgaagttattattggtattgaagtgcatactgcacttaatacaaaaaccaaaatgttttctaatgcagcaacatcgcataagagtattcctaacactttaattaatgaaattgatttagcattgccaggtacattaccaactgttaatcaagaagttgttcataaaggactttttttagcaaatgcattacacatgcgtactaatcatcaatttattgcttttgatcgtaagcattattattatttagacttacctaaaggatatcaaattacacaaaattattttccaataggtcagaatggttatattcaaatcattgatgaatataataatttaaaacgaatacgtatcaaacaaattcatttagaagaagatacagccaaacaaactaatataggtaatcaaatatatttagattataaccgtgcaggatgacctttaattgaaatcgttagtgaagcagatttacgaagtgcacaagagacggttttatttttagaagaattgcgaaaaattttattgtttaatgatatatcagatgcaaaaatggaagatggatcattacgtgttgatgtaaacgtttcaattagacctcaaggggctaaaaaatttggcacaaaagtagaaattaaaaatattaattctatttcaaatgttgctaaagctattgattatgagataagacgtcaattaaatttaattttactaaatcagaatgttgaacaacaaacacgacgttttgatgataatacgaatacaacggtttttatgcgttcaaaaaatgatgctattaattatcgctatattcgtgaagcaaatattgcaccaattcatctaagtgatgattatgtaaaaaaaatgtttttaactaaatcatgtagtattaatgatttgcgtcaacaactagcacaaaaaggtttagttagttctgctatcgaacagttattaagtgatggaccgttgtttaaagcatttaaatatgtagacaaaattgttaataatcctttaagtgtttataaatgattatgtttggaatttattggtctaattaataaaaatacgcaaaacattgaagaaattacaccagaattattgcaaaaaattgctagaatgatcttattatttgatcaaactttgattaatggaaaacaaacaaaaataattttagaaaaaatttatttgacaaataaagatcctcaaattctaattaaggaattaggttttgagcaaattactaatgaaaatgaaattactaaactttgacatcaaattttagctaagaatcaagaaatgttattacaatacaatgaacgccccgaccgtgttgaaaaattttttatgggtgaaataatgaaattaactaaagcacaagcgaatccaaccatttcttttaatgttttaaaaaaaatcttacaaaaataa

SEQ ID NO: 40716 - DNA, 1434 bp, Ureaplasma urealyticum
atgaaaaataaaactattttagcgcttcataatcaaattaaaaaacgtgaagttaaaatttatgatttgattaaaaaatcgattgatcatgatttaaagattaaaaatttaaatgcaactttagcaaataattatgaacaggcattgaaacaagcagcttttttagatgaaaagattagtagtgataatttagaaattgattatttatttggaattccatattctttaaaagacaacatttcaactaagaatattattacaacaggtggttcattgtttttaaaaaattacaatcctccatatgatgcgacagttaaaacattattagatcaaaaacaagcaattttgttaaataaatcaaatttagatgaatttggtttaggaggcactggtactgattcagcatttggccctgtaattaatccattaaatccaaaacatgttagcggaggttcttcatctggtagtgctgttttagttcaacaaggcgttgtaccttttgcaattgctacagatacaggagattctgttcgtcgccccgcttcaattatgggtattgttggttttaaaccgtcatatggtcttatttcgcgttatggcgtttacccctttgctccttctcttgatcatgttggaatttttacaaataatatttttgatacgcaaattgtttttaatgctcttgctaagcgagattttaaagattttacaagtcttagttttaaaacacaatcactttcaatgctaaaaacaaaaaataaatataagattggtgttttaaaacctagttttgatttattagcatcaaaatatcaacaagaattaactaatctgattgttaaattaaatgatgagcatgaaataattaatgttgattatgatattaatttattaaaggcaattagtccagtttataaattaatcgcttttagtgaggcttatagttcatactctaattttacaaacatcacttttggcaaacatgatattgattatgataactatgaggatttaattattaaaacgcgaactttatatttaggaacacaattaaaacaacgttttatgataggtgcttatgttactcaagaaagccagtttgaaactttattagttgctgctaaaaaaatgcgtacattaatagttgatcaagctaaaaatttatttaaaaattgtgatttaattttaaatttagcagttcatgatataagtgaaacaattgatgatgttaacaaccaaaagcccacaactaatttagttgaagatgtaatgcaaattgctaattttggtggttttccatcaattgtaatcccctttttaacaactaaattaggaaatttaggtttaaatttgtgagcagattacttaaatgataataaattattaaatggcgcttatttaatcaataatttactaggaaatgaggaaaaataa

SEQ ID NO: 40717 - DNA, 1461 bp, Ureaplasma urealyticum
atgccaacaaaagacttaaatgatgcgatattagatttgttttgtttaattattaataataatgacttttgaaaagatgttgttttacgtttagaagttaaagattttccagaaaagattcagcaaaatatttttaatacaattgctaatttaaacgaacaaaagtataaaatcaatgaatcaaatattttaaatgcattagctaattatgtgattattgatgaacaagatcaaaattatttattacataagaattatttacttcaaattttagatcgtactgattatttagtagatttaaaagattgtattgaaattattaagaatgcttcaattaaaaataaacttgatgtttttgcaaatgagattttagcaacccaaatttcattaattaacgctaaagatcaatttaaagaaatgcatgaaaaatttttagaaattcttgcatcacgaaccgaagatactattgaaaatatggaattaattgctaatcgatattttgagaaattaaataaaataggcaatagcgggattattcctggagttattaaaactaaatacgataatattgataaattcactaatggttataaacctggagaattagttgttattgccgctcgtcctggaattggaaaaactacattttgtttaaatgttatggttaacaatgttaatgaaattattgaatataacgaaaatattcaaccaaatcaaaaagaaaagatcattgtaatgttttcgcttgaaattactaaagaacaaattttacaaaagtttatctcaattaaaacaggaatttctaatcgtgaagttatagaaaataaatatcgtataactaaaggatatgacacaaggtcttttgctatgcaagcaatcaatgatattaaaagttgacctatttttatcgatgatcgtcctaatatttcaattgtagacattgaagcaaaattatatgatttaaaaaaacgttatgatattgctttagtcgttttagattatttacaattggtttcaggaggcaatgcaaataaaaatatgacaagaacacaagaggtaggtcgtgtttcaagtgcattaaaaatcattgctaaagaaattaatgcaccagtaatcgctatcgctcaactttcacgtaaagcagaagaacgtgatgtaagcaataatgttaatatgaaaaataaccctttagtaaaaacaattgataattccccaaaattgtctgatttgcgagaatctggatcaattgaacaagatgctgacgttgttgcttttttacattgggatcgaaaacaacgcaattttatgcaaaatgataatcaagaaacccgaatgcgcgatgatttgattgaagcaaaatttattgttgaaaagaaccgaaacgggtcaacaggtgaaactgatattattttttctaaattaaatagtaaatttattcgtgcaaccacttcaaaggagtaa

SEQ ID NO: 40718 - DNA, 438 bp, Ureaplasma urealyticum
atgaaagttattttattagaagatattgcaagtcttggtaaaaaaaatgaaattattgatgttagtgatggttatgcaaaaaattttttaattcgacaaaaaaaagcagttgcattaacaaataaatcacaagaagttttaaataaagatcttgcaattttagaagctcaagaacaacaagcaatcttagacgcaactttactaaaagataaactagagcaaaagcctctacaattttttttaaaaacaaataatttacaaacttttggatcaattagtaataaacaaattattgatgaaattaataaagaacaaaaatttataacaaagcatatgataacaaaaccacatgcattaggtattggtgaacatattgttgaaattttattgcataaaaaggttactgctaaacttcatgttattgttagcaaagaataa

SEQ ID NO: 40719 - DNA, 240 bp, Ureaplasma urealyticum
atggccaaagtaactaataaccgtaatcgtaaaccacgtaaaaaagtttgtattttatctgctaaaggaatcgaacatgtcgattacaaagatgtagaattactacaacgttttattaacaataataacaaaattgcatcacgacgtgtaacaggagcaagtgctcgtatgcaaagaagaattgcaaatgcaattaaacgtgcacgtttcgtaggattacttccatacgttaaagaataa

SEQ ID NO: 40720 - DNA, 501 bp, Ureaplasma urealyticum
atgaataaagtaatattgattggtaatttagtacgtgatccagaagctcgtcaaataccaagtgggcgtttagttactaactttacaatcgctgtaaatgacaatacacctaatgctaatgcaaattttatacgttgtgttgcttgaaataatcaggctaatttcttaacaacatatttaaaaaagggtgatgccattgcaattgaaggacgtatagtttctcgaagttatgtcgacaataatggtaaaacaaattatgtaactgaagtttacgctgatcaagttcaatcattatcacgtcgaaaccaaagtcctagtgataacaataaggtaaatgttgatacaatgatggaatcatatacaggtattaatactgatgcagcatttagttcaaacaaacctcaaactaccctttcatcgacaacatcaaatttaaataaaaataatgatgaagaagatgaaattacaagttgaattaatcttgatgatgatttagaatag

SEQ ID NO: 40721 - DNA, 483 bp, Ureaplasma urealyticum
atggcgaaatacgaaattatgttagttgttcgtggtgatttagatcaagaacaagctaataaagttgcaaatgaattaaaagcaactttaaagaatacagaagtaaaagaaaataattatgatggcgtgcaacaattagcttatgagattaataagttaaaaacagcttatcgttatgtttataattttgaaactactgatgttagcctaattaatgaatttagacgtttagcaattattaataaaaatgtattgagacatattattattaatttagaaaaagattacggttataaagcaactgttaatactaaaaaagtacaacgtaatgaaaaacgtgctgaagtttatgcacgtcaaaaagaagaagcagaacgtcgtgcagtagaacgtcaagcagcttatgaagcaatgaaagccgaacgagaagcagctggtttgccagttaaagaatttgttaaaaacacaaattcaaaacgttaa

SEQ ID NO: 40722 - DNA, 1521 bp, Ureaplasma urealyticum
atgaaacaaaaaaacaaccgatatacttatattaactatcttcgtagtcaacgcgcttttattcaaacattaaaaccacaaattttaaaattaacttcaaataatgtttgtttaaatgaacaagaggtggatttagaaccacaattaaataatttagaagacattaatatacaattaactaatgaaaaagttaatattcaagatattgttactttagaagaagaaattaatgttaaagataataatcaaaatcaaaatttaaatgaagaaatcttagcaacaacattaattaatgaacaggctagtggtattaatgaaattagtgaacaaaaagaaactacaatagctaataaaaaacataaaaaacaaacaatggcttttaaagctgctaattcacgaaaaaactttgattttgaaaaatttgaaaaaaatgttaaatataaaagttttaaagatggtacagttaaaaaaattgcagctgaaatcgaaaatgtacgtttaacttttacaaacccatcaaaacccaatgatcgtgctttagttttacgaaatacatctgttcaattttatgaaggtgaagtccatgcaattattggtgaatcaggatctggtaaatcagtaattacttctcttttgtatggtttggctggaaaaaatgccaatgttgaagaaggtaaaattttattatataacaatgaagttcaagattttagcttcaaagattgagagaaatcacgttatttagggaaagtaatttctgcagtttttcaaaatccaatgtcaacattaaatccaaccatgaagattggtaagcaaattatggaagggatgttaattaatggaattgttaagacaagaaaagaagcctataataaatcaattgaatatttaaaattaacaaaaattaataatcctgaagaaattatggaattatacccacacgaattatctggtggaatgattcaaagagttgtaattgcctcaattgtttcattacatccaaaaattttagttttagacgaaccaacaacagcgcttgatccaacagtgcaagctttagtgttagatgttattcgtgagttacaagagaaatttaaaatgtgtattatttttattactcacgatcttggagtggttgcttcaattgctaattatatttctattatgtatgctggacaaattattgaagaaggtcagcgtgatgaaattttatgatacccacaacatccatatacttgaggtttaattatgtcaatgcctgacgttaataaaggtgatcgtttagcaacaattaaaggttctgttccatcacgtttaaatgacatagttggtgatgcatttgctattcgtaatgattatgcattaactcgtgattttgaacatgaacctgaaatgtatcatgtaagtgaaactcatcgtgttaaatcagcattattagatgaacgtgctgaaaagtatacacctccacaaataattttagataaatgaaataattttaaaaaacgacaagaaaataattaa

SEQ ID NO: 40723 - DNA, 372 bp, Ureaplasma urealyticum
atggctttatttaagattaacaaaggcgaaattatgaattttgttaattcaacacaattaaaaacagatattcctaattttgattctggtgatacaattatcgttcataatcgaattgtagaaggaaaaaaatcacgaattcaaaagtttgaaggcgttgttttacgtcgtcgtggttctggttcaagtgaaacagttattgttcgtaaagaatcaagtggtataggtgttgaacaatcattcaatattcattctccacttgttgaaaaaattgaagttatcaagtatggtaaagtaagacgtgcttatatttcatacatgcgtaatcgttcaggcaaatctgcaagaattaaagaattaaataaacaataa

SEQ ID NO: 40724 - DNA, 687 bp, Ureaplasma urealyticum
atgaaaatatcgattttatctttatttcctgaattatatgaaacatggataaagcattcaattattagtaatgctattaaaaataaccaagttataatagaagttatcgattttcgtttatatacaaatgataaacataaaaaagttgatgattaccaatatggtggcggagcaggtatggttttaaggattgaaccaattgttgctgccattcgtgcaattcgttcttctaattcatatgtgattttaacaacaccaaaaggtcaagtttttaatcaagaattagcaaacaattttgttagtaaatatgatcatatcatcattattgctggtcattatgaaggttttgatgaacgtattaattattacattgacgcccaatatagtatcggtgattttgtcttaacagggggggaattaccaagtatggtaatttctgatgctgttattcgtttgttagatggcgttatttctccttctagtttagaaactgaatcatttaataactacttattagattatcctgtttacacacgccctcttgtttttgaagggcataaagtaccggatatactattatctggtcatcataaaaatattgctgattttcgtaaacagcaacaagagacgattactaaaaagaatcgtcctgatttatatcaaaaatatttaaataacaaaaagtag

SEQ ID NO: 40725 - DNA, 306 bp, Ureaplasma urealyticum
gtgaaaattttggtaaagattagattaacaagagtaggaacacataaaaaaccattttttcgtattgtagttatggatgctaaaaccaaagctaatggtgcatatattgaaaatttaggtcattatgatcctgttttaggacaagttgttttaaaaaaagaagctattttagctcaattacaaaacggagcacaacctagtgaaacggtaaaaaatatcttatcacaagaaggtatttgaaaagaatttattgctttaaaagatgcaaataaaaaacgtaaagctgctttaagtaaagctaaataa

SEQ ID NO: 40726 - DNA, 834 bp, Ureaplasma urealyticum
atgcaatataagatgttagttattgatctagatggtactttattaacgaaaacaaaaaacattagtaaagctaatttacaaggattaaaaaaatatattagtttaggcggtaaggttgtactaagtacaggacgttcattagaaaatactttaaagattgtgcatttaattcatgatcaaatcaaggaattaatccaatatatttcatgttttaatggctcatatatttatgatgttattaatgaaaaagtattgtttgaatcaacaattaataaagatatagtgaatgaaatctataaattttcattaaaacatggattaggattttgaccatataaccaaaggtttatgcaaacacattttttagatgtttataatattaactataaatttttattacaacttcatcacacaaaaagaaaagtttgtttaaacccaatttttaataaaaatgataaattttataaaattaatattttaccttcaaattttgttaaaaaattaaaacacgaggttatagatcaattgattaaagaatttagtgatcaagtaaatatttcattcacctcaaaatacattgttgaagtgactaataaaaatattaataaggcatcatcattacgatttattgctaatttataccagattaatttagataaggttgcaacgattggcgattcgcctaatgatattccaatgtttaaaattagtggtttagcagcggctgctagaactaaatctaaaacaattattgaacatgttgatgtgattattaattataaaaataattctaattctgttgcattatttattaataattacttactaaaataa

SEQ ID NO: 40727 - DNA, 1791 bp, Ureaplasma urealyticum
atggaaaataccaaaaaaagtcctacatatgtttatgctttaggggggctagaagaaattggtaaaaacacttatgttgttgaacatgaagatgaaattattttaattgatgcgggcattaaatttgctaatgcatctttaccaggatttgatggaactgttgccaattttgattatttaataaaaaacaatcataaaattcattcattagtagttactcatggtcatgaagaccatattggggggattcctcacattttgcgacatgttaaaattaagactatctatgcaccaacattagcagcaaaattaattgaacgtcgtttaagtgaatataaagatattaaacctccgcgtattattgtctttgaagatgagtcaatgtataaaacaaaatattttgaagttgatttttatcgtgtttgtcattcaattcctgattcatttggaatttgtgtaaaaacaccaaacggatacattgtaacaactggtgattttagatttgattttgctacagctggtgatgagactaatttagctaagatttcacaaatttctaatcgtggaatctcagtattaatgtgcgaatcaacaagtgctgaaattcctggatttagtgaaagtgaacgatatgttattgataacattcgtgattatatggtaaatattaaaggacgaacttttatttcaacatttgcttctaatttaggtcgtgttgaagaaattattgctatagctgttggtttaaataaaaaaatctgtatcattggtaaatcaatggaagctaatattaaaacaagtcgaaaattgggttatttaaatgttcctgaatcttcatttatcacacataaagaattgccattttataaagatcatgaaattgttgtaattttaactggttcacaaggtgaaaaaatggcggctttaaatgttatggctaataataaccactcaaaaattactttaaaaccatcagatacaattatcttatcatcaaatccaatcccaggaaactatgctcaagtcgaagcaatggttaataaactttataaactcggattaacagtttatgaaaattcacctaacaaaaagattcatgcttctggtcatgccacacggagtgaacaccaattaatgattaaagcaattaatccatcatatttatttccaatccatggggaatataaaatgtttcgtgctttaaaacaaaatgctgttgaccaaggttttgataaagaccatgtcattattgcaccaaatggccaaaaattacaattattagatggtgttttaagtcatactaatatttatgttgatgctgaacctaaatttattaatggttatgaaattagttctaaaattagtaaattattaagtgaacgtgttgttttatccagtgatggtattttaaatctagttttaaatgctgattttaaaaaagctaagttaaactctgctgtaagtatttcaacacgaggatgtttttttgccaaagaatcaactaatttaattaataaaatttctaatgtagcaaaatcaagtttagaagaagcgttggcaaaaaaagaatttgatgaaaaaaaactaaaagaaatagttagtggaaatgttaaatcaattgtttgaaaatgacgtaagaaaaatccaattattaatgtcacaattattaataatgatttggtcgaacagtttagaaaagacaataattatgttgaatttatcaaacaagctgaagttgaagaaattgaacaagaagttgatattgatgatttaatttcaaacggtttataa

SEQ ID NO: 40728 - DNA, 1737 bp, Ureaplasma urealyticum
atgagaaataatttatctgatttggaaatcgaaaaattgaccaaaacattagtatcaaaaaacaaaagagttgtagctttatatggcgttcccgaaaacacttcttataaactaatgaacgatctaattagtttaatggatgtagaaattcctaattgatcatcaatttcaagcgcaactgaagaccaatgtattaatgatattaaaaattttttactgtcaaatgcaagtttagaaaactttaaaaacttgccttctaataaccctttaattaattggtggaaaagacgccgtttaaatactgttgttaaaaagattgaagaaatcaactcagcgttcgcagaccgtgaaataacatctcgttcaaaaatctttttgatgcctgttttaacagcatttagtactttaggaactacactagctgttcctttaatatctgttacttttttacggggtgatgcaattattaatttgtggggtaaagatggatatattgctttcttaagtttactattttctttagttgttgctgttattatttcagcttttgtcgctttatttagtagtttaaaaaataataaacgtaattatattgtttcaaacatgaccaaaggtcttaaaagaatatatgataaatattttatcgaaagtaattctcaagaaaagattaatgctaaagtaactttttattcacgctttttagaacgttctaaattcgttgttcaaaataattacacatttttttatgatgttgtagatattaatagtgatcaatatcctaaaatattaaaatatttcaaaaccttaaaccaattaaataatacagtaatcttcgatgctagtggttttaaatatttagacgaacgtaaaattttccgtaacattatcgatttagagaaaacaaatgttgtccgtttggatcgttataaaacaaaaacaagcggacgtcgcttaatgagttttattttctatcaattatcaatcattgctaatgttaatacacgaaaacttttacaaaaatttcctttctttgtcaactctttatatcgttttttagattacagcgaaaaaaatactgagttattaacacttttattagacattaaaaaacacgcttcaaaaacagaaattccattaaacgatgaatcacaattattttttgtagacttttttacattcgtggtttttaaagctttggatgaattaggatttgagacgctaatgaatgatttaacagtctatggtcgtccatctgaaatcactaagaaaaatataacttataattcattaaaattggattacatcattaatcgtaatgcgcgtaattttggacaacaagcattattgtttaacttattagattattttgatgagacagtaaataaaaatatctttaacgaattaggaaatagtaataaaaacatgattttttctaaaaatcatcaattaaatttagccaatgaagctttaagtaaaaaaggttttacaaagcgtgaaattgatttaaataatcattgatatgatgctttatattctaatcttcatgatgatgaagacatgtttgttaaaattattgaaattaaagataatgttgatatcttaaatgtattagatgaactctttgttcgtgctcaaaatgatggtgttaaaaatttattaatttatgtttttaatgtaaaaatgttatattcattaatagataatgaatacgagttggttaatgagtcaattatttaa

SEQ ID NO: 40729 - DNA, 1287 bp, Ureaplasma urealyticum
atgacaaatgatgagcgtaaagaatttattagaaaaaataaaattatttattttaatcgaattcgttactttttttatgaatgaacagatatgaaagcatatcaacgcatgttagtgcctgaaacttttttctcatttttttatcaattattcgtcttaatgattgctttttgttccgttacaattattatttataatcaaattgaattaaaacaagctaatgaagagcacatagactttattgctaaatattttgaagtttattatgcttttaatattttttttattattgattatttaattcgtatttcatacgctgattacacatacaattcaatttcaagactaaaggcttttttaatagcaccatttcgttttgttaatttattggatctagtatcttttgtagcaattgttatcatttataatacaggattattagattttgtagcaaaaatgaatgaaacaacttcatattcacaaaaatttgattattattatcaaatcatcaataataatgcttatatgaatgttgttccttgtatgtttttaattaaaatcttaggtgcgcattctaaaattatcaaaaatgttattttgagtagtgaagttaatttcttttgacaaatttttaaacggcgttgacgtgtattattatcatcattcttaattttagttttatttacttttctattaagttttattatttatagaattgaacaaaattattatgaaataaagcatattttgcctggtaatccgttgtacaaacttaaaaattttggtgaaactttgtggttttctatgggaacaattaccacgatagcttatggtgatgttacacctgtttctccagctggtaaagtatttgccgttattttaggtgtaattggtgttacctattatggttttctgacttcattatttgcttcagctttaatttcagtaattaatgaatttggtaaacgccgtgatagccgtagattgttagaatttcaaaatgaaaacgagcgattattgcatgaattttctgagcaaattaaagtagatattgtccaagaattaattaaaaataatgttattcaggatccagaagaaattaaacgaattgaagatcttcaaaatcaagaacgtgaagctttaaaaatgaaagcgaaacgccgaaagaaaatttattttagtgatgatttatttgatgatacaaaacgaattagtgtttcaaacgtcaaagtacgtagtgcttcaaatgtaacaaaagtattaggtcgatcatcaacaaaaaaataa

SEQ ID NO: 40730 - DNA, 402 bp, Ureaplasma urealyticum
atgcaaaaaagtaatattgttgaatacaaaggtttaggtcgtcgtaaatcttcaattgcaagagttaaattagttccaggttctggaaaggttcttgttaatgatcgtcaaccagaaaattattttccaaataaattagttatccaagacatgatgcaaccattggttttaacaaaaacagctgaaacttatgatgtttatgttaaagttattggtggtggatttaatggacaagctggagcaattcgtttaggaattactcgtgctttaattcaaactcgcgaagatttaaaaaccgatttacgtaaagctggtttagtaacacgtgattcacgtgttaaagaacgtaagaaatttgggctatatggtgcacgtcgtgctcctcaatttacaaaacgttaa

SEQ ID NO: 40731 - DNA, 447 bp, Ureaplasma urealyticum
atgcaaaagtcttcaatgcttaagaaagaagtcgctattgcgcgtcgacaatgatatttagttgatgcaacagatttagttttaggtcgtttatctgttaaagtagcagatattttaagaggaaagaataaagttgattatacaccaaacgttgatgcaggtgattatgtggtagttatcaattcagataaagttgttttaactggtcaaaaagcattacgtgaaaattgatataatcattcacactatattggtggtttaagaacacgtagtggggaagaaatgattagcaaatattcagatgaacttattcgtcgttcagttaaaggaatgcttccaaaaaataaattagcaaaacaaattctaaacaaattattcatttataaaaatgataaacatccccatgaagcacaacaaccaactattttggaattaaaattaaaatag

SEQ ID NO: 40732 - DNA, 1581 bp, Ureaplasma urealyticum
atgaaaagaaagaataaaataataacatcatcattagctttattgtttacaggagtaatagcaacgataagtattgccgcttgctcaaaacaaaataatcaaaaaacaaaaaattttaattcacaagaacaagcaaataagattattgaggctatattaaataaaaaagaaggtaaggataattttatcgattgagttcattgatgaaatagtccatttcaacaagcacgcaaacttgcaaaagatttagataaatatattgatttaacaaaatctaaaaattttaaatcaatgattgataaaaatgaatataagtcaacttttagtgcacaaattgaaaatgtaattaggatcattaaagatgatattaaaatgtatgctaattcaccattttgaaaaaaatgacgccagcaaaagaaaacagcactatttttaattaattatgcacctattcaaaaagatgatagccaaattaatgctccaggtattttattacctgctgaatacccattattatattctaaacctgattttgaagaactaccaggattcggtgcattttttcctacaccaaaatctatggatgcagtcgatcttttagatacttgaaaatcgtttggatcattaatttcatctaaaggtaattctgttgaaaaaagcgttttagcatctaaattacaaaattcatttgcaaaaacagcagataaagttgtttacatttatgatgatgctattgtccctaatatttatgataagaatggcaatcgtaatttaaaaattacacaagaatttgctaattgaatgattaaccaaaattataaaggttatttagctcgtgaatttttaaaaataaatcaaaaaaatgatttaattcctttaccaatgagtattgtttgacacgcaagttatggtatcatcggaatgcatcgtatgttatatactttatcaaaagcttttggaatgccaaaagatgaattagaacatttgaaagcacaagaaaaatttaaaattccaactttaaaaaaattactaacaaatgatgaattagaattgaaaaatggtatacaaacgattaaaacaggcattgattcgccatttaaatatcatcgcgatcaaaaccgtgatgattgaaaaatttgagcaactaattcccaagttttagatatttgtattgctttgggtttaaaaccagatttattagttaaaggcgaactatcaactagtgtccatgaagatcctaacttagcttattatttaaatgatgtaataaaaaaccaattaagtgatatagaacaaattagtattaaaaaaaaccacattaattgaacagcaacaaattatgaacctattaaaaatttaaatgttaatttaattttaatgggtgtgcatggcttaattaaaaattcagcttttaaaaaaatgatggatgaaggtaaacaaattaaaaattgggcctttactgaccgcagatttagcgatgaaacacgccaatatgttaaaaaaggtgaagaagatttatatagccaaaacgcatcaattcttggttgagatgagtttttaaaaacgaagaacaatcaataa

SEQ ID NO: 40733 - DNA, 1614 bp, Ureaplasma urealyticum
atgaagattagtgttaaaaaaacaaagcaaataggtttgtttacatctattgcaattatgattagtagcgttgtgggaattggtattttttttaaaaatggatctatttttcggtttaataactttaatgaaataggaattattatttcttgagtggtggcaagtttaatcgccttttttacagcattaagttttgcatatattaccttttctaaaaaatctggttctggaatagctggtataatagatgaattaaaagctcctaaatgtgctcgttttatttctgttttgcaaacttttttttataatggaatactgatgccttccatttcctttttcgctgcagaatcattattaatgacaataatacctaaaaattcatcatcaccacaaatatatcaaatttttattttggctatcgggttgtttttattttttttgttgcttaattttatttcatttaaatttagttcaattttacaaaacattgcaacaattattaaatttattcctattattgctattgctattattggtattacatatggtatcaacaatgcacaaaattcattgttcaatcataataatcctaagcatgcgaattttagtcttttaggaatattagcttctcttccttcgatcttattctcattcgattcttttttaggcatttcatcattacaacacaaaattaaaaatgctcaaaaaaatgttccaattacattaattgttggtatgtttttagtcgctattgtttatattctaataactatagggcaagtttttgtaggcgaaggttatgcttatggtgtaattaataaagtatttaaaaataatatcaatctcctaaaaattattactattattgttaatgtttttattacaatttcaattattggtgttttaaattcatttgttattttttcaattcataatgctcaatatgtaattaatgaaaaaattattttttgatgatcttgaatccaacgtgttcaatcaaaacattttaaagaagcacaaggattaatcagtgttttattcattttttttacatgaataaccatttttatgataattagtattccattaaatacagacgcgtatattgatttattatctaattatccaattgttttcttttttgcagtttatggtttaataattgcttttgccttttataaaaaagttaaaacaaagcaaaaaataaaaggcattaaaaaacaatattatacaagtgatgttacaaaacgtcctaaatgattttttaattatcaaaatagtagtttaaaaaataagaatattcttaataaggaattaaaaattgctaataattgaattttaagtgtttgaataattggcatcacaagttgtttatttgtttttttataccaatttttatatggatatacaatttatgcttgattagatccttataatttaaaactatatacttttggattattttatgcaaataatgttagtgtcattccatgaatcgttagtttgttattttttgttatgcttatatttttcataggatttccatttttaaatgatgctattttaaatcttaatcataaaaaagtaaacaaacagcaaaaagtttttgtttaa

SEQ ID NO: 40734 - DNA, 501 bp, Ureaplasma urealyticum
atggttaatgacaaaaaacaaaaatcaaataaatatttaacgtaccaagatcaagaatatgaacgtaatcttttattagaaaaagaacgtaaacaacaaaaaaagattttggcacaacaagcatatcaacaattagatcttaataaaaaattaattaaaaaagctaaaaatgatcaaaaacttattttaagactactaaaagaagataaatcaatttcaaaaacacaatttaatacccaccgtttagaattaaaaaatacaattgatcaaatggttgatgaatattatgaattattagaacaatatagtgtagattttgaaaaaataagttttaaattaaaacgttggctctatggcattaataaagaaatcagacgtactacttgggcttctaaacgttctgttattatcagtttaatcattgtaattgttattgttttaattcttgctgcaatattttttggtattgatacaggtttttataaattatcagcaaaataa

SEQ ID NO: 40735 - DNA, 777 bp, Ureaplasma urealyticum
atggcatataagattaaagatttagattctaaattattaagtgatttaaaaattgattttaatcacagacatcaatgatacattgttacggtagtaagcggtaatgaacaaaaagttattgaaaatattaaagataaattaaatggctatggttatggtgataaattatcagatttaaaaattattaaagaaaaaattaaagaagttaaaatttatgagccatcagaagcgccacggtcaatgaagaatcgtgcaaacacaaaatgagaaacaatagttgttgatggcgcaacaaaatatcgttgtacaaaaataaaagaaggtaataaatttaatggatatatctttttaaaagcggaaatgaccgatcaaatttggtttttaattcgtaatacccaaatggttactggtttagttggttcatctggaaaaaatgttaaaccaattcctgtacctgaagataagatcttaaaattaattgctgataatgatgctaaacgtgctttaataagtctaaatgaaaaagttgaccatgaagaaaatattgaagttattgaattgcatgaagacgaaaattttacgaactttgaagttgatcaagaagttaaaattatcgcagatactttttttggtgaaattgcaaaaattgcaaaaattgatcaaaacaagaaaattgccactgtagaatttgaattttttggccgaattaacacactagatttaaattttaatgatattcaactttatgatgaagaaagtgataagttagaaaactaa

SEQ ID NO: 40736 - DNA, 1332 bp, Ureaplasma urealyticum
atgaaatttaatagtaattatcaaaaatgaattcttgattcattaattaaccaaaaaattttcgaaccaacacctattcaattaaaaacgatgccattaatcgctaaaagagaaaatattattggcgttgcaccaacagggacagggaaaactttagcctttgttttgcctatattaaacaacttagatttatctcaaaaactgcaagttataattattactcccactcgtgagttagctcgccaaatttttagtaaaattattgtttttaaaaaacatcaaccacttttacaagttaaaatgttaattggtggtgaaagtattgaccagcaaattaattcacaattaaataaaagccaactgcttattgcaactccaacgcgtctaaaacaaattttaacacgacaaattcttgatttacaccatgttaatgcacttgtttttgatgaagctgatatgttaatggatcttggttttattagtgatttagagtttattaactcacaatttacaaataaagatgtacagaaaataagttttagcgctacactgcacgaaatgttatcgatccaattaaaaaaatattttaaaaatacaaagattattaatattagtaattcaatttatgaaaataaaaaaataacccattatgttattcataatcacgacaaatgacattcattatctataattatgaagactattaaaccttatttatgtatcatttttgcaaatacaaaaaaagaagttgaagcaatttatcaatatttaattcaacaaaataaaaatgtttgcattttgcatggctcactacttcaacgtgaacgaaaaaacaactatcgtgatattaaaaataataaatttcagtatgttgttgcctcagatattgcaagtcgtggtttagatattgatggtgtaagtcatattattaattgaaatttgcctactgaaaatgaatgatacattcaccgtgcaggacgtagtggtcgtggtaaatatagtggagaatcatatgttttatatgatcaaaaagaacatgataagttattgaatttatcaaaaaaaggaatcgtctttcaccataaattcattaaagaaaatgagttatttgataaagaatttctttttaagaaaaaaaatcaatttaaagatttaaaaacacaaaatgaaattcaaaaaataatctcaacaacaagtacaaaaataaaaccaggatataaaaagaaaattaaagaagctattcaaaaaattaatcaaaaaaacaaacgctctcatatcgaaaagaaaatgaatgctcaccgaattcgtggatataaattaaaaaatagttaa

SEQ ID NO: 40737 - DNA, 648 bp, Ureaplasma urealyticum
atgaataagtataatatttatgtagatcacacattattaaaagctgacgcaagtttagaagagattcataagttgtgtgaagaagcagaagaaaatgaattttattcagtttgtattaatccttgttttgttaaagttgcaaaacactatttattagaaacgtctgttaaaatttgcacagttattggttttccactaggcgctaacacaattgaaactaaagtttttgaaacaaaaaacgctatagatttaggtgctgatgaaattgatatggttattaatattaatcaattaatcaatggtaatagagaatattgcttaaatgaaattaatcaaattaaagaagtttgtggggataaaattttaaaagtgatcgttgaaacagcatttttgaacagggagcaaaaagaatttgcagctaaaattattctagaatcaaatgctgatttcattaaaacatcaactggttttgcaaaagaaggtgcaaaacttgaagatattattctatgaaagcgaattttaggtgatgtaaaacaaattaaagcatcaggtggaattaaaaattttgaggattttaaatcttttattgaagctggagctacaaggatcggaacgtcatcagcaattaaaatattaaataatcactaa

SEQ ID NO: 40738 - DNA, 1962 bp, Ureaplasma urealyticum
atgaatcgttatgttaacgcaatgcgttcacttgctttacaggctattaataaagcaaagcaaggtcacagtggaatgagtatttcagctgcacctattgtttataccctttataagggattaatgactatttcaaaatcacatccaaagtgatttaatcgcgatcgtttggttttatcagctggtcatggatcgatggcattatatcctgttttttatttttcatcattattaacattagatgacattaaaaattttcgcaatgataattatttaacaccaggtcatcctgaagtgttggctaataattatattgatgcatcaacaggaccactagggcaaggggttgctaatgcagttggtatggcaattactgaaagttatttaagaactgaatttgctactcttaaaggtgttattgatcattatacttattgtattgttggcgatggggacctacaagagggaatttgttatgaggcaatgagtattgctggaaaattaaaattatcgaaattaattattttacatgattcaaatgattaccaattagattcagcagtaagtgatgttaatattgaagatttaaaaatgcgtgttgaatcaatgggttgaaattatctaaaaacagataataatcctgaaaatattttcaaagcaattgctgaagctaaatgaaaaaagaatgttaaaccaacgtttattgaagtcaaaacaatcattggtgaggggacatcttttgaaaatagtaatgaagcgcatgctgcagcaatttctaatgatgaattagaaaaattttctaagcgttttcatattaaaacaaataattttgaatttcatcaggaaatttttgatcacttcttttttaatgttgtagctcggggcgaaagtgcttataatcaatgacaacaattagttgaccaatatatgcaaactaatccagaacaaatgcaacgtttattaaattatattaatggtaattatgaagatttaaataaattattagatgaaaataaaattactaatttaaatgattctactcgcagttatttaaaacaatattttaatcaattaaaagatttaaaatcagctcttgttttatctgctgatttagctaaatcaactttcacaaaaataggcgaaggcgcttttaacgataaccataaaaatccatatattaaattcggtattcgtgaatttgctatggcaggagcgatgaatggaataagtttacatcaaggcgttaaagcgataggaggcacttttttagctttttctgattatatgaaaccagcaattcgtttagctgccattagtaatttagctaatttatttatttttagtcacgatagttatgcagtgggtggtgatggacctacacatcaacctgtcgatcaattaccaatgttaagagcaattccaaatgtagaagtaattcgtcctgctgatcattatgaagttaaatatgctctttcatatagttttaaacaaaaacaaaaaccgatttgtttaattacttcacgtcaaactattaaacaaattaatgatcaaaaaccacaagattttagtaagggagcatatattattaattcgcctttttctttttgtaaagatgtagattacacgattattgctagtggtagtgaagttagtttagcaaatgacgcagcaaaagaactttttgaaaaacataaacttaaaattaaagttatttctgcttttaacttaaatttatttttacgtcaaaaacctgaagatattaagagccttttagcttcaaaaaatggtctattagcaattgaagcatcaagcgaaatgctttgatgaaaattatcaatttatacaaataaatttatacaaattgctgctaatcaatttgggcgtagtgcagatggtgataaattaatgaatgaatttggttttagtgttaaaaatattattaatcaacttttaaaccaataa

SEQ ID NO: 40739 - DNA, 264 bp, Ureaplasma urealyticum
atgatatcgaaagaatttaccatcgtagcagaattgtcagcatttattaaggcgatcacttattttgttaatgcagctagtgattttagctcttcaattactattaaagcaaatgggcgtcaagcagatgctaaatcaattatcaacattatggctttaggaattaaacaaggcacaaaaatcgagctgagtgccgttggaaatgatgcaaataaagcaattaacaaattagaagaaattttaattgaacagaaattaatttaa

SEQ ID NO: 40740 - DNA, 2034 bp, Ureaplasma urealyticum
atgcaaaaagatttaatagtagtagagtcaccaaataaaattaaatcaattcagtcttatttaggtgatagttataatgtaatagctacatgtggacatttacgtgagctcgcaaaaaaatctggttatgatccaaaaacttatgatttaaaatgagaaataataaaaacaacaaataaaaaattatcgaaaaaacaacaaataaaaacaattattgatttagcaaaaaaatcaaataatatctatttagcaactgaccctgatcgtgaaggtgaagctattagttgacatgtttatgatttattaccaaaaaaagataaagaacgtgttaaaagaataacttttaatgaaataacacagaaagctattttaaaatctattgatgaaaaacatgatattgattttaatttggtagattcgcaatttgcaagacgaattttagatcgagttattggttataaactttctggattagttaaaaaaaacttacatggcttatctgctgggcgagtacaatcgatcgctttattatttgtagttgagagagagttagaaagacgttcttttgttaaagaagaatgatatcaaattgaaggaataattgaaaaaaacatttttgtatctttaagaaaaattccctatgatgttgaattatataatcagaaagataatagcgatagtgatttaaaatttctacacaaaaaagatgcacagcgtgtgattgatgatttaagtgatatttttaaagtttatagtattgatgatttgaaaatcaccaaaggcgatgttcaattaccattaacaactgataaattattacaaatcgcatccaataattttggttgaagtgctaataaaacaactttaatagctcaacaaatgtttgaaggattagaaattaataatcagcaattagctttaataacttatccaagaacagatagcgagcgattaagtgatgattttttacaagaagctaatgcctttattgaaaataattttggtaaagaatatctagaaaattttaaaaataaaaaaattaatagaaaagaagtaaatattcaagacgcacatgaagcaattcgccctgttgatattaatttaaaacctgaagaaattaaagattatgtttcattagatatttataagctgtataacttagtttgaaataaaacactatcagctttaatgaaagtgccaacttttaataagcaagtaattcgttttattaataatgaatataaattttatacagcttataaaacaattcgaactttaggatattgaattttagatttttataaaaagcaacgtgatgaattagaattccaacctcctataattaatgttggtgatgaatttaaaaaagaaaagatcgatttaatacaaaaagaaactacgccaccgccttattacacagaagcctctttaattgcagcgctaaaaaatgccggagtaggtcggccttcaacatatgcaacaatggcaactattggcaccactaggggttacatcaataaagataagagtaaattaattccaacagaattagggattaaagtcatccaagagttaaaagaagcctttccaaaagtgatttctattaaatttacatctgagatggaagaacgtttagatgttatagctaatggcaaattattttgaaaagatttagttagcacttttattcctatttttgaagaagaagtaaaacaagcatacactaaaatcgaaaaagttcctgatgaaaaaattaatcgattatgtcctatatgtgctcatgatttattgattaaaagatctagaatgaacactcggttcattgcgtgttcaaatttccctacatgtcgttttacagaatcgttagagaaaccagaaattcttaacgaattatgtcctaactgttcaaaatcattggttaaacgtaaaaatcgtaaaaataaatattttattggatgcacaggttatcctgaatgtaattttattcgtaatttagatgaatcaaacaatgataaaaacgattttaatcaataa

SEQ ID NO: 40741 - DNA, 822 bp, Ureaplasma urealyticum
atggacataattaataaaaaaattaattgatttcctgggcatatgaaaaaagcaacagatgagattttaaaaaatcttaaaaatgttgatttttttattcaattagttgatgctagatgtccattaacatcaagtaatattgaattattaaaagaagtttcatccaaaccagttattaatttggctaataaggccgatttaagtgattgaaaaaaaaatttcgataataattttttattaatttcaactaaaaaaagaaatgataaaaataagattattcaacatttatatcaattatttgatcaaaaaataaaaatataccaaaagaaaggattaataaatcctaaatttgtaggtatgattattggtctaccaaatattggtaagtcttctttgattaattttttagctcccaaaaaagtattaaaagttgaaaatagacctggagttactaagactcaatgtattcgtcaaatcaatcaacatttttatttaattgatacacctggaatttttttaaaaaatattcaaaatgagcgtgatagttttgttttgactttgattaattgtgttaagaaagaagttttggaattagaatcaattgtacattttgcatatgatttttatttaaaaaattataggaatgaattatttataaaatataaaatgaataaggtattaaattttgatgattttattcatcatatttgtgagttatataattataaattaacaaataatgaatttgatcatgtaagagcttatgagaatttatttaatgatttttctaatggattgatttgtaaagttaattatgattag

SEQ ID NO: 40742 - DNA, 672 bp, Ureaplasma urealyticum
atggctaaagtgaatgcattttcaaaaaaaataggatgaatagaattaattactggcccaatgtttgctggaaaaacagcagagttaattcgtcgcttacatcgtttagaatatgcagatgttaaatatttggtttttaaacctaaaattgatactagatctattagaaatatccaatcacgaacaggaacgtctttaccatcagttgaagtagaaagcgcaccagaaattttaaattatattatgtcaaacagttttaatgatgaaacaaaagttattggcattgatgaggttcaattttttgatgatcggatttgtgaagttgcaaatattttagcagaaaatggttttgttgttattatttcaggattagataaaaattttaaaggcgagccttttggtccaattgctaaactttttacttatgctgataaaattacaaaactaacagcgatatgtaatgagtgtggcgctgaagcaacgcattcattgcgtaagattgatggtaaacacgctgactataatgatgatattgttaaaattggctgtcaggaattctattctgctgtttgtcgtcatcatcataaggtacctaatcgtccttatttaaatagtaattctgaggaatttattaaattttttaaaaataaaaaacgaaataaaaatatataa

SEQ ID NO: 40743 - DNA, 1107 bp, Ureaplasma urealyticum
atgtcgttatcagcaggtcttgttggtttgccaaacgttggtaaatccacattatttaatacaattacaaattctagagttgaggcagctaattatccttttgcaactatcgaaccaaatattggaattgttaatattaatgatccgcgtttaaaacgattagcaagcttagttgtgcctgataaaattgtgccgaccactttcaaatttgttgatattgcaggtcttgttaaaggcgcttcgcaaggtgaaggactaggaaaccaatttttaaataatattcgcgatgttgatgctatttgtcatgtcgttcgctgttttgatgataaatctattactcatgttcataataaaattgacgcattatctgatattcatgttattaattatgaattaatattatctgaccttgatattattgaaaaacgaattagtcgtattaaaaaaaaggctgattctggcgataaagatgctagaagagaatatcttattttatttaacattgaagaagctttaaaaaagggtcaattagcatcaagtgttaaattaaccaaagaagaattgaaaatcattaattctttcaatttaataactttaaaaccaattttatatattgcaaatatttcagaaaatgagatttcaaatcctgatttaaataaagaatatttaaaagtaaaaaagtatgctcaagataatgatgctagatgcgttgctttgtcagcaaaaattgaatatgaaattagcattttagatgaagaatcaaaatcaatatttattcaagatttaggtattaaaacaacaggattagatgaaattgtaaagcaaacctatgatttattaaatttaaaaacttattttacatatggaaaacaagaagtacgtgcttgaacatttataaacggaatgagtgcgcctgaatgtgcaggaattattcatagcgattttgaaaaaggttttattaaagctgaaattatgcattatgatgatttaatatcattaggaagtgagcaagctgtgaaagaagcgggaaaaataagaatggagggaaagtcatatttaatgaaagatggcgatatttgcaattttagattcaatgtgacaaaataa

SEQ ID NO: 40744 - DNA, 873 bp, Ureaplasma urealyticum
atgtcaccattagttaatgccaaaaaaatgattcaaaatgcttatgaaaatcattatgcagtggctgcaattaatatcaataatttagaatgaattaaagcagcattattagcagctcaagaaacaaactctcctcttttattagcgacatctgaaggtgccgtaaaatatatgggtggttatgataattgttatgcaatggttgttaatttaataaaacaaatgaatattaaaactcctgtttgtttgcatttagatcatggtacatatgaaggatgtataaaagctattaatgctggttattcctcaattatgtatgatggatcaaaactttcgatcgaagaaaacattaaaaacactaaagaacttttgacaataactaaattaaaaggtgtatcagtagaagttgaagttggttcaattggtgggacagaagatgggattacttcagaaggtgaattagctaatatcgacgattgttatcaaatgtgtttattagatattgatatgttagcgtgtggtattggaaatattcacggaatatatcctaaaaattgaaaaggtttaaattttaatttattaaaagaaattaacaataaagtgaataaaccaattgttttacacggaggttctggtattagtgatgaacaaattttaaaagcaattaatttgggtgtagcaaaaattaatattaatacagaatgtcaaattgcattttcaaatgcattacaagatcacttaacaaaagcaggtgatttaattctttctaaacagtatgatccacgaaaaattttggcttatggtgtggacgcaattaaaaatacaatcattgataaattcactaagtttaatagtttaaataaaataaaataa

SEQ ID NO: 40745 - DNA, 1449 bp, Ureaplasma urealyticum
atgaaaattagaacacgttatgctccatcaccaaccggttatttacatattggaggagcgcgaacagctttatttaattatttactagcaaaagcttatggtggggattttattattcgtattgaagatactgatattgaaagaaatgtggaagggggaattaattcccaactagattttttagcatgaatgggtattattccagacgaatcaattcgtaatcctaaagcttttggcccatatatccaatctgaaaaattaaaacattatgaaaaattagcattagatctagttgatcaaaaaaaagcttatttttgtttttgtagtaaagaacaattagatgcagatcgcgaattagctgaaaaatcacatcaaacacctaaatacaaacggcactgtttaaatttagataaaaaaacaattgaaagtaacttattacaaaataaagaatacacaattcgtttaaaaattaatgaaaatatggaatatagctgggatgatttaattcggggtaaaattagtattccaggtagtgctttaactgatcctgtcattttaaaatcaaataagattgcaatgtataattttgcagttgtaattgacgattatgaaatgcaaatttcacatgtcattcgtggagaagagcatatttctaatacaccttatcaattagcgattgctcaggccttaaattatgatataacaaaaattaaatatggtcatttgtcaattattgttgatgagacaggaaaaaaattatcaaagcgaaatttatctttaaaacagtttgtgtctgattatgaaaaagatggttattggccacatgctattacaaactttgttgcattattaggttgaagcccaaaaaataacgatgaaataatgagtttagaaacgatgattaaaaattttgatatcaataatttatcaaaatcccccgccttttttgatatcaataaaatgaattggttttcaacacaatattttaataatattacccaagaagaatttatcaattttataaagaaacattcattaactaaagaattagttttgaatgattatacttttattaataaatgtctattatttaaatctcatattattaatttaaaacaactaattgatttagtaattgaacaatttaattgtgataaaaaagtattagcatcagatgtagattatattaaaaaaaaccaattaataactgttgttcgtgttttttatgaacaattaataattaatgatgaatttaatgaagaatttataaaagaaataattaaaaaagttcaaataataactaataacaaaggtgctaatttatacatgccaattcgtattgcaactacatttagttcgcatggtccagaattagctaaaacaatttgttatttaggacgcgaaaaagtattaaaaaatttaataaatattttaaaaattttggattaa

SEQ ID NO: 40746 - DNA, 774 bp, Ureaplasma urealyticum
atggggcaaaacttcttattgtctaataacataaaaaataaaattgtagatgtggcgaatattaataaagatgatcttatattagaaattggtccagggtgaggagcaattactgaaattcttgtacaaaaaacaaatattttaattgctattgaattagataaaagactatatgcacacttaaaaacatacataaaaacaagtaattttcatataataaataatgatgtattatgtgtagatttagataatttgattttagattacaataatactcaaaaaattcaaaaaattaaagttgttgcaaatcttccatatgcaatatcttcaaagatagttttaaaaattattcaatcaaaattaattaatgatgcttatattatggttcaaaaagaaatggctgaacgaattggtgctaaagtaaatacacgtggttataatgcttttactgttttagtacaattattctgtaaaacaaaaattctattcgaagttaatgctaaagaatttcatccccaacctaaagttcaaagtgctgtcattcatcttgaaaatcttcataatagtgtgaattttaatattgaagaattaggtaaatttttacggatttgttttttaaataaacgaaaaaagttaaaaaataacttatctaatatttatgatattaaaataattaatcaaatgtttattgattataatttagatatgaatttacgagctgaaaacattgaaccaaaaatgtttctaaaactctttaattatttgaatagataa

SEQ ID NO: 40747 - DNA, 1152 bp, Ureaplasma urealyticum
atgtcatctgttgataaacaaaatttaacaaatagaatgcggatttctgtttcacattttgctggagcatcgaatgcaaattcgataaaaaaagaacgtaagaaaaaaatttttaatgttttattaaaagtttttaaaatcatcgtttatgcatttttcttaggtattggcttatatggttgtttccaaaatatggcaaaccactgaacaattaattctactattgttggtaatggttttgaattaggatttcatgttgatcctattcttggtgctaatgacattcgttttgatttaatttattctggaacaggtccttgatatccaatgtctgatttttcatttgattatggtcctttctatgctttatttgtttggccaattgcacaaattttattacattttatgtatgcaacgagagattgaccagcaggtttaaatgctattttaggattaattatcattttattaattattcgtgtgattacaatgttgatctcagcacgtgcaactatccaaacagaaagaatttctgaaattcaaggaaaaattgcagaaattaatgcaaaatataaagacgcaaaagatatgcagtctcgtcaaaaaaaacaaatggaaacaaaagagttatatcaaaaacataacgttaaacctttagctccttttgaaagtatgattattacattgccgatctttttaattatttatcgtgttgttacaattttaagaccacttaagtttattagtattttttatatttgagacttatcagcaacacctatttctgaaattttttcaaatttcacaacttcaggatgaccttatattttcttcttattaattattattccagtacaaatcttatcccaaaaaataccacaactattagctagaaaacgtaatcgtaatgccacaactgttggtgctaaaaataaacaacagttaaaacgtgtacgaatgacacaaaacattattgcaattgttttagctgttgtagtagcaatttctgcttccgggattggtttatactgattcttcaatgcgatctttactattctgcaatcgtatatcattcatgttattattatgaaacgccgttcaaacagtgccacaagaattgaatcaaaacttgctaaattaggaattagctaa

SEQ ID NO: 40748 - DNA, 342 bp, Ureaplasma urealyticum
atggctaattttattagtctaaaaaaaaatgaagatatacttgatacaattaagaaacaacaaaaaattcattctaatcaaatcgtagtttattttcgtaaaaccaatctaaaaaatgttcgcttagctataagcatttctaaaaaaaagtttaaattagcaacacaacgcaatcgaattcgacgcctgattaaagcatggtttattgctgctgatattcccattaaaagttatgatattgtagtcttagtgaaaccatcgtttattgatggttcttttgttttaaattgtaataatcttaaaataattcttcaacgaattattaacaaagaaaaaagataa

SEQ ID NO: 40749 - DNA, 147 bp, Ureaplasma urealyticum
atgaaaagaacgtttcaacctaataatcgtaaaagagcaaaagtgcatggttttcgtgcacgcatgaaaacaaaaaatgggcgtaatgttttagctagaagaagacttaaagggcgtcatagtctaacagtttctagtgaaaaataa

SEQ ID NO: 40750 - DNA, 1395 bp, Vibrio cholerae
atggcgctaattcaatcctgttcaggtaacactatgacaacagataccattgtcgcgcaagctacggcacccggccgtggtggtgtcggcattattcgtgtatcaggcccactggctgcccacgtcgcgcagacagtcactggacgcacgctcagaccccgctatgccgaatacttgcctttcaccgatgaagatggccaacagctcgatcaaggcattgcgctgtttttccccaatcctcattcatttaccggtgaagatgtgcttgagctgcaaggtcacggtggcccggtcgtcatggatatgctgatccgccgtattttgcagattaaaggagtgcgcccagcccgtcccggtgaattctcagaacgcgctttcctcaatgacaagatggatttaacccaagcggaagccatcgcagacctgattgatgccagctctgagcaagccgcgaaatccgcgctgcaatcactgcaaggcgagttttctaaacgcatccataccttggtggaatcgctgattcacctgcgcatctatgttgaagccgcaattgatttcccagaagaagagatcgattttctggccgatggtaaggtttccgctgatctgcaaaccatcatagataatcttgccgcagtgcgccgtgaagccaaccaaggcgccattatgcgcgaagggatgaaggtggtgattgctgggcgtcctaatgcgggtaaatcgagcctactcaatgcgctttcaggtaaagagtctgccatcgttaccgacattgccggtaccacccgtgatgttctgcgtgagcatatccatattgatgggatgccgctgcacatcatcgatactgcgggactacgagacgcttctgatgcggtagaaaaaattggtattgagcgcgcatgggaagagatccgccaagccgatcgcgtactgtttatggtcgatggcaccaccacagaggccaccgatccacaggacatctggcctgattttgttgacaaactgccagagaatattgggatcactgtgatccgtaataaagccgatcaaactggtgagccccttgggatctgccatgttaatcaacccaccttgatccgcctatcagccaaaacaggccaaggggtcgatgccttgcgtcagcacctcaaagagtgcatgggtttttcaggcaatcaggaaggtggctttatggcacgccgccgtcatctcgatgccctagagcgagccgcagagcacttagcgattggccagcaacaacttgaaggctatatggccggagaaatcctcgccgaagagctgcgtatagcccagcaacaccttaacgaaattacgggcgagttcagctccgatgatctgcttggccgcattttttcatcattctgtattgggaaatag

SEQ ID NO: 40751 - DNA, 1626 bp, Vibrio cholerae
atggattctcaacgtaatatcttgttaatcgctctggcgctggtttctttcctactgtttcaacaatggcaagtagcgaagaaccctgcaccgcaagcgacacagcaggcccaatccacaggcgcagctcctgctccttcattttccgatgagttagatccaacgcctgcacaaaatgtggcggcgaaggccaagaccattaccgtctcaaccgatgtactgactctgtctattgatacgctcggcggcgatgtggttagcgcaaaactgaatcaatactcagaagagctcaattcgcctgagtcttttgtcttgttgcaaaacacccaaggccatcagtttattgctcaaagtggtttagtcggcccacaaggcattgacgtcaccagcaataatcgtcccgcttaccaagtgagtgcggatagtttcactctggccgaaggccaagatgaactgcgcattcctatgacctatcaagccaatggcattgactacacgaaaaccttcattcttaagcgtggtagctacgccgtggatgtggtgtttgacgtcgccaataattcaggtagcgaagccacactaggtatgtatgctcacctgcgccaaaatctgctggattctggtggcaacctcgccatgccaacttaccgtggtggtgcttactcaaccagcgatgtgcgttacaagaagtacagcttcgacgacatgaaagatcgcaacctcagtgcaccaaacgatgtgacggtaaactgggtcgcgatgatccagcactacttcgcttcagcatggatcccacgtgatgagccgcaagcacagctttactcacgcgttatcaataatttaggtgatatgggtatccgtacaccaaacaaaaccattgccaacggtgataaagcagagtttgaagcaaccttatgggtaggcccaaaactgcaagaccaaatggccgcaacagcccctaatcttgatctggtggttgattatggttggttgtggttcattgctaagccactgcactggttgctgtctgtgattcagacctttgttggcaactggggtgtggccatcatctgcttaacctttattgttcgtggtgcgatgtacccactgaccaaagcacagtacacctcaatggcgaaaatgcgcatgctgcaacctaaactgcaagcgatgcgtgagcggattggcgatgatcgccagcgcatgagccaagagatgatggagctgtataagaaagagaaagtaaacccactgggtggctgtctccctatccttctgcaaatgccgattttcattgcgctgtactgggcactgatggagtcggtagagctgcgtcactctccattctttggttggattcatgacttgtccgcgcaagatccttactacatcttgccactgctgatgggtgcgagcatgttcgttatccagaagatgagcccgaccacgatcaccgatccaatgcaacagaagatcatgaccttcatgccagtcatgttcactttcttcttcctgtggttcccatcaggtctggttctgtactggttggtgtcgaacatcgtaacgctaatccagcaaacgctgatctacaaagcgctagagaaaaaaggcttacactccaagtaa

SEQ ID NO: 40752 - DNA, 357 bp, Vibrio cholerae
ttgagtacgtacgcattcaatcgggagttacgtttgttaactcccgaacattatcaaaaagtcttccagcaagctcacagtgctggttctcctcatctcacaatcatcgctcgcgctaataacctttctcatcctcgtttgggactcgcggttcctaaaaagcagatcaaaactgccgtcggccgtaatcgattcaaacgtatttgcagagaaagctttcgcttacatcaaaatcaactggctaacaaagattttgttgtcatcgccaaaaagagcgcgcaagatttgagcaatgaagaactgtttaacttgcttggcaaactatggcaacgcctctctcgcccttctcgtggttag

SEQ ID NO: 40753 - DNA, 138 bp, Vibrio cholerae
atgtctaaacgcacttttcaaccttcagttctgaagcgcaagcgtactcacggtttccgtgctcgcatggcgactgcgaacggtcgtaaagttctgaatgcacgtcgtgcaaaaggccgtaagcgcctgtcaaaataa

SEQ ID NO: 40754 - DNA, 1419 bp, Vibrio cholerae
ttgagtgagggaatcgtgtcatcttcgctatggttgcaatgtttgcaacggcttcaggaagagctacctgccgcagaattcagtatgtgggtgcgtccgcttcaagcggagctcaatgacaatactctcactttattcgccccgaaccgctttgtgttggattgggtacgcgataagtacctcaataacatcaatcgtctgctgatggaattcagtggcaatgatgtgcctaatttgcgctttgaagtggggagccgccctgtggtggcgccaaaacccgcgcctgtacgtacggctgcggatgtcgcggcggaatcgtcggcgcctgcgcaattggcgcagcgtaaacctatccataaaacctgggatgatgacagtgctgcggctgatattactcaccgctcaaatgtgaacccgaaacacaagttcaacaacttcgtggaaggtaaatctaaccagttaggtctggccgcggctcgccaagtctctgataacccaggtgcggcgtataaccccctctttttgtatggcggcaccggtttgggtaaaacgcacttgctgcatgcggtgggtaacgcgattgttgataacaacccgaacgctaaagtggtgtacatgcactctgagcgtttcgtgcaagacatggtaaaagccctgcagaacaacgcgattgaagaattcaaacgctactatcgcagtgtagatgccttgttgatcgacgatattcaattctttgccaacaaagagcgttcgcaggaagagttcttccacacctttaacgcactgctggaaggcaaccaacaaattattttgacttctgaccgctatccaaaagagatcagtggtgtagaagatcgtctcaaatcgcgttttggctggggcttaacggtggcgatcgagccgccggagttggaaacccgcgtcgcgatcttgatgaaaaaagcggaagatcaccagattcatctgccggatgaagtggctttctttattgcgaaacgcctgcgctctaacgtgcgtgagttggaaggcgcactgaaccgcgtgattgccaacgccaactttaccggtcgcccaatcacgattgatttcgtgcgtgaagcactgcgtgacttattagcgctgcaagaaaagctggtcacgattgataatattcagaagaccgttgccgaatactacaaaattaaagtggcggatctgctctcaaaacgccgttcgcgctcagtcgctcgtcctcgtcaattggcgatggcactggctaaagagctgaccaaccacagcttgccagagattggcgatgcgtttggcggccgtgaccacacgactgtgttacacgcttgccgtaaaatcgagcagttgcgcgaagagagtcacgatatcaaagaagattattcgaacctgattcgtacgctttcctcttaa

SEQ ID NO: 40755 - DNA, 1101 bp, Vibrio cholerae
atgaaatttaccattgaacgtagccacttgattaaaccattgcagcaggtgtctggcactttaggtggtcgcgccagcttgccgatcttgggtaatttgttgctcaaggtggaagagaatcaactgtcgatgaccgccaccgatttggaagtggaactgatcagccgtgtgacgttagaaggtgaatttgaagcaggcagtattaccgttcctgcgcgtaagtttttagatatttgccgtggtttgcccgatagtgcggtgatcactgtgctgcttgaaggcgatcgcattcaagtgcgttctggtcgtagccgtttctcactcgccaccttacctgccagtgattttccgaacattgaagattggcaaagtgaagtgcaagtttcgctcactcaagcggaactgcgtggcctgattgagaaaacgcagttttctatggccaaccaagatgtacgctactacttaaacggcatgctgtttgaaattgatggcaccaccttgcgttctgtggcgactgatggtcaccgtatggcggtggcgcaagctcagctcggtgcggattttgcgcaaaagcagatcattgtgccgcgtaaaggggtgcttgagctggtgaaattgcttgatgcgccagagcaacctgtggtgctgcaaatcggccactctaacttgcgtgcagaagtgaatcactttgtgtttacttcgaagctggttgatggtcgtttccctgattatcgccgtgtattgccgcaacataccagcaaaacactacaaacgggctgcgaagagttacgccaagcattttcgcgtgccgcgattctatcgaatgaaaaattccgtggtgtacgggttaatttggctgacaacggaatgcgcattaccgccaataacccagagcaagaagaagcggaagagctactggatgtgagctttgaaggcgagccgattgagattggctttaacgtcagctatatcttggatgtgcttaacaccctgcgctgcgacaatgtgcgcgtttcgatgtcggatgccaacgccagtgccttggtggagaatgtcgatgatgacagtgccatgtacgtggtcatgccaattcgtctgtaa

SEQ ID NO: 40756 - DNA, 2418 bp, Vibrio cholerae
atgtcgaacaattacgattcatcgagtattaaggtactgaagggtctggatgcggtacgcaagcgtccgggtatgtacatcggcgacactgatgatggcaccggtctgcaccacatggtttttgaggtggtggataactcaattgatgaagcgttggcaggttactgtaaagacatcgtggtcaccatccacgaagacaactcagtgtcagtcagcgatgacggtcgtggtatcccgaccgaaatgcatcctgaagagaaagtgtctgcggcagaagtcatcatgactgtactgcacgccggcggtaaatttgacgacaactcctataaagtctccggtggtctgcacggggtaggtgtgtcggtggttaacgcgctttctgaaaaagtgctgcttaccatttatcgtggtggcaagatccattcgcaaacttaccatcatggtgtgccacaagcaccgttggctgtggtaggtgagacagagcgtaccggtactaccgtacgtttctggcctagtgcacagacttttaccaatatcgaattccattacgacattttggctaaacgcctgcgtgagctgtcattcctgaactctggcgtgtcgatcaagctgaccgatgaacgtgaagaagataaaaaagaccacttcatgtatgaagggggtattcaagcgtttgtgacccacttgaaccgtaacaaaacgccaatccatgagaaagtcttccactttaaccaagagcgtgaagatggcatcagcgtggaagtggcaatgcagtggaacgatggtttccaagaaaacatctactgctttactaacaacatcccacagcgtgatggtggtacccacttagccggtttccgtggtgcgttgacccgtactttgaacaactacatggacaaagaaggcttctcgaagaaagcgcaagcggcaacctcgggtgatgatgcgcgtgaaggcttaacggcagtggtttcggtgaaagtgccggatcctaaattctcaagccaaaccaaagataagctggtttcttcggaagtaaaatccgcggttgagtcagccatgaatgagaagctggcggatttcctagcggaaaacccaagcgaagcgaaaaacgtttgttcgaagattattgatgcggcgcgtgcgcgtgaagcggcgcgtaaagcccgggaaatgactcgccgtaaaggcgcgctggatcttgctggcttacccggcaaactggcggattgtcaggaaaaagacccagcattgtctgaactctacatagtggagggtgactcagcgggcggttcagccaaacaaggccgtaaccgtaagaatcaagcgattctgccgctgaaaggtaaaatcctcaacgtagaaaaagcgcgttttgacaagatgttgtcttcacaagaagtcgcgaccctcatcactgcattaggctgtggtatcggccgtgatgagtacaacccagataaactgcgttatcacaacatcatcatcatgaccgatgcggacgtcgacggctcgcacattcgtactctgctgttgacctttttctaccgccaaatgcctgagttgattgagcgtggttacatctacattgctcagccaccactgtataaagtgaagaaaggcaaacaagagcagtacatcaaagatgaagaggcgatgaaccagtaccaagtggcactggcgatggatggtgcagagctgcacgtgaatgccgatgcgccagcgttagcgggtgaaccgctggagaagctggttcagcaatataacgccgcgatcaagctggttgagcgcatgagccgccgttacccttacgcgatgctgcatgagctgatttacgtaccacgcatcaatgccgagctgtgtgcggataaagccgcggttgaagcttggacacagcgtttagtcgaacagttgaatgctaaagaagtgggtgcgagccaatacagcgttctggttgaacacaatgctgagctgaatgtgtacttgccaaaaattcaggtgcgtactcacggtgtgactcatgaatacttactgagcgcggatctgatcaactcgaaagagtacgctaagttagccgatctgtcggaagcgctggacggtttgattgaagcgggagcgtttatcaaacgtggtgagcgagtacaaccgatcagcagctttgccgccgcgctggattggctgatcaaagagtcgcgccgcggtctgtctatccaacgctataaaggtctgggcgaaatgaaccctgatcagctgtgggaaactacgatggatccagaaacgcgtcgtatgatgcaagtcactatcgaagatgcggtaggcgcggacgaactgttcacgacgctcatgggcgatcaagttgaaccacgtcgtgcatttatcgaaaccaacgcactgaaagtggccaacctcgacgtataa

SEQ ID NO: 40757 - DNA, 1257 bp, Vibrio cholerae
atgcagtattcctcttttggcgaaaagtttaatcgctactccggtattacccagttaatggatgatttgaacgatggtctgcgcactccaggcgcgatcatgcttggtggcggtaatcctgctgccatccctgccatgctcgattatttccataacaccagcgccgaaatgttggccgatggttcactgctcaatgccatgaccaattacgatggtccacagggcaaagatgtgtttgtaaaatcgctcgctacactgctgcgtgagacgtatggctggaatatcagcgaaaagaacatcaccttgaccaacggcagccagagtggctttttctacctgtttaacttgtttgccggtaaacagcccgatggtgcacacaaaaaaatcctcctacccctcgcgcccgaatacattggctacggtgatgctggcattgatgacgatatttttgtctcctaccgtccggagattgagctgctcgatcaaggactgttcaaataccatgtggacttttctgagctgaaagtcgatgaatcggtggccgcgatctgtgtgtctcgccccaccaacccaaccggtaacgtgttaaccgaagaggaaatccacaaactcgaccaactggcacgtgataacggtgtgccgttaattatcgacaatgcttacggcgtgccattcccgaatatcatttttgaagacattgaaccgttttggaatgacaacaccatcttgtgcatgagcctatccaaactgggcttgcccggtctgcgctgcggcattgtgatcgccaatgaagcggtaactcaagcgctgaccaacatgaatggcatcattagcttagcacccggcagtatgggacccgcactggtgcaacgcatgatagaaaaaggcgatctgctgagacttagcgagcaggtgatcaagccgttttatcgccaaaaagcgcaacatgcggtagagctgctgcaaagtgcgattacggatccgcgttttcgcatccataaacccgaaggggcgatcttcctctggctgtggtttgatgaactgccgatcaccacaatggagctttaccaacgtttgaaagcgcgtggggtattgattgtaccgggcgaatatttctttatcggccagccgcaagaatggccacacgctcatgagtgcttgcgtatgaactatgtgcagaacgagcaagcgatggaacaaggcattgccatcatcgccgaagaagtacaaaaagcgtatcaacaagccaacgtctaa

SEQ ID NO: 40758 - DNA, 2067 bp, Vibrio cholerae
atggcaaaagaatttttaattgagctaggcacagaagagctgccaccaaagcaactgcgcacactggctgaagcctttgcggcgaattttgcggcagaactggcaacagctgacatcgcccatgaaggcgtaacttggtttgccacgccacgccgtttggcactgaaagtggccaatttggcagaaagccaaccggatcgcgtcgttgaaaaacgtggtcctgccgtcaacgttgcgtttgatgccgatggcaagccaaccaaagccgctgaaggctgggcgcgtggcaatggcatcacggtagagcaagcagaacgtctcgtcacagacaaaggcgaatggctgctcttcaaagaacaagtgcaaggccaacaaaccgcttctgtggttgtggagatggcggccaaagcgctggctaacctgccgattgcgaaaccgatgcgttggggcgacaaagaaacccaatttatccgtccagtaaaaactctgaccattctgtttggtagcgaactgatccaaggcgaaatcttgggtgttgcttctgcacgcaccctccgtggtcaccgctttatgggtgaagcggaattcaccatcgaatcggctgagcagtaccctgcgatccttgaagagcgcggcaaagtcatcgctgactacgcgactcgtaaagcgatgatcatcgaaggctcacaacaagcggctcagcagctcggcggtatcgcggatctggaagatgcgctggtagaagaagtgacctcgctggtggaatggccagtggtgatgacggcgaaatttgaagaaaaattcctcaaagttccagcagaagctttggtgtacaccatgaaaggtgaccaaaaatatttcccagtctatgacgcaagcaaaaaactgctgcctaacttcatcttcgtttcgaacatcgaatcgaaagagcctcgccacattgtggaaggtaacgagaaggtagttcgtccacgtctggcagatgcagagttcttctttaatactgaccgcaagcgcccattggtggatcgcttacctctgctcgaaaacgcgattttccaacagcaactcggcacgattaaagacaaaaccgaccgcattactgaactggctggctacatcgcagagcagatcggtgctgacgtggagaaatctaagcgtgcaggcctactggcaaaatgtgacctaatgacctcgatggtgtttgaatttaccgacacccaaggcgtgatgggtatgcattatgcgcgtcacgatggcgaagcagaagaagttgcagttgcgctgaatgagcagtacatgccacgtttcgcgggtgatgaactgccaagccgtggtgtttcagctgcggtcgcgatggctgacaaactcgatactatcgtcggtatatttggtattggtcaggcgccgaaaggcagtgacccatttgcgctgcgtcgtgcttcactgggtgtactgcgtattctggttgagtacggctaccagttggatctggtggatttgatcgccaaagccaaatcactgtttggtgaccgcctgactaacgccaacgttgagcaggaagtgatcgagtttatgcttggccgtttcccaacctggtaccaagatgccggttttagcatcgacatcatccaagcggtactggcgcgtaacccaaccaaaccagccgactttgatcagcgtgtgaaagccgtatcgcacttccgcgctcttgaagaagccgaagcactggctgctgccaacaagcgtgtaggcaacattctggctaagtacgatggtgaattgggtgaagaaatcgatctcgctctgctgcaagaagatgcggaaaaagccttagccgaagccgtcgaaatcatggcagaagcgttagaacctgcgtttgcaaccggcaactaccaagaagctctgagcaaactggctggcctgcgcgcgcctgtcgatgccttcttcgacaacgtgatggtgatggctgacgatgaagcactgaagaagaaccgtctcacgctactcaacaagctgcgtaacctgttcctgcaaattgccgacatttcgctgctgcaaaaataa

SEQ ID NO: 40759 - DNA, 993 bp, Vibrio cholerae
ttgtcagggaatatctgggtatacttcagtgttattttttatcaattcagacagaagaatcgcgcgaacctgactatgcaaaaatacgacatcaaaacctttcagggtatgatcctcgcgctgcaggattattgggcccaacaaggctgtactattgtgcaacctctcgacatggaagtgggtgcaggtacttctcacccgatgacttgcttacgagcattaggccctgaacctatcgcaaccgcgtacgttcaaccctcacgccgcccaactgacggccgctacggtgaaaacccaaaccgtctgcagcactactaccagttccaggtgatcatcaaaccctcaccagacaacatccaagagctgtacctaggttcactgcgtgtactgggtgttgacccttgtgtgcatgacatccgctttgtggaagacaactgggaaaacccaaccttaggtgcttggggtcttggctgggaagtgtggctaaacggcatggaagtgactcagttcacttacttccagcaagttggcggtcttgagtgtaagcctgtgaccggcgaaatcacttacggtattgagcgtctggcaatgtacattcagggcgtggattcggtttacgatctggtctggaccgatggcccactgggcaaagtgacttacggcgacatcttccaccaaaacgaagttgaacaatccacttacaactttgaacacgcggatgtggatttcctcttcacttacttcgaccagtgtgaaaaagagtgtaaatacctgctagagcttgaaaagccactgcctctgccagcctacgagcgtattttgaaagcggcacacgccttcaacttgctcgatgcacgcaaagcgatctcagtgactgagcgtcagcgctacattctgcgcattcgcaacctaaccaaatcggtcgccgaagcttattacgcatcccgtgaagctctgggcttccctatgtgtaagaagtcagaacagaagtaa

SEQ ID NO: 40760 - DNA, 1842 bp, Vibrio cholerae
atgcctaagtaccgttccgccaccaccacacacggacgtaacatggcgggtgcgcgcgcattatggcgcgccaccggcgtcaaagaggaagattttggtaaaccgatcattgcggtggtcaactccttcacccaatttgttcccggccatgtgcatttaaaagatctcggccaactggtcgcacgcgaaattgaagccgcgggcggcattgccaaagaattcaacaccattgcggtcgatgacggcatcgccatgggccacggcggcatgctctactcgctgccatcgcgtgaactgatcgccgattccgtcgaatacatggtcaatgcgcactgcgccgatgccatggtgtgtatctccaactgtgacaaaatcactccaggaatgctgatggcggcgatgcgccttaatattccggcgattttcgtctctggcggcccgatggaagcgggaaaaaccaagctttctgaccaaatcatcaagctcgacttggtcgatgccatgatgcaaggcgctgaccccaaagtatcggatgcccaaagtgagcagattgaacgctcggcctgtcctacttgtggctcttgctcggggatgtttaccgccaactcaatgaactgcttgaccgaagcgctgggtctctctcagccgggtaacggctcactgctcgccacgcatgccgatcgcaaacagctgtttttgactgctgggcaacggattgttgagctgactaaacgttactacgagcaagatgatgcctcagttttgccacgcaacattgccaacaaagcagcgtttgaaaacgccattgcgctggatattgcgatgggcggctccaccaacacggtgttacacctgttggccgctgcgcaggaaggcgaagtggaatttgatatgaccgatatcgatcgcatgtctcgccaagtgccacacttatgtaaagtcgcgccttccactcagaaataccatatggaagatgtacaccgcgcgggcggtgtaatgggcattttgggtgagctacaacgtgcaggtctactcaaggatcaaacccgcaccgtactaggcatctcgctgcaagagcagctggcgcaatacgacgtgaaacaaacccaagatccagcggtacatactatgttccgcgcaggccctgctggcattcgcaccactcaagctttctcacaagattgccgttgggatacgctcgatgacgatcgccaagaggggtgtattcgcgataaagcgcacgcattcagtcaagatggtggccttgccgtactcaaaggcaacttggcgattgacggctgcatcgtaaaaactgctggcgtggatgaaagtatcctcaaattccgtggtcctgctgtggtgtatgaaagtcaggaagacgcggtcaacggcattcttggcggccaagtcaaagccggtgacgtcgtggttattcgttatgaagggccaaaaggcggtccgggcatgcaagagatgctctacccaaccacctacctcaaatcgatgggactgggtaaacagtgcgcgctactgaccgatggccgcttctccggtggtacgtccggcttgtcgattggtcacgcctctccggaagcggcgaatggcggtacgatcggcttggtacgcagtggcgatagcatcgcgattgatattcccaaccgttcgatcacgctcgaagtcagcgaatctgagctagcagctcgccgcgctgaacaagataaactcggctggaaaccagtggatcgccagcgtaccgtttctttggcgctgaaagcttatgccagcatggcaaccagcgccgacaaaggtgcagtgcgcgataagtccaaacttgagggctaa

SEQ ID NO: 40761 - DNA, 960 bp, Vibrio cholerae
ttgcgcataaggaaggcaatcatggcaacaaaaactgctgattatatttggttcaatggcgagatgatcccatgggcgaatgcgaccgttcacgtactcacccatgcaatgcactacggcacttcggtgtttgaaggtgttcgctgctacaacaccccaaaaggccctatcatcttccgccatcgcgaacacgcgcagcgcctgcttgattcagccaaaatctaccgctttccaatcccttattcgatcgagaccatcatggaagcgacgcgcgaaaccttacgcgtcaacaaactcgataacgcttacattcgcccattggcgtatgtgggtaacgtgggtcttggcgtgtgcccgccagtcggcactgaaatggatctgatgattgccgctttcccttggggggcttacctcggtgaagaagcgctagaaaatggcgtggatgccatggtttcaagctggcatcgtgcggcaccgaacaccattccaaccgcggcaaaagctggcggtaattacctatcttctctactggttggtggcgaagcacgtcgccacggttacgcggaaggcattgcgctgagtgtggatggttatctctctgaaggcgcaggcgaaaacattttcgtggtgaaaaacggcgtgatcctgaccccaccgaccaccagctctatcctgccgggtatcacccgtgattcgatcatgacgctggcacgcgacatgggttatgaagtgcgcgaagccaacatctcccgtgaagcgctctatctggccgatgaaattttcatgacaggtaccgccgccgaagtggttcccgtgcgtagcgtggataagattaccgtaggcgcaggcaagcgcggccccatcaccaaggtagtacaagatgcttactttggtctgttcaaaggcaccacagaagataagtggggctggttggattacgtttacccagcagcgaagtaa

SEQ ID NO: 40762 - DNA, 1023 bp, Vibrio cholerae
atggtaaagggctcagtaatgagccctttttattcaatgacccaagccacgtttcattttgatgctttaactcccgatctgatttggtacgcgctggaaagtatcggcattcgtgctgagtcaggctttttgccactcaacagctatgaaaaccgcgtctaccagtttaccgatgaagagcgtcgccgctttgtggtgaaattttatcgcccacaacgttggaccgatgagcagatccaagaagagcatgatttcgcgctcgaactggaacaagaagagatcccgatcgtcccgccgcttagactcaatggcgcgacactacaccactaccaaggctaccgttttgccctgtttaccagcatgggcggtcgccaatacgaagtggataatgaggaacacttagagtgggttggccgctttctggggcgcattcacaaagtcggagcaagtaaaccctttctccaccgcccaactctgtcgctggatgaatacttacatcaacccagacataccttggagtacagtcactgcattcctgcccatttgcagcgggtgttttttcacgatctcgatattttgattgctgaaatcaagcagcattgggtacccacccagcctcagatccgtctgcacggagactgccaccccggcaatattttatggcgcgatggcccgatgtttgtcgatctggatgacgcacgcaacggccctgccattcaagatctctggatgctgttgcatggtgatcgccaagacaaactgatccaattagatatcgttttggaaggctaccaagagttttgcgattttaatcctcaacaattgaaactaatcgagcctttacgtggtctacgcatggtgcactacatggcatggctcgccaaacgctggcaagatccggcttttccaatcgcatttccgtggtttaatgacgcgaaatactgggagaatcagatcctcgcttttaaagagcagattgccactttacaagaacccccgttatcattgcagccgcagtggtaa

SEQ ID NO: 40763 - DNA, 648 bp, Vibrio cholerae
gtgagtatgtcgaacagttatggctttaaagaagaagtggccaatgcgataagtcatggcgttggccttatcttagggatagttggtttagtgctgctgttggtcaaagcggtggatcagcaagccgatgcattgactattaccagcatgagcatttatggcggcagtatgattgcgctatttttggcttctacgctgtaccacgctatcccttatcagcgtgcaaagcgttggctaaaaacctttgatcactgtgctatttatttactgattgcgggcagttataccccatttttactggtcagtttgcgtacaccactggcggttggtttgatgatagtgatctggtcgctcgcgcttattggcattctgatgaaaattgcttttgtctaccgcttcaaaaagctctctttggtgacgtatctgaccatgggttggctttcgctgatcgtgatttaccagcttgccattcatcttgaggtgggtgggctcactctgctggcggcaggtggacttatctattcactcggggtgattttctacgtcgccaaacggatcccttacaaccatgccatttggcacgcttttgtgctggcgggatgcgcatgccatttcttagccatttatctgtatgtcgagccgatttag

SEQ ID NO: 40764 - DNA, 1377 bp, Vibrio cholerae
atgaaaatcatcattcttggtgcaggacaagtcggcggtacgctcgctgaaaacttggtaggcgaaaacaacgacattactgtggtcgataaaaacgctgaccgactgcgcgatttacaagataaatatgatttgcgtgtagtcaatggtcacgccagccaccctgatgtgctgcgcgaagctggcgcacaagatgctgacatgctggtcgcggtcaccaataccgatgaaaccaacatggccgcttgtcaggtcgcctttactctgtttaacacgcccaaccggattgcgcgtatccgctctccacaatatctcgctgaaaaagaagcgctgtttcaatctggcgcggtcccggtcgatcacctgattgcaccggaagaactggtcaccagctatatcgagcgcttgatccagtatccgggcgcgctgcaagtggtgagtttcgccgaagaaaaagtcagcttggtggccgttaaagcgtattacggtggtccactggttggtaacgccctttctgccctacgcgatcacatgccgcacatcgatactcgcgtggcagcgattttccgtcagggacgcccaattcgtccgcaaggcaccaccattattgaagcggatgatgaagtgtttttcgtcgccgcgagtaaccatattcgctcggtgatgagtgagttgcagcgccttgaaaaaccgtatcgtcggatcatgattgtcggcggcggtaacataggtgccagcctcgctaaacgcctagagcaaacttacagcgttaagctgattgaacataattaccaacgtgcggaacagttatctgaacagttggaaaataccatcgtcttttgtggagatgccgcggaccaagagctgctgtcggaagagaatatcgatcaggtcgatgtgtttatcgccctcaccaatgaagatgaaaccaacatcatgtcggccatgcttgccaaacgcatgggagccaagaaagccatggtgcttatccaacgcagcggctatgtcgatttagtccaaggcggtgtgattgatgtagcgatctccccgcagcaagcgaccatttctgcgctactcactcacgtgcgccgcgccgatattgtcaacgtctcttcattacgccgtggagcggcagaagccattgaagcgattgcccacggcgatgaatcaacctctaaggtagtaggacgagcggtgggcgatattaaactgcctccgggcacgacaattggcgctattgtgcggggcgaagaagtgctgattgcccatgaccgcactgtcatcgagcaagacgatcacgtcgtcatgttcttggtcgataaaaaatatgtgcccgacgtggaaacgctattccagccgagcccattcttcttgtaa

SEQ ID NO: 40765 - DNA, 1305 bp, Vibrio cholerae
ttggctttttgtttaggttttattatgaatgttcgcgccgctgctgcgtcggctctttaccaagtggttgatttagggcactcactgtccaatgctttgcctgcggctcagcagcaaattcgcccacgtgatcacgccctgctgcaagagatctgctatggcgttttgcgccaattgccgcgtttggaatccatcagccaagctctgatgggaaaaccgttgaaaggcaaacaacgcgtattccacttcctgatcctcgtcggcttataccaactgagctttatgcgcattcccgcacatgctgcggtaggggaaaccgtcgaaggcgcgcaagatttgaaaggccctcgtctgcgcggcttgatcaatgcggtgctgcgtaactatcagcgtgaccaagaaggcttagatgctcaagccaccagccatgacgcagggcgctacggccatccgggctggttattgaaattgctcaaagagagctacccagagcagtggcaacaaattgttgaagccaacaacagcaaagcgccgatgtggctacgcgtcaatcatcaacaccatactcgtgctgagtatcaagccctgctcgaacaagctggcatcgtcactacgcctcatgcgcaagccgaagatgcgctgtgcttagaaacgccttgcgatgtacaccaactgccgggtttcgctgaaggttgggtttcagtacaagatgccgctgcgcagttagcactgacttaccttgcaccgcaagcaggagagctgattttagattgctgcgctgcccctggtggcaaaactgcgcacatcttggagcgcacaccagagagccaagtcgttgcgattgattgtgatgaaactcgcctcaaacgcgtgcgagaaaacctgcagcgtttagagctcactgcgcaagtgatttgtggcgatgcgcgttacccgcaacagtggtggcaaggcgaacagtttgatcgcatcttgctggatgcaccttgctcggcgaccggcgtgattcgccgccatcccgacatcaaatggctgcgccgcgcagacgatatcgcggcattagccgagctacagcgcgaaattttggatgcgatgtggcaacaactcaaacccggtggtagtttggtgtacgcaacgtgctcgatcacaccacaagaaaaccgcctacaggtcaaagcgttccttgaacgcacgccagatgcgcgcttagtgggttccgatcccgcgcagcccggccgccaaatccttcccggagaggaagcgatggacggtttctattacgccgtattaagcaaacaacactga

SEQ ID NO: 40766 - DNA, 1176 bp, Vibrio cholerae
gtgatttctccgaaacccagtcattttttcgaccaaggaagcaaggtcatggcacgattaacccgttatattacctacgctttattgcctttcactctgctcagtggacaggtgaccgccgatgagcaaacgccgctggcactcaaaccaaatgcaccgaccacctataccgtggtgaaaggtgacaccttgtgggatatttccgctttgtatctcgacagtccatggctgtggccaagactttggcaagtgaacccagaaattgataacccacatttgatctaccccggtgataaattgacgctgttttggcgtgatgggcaacccgaactcagtctaaaaccgatgcgcaaactgagcccgcaagtgcgtgtgttggagaaacaagctgttccgactgtgcaagaaggcttggtgctgccttatttacaatctgaccgtttgatggcgaaaaccgccttgcaaggtagcgtgcgtgtgattggctccagtgaggggcgtcaatatctcaccaagcaagatcagctttacatctccggtgtacacagcgagaaaaagtgggggatttatcgcgaggtagcacagtatcaacgtgatgatgaagtcatggtggcgctgcgtttagtggcggtgggtgaattggcgatgactgggggcaactttagtggactaagcttgctagagcaaaatcaagagattttagccaatgatattgctttgccagaagtcgatcttgaggagcgccaactgtcgacaaccttctatccgcagccagcgcctgcagggagtgaagctcgcattctgggttcgcttgaagggagtcaatacgccggacagaatcaagtggtggtgattgaccaaggccgcagtgatggcgtcgcgcaaggcagtatgtttgaactgtatcaagccgcagtccaagtcaaagctaagcaagattcgtctactttcctgtctgagcgttcgaacacggacgtacagttaccaagtgtaaaagtgggcgctttgatggtgattcgcccttatgagcgttttagcttggcactgattactaacagttcggcaccgatcagtgctgaagtgcacgcactgtctccgcaggcagagcctcaaaccgagcagccagatgtagtgcaattgtctgaacaaatcgatttggttgatgatgccagttaa

SEQ ID NO: 40767 - DNA, 837 bp, Vibrio cholerae
atggcttctcaaatcgatcagtatgccgtttttggtaaccccattaatcacagtaaatccccttttattcatacgctgtttgcacgacaaactcagcagtccatgatctataccgcacagtgcgtgccagtggatgggtttactgaggcggcgaaacatttttttgcgcaaggtggacgaggttgtaatgttaccgtgccatttaaagaggaggcgtaccgctttgccgatcgcttaacggagcgcgcgcgtttagccggtgcggtaaacacgttaaaaaagctggatgatggcgaaatactcggagacaacaccgatggtgaaggcttagtgcaagatctactcgcgcagcaagtgctactgaaaggcgcgacgattttgttgattggtgctggtggtgcggcgcgtggcgtgctcaagccgttattagatcagcagccggcctctattaccgtcacgaatcgtacctttgcgaaagcggagcagttggctgagcttgtggccgcttatggtgaggtaaaggcgcaagcgttcgaacagcttaaacaaagttatgatgtgatcatcaactcgacctctgccagtctcgatggcgaattgcctgcgattgatccggtgatcttttcatctcgctccgtctgctatgacatgatgtatggcaaaggctataccgtgtttaatcaatgggcgcgacaacatggctgcgcgcaagcgatcgatggcttaggcatgttagtgggacaagcggctgaaagttttatgctatggcgtggtttacgtccgggcacgaaacaaattttgcgtgaactgcgtaaaaatctagaaggtgcgctatga

SEQ ID NO: 40768 - DNA, 1323 bp, Vibrio cholerae
atggtacgtttggtttttccacgtcacctatcagccttaatcggtcacgtgcaatacgcactgttgcaagccaaggaacaaggggtcgctattcagcatatccgtttggatgtgggctctgaggctcagtttattttagagaagagtgaagagtctttgcgaattggcagtagtttgtgctctcaaaaggagggttttgagccttgcgactactacctagactatgtgtctgaaaaccgagtgttacccgaggcaatgatgtgtaacgctcgctgcacggtgactgtaggtcttcatgatgaatatggttttacgctggataagtggcagtatgggcatgctgcagagcaacttattgtttatccatcagagaaccatcgattaaatagtaaggtaaatcagcatcttgcttgggttttagctacgttgaccttagatttttcgattggagatggtttgtgcattgcaagagcggcaatcactcaaggggatagcgtttcacgtgaaacatggccaacgcaattcgagcgtttccctgcagtgcaatctaacattcgctctctatctacccaagtatttctaaccaccagagcatttccaacgattgataaagcaaaatttaatctctatcccgtagtggatgatgtgaattggattgagcatcttctgaagctcggtgttagaacggttcagctgcgaattaaagatcctaagcagggtgatttggaagcacagattatccgagccatcgcgttaggtcgtgaattcaacgcacaggtttttataaatgatcattggcaattagccattaagcatcaggcttatggtgtgcaccttggtcaagaggatttgacgagtgcgaatttaaccgagctattagatgcaggtattcgattggggctttcgacgcatggttattatgagttactgatagccgcaggaatacagcctagctacatcgcccttgggcacatttttcccacgaccactaaacagatgccatcaaaaccacaagggctagtgcgattggccgcctatcagcggttggttaatcaaatgccttaccaaggacaacatggcattccaacggtggcgattggtggtattgattgcagaaacattcgcgatgttctcgattgtggcgtcacggcggttgcagtggtgcgggctattaccgagtcaccggatcctagccttgcagtacaagcgttgagttctgcttttgccgattttgtagatgcggagtacaagttgatgccagccagcgagtcatgcgagccactcagttacttggctatggaggtagcggatgctcacagataa

SEQ ID NO: 40769 - DNA, 771 bp, Vibrio cholerae
atgctcaagattgcagataaaacgtttcaatccagactgtttactgggactggaaaattctctaatcgccatgtcatggctgaagcattggccgcctcaggttcagagttggtgaccatggcgttaaagcggattgatttggctcagcgcgacgatgacattcttgcgccgctactcagtatgcagatgaatctcttacctaacacatctggagccaaaaatgctgctgatgcggtgtatgccgccgagctagcccgagaagccttagccacgaactggcttaagttggagattcatcctgatcccaaatatctaatgcccgatcccatcgaaaccctgcttgcggcagaacaattggtgaagcaaggttttattgtgttgccgtattgtcatgctgaccctgtcttgtgcaaaagattggaagaggttggctgcgctgcggttatgcccctcggttcaccgattggcagcaatcaaggcttggcgtcgaaaacctttcttgaaatcatcattgaccaagccaaggtgccggtcattgtcgatgcggggattgggtcgccatccgatgctgcgcaagcgatggagcttggcgccgacgctgtgttagtgaataccgctattgccgcggcgcatgaccccatcgctatggcaaaagcctttaagctagcggtcgaagctgggcgaatggcttatgaatccggcttgccatcacgagtaaaaatggcgacggcatcaagtccattaactggatttttggattttgtatcatga

SEQ ID NO: 40770 - DNA, 1197 bp, Vibrio cholerae
gtggcagtgatgagcaaaacagtcgatgtggtaattattggcgcaggtgcggcgggattgatgtgcgcagcacaggcggcgcgacgcggccgtcaggtattgctgctcgatcatgctaaaaaaccggggcgaaaaattctgatttccggtggtggacgctgtaatttcaccaattacgatgtctcggcggcgaactacttgtgccaaaacccacactttgtgaaatcggcgctgtcgcaatacaccaactgggattttatctcgctggtcagcaaatacggtattgcctttgaagagcgcgatcacggtcagctgttttgtcttgattcggccaaagagattgtagacatgctactcagcgagtgtgaccaaccgaatatcgagcagcgctatcaagttgaaatcagcgccatagcccacaccgagcaaggttttactctgcaaaccaccataggtgagattgagtgcgcgtcgctggtggttgccaccggcggtttatcgatgccgaaactgggtgccacgccgtttggctacaaaattgcagagcagtttggcttgcccgtgatcagtaccagcgcaggtttagtgccatttacgttgcatgtgcaagataaggaagatttcgcgccgttatcgggtgtggcgattcctgttgagatgcgcgcagaatgcggtaaaaccttcaaagaagccttgctctttactcaccgcggcttatctggccccgcggtgctgcaaatttcctcttattggacgccaggacaaaccattaccaccaatttagtccccgacgtggatttggctgagttgttgagtagtgaaaaagaagcgcacccgaaccagagtttgaaaaataccttatcgaaagtgttgcccaagcggctggttgaagtgctgattgaacgccaactgtttgccgataaaccgctgaaacagtattcccccaaagagctcgacgcggtgcaaacccgtttagagcagtggtcgattgtgccaaacggtaccgaaggctatcgcaccgcagaggtgacgcttggtggcgtggataccgattgcctctcatccaaaaccatggagtgcaaaaccgtcaaaggcttattctttatcggtgaagtgatggatgtgactggctggctcggcggctataacttccaatgggcttggtcgagtggctacgtcgccggccagtgggtttag

SEQ ID NO: 40771 - DNA, 783 bp, Vibrio cholerae
atgacggacaccaacgtgctagcaaactctgcaacagacaatcaggaaacgacccactttgggtttgaaaccgtacgtaaagatgaaaaagtgcataaagtcgcgcaagtgtttcactcggttgcggccaaatacgacatcatgaatgacctgatgtcgggcggtatccaccgtttatggaagcgctttaccatcgattgttcaggcgcacgtccgggacaacgcattctcgatttgggcggcggtacaggcgatttaaccgcgaaattctcgcgtattgtgggcgagaaaggccatgtgattttggccgatatcaataactctatgctcaatgttggccgcgataaactgcgcgacagcggcgtggtcggtaatgtgcattacgtgcaagccaacgccgaagaactgcctttcccagacaactattttgactgcatcaccatcagtttctgtctgcgtaacgtgaccgacaaagataaagcgctgcgttcgatgttccgtgtattgaaacccggcggccgcctgttggtgctggagttttctaagccgatccttgagccgctgtctaagctttatgacacttactcgttccatattttgcctaagatggggcaactgattgccaatgatgcagacagctatcgctatcttgctgagtcgatccgcatgcatccggatcaagagactctaaaaggcatgatggaagaggcgggttttgaacaaaccacttattacaacctgaccggcggcattgtggcgctgcatcgtggttacaaattttaa

SEQ ID NO: 40772 - DNA, 1044 bp, Vibrio cholerae
gtgtcggtatccattcaaggtcaatttcctgggcgtcgtttacgccgcctgcgtaaacatgatttcagccgtcgccttgtggccgaaaaccagttgtcggtgaacgatctgatctacccgatgtttattttgatgggtaaagatcgccgtgaaaaagtcgattccatgccgggcgtagaacgtttatccatcgatttaatgctggaagaagcacagtatctcgctaacctcggtgtgcctgcgattgctctgtttcctgtggtcaatcaggatgcaaaaagcctatgtgctgccgaagcttacaaccctgaaggcttagttcaacgcgcagtgcgtgcgctgaaagagcatgtgccgcaaatgggcgtgatcactgatgtggcattggatccattcacaactcatggacaagacggcatcatcgatgagcaaggttatgtgttgaatgatgaaacaacggaagtgctagtgaagcaagcactgtcgcatgctcaagctggtgcggatgtggttgccccttccgatatgatggatggccgtattgggcgcattcgtcaagcattggaagaggcggggtacattcatactcaaatcatggcttattccgctaaatatgcctcgaattactatgggccattccgtgatgcggtcgggtcatctgcgaatttaaaaggtggcaacaagaaaaactaccaaatggaccccgccaattccgatgaagctttgcatgaagtcgcgatggacatcaatgaaggtgcggacatggtgatggtgaagcccggcatgccctatctagatgtggtgcgccgtgtcaaaaccgagttgcaggtaccgaccttcgcttaccaagtttccggtgagtatgcgatgcacaaagcggcaatcatgaatggttggttgaaagagcgggaaacggtattcgaatctttactctgcttcaaacgtgcaggtgcagatggcattttgacttactttgcgaaagaggtggctgagtggttggcggaagacagcgcaaaagccgcgcagttcttacctaaaaagtaa

SEQ ID NO: 40773 - DNA, 2805 bp, Vibrio cholerae
atggctcatatacctgacaatccattgattttgatcgacggctcctcttacctttatcgcgcatttcatgcttacccgggcaccatgagtaatggtgaaatcccaaccaacgccatctatggtgtggtaaacatgattcgcagcatgatgcgccagttcgcttcggatcgcatggcggtgatttttgatgccaagggaaaaaccttccgtgatgagatgtacgatcaatacaaggctcatcgtcctcctatgccagatgagttgcgctgtcaggttgaacctttacaccaagttattcgcgctatgggtttaccgctgttggcgattgaaggtgtagaagctgacgatgtgattggtacgttggcgcgccaagcctcacaagctggtatgcctgttttgatcagtaccggcgataaagatatggcgcagttggtggatgataatattaccctgatcaataccatgaccaacgtcgtgctggatcgcgaaggtgtgattgaaaaattcggtatcccgccagagcttattatcgactacctcgccttgatgggtgataaagtggataacattccgggcgtacctggggtgggtgaaaaaaccgcgaccgcacttttgcaagggattggcggcttagaagcgctgtacgccaacctcgataaaatcgctgctttaggcttccgtggctcaaaaaccatggcacaaaagctggaagagaaccgcggtaatgccaagctttcttatcaactcgccaccatcaaatgtgatgtcgagcttgaggaatctccgcaaaccctgctaaagcaaacgccagatcgagatgcgttgatgtcgctctacggtaagctcgcctttaaatcttggctgaccgaattgcttgatggtggtacaggtattgtgacggcggacgagcaaacgaaaacctcttcagttactgtttcaaccgcagcaactcatgcggctgcgattcctgaaagccctgcggcccacatcgatcgcagccagtatcaaaccatcctaaacgaacaagacttccagctttggttagagaagttaaaacaagccgagctgtttgcctttgatacggaaaccgacaaccttgattacatggtcgccaatttggtggggatgtcgtttgcagttgccgaaggtgaagcggcttatctgccagttgcgcacgattatctggatgcgccgcagcagttggagcgcgactgggtgattgcccagctaaaacctctgcttgaagatgaaagcaaagccaaagtgggccaaaacctcaaatacgatgcgagcgtgatggcgcgctacggcgttgagctgcgtggtattcgccatgacactatgctgcaatcctacgtctataacagcgtgggcggcaaacatgatatggatagtttagcgctgcgttttttacagcacagctgtatctcgtttgaacaagtggcaggtaagggtaagaaccagctcacctttaaccaaatcgctttagaagaagcggcacaatacgcggcagaagatgcggatgtgacgttgcgtctgcatcagcgaattcatccgttgattgagcaagacgctaagcttgagcaagtgtatcgcgaaatcgaaatgccgctggtacctgtgctatcacgtattgaacgtacgggcgtgatgatcgacgacatgctgctcagtgcccaatcgcaagaaattgcgttacgtttagatcaattagaacaaaatgcttatgagttggcaggtcagccgttcaacttaagctcgccgaagcagctacaaaccattttgtttgagcagatgaagctgcctgtcttgcaaaaaacgccatccggtaccccttcaaccaatgaagaagtgttgcaagagctggctttggattacccactgcccaaggttctgattgagtaccgcggtctggccaaactcaaatcgacctataccgataagttgccgaagatgattaacccaagtacagggcgcgtgcatacttcctatcatcaagcagtgacggccactgggcgtctctcctccactgatcctaacttgcagaacattccagtgcgtaatgaagaaggacgccgtattcgccaagcgtttgttgctccgcatggttggaaaatcatggcggtcgactactcgcaaatcgagctgcgcatcatggcgcacctgtcgggcgatcaggcgttattggatgctttccgtgatgggaaagatatccatgcggcgacagcagcagaaatcattggtgtgccgattgatcaagtgagcagtgagcagcgtcgccgagcgaaagcggtgaactttggtttgatctacggcatgagtgcgtttggtctggcaaaacagctcggtattccacgcggtgaagcacaagagtatatggataaatactttgagcgttatcccggcgtgatgcagtacatggaagatacgcgtagccgtgctgcacaattgggttatgtcgaaaccatcttcggtcgtcgcttacatttgccggaaatcacctcacgtaacgctatgcgtcgcaaagcggctgagcgggcagcgatcaacgcaccgatgcaaggcaccgcggcagacatcatcaaaaaagccatgttgttggtggatgagtggattgagcgggaaggtgatggccgagtcaaattgctgatgcaagtacacgatgaattggtctttgaagttaaagagtcatctttatccgaaattgaaagtaaagtacaacagctgatggagtcagcggccgagcttgcagtacctttagtggccgaagccggccacggcgacaactgggagcaggcgcactag

SEQ ID NO: 40774 - DNA, 672 bp, Vibrio cholerae
atgagaggtaccccagagtggtactggaagcttgataattataaatggaatgtcatgaagaaattagcgctaatcttgagtgttttagccagctgctctgtatgggcccaaggtagtatcgaagctggtaaagccaaatctctaacctgtgctgcctgccacggtgcagacggcaacagcccgttaaccatttaccctaaactggcagggcaacatgagaagtatcttgagaaacaactcaaggaactgaaattgggtgcttccagcggcggaaaacagggccgttatgatcctgtgatgagtgcaatggcgatgccactgagcgatgaagatatcgctgacttggcagcatactatgcctctatgcctatctctggcaataccacaccggaagatgtcgtggcccaaggtaaagtactttataccgctggggatgcatcacgtgggctgaccgcttgtattgcgtgtcatggtccgcgcggtaatggtacggagttatcaggctttccaaaaatttcaggccagcatgctgactacattaaagcgcagctagaaaagttccgttccggcactcgtgcgaacgatatgaacgaaatgatgcgtgatgtggcacataagctgaccgatgcggatatcgatatcctatccaaatacgtaggtggcctacactag

SEQ ID NO: 40775 - DNA, 954 bp, Vibrio cholerae
atggataggaacatcataatgaccgagacgccgattcgcattgcaacccgccagagtccactggctttgtggcaagccaactatgttaaagacgccttaatggcagcccaccccggactgcaggtggagttggtgactatggtcacgcgcggcgatgtgattctggatactccactggctaaagtgggcggtaaaggcttattcgtgaaagagctggaaattgccatgctcgaagggcgcgccgatttagccgtgcattcaatgaaagatgttccggtcgatttccctgacggtctgggcttagtcaccatctgcgaacgggaagatccgcgtgatgcgtttgtctcaaatacctacgccaagattgaagatctgccctcgggcgctatcgtcggtacctgcagtttacgccgtcaatgccaactcaaagcggcacggccagatttagtgattaaagagctgcgcggcaacgtggggactcgcctaagtaagcttgatgcgggcgaatacgatgccatcattttagcggcagcaggcctaaaacgccttgagctcgaaagccgtattcgtagctttattgaaccggaacagtccctacctgcagttggccaaggtgccgttggtattgaatgtcgcgtgaatgatcaacgcgtgcgcgccctactcgcacctcttaaccatgctgataccgccgatcgagtgcgctgcgaacgcgcgatgaatctcacgttacaaggtggctgtcaggtgccgattggtagctatgcactgctggagggtgacactatttggctacgcgctcttgtgggtgaacccgatggttcgcaaatcgtgcgcggcgaaattcgcggacctcgcacacaagctgagcaacttggcatcacgctggctgagcaactgcttagccaaggagccaaagagatcttggagcgtctctactgtgaccacgaataa

SEQ ID NO: 40776 - DNA, 936 bp, Vibrio cholerae
atgaagaacgacgaacgcaccccgcttcctgatgcgttggctcaaccgctggagcgtttttacgcctacctgcatacggaaaaagggttgagcctgtatacccagcgcaattataagcagcagttggaaaccatgacccagtacttagtacaggttgggctcacccactggacacagcttgattcggcgtgggtgcgtcaattggtgatgcaggggaaaaggcaggggatgaaagccagcagtatcgcgacgcgtttgtcttcattgcgcagtttcctggattttctgattttacgtggcgagcttcaggctaaccctgcgaaaggcgtctctgcgccgcgcaagcagcgtactttaccgaaaaatctcgatgttgatgaaatggcgcagttactggaagtgaccgatgatgatccgctttcgattcgcgatcgggcgatcatggagctgatgtacggcgcgggtttacgtttggctgagctagtttcgattgatatcaaagacgttaatctaagcgaaggtgagatccgcgtcatcggtaaaggcaacaaagagcgcaaagtgtggtttgctggacaggcacaagagtgggtcggtaaatggctcaaattgcgcagtcaattggcggatagcgcagaaacggcgctgtttgtgtccaaactcggtacccgtatttcacaccgtagtgtgcaaaaacgcatggccgaatggggccaaaaacaggcggttgccagtcatatcagcccacataaattgcgccactcgtttgccacccatatgctggaatcgagcaataacctgcgtgcggtgcaggagctacttgggcacgagaacatcgcgacaacgcaaatctatacccacctcgattttcaacatctggctcaggtgtatgaccaagcgcatcctcgggcgcgcaaaaagaataaggatgactaa

SEQ ID NO: 40777 - DNA, 720 bp, Vibrio cholerae
atgctgttttaccgcccattggcttcgattcaagcactgacgtttgatttggacgataccctttacgataaccgtccggtcatcaaacaggtcgaggaaaaagtcactgagtggttgttaagtgagcatcccattacggcgacgcgtcctttggcttggtggctggcgatgaagcgtgatatagcgcgccgctttccggagcagtgccatgatgtgagccaatggcgttatttacaggtgcagcatggtttactggaattaggctatgcgcagccagaggcggagcaagcggcgagcgagacgcttgagcaagtgatgcgctggcgtaatcaagtcgatgttcctgccgaaacgcatcgggtgttggctcagttagcggctaaagtgccgctgattgcgatcaccaatggcaatgtccagatagaaaaaattggtttaagtggctatttccaaacggtattgcgcgcagggccagacggccgtgccaaaccgtatcccgatctctttgcacaagcagcacaacagcttcagcttgagccccgttcaatcttgcatgtcggggatcatttacaaaccgatgtgctaggggcgcggcaaaatggttttcaagcctgctggtttaacgatcaagggcagagtattcgtcggctcgccaaagcgagcgtattacccgacgtggagatcgagcgtctctcggaattacttctgatagttaactag

SEQ ID NO: 40778 - DNA, 828 bp, Vibrio cholerae
atgaccacttcagcacacaaacatccgtataaaatcgtggcgtcggatctcgacggcaccttactcgccccgaaccatcagttgagcgaattttcgaaacagactttgaaacagctgcacgataaaggatttacctttattttcgcgacaggccgtcaccacattgatgtcgcggggattcgtgaaatcgcggggattcctgcgtatatgatcacctcaaacggtgcgcgagtgcatgaccagaatgaccaactgatgtacagcaaaaacgtaccgcaagatttggtgcaagccatcatcgatgtcgttaaacacgataagcagttgttcgtgcatctgtaccgtaatgacgaatggatgctcaataaagaagatgagatcctgcgcgacttccatgaagactctggttttacctatcgcgtctttgatgtcaataacgccccaaccgatggcatcgcgaaaattttcttcactcaagaagaccaagatcatgaacatttggtgcagtacgaaaccttactgaatcagcgctttggcgataaactcaacgttgctttttcaacaccttggtgcctagaagtcatgtgtgcgggcgtatcaaaaggcgatgcgctgcaagctgtggccgaatctcttcaccttggccttgaaaactgtatcgcgtttggggacggcatgaatgatgtcgaaatgctctcaatggccggaaaaggcttagttatgggcaccgcccatgaaaaagtgtttaacgccctgccggataatgaagtgatcggcagtaacgccgatgatgcggtggcgcattacctgcatcagcatctgttttaa

SEQ ID NO: 40779 - DNA, 1017 bp, Vibrio cholerae
atgaaccctgaaaaaaatctttatccttatacgcaagagtcgagtttggagcaagctctcaactttgagatagctcaagtgtggcacactcgaagcgaaggaacctatcgcagttttgataaaacgcacatttattggtgtagtctcaagcatcctgagcatcaaaaagccgtagtgattgtgaatggcaggattgaatctgcgtggaaatatcaagagctgtgttatgacctattccgccaaggttttgatgtttatacctatgatcaccgtggtcaaggacggtcagaacgtctgactgaagatagacaaataggccatgtacatgagtttcaagattacgtgactgacttaaaagccttagtcgagcatttcgatctcggtcactaccaagagcgctttttattagcccattctatgggtggcgcgattgctacgcgctatatccagaccactccagcgcacccctttagcgcactggccctgagtgctccgatgtttggcgtgaatatgccttggtatttaaggccatgggctttgctcatcactcaaattatggctgccgttaccctaaaacccagttacgctccgggttatggcccttatcacgctaaaccctttcatctcaacctgctcacccacagtgaaacccgctatcagttgtttcgtgaactgtatgaagcgcaccctgaactgcaaattggagggccgagtcaccgctgggtttggcagagcttaatggcgaccaaacagtgtttgcagttaacccgacaaatcaaaatccccatgctgatcttacaagctggcgaagaagcgattgtgtgtaatcgggcgcaaatccggctcttcaaaaagctgtctcgcacccaaaaacgtgccgctttatgccgcatagcaggagccagacatgaactgctttttgaacaagatgcctaccgaaatcagacgttagaccatattttgcgttttttcgccgacagtactatcgaccataaaagacagcaccatcgaccatag

SEQ ID NO: 40780 - DNA, 618 bp, Vibrio cholerae
atggatatccatgtttggcttgcctatctactgaccgcggtggtgtttagtctggcgcccggttcaggcacggttaactcgatcagcaatggtttaagttatggtacacgccactcattaggggcgattatcggcctacaaatcggtcttgcttgtcatatagtgttggtcggcattggaattggcgctttggtggcacaatctgcgttggcgttcactctgatcaaatggattggcgcggcttatttagtatggctgggtattcagaaatggcgagatagagcccccctaacggctaccacaacttctcatgaactctcacaagccgccctgctgcgtaaagcagtactgattaacctgaccaatcccaaatcaatcgttttcttagtggcattatttccgcagtttattgatcccactagagatcattggccgcagttcttggttctgggtatcacaaccgttactattgatgcgattgtcatgttcggatacacggcactggctgcgcagctaggtcgctatattcgttcacctaacataatgaccagaatgaataaactgtttggttcgatgtttatgggctgcggaatgctgttggctaccgccaaagcgtaa

SEQ ID NO: 40781 - DNA, 471 bp, Vibrio cholerae
atggcaacgaatttgattggtcttgataccacacaaagtcaaaaactggcgaatgcgctcaacaacttgctggccaactatcaagtgttctatatgaatactcgcggttaccactggaatattcaaggtaaggagtttttcgaactgcacgctaagtttgaagagatttataccgacttacagctaaaaatcgatgaactggcagagcgtattttaacgctgagcgctcgacccatgcacagctttagcggttacctcaaagcggcgcaaatcaaagagcataccgactcaattgatggccgtagcagcatgcagggattggtggatggttttagcattctgctccaccaacaacgagacattcttgagcttgccggcgaaaccggggatgaagggacgtcagcgctgatgagtgattacatccgcgagcaagagaaattggtgtggatgcttaacgcttggctgaaataa

SEQ ID NO: 40782 - DNA, 1176 bp, Vibrio cholerae
atgacggaaaaaaagaagcgtggcttgttgtcatggcttggatttggtgacgaagagaaaagccaaaccactgcaacggatactcaaacgcaggatgaaccacaaagccaagccgatgttgaagcggtggcgattcaaacggaaactgcgttaacagaaacagaaacagaaacagaaacagaaacagaaacagaaacagaaacagaaacagccacggttgaacctgcacgtattgttgaacaagagaaaccgaccgaaagtttctttgcgcgcttaaagcgcagtttgagccgcaccaaagcgaatattggcgctggcttctttggcctgtttaaaggcaaaaagattgatgatgacctgttcgaagagctcgaagaacaactgctgattgccgatgtcggcatggatacgaccagcaaaatcatcgctaatttgaccgccagagcttctcgccagcaactgcgtgatggggaagcgctgtacggtctgctgaaagaagagatggccgagattctctctcaggtcgagcagccattggtgatcgacactgagaaaaaaccttacgtgatcttgatggtgggcgtgaatggggtgggtaaaactaccacgatcggtaaactggctaaacagttccaagcgcaaggcaagaaagtgatgttggcagcgggcgataccttccgtgctgcagcggttgagcagttgcaagtgtggggagagcgcaatcaagtgcctgtcatcgctcagcatactggcgccgacagtgcctccgtcatttatgatgcgattgaagcggcgaaagcgcgcgggattgacgtggtgattgcggataccgcaggccgtctgcaaaacaaaagtaacctgatggaagagctgcgcaagattgtgcgcgtgatgaagaagattgatgacagtgcgccacatgaaatcatgttgacgctggatgcgggtaccggacaaaacgcgatcagtcaggccaaattgtttagtgatgtagcgcccatcacgggcattaccttaactaagcttgatggcaccgctaaaggtggcgtgattttcgcgattgccgatcaattccagatcccaatccgttatatcggtgtcggcgagaaaattgacgacttacgtccatttgcaacacaagagtttatcgacgcgctatttagccgcgaagaataa

SEQ ID NO: 40783 - DNA, 1401 bp, Vibrio cholerae
atgggacagaaaaaccactttgacgtcattgtgatcggtagcggtccgggcggagaaggggcagccatggggctgaccaaagggggaaaaaatgtcgctatcatagaaaaagagagcagtgtaggcggaggttgtactcattggggcaccatcccatcgaaagccctacgtcacgcggtaagccgcattattgagttcaatagcaacccgctgttttgcaaaaacaactccagcattcacgctacgttttcgaccattttaagtcacgccaaaagcgtgattgataaacaaacacgcctgcgccaaggcttttacgatcgcaatcaatgcacgctgatttttggcgctgcgcactttattgatgctcacaccgtagcagtcaaaaaagccgatggcagcatcgacacctacagtgccgataaatttgttatcgccaccggttcacgcccttatcatccgaaagatgtcgattttggtcacccgcgtatttatgacagcgactcgattctgaacctcgaacatgatcctcgccatatcattatttacggtgctggggtgattggttgtgaatacgcctctatcttccgcggcttggatgtcaaaacggatctgatcaacacccgtgatcgcttactgtcgtttctggataatgaagtctctgatgcgctctcttaccacttttggaacagtggtgtggtgatccgcaatgatgaaacttacgacaaggtggaaggcaccagcgatggggtgatcgtccatctgaaatcgggcaaaaaaatgcgcgccgattgcttgttgtacgccaacgggcgcactggtaatactgataagctcaatttagagtcggttggcttacaagccgattcgcgaggccagttagtcgtcaacgccaattaccagactcaagtggaacacatttatgcggtgggtgatgtcattggttacccaagccttgccagcgccgcttatgaccaaggtcggtttgtcgcgcaagccatcattcatggccaagcggcacatttgttgactgaagatatcccaaccggtatctataccatccctgagatcagctccgtgggtcgtaccgagcaagagctgacggcggctaaagtgccttatgaagtgggacgcgcttctttcaaacatttggcgcgcgcgcaaattgcgggcaaagatatcggcagcttaaaaatcctgttccatcgcgaaaccaaagagattttaggtattcactgctttggtgagcgtgccgcagaaatcattcatatcggccaagcgatcatggaacaaaaaggggaagccaataccattgagtatttcgtgaacaccacctttaactacccgacgatggccgaagccttccgtgttgcagccttaaatggtcttaatcgactgttttaa

SEQ ID NO: 40784 - DNA, 798 bp, Vibrio cholerae
gtgtcatctccatcttttcctcgtgttctgattttcgattctggtgtgggtggtctttccgtatatcgagaaattgaagcccgcttgccgcaattaaactatatctatctgtttgataacgcggcatatccttatggtgagctgacccaggaaacactgatcgcacgagttgatacgctggttactcgaatggttgaacaagagcgaatcgatcttgtggtcatcgcttgtaataccgcgagcaccatagtgttacccgtattgcgcgccaaactcacgatacctgtggtcggggttgtgcctgcaattaaacccgcctccctgattgctagcaaggcgattgggcttatcgcgacgccagccacagtgaaacggcaatacactcaagaactgatccgtgacttttccgccaacaaaaacgttgagctattggggtctacacgcttggttaatatggctgaagagaaattgcgtggtaagcctctcgatctcgaagaattagccagcatattgcaacccctgaagaacacgattgatgtcgccgttttaggctgtactcactttcccctgattaaagaagagatccagcaagtacttggagagcaagtgcaactgattgattctggtttggccattgcgcgcagagtgcaggagttgctgggaatagagcaagcggttggtgcaaagcaaaagcatcgaatttatgcaagcgcaccaccatgggaggaaagtgcgctgaacataaagcttgaacagttaggttttaatcctgttcagccatttcttcatccgatttag

SEQ ID NO: 40785 - DNA, 1485 bp, Vibrio cholerae
atggcgaattatttcaatacgctgaatctgcgtgaacagttggatcaacttggtcgttgccgttttatggcgcgagaagagtttgcaaccgaagctgattacctaaaaggtaagaaagtggtgatcgtaggttgtggggctcaaggcctaaaccaaggcctcaatatgcgtgattcaggtttggatgtttcttacgctctgcgtcaggctgcgattgatgaacagcgtcagtcatttaagaatgccaagaataatggcttcaacgtgggtagttatgaacaactcatcccaaccgcagatttggtgattaacttgacgccagataagcagcacaccagtgtggtcaatgcggtgatgcctctgatgaagcaaggtgctgccttgggttactcacacggttttaatatcgttgaagagggcatgcagatccgtaaagacatcacggttgtgatggtggcaccaaaatgtccgggtacggaagttcgtgaagagtataagcgcggtttcggcgttcctactcttatcgcggtacaccctgaaaacgatccacaaggtgaaggttgggaaattgctaaagcgtgggctgcggcaacgggtggccatcgtgcgggctgtttagcttcttcttttgtggcggaagtgaaatccgatttgatgggtgagcaaaccattctctgcggtatgctgcaagcgggctctatcgtttgttacgagaaaatggttgctgatggcatcgaccctggttatgcgggcaagcttttgcaatttggttgggaaaccattaccgaagcactcaagtttggcggtattactcatatgatggatcgcctgtctaaccctgcaaaaatcaaagcgtttgagctgtctgaagagttgaaagatctgatgcgcccactgtacaacaagcatatggatgacatcatttctggccacttctctagcaccatgatggcggattgggcgaatgatgataaagacttattcggctggcgtgcagaaaccgctgagacggcctttgaaaactatccaacaaccgacgtaaaaattgctgagcaagaatactttgataacggtattttgatgattgccatggtgcgtgctggggttgagttggcgtttgaagcgatgacggcttcaggcatcatcgatgagtcggcttactatgaatcactgcacgaactcccactgattgccaatacggtagcgcgtaagcgtctgtatgaaatgaacgtggtaatctctgacactgctgagtacggtaactatctgtttgccaatgtggcggtaccactattgcgtgaaaagtttatgccgaaagtgggcactgatgtgattggtaaaggattaggcgtggtctctaatcaagttgataacgcaacgcttatcgaagtaaacagcatcatccgtaaccatccggttgagtatatcggtgaagagctgcgcggttacatgaaagacatgaagcgcatcgccgtgggtgattaa

SEQ ID NO: 40786 - DNA, 3111 bp, Vibrio cholerae
atgcgctttactgatgtttttataaaacgtccagttttagcggtatcgatcagctttttgattgtgttgcttggtctacaagccattttcaaaatgcaggtgcgtgaataccctgaaatgaccaataccgtaattacggtgagcaccggctattacggtgccagtgccgatttgattcaaggttttattactcaacccttggaacaagcggtagcacaggcggataacattgattttatgacgtcacagtccgtgttgggtcgctcgaccatcacagtgaccatgaaattgaatacggatcccaacgccgcgttatctgacgttctggccaagaccaactcagttcgctcgcagctgcctaaagaagcagaagatccgaccgtcaccatgtcgaccggttcaaccactgcggttctgtatattggtttcaccagtaatgaattggcatccagccaaatcactgattacctagagcgcgtggttaatccacagctttacgcagtcaatggtgtgtcaagtatcgatctgtatggcggtatgaaatacgcgctccgggtatggctcgatccagccaaaatggcggcactaaacctctccgcagcggatgtgatgagcattctgaatgccaacaactatcagtcagcgaccggtcaggcgattggtgaattcgttctttataacggcagcgccgatacccaagtctccaccgtggaagatttggaaagtctggtggtgaaagctgagaaaggtaccgtgactcgcctaggtgatatcgcgaaagttaccttggctaagagccatgatacctatcgcgcgagtgctaatggccgtgaagcggtcgttgccgcgattaacgcggccccaagtgcgaacccgatcaacatcgccaaagatgtgcttgagatgctgcctgagctgcagaaaaacatgccaagcaacattgaaatgaacgtgttgtacgactcaacggttgcgatcaatgaatcgatccacgaggttatcaaaaccatcgtagaagcggcgctgatcgttcttgtggtcatcactctgttcttgggttcactgcgtgccgtactcatcccaattgtcactatcccgctttcactgattggtgttgcgatggtgatgcagatgatgggcttctcttggaacctaatgacgctgctggcgatggttctggcgatcggccttgtggttgacgatgcaatcgtcgttctagagaacgttgaccgccatatcaaagaaggggaatctcctttccgcgcggcgatcatcggtacacgtgaaattgccatcccagttattgcgatgacgctgacgttgggtgcggtctatgcgccgattgctttgatgggcggtatcaccggctcactgtttaaagagtttgcgctcacactggctggttctgtttttgtatccggtattgttgcattgactctgtcgccgatgatgtgttcaaagatgctcaaagccaatgaagcgccgaacaaatttgaactgaaagtgcaccatttactggatcgcatgacggcacgctatgaacgcatgctgaccgcggtaatggctcatcgccctgtggttattgcctttgcgtttatcgtttttgcaagtttaccaatgctgtttaagttcattccaagtgagcttgcgccatcggaagataaaggggtaatcatgctgatgggtacaggcccgtcgaatgccaacctcgattatctggcgaatacgatggatgatgtgaataaaattctgtctgatcagccagaagttcagttcgctcaggtgtttactggtgttcctaactcaaaccaggcgtttggtattgcgtcaatggtgccatggagccagcgtgaagctagccaagccacagtaaccaaccgcgtgggtaccttggtacaagatatcccaggtatggcggtaacggcattccagatgccagaactgcctggtgcaggctctggcttaccgatccaatttgtgatcaccacgccaagcaactttgaaagcttgtttaccatcgccaccgatgtgctgaccgaagtcaaagccaatccgatgttcgtctactcggatctggatctgaacttcgattcggcaacgatgaagatcaatatcgataaagataaagccggtgcctacggcgtgaccatgcaagatattggcatcacgctcagcaccatgatggccgacggttatgtcaaccgtatcgacctcaacggccgctcttacgaagtgatcccgcaagtggaacgtaaatggcgtctcaaccctgaatcgatgaacagctactacgttcgcgcagcagatggcaaagtgatcccactcggtagcttagttacgattgatgtggttgcagagcctcgctcgctaccccacttcaaccagctcaactctgccaccgttggtgcggtgccagctccgggcacggctatgggggatgccatcaactggtttgagaatttggcaagcagcaaactgcctaaaggctatagccatgactacatgggtgaagctcgtcagtatgtgaccgaaggtagcgcgctgtatgccacatttggcctagcgctggcgatcatcttcttggtgttggcgattcagtttgaatctctcagagatcctttggttatcatggtctctgtaccactcgccatttgtggtgccttgatcgcactggcttggggtacggcaaccatgaatatctactcgcaggttggcttgatcacactagtcggtcttatcactaaacacggtattttgatctgtgaagtagccaaagaggagcagttacacaacaaactcagccggattgaggctgtcatgcatgccgctaaagtgcgtctgcgcccaatcctaatgaccactgcagcaatgatcgcaggcctgatcccactgatgtacgccaccggtgcaggggctgcacagcgcttcagtatcggtattgttatcgtctctggtctggcaattggtaccttgtttactctgtttgtactgccggtgatttacagctaccttgcagagaaacacaaaccactaccggtgtttgttgaggataaagatctggagaaattggcccgcattgatgaagccaaagcggctcatcgtcagctgtaa

SEQ ID NO: 40787 - DNA, 2016 bp, Vibrio cholerae
atgaagctgaacccaagacaagatgaagcggtcaagtacgtctccggaccctgtctggtattggcgggggcgggttcgggtaaaacacgcgtcatcaccaataaaattgcctatttggttcagcaatgtggctataaagcacgcaatattgctgcggttacgtttaccaataaagcggcgcgtgagatgaaagagcgcgtagctcaaacactcggtaaaggtgagtcgcgcggcttaatggtgtcgaccttccatactcttggcttaaacatcattcgccgtgagtttaaagctttgggcctcaaagcgggtttttcactgtttgacgaccaagatcagctcgcgttacttaaagagctgaccgaaaagcagctcgacggcgataaagatctgctgcgcttgctactgagcaccatttccaactggaaaaatgacatgctgactccgccgcaagccaaggcaatggcgaaaggggaacagcagctgctttttgcacactgctttgagctttaccaaaaacagatgcagtcttacaacgcactcgatttcgatgatttgatattgctgccggtgttactgctacgcagcaatgaagaagtacgccaacgctggcaaaatcggattcgctatctgttggtggacgaatatcaagataccaacaccagccaatatgagttggtcaaactcttagtgggtgagcgtggccgtttaactgtggtgggagatgatgaccaatccatttattcatggcgtggtgcaaaaccacaaaacttggtgttacttggggaagattttccgagtttaaagctgattaagctcgaacaaaattatcgctcgaccagccgcattttgcgtgcggcgaacattttaattgccaataacccccacgtttaccaaaaggcgctcttttctgagttagcggaaggggaaaagctcaaggtcatactggccaataatgaagatcatgaagcagagcgagtgatcgcagaaatcatcgcccataagtttctcaatcgaaccgaataccgagattacgcgattctttatcgcggaaaccatcaatcgcgactgattgaaaaatcgctgactcaaaaccgtgtgccgtacaaactttccggcggcacttcgttttttgcgcgcgcagagatcaaagacatcatggcttacctgcgagtgctggtgaaccctgatgatgacaacgcatttttacgcattgtgaatacaccgaagcgtgaaatcggcccagctacgctcgaaaagttaggcagttacgccaatatgcggggcaaaagcctatttaccgccagttttgagctcggtttagagcagcatttgagcgggcgagggcttgagaacttacgccgcttcactgagtggttggtggcgattgccgataatgctgagcggggtaacacggtggaagcggtgcgcgcattagtgcgtgatattcgttacgaagattggttgtatgagacttccgccagtccgaaagcggccgaaatgcgcatgaaaaacgtctccgatctctattcatggatcgtggccgatttggaaggcgataatcccgatcagcaagagaaaactctgaaagaggtggtgcagcgtttaactctgcgcgacatgatggagcgtggcgaagagaacgatgacagtgatgcggtacagctgatgacactgcacgcctcaaagggcttagaatttccgtacgtgtatttgattggagctgaagagggcattttgccgcatcaaaccagtattgatgaagagaatgtcgaagaagagcgccgcttaatgtacgttgggatcacccgagcacaacgcgagctaacgtttatcgtgtgtaaagagcgccgtcagtttggtgaactgatcaaaccttcgcaaagccgctttttggatgagttgccccaggacgatatcgagtgggaagtaaagaaaaagcccgtcacccaggaagagcgtatggccaaaggccaagcgcatatcgctaatttaagagcgatgtttaagaagtaa

SEQ ID NO: 40788 - DNA, 1716 bp, Vibrio cholerae
atgtcacttttagaagtcaaaaatcttagaattgaatacccttctcgtcacggtgtgcacgcggcggtgaaatcactcaccttagatatccaacgtggtgaaattgtcggtgtggttggggaatcgggcgccggaaaatcgacggtcggtaatgcggtgattgacctgctcagccctccgggaactattgcgggcggtgaagtgtatttaaacggtgagaagatctctggtctttctccgcaagcgatgcgtgaagtacgtggtagtaaaattggctttattttccaagatcccatgacctcactcaacccgctgtttaccgtcgagcatcagttgaccgaaaccattcatgccaacatgcaggtgagtgccgaagaagcgtatcaacgtgctttatctttgatgaagcaagtcggtattccgcagcctgaaaatcgccttaaacagtatcctcaccaattctctggtggcatgcgtcaacgggtggtgattgcgatcgcgttggctggtgaacctgatttgatcatcgccgatgaacctaccaccgcgctggatgtgtcgattcaagaccagatcctgaatctgattcgcgaactgtgtaagaagaataatgtgggttgcatgctggttactcacgatatgggtgtggtttctaacgttactgatcgcgtagcggtgatgtaccgtggtgatttggtggagttcggtccgactgccaaagtgcttggcacacctgagcacccttacacccgtagtttgatttcggcggtaccgcgctctgatcgcaaactcgaccgtttccctctggtgagctatatcgaagaagcgaaagagctcaagccgttggatgtgaaaagccattggttggggcagagccaagatcaccgcaaatacacagggccgctgttaaaagtcgaaaacgtcaatctacgttttgtgaccaaagattcgctgtttgaaagccgccgtgagtatgtgcaagcgtcgaataacgtcagttttgcagtacatgaaggggaaacctttggtctggtcggcgaatcgggttcaggtaaatcgaccattgcgcgcgtgattgccggtttgtatcaacccaatgcggggcgagtgacttttgaaggcatcgatttaaccgcgctgaaatcggagcacgaacgtcgcccactgcgtcgtcaaatgcagatggtattccaaaacccgtacacctcgatgaacccgcggatgaagatttttgacattatcgccgagccgatccgcttccataagttgacacgaagcgagagtgaaacccgacaaatcgttaatgatctgctcgagcatgtcggcttaggtaagatggcggggttgaaatatccccatgaattttcaggtggtcagcgtcaacggatctcgattgcgcgcgcactcgcgacgcgaccacgtcttttgatttgcgatgaacctacctcggcactggatgtgtcagtgcaggcgcaaatcctcaatttgctgaaagatctgcaagatgagctcaatcttaccatgctgtttatcagccatgatttgcctgtgatccgccagatgtgcgatcgcgttggggtcatgcagatggggacgctactggaagtggcacccactgagcagctgtttaccgatccgcagcatgaatacagcaagaaattgatttccttaatgcctgaatttacaggcttacgcgaaagcactacggcagcatag

SEQ ID NO: 40789 - DNA, 1629 bp, Vibrio cholerae
ttgggttggcgattgttacaaaagcaaatacaacaaactagggatctggattcccgcataaggagttatgcaatgaaaaccatgaaaaacaaactggcgttggctttgatagcggctggcttgagttttggtgcgatggcagcggatattaccgtggcttacgacgctgacccggtctcaatggacccacatgagcagctgtcaggcggtactctgcaactgtcgcacatggtctttgatccacttattcgctttacacaaaaaatggaatttgaacctcgtctggccgaatcttggcagcgtgtggataacgaaaccatgcgtttcactttgcgcaaaggcgtgaagttccactctggcaatgattttactgcggatgacgtggtatggacgttcaatcgtttgaaagaatcggcggattttaaagggatttttgaacctctggtctctttgactaaggtggatgattacaccatcgaaatcaaaacggctggcacttacccgctgattgaaaacgtggcgacctacattttcccgatggacagcaagttctacaccggcaccacggcggatggtaaaaacaaagcagaaatcgttaagcacggtaactcttttgcctctgaaaatatctctggtaccgggccatttacggtgacggctcgtgagcaaggcgtgaaacttgagttccaacgcaaccccaattactgggataaagcgtcgaaaggcaatgtggacaaactgacgctggcagtgattaaagaagatgcaactcgcgttgcggcactgctgtctggcggtgtggatatgattgcaccggtttctccgaatgattaccaacgcatcaaagatgcgaaaggtgtagatctcttcactatgccgggcactcgtgtgattaccttccaaatgaaccaaaacagtaacccagcgttgaaagatgtgcgtgtgcgtcaagcgattgtctacgccatcaacaatgaagggattgtcgataaggtcatgaaaggggcagctaccacggctgcgcagcaaagcccagtcggttatgccggttacaatgagaacctaaagccacgttttgatctcaacaaagcgaaagagctgatgaaagaagcaggttatgagaaaggcttcaacctgaccatgatcgcgccaaacaaccgttacgtgaacgatgagaagatcgcgcaagcggcatcggcgatgttgtcaaaaatcgggattaaagttgacctaaaaaccatgccaaaagcgcaatactggcctgagtttgataagtgtgcggcagatatgctgatgattggttggcacccagatacagaagactcagcaaactttactgagttcctgaccatgacccgtgattccaatacgggtaaaggtcagtacaactgtggttactactcgaatgcggaagtcgataagttagtcaatgccgcgaacgaggaaaccgatctagaaaaacgcagcaccatgctgaagaaagtggaagagatcctgtataacgaagcggcgtttgtgcctcttcacttccaagatccgtcatgggcagcgaaaaatacgctagatatcgcacctatcatcaacggtatggacttcccatactttggcgatctggtggtgaaagagtaa

SEQ ID NO: 40790 - DNA, 1365 bp, Vibrio cholerae
ttggagaaagtaatggcaacacattttgactacctgtgcattggtggtggcagcggtggtatcgcttccgctaaccgcgcggcgatgtatggcgcgaaagtcgctctcatcgaagccaaagatctcggcggcacttgtgtcaacgttggctgcgtaccgaaaaaggtgatgtggcacggcgcgcaaatcgcagaagcgatgcacctttatgcagaagattacggctttgatgtcgatgtgaaaaacttcaactgggcaaaactggtggaaagccgtcaagcctacattggccgcatccatcaatcttacgatcgtgttctgggcaacaacaaagttcacgtgattaagggcttcgctaagtttgtggatgcgaaaaccgtcgaagtgaacggcgaactttacacggctgaccatattctgattgccgtaggtggtcgcccaagcattccaaatattccaggcgcagaatacggcatcgactcgaacggcttttttgagctgagcgagcagccaaaacgcgtggcggtgatcggtgctggttacattgcagtagaaatcgccggcgtgctgaatgcgctaggtacagaaacccacctgttctgccgcaaagagtctccactgcgtagtttcgaccccatgatcatcgaaaccttagtggaagtgatgaacagcgaagggccacaactgcacacccatagcgtgccaaaacaagtggtgaaagaagccgatggtagcctgacgctgcatctggaaaatggtcagacgtacaacgtggataccctgatttgggcgatcggtcgccacccagccaccgatgccatcaacctagcggcaacgggtgttgcaaccaatgagcaaggctacatcaaggtcgatgagttccaaaacactaacgttgcaggcatttactgtgtgggtgacatcatggaaggcggcattgagctgactccggtggccgtaaaagcaggtcgtcaactctctgagcgcctgtttaacaacaaactgaacgccaagatggattaccagttagtgccaaccgtggtgtttagccacccaccgatcggcaccattggcctcactgaaccacaagcgattgctcagtacggtgcagagaacgtgaaagtgtacaaatccagctttaccgctatgtacaccgccgtcacctctcaccgtcaaccatgcaaaatgaagctggtttgtgctggccctgaagaaaccgtggttggtctacacggcatcggttttgcggttgatgagatgatccaaggttttggtgtcgcgatgaaaatgggcgcaaccaaagccgatttcgactccgtggtcgcaattcaccctacgggctcggaagagttcgttaccatgtag

SEQ ID NO: 40791 - DNA, 840 bp, Vibrio cholerae
ttgttaagttaccgacacagtttccatgcaggcaatcatgcagatgtgctcaagcacatagtacagagcctgatcctcaattctctgcaacaaaaagagaaaccttttgtctaccatgatactcactctggtgtgggtcgttacgatctgacccatgagtggtcggaaaaaaccggcgaatacaagcaaggcattgcccgcatttggcaacaagacaacattccggcagagctcgatagctatctggatgcgattcgccagctcaatcaaggggaaacactgcgttactacccgggttcacctcgagtcgcccgcgcccatctgcgtgagcaggatcgcatggtactgactgagctgcatccaagcgattacccattgctggagcaagagtttcaccgcgatcgccaagtctctatctataaagaagatggcttcgcacgtctgaaagccagtttgccgccgcaagaacgccgcggtttagtgctgattgacccgccttatgagctggctaaagagtaccgcgatgtggtgcgcgctatcgctcagagttacaaacgctgggcaacgggtatttatgcgatttggtatccagtggtcaatcgctgcgatatcgatgacatgttagaaggcttgcaaggcttagagatccgtaaaatcttacaaattgaactcggtgtcgcgccagataccaatgagcgcggcatgaccgcctcgggcatgatagtgattaacccgccgtggacgctggaaagccagatgcagaccattttgcctttcctcaaacaggcgattgcccccgctactggacactataaagtcgagtgggtggtaccagaataa

SEQ ID NO: 40792 - DNA, 2172 bp, Vibrio cholerae
atgatcgatccctctctattgctcgacggtctcaacgataaacaacgcgaagcggtggcagcgccactggaaaacttactgattttggccggtgctggcagtggtaaaacccgcgtactggtgcaccggattgcgtggctgatgtcggtggaagaagcctcaccgttttcggtgatggcggtgacctttaccaacaaagctgcagccgaaatgcgtggccgaattgaagagctgatgcatggcaccgcctctggcatgtggtgtggtactttccacggtatttgccatcgtattctgcgcgcccattatctcgacgctaagctgctggaagattttcagatcatcgacagtgacgatcagcagcgtctgctcaaacgcctcatcaaagcgcacaatctggatgataaacagtggccggcacgccaagtcgcgtggtggatcaacaatcaaaaagatgaaggattgcgcccgacgcacatcaacgcctttgatccggttactcaaacttatctcaagctgtacaccgcttaccaagaagcgtgcgatcgcgccggcttggtcgatttcgccgaaattttgctgcgcgccctagagcttctgcgtggtaatcagcacattcgcgagcattatcaggcgcgctttaagcacattttggtcgatgaattccaagacaccaacgcgattcagtacgcgtggctacgtatgatggcgggtgctcagtcgaacgtgatgatcgtgggtgacgatgaccagtcgatttacggctggcgtggcgcgcgagtggaaaacatcgaaaaatttacccgcgaattcccgagcgtgaataccattcgactggagcaaaactaccgctccaccaaaaccattttggaagcctcaaatacactgatcgccaataatagcgagcggatgggcaagcagctatggactgacggtttggtcggcgaacccatttcggtgtactcggcgtataacgagctcgatgaagcacgctttgtggtcagcaaaatcaaaggctggcaggagcagggcggcacactgaccgattgcgcgatcttgtatcgcaacaacgcccagtcgcgggtattggaagaggcattattgcaagcgagtttggcctaccgcatttatggcgggatgcgctttttcgagcgccaagagatcaaagatgcgctgagttatctgcgtttgattaataaccgcaatgacgacaccgcctttgagcgagtgattaatacgccgccgcgcggtttgggtgataaaaccctagagaccattcgctttgccgcgcgcgatcgtggctgcaccttgtgggatgccagtgtcggtctgctcaatgaccaagtgctcactgggcgtgctgcgagcgcgctgagccgctttgttgaactgatcaacgccttggaagaggaaggcatcgacatgccgctgcatgtgctcacggaccacgcggtaaaaacctctggtctgctggagatgtatcagcaagaaaaaggcgaaaaatccaaagcgcggattgaaaacttggaagagctggtgacggcgacgcgccagtttgaaaagccagaagaagcgcaagagatgaccatgctgaccgcatttttgacccatgcggcactggaagccggtgaaggtcaagccgatgagcatgatgatgcggtacaactgatgaccttgcacagtgccaaaggattagagtttccgctggtgtttatggtcggtgtggaagagggtatgttcccgagccaaatgtctgccgaagaggcggggcgtctcgaagaggagcgtcgcctgtgttacgtcggtatgacccgcgcgatgcaaaagctctacatcacctacgcggaaatgcgccgtttgtacgggcaagataagtatcacaaaccctcacgctttattcgtgaactgccagaaggctgtttggatgaagtgcgcatgaaggcgcaagtcagccgtccaaccagtacagggcgctttagccaaaccgtagtcaaagaaagctttaacgaaaccggttttaatttgggctcacgagtccgtcacccgaaatttggtgaaggcaccatcattaactttgaaggcagtggcccgcaaagccgagtgcaagtggcgtttaatggcgaaggcattaagtggttagtcacggcttacgcgagattagagaaggtgtag

SEQ ID NO: 40793 - DNA, 1767 bp, Vibrio cholerae
atggagatgggcatgaattggactcatacccccttggcgctttctgcgctgatgtttgcgatggctgcacaagctaccccgaatcaagccaccgatgcggttgcgccagaacaagccactggctttgagcacaaatcgttagtcaaagccaaaaactggatggtcacggcggctaacccactggcgagcgaagcaggggcttcgattttacgccaaggcggtaatgcgatagatgccatggtgacgacacaactgatgctgggcttggttgagccgcaatcatccggcattggcggtggctcgtttttggtctactgggatgccaagaaaaaagcgctcactacgttcgatggccgcgaaaccgcgccactcaacgccacacctgaactatttttagatagtacaggtcagccaatgaaattttacgatgccgtggtcggcggtcgctcggttggtactcccggcacggtcaaactgctgtgggaaacccatcgtcaatacggcaagctggaatgggcgcgcttgattgaacctgtcgccaaactcgccgagcaaggctttgaggtaagtcctcgcctcgcggcactcattgcagaagataaagagcgtttaggccgttttcctgccaccaaagcctatttctttgatgcacaaggtgaacccctcacagccggcactttactgaaaaacccggactacgccgccacactcagagccatcgcacagcaaggcgcctccgccttctatcaaggtgacatcgccaaagacatcatcgccacggtgcaaaatgcgccgggcaatcccggagtgctcgctcagcaagattttgatacgtaccaagtcaaacagcgtgcgcccgtgtgtgcggcttatcaaagctatcaagtctgcggcatggggttacccagctcaggtggcctgacggtgggacaaattctcgccctcaccgaacaatacgatctcaaaggttggggcgcgcaggatgtgaaatcatggcaagtgctgggggatgcctcacaactggcgtttgccgatcgcggcttgtacatggccgatcaagattatgtgcccgttccgacccaaggcttattggataaaacctatctggccgagcgcgctaaactgatccaacccggcaaagcgctgaccagtgcgccagcaggcaatccgccttggcatcatgcgcagctacgcagccccgatcagtcgatagaactgccctccaccagccacttcaacattgttgaccgtgaaggcaacgtggtttccttcaccacctcgatcgaaaacgcgttcggttcacgcttgttggtgcgcggctttttgctcaacaacgaactgaccgatttttcgtttgccacgcaaagtgaaggtcgcccgattgccaatcgcttagagccgggcaaacgcccacgttcatcgatggcaccgaccattgtcttgcaggataaccaaccctatttggcgattggctcacccggtggcagccgaattattggctatgtggcgcaagcaatcgttgctcacacccaatggggcatgaacattcaagccgcgatcaatcaaccgcatgtgctgaatcgttttggcgaaatcgagctcgaacaaggcacctccgccgagcagttcaagccagcgctagaaagtttgggggcaaaggtcgggatcaaagagctcaactctggcctgcacgccattcgtattactgcacaaggtcttgagggagccgctgaccctcgccgtgaaggcgtcgccatcggcgagtaa

SEQ ID NO: 40794 - DNA, 1863 bp, Vibrio cholerae
atgactcttactttgcactctatcgatatgaccgcgactttaatggctgaatcttctgctctctttgccactcctgaacgtgttttgcacgaggtgtttggctatcagcaatttcgcgtcggtcagcaagaggtgattgaggcggcgctggctgggcgtgatagcttggtcattatgccgactggcggtggtaaatcgctctgttaccagatccctgcactggtgctggaaggggtcacgttagtgatttctcccctgatttcgctgatgaaagatcaggttgaccagcttaaagccaacggtgtcgccgccgagtgtgtcaattccaccttggcgcgcgaggaactgatcgcgatttataaccgcatgcatgctggccagctcaagctgctgtatgtgtcgccagagcgggtattgaccgccgagtttatcgaacggctcagccatctgccgttagccatgattgcggttgatgaagcgcactgtatttcgcaatggggacacgattttcgtcctgaatacgcctcattaggccagcttaagcagcgtttcccgaatgtgccagtgatggcgctgacggcgactgcggatgacgcgacccgtcacgatatcatgcagcgtttgcagctcaatgagccgcatcagtatctgggcagctttgatcgcccgaacattcgctacatgctggtggaaaaacataagccggtttcacaagtgattcgttatctggaaactcagcgcgggcagtgcggcatcatctattgtggcagccgtaaaaaagtggaaatgctcactgaaaagctgtgcggcaaccacattcgcgccgccagttaccatgcagggatggatgccgatgagcgcgcttgggtgcaagaagcgtttcagcgtgatgacctgcaaattgtggtggcgaccgtggcgtttggcatggggattaataaacccaacgtgcgctttgtggtgcattttgatattccacgcaacattgaatcctactatcaggaaactggtcgcgcagggcgtgatggtttgcctgctgaagccatgatgctgtacgaccctgccgacatgaactggctgcgccgtatgctcgatgaaaagcccgatggcgcgcaaaaacaggttgaaagccacaagctcaccgccatgggcgcgtttgctgaagcgcaaacttgtcgccgccaagtattgctcaattattttggcgaatatcgcgataagccatgtggtaactgcgatatctgcctcgacccgcccaagcgttttgatgccacggaagaggcgcgcaaagccttgtcgtgtgtctatcgcgtcaatcaaaacttcgggattggctatgtggtggaagtgttgcgcggcatgcaaaacatccgcattcgcgaacatggtcacgacaaaattaccacttatgggattggccgcgatcacagccacgattactgggtgagtattttccgccaactgatccacaaaggcatgctctaccaaaacatcacgcgcaactcgacattgcaactgaccgaagaagctcgccctttgctgcgcggtgaaatgaatattgagctggcggtaccgcgtttagataccgcggcgcgcgcggcgaaatccgacaaattgtcgggcaaaaactacgacaaaaaactgtttgccaaactgcgtaagctgcgtaaatcgatcgccgatgacgaagggttaccaccgtatgtggtgttcagtgacgccaccttgattgatatggcggagatcatgccaacctcttatggcgaaatgttggcggtgaatggggttgggcagcgcaagctggaaaaatacgccgacccgtttttggatctgattcaggagcatttgacctatcatggctga

SEQ ID NO: 40795 - DNA, 2157 bp, Vibrio cholerae
ttgcgtaaaattaatactaataaaaacgattctcaaatctatagcagaggttttatcatgcgcaatattcgcccgagtcagctcggacaatacattcgtcgtgcgcttcgcttgcacttcatccctgttgttttggttgccgcaccgagtgtaatggccaataccaaccaagaaactgagcagttagaaaccttagtggtgaccgcttcagccttgaaagtggaaacacccgcacaagaaacgccaaaagcgctatcgattgtcactcaagaagagattgtggctcgcgcgccacaaaaattggatgaagcgctgcgctatacctccggcgtcaccgctcaaccttatggcgcggacaatgatactgattggctcaaagtgcgtggttttgatgccgcaacctaccaagatggcagccgcctgttccgtgatggttactacacttggcttatcgaaccttacgctttagagcgtattgaagtgctgaaaggtcccgcttcgattttgtatggtgaggcacctccaggtggagtggtcaatgcggtgcagaagaaaccgaccgacattccacaaggtgaggttggcctacaagtgggtaatgatgcgctgcgcaccttaaccttagacatttccgattacgcgaatcaagacggttccgtgcgttaccgtttagtcgcgttgatgaaagagaatgatggtcagttgaacggtacgcaaaccagccgtaactaccttgcgccaagtctcagcatcgatatttctgagcaaacccgtttaaccctgttggcgagctttttggaagacagcggtgtgccgactaacccatttttccctgcggcgggcaccttaatcgattccaactttggtcatatcgatccctctaccaacttagggcaaccggattacgacaagtatgagcgtcgtcaggtgtcattgggttacttgttcgaacatgatcttaatgatgtctgggcgctgtcacagaccttcaattacggcgataacgatctctatctgcgcagcagctacgctttctcgaatgatgacccaagtaaagacacattaacgcaaggcatagtgttccgtgatggttcaaccgaaagcttgagcttagataacaaagcggtggcgaagtgggattctgcccgtgttgaaaacacgctgttgatgggcttagagctgcaacgccaccagactcaaggtgttgagttagataactacagctttggcaccatcaatccgttcaacccgaattatggcaatttcacgcctatcgatgaatcttccgcagcggatcgcaccattaccaaagagcaagcgagcctgtacgcgcagtaccaaatcaagctggatcagcagtggattggcctgattggcggccgtatggattgggtcgatactgaaaacgaaagccaaaagaacatgcagcgtaaaagccgcagcgatgcggagttttcattcaatgcgggtttgatgtatctggccagcaatggtgtatcaccttacctcagctattcacaatcgtttgatgtgctcagcactatcgatagcgcgaagggtgagttgtataagccactgaaaggcgaacaaactgaggttggcgtgaagtaccagccagagttttatgatggttacatcaatctagcttggtttgatatcacccaacaaaatgcgctggtgaccaacccaacgacttttgtggcgacgcaaacgggtgaaatgaccgcccaaggtattgaagtcgaaagcgtaggttatgtcactgatagcttgaaactgaccgccagctacaccttcaccgatgccaaaaccgatgaaacgggtggcaaggggacgcaacaagccggtttgatcccgaaacatcaagcgtcagcgtggctggattacgatgcggcgcagcttggtctgcaaggttggacgtttggctccggcgtacgttacatcggtgagtcgaaagataatccgcgttcgagcgatcgtacggtgccgagtgtaaccttggtcgatctgatggcgggctatgaaatcactgaaaactggcaagtgcagctcaacatcaacaacctgtttgatcgcgagttcgtttctggctgtgattactggtgttactacggccaatcacgcagcgcggtactcagtgctaactatcgctggtaa

SEQ ID NO: 40796 - DNA, 858 bp, Vibrio cholerae
ttggctgcaagacaactcccgcttctggcgggatttgttgtttttattgaatgtcaattattagggggatcaatgtttcagttggctgatattcaaatggttcgcggtgggcgcaccattttggcgatcgatcatttgaccattccgacccatgagctgacagttgtgctcggtcacaacggttctggcaaatccaccttagtcagtttactgtcgggccaacagtcgcccgataatggtcaagtgaccctcaatggtcaatcactctcatcgctgccgagtaaaaccctcgccaaagccgtggcctttttgccgcagaaattgccgaccagcgctggattaaccgtgcgtgagttggtgcgtttagggcgctttccgtggcgcggcaccttgggccgatggcgcaaggaagatgagctgattatcgatgcggcacttgaaaaaacgggtgtgagtggttttgcgcataacttggcggatgagctttccggcggtgagcgtcaacgcgcttgggtggcgatgctgcttgcgcagcaatctccggtgttgattttggatgagccgacgtcggcgcttgatgtgcatcaccaatatcaattgatggcgctgctggcggagctcaatcaaacccaaggcgtgggtattatcgtgattttgcatgatctcaatttggcgctgcgctacgcgacccacattgtggcgcttaagcaggggcagatcgcctttgaaggcggtgctgaattgttgctcgatgagcagcggttgtcggatctgtatcactcaccgatccgtttgattgatcacccgaatcccatttcccactcttctactaataaggtttcgatcgtatgtgcttga

SEQ ID NO: 40797 - DNA, 960 bp, Vibrio cholerae
atgtgcttgatgagtctatggaatgttcgtctgcggaacatttgccgaccaaaggccgtttttggctggcttgccgcgctttgtctattcgcactgcccgtgcaagcacaaattgtgctgacggatagccaagggacgcacacttttgctgaggttccacagcgagtggtggtgctgaactgggatctgcttgaacaagtgcttgaactgggcattcagcccgttggcgcgccggaattgagttcttacgtgcagtgggttgtgcaacccgaggtgccaagttcggtgcaagatattggcactcgtactgagccgaatttagagaaaatcgccgcacttaaaccggatgtcattttagccgcagggccgcaacaagatttgctggccaccttagggcgcatcgcgccagtggtgtatctacccaatttttccgagcaagataacgctgcccaagtggcgatttcccactttaaaaccttagctaccttgtttggtaaagaggcggtggcgcagcaaaaactggaggcgatgtatgcccgtttttctgagctgaaagcttcgctacagcacgcctttggtgacactttacctgcggtggtgacactgcgttttgccaacccaacctcggtgtttctgtataccgaaaactccacgccgcaatatgtgctagaacagctcggtttatcgtcagcgctgccgcagccgccgaaagagtggggcatagtgcaaaaacgcttgagtgagttgcaacacgttgagcaaggctatgtgctctatttcttgccgtttgcggaagagaaaaaagtgcaaaaatcggtgttgtggcgcgcgatgccgtttgtgcaggcggggcgtgtcaattccgtgcgtcctgtgtggagctacggcggggcgatgtcgctgcgttatagcgcagaagcgatcaccgaaagcttgctggcggtggctccgcaatcatga

SEQ ID NO: 40798 - DNA, 1962 bp, Vibrio cholerae
atgagtgtgctgcgtttaactggtttgggggcgctgactctactgttggcgcttgttagcttacagtgggggcacaatttaaccctcaatgagcagtggcaattggtgctcggtcatcaagccgcgcaaagtttcgcgcaggtgaattttatctacgcgcagctaccccgtgcggtgatggccatagtggtcggcgcggtgcttgggttggtgggcagcttgatgcagcagttgacccaaaaccgactcacctcaccgctgacgttgggaacctcatccggtgcttggttggggctgattatcgtcaatatctggttcagtgattgggtggctgattacagcgcactggctgcgatggctggagcactgctcgctttcgcactgataatctcgatagcggggctacgcaatctcaccggattaccgctagtcgtttccggcatggtggtgaacattttgctgggttcgattgccacggccttggtactgctgaacgaagagttcgctcagaatgtgtttatgtggggcgcaggtgatttagcgcaaaacggctgggagtggctcacttggttgctgccgcgtttggctttggtgttcccgttactgctgtttgcacctcgagtgctgactttgcttcggttaggccatgaaggggcggcggcgcgtggtttagcggtattgcctgctttcttgtttctgatggcaggcgggatttggttggtctctgcttcaatcaccgcagttggggtgatcggttttatcggtttattaaccccgaatatcgcccgttcactgggggcgcgcacgaccaaaatggagttgtacagcagtgcgctgcttggcgctttgttgctgcttgccactgacatgctcgccatggggctgagcgtgtgggctgaggaagtggtacctagcggcattactgccgccgtgattggtgctccggcgctgatctggtttagtcgtcgccagctccaagcgcaggattcgctctctatctccttgtcttcacatcgccgttcgccttctcgatgggcggtgatgctcattgcggcagctttgttgttggcactgagcctacatattggttggcagatggaaagtgcaagctgggcgctgccgagtgagtttcaatggccgcttcgttggccgcgcatgctcaccgcgctgtttgctggggtgggattggcgatcgcgggaacgttactgcaacggctgatttataacccgttagccagccccgatattttgggcgtctcttcgggggctacgtttgctttggtgtttgctagcttgtttttagggcaaagtttgcagagcacccactggatgacagcactgcttggcagcgctgcggtattggtggcgctgttgctgcttgggcggcgccatcattacgcaccatctagcttgatcttgactgggattgctatcactgcactgttggaagccttggtgcaatttaccttggctaaaggaacgggcgacagctatcagattttgctgtggctatcgggctcaacttatcgtgccacgggcgagcaagctttgctgctcagcgtgggtgtggtggggttaacactgttggcgcttggcttgtctcgttggcttaccttgatctcaattgggcgcggctttgcttctgctcgcggcttgagtgcgagtcgcgccagcttagtgttgctgatcttggtcgcgctgttgtgcgctttggtgaccgcgaccatgggccccgtcagctttgtcggtttgattgcgccacacatggcgatgatgctcggcgcgcagcgtgctccatctcaacttctgctggccgccttggtcggtggtactttgatgttgtgggcagactggttggggcaagccttgttattccccgcgcaaattgccgcaggcacgctagtggcaatcattggtggcagctatttcctgctgctgttactcagtcagcgtgcacgctaa

SEQ ID NO: 40799 - DNA, 1449 bp, Vibrio cholerae
atgatggccaaaataacccaaaccatgatggcacaagtgctgtctctggtgggcggcagtggtaacgtcgccaaatgtggcaactgcatgactcgcttgcgtttaacgctgaataattctgcgctcgccgatcatgcggcattgaaaaaaatttctggagtgatgggcgtggttgaaagtgacgcacaactgcagatcatcctcggtcccggtaaagcacaaacggccgcggatatgatgaatgccttgattgaatcgggcgacaacgtggcacctgcagtgagcgaggcggatctctccaccattgccgcgcagcagaaaaagcagatgaagagcaagcaaaccagtgcggtacaacgctttttgagcaagtttgccaccatttttaccccgctgatccccggatttattgccgcaggcttgctgctgggcattgcgactctgcttgagcaaatctatgtggttggccaaaccccgagcgagtttatgctcgatctggtggcttatctcaaagtgtttggcaaagggctgtttgcgtttctcagcatcttgattggctataacgcgcagcaggcatttggcggctctggcgtgaacggggcgattctggcttcgctgtttgtactcggttatgacccagaagcaaccaaaggcatttactcggggatgagtgagttcttcggctttgcaattgacccgcgcggcaacatcatcggggtattactggcggcaattttaggcgcgcaagtggaacgtaaagtgcgtgaatacatgccggatgatttggatatgatcctgacttcggtggtgactttgctgatcatgggcgcggtgactttcctcatcatcatgcctatcggcggtgagctgtttaaaggcatgtcatggctgtttttaaacctcaatgataacccactcggtgctgccatcttggccggtttattcttaatctcggtggtgtttggtattcaccaaggttttgtgccggtttatttcgcgctgatggaagcgcaaggctttaactcactgttcccgatccttgctatggcaggcgctgggcaagtcggtgcctcactggcgctatacgcgagagccaaaaaagagaccaccattcgcactcaaattaaaggggcgatcatcccgggcattctcggcattggtgagccactgatttatggcgtgacgctaccgcgagtgaaaccttttgtcactgcctgtattggcggtgcggcgggtggcttctttatcggcctcatctcttatttgggtttgccggttggcctcaatacggtgtttggcccatccggtgtggtggcgattcccctgatgacttcagccgacggtatttttgcgggtatggcggtatttgtcggtggtttgctcatctcttataccgttggctttgctgctacctacttcttcggttgtaaagacgtcgatctgagctaa

SEQ ID NO: 40800 - DNA, 867 bp, Vibrio cholerae
atgatttacagcatgactgcgtacgcacgcaaagaagtcaaaggcgattggggcagcgccgtgtgggaaattcgctcggttaaccaacgctatttagaaacgtacttccgcctgcctgagcagttccgtggtttagagccactgctgcgcgagcgttttcgtcagcgcctgtcacgcggtaagatcgagtgtcatttgcgctttgaagcgaatccagccgcgcaaagccacctcaccatcaatgaaggactcgcccagcaagtgattaatgccgctaaccagatcatgcacatgaccggtgaactcagccgcattaacccattccaagtgatgcagtggccgggcgtgatggaaacgcctgagcaggatatggacgccataaaccaagcactactcagtgcgtttgatgaaggcgtggacgaatttatcgccgcgcgtggccgtgaaggcgataacatgaaagcgctgattgagcagcgtttgcaagcgatcagcgccgaagtggtcaaagtacgcgcacgcatgccagaaattctggaatggcaacgcgagcgtctgttcagcaaatttgaagaggcaaaaatcgagcttgatgcgagccgcgtagagcaagagctgatcctgctggcacaaaaatcggatgtagccgaagagctggatcgtctcgactctcatgtcaaagaagcgcgtgaagtgctgaaaaaaggtggctcatgtggccgtaaactcgatttcatgatgcaagagttcaaccgtgaatcgaacaccttggcttcgaaatccatctcaaccgatatcaccgcctccggtgtggagctgaaagtactcatcgagcagatgagagagcagatccaaaacatcgaataa

SEQ ID NO: 40801 - DNA, 645 bp, Vibrio cholerae
atgatgaaagcttaccagcgtgaatttattgagtttgccctagaaaaacaggtgctgaagtttggcgaatttactttgaaatcaggccgtaaaagtccttatttctttaacgctggtctgtttaatactggccgtgatttagcgcgcttgggccgtttttacgctgcagcgttagttgattcaggtattgaatttgatgtgctgtttggccctgcttacaaaggcattccgattgctaccaccacagcagtcgcattggcggatcaccacgatgtggatacgccttactgctttaaccgcaaagaggccaaaaatcacggcgaaggcggtaatctagtgggcagcaagttagaaggccgcgtgatgttggtggatgatgtgatcaccgctggtacggcaattcgtgaatcgatggagcttatccaagccaacaaggctgatttagccggcgtgctagtggcgatcgatcgccaagagaaaggcaagggcgagctctcagcgattcaagaagtggaacgtgattttggttgtgcggtgatttcgattgtgagcctgaccgatctcatcacctatcttgaacagcaaggtaacaacactgagcatctagaggcggtgaaagcgtatcgtgcacagtacggaatttaa

SEQ ID NO: 40802 - DNA, 675 bp, Vibrio cholerae
atgagcctaaaacagttacccaccgaatccatgccgcgcgaaaaattgctgcaacgcggtccacaatcattaagtgatgcggaattgctggcgattttcctacgtacaggcacccaaggcatgaacgtgctcgccttagctgatctgctgctgcgcgattttggatcgctgcgcgcactgttttgtgcctccaaggagcagttttgtcgccacaaagggttgggcgaagccaaatttgttcaattacaagcggtattggagatgacgcagcgttatctcgctgaaaccttaaagcgcggtgatgccctcaccagtccgcagcaaaccaaactttatttatcgagcgtgctgcgcgatcgccaacgagaagccttctatatattgtttttggataaccaacatcgtgtcattcgtgatgagattttatttgaagggacgattgatgcggcgagcgtttacccacgagaagtggttaagcgggcgctgcaccataatgccgctgcggtaatactggcacacaaccacccatcgggtgttgcggaaccgagtcaagccgatcgaaggatcaccgatcgcctgcgtgatgcactcggtttggttgagattcgtgtgctggatcattttgtcgtcggtgatggggaagtggtctcttttgctgaacgtggctggatatag

SEQ ID NO: 40803 - DNA, 237 bp, Vibrio cholerae
atgtcacgagtatgccaagtaactggtaagcgtcctgcagttggtaacaaccgctcacacgcaaaaaatgctactaagcgtcgttttctgccgaacctacaaactcatcgtttctgggtagagagcgaaaaacgttttgttaaactacgtctaactgctaaaggtatgcgtatcatcgacaagaaaggcatcgatgctgttcttgtagagatccgtgcacgtggcgaaaacgtttaa

SEQ ID NO: 40804 - DNA, 168 bp, Vibrio cholerae
atggctaaaggcattcgcgaaaaaatccgcctagtatcatctgcaggtacaggtcacttctacaccactgataagaacaagcgcaatatgcctggcaagttcgagatcaagaaatatgatcctgtagttcgccagcacgttgtgtacaaagaagcaaaaatcaagtaa

SEQ ID NO: 40805 - DNA, 810 bp, Vibrio cholerae
atgcctgaattacctgaagttgaagtcagccgtttagggatctccccacatttggtcggtggcaccattcaatccttagtgttacgtacgcccaagttgcgctggcctatccctcaagagctgaaacagcttgaagggcagaccattctcgcgattcatcgtcgagccaagtatctgattattgaaaccgccgtcggcagtgcgattgtgcatttgggtatgtctggctcgctgcgtattttggatggcgattttcctgccgcgaaacacgatcatgtggatctggtgatgaccagcggcaaacggctgcgctataacgatccgcgtcgcttcggggcttggttatggtgtgcgcctgatgagagccatgaagtgctcgggcgtttggggcctgagccgttgaccgaagcttttaacgctgaatatatgatggacaaagcgcgcaacaaacgcattgcagtcaaagcttttatcatggacaacgcagcggtcgtgggtgtggggaatatctatgctaatgaatcgctgtttacatcacgcctccatccactacgccccgctcattcgctgagcttagaggagtggcaaaccttagtggcgaacatcaaacaagtgctgcaagtggcgattaagcaaggcggcaccacactgaaagattttacccaaagcgatggtaagccgggctatttcgcgcaagagctgcaagtgtatggcaaagccaaacagccttgcccccattgtggagagccgctttgcgagcagaaaattgctcagcgcaatacctttttctgcccgcagtgccagcattga

SEQ ID NO: 40806 - DNA, 780 bp, Vibrio cholerae
gtgagtaaaccaacgcttgctgtcgcattgatagtaaaaaatgaagcgcgtcatctggatgagtgcttacaaaccgtgcacgactgggttgatgagatcgtagtgctcgattctggcagtcacgatgaaaccgagcaggtcgcgcgtcgttacactgaaaaattttacgtgaatgcaaagtggccgggctttggcctgcagcgccaattggcacaatcttatgtccaatcggattatgtgctgtggctggatgccgatgagcgagtgactccggagctcaagcagagcattttgcaagccgttgctgccaataagccggataccttgtatcaatttgcacgcctcagttgggtgtttggtcgctttatccgccatagcggttggtaccctgatcgcgtactgcgcctctatccaactcaactgactcgctacaatgacgcattagtgcatgaaaaggtgcacgttgaaccaagcatgaaagtcgaaactttagcgggcgatgcgattcactacacctataacgatgtgcatcactatctggtgaaatccgcgggttacgccaaagcgtgggcggatcaacgtcaagcgaaaggcaagaaggcttccctttctcaaggcatcgtccatgctgtgggctgttttctgaaaatgtatctgctcaagcgcggttttttagatggaaaacagggatttttaattgcactgctctctgcacactctacctttgtaaaatacgcagacttgtgggcacgtgataatgacgagcactacaaacgctaa

SEQ ID NO: 40807 - DNA, 1200 bp, Vibrio cholerae
atgaataataaaataactaaaacctcaattttccttactatctcactacttttaattacaccgggattttctgttgtagcggtaggattactgactctctactctagtgttaaattaattaaaaatggcttaaaccttaataaattcgacattattcctcttataaccctgagtgcgtattttttgtcaaacttaccaattaccattattgatggtgatactttaagatatttagatgcaggcattcgtgctctgttatgtatacctatgtactttttcattaagaatgaaatttccaaaggcgcaaatttagataacacactatgcacatcaaccatattggcttcttttggtgctttagcgtttgctttttatcaatttttcatattaaacatgccacgcgttgatggttttctatttagtatcaacttcggttatctcgcagcagctttagctatcttatcttttggcttgtcatttacacaaacaagattcaaatattatttgtatctctcagttgtagctgcaacagtggcgacaatcttaaccttaacaagaggagccattttaacgctactctttgttttcatcttgttctttatcgtcaatgtaagaaaaataaaatttaagcaaacccttgtttttactctaatcagttttttattagtctcagtcagttatcaattttcaccgcgtatacaagaacgggttgattttacaatttttgaaatatccagcattgccagtaacaatattcacgctgcagcttcatcaggggggcgacttcaactctggtatgccgctgttgaagcatttaaacacaatccaatttggggtactacgtattcggaaagagaaagcttaaatattgaactttttaaagaaggaaaagtggatgaatggacgagcacggtgcccagaggtcatgcacatagccagtattttgaagctatagctagtaatggaacattgggaattctggcgattttcgcgatgcttatcttaccatttggggtatttttaaacgactatcgaaaaacaggctctccaatcagccaaactggatacctttttgcctttgggtttatcattttctgtttaactgaagcaccactacaagccaaccttattggaactttttatggctttatggtggcaattttttatgcttacatcgcagccaaaagagcaaaaaattga

SEQ ID NO: 40808 - DNA, 816 bp, Vibrio cholerae
ttggtatggtcagctacttctcgtacaaagtactcgataaaaaagtcattttttgggtgtagtatgatagagctatctaatgttaatttgcactaccctgtgccagggcatttctcacattctttgcaaacaacaatatccagcaaaattggtggtgtactgggttctagttctgcaaaagataaagaaatgaagtatgttcatgcactaagagatattaatctaaagctagaagatagcagtaggttgggtattattgggcataatggtgctggcaaaacgactctacttaggttactttctcaggtttatccaccaacgtcaggaaaggttactatcgaaggaaagatttcagcattgactgacttcactcttggaatggatcccaatgcaacaggtctaaagaatatcgaatttagattagtatttatgggatgtacatttaaggaagcgcaacaagcagttgaagaaatcgttgctttttcagaactcggcgaatttatcaatctaccagtcagaacttattctaccggtatgttcttacgtttggcttttgcaatttctacacatttcactccggatatattgattttagatgaagttattggggctggtgatgaaactttccgtgagaaagcattatcacgtttggaaagtctgatcaagaagtcaagaatggttgttttgtcttctcatgatttaaatgctattaaacaatattgtgatcaggctattgtaatggagaaaggtgaaattgttttcaatggaacaccacaatcatgcattgactactatttaaacagtgtcaaaaaataa

SEQ ID NO: 40809 - DNA, 1233 bp, Vibrio cholerae
atgccatggaagacctactcacggaacttgatgtatgctgtcataactttgatgttgaatgtattaagcgaattttacttgatgcacctacgggttattcgccacaaaaatgagaataaaatgaaagtattgcatgtatatagaacctgttatcctgaaacaaaaggcggtgttgagcaagttattcgatttatagcatcgggaacaaaaccgttaggaatagaaactaaaatacttacattatctgataatcaaacttcttcttattattgtgaaggaacagaaataatctcagtaaaaaaatcgattgaaatctcttcaaatggattctcgtggaagctaattagacaattcaagaaactttcaaaatgggctgacataatccattaccattatccatggccaaccggagactttctctctttatttggctcatcgaatccaagtattgtaacgtatcattccgatattattcgtcaaaagtgcttaaagaaattatatcaaccacttgagagtcattttttaaatcaagcaaatatccttgtggcaacatcaccacaatatgcacacacaagcgagaatttgttaaggcataaaaataaggtaaaaataattccacttgccgttgatgagaatacttatcctatcccatcaaacgataatattaataaatggcgagaaaaagtaggggaaggttttttcttatttgttggcgtattacggtactacaagggtctagatttcttacttgaagcagcaaaaatcaaccagctacctgttataattgctggtgacggtccggaaagagtaaaactagagtcttatattgccaaacacaatcttgaaaacgttaagctagtaggattcatttctgaggaagacaaagtcatattacatttactttctaaagcttttgttttcccatctcacctacgctcagaagcttttggtatatcacttatcgaagcacaaatgtactgtaaagccattattagtagtgatattggcacaggttcatcttatgtgaacatcaatggcgaaacagggttagttgttccgccagctgacagtcaaagcttttccgatgcaatgttaaaaatagaacatgatacaaaactttgtgaaaaattaggtattaatgctcgcaaacgttttgaacaggaattcacagcacatcgctatgcacaaagctatactaaactgtatagtgaactcttcggaaatgtctgttga

SEQ ID NO: 40810 - DNA, 1866 bp, Vibrio cholerae
atgtttacccctattcaactgctcttaagcgcacagcgtcatcataagcgtatgataacgttgctatatgatgtatttgcgctgatgttttccctttatgctgccatcgcactacgcttagatactttagcattcacgtttagcttcccagagtttctgagcatgatgacaacggtaggggtcactctctactgctttgtccgactcggtatgtatcgcgcagtgctacgttatatgatgctgcctgcgatcggctatatctttttgtctgtcatcatttctgcggtgacgctagcactaagcggctttttctttcaggcctttattccccgcagtgtcccctttatttatgcaggcctagcaacgctgactttaggtgggcctagaatttttattcgcaccatctattaccattattacaagcgtcagaaaccaaatgtttttatctatggtgcaggttcaacagggcgagatctggcctatgctctcattcaaggtgatgagtaccacccggtaatcttcttagatgatgatccagctaaaacaggacaaattatatttgggctgcgagtgcaccatagtagtgattttgaatcactcagaaatctttatgaacccgtaaagatgctgatcgccataaataatatcggtaaaaatacacgtataaaattacttgaacgactctctcattggcccattgagattcaatctgtcccctcagtggaagatattgctgcgggacgcgcaaaagcgactgatgtacaagatcttgatatcgcagatttgcttggccgcgcaccggttgaacccgacttagcgctgttacaaaaaaacattactgaaaaatccgtcatggtcactggagcgggaggttcgattggctcagagttatgcagacaaatcttggctcaaaaacctaaaaccttagtgttatttgagctcaatgaatataacttgtataccatcgatcaggaattacaagcgatcaaacagaatttaaaactcaacacgaaaatagttgcagcacttggctcagtacaacgtgaaaaccgcgtcaaaaaactcatgcaagctcatcaggttgaaacggtttaccatgctgcagcttataaacacgttcctctcgttgaagataatgttatcgaaggcattcgcaacaatgtctttggaacattagcctgtgctaatgcagctatagaagctggcgtaaaaaactttactctgatttcaacggataaagccgtgcggccaacgaatatcatgggagcaagcaagcggatggcagagctggtactacaagccctagccgataaaaacagtacaaccatttttaccatggtacgtttcgggaatgtcttaggctcttcaggttcggtcgttcctctattcaaaaaacagatccgcgcaggtgggccagtaacggtaactcaccctgatataatccgatatttcatgctgattccagaagccgctcagcttgtcattcaagctggggcgatgagtcataatggacaagtctttgtcctcgatatgggtgaaccagtaaaaatcgtcgatctcgccaaacgtatgattcatcttatgggcatgaaagaattctgcgatggaagaagtgatgaaggcgatatcgagatcaagtttactggcttgcgcccaggagaaaagctctatgaagagctacttatcggagagaatgtggaaggcactagccatcaaaagatcatgacagcatgtgaagaaaaactgagttgggatgccatggaagacctactcacggaacttgatgtatgctgtcataactttgatgttgaatgtattaagcgaattttacttgatgcacctacgggttattcgccacaaaaatga

SEQ ID NO: 40811 - DNA, 555 bp, Vibrio cholerae
atggttattcgatttcttgattttatttttgctctagctgggctgttgttactctggcctgtgttattgattgtgtgcattttgggctattttgatactggctcccctattttctgccaacagcgagtcggtaagaatcagcgtccatttaccctcattaaatttcgaaccatgccaaaaaatacggcgtcggtggcaacccatttggttggtgcttcttctgtcactaggctcggtcagtttctgcgcaagaccaagcttgatgagcttccacaattaatcaatgtgctgaagggtgaaatgagtttagttgggcctcgaccttgcttgtttaatcaacaagatctgattgctgaacgagaatcccgtggagtgtttaccgttctccctggcattacgggactggctcaagtaaacgaagtggatatgtcgacaccagtaaagcttgcagagcttgatcaacagatgattcaaacgctgaatttaaaaaactactttacgtatatcattcagaccgttttaggcaagggagcgggtgatcgtgttaagccataa

SEQ ID NO: 40812 - DNA, 1368 bp, Vibrio cholerae
ttgctgaggcgagctaaccacggcaaggtggcgcaaaacaggagaaacaacatggaagtggttcatcacggagggaaggcgagtgtcacgggttcatgccatgaattgcgagccgatgggcaagcgctgctgattgattgcggcttgtttcaaggggcggatgaacgcccgttggctgtggagtttgcgctggggcatgtggatgctctgatcttaactcatgcgcacatcgaccatattggccgtttgccttggttattggcggcgggccttaagcagccgatttactctacggcggcaacggcggagctggtgccattgatgctggaagatggtttaaagctgcagttagggatgtctcccaagcagagtgagcgcgtactgactgaggtgcgccgtttgctgcgggtgcaagattaccaaaagtggtttgcagtgcagcctaagcgtgctgattcgctctgggtgcgctttcagcctgcggggcatattttgggctcggcgtatgtggaaatccggcgtccgaatggtgaggtggtggtgttttcaggggatttggggccaagccatacgcctttgttgcctgatccgcagtcgccagagcgggcagattatctgtttattgaaaccacttatggcgataagcagcacgaggatgtgcagagccgagggcagcggctgcgcgcgatgattgagcgctcactgactgacggcggtgcgattttgatcccggcgttcagtgtcggtcgcacgcaagagctgctctttgatattgagcagctcatcttttctcagcaaatcgatgctaacttgccgattattctcgattcgccgatggcgcagcgagtgacgcgttcttatcgtcgctttaagcagttatggggacgagaagccaaagcgcggctgcaaatgcatcggcatccgttggcgtttgagcagtgtattacggtggaagatcaccgaacccatgagcgcttggtcaaccgtttagcctcaaccggagaggcggcgattgtggtggcggcgtcggggatgtgtcagggcggccgcattatggattatttaaaagcgctgctgccggataagcgcactgacctgattttggccggctttcaagcagaaggcacgcttgggcgcagtattcaaagtggtcaaccttcggtctggattgaggggactgaagtggaagtcaacgcgcatattcatacgatgtccggttattccgctcacgccgataaggccgatttgctgcgctttattaccggcattcctgaaaagcccaagcaagtgcatctgatccacggtgaagccccagccaagcaagcgttcgcggctgagcttactcaactcggatattcggtgctttga

SEQ ID NO: 40813 - DNA, 1200 bp, Vibrio cholerae
atgaacaccgcaattccagctccattttttattatgcataacgttatccaatcatacgcatggggcagtattgactcaataaaccagttgtttgacattcctaatccaaagggagaacctcaagctgaagtatggatgggtactcacccgaatggttgctcatacgtcgaattttctggagaaaaaataaaactcagtactctaatagaacaaaaaaaaactgactttctctcaatccaaacagtagaacagtttggtgagctaccttatttgtttaaaattcttgctgcaaatcaagcgctttcgattcaagttcacccaagcaaagcagaagcagaggaaggatttgctcgcgaaaatgcccaaggaattttgataaacgctacaaatcgaaactataaagatcctaaccataaaccagaactggtttacgcgcttaccaattatcaagccatgaatggttttcgtccattaagtgacattatttcactatttagcgccttggctatcgatgaaatagcttcgctattgagccaccttaaacgaaaccaaaacgaaacagggctcgaacacttttttactaaattactctcactctgtggtgaaaaaaaaagacgcgttttagaacaattgcttagctatgctcgatcgcatgcaaaacaacctatatttgccttaatcgaagaactagcgacacaatacccaaatgacattggccttttcgcgcctttgatgctgcatgttttaacccttcaacctggcgaagcaatgttcttagatgcgcgcacacctcatgcttacttgaaaggtacagctttggaaatcatggctaattccgataatgtgctgcgtgctgggctcactccaaagcatattgatgtggtagaacttgctaaatgcactctatttaaggaaaaatctgaagccaccttattgctcacaccaattcaacaaggagatatgctcagtttcccagtgcctgtagcggattttaagttcgcgattttcccacgaccgcagcaagctaatatcacagttagtagcgccgaaattttactgccaattgattgcgatgctactttagttagtccttgcggcaccgttcttacagtacacaaagggcaatcggtctttattcccgcctatacggaaaaatactgcttaagtgcagcaggacgtgtcgcgcgagcatacaattaa

SEQ ID NO: 40814 - DNA, 273 bp, Vibrio cholerae
atgaacaagacccaattgatcgactttatcgcagagaaagcggacctgactaaagtgcaagcgaaagcagctcttgaagcgactctgggtgcggttgaaggtgctctgaaagacggcgaccaagtacaactgattggttttggtacattcaaagttaatcatcgttctgctcgtactggccgtaatccaaagaccggtgaagagatcaaaattgcggcagctaacgttcctgcattcgtagcaggtaaagcgctgaaagacgcgatcaagtaa

SEQ ID NO: 40815 - DNA, 1338 bp, Vibrio cholerae
atgtcatcaaatgcaaaaaaaatcggcctgatcgcctgtacgggtgtggtggctggcaacatgatgggcagtggtattgcgctgcttccttctacgcttgcgagcgtaggttcaatttccatttatagctggctgatctgcattgttggcgcactcagtttggcgtttgtgtttgctcgtttggcaaccaaaaacccgcaagagggtggcccgattgcttatgcaggggaagtgtcaccggtgtttggtttccaaacgggcgtgctttactaccacgctaactggattggtaatttggcgattgcgattaccggtgtttcttacctttcggtgttcttcccggtgctgaataacccgatccctgctggtttagcgaccattgcttcggtttggctatttaccttagtcaacttgcttggtggtagctgggtaagccgtttatgtaccattggtttggtgctgattttgatccctgtagtcggtacggctctgtttggttggacgcactttgacagcgcgctctacagccaaaactggaacgtgtctgccggtagcgatggccatgcggtgatcactgcagtgctgatctgtctgtggtctttcgtgggtgttgaatcggcagcggtttcttccggtatggtcgaaaacccaaaacgcacggtgccactggcaaccatgttaggtactggtcttgcgggccttatctatgtgctatcaactcaaatgatcagcggtatgttccctgcctctgaagtggcggcatcgggtgcaccttttgcactggcgaccacagcactgtttggtagctggactgcgccattcgtgtctgcctttactgcactagcgtgtttcacgtcacttggctcttggatgatgctggtcggcgaagcgggcaaacgtgccgctaacgatggcaacttcccgaaagtattcggtgaaaccgatcgcaacggtgtaccgaaaaaaggtctgctgattgcttccagcatgatgacattgctgatgctggtgctgatgttcttcagctcagaaactgcgcacgcttccgatctgtttaaccaactgactaccgatgcggttctgctgaccatgctgccttatttctactccagcattaacctgatccgcttcgaaggcatgaccactcgcaatacgtttgtgatgctgttctccggtattgccagcctgttctgtatggtggcgctggctggtgcagagggttcaaccctgactgcaaccttcatcatgtcgctgattattttgatgttctacagcaaaaaagcgggtctggataaatacctcgagactcatccacaacaagcttcggctcagttctga

SEQ ID NO: 40816 - DNA, 1344 bp, Vibrio cholerae
atgttagataaagttgtcatcgcgaaccgaggcgaaattgcgcttcgtattcttcgcgcttgtaaagaattaggcattaaaacggttgccgtgcactccacggctgaccgcgacttaaaacacgtactgctggcggatgagtctatctgtatcggtcctgccaaaagcatcgacagttacctgaacattccacgcattatctctgcggcggaagtcacgggcgcagtagctatccacccgggttacggctttttgtctgaaaacgcagactttgctgagcaagtggagcgcagcggcttcatttttgtcggccctcgcgccgaaaccatccgcttgatgggtgacaaagtctccgccatcaacgcgatgaaaaaagcgggcgtaccttgtgtaccgggttcagacggcccactggataacgacgaagcgaaaaacaaagcgcacgccaaacgcatcggctacccagttattatcaaagcctctggcggcggcggtggtcgcggtatgcgtgtcgtacgtaacgaagccgaattgaccaaatctatccagatgacgcgtgcggaagcgaaagccgccttcaacaacgacatggtgtacatggagaaattcctagaaaacccacgtcacgttgaagtgcaagtgatcgctgacggtcaaggcaatgcaattcacctcgctgagcgtgactgttcaatgcagcgccgtcaccagaaagtggtggaagaagcacccgcaccgggtatcactgaagaaatgcgtaagttcatcggtgaacgttgtacccgtgcgtgtatcgaaatcggctaccgcggcgctggtacctttgaattcctgtacgaaaacggtgagttctacttcattgagatgaacacgcgtattcaggttgagcacccagtaacagaaatgattactggcgttgacctaatcaaagagcagctgcgtatcgccgcgggtcaaccgctgtctttcaaacaagaagacatcaaaattcgcggccatgccgttgagtgtcgtattaacgcggaagatccagagcgcttcctaccttgcccaggcaagattgaacgcttccatgcacctggcggcatgggtgtgcgttgggaatcacacatttactctggctacaccgtacccgcgcattacgactcgatgatcggcaaactcatcacttacggtgagaaccgcgatgtggcgattgctcgtatgcgtaacgcactcaatgagatgattgtggaagggatcaaaaccaatatcccactacaacaagctatcatggcagatgagaacttccagaaaggcggtaccaacatccactatctggagaaaaaactcggcatcaagtaa

SEQ ID NO: 40817 - DNA, 591 bp, Vibrio cholerae
ttgcggtttaggtgcccaaggttacgaattcgctttgtctgctgcaatccgagcattgcaggccaagcaataaagacactctgcggcccattcgggctgtcttattcacaagataaaagagaaagaaacatggatatccgcaaaatcaagaagcttatcgagttagttgaagagtctggcatcgcagaactggaaatttctgaaggtgaagagtcagtacgcatcagtcgttatggccaaccagctccagcacctcaagtgcactacgcagccgcaccagcaccagtggctgcaccagcaccggtagctcaagcagccgcggtagcagaagcaccagcagccgcgaaagtgccagcaggccataaagtgctttctccaatggtaggcactttctaccgttcaccaagcccagatgccaaagcgtttatcgaagtgggtcaaagcgtttctgttggcgataccctatgtatcgttgaagcgatgaaaatgatgaaccagatcgaagccgacaaatctggcgttgtgaccgcgattcttgttgaagatggtcagaccgttgaattcgaccaaccgcttgttgttatcgaataa

SEQ ID NO: 40818 - DNA, 2001 bp, Vibrio cholerae
ttgaaacgcgccctttcaggaaatttgccgaattcacaaggagaacccgtaatgagtgaagcccatatttatccggtcaaacagaacatcaaagcgcatacgcatgccgataacgacacctatctggcgatgtatcaacagtccatcaaagatccggaaggcttttggagcgaacacggcaaaatcgtcgactggattaaacctttcaccaaggtgaaacacacctcttttgacccagggcacatcgatatccgctggtttgaagatggcacgttaaacgtttctgccaactgtattgatcgccatttggcgacccgtggcgaccaagtcgcgatcatttgggaaggcgacgacccgactcaagacaaaactctgacgtataagcaactgcaccaagaagtgtgccgttttgccaatgcgctgaaagagcaaggcgtacgcaagggtgatgttgtctgtatctacatgcctatggtgccagaagcggcggttgctatgttggcttgtacccgtattggcgcagtgcacactatcgtctttggtggcttctcgccagaagcactggctggacgcattatcgactcgaacgccaaattagtgatcactgccgacgaaggtgttcgcggcggccgcgccgtccccctaaagaaaaacgtcgatgaagcactgtgcaatccagaagtcaaaaacatcagtaaagtgatggttcttaagcgtactggcggcaatgtcgcttggcatgaacaccgtgacatttggtggcatgaagcaaccgcaaaagcctccgataattgtccaccagaagagatgaaagccgaagatccgctgtttatcctctacacctctggctcaaccggtaaaccgaaaggcgtattgcacaccactggcggttatttggtttatgcgactatgaccttcaaatatgtattcgactatcagcccaatgaagtgttctggtgtaccgctgatgtgggttggataacgggtcactcctatctggtgtatggcccattggcgaatggcgcaaaaaccattctgtttgaaggcgtgccaaactaccccaccaccgcacgcatgagcgaggtggtagacaagcataaggtcaatatcctttacactgcgccaacggcgatccgtgcgctgatggccaaaggtgatgaagcgattaaaggcactagccgtgacagcttgcgcattatgggctctgtgggtgaaccgattaacccagaagcgtgggagtggtactaccgcacgatcggtaacgaaaaatcaccgattgtggatacttggtggcaaaccgaaaccggcggtatcttgatcacgccactgccgggggcaacggcgttgaaaccaggttcggccacacgcccgttctttggtgtgcagccagcgttagtcgataacatgggcgaaattgtggaaggcgcaactgaaggcaacttggtactgctcgattcatggccgggtcaaatgcgcactgtgtatggcgatcacgaccgctttgaacaaacctacttctctacctttaaaggcatgtactttaccggtgacggcgcgcgtcgcgatgaagacggttactactggatcacaggccgtgtcgatgacgtactcaacgtttcgggtcaccgtatgggaacggcagaaattgaatccgcactggtggcattcaataagattgcagaagccgccgtggtcggtgttccacacgatatcaaaggccaagcgatttacgcttacatcacactcaatgatggggtgtatccgagcgctgaactgcataaagaagtgaaagattgggtacgcaaagagattggcgctatcgcgacaccggatgtcctacactggaccgatgcgctaccgaaaacccgttcaggtaaaattatgcgccgtattttgcgtaaaattgccaccggcgataccagtaacttgggggatacctcaacgctggccgatccaagcgtggttgaccgcctgattgcggaaaaagcccaacttaaataa

SEQ ID NO: 40819 - DNA, 1260 bp, Vibrio cholerae
atgaatctaacagaactgaagaacacccctgtgtctgatctggttaagcttggcgaaagtctgggccttgaaaacctggcacgcctacgcaaacaagacattattttcgcaatcctcaaagcacacgcaaaaagtggtgaagacatttttggcgatggggttctggaaattcttcaagacggttttggtttcttacgtagtgcagacagttcataccttgctggccctgacgacatctatgtgtcacctagccaaattcgtcgctttaacctacgtacaggcgactcaattgccgggaaaattcgtccgccgaaagagggtgaacgttactttgcattgctcaaagtgaacactgtaaacgatgaccgtccagacaacgcccgcaacaaaatccttttcgagaacttaactcctctacacgccaatgaacgtatggtgatggaacgtggcaatggctccacagaagacatcacggcgcgtgttctcgatttggcagcaccgattggtaaaggtcaacgtggtttgatcgttgctccgccaaaagcgggtaaaaccatgctgctacaaaacatcgctcaaagcatcgccagcaatcaccctgagtgtgtgctgatggtactgctgattgacgagcgtccagaagaagtgactgagatgcagcgcctagtaaaaggtgaagtggttgcttcaacctttgatgagccagcatcgcgccacgtacaagtggcagaaatggtgattgaaaaagccaaacgtctggttgaacacaagaaagacgtggtgatcctactggattcaattactcgtctagcgcgtgcctacaacactgtggttcctgcatcaggtaaagtactgaccggtggtgtggatgcgaacgcattgcatcgtcctaagcgtttctttggtgcggcacgtaatgtagaagaaggtggtagcttgaccatcatcgctactgcactggttgataccggttctaagatggatgaagtgatttatgaagagttcaaaggtacaggtaacatggaactgcacttgaaccgtaagattgctgaaaaacgtgttttcccagctatcgacttcaaccgttcaggtacgcgtcgtgaagagttactgactaagaccgatgagctacaaaagatgtggattctacgcaagatcgttcacccaatgggcgaaaccgatgcgatggaattcctgattgataagttagccatgaccaaaaccaacgatgagttctttgacgcgatgcgtcgacagtaa

SEQ ID NO: 40820 - DNA, 711 bp, Vibrio cholerae
atgataattcaatgccaagttaagtctgtgcagccgctggcgacgcatacttaccaaatcctattacaacccgagcacgcggtggcttaccaagccgggcagtatttaatggtggtgatgggcgaaaaagataagcgaccattttcacttgccagtagtccttgccgtagcaatggcgagctcgaactgcatattggtgcggcggatcacagcgcctttgcccaccaagtcgtggaaaaatttcagcaagcccatcttaatcagacatgggttgaagtagatgtgccacatggcaatgccgcattacaagagagtgagcgacctctactcttaatcgctggcgggaccggctttagctatgtgcgttccatcttagatcattgcctctcgcaaggtaaaactcagcctatctacctgtattggggcgcgcgtgatgcagctcagctgtacgcactgaatgagttgcaagagcttgccaagcaacatgctcatttgcaggttgttccagtggtcgagcaagcacaagatgactgggctggaaaagttggcaatgtactgcaagcgattaacaacgactttgcaagtttagaagcatttgacatctatatagcaggtcgctttgagatggctggagccgcacgtgagcaatttactcaaaacaaacaagctcgacgcgatcgaatgtttgccgatgcttacgcctttatttaa

SEQ ID NO: 40821 - DNA, 1074 bp, Vibrio cholerae
atggccagtttaagttatccaaagacgaccatgcaaattcaactcggtgcgaacctcaaaccctaccacacctttggtattgaacagttagctgctcaattggtcgtggcggaatcgattgacgatcttaaggcgctctattgctcagctgaatgggctagcctacctaagcttattataggcaaaggcagtaatatgctttttacttgtcactatacaggtatgatagtggttaaccgcctcaatggtatagagcatcaacaagatgatgattaccatcggctgcatgtggccggtggtgaagattggccttcactcgtaagttggtgtgtggagcaggggatcggcggtttagagaatcttgctttgatccctggctgtgctggctctgcaccaatccaaaatattggcgcgtatggcgttgagtttaaagatgtttgtgattacgtcgagtacttatgcctagagactggcacagtgaagcgtttgacgatggaagagtgccaatttgggtaccgtgactccattttcaaacatcagctttatcaaaaagcagttgtgactgcggtagggttaaaattcgctaaagcttggcagccgattatccaatacggcccactaaaagatttgtcctcggactgtgctattcatgatgtgtatcagagagtttgcgctacgcgaatggaaaaactgcctgatcctgctgtgatggggaatgcgggcagtttctttaaaaaccctgtgatcagtcagcaagcctttgctcgactgcaaattgagcatcccgatgtggtggcatatccagctgaacaaggggtcaaggtagcggccggatggttgattgatcaagcgggtttgaaaggtcaccaaatcggaggagcgaaagttcaccctaaacaagctctggtgatcgttaatacgggtgatgcgagtgcgcaagatgtactcatgctggcggctgatattcagcagcgcgtgttcaactgctatggcattgaacttgaacatgaagtgcgatttattggcgaaagtgaagaaaccaatttaaagcaatggatgagtgaacaagcatga

SEQ ID NO: 40822 - DNA, 1185 bp, Vibrio cholerae
atgtctaaagagaaatttgaacgtacgaaaccgcacgtaaacgttggtactatcggccacgttgaccacggtaaaacaactctaactgcagctatctgtactgtacttgcaaaagtatacggcggtaaagctcgtgacttcgcgtcaatcgacaacgcaccagaagagcgtgagcgtggtattacaatcaatacttctcacgtagagtacgatactccaaaccgtcactacgcacacgtagactgtccaggacacgcggattatgttaagaacatgatcaccggtgcagcacagatggacggcggtatcctagttgtagcggcaactgacggtcgaatgccacaaactcgtgagcacatcctgctgggtcgccaagtaggtattccttacatcatcgtattcatgaacaagtgtgacatggttgacgatgaagagcttctagagctggtagagatggaagttcgtgagctgctgtctgagtacgatttcccaggtgatgacctgccagtaatccaaggttcagcactaggcgcgctaaacggcgaagcacagtgggaagcgaagattgttgagctagcagaagcactggatacttatattccagagccagagcgtgcagtagacatggcattcctgatgccaatcgaagacgtattctcaatccaaggtcgtggtacagtagtaactggccgtatcgagcgcggcatcctgaaagtgggtgacgaagtagcgatcgttggtatcaaagagacagtaaaaacgacctgtacaggtgtagagatgttccgtaagctgcttgacgaaggtcgtgcaggtgagaacgtaggtgcactactacgtggtactaagcgtgaagaagtagagcgtggtcaagtactggcgaagccaggttcaatcacaccacacactaagttcgaatcagaagtatacgtactgtcaaaagatgaaggtggccgtcatactccattcttcaaaggttaccgtccacagttctacttccgtacaactgacgtaacaggcagcatcgagctaccagagggcgtagaaatggtaatgccaggcgacaacgtgaagatggttgtagacctgattgcaccaatcgcgatggacgaaggtctacgcttcgctatccgtgaaggtggccgtactgtaggtgctggtgttgtagctaagatcatcgcttaa

SEQ ID NO: 40823 - DNA, 549 bp, Vibrio cholerae
atgagtgaagctcccaaaaaacgctggtatgtagttcaagccttctcgggatttgaaggacgtgttgctcagtcacttcgtgaacatatcaaaatgcacggtatggaagagctgtttggtgaagtgttagtaccaacagaagaagtggtagaaatgcgcgctggccaacgccgcaaaagtgaacgtaaattcttcccaggttatgtgctagtgcagatgatcatgaatgatgaatcttggcacttggtacgtagcgtacctcgcgtgatgggattcatcggtggtacatcagatcgcccagctcctatcacagataaggaagcggatgcgattctgaatcgtcttgagaaagccagcgaagcaccacgtcctaaaaccatgtttgaagcaggtgaagtcgtgcgtgttaacgacggtccatttgctgacttcaacggtaccgttgaagaggtggattacgagaaaagccgcttgaaagtgtcggtttcgatctttggtcgtgcaacacctgttgaactcgaatttggtcaagtggaaaagcttgattaa

SEQ ID NO: 40824 - DNA, 429 bp, Vibrio cholerae
atggctaagaaagttgaagcttatgtaaagctgcaagttgcagctggcatggcaaacccaagtccaccagttggtcctgctctaggtcaacgcggtgttaacatcatggaattctgtaaagcgttcaacgcacgtacagaatctctagagaaaggtctaccaatcccagtagttattactgtgtacagcgaccgttctttcacgttcgaaactaagactccaccagcatctgttcttctgaagaaagcagctggcatcaagtctggttctgcacgtcctaacactgctaaagtgggcacaatcactgacgctcaaatccaagaaatcgctgcgactaaagcagctgacatgactggtgctgatatcgaagcgatgaagcgttctatcgcaggtactgctcgctcaatgggcctagtggttgagggttaa

SEQ ID NO: 40825 - DNA, 702 bp, Vibrio cholerae
atggcaaaactaactaagcgtatgcgtactatccgcgcaaaagtggatgtaactaaagagtacgacatcaacgaagctgttgctctgctgaaagagctggcaactgcgaagttcgttgaatcagttgacgttgctgttaacctgggtatcgatgctcgtaaatctgaccaaaacgttcgtggcgctactgtactgccacacggtactggccgtgacatccgcgtagcggtattcactcaaggtgctaacgctgaagcagctaaagcagctggtgcagaactggttggtatggaagatctggctgatctcgtgaaaaaaggcgaaatgaacttcgacgtagttatcgcatctccagatgcaatgcgcgttgttggtcaactaggtactatcctaggcccacgtggtctgatgccaaacccgaaagttggtactgtaactcctaacgttgctgaagcggttaagaacgcgaaagcaggtcaggttcgttaccgtaacgacaagaacggtatcatccataccactatcggtaaggtgacgttcgaagcagaccaactgaaagagaacttagaagctctgctggttgctctgaagaaagcaaaaccatcttctgcgaaaggcgttttcgtgaagaaggtaagcatctctactactatgggtgctggcgttgctgtcgatcagaatactctgagcgcacaagtttaa

SEQ ID NO: 40826 - DNA, 489 bp, Vibrio cholerae
atggctttaaatcttcaagacaaaaaagcaattgttgctgaagtcaacgaagcggccagtggtgcactttctgcagttgttgctgactctcgtggtgttcaagttgctgcgatgactaatctgcgtaaacaagctcgtgaagcgggcgtttacctgaaagttgttcgtaacacactggcacgtcgcgcagtagaaggcacagcttacgaatgtctgaaagacgtattcgtaggccctactttgatcggcttctctaacgagcacccaggtgctgcagcgcgtcttttcaaagacttcgctaaagagaacaaagcattcgagatcaaagcagctgcatttgaaggtgtactgactgaccctgaagtactagcgacactaccaacttacgacgaagcgattgcacgcctgatgatgtgcatgaaagaagcttctgctggcaagctggttcgtacaatcgctgctgtccgcgatcaaaaagaagctgcataa

SEQ ID NO: 40827 - DNA, 366 bp, Vibrio cholerae
atgtctattactaacgagcaaatcctagacgctattgcagaaatgtctgtaatgcaagttgttgaactgatctctgctatggaagagaagttcggtgtttctgctgctgctgcagttgtttctggtccagctgctgctgctgcagttgaagagcaaactgaattcaacgtaattctggctgctgctggcgcgaacaaagttgctgttatcaaagcagtacgtggcgcaactggcctaggtctgaaagaagctaaagctcttgtagacggcgctccagcatctgttaaagaagctgtatctaaagaagaagcagaagcactgaagaaagagcttgaagaagctggtgcaactgttgaagttaagtaa

SEQ ID NO: 40828 - DNA, 4128 bp, Vibrio cholerae
atgaattcacactacagtaaacagcgattagtcactgtcctcaccctttttaacctgaaaggtggacagtttgggtcacttatcagcgagctgaggaaccccatggtttactcttataccgagaaaaagcgcatccgtaaggactttggtactcgtccacaagtgttggacattccatacctgctatcgatccagctcgattcgttcgaaaagttcatcgaacaggatcctgaaggacaatacggtcttgaagccgcttttcgttctgtatttccaattcagagctataacggcaattcagagctgcaatacgttagctaccgtcttggtgagccagtttttgacgttaaagaatgtcaaatccgtggtgtaacttattcaaaaccgctacgcgtgaaattacgcttagtgatctttgataaagacgcgccagcaggtactgtcaaagatattaaagaacaagaagtctacatgggcgaaattccgctcatgacagaaaatggtaccttcgtaatcaatggtactgagagggttatcgtatcccagctgcaccgaagcccaggcgtgttcttcgacagcgataagggtaagacccactcttcaggtaaagttctgtataacgcacgtatcattccgtaccgtggttcatggctcgattttgagttcgatccaaaagacaacctgtacgtacgtattgaccgtcgtcgtaagctgcctgcatcgatcatcctgcgtgcactaggtaaaactagcgccgagatcctggacatcttcttcgaaaaagtgaatttcgaagtgaaagatcaaactctaatgatggagttggttccagagcgtctgcgtggtgaaactgcgaccttcgatatcgaagcggatggcaaggtttacgtagagaaaggccgtcgtgtgactgcacgtcacatccgtcaacttgaaaaagatggcgtgaactttattgaagttccggttgagtacatcgtaggtaaagtatctgcgaaagattacgtgaatgaagcgactggcgaactgatcattaccgcgaaccaggaaatcagcctggaagcgctagcgaacctgtctcaagccggttacaaaaagctagaagttctatttaccaatgatctggaccacggtccgttcatgtcagaaaccctgcgtgttgatagcacgacagatcgcatctctgcactggtagaaatctaccgcatgatgcgccctggcgagccaccaacgaaagaagccgcggaatcgctgtttgaaagtctattcttctctgcagagcgttacgatctgtcgactgttggccgtatgaagttcaacagctcaatcggtcgtgaagatgcggaagagcaaggcacgctggacgaagttgacatcatcgaagtgatgaaaaagctgatctcgattcgtaacggtaaaggcgaagtggacgatatcgaccaccttggcaaccgtcgtatccgtagtgtcggcgaaatggcagagaaccaattccgtgttggtctggtacgtgttgaacgcgcagtgaaagaacgcctaagcttgggcgatctggacaacgtgatgccacaagacctgatcaacgcgaaaccaatttctgctgctgtaaaagaattctttggttcttctcagctgtctcagtttatggatcagaacaacccgttgtcagaagtgacgcataagcgtcgtatttctgcattgggccctggcggtctgactcgtgagcgtgctggcttcgaagtacgtgacgtacacgtaacgcactacggtcgtctatgtcctatcgaaacacctgaaggtccaaacatcggtttgatcaactcgctgtctgcgtttgcacgctgcaacgagtacggtttcctagaaaccccttaccgtcgcgtagtcaacggtgttgtgactgacgaagtggattacctctctgcgattgaagaaggtcaattcgttatcgctcaggcgaacgctaagctgacagaagaaggcggttttgctgatgaactggttaccgcacgtcaaaaaggcgagtcaggtcttcacccacgtgaacacgttgactacatggacgttgcgacaaaccaagttgtatcgatcgcggcatccttgatcccgttcctagaacacgacgatgcgaaccgtgctttgatgggtgcgaacatgcaacgtcaggcggttccaactctgcgttcagagaaaccactggttggtacgggtatcgagcgtaacgtagcggttgactctggtgtaacagcggtggcgaaacgtggcggtgttatccagtcagttgatgcttctcgtatcgtagtcaaagtgaacgaagaagagttgatccctggcgaagcgggtatcgacatctacaacctgactaagtacacccgttcgaaccagaatacttgtatcaaccagcgtccatgtgtgatgccgggtgaacctgtagctcgtggcgatgtactggcagacggtccttcaactgaccttggcgaactggctcttggccaaaacatgcgtatcgcattcatgccttggaacggttacaacttcgaagactcgatcttagtgtctgagcgcgtagttcaagacgaccgctttactactatccacatccaagagctttcttgtgtggcgcgtgatactaagctgggcgcagaagagatcacggctgacatccctaacgtgggtgaagcggctctgtctaagcttgacgaatctggcatcgtgtacatcggtgcagaagtgaaaggcggcgacattctggttggtaaagtgacaccaaaaggtgaaactcaactgactccagaagagaaactgctgcgtgcgatcttcggtgagaaagcctcagacgtgaaagatacgtctctgcgtgtaccgaactcagtagcaggtacggttatcgacgtacaagtctttactcgcgatggcgtagaaaaagacaagcgtgcgcttgaaatcgaacagatgcagctgaaagaagcgaagaaagacctgactgaagagttccaaattctggaaggcggtcttctggcgcgtgttcgttctgtactgctggcgggtggttacactgaagcgaaactgggttcaatcgaacgtaagaaatggttagagcagacgcttgaaaatgaagagctgcaaaaccagctagagcaactggcagaacagtacgacgaactgaaagcagacttcgataagaagtttgaagcgaagcgtcgtaagatcacccaaggtgatgatctggctcctggcgtactgaagattgttaaggtttacctagcagtgaaacgtcgcatccagccgggtgataagatggcgggtcgtcacggtaacaagggtgttatctctaagatcaaccctgttgaagacatgccatacgatgaaaacggtcagccggttgacatcgtactgaacccactgggcgtaccatcacgtatgaacatcggtcagatcctagaagttcacttgggtctggcggcgaaaggtatcggtgacaagatcaaccaaatgatcaaggaacaacaagagctggcgaagctgcgtgagttcctgcagaaggtttatgatctaggcgatactcgtcaacgcgttgatatctcagaactcagtgatgaagatgttcgtacactggcgcataacctgcgtgctggtctaccggtcgcaacgccagtcttcgatggtgctcctgaatcgtctatcaaagctatgttggaactggcggatctgccagcttcaggtcagttgactctgttcgatggccgcacgggtgacgcatttgagcgccctgttaccgtgggttacatgtacatgctgaaactgaaccacttggttgacgacaagatgcacgctcgttctacaggctcttacagtctggttactcagcaacctctgggtggtaaagctcagttcggtggtcagcgcttcggtgagatggaagtgtgggcactggaagcatacggtgctgcgtataccctgcaagagatgttgaccgttaaatcggacgacgtgaacggccgtactaagatgtataagaacatcgtagatggcaatcacgcgatggaacctggtatgccagaatcgttcaacgtactgttgaaagagattcgctcgctgggtatcaacatcgagctagaagacgaataa

SEQ ID NO: 40829 - DNA, 4206 bp, Vibrio cholerae
gtgaaagacttattaaactttctaaaagcacagcataagaccgaagaatttgatgcgatcaaaatcggtctggcttcaccagacatgatccgttcatggtcttttggtgaagtgaaaaaacctgaaaccatcaactatcgtacgttcaagcctgagcgtgatggtctgttctgtgcgcgtatttttggcccggtaaaagactacgaatgtctttgtggcaaatataagcgtctgaaacaccgtggtgtgatttgtgagaagtgtggcgttgaagtcacccaaactaaagttcgtcgtgaccgtatgggccacatcgaactggcttctccagttgcgcacatctggttcctgaagtctctgccatctcgtatcggtctactgatggacatgcctctgcgtgacatcgaacgcgtactttactttgaaatgtacgtagtgactgagccaggcatgactgaccttgaacgtggtcaaatgctgactgaggaagagtacctcgaccgtttggaagagtggggcgatgagttcaccgcgaaaatgggtgctgaagcgatcaaagatctgctggcatcgatggatctgcctgcagaagcagagcagatgcgcgaagagctggataccactaactctgaaaccaaacgtaagaaactgactaagcgtctgaagctggttgaagcgttcgtcgcatcaggtaacaaacctgaatggatgatcctgactgtactaccagttctgccgcctgatctacgtccattggttccactggatggcggtcgtttcgcaacgtcggatctgaacgatctgtaccgtcgcgtcatcaaccgtaacaaccgtttgaagcgtctgcttgaactggcggcaccagacatcatcgtacgtaacgaaaaacgtatgctgcaagagtctgtggatgcgctgctggataacggccgtcgtggtcgtgcgatcacgggctcgaacaagcgtccgctgaagtctctggctgacatgatcaaaggtaagcaaggtcgtttccgtcagaacctgctgggtaaacgtgttgactactcaggccgttcggttatcaccgtaggtccatacctgcgtctgcaccagtgtggtctaccgaagaaaatggctcttgagctgttcaaaccattcatctacagcaagctggaaactcgtggcctagcaacgacgatcaaagccgctaagaaaatggttgagcgcgaagaagcggtcgtatgggatatcttggatgaagtgatccgcgaacacccagtgctgctgaaccgtgcaccaacacttcaccgtttgggtatccaagcgtttgaaccggtcctgatcgaaggtaaagcgatccaactgcacccactagtgtgtgcggcgtataacgcggacttcgacggtgaccaaatggcggtacacgttcctctgacgcttgaagcgcagttggaagctcgtaccctgatgatgtcaaccaacaacattctgtcgccagcgtcaggtgatccaatcatcgtaccgtctcaggacgtggtactgggtctgtactacatgacccgtgaaaagatcaatgcgaaaggcgaaggtatgtacctgactggtcctgctgaggctgagaaggcgtaccgtactaagactgctgagctgcacgctcgcgttaaagtacgtattaccgaaaccatcaagcatgaaaacggtaagctgaccactgaaaccaagatgattgacacgaccgttggccgtgccatgttgtggcaaatcgtaccgaaaggtctgccatacagcttggtgaaccagaagttaggtaagaagcaaatttctaacctgctcaacgaggcataccgtaagctgggtctgaaagacaccgttatcttcgctgaccaaatcatgtacaccggtttcgcttacgcggcactgtctggtgtatcggttggtatcgacgatatggtagttccagcggctaagtacacggaaattgctgaagcggaagaagaagtacgcgaaattcaagagcagttccagtctggtctggtgaccgctggcgaacgctacaacaaagtgatcgacatttgggcatcaaccaacgatcgcgtagcgaaagcgatgatggaaaacctctcttctgagcaggtgattaaccgtcaaggcgaacaagaaaaacaagagtcgttcaacagcatctatatgatggccgactcaggtgctcgtggttctgctgctcagatccgtcagttggcgggtatgcgtggtctgatggcgcgtccagatggctcgatcatcgaaacgccaatcacggcaaactttaaagaaggtctaaacgttcttcagtactttatctcaacgcacggtgctcgtaagggtctggcggatacggcactgaaaacagcgaactccggttacctgactcgtcgtctggtagacgtagcgcaagacgttgtggtgactgaacatgactgtggcaccctagaaggcgtggtgatgacaccgcacatcgaaggtggtgacgttaaagtcgcactgactgaactggcactgggccgtgtggtatcagaagatatcctcaagccaggtacagatgaagtgttgatccctcgtaatacactgctggatgaaaagtggtgtaaggtgatcaacgataactctgttgaccaaatcaaagtacgttcagtggtaacttgtgattctgacttcggttgttgtgcgcagtgttacggtcgtgacctagcacgtggtcacttggtgaaccaaggtgaagcggtcggtgttatagcggcacagtcaatcggtgagccaggtacacagctgacgatgcgtacgttccacatcggtggtgcggcatcaacagcagcagcagaaaacagcatccaagctaagaacaacggttctgtgaaactgcacaatgcgaagttcgtaaccaataaagatggcaagctcgttatcacctctcgtgcttctgagctgaccatcattgacgaatttggtcgtaccaaagagaaacacaaactgccatacggctctatgctgagcaaagccgatggtgatgcagtggctgcgggcgaaaccgtagcgaactgggaagcgcataccatgccaatcatcactgaagtggcaggtcgcgtacagtttgtggatatgatcgatggcgtaaccgtttctcgtcaaacggacgatctgactggtctgtcttcaagtgaagtgactgaagccgcagcgcgtcctgcagcaggtaaagatatgcgtccagccattaaactggttgacgcaaatggtaaagatgtcctgatcccaggtactgacatgccagctcaatacttcctgccaggtaaagcgattgtgaacttggacgacggtgctgaagtgaatgtgggtgatacactggctcgtattcctcagaagtctggcggtaacaaggacatcaccggtggtctaccacgcgttgctgacctgtttgaagcgcgtaagccaaaagagcctgcgattctggctgagcactcaggtaccgtatcgttcggtaaagagactaaaggtaagcgtcgtttgatcatcactcgtgacagcggtgacacttacgaagagatgatccctaaacatcgtcaattgaacgtgtttgaaggtgagcgcattgagcgtggtgatgtgattgcggacggcccagagtcgccacatgacatcctgcgtctgcgtgggatccatgcagtgaccacttacatcgcgaacgaggttcaggaagtttaccgtctacaaggcgttaagattaacgataagcacatcgagactatcgttcgtcaaatgctgcgtaagtgtacgatcaccttcgcgggtgactcagagttcttgcctggcgagacagttgagtactcacaagtgaagatcgcgaaccgtaaactggttgaagaaggcaaagagccagctcgtttcgagcgtgagttgttgggtattaccaaagcatctctggcgactgagtctttcatctcagcagcatcgttccaagaaaccactcgcgttctaacggaagcagcggtatctggtaagcgtgacgatctgcgcggtctgaaagagaacgtgatcgttggccgtctgatcccggctggtacaggttttgcgtaccaccaagatcgtcaagccaaacgtgcacaagaacagcaaggtccatcggctgaacaagccactgacaacctcgctgcactgttgaatgcaggtttctcttctgacgacgagtaa

SEQ ID NO: 40830 - DNA, 1746 bp, Vibrio cholerae
atgcgaccttttgagtcagttggagttatgttgaacgttagccgttttgtattcttactctttggattcgttttactcgcgatcgctcctcaaacttgggcgaacgttttggaaggcgtgcgcgtgtggccttctcctgatgagacacgagtggtattagatgtcaaatccgaggtggattacagctactttaccctcagctctcctgagcgcttggtggttgacctcaaacagagcacctctcgcgctaagttaccggttaatgtcactgaaagtggcattttatcgaaagttcgcgcttcatctccccctgaaaaaagtacatttcgtttggtgtttgagctcaaacaaaaaacaacgccaactttatttaaattggctccgacacccggtggtcaatatggccatcgtttagtcattgatatgccacatggcaaagtgagtgagagctcttccgccagcacgccgagttcacccgctcaagtcagtaaagatgcctctcaactcttagggaatgacgatattgtggtggcgattgacgcgggacatggcggtgaagatcctggttccattggtcctacacgcaaatatgaaaaagacatcaccttgagcgtgtctaaaaagttggcggatcaactcaatgcagtgccgggaatgaaagcggtactgactcgccgtggtgactattttgtaaatctgaataaacgtacggaaattgcgcgtcgtagcaaggcgcacttgttggtttcggtgcatgcggatgcgtttcatactccacagccgcgcgggggatcggtgtttgtgctgaatacccgccgtgccaataccgaaattgcccgttgggtggaaaatcacgagcaacaatctgaattgctgggcggtgctggcgaagtactttcgaaaaccaataacgatcgtaacgtgagtcagaccctactggatctgcagtttagccattcgcaaaaagagggctataaagtcgcgacgaatattttgcgtgaaatgggcaaggtggcgcatctgcataaaaccgaacccgttaatgcaagtttggcggtattgaagtcaccagacatcccatcggtactggtggaaacaggctttatctctaacccatcagaagaaaaattgctgattcagcgcagtcatcaagataagttagctcgcgctttagccacggcgattgtgcagtactttgaagataatccgccagagggcacactgtttgccaaccgaggtaaagctcagaaacacaaagtgcagcgtggagaatcaattggtctgattgctaaccagtatggggtcagtgtcgatgctttgaaaaaagccaacaacctcaagtcttcgacgatttcggttgggcaactgctgactattccagcttcttcagcaccaaacccagtacctgttcctgtgatggcaaatcctgtagaaacggaaactattacccatgtggtaaaaacgggcgattttctcggtaaacttgccaccacctataaggtttcagtggcttcgataaaaaaagagaacaatctgaaatcggatactctagtgctcgggcagaagctgaaaatcacggtgagtttaaaagataagccgctgcgtaagcacaaggtgcagcgcggtgaattcctgagcaaaatcgctgatcaatacaatgttagcgttgatagcattcgccaagccaaccagctacgcactgaccaattgttggttgggcagcaactgattatcccgaataaataa

SEQ ID NO: 40831 - DNA, 1962 bp, Vibrio cholerae
atgacgattcgaatcctacccgcccgtttagccaaccaaattgcagcgggtgaagttgtagaaagaccggcttcagtagtcaaggagttggtggaaaacagtttagatgctggagccactcgaattgatattgatctcgagaaggggggcgctaagctcattcgtattcgcgataatggttcgggtattgataaggacgaactagggcttgcgctgagtcgtcacgcgacctctaaaattcacaccctcgatgatctggaagcgatcatgagccttggttttcgtggcgaggccttagccagtattagctcagtctcacgcttaacccttacttcgcgcacggtagctcaagaagaagcgtggtctgcctacagtgaaggccgtgatatggcggtcaagttacagcccgcggctcaccccgtgggtacgactgtggaagtgctggatctctttttcaataccccggcacggcgtaaatttctgcgcaccgaaaaaaccgaatttacccatattgatgagctgctcaaacgaattgctctgagccgttttgatgtcagctttactctgcgccataacggaaaaatcgtgcgtcagtatcgcgctgcaacgactttaccgcagcaggaaaaacgtttagctgcggtgtgtggcaacccgtttgtgcaacatatgttacgcattgagttagagcaccaagggcttaaactgcatggctggatcaccacacccgaaggagcgcgccagcagagcgatctgcaatactgttacgtaaacggccggatgatgcgtgataagctgatcaatcatgcgattcgccaaagctacgaaaccagcttacgtgtcgatcaatttgctacctatgtgctgtttattgaactcgatcctcatcaagtggatgtcaacgtgcatccagccaagcatgaagtgcgcttccatcaagctcgcctcgttcatgatttcatctatcaagccttaagcagtgcgctagtacaaggtgcgcaggtgatggctccgaccattaatgaaggggcgtttcatttacctcactgcgcggaagaggtgaatcctccggttgtgccgatgatcgataccacgcaacaagaaagagtgtggcaagcggtgcaaaatacgccagattatccgcgcaaagctccacgtgataacgatagggatgagagcgataatccgcaggttagagagcgagcggtcagtaatccttgggtggcttcacccaagactgcaagtactggcaaagaaagatatggttcggcatccgtcagcaaaaaagaggccgcggtttatcaaaccttgatgcaaactcccgatttatcggatgaagaaccgagtactgccagtaccatcgtctcatcaattgaagccgtcaaggctaatattgctatcgaaaaactgggtaaagcgatccaagtggtcgcgggacagtacctgttgatgagtagcccacaaggctgtgtgcttatctcgctataccaagctcagcaactcaaactgcgtggattactcaatgctcagcatggtgcgctgaaagcgcagccactgctggtgccactcgcgctaaaactgaatgaatctgaatggcaagtggcgcagcgtcattcatcggccctgttgcaactgggtattgagctgaaatcgcgcaccaatcacagcattatggtgatggcggttccgcagccgctgcgccagcaaaatttacagcaattgctgccggatctgttatcttacgcggcgagttgttcggaaagccaagccttgagccatcaagcgttggcggattggttaactcaacgcatcgttgtagaaaaaagagactacactttagccgaggcgatcggcttgatcgcagagctggagcagctctggcaaggcaacttgcctttgcaagacccgcattttattactttggtggatttttccgcctcaattacagcattacactcatga

SEQ ID NO: 40832 - DNA, 1188 bp, Vibrio cholerae
atggcgtggaatgagcctggtaataataacggcaacaatggccgcgataatgacccatgggggaacaacaatcgcggtaacaaaggtggccgagatcaaggaccgccagatttagacgaagtgtttaataaactgagtcaaaagctggggggcaagtttggtggcaaaggtggtaaaggcccttcgttttccggtggcggtgcgattggctttggtgtcattgcagctatcgctgttgcggtttggttctttactggtttttataccatcggtgaagctgagcgcggcgttgtgctacgccttggcaaatacgaccgcattgttgatccgggtctgaactggcgtccacgctttattgatgaagtgacaccagtcaacgtgcaagcgattcgctctctgcgcgcctctggcttgatgctgaccaaagatgaaaacgtggtaacggtatcgatggatgtgcaatatcgtattgccgatccatacaaatacttgtatcgcgtgaccaacgcggatgacagcttgcgtcaagcaacggactctgcgcttcgtgccgtagtcggtgactcactgatggatagcatcctaaccagtggtcgtcagcaaattcgccaaagcacgcagcagacactcaaccaagtcatcgatagctatgatatgggcttgatgattgttgatgtgaacttccagtcggctcgtccacctgagcaagtaaaagatgcctttgacgatgcgattgcagcccgtgaggatgaagagcgtttcattcgcgaagcggaagcttacaagaacgaaattttgcctaaagccacaggccgtgctgagcgtctgaagaaagaagcgcaaggttacaacgagcgcaccatcaatgaagcgctcggtcaggttgctcagtttgaaaagctgttgcctgagtatcaagctgcaccgaaagtaacccgtgaccgtctctatttggatgcgatggagcaggtgtatagcaatacttcaaaagtactgattgattctgaatcgagcggtaatctgctttatctgccgattgataagttagcgggtcaagacaataaaacggcgcagccgcgtccaaataagtcttcatcagcctacgatcaaattgagcttgaatcacaaacgacagaaacgaataccgacactcagtcgcgtagcaccacacgtcaagggagatactaa

SEQ ID NO: 40833 - DNA, 276 bp, Vibrio cholerae
atgctacatattgttaagcacttagaaaaactccctttgcttagtgcttatttactcgatggtgatgttgttctattgacggagaatgctgtctacgcggcggcagtacattcaccatatcaagcgagtattaacgatcagaacctatggttggtgctttatgaggatctgcatgcgcgtggttggctagaaaagtgcgatccgcgtatttcggttgtcaccatgagtgactttgttgatttgacagtaactcatgataaatcaataacctggtag

SEQ ID NO: 40834 - DNA, 375 bp, Vibrio cholerae
atggcaactattaaccagttggttcgtaagccacgtgctaagcaagttgttaaaagcaacgtgccagcactagctgcgtgcccacaaaaacgtggtgtatgtactcgtgtttacactactacacctaaaaaacctaactcagcacttcgtaaagtatgtcgtgtacgcctaactaacggttttgaagttacttcatacatcggtggtgaaggtcacaacctacaagagcacagtgttgttctgatccgtggtggtcgtgttaaagacctcccaggtgttcgctaccacacagttcgtggtgcacttgactgtgcaggcgtgaatgaccgtaaacaagctcgttctaagtacggtgtgaagcgtcctaagtcttaa

SEQ ID NO: 40835 - DNA, 471 bp, Vibrio cholerae
atgccacgtcgtcgcgtcattggtcagcgtaagatccttccagatccaaagttcaaatctgaactgctggcaaaattcgttaacatccttatggttgacggtaaaaaatctactgcagagaaaatcgtttacactgcactagacaccatggctgagaaatctggtaaagatcacttagctgtatttgaagaagctcttgaaaacgttcgcccagcggtagaagttaaatctcgccgtgttggtggttcaacttaccaagtgccagttgaagtacgtccagtacgtcgtaatgctctggcaatgcgttggttggttgaagctgcgcgtaagcgtggtgaaaaatctatggctgctcgtctagctgctgaaatgctggatgcggctgaaaacaaaggttctgctgttaagaaacgtgaagacgttcaccgtatggcagaagcgaacaaagcgttcgctcattaccgctggtaa

SEQ ID NO: 40836 - DNA, 2097 bp, Vibrio cholerae
gtggctcgtaaaactcctattgagcgctaccgtaacatcggtatctgtgctcacgtagatgcaggaaaaacaaccactactgagcgtattctgttctacactggcctctctcacaaaattggcgaagttcacgacggtgctgcgactatggactggatggtccaagagcaagagcgtggtattaccattacctctgcggccaccaccaccttctggcgtggtatggaagcgcaattccaagaacatcgcatcaacatcattgatacccctggacacgttgactttacgatcgaagtagagcgttcacttcgtgtgcttgatggtgcagtggtcgtattctgtggcacatcaggtgttgaacctcagtctgaaaccgtttggcgtcaagctgacaaatacggcgttccacgcatggtattcgtcaacaaaatggaccgtgccggtgcagatttcttacgcgtagtaggccaaattaaacatcgtcttggtgcgaaccctgttcctatccaactcaacattggtgcagaagaagagttcaaaggtgtcatcgaccttatcaagatgaaagccatcaactggaatgaagccgatcaaggcatgagcttcacttatgaagaaattcctgcggatatgcttgagcttgcccaagagtggcgtaaccaccttgtggaagccgcagccgaagccagtgaagagttgatggaaaaataccttgaagatggtgaacttagcgaagtagagatcaaacaagctctgcgtcagcgcaccatcaataacgaaattgttctcgcagcttgtggtagtgcatttaagaacaaaggcgtgcaagcagttctggatgcggtgattgagtttctaccatcaccaaccgatgttcctgcgatcaaaggtattgatgatcgagaaaacagtgttgagcgtcatgctgacgataacgaaccgttttcttcactcgcgtttaagattgctaccgatccttttgttggctcgctgacctttattcgcgtctactctggagtggttaactcgggtgatgcggtttataactcagtgaagcaaaagaaagagcgctttggccgtatcgtacagatgcatgctaacaagcgtgatgaaatcaaagagattcgtgcgggtgacatcgctgcggctatcggcctgaaagatgtgactacgggcgatactttgtgtgatccgaatcatgttgtgattctggagcgtatggagttccctgaaccagtaattcagatcgcagtagagcctcgctctaaagctgatcaggaaaaaatgggtattgctttaggtaaactcgcagcagaagacccatcattccgcgttgagactgacgctgagacgggtcaaacgctgatttctggtatgggtgagcttcacctagatattatcgtcgatcgcatgaaacgtgagtttggtgtcgattgtaacgtaggtaaacctcaggtggcttaccgtgaaaccattcgtggtaaatcggaagtggaaggtaagttcgttcgtcagtcaggtggtcgtggtcaatacggtcacgtatggctgaaaattgaacctgctgagcctggtcaaggttttgtcttcgttgacgcaatcgcgggtggtgtgattccaaaagaatttatcaacccagttgcgaaaggtatcgaggagcaaatgaacaacggtgtgttagcgggctatccagtgctggatgtcaaagctaccctgtttgatggttcattccacgatgtcgactccagcgaaatggcgtttaaaatcgctggttctatggcattcaagaaaggtgcgcttgaagctcaacctgttcttcttgagccgttaatgaaagttgaaataaccactccagaagactggatgggtgatgttgtgggtgacttaaaccgtcgtcgtggcatcatcgaaggtatggatgaaggccctgcgggactgaaaatcatccacgctaaagtcccattgtctgagatgtttggttatgcaactgacctgcgttctgccacacaaggccgtgcttcttactctatggagtttgctgagtacgctgatgtgccgaaaaatattgctgacgcaattatcgcagagcatggttaa

SEQ ID NO: 40837 - DNA, 1185 bp, Vibrio cholerae
gtgtctaaagaaaaatttgaacgtacgaaaccgcacgtaaacgttggtactatcggccacgttgaccacggtaaaacaactctaactgcagctatctgtactgtacttgcaaaagtatacggcggtaaagctcgtgacttcgcgtcaatcgacaacgcaccagaagagcgtgagcgtggtattacaatcaatacttctcacgtagagtacgatactccaaaccgtcactacgcacacgtagactgtccaggacacgcggattatgttaagaacatgatcaccggtgcagcacagatggacggcggtatcctagttgtagcggcaactgacggtccaatgccacaaactcgtgagcacatcctgctgggtcgccaagtaggtattccttacatcatcgtattcatgaacaagtgtgacatggttgacgatgaagagcttctagagctggtagagatggaagttcgtgagctgctgtctgagtacgatttcccaggtgatgacctgccagtaatccaaggttcagcactaggcgcgctaaacggcgaagcacagtgggaagcgaagattgttgagctagcagaagcactggatacatacattccagagccagagcgtgcagtagacatggcattcctgatgccaatcgaagacgtattctcaatccaaggtcgtggtacagtagtaactggccgtatcgagcgcggcatcctgaaagtgggtgacgaagtagcgatcgttggtatcaaagagacagtaaaaacgacctgtacaggtgtagagatgttccgtaagctgcttgacgaaggtcgtgcaggtgagaacgtaggtgcactgctacgtggtactaagcgtgaagaagtagagcgtggtcaagtactggcgaagccaggttcaatcacaccacacactaagttcgaatcagaagtatacgtactgtcaaaagacgaaggtggccgtcatactccattcttcaaaggttaccgtccacagttctacttccgtacaactgacgtaacaggcagcattgagctaccagaaggcgtagaaatggtaatgccaggcgacaacgtgaagatggttgtagacctgattgcaccaatcgcgatggacgaaggtctacgcttcgctatccgtgaaggtggccgtactgtaggtgctggtgttgtagctaagatcatcgcttaa

SEQ ID NO: 40838 - DNA, 369 bp, Vibrio cholerae
atgcgtcattacgaaatcgtattcatggtgcacccagatcaaagcgagcaagttgctggcatgatcgaacgttacactggctcaatcactgaagctggcggtaaaatccaccgtctagaagattggggtcgccgtcaactggcttacccaatcaacaaactgcacaaagctcactacgttctgatgaacgttgaagctgaccaagcagtggttgatgagctagaaactgctttccgtttcaacgatgcagttctgcgtaacatgatcatgcgtactaaagctgctattactgaaccttcaatcatgctgaaagctcgtgaagagcgtgtaaagcgtgacgagatgaagttcgacgcagacgttgagtaa

SEQ ID NO: 40839 - DNA, 303 bp, Vibrio cholerae
atgaccaatcgaatcgagttgagcggcgttgtcgcaaaggctctggttcgaagccaaagtccatcgggtgttaaacattgccatttttggctagagcatcgctctacgatggtagaagctgacctcccaagacaagttttttgtcgattacctgtggtggtgagtggggctaggtcagaagcgttaactcaaaacttagtacaaggcagtagcattttggtaagtggttttttggcttaccaaaccagccgaaatggcgtaggtaaattagtgctgcatgccgacaaaatttctcaaatatag

SEQ ID NO: 40840 - DNA, 228 bp, Vibrio cholerae
atggctcgtttcttccgtcgtcgtaaattctgccgttttactgcagaaggcgtacaagagattgattacaaagacgtagcaactctcaagaactacatcactgaagctggtaaaatcgttcctagccgtatcactggtacaagtgctaaatatcagcgtcagctagctcgtgcaatcaaacgcgctcgctacctagctctactgccatacactgacaaacatcagtaa

SEQ ID NO: 40841 - DNA, 450 bp, Vibrio cholerae
atgcaagttattctacttgataaaatcggtaacctaggcagccttggcgatacagtaaacgttaaatctggttacgctcgtaacttccttatcccacaaggtaaggcagtaatggcaactaaagctaacgttgcaatgtttgaaagccgtcgtgcagagctggaagcaaaagttgctgagcaactggctgccgctcaaactcgcgctgaccaagttaacgctctggaagcagttgttattgcttctaaagcaggtgacgaaggtaaactgttcggttctatcggtactcgtgatatcgctgatgcaatcactgcagctggcgttaaagtatctaagagcgaagttcgcctacctgaaggtgctctgcgcaacgttggtgcttacgaagttagcgttcaacttcactctgaagtgttcgcaactgcaaaagtacaagttgttgctgagtaa

SEQ ID NO: 40842 - DNA, 1407 bp, Vibrio cholerae
atggcagatccacgtactgataatcgaaaccgtaaaattcccgacgcacaagtcgatgcaattaaagtcccaccgcattcattagaagctgagcaatccgtcattggtggcttgctgctggataatgagcgctgggatacggtctcagaacacgtgatgactcaggacttctacagccgcccgcatcgtttgatttttgacggggtaaaatcgattttggaggcgggtaaaccgctcgatctcattaccttgtccgaatatcttgagcagcgtgagcagttggaagatgtcggtggctttgcctatttggccgatttggccaaaaacacgcccagtgctgccaacattaatgcctatgcggagattgtggccgaacgggctttggtgcgtaatctgattggtgttgccaatgagattgccgatgcgggatacgatccacaagggcgcaacgctgaagatttgctggatctggcggaaagtaaagtttttgcgattgccgaagcgcgtaccagtgaaaatgaaggcccgaaaaacgtggatagcattctagagcgcacgctagagcggattgagctgctctacaaaacgccgcaggatggggtcactggagtgaacacgggctttaccgacctgaataaaaagacggctggtttgcaaggctcggatctgatcatcgtcgcagcgcgtccttcgatgggtaaaaccacttttgcgatgaacctgtgtgaaaacgccgcgatggagcaagataaacctgtgctgatcttctcgctggagatgcccgccgaacagatcatgatgcgtatgctggcctcgttatcacgtgtcgaccaaaccaaaattcgtaccggtcaactggatgatgaagattgggcgcgtatctcttccaccatggggattctcatggagaagaagaacatgtacatcgatgatagctcaggcctaacccccaccgaagttcgctcgcgtgcccgacgcattgctcgtgaacacggaggcttgtcgctcatcatggtcgactatttacagctgatgcgtgtaccggcattgaccgataaccgtacactggaaattgctgaaatttctcgctcactcaaagcgttagctaaagaattgaatgtgcccgtggttgcgctttcgcagttgaaccgttctttggagcagcgtgcggataagcgtccagtcaactcggatctgcgtgaatcgggttcgattgagcaggatgctgacttgatcatgtttatctatcgagatgaggtgtatcacccagatagtccgctaaaaggcacggcggaaatcattattggtaagcaacgtaacggcccgattggttcggtgcgtttgactttccaaggtcactattctcgtttcgacaactatgctggacctgcatttgacgatgagtaa

SEQ ID NO: 40843 - DNA, 1128 bp, Vibrio cholerae
atgctggacctgcatttgacgatgagtaattcgatgaactatatgaaggcggccaccgcctacatcaatttagaggcgttgcagcacaacttgcagcgcgttaagcagcaagcgccagagagtaaaatcatggcggtggtgaaagccaatggttatggacacgggctgcgccatatcgcacgtcacgcccttggggcggatgcctttggcgtggcgcgcattgaagaggctttacagctgcgcgccagtggcgtagtgaaacccattttgttgcttgagggattttattctcccggtgatttgccagtattggttaccaacaacatccaaaccgtcgtacattgtgaagagcagttacaagcgctggagcaagctcagctagagactccggtcatggtatggctgaaagtcgacagcgggatgcatcggctaggggttcgccctgaacaatatcaagatttcgtggctcgtttgcaccagtgtgagaatgtggctaaaccactgcgttacatgagccatttcggctgtgccgatgagttagataaatcgacgacggtagagcaaacagaactgtttttatccctgacgcaaggctgtcagggtgagcgttcgctggccgcttctgccggattattagcttggccgcaaagccagcttgaatgggtaaggccgggaattattatgtacggcgtttctccctttgtggaaaagagcgcggttcagttaggttaccagccagtgatgaccttaaagtcgcacttgatcgctgtccgcgaagtgaaagcgggggagagtgtcggttatggcggtacttggaccagccagcgagataccaaaattggtgtgattgcgattggttatggtgatggctatccacgcactgcgccgaatgggacgccagtggttgtcaatgggcgtcgggtgccgattgctgggcgcgtatctatggatatgttgacggtagatttagggccggatgcttgcgatcgcgtcggtgatgaagccatgctgtggggtaatgagctgcccgtagaagaagtggccgcacatattggtacgatagggtatgagttagtgacgaaactcacctcgcgagtggaaatgtcttattatggagcaggcgtttag

SEQ ID NO: 40844 - DNA, 1653 bp, Vibrio cholerae
atgttgaaaaatatcaatccaacgcaaacccaagcttggaaagcgctgaccgcgcattttgaatctgctcaggatatggacctcaaagcactttttgcgcaagacagcgagcgttttgccaaatactctgcgcgctttggtcaggacattctggtcgattattcgaaaaacctagtgaatgcggaaacgatgcaacacttgtttgcgttggctaaagaaacggatctgcaatctgccatcaccgcgatgtttaaaggtgaagcgatcaaccaaacggaagatcgtgcggtactgcacactgcgctgcgtaatcgtagcaattcacctgtgttggtgaacggtgaggatgtaatgcctgcagtaaacgctgtgttggctaaaatgaaagccttctctgagcgtgtgattggcggtgagtggaaaggtttcaccggcaaggcgattactgatgtcgttaatatcggcattggtggctccgatctcggtccttacatggtcacagaagctctggtgccttataagaaccatttgaccatgcactttgtgtcaaacgtcgatggtacacacatggcggagacactgaaaaacgtcgatcctgaaaccaccctcttcttagtggcttccaaaactttcactacccaagaaaccatgaccaacgcccacacggctcgtgattggttcttgaaagcggcaggagatgaagcacatgttgctaagcactttgcggcgctatcaaccaatggtaaagcggtggctgagtttggtatcgacaccgacaacatgtttgaattctgggattgggtaggcggtcgttactcactgtggtcagcgattggtctttctatcattctgtctatcggttacgacaactttgttgagctgctggcgggggcgcatgaaatggatcagcatttcgtgaacacgccgtttgaaagtaatattccggtcattctggcgctgattggcatttggtataacaacttccatggtgctgaatctgaagcgatcctgccttacgatcagtacctgcatcgcttcgcggcttacttccaacaaggcaatatggagtctaatggtaagtatgttgatcgtaatggcaacccagtcacttaccaaacgggcccaatcatttggggtgaacccggtacgaacggccagcacgctttctatcagcttatccaccaaggcactaagctgatcccatgtgattttatcgcgccagcggtgagtcataatttggttggcgatcatcaccaaaagctgatgtctaacttcttcgcgcaaaccgaagccttagccttcggaaaatccgcgcaagccgtgcaagctgaactcgaaaaagcgggtaaatcggcggcagaaattgcagcgttagtgccgttcaaagtgtttgaaggtaaccgcccaaccaactcgattctggttaagcagattacgccacgcacgctgggtaacttgattgcgatgtacgaacacaaaatcttcgtacaaggtgtgatttggaacatcttcagtttcgatcaatggggcgtggaactgggtaagcaactggcgaaccaaatcctgcctgagttagcggatagcgcagccgtgacgtcacatgacagctcgaccaacggtctgatcaacgcctttaaagcgtttcgcgcctaa

SEQ ID NO: 40845 - DNA, 984 bp, Vibrio cholerae
atgactcactcatgcagactctcagttgctccaatgctcgattggaccgaccgccactgccgttatttccaccgtctgctctctgcgcagactctgctgtacaccgaaatggtgacgactggcgcgatcatccatggtcgtggcgattttctggcgtacaaccaagaagagcatcccgtagcgctacagtttggtggttccaatcctaaggatttagcgcattgtgccaagctggctcaagagcgaggctatgatgaaattaacctcaacgtcggctgtccatccgatcgggtacagaatggccgctttggcgcttgtctgatgggcgagccggacttggtggcggagtgcgtcgccgccatgcgtgcggttgtcgacattccggtgacggtcaaaacgcgtatcggtattgatgatcaagactcgtacgagtttttaactcagtttatcgccacagttgcggaaaaaggtggctgtgagcaatttactatccatgcgcgtaaagcttggttaagtggtctgagcccgaaagaaaaccgtgaaattccaccactggattacccacgagcgtaccaaatcaaacgtgattttccgcacttaaccattgcagttaacggtggggtgaagagcttggaagaagcgaaacttcatctgcaacatcttgatggtgtgatgattgggcgtgaggcgtatcaaaatccgtatttgctggctgaagtggatcagcagatttttggcttagaaacgcctgtgaaaaagcgctcacaagtcatccatgaaatgatgccttatattgagcgtgaactttcacaaggcacccatcttggtcatatgactcgccatatgttaggactgttccaaaatatgccgggtgcacgccaatggcgacgccatatcagtgagaatgcgcacaagcctggagcgggattggaagtggttgaacaggcgttggccaagatcccttaccaagagttaggtgtgtaa

SEQ ID NO: 40846 - DNA, 1335 bp, Vibrio cholerae
atgtccgtctactacactttgtgcttcctctctgcggcagccatgttgattgcatttattaatagcaagatcagccgaatgcagactactatcgcaatcaccgcaggttcgatgatgttatcgttactgatcttgatcgcgggtcaaaacgactggtttcatctcaatcaaatcgccaccgaaaccgtcaccagtattaactttgaaaattttctactcaaagggattttagggtttcttcttttcgctggaggtcttggcattaagctgccaaatctaaaagatcagaaatgggaaattacggtattggctcttggcgcaacgctgttttcgactttctttattggatttactctctatggtttctgccaattaatcggtatccagtttgatttggtttactgcttgttatttggcgcactcatttcccccaccgacccaattgctgtcctcgcgattgtcaaaaagctcaaagcaccgaaacgtatttctacccaaattgaaggcgaatcactgtttaacgatggttttggcttggttatcttcgtgaccatctttaccatcgctttcgggcatgaaacaccaacggttggcagcgttacccttctcttcatccaagaagcgatcggtggcattgtttacggtttcttattaggtctcctgttccactacctgatttcagcaaccgatgaccactctatggagctgttgctgacgattggtattccgaccgctggttatgcatttgccgatgtgatccatgtttctggtccactcgctatggtcgtatctgggatcatgattggtaactggactcgtttcataggcttctcaaaagagagtgaagagcatctcgatcacttctgggaactcgtagacgaatttctcaacggcgtcctattcctgctgattggtatgtcaatgctactgtttgagttccatcaagaagactggattttaatggcttttgcagttccactggtgttatgtggccgctacctcagcgtatttgtctcctacatcggatttaaacgctaccgtagttacaacccttggtcgattcgtattctgacttggggtggcttacgtgggggactcgcgttagcgatggcgctctctataccttctggaatcatggtaattcccgagaaattgattgatgtaaaagagctgattctggtgatgacttacgccgtggtagtgttttctatcctagttcaaggctcaaccattactcctatgattgagaaagctaaaaaggctgaaaaagccctccaagctgaaagaaatacagacaatcaatcccctatgcctcagcaagaacaacaacactaa

SEQ ID NO: 40847 - DNA, 3681 bp, Vibrio cholerae
gtgggaaaagaagtaagacaacaactcgaacagcaattgaaacaacgtatcctactgattgatggtggtatgggtaccatgattcagagttataagttacaagaggaagactatcgcggtgcacgatttgtcgattggcactgtgatttgaaaggaaataacgacctcttagtgcttactcagccgcaaattattaaagagattcactccgcttaccttgaagcgggggcggatattcttgagaccaacacctttaactcaaccacgattgccatggcagactatgacatgcaatcgctcagtgctgaaattaactttgccgcggctaagcttgcacgtgaagtcgcggatgagtggacggctaaagatccaagtcggccacgctatgtggctggtgtgcttgggccaaccaaccgtacttgctctatttcgccagatgtgaacgatccaggatttcgtaacgtcacttttgatgggcttgttgaagcctattccgaatcgacgcgcgctttgatcaaaggtggcagcgatctgatcctcattgaaaccatcttcgatacacttaacgccaaagcctgtgcgtttgcggtcgatagcgtatttgaagagctgggcatcagcttacctgtgatgatttccggcacgattaccgatgcctctgggcgaactctgtcaggacagacaacggaagctttctacaacgccttgcgtcatgtacggccgatttcgtttggcttgaactgtgcgttaggtcctgatgagctgcgccagtacgtggaagagctttcacgcatttcagaatgctatgtttccgcgcacccaaatgccggactgcccaatgcgtttggtgaatacgatctctctgccgaggaaatggcagaacatattgcggaatgggcacaagctggctttttgaatttggtcggtggttgctgtggaactacacctgagcatatcgccgccattgccaaagccgtcgagggtgtaaaaccaagggctctgccagatctgaaagtagaatgtcgtctctcgggtttagagccgctcaatattggtcctgaaaccttgtttgttaacgtgggcgaacgtactaacgtcaccggttctgcgcgttttaagcgtttaattaaagaagagcaatacgacgaagcgctcgatgtggcgcgtgagcaagtcgaaaacggcgcgcagatcattgatatcaacatggatgaaggcatgttggacgccgaggcgtgtatggtgcgctttttgaatctatgcgcctctgaaccagaaatatccaaagttccggtgatggtcgactcctctaaatgggaagtcattgaagcgggtctgaaatgcattcagggtaaaggcatcgtcaactctatctctctaaaagaagggaaagagaagtttattgcccaagccaaattggtgcgccgctacggtgccgcggtgattgtgatggcatttgacgaagtgggccaagccgatacccgtgagcgcaaattagagatctgtcgtcgggcttaccatattttggtcgatgaggtgggcttcccaccggaagatattatttttgacccgaacatctttgctgttgcgaccggaattgatgagcacaataactacgcactggatttcattaatgcagtggcggacattaagcgtgagctgccgcatgcgatgatttctggcggtgtttctaacgtttccttctctttccgcggcaacaactatgtgcgtgaagcgatccatgctgttttcctttatcactgcttcaaacacggcatggacatggggattgtcaacgcagggcagcttgaaatctacgataacgttccgctgaaactgcgtgaggcagtggaagatgtgatcctcaatcgacgtagcgatggcacggaaagactgcttgagatcgccgaagcgtatcgcgaaaacagtgttggtaaagaagaggatgcttctgcattagagtggcgcgcatggcctgtggctaagcgcctagagcacgctttagtcaaaggcatcaccgaatttatcgtccaagacactgaagaagcacgtcagcaagccagtaaaccactggaagtgattgaagggccgctgatggatggtatgaacgtggtcggtgacttgttcggggaagggaaaatgttcctaccgcaagtcgtaaaatcagcgcgtgtcatgaaacaagccgttgcgtatcttgagcctttcattaatgcgcaaaaaagtggtagcacttcaaatggtaagattttgctggcgaccgtaaaaggcgatgtgcatgacattggtaagaacattgttggcgtcgtgctgcagtgtaataacttcgagatcatcgatcttggtgtgatggtgccttgcgagcagatcctcaaagtcgcacgcgagcaaaatgtcgatatcatcggtctctctgggcttatcacgccgtctttggatgagatggtacacgtggcgaaagagatggagcgacaagggtttgaactgccacttttgattggtggggcaacaacgtctaaagcgcatactgcggtgaagattgaacagaattatcatgcgcctgtagtgtacgtgaataacgcgtcgcgcgcggtaggggtgtgcacatcattattgtctgatgaacagcgccccggatttatcgaacgtttggatctcgattatgagcgcacgcgtgatcagcatgctcgtaaaacgcccaaatcgcgcccagtcacgttagagcaggcacgtgctaataaagcggcgctggattgggcaaattacacgccgcccgctcctgcgaaaccgggtgtgcatgtgtttgaaaacattgcgttagccacactacgtccttatatcgattggacgcctttttttatgacttggtcgcttatgggcaaataccctgccattttggagcatgaagaggtcggtgaagaggccaaacgtctgtttcatgatgccaatgccttacttgataaagtagagcgagaaggactactgaaagccagtggtatgtgtgcactgtttccagcagccagcgtgggcgatgacattgaggtgtacagtgatgaatcgcgtacgcaagtcgcgcatgtgctgtacaacttgcgtcagcagactgagaaaccgaaaggggccaactactgtttgtcggactatgttgctccgaaagagagcggtaaacgtgattggattggcgcgtttgcagtaactggtggcattggtgagcgagccttggccgatgcttataaagctcagggtgatgattacaatgcgatcatgatccaagcggtagccgatcgtttggcggaagcctttgcggaatatctgcatgaaaaagtgcgtaaagagatttggggttatgcgagcgatgaaaatctctccaatgatgacctgatccgtgagcgttatcagggcattcgacccgcgccggggtatcccgcgtgtcctgagcataccgagaaagcgactttgtggcagatgctaaatgtcgaagagaccataggtatgtcactgaccacaagctatgcgatgtggccgggcgcttcggtatccggttggtatttctcgcatcccgattctcgctattttgcggtagcgcagatccaaccagatcaactgcacagctacgctgagcgtaaaggttggcgtttggaagaagctgaaaagtggctagcgcctaaccttgatgcttaa

SEQ ID NO: 40848 - DNA, 1119 bp, Vibrio cholerae
atgacaattcgcagttttattcccccgcatcggattttgatgggccctggaccttcggctatttcccctcaagtcctgcaagcgctcagccgcccaacggttggtcatcttgatccactatttatcggtatgatggatgagctgaaacagctcttgaaatatgctttccaaacggaaaacgaatttacgattgccgtttctgcgccgggtagtgcgggtatggaagcctgttttgttaacctcgtcgagccgggcgataaagtgattgtttgccgcaatggggtgtttggtgagcggatgcgcgataacgctgtgcgttgtggggccgaagttgtggtggttgatgatgaatggggttgcccagtcagcgttgaaaaagtgcaagccacgatagatgagcatccggatgcgaaaatactggcttttgtacaagcagaaacgtcaaccggagccttaagtgatgcgcaagcgttaggtgctctagcgaagcagcatggtttgttgacgattgttgatgcggtgacctcgctcggtggcgttcccctgctggtggatgagtggcaactggatgcggtgtattctggcagccaaaaatgcctctcttgtgtgccgggattggctccgttgacgttttcacctcgtgccattgagaagattcaatcgcgaaaaacaccgattcaaagctggttcctcgatcaaagcttggtattaggttattggagtggcgcgggcaaacgtagttatcaccataccgctccggttaatagtttgtacgcgctgcacgaagcgttactgcttttgcaacaagaaggtttagagcacgcgtggcagcgccatcgtctgatgcatgagaagcttaaacaagggttagagcaactcggttttcaatttgtggtcgcagagccgtatcgtttaccgcagttgaacgcgatttatgtgccggaaggtattgaggaagccaaagtacgcagccatctactcaatgaatacaatttggaaattggtgctgggctcggggcattagccggcaaagcgtggcgcattggggttatgggctatggcgcgcgttcagaaaatatcgcgctctgtttgcgagcgctcgaagagtcgctgcgttaa

SEQ ID NO: 40849 - DNA, 2823 bp, Vibrio cholerae
atggacaaaatcgaagtacgcggcgctcgtacccataacctcaaaaatatcaatctgaccattcctcgtgacaaattgattgtcatcaccggcctctctggttcaggtaaatcctcactggcttttgatacgctgtacgcagaaggtcaacggcgttatgtcgaatcactctcggcttatgcgcgccaattcctttctctgatggaaaagccggatgtagaccatattgaggggctttcacccgcgatttcgattgagcagaagtccacttcccataacccacgctctactgtgggtacgattacggaagtgtatgactatttacgtctactctacgctcgggttggtgagccacgctgccccgaacaccaagtgccactgaaagcgcaaaccatcagtcagatggtagacaaagtattggaattgccagaaggcagcaaaatgatgctgctggcaaccatagtcaaagagcgcaaaggcgaacacgttaaaacattggaaaaccttgctgcgcagggctttattcgtgcgcgtatcgatggtgaaacctgcgatctgaccgatccaccgaaactcgaactgcacaaaaagcataccattgaagtaattgtcgaccgtttcaaagtgcgcagtgatctgcagcaacgcttagccgaatcctttgaaaccgccttggaactttccggcggtatcgtcgttgtcgccccgatggaaggcgatggcgaagagcagattttctcggctaactttgcttgtccacattgcggttacagcatgcgcgaacttgaaccacgcctgttctccttcaacaacccagccggtgcttgtccaacctgtgatggtttaggagtacagcagtatttcgatccagatcgagtgattcaagatgccaatttaagtttggcacaaggtgcgatccgcggttgggatcaaaagaacttttattatttccagatgctgactgcactggccgagcactacgattttgatgtacacacgcccttcaataagctgagcaaaaagattcaggaaatcattctgcacggctctggtcgcaccgaaattgaatttaagtacatcaatgatcggggtgatattcgccttaaaaaacatccttttgaaggaattttgcataatttggagcgccgctatcgcgataccgaatccaactcggtacgtgaggagctggcaaaatacatctccaacaagccttgcagcagctgtgatggtacgcgcttaaaaatcgaagcacgcaatgtgtttattaatgatactgcgctgccaacgattgtagaactgagcattgctgatgcgctaacgttcttccaagagctcaaactggaaggccaacgtgcacaaatcgctgaaaaagtgatgaaagagattaatgaccggctgcaatttttggtcaatgtcgggctcaattacttaaatctctcgcgcagcgccgagacgctttccggtggcgaagctcagcgtattcgtctagccagtcagattggtgcgggtttagtcggtgtgatgtatgtccttgatgaaccctcgattggcctccaccaacgcgacaacgaacgcttgctgcaaaccctcacccacttacgcaatctagggaataccgtgttagtggttgagcatgatgaagatgcgattcgcatggcagatcatgtgattgatattggcccaggtgctggcgtacacggcggcatggtggttgccgaaggcaatgtggaggaaatcatcgccaatccaaactcactcacaggtcaatatctcagtggcgtgaaaaaaatcgcggtaccagagcagcgcacaccaaaagatgcgaagaaaacggtagagcttaaaggcgcagtcggtaataacttaaaaaatgttgacctgtctattcctgttggcctgtttacttgtgtgacgggcgtttcaggttcgggaaaatccactctgatcaacgataccttctttaagattgcccatacagcactcaatggcgcgacgacggcgacacctgcgccttatcgctccattcaaggtctagaacactttgataaagtgatcgatatcgatcagagcccaattggtcgcactcctcgctccaaccctgccacttacaccggaatcttcactccaatccgtgaattatttgcaggaacacaagagtctcgctcgcgtggttatcagccgggacgctttagttttaacgtccgcggagggcgctgtgaagcgtgccaaggcgatggcgtgatcaaagttgaaatgcacttcttacccgatgtgtatgtgccttgtgatgtgtgtaaaggtaaacgctataaccgagaaacactggaagtgcgctacaaaggcaagacgattgatgaagttttggacatgaccgttgaagacgcacgcgagttttttgaccccgtacctgtgatagcacgtaagctgcaaaccttgatggatgttggattgtcctacattcgtcttgggcaatcagccaccaccttatcaggaggtgaagcgcagcgggtaaaattagcgcgtgaactctccaaacgagatacgggcaaaaccctgtatattttggatgaaccaaccacgggcctacacttccacgatattcagcaactattgagcgttctgcaccgcttgcgtgaccatggcaataccgtggtggtgattgagcataacttggatgtgatcaaaacggctgactggatcatcgatttaggccccgaaggcggccaaggcggcggactgattattgcagaaggaacaccagaagatgtggcgcagatcgaagcttcacataccgcacgtttcctcaagcctttgttgaattag

SEQ ID NO: 40850 - DNA, 876 bp, Vibrio cholerae
atgatgattaagaagtgtctatttccggcagctggctacggtacccgattcctaccagcgactaagtcgatgcccaaagagatgatgcctgttgttaacaaaccgctgattgagtacggtgttgatgaagcgattcaagcgggtatcacaggcatgtgtattgtgacaggtcgtggtaagcattcgatcatggatcactttgacatgaactacgagttagagcaccaaatccgcggtacgaataaagaagagctattgggtgatatccgtaaaatcatcgaaagcgctaactttacttttattcgccaacgcgaaatgaaaggcttgggtcacgctatcttaacgggcaaagagctggtcggtgatgagccgtttgccgttgtgctagcggacgacctgtgtgtgaacgaagagcaaggcgtactggcacagatggttgcactgtacaaacagttccgctgctctatcgtcgctgtgcaagaggttccagaaaacgaaactcacaaatacggcgtgatcgcaggtgagatgatcaaagacgatctgttccgcgtcgataacatggtcgaaaaaccagagccgggcacagcgccaagcaacctcgccatcattggccgttatatcctcacgccagatatttttgatctgattgagcagaccgagccgggcaaaggcggtgaaattcaaatcactgacgcgctgctcaaacaagccaaagcgggttgtgtactggcttataaattcaaaggtaagcgcttcgactgtggtagcgttgaaggctatatcgaagccaccaacttctgctacgaaaacatgtacaagaaaaacgaccaaaaagtggagttggctaaaaagtcgacgcacaaaggtcagtaa

SEQ ID NO: 40851 - DNA, 534 bp, Vibrio cholerae
atggcaagccgtggcgtgaacaaagtaattttgattggtaacttaggccaagatcctgaagtgcgttatatgccaagcggcggcgcagtagcgaatatcaccatcgcgacctccgaaacctggcgtgataaagccacaggtgaacagaaggaaaaaaccgaatggcaccgagttactctgtatggaaaattggcagaagtggctggtgaatatttgcgtaaaggttctcaagtttacattgaaggccaactgcaaacgcgtaagtggcaagatcaaagtggtcaagatcgctactcaaccgaagtggttgtacaaggctataacggtatcatgcagatgctgggtggacgtgcacagcaaggtggaatgccagcccaaggcggcatgaatgttcctgcgcagcaaggaagttggggacaaccacaacaaccggcgaagcagcatcagcctatgcaacaatctgcgcctcaacagtactcgcaaccgcagtataatgagccgccgatggattttgatgacgacatcccgttttag

SEQ ID NO: 40852 - DNA, 2022 bp, Vibrio cholerae
gtggcacaaatgaggtatacaccgacattaaaactgagcactcggttagtggcgttcgtcactatgacggtgatcagtgccatgtttatcctgttccttggtggcaccttatcttttcagcgtttggggcaggaatacctcaaccactatctacaagggatagttgaggttgtcgataaggagatggaagatccagacgccgcttactctatgcagcgttggatgcccaaaatgcttcaagcgagtggcatcattgaaatgcagcttacttccgaagcgggccccatctaccgttttaaagacaccaccaacaccattgaagcttcacgtttgcatcaagtcgctttaccgctcaaacgtaatcccggttatgtgatgcattttaaagcggtgcctccctacctcaattacaactattcactgcaagccatgtggtcgaccaccttagcggtgctactgatcgtatttttcttgatccgcggtctgaaatggttgaaagagcaactactaggatcggagttactggaagagcgaggacggatgattcttgctggacgagtggagcaacatgccaagggggatccgcgagagtggcctttcaccgcaagtgaagccttagatcgcttgattgaagagttgcaagatgcccgtcaagaacgtagccgttttgatacctttattcgtagccaaaccttcctcgatcaactgaccgggacggcgaatcgggtgttgtatgacagtaagctggaatcggctttactggagagtggcgctcacggcggcgttatgatgctgcgggtcgatgacttagagtcagcgcgagaagagagccctaaacgtacgctcgatgagtttatcattgaggtgggggagtgtttatccaacatagtacagcgttatccggatgccatactttctcgctactatgaggatgtgtttgcgctgtttattcctcatcagggtagtaaagatattgctcaagtagcgacacaggcgattaagttgattgagcgcatcaatccccctgagccactgccagaagacaattggttccacattggtgtaaccatgtatcaagaaggtgagcggcgtggacggattattgatgagatggaaaccgcgctcaaaagtgctcaactgcaaggggtgaatgcgtggagccgttttcaaaaacctaaacagttacaagaggatcgcggtagcgttcggtggcgtacattgtttgaacaggtgcttcgtccggaagagattttgctctatcgccaagcctgttatcgtatttctgctaatggagagcgggagttcctacattatgagttatttgcgcgtattcaggatccgcaacaaggcattctcaaagcgtcgcggtttagctcagctttaaaacggtcggctatgaagccatgttgggatcgtgccgtattcagctctgtcgtgagttttttgaagcgctctgaactggttgaaccactctcggtaaacttgcacgttgttccatttaacgataaacggtatgctcgctggattcgcaacgaattgatgcagatgcctttttctcttagaacggcgctctcttttgagttttcagaagcgcatttggtcaaccatttagactatatgcgccccatcattcgcatgttggcggggctgggttgcaagatagtggtgggacaagcgggacgaacaattgtcagcacgcactatatcaaagacttaaaagtcaactatcttaaacttcatcggagtttgataaagaaaattgaccaacgccatgaaaatcagctgttcgttcgcagtttggtaggtgtatgtggcggtacccaagcagaagtggttgcggttggggttgaaactactcaagagtggcaaaccttacagatgctgggtgtcagtggtgtgcaaggtcgcttgtttgatgaggagcaacagatgttgcctcctttgccaccagagccattgaaacgccccccgcgtctctctgtaaagcccatcggcaaacgtaatcgatggcgaaccaaatag

SEQ ID NO: 40853 - DNA, 1044 bp, Vibrio cholerae
atgttcaaaaaacttcgtggcatgttttctaacgacctatcgatcgatttaggtaccgccaacacacttatttatgtcaaaggacagggaattgttcttgatgaaccttctgttgttgcaattcgtcaagacaaaggtcgtggcggtaaaaccgttgcagcggttggccatgccgcaaaacagatgctcggtagaacccctggtaatatttcagccattcgcccaatgaaagacggtgttattgctgatttttacgtcactgaaaaaatgctgcagcattttattcgccaagtgcacgacaacagcgtgttaaagccaagcccacgcgtactggtgtgtgtgccttgtggttcaacccaagttgagcgtcgtgcgatccgtgaatcggcactgggtgcgggcgctcgtgaggtttacttgattgatgaaccaatggcggccgccatcggtgctggtttgcgcgtttctgagccaaccggttcaatggtgattgatatcggtggtggtacgacggaagtggcggtgatctcgctcaatggcgtggtttactcttcttctgtgcgtatcggtggtgaccgttttgatgaagcgatcattaattatgtgcgccgtaactacggtagcttgattggtgaagccactgcagaaaagatcaaacacgaaattggctcagcttatccgggcgatgacgtgcaagagatcgaagtgcgcggtcgtaacctagcagaaggtgtaccacgcagtttcacactgaattcgaacgagatccttgaggcgctgcaagagccgctgacggggattgtgtctgcggtgatggttgcactcgagcagtgtccaccagagctggcttcagatatctctgaaaacggtatggttctcacaggcggcggtgcactgctgaaagatctggatcgtctgctaatggaagagactggcattcctgtggtgatcgccgatgacccgctgacctgtgtggcgcgtgggggtggtaaagccttagaaatgatcgatatgcacggcggcgatctgtttagcgaagaataa

SEQ ID NO: 40854 - DNA, 3876 bp, Vibrio cholerae
gtgatttcgacagtaacccgcctcgggcggatccttatgtggctgctggtcagcctgctgattgtgctggctttagccgtcacagccctgcgcattttgctgccacagatgaaccgttttcaggcggagattcagcattggctgaatcaaaactcgtcggtacaagtggcgattgctgatgtacaaggttactggcgcaatacgcacccctccctctcactgcaaaccttacaagcccattggccggacagtaacgatattcagctgaatgcggccagtgtcgagattgagttcgacctgctgcaatcactgtggcagcggcaacctgtggttgccgatcttactgtcaatggtttagtccttgatttacgggcgatcgactggctggccttagagcaaaatcctaatccgaaacagtcgcgtcaaggtcgcgtagtcaaacagctcgatgatctcttactgcgtcaactggatgatttcaccctcaaaaactcagcgattttgtatcgcacttttgccggcgatctgcgccaactcgatattgaaaaactgcgttggcaaaaccaaggtctacgccactttgctgaaggggtggtcagtattgcaggcatcaacatcaactctttgttggtaagcgctaactttattgatcatggttcgctgcgcgatgtgtcgggcgatttctatgtcagcgcggataaagtgcgcgtattaccttggttaacacgatatttaaaagatcaaactggcattcaaaaaggccaagtaagcttaaatgcttgggcgacccttgaacacaatcagccgaaagatggctatgtcgaatttaagccttcggagttggtgtggcaaaacggtgagcagacccatgaactgctgcttgagtcagggattgtcgaactcaaaccaaccgagaaaggttggcaagtgaatgcccactcactgcgtttacgaagtgatgatgagctatggccgcttttggatgtggcgatggattggcagcccgatgagtggcggctcaatctctctcagctcaatattgagaacctgttacctctggctaagttgatccccgagtcacaaacgctcaatcattggctgacaaccttaaagccgaaagggactttggaagatgtgcggattgccaaaggcgcaacgttggaatcattacgttattcggcatcattaattgatggcggaatagcgcaatgggagttgctaccccaagtcaatgctttgcaagcgcaaattcaaggttcaccgagcaaagcactcattaaagccagcatggtggatgacgtcttgccctatggtgaggtgttccaagctcctctgaatatccgccaaggcgcagtgaatctggtctggcagcaagagcaatatggatggtcgctctggtccgataaagtcacggtagcgacgccggatctgcaagcgctgggcgcatttcgcctcgatttcccggatgatgctagcccattcctctcattttatgccgaagccgatctctttaatgctggggagacatggcgctacttgccgacgttggcgttagggcgtgagctgaccgattatctctcgaccgcgattcaagcgggacaagtcaataccgcgaaactgatctggtatggcgcgttagatcagtttccttatcgtatgcacaatggcgtgttccaagcttgggttggtttaaaagaggccaaatttgcctttgatacggcttggccaccgatcaccgatttgcagctcgatctgctgtttgaaaatgacgccatgtatctcgactcgcgctctgctaccttgatggaagtcagtgctgaacggatcaccggtcgtattcctgaattggccgagctgggtcacattgagattgaagcggtagccagtgcccagcaaggtaacgcgattcgcaattacatgatggcgaccccgttagtcgattccgtaggcgcggcgctgaccacgattcaagttaaaggaccggtgcgctcagagtttcaactcaatattccattccacagtggcgcagagccgcgggcttggggctttgccgagctgagcaataacgcggtggatattgatacaccgccgatgagccttacctctgtgtctggcaaaatcgagttcgataatgaccgcgtgagtgcagcggggcttgatgcccgtttgctcaaacagcccgtctcgatcgattttaaaggcgaagatgccaagcgaggttatgcggttggcattgatatggttggggattgggaagtcaaaccgctgatcccgtttgtgggcgaacgctggttaagccgagtgaaaggccatgcaccttggcaggcgagcgttgacattcaactcaatgatgtgggctttacttaccaattggatggtaaggcggatttgcgcgggttagagagccgctaccccttcccacttaaaaaagcactcaaagtgaaagggcaggctctgttgcaagcctcgggcaatcaagagatggtttccgcgcgcttgcaactgccgcaagcaaaatatcaggccgagattgatttaacgcctaaagtaccggttctgaaagccacgaatctggtgcttgggcagggcagttttaaaattagcccagtggtggggcatcatgtccagttgcgtagccaagcgttcaatctggatgattggctctccattttgaatgaaaagcctgcgcctaaatcgcgaaaatctaagctagccagtttaaatacgcctgcatttccaatgccggagcgagtggatgcggcggttaaagagctgacctttgcagggttggattggcatgacgtggatcttaatgcgcggcgcaaagacctcggctggcttctcaatctggatagccaagagatcaaaggccaagccaattatattgagccttatgatttgagtattgcgcttgagcgcctgcatctgtttttgcctcagctcgaggcgggggaagaggcgttgctggtcgatcttgatcgccagaaattaccgcttatcaccgattttgatcgtaaattccatcaatggatgcctaaccttacgttgaccatcaaagacttttggttgcaaggctacaaaatcggccaagccaatgtcgattttcagcgccaaggggatacgctgctgtggaagagcattgatttcactagtggtaccaaccaactgcatgttaatggcacttggacgctgaccgatactcagagccgaactcaaatgaatttggatatgaagggcgataacaacagtgacttgatggcacgttttgggatcaactcaggtatccagcgtgcgccgtttgagattaccgcaagcacgcaatgggatggcgctccgtggtcaatgcaggtcaacactttgcaaggcaaggtggataccaaacttggaaaaggggtgatttccgatgtgagtggggcggcaaggttacttggtctatttagccttgattcaatcatacgcaaaatgcagctcgactttagcgatgtatttgataaagggatggcgtttgattcgatctccggcagtggtgagctttcccaaggaatttttgtcaccaataacatcaaaatggatgcggtggccggagagatgacgattaaaggtctcgccgatctcaatacgcgcacggtcgatgcagaagtgaatttcgtcccagacattacatcaggcattccggtattgacggcgtttgcggtgacacctcaaaccgccttgtatgtgctggcgatcactacggtgatctctccggtagtggaagtgtttactcaagtcaactatgaagtaaaaggaccgctcgattcaccgacagtgaaagagctttcgcgcagtaaaggcgaattcaagttgccggaaaagctgcgtaaactgactgaatag

SEQ ID NO: 40855 - DNA, 438 bp, Vibrio cholerae
atgtataaacatattcttgttccggttgatttgaatgaacaaggctttgccgacaaagcggtgcaacttgctgtctggcatgctaagcattccaatgccgaaattcacttgctgaacgtgttgcctggtattcacatgtccatggtggcgacttattttcctaaagacgcggccgcgcagatgaaaaatgatgtgcgagcacaactcaaagcctttgcggagaagcacatcgctgaagaggtggtgtacaaactccacatcgccgaaggcaaaccttacgccactatccttgattatgccgagcgcttaggggctgacttaattgttatgccaagccacaaacgctcacgcatcgataaagtgatgctcggctccgtggccagtaaagtggtagaaaattcgcctattaatgtcatggtcgtcaaaccacaaggttaa

SEQ ID NO: 40856 - DNA, 1407 bp, Vibrio cholerae
atggataaaaaactgggtttaggctctctcacggcgctagtgattggttcaatgattggtgcgggcgtgtttagcttgccacaaaatatggcagcggttgccagtccactggcagtgatgatcggctggtcgatcactgggatcggcatgatctttcttgcgctctcttttcaatatttagccgtcaataaaccccatgtgaacagtggtgtgtttggttttgctcgtgaaggttttggtgattttgccggattttgctcggcgtggggctactggtttagtgccatggtcgcgaacgtctcttatctggtgattgtgttcagtactttaggactgttgtttgatacgcctgatcagattatctttggctcaggtaatacttggtggtcaattggtggcgcttctctactattgtgggctgttcacagcttagtattaagaggggtgcaaaccgccgcgctgatcaatctcatcaccactatgactaaaatggtgcctttgctacttttcattgtgtctgcgattgcggcgttcaactggtccacatttagcttggatttcgcagggctccatcacatttcaggcgctgatctgctcggtcaggtcaaagcgaccatgttgatcacggtttgggtttttgtggggattgaaggtgctgtggtggtatcaagccgagcacgtcagcgtaaagacatcggtcgcgcgaccattcttgggttactcacggctctgtcgatttatgtcttagtcacgctgttgtcgatgggcgtgattcaagtcaatcagttggcgcaatacccgaatccttctatggcgcaagtgttgactacgattattggtccttggggtaagtacattattgcggttgggcttttgatctcggtttgcggtgcgtttttgagttggacggtattggcttccgaagcgcctttccttgccgccaaagataagatgtttccccgccattttgccaagcagaatcaagcgggaagtccagttaatgccttgttcttaaccacactctgtatccaagtctccttgatcttggtgcgctatacttccagcacttacgatagcttattgatctttgcctcagagatgattttagtgccgtattttctggtgggcgcttttacccttaagcttgctctggagcaaagagatcgagggaagttgctattgattggctttggcgcaacggcttatggtctatggttgctgtatgcatcaggtttgcactatttgatgctctcaaccctgttgtatgtaccgggcttcgctttctatctcaaagcaaagcgtgagcaaggtgtaaaagcattctgcggccgagaaatggtcggagccagcaccctactgctgtttgccgttggggcggcaggcatgctttggcaaggcgcttggtaa

SEQ ID NO: 40857 - DNA, 1047 bp, Vibrio cholerae
atgatttttagtgtattatgcagcgattccagaagactaaatgccttacacgctcttatttcagccggatttacgatggattttaaagctatccaagcgcttactgccaatgacatggcaaaagtgaacgaaacgattcacgctcaactcaattctgacgtttccctaatcaaccaacttggtttctatatcatcagtggtggtgggaagcgtttacgcccattgctggcggttttatccgccaaagcgctcggttatcaagggtcacatcacacgactgctgctgcgtttattgaattcattcatacggcaaccctgttgcacgatgatgtggtcgatgaatcagacttgcgccgcggtaaagcaaccgccaatgccgcgtttggtaatgccgccagcgtattagtcggtgattttatctacactcgctcgtttcagatgatgacagaattaggatcaatgaagatcctgaaactgatgagtgatgcagtaaacgtgatcgctgaaggtgaagtacagcaattaatgaactgtaacgatcctgataccaccgaagccagctacatgcaggttatttactccaaaactgcacgtctgtttgaagcggcaacccagattggcgctatcctgtgtgatgcttctcctgaagtcgaactggcgatgcaaaactacggtaaatacctaggcacagccttccaactgattgatgatgtgatggattacacttcagatggtgatgagatgggtaaaaacgtcggtgacgatctggcagaaggcaaacctaccctaccactgctttatgcgatgcagcacgggaatcctgagcaagccgcgatgatccgtgaagccatcgagaaagccaatggcatgtcgcgtcttaatgagattctcgcagcgatggagcaaaccggttctttacaatacaccattgaaaaggcgctgcatgaagcggataaagccatcgctgaacttgcgattttgccagaaagcgaatacaaacaagccttgatcacgctcgcccatatggcggtcaatcgcagtaaatag

SEQ ID NO: 40858 - DNA, 312 bp, Vibrio cholerae
atgtacgctgttttccaatctggtggtaaacaacaccgtgtaagcgaaggtcaaactcttcgtttagagaaattagacgttgaaactggtgcaactgtagaatttgataaagttctgctggttgctaacggtgaagacattaaagtaggtgctcctctggttgagggcggtaaagtagttgctgaagtggtacaacacggtcgtggcgataaagtaaaaatcgttaagttccgtcgtcgtaagcactctcgtaagcaacaaggtcaccgtcagtggttcacagaagtgaaaatcactggtatcaacgcttaa

SEQ ID NO: 40859 - DNA, 261 bp, Vibrio cholerae
atggcacacaaaaaagctggtggttctactcgtaacggccgcgattcagaaagcaaacgtctaggtgttaagcgtttcggtggtgaatctgtacttgcaggtaacatcatcgttcgtcaacgtggtactaagttccacgctggcactaacgtaggtatcggtaaagatcacactctattcgctctatctgatggtaaagtgaagttcgaggttaaaggtcctaacaaccgtaaattcgttagcatcgaaactgctgaataa

SEQ ID NO: 40860 - DNA, 1188 bp, Vibrio cholerae
ttgagtggaggaaaaatgaaattcgtagatgaagcggtaattaaagttcaagctggtgatggcggcaacggtgttgtgagcttctggcgtgaaaaattcgttaccaatggcggccctgatggtggtgatggtggtgatggcggcgatgtgtatatggtcgctgatgaaaacctcaacactttgattgactatcgtttccagcgcttttatgaagcggagcgtggtaaaaacggcggtggcggtaactgtacaggtaaaagcggtaaagacaaagagctgcgcgtaccggtaggtactcgtgccgtcgatattcacaccaatgaaatcattggtgaagtggccgaacatggcaaaaaagtcatgatcgccaaaggtggttggcacggtttgggcaacgcccgttttaaatcctcggtgaaccgctctccacgtcaaaaaaccttgggtaccaagggtgagctgcgtgatattcgtttagagctgctgctgttggctgacgttggtatgctcggcatgccaaatgcgggtaaatcgaccttcattcgtgctgtttctgcggctaaacctaaagtggcggattacccgtttaccacgctagtaccaagccttggtgtggtgagcgtgctgccggagaaaagctttgtggtggctgacatcccaggcttgattgaaggcgctgcggaaggggctggtttagggattcgtttccttaagcaccttgaacgttgtcgcgtgctgctacacatgattgatatcatgcctgctgatcaaagcgatcctgcacacaatgcgttgaccattattgatgagcttgaacagtacagtgaaaagctggcgaaaaagccacgttggttagtgttcaacaaagttgatctgatgtcagaagaagaagcggatgagatcattcaaaacatcatcgatgctctggcatgggaaggcgattacttcaaaatctctgcggcgaatcgtcaaggcaccaaagagctgtgcatgaagcttgccgagttcatggataccttaccaagagaagcggaagagaaaacagaagccgaaaaagtcgatttcacatgggattataaccataaagacggattggctggtcgtgaagtgatcactgaagatgatgacgattgggatgattgggacgatgaagaagatgacggccacgttatctatgttcgtgactga

SEQ ID NO: 40861 - DNA, 498 bp, Vibrio cholerae
atgatgatcagtatgattgccgcgatggcagaccagcgcattattggtaaagataaccagatgccttggcatctaccggctgatttcgcgtggttcaaacgctgtacattaggtaagcctgtagtgatggggcgtaaaacctaccaatcgatcggacgtcctttaccggggcggcacaatattgtgatctcccgtgatgcgagtttgcagattgagggggtggatgtggtgacctccattgaggcggcgctggcgaaagcgggtgaggtcgacgaggtgatgatcatcggaggtggtagcttgtatgcggcctgtttgccgatggcccataaactgtatattaccgagatccatgcaaaattggatggtgatactcagtttcctgaatgggggagtgattggctagagcgctctcgtgagcattatcctgccgatgaaaaaaatgcctacgggatggattttgtgatttttgaacgccaatatccccttcctacttga

SEQ ID NO: 40862 - DNA, 849 bp, Vibrio cholerae
ttgataaaaaagcgcaataacttagagaaaactatgagaaatgatgtccacttagggcacaaagcgcgtaaacgctttggtcagaacttcctcaatgatccttacatcattgatggtattgtgtcggcaattaatcccaaaccggggcaaaacttggttgaaatcggcccagggttaggcgccatcacagaaccggtaggacgtgaagtggataagttcactgtcattgagcttgaccgcgatctggcagaacgcctgcgtaatcatccagaattagccagcaagttgaccattcatgaaggcgatgcgatgcgtttcgacttcaagcagttggtgaaacccaataacaaacttcgcgtgtttggtaacttaccttacaacatttcaacgccgctgatgttccacttgtttgaattccaccgtgatattcaagacatgcacttcatgctgcaaaaagaggtggtgaaccgattagccgcaggtccgggaaccaaggcctacggtcgactaaccgtgatggcgcaatactactgtaaagtggttccggtactagaagtgccacctagcgcatttgtgccaccaccaaaagtggattcggccgtggtacgtttggtgccttatgaagatctccctcatccagcaaccagcttagagtggttagatcgcgtggtacgtgaaggctttaaccaacgccgtaaaacggtgcgtaactgttataaaggtttggctgaaccggaaacactggaaactctgggcatcaacccaggtatgcgcccagaaaatctgaccttggctcaatttgtggcattagcgaactggcttgatgccacacacaaaactcacgcataa

SEQ ID NO: 40863 - DNA, 1626 bp, Vibrio cholerae
atgaaattaaaaacccaagcttatttattatctgccatcattctcgccgctcttctcgcgctaaccgcgaccggactgtggacgttacgtgtggccagcaatctcgataacaaagcgcgtgtaaccgagctgtttaatagtgcctacagtattttgactgaggtagagaagctggctcaagaaggcaagatgtcggagccagaagccaaagcgctcgccacccgcctaatgcgcaacaatctctacaaagataatgaatatgtgtatgtggcagatgaaaatatgactttcgtggcgacgccgctcgacccacaactgcacgacaccagttttcacgattttaaagatggtaaaggcaatagtgttggccgcttaattcaagatgtgctgcgtcatcaatccggcaagttggtggaatatacgtggacacaaaagcaagctgacggttcgattgaagaaaagctctcgatcgcgcgcaaaacgccacactggggctgggttgtcggcacgggtattggttttaacgaagtgaatgcgcgtttttggtctaccgcgcaatggcaactaagcttatgtgtggtgatcgccgttgcgattttatctctgctactggtcgcgattcgtaaaatactgctgattatcggcggtgaacccaatgaggtacgcagcgcagtacaagcggtggcacaaggccgcattcgtcgtgaatttgtgataaaagcccctaaagagagtatttatggtgcagtgcagcagatgagcagctcacttgcagacttggtggctaagcttgagcaatccatggtggctttacgctctgaattagccggcgcaggtactcgcgccaaaagcattgccgaattaacggatagccagcagcaatctaccgccatgattgccactgcaatgaccgaaatggcctcttcagcgaaccaagtcgccgattctgcgcgtgataccgcattcaacaccgatcaagcggatcagcaaagccagcatacgcaaaagctcatccacaacacggtaagcaatattcaaggcttggcgacccaattacaaactgcgagcaccgcggttgccgatctggatctggatgtcaaaaacatcgctaaagtactggatgtgattggtgatattgcagagcaaaccaatttactggcgctgaatgccgcgattgaagcagcacgcgctggcgagcaagggcgcggttttgccgtcgtggctgatgaagtgcgtaacttagcgggccgcacgcaaaccagtaccaaagagatccagcagatgatccacaatttgcaggaagggtcgcgtaatgcgattcaaaccatccagatttgtgggcaaaccagtcaaagcagtgtgcaagagtcagaaaatgccgcttctgcgctggcattgattgtcagcgcactcgaaagcgtctcttcgatgagccatcaaatagccacggcggccgctgagcaaacccaagtcagcgatgatattgcgcgccgaatcaatatgattgaagaaagtggctcaaaactgagccgagtggtgatggagagccacaatagtacgcaaactctcaccaaactcgcccgcgagttagaacagtgggctgcgcattttgaggtcactcgttaa

SEQ ID NO: 40864 - DNA, 603 bp, Vibrio cholerae
atgaaaaagatcgttttagccacgggcaatcaaggcaaagtgcgtgaaatggcggacctattgtccgattttgggtttgatgtcgtcgcgcaaagcgaattcaacgtccctgaagcggcagaaacaggcaccacttttattgaaaatgcgatcatcaaggcacgtcatgccgcgcaaattaccggcttaccgacgattgccgatgattccggtttggaagtggattacctaaacggcgcgccgggcatctattctgcgcgctacgcgggcgagcatgccagcgacggagacaatctcaataagctgctaatggcgatgcaagatgtgccagacgaccagcgcagcgcgcgttttcattgtgtgctggtgttaatgcgccacgccgatgatccaacgcctatcgtttgccacggcaaatgggaaggcaaaatcctcaccgcgccacacggcagcaatggctttggttacgaccctattttctgggttccggaagaaaactgcgcttctgctgagctagaaccggtgcgcaaaaagcagctatcccatcgcggcaaagccctgcaaaaactgttcaaagcgattgaagagcagcgtacatgctaa

SEQ ID NO: 40865 - DNA, 711 bp, Vibrio cholerae
atgcgtagtattcaacaaaacattgaacatatcactgcacagattgagagcgcacaacaaaagtgtggacgcgctcgaagcagtgtgcaacttctcgcggtaagtaaaactaaacccgtcgaggcaattcttgaggcgactcaagcaggtcaacgctactttggtgagaattatgtgcaggaaggtgtggataaaatccgctattttgccgaacatcacccgcagttagcactggagtggcactttatcggtccactacagtcgaataaaacgcgcttagtggcagagcattttgactgggttcacaccattgatcgcgagaaaattgccttgcgcctcagtgaacagcgccctgtgaatatgccaccgctgcaagtgctgattcaggtcaacaccagcggtgaagcctcaaaatcaggcatcgaaccgcagcaattatttacactagctgaattgatttctcgtctgccaaacctcaccttaagagggctgatgtcaattcctgagaacgtgccggattaccctgcgcaactggcggcatttacccaattagccgaattgcagcaacaactggctcagaaatacccgcagattgacaccttatccatgggtatgagtggcgacatgcaagcagcgattgaagcaggcagcaccatagtgcgtattggtaccgcgattttcggcgagcgcgattacagccgcaacgcttaa

SEQ ID NO: 40866 - DNA, 1038 bp, Vibrio cholerae
atggatatcgctgagttactggaatttagtgtaaaacataacgcctcagatctacatctttccgcaggtgttccgcctatggtacggattgatggcgaagttaggaagcttggcgtgcctgcttttacccattctgatgtacatcgcttgatttttgagatcatgaatgatgcccagcgcagtgaatatgaagagaaattagaagtcgatttttcttttgaactgcctaatgttggccgtttccgggttaacgcgtttcatcaagcgcgcggatgctcggcggtgtttcgtaccattcccactgtcatcccgacgctagagcaactggatgctcctgaaatcttcagcaaaattgccaattatgaaaaagggttagttttagtgactgggccaacgggctcgggtaagtcgacgaccttggcggcgatggtgaactatgtcaatgctcatcacaataagcatattttgaccattgaagatccgattgaatttgtgcacagcaacaataagtgtttgatcaaccaacgcgaagtgcaccgtgatacccacagttttaaaaatgcattgcgctcggcattgcgtgaagacccagatgtgatcctcgtcggtgagctgcgtgaccaagaaacgattagcttggcgcttactgcggcagaaaccggtcacttggtatttggcactctgcacaccagctcggcggcgaaaaccattgaccggattatcgatgtttttccgggcagcgacaaagacatggtgcgttccatgttgtcggaatcgctgcgtgcggttattgcgcaaaaactcctaaaacgcgtcgggggtggccgtgttgcgtgtcatgaaatcatgctggcgacgccggcaattcggaacttgatccgtgaagataaagtggcgcagatgtattcgatcatccaaaccggtgccgcacacggcatgcaaaccatggagcaaaacgccaaacagctgatcgcgcgtggtgtggtggatgcgcaagaagtacagagcaaaatcgagttggatttaaaagcattttag

SEQ ID NO: 40867 - DNA, 1305 bp, Vibrio cholerae
ttgccaagacttttaggaggcagaatgaattcacagcaactttttgatgatttacagcagcgcggtttgatcgcgcaaagcacacctctggaggcgctggttgagcgctttgccacaccgcaagtgctgtattgcggttttgaccccactgcaggcagtttgcacatcggccatttggtgccgttgctgatgcttaagcgttttcaaaacgccggacatcaagcgattgcgcttatcgggggggccacaggcatgattggcgatccaagcttcaaagccaacgagcgggtgctcaatagtgcgcaaactgtacagcagtgggtgagtgatttaagccagcaaatcacgcaattgatgacctcgcagggcgagaactgcgcatcgctgatggctgtcaataatgccgattggatcggtaagatcaatctgatcgattttttccgcgatgtgggcaagcacttttccgtcaatgccatgatcaatcgtgaatcggtaaagcagcgtttggcgcgtccggatcaaggcatctcttttaccgagttcagttactctttgctgcaatcttatgactttgcgcatctcaatcgtgagtttggctgcgcactgcaaattggtggcaatgatcagtggggcaatattgtcagcggaattgatttgacccgtcgcctgaatggggttgaggtgtgtggtttaactctgccgctcattaccaaatccgatggtactaaatttggcaaaaccgaaagtggtgcagtgtggcttgagagcagcaaaacctcgccgtatcgcttttaccagttttggttaaacagtgatgatgccgatgtgtaccgcttcttggcgtattacacctttttgagcacggctgagattgaggaaatccgtcaagccgatgcgctacgtgcaggcaaaccacaagcgcagcagattttggccgaacacgtgacccgttttgtgcatggtgaagagggactcgctgcggcgcagcggattactcaagcgctgtttagcggggacgtcagctatctcagcttaagtgagttggctcagttagaactggatggtttgccttgtgtggcggcatcacgcaccgattccttactcgatttgctgcttagctcaggtttagccagttctaagcgccaagcgcgcgagtggctggagaatggggcgattcgcgtcaatggtgagcgagtacagcaagagggtgggttatccggctttgctctgtttgatcgctactatgtgttgcaacgtggtaagaagcagtttgctttgatcaaattggaaggcttggctgagtaa

SEQ ID NO: 40868 - DNA, 423 bp, Vibrio cholerae
atgtcacgtaccgttatggcctttgattacggcaccaaaagcattggcagtgcaatcggtcaagagatcacgggcacggcgtctccgctgaaagcgtttaaagccaatgatggcatccccaattgggatgaaattgaaaagcagatcaaagagtggcagcccaatttattgattgttggcctgcctaccgatctgcacggcaaagatctggacaccatcaccccacgcgcaaagaaattcgctcagcgtttgcatggccgttttggtttgcccgtagaactgcatgatgagcgtctttccaccaccgaagcgcgcgcagagctgttcgccatgggcggttacaaagcactgagcaaaggcaatgtggactgccaatcggcggtgatcattctggaaagttggtttgaaagtcagtggggctaa

SEQ ID NO: 40869 - DNA, 732 bp, Vibrio cholerae
atgcgcatccctcgaatttatcatccagaaccgatccaccagcttggcaccgttgccctgagtgaagatgccgcagggcatatcggtcgcgtattgcgtatgcaagctgggcaagaagtgctgctgtttgatggtttgggggctgaattcccagccgtgatcagtgaagttggcaaaaaacaggtattggtcaatatcactgagcgcgtagaaaacagcattgaatcgccgctcgatctgcatcttgggcaggtgatttcacgcggcgataagatggaattcaccatccaaaaatcggtggaattgggggtaactaccatcacccctctgctttctgagcgttgtggtgtgaagctggatgaaaaacgcttcgagaagaagattcagcagtggcagaaaattgcgatcagcgcttgtgagcagtgtggccgtaataccgtgccagaaatccgcccaattatggatctcgaagcttggtgcgcagagcccaccgaggcactgaaactcaatttgcacccacgcgctaaatactcgctcaacaccttacccaccccagtgagcaaagttcgtttgctgattggtcctgaaggtggtctgtcagcggaagaaattgatatgactcgccgttaccagtttgaagaaaccttgttaggcccacgcgtactacgcacagaaacggcggcgctcacggcgatagctgcactacaagttcgtttcggcgatcttggctaa

SEQ ID NO: 40870 - DNA, 696 bp, Vibrio cholerae
atgatgatttttcgtttcgttaccacgcttgctgctagcttacctctgctcacctttgccgcccccatctcttttagtcatgccaaaaatgaagcggtgaagatttatcgtgatcatccggtctctttttactgtggctgcgagattcgctggcaaggcaaaaaaggcatcccggatctggagagttgcggctatcaagtgcgtaaaaatgagaatcgtgcttcgcggattgaatgggaacatgtggtgccggcttggcaatttggtcatcagttgcaatgctggcaacaaggtggccgtaaaaactgcactcgtactagccctgagttcaatcagatggaagccgatctgcacaacctcactccggcgattggtgaagtgaatggcgatcgctccaacttcagtttcagtcagtggaatggcgttgatggcgtcacctatggccaatgtgaaatgcaagtaaacttcaaagagcgcactgcaatgccgccagagcgtgcacgcggggcgattgcgcgtacttatctgtacatgagtgagcagtacggtttgcgactttccaaagcgcaaagccaattaatgcaggcatggaacaatcagtatccggtcagcgaatgggaatgtgtgcgtgaccaaagaattgaaaaagtgcaaggcaactcgaaccgctttgtgcgtgagcaatgcccgaactga

SEQ ID NO: 40871 - DNA, 1158 bp, Vibrio cholerae
atggcgattaagcacctgtttacttcagaatcggtatcagaaggccatccagataaaattgcagaccagatctctgatgcagtgttggacgcgatttttgagcaagatcctaaagctcgcgttgcttgcgaaacttacgtaaaaactggcatggtgatggtgggcggtgaaatcacgacttccgcttgggttgatatcgaagagattactcgtcaaactgttcgtgaaattggttacgtgcactcagacatgggcttcgatgccaactcttgtgcggtactgaacaccataggtaaacaatcgccagacatcaaccaaggtgttgataaagccgatcctaaagagcaaggcgcgggcgaccaaggcatcatgtttggttatgcaaccaacgaaactgaagtgctgatgccagcaccgatcacctatgcgcatcgtctgatgcagcgccaagctgcagttcgtaaaaatggcacactgccatggctgcgccctgatgcgaaatctcaggtgaccttccagtatgaccaaggcaagatcgtaggtattgatgctgtagttctgtcgactcaacacagtgattcaatctctaccgcagatctgcgtgaagcggtaatggaagagatcatcaagccagttctgccagcagaatggttgagcaaagagaccaaatacttcatcaacccaaccggtcgttttgtgattggtggcccaatgggtgactgtggtctgaccggtcgtaagatcatcgttgatacctacggcggcgcagcgcgtcacggtggtggtgcattctctggtaaggatccatccaaggttgaccgttcagcggcttacgcagcacgttacgttgcgaaaaacatcgttgcggcgggtatggctgatcgttgtgaaatccaactctcttatgctatcggtgtcgcggatccaacgtcgatcatggtggaaactttcggtactgagaaagtgtcgcaagagatcatcattgaagccgttcgccagttcttcgatctgcgtccatacggtctgcaagagatgctgaacctgctgcaacctatctacaagaaaaccgcagcttacggtcacttcggccgcgaagagttcccttgggaagccaccgacaaagccgcgctactgcgtgacttcgctggtctaaaataa

SEQ ID NO: 40872 - DNA, 2085 bp, Vibrio cholerae
ttgcagcagcaggggggctttgcgacaatagccgccactgattttccgcatccattcatttcgcttacttcccatttaggagtcgacatgtcttctcgcaaacaacttgccaatgctatccgcgccctgagcatggacggcgttcaaaaagctaactctggccacccgggagccccaatgggcatggcggatatcgccgaagtgctgtggcgttcacacttaaaccacaacccacaaaacccaaactgggctgaccgcgaccgtttcgtactgtctaacggccacggctctatgctgatttactcgctgctacacctgagcggctatgagctgtcgattgacgatttgaaaaacttccgtcaactacactccaaaacaccgggtcacccagagtacggttatgcaccgggcatcgaaacgactacgggcccactcggccaaggcatcaccaatgccgtaggtatggcgattgctgagaaagcactggcggcgcagttcaacaaaccgggtcacgacatcgttgaccacttcacttatgtgttcatgggtgacggctgtttgatggaaggtatctcgcacgaagcgtgttcactggcgggcacacttggccttggcaaactgattgcgttctgggatgacaacggtatctctatcgacggccacgtggaaggctggttctcagacgacacaccaaaacgttttgaagcgtacggctggcacgtaatcccagcggttgatggtcacgatgcagacgcgattaatgcagcaattgaagcggcgaaagcagaaacctctcgcccaacgctgatttgtaccaaaaccatcatcggtttcggctctccaaacaaagcgggctcacacgactgtcacggcgcgcctctgggcaacgatgaaatcaaagctgcacgtgaattcttgggttgggaacacgctccgtttgaaatcccagcggacatctacgcagcgtgggatgcaaaacaagcaggcgcaagcaaagaagccgcttggaatgagaaattcgccgcttacgcgaaagcttacccagccgaagctgctgaatacaaacgccgcgtagcgggcgagctgccagcgaattgggaagccgcaaccagcgagattatcgctaacctgcaagctaaccctgccaacatcgcatcgcgtaaagcatcacaaaatgcgctggaagcgttcggcaaactgctgccagaatttatgggtggttctgctgacttggcgccttctaacctcaccatgtggtctggctctaagtcactgacagcagaagatgcgtcaggcaactacatccactacggtgtgcgtgagtttggtatgacggccatcatcaacggtatcgcgctgcacggcggttttgtcccttacggtgcaaccttcctgatgtttatggaatacgcgcgtaacgcgatgcgtatggcagcactgatgaaagtgcaaaatatccaagtgtacacgcatgactctatcggtctgggtgaagatggcccaactcaccaaccagttgagcaaatcgcttctctgcgtatgacaccaaacatgagcacatggcgcccatgtgaccaagtggaatcggcagtggcttggaaactggccatcgagcgtaaagatgcgccatctgcgctgattttctcgcgtcaaaaccttgcgcagcaaccacgcagcgcagagcaagtcgcgaacatcgctaaaggcggttacatcctgaaagattgtgcaggccaacctgagctaattctgattgcaacaggctctgaagtggaactggcggttgccgcttacgagcaactgagcgccgaaggtaaagcggttcgcgtcgtttctatgccatcgaccgatgcgtttgataagcaagatgcggcttaccgtgaagccgttctgccagccgctgtgactaagcgtatcgcgattgaagcgggcattgccgacttctggtacaagtacgttggctttggtggtcgcatcatcggtatgactagcttcggtgaatcagcaccagcgggtgagctgttcaaactgtttggtttcacgactgaaaacgtagtgaagcaagctaaagaactgctggcgtaa

SEQ ID NO: 40873 - DNA, 1179 bp, Vibrio cholerae
ttgagaggacaaatcatgtctgtaatcaagatgattgacctggatcttgcaggtaaacgcgtatttatccgtgctgacctgaacgtaccagtaaaagacggcaaagtgacttctgatgcacgtatccttgcatcactacctaccattaagcactgcttggaagcgggcgcgaaagtaatggtcacttctcacctaggtcgtccaacggaaggtgagtacgctgaagagttctctctactgcctgtggttaactacctgaacgatgctctcgattgcgaagttcgcctagtgaaagactacctagacggcgttgaactgaacgcaggtgaactggttgttctggaaaacgttcgtttcaacaaaggcgaaaagaaaaacgaagaagcgctgtctaagaaatacgcggcactgtgtgacgtattcgtgatggatgcgtttggtactgcgcaccgtgctcaagcttctactcacggtgttggtatgtttgctcctattgcgtgtgcaggccctctactggctgacgaacttgaagcgctaggcaaagcgatggacaaaccagctcgcccaatggtggctatcgttggtggttcaaaagtatcaactaagctgactgtacttgagtcactgtcaaaaattgctgaccaactggtggttggcggtggtattgcgaacactttcatcgctgcagcgggtcacaacgtaggtaagtctctgtatgaagctgaccttgttgaaacagcgaaaaaactgatggaagagtgcgcgattcctgtggcgactgacgtagcttgtgccaaagctttcgatgagaacgcagaagccgaaatcaaacacgtttctgaagttcaagatgacgacatgattttcgacttgggtccaaactcaacggctgaactggctgagatcctgaaaaacgcgaaaactatcctgtggaacggcccagtaggcgtattcgaattcaagaactttgaagcgggtactcgtggtatcgcagaagcgatcgcacaatcagaaggcttctctgttgctggtggcggtgacacgctagcggcgatcgacaagtttggcatcaaagccgatgtttcttacatctctactggtggcggcgcgttccttgagttcgttgaaggcaaaaaactgcctgcagtagaaatgctggaagcacgcgctaaagcgtaa

SEQ ID NO: 40874 - DNA, 1077 bp, Vibrio cholerae
atgtctaagatctttgattttgtaaaacctggtgttatctctggtgatgacgtacagaaagtttttgaagtagcgaaacaaaatggctttgcacttccagcagtaaactgtgtaggtactgactctgtaaacggcgttctagaagcagcagcaaaagtgaaagcgcctgttatcgtgcagttctctaacggcggcgcagcattctttgctggtaaaggtctgaaacttgaaggtcaacaagcacaaattctgggcgcgatcgcgggtgcgaaatacgttcacactgtagcggaagcttacggcgttccagtgattctgcacactgaccacgcagcgaaaaacctactaccttggatcgacggtctgctagacgcgggtgaaaaacacttcgcagaaaccggcaaaccactgttctcttcacacatgattgacctgtctgaagagtctctggaagagaacatcgagatctctgcaaaatacctagagcgcatggcgaaaatgaacatgactctggagatcgaactgggttgtactggcggtgaagaagacggcgttgataactcagatatggattcttctgagctgtacacttctccagaagacgtggcatacgcttacgagaaactgaacgcaatcagccaccgtttcactatcgcggcttctttcggtaacgtacacggcgtttacaagccaggtaacgtggttctgactccaactatcctacgtgattctcaaaaatatgtttctgagaagtttggtctgccagaaaactctctgaacttcgtattccacggcggttcaggttcttctctggaagaaatccgtgagtcaatctcttacggcgtgatcaaaatgaacatcgatactgatactcagtgggcaacatgggatggtattcgtcaatacgaagcgaaaaaccatgactacctgcaaggtcaaatcggtaacccgactggtgaagatgcaccgaacaagaagtactacgatccacgcgtatggctacgtgctggtcaagcagccatggttgctcgtctagagaaagcattctctgatctgaacgcgatcgacgtactgtaa

SEQ ID NO: 40875 - DNA, 864 bp, Vibrio cholerae
atggctggtgaatcgattggtgttgaagtgcctatcgtcgaaagttttaaccaagtgaatacttggttaaccaataattcggatcttttgattcagtacggcgtgaatgtgatttccgctattctgatcctatttatcggtaaccttgtggttaaaggggttgcaggtagtgtggcgaatgtattgaaaaagaaagagatggataaggctgtcgtagactttatccacggtcttgttcgttacacgctgtttattattgtgttgattgcggcgttgagtcgtattggtgtgcaaactgcgtcggttgtcgctgtgattggtgctgcgggtctggccgttggtttggctctacagggttcgctgtctaattttgcagccggtgtactgattgtggcattccgcccattcaaatccggtgattatgtagaaattggtggcgtcgccggctcggttgattctatccaaattttccaaactgtcctgaaaagcccagataataaaatggttgtggtaccaaactcggcggtcattggcggtgctattactaactattcacgtcacgaaacgcgtcgtgtcgacatggtgattggggtttcttacaagtctgatctgcagaaaaccaaacgtgttctgcgtgagacgctggaaaaagatcctcgtatcctcaaagatccggatatgacaattggtgtgctgacgctggcggattcatcaatcaactttgtggttcgtccatggtgtaaaacttcggactattgggcagtgtactttgattcgatgcaagcgatcaaagaagcgctggatgccaacggtatcgaaattccattcccacaaatggatgtgcatctgaacaaaatcaattaa

SEQ ID NO: 40876 - DNA, 897 bp, Vibrio cholerae
atgcgtggtctggattatcggtggattgaagctctagatagtgtggtgagtaaaggcagttttgaacgagcggctgagcagctctttatctcccaatctgctgtatcacaacggattaaacagttagaaaaatacttagctcagccagtgttgatccgtgagcagccaccaaggccaaccttggttggcaaaaagttgcttgggctctatcgccgagtctgtttaatcgaacaagagttggttccggagttgacgaaccaagagcacgttcgcccggtttctatgtcgattgcgaccaatgcagatagcctagccacttggttgttaccggcgctggataaggtaatgaaaagccgccaagtggaattgaatctggtgatttatggtgagtcacgtaccctcgataagctcaaaaatggtgaagtggtcggtgcaatcagtttggagccacaaccgatcactgggtgtagtgctgagtatttgggtcagatggagtatctgtgcgtcgcaagccctgagttctatcaaaaatactttgctaagggggtcaccccgcgttcattaatcaaagcgcctgcggtgtcttacgatcaatatgacgaattgcacaataaattcttatgggattactttgctgtaccacgtgataaagtcatcaaccacacggttggcagctcagaagcttttgtccgtttagcgctttctggcgcggcttactgtttgatcccacgtttgcagatcatttcggaattggaaagtggtgctctcatcaatatgacgcctgattttatgctgtcatatccgattttttggcatcattggcagcttgaaacgggcgtcttacttgaaattagcgaagcgatcactgcttatgcgaaaagcgtactacctcaataa

SEQ ID NO: 40877 - DNA, 717 bp, Vibrio cholerae
atgacattaaggatcgaaacgatgaaattatttgcaccggtggttttactgctctctgttctttcaagccctacctttgcacaggaatgggattttccacatatttcgacttcaggttatggtgaagtgactgctgtacctgatatggcggagttttccgtgaaggttgttgaatcgacaatgaatgcggaacaagcgaaagcggcagtggataaggcggtaacggaattcacctcaaaattggtgaaatccggtgtcgcacagcagaatatctcgagctcaaatctgtacatcaacccgcaatatcactatccagcaaacggtaagccagagttagtgggctatcaagcttctcgctcgattaccgtcagggtcgaagaggtgagtaagctgaatcagtatctggatatcgcgttagagtctggtatcaatcaagtcaatagcattcaattgaaggtgcgtgatcaagagaaataccagcagcaagcgcgtatggcggcgattgaagatgccaagctcaaagctcagtctctagctaagggatttgagcgccgcttagaaggcgtttggcggatagactacaacacgccaagtgttgagccgatcatgatgcgagcggcgaatctaagcgaaaaaatggatgtggcagatacctatcaagagtcttccttggtgattcgtgatcgagtggatgtggtatataagttggcaccatag

SEQ ID NO: 40878 - DNA, 1413 bp, Vibrio cholerae
atgaaaaagaccaaaatcgtatgtacgattggcccaaaaactgagtctgtagagaaactgactgagcttgtaaacgctggcatgaatgttatgcgtctcaacttctctcacggtgactacgttgaacacggcactcgtatcactaacttccgtaaagtgatggaagtgaccggtaaacaactggcgatcctactggatactaaaggtccagagatccgtactatcaagctggaaaacggtgacgatgtggatctggtcgctggccaagagttcactttcacaactgacacgaaagttgttggtaacaaagagcgcgtagcagtcacttactctggttttgcaaaagacctgaacgtgggcaaccgtattctggttgacgacggtcttatagagatggaagtactggcgaccactgacactgaagtgaagtgtaaagttctgaacaacggcgctctgggtgaaaacaaaggtgttaacctgccaggcgtttctgtcaatctgccagcgctgtctgaaaaagacaaaaacgacctgaaatttggttgtgagcaaggcgttgatttcgttgctgcctctttcatccgtaaaggttctgacgtgaaagaaatccgtgaagtattagcttctcacggcggtcaaaacattcaaatcatctctaaaatcgaaaaccaagaaggcttggacaacttcgatgagatccttgagctgtctgacggcatcatggttgcacgtggcgacctaggtgtagaaatcccagcagaagaagttatcttcgctcaaaagatgatgatcgagaaatgtaaccgtgcacgtaaagtggttatcacggcgacgcaaatgctggattcaatgatcaagaacccacgtccaactcgcgcagaagcgggcgacgttgcgaacgcgatcatggatggtactgatgctgtaatgctttctggcgaaacagcaaaaggtaagtacccagttgaagcggtgaagatcatggcgcaaattgctgagcgtactgaccctgtactgaaagcagaactgggttcacgcctagacagcccacgtctacgtatcactgaagccgtatgtaaaggtgcagtagacaccgcagagaaactggcagcgccactgatcatcgtagcaactgaagcgggtaaatctgctcgttcagttcgtaagtacttcccaacggctaacattattgcagtcaccaccaacaagaaaacagcagctcagttagtgctttctaaaggtgtaacgccagttgtggttgacgcgattgacaacactgacgctttctaccacctaggtaaagagattgcgctgcaatctggccttggcaagaaaggcgacatcgtagtgatggtttcaggcgcactggttgcttctggcacaacgaacactgcatcagtacacgtactgtaa

SEQ ID NO: 40879 - DNA, 1833 bp, Vibrio cholerae
atgtgtggaattgttggtgcggttgcacaacgcgatgttgctgaaattttagtacaaggcctacgccgtcttgaataccgcggctatgactctgcgggcgtagctgttgtggatagcgataagcagctcacgcgtttacgccgtttgggtaaagtacaagagttggcggatgcggttgaagcggcgcaagtcgcgggcggtacaggtatcgcgcatacccgttgggcaacgcatggtgagccttctgagatcaatgctcacccccatatttctggtgacattacggtggtacacaacggcattatcgaaaaccatgaaatgctgcgtactatgctgcaagatcgtggttatgtgtttacttcacaaacggatactgaagtcattgctcatttagtggagtgggaattgcgcagtgcttcctctttattagaagcggtacaaaccaccgttaaacagcttacaggagcttacggcactgtggtgatggatcgtaacgacccttcgcgcttagtggtcgctcgctcaggtagcccaattgtgattggttttggtatcggtgaaaacttccttgcgtcagaccaactcgcgctacttaacgtcacacgccgctttatgtatctggaagagggggatgtagcggaaatgactcgtcgtgatgtgcgcgtatttgatgctctggggcaacccgtacaacgtgaaatcagcgaatccaatctagaacatgatgctgcggacaaaggtcactaccgccactacatgcaaaaagagattttcgagcagccaaaggcgctgatcaataccatggaagggcgtattacccatgactgcgtggtggtggaaagcattggtgtgcacgcggcagagattctggcaaaagtggaacatgtacagatcgtcgcctgcggtacttcttataatgcagggatgacggcacgttactggtttgaatcgttagcgggtgtgagctgtgatgtcgaaatcgcgtctgaattccgctatcgcaaatttgtcacgcgccccaatagcctactgatcactctatctcagtctggtgaaacggcagataccttagccgcgctacgtttagcgaaagagaaaggctatatggcggcgatgacgatttgtaacgttgcgggttcttctctcgtgcgtgaatcggatttcgcctttatgactcgcgcaggtactgagattggtgtggcttcaaccaaagcctttaccactcagctagtcacattgttgatgctggtgactgcacttggtaagcagcaacagcgcattggtcgcgagttagaagctgagatcgtacatgcattgcatcaactgccgaagcagattgaaaccgcattgtcgtttgaaaaacagatcgaaacgctcgcggaagattttgctgataagcatcataccctcttcttggggcgcggtgagtactacccgattgcggtagaagcgtctcttaaactgaaagagatctcttacatccacgcagaagcctatgcagcgggcgagctaaagcatggcccattggcgttaattgatgcggatatgccagtggttgtggttgcaccaagcaatgaactgttagaaaagcttaaatccaatattgaagaagtgcgtgcgcgcggtggtttattgtacgtatttgccgatgaagtggcgggctttgaagcggatgagacgatgaaaatcattgcgatgccgcatgttagcgagattgtggctccgatttattacaccatcccaatgcaactgctctcttaccatgtggctttaatcaaaggtaccgatgttgaccagcctcgtaaccttgctaaagcggtaactgtcgagtaa

SEQ ID NO: 40880 - DNA, 1281 bp, Vibrio cholerae
atgggtcaatttagatttcttgctttaatcgttgctgtactttgtttttcggtcgctttgtttctacctaccgcagatgagccagatcaagatagttatagcgttccactcaatcaaagcgttaacacgtcgcaaccgccatcatcagagatggttccctcagatatccgtttgacaccgttacctcaacctaaacggatacactatatggtaaaagtgggggacacgcttagtggtatcttcgctcaactgggtgtgccttatagtattttgcagaaaattctctctgtagatcttgaccatctccagctagacatgattcagcccggggaagagcttgaattaatgatggatgacatggggcaattgagccggctaatttatcatatgagtattgtagagaaggctatctacactagagaaaacgatggttctttctcgtacgatttccaagaaatttcaggggaatggcgtgaaatcttattttcgggagaaatcaatggaagcttttcggtttcggcccgtcgagtgggattgacatcaagccaagtcgcaaatattacgcaggtgatgaaagataagattgatttttctcgatcccttagagccggtgaccgtttcgatatcttagtgaaacagcaatatttaggtgaacacaacaccggcaacagtgagattaaggcgatttcttttaagttagcgaagggggacgtcagcgcatttttagccgaggatggacggttctatgatagagctggcaacagtttggagcgagcgtttaaccgctatcctgtagataaggcataccgccaaatcacctctgggtttaatcctaagcgtaaacatccggtaacgggaagagttgttccacataacggaacggatttcgcgacgccaatcggtgcgccagtttattctacaggtgatggaaaagtgattgtggttcgtaaacatccttatgccggtaactatcttgtaattgaacataacagcgtgtacaaaacgcgttacttacacttggataaaatcttggtgaaaaaaggtcagcttgtaaaacgtgggcaaaaaattgcccttgctggggcgactggccgcttaaccggacctcatttgcactttgaagttttagttcgcaatcgtcctgttgatgcaatgaaagctgatttacctatcgcgaagtcgctttctagtaaccagaaaacctcatttttggcacgagtatcagagtttgatcatttggtgcaggctaatcaacaagaggttgctctcgacgaaacttaa

SEQ ID NO: 40881 - DNA, 474 bp, Vibrio cholerae
atgaatcccaaaacttccgagtaccaaaagcagcaacgctatcaggaaaatgaaatcctagagcatgccgctgagatactagctaaccgctacgtgcgtggcgatgccctaaccaatcctgatgccaccaaagagtatgtacgctgtaagctaggcagctatgaacgtgaagtgtttgccttattgctactggataaccaaaaccgactgattgagtttaaagagctgtttcaaggaacggtggatgcggccagcgtttacccgcgagaagtggtgaaagcggtgttagaagtgaatgccgcagcagtgatatttgcccataaccatccatctggagactcaacaccatctcaagccgatagacgaataacagaaagactcaaagatactttagcgctggtggatgttcgcgttctcgaccatatcgtgacaggcgatacctgcacctcatttgctgaaagggggtggttatga

SEQ ID NO: 40882 - DNA, 1881 bp, Vibrio cholerae
atgaatgtagggtttgtaaaaaaattaatatttatatcttcttttatcttattagtgactgtagcatttgttgtttgggaagggtacacaactgcgaagaaggaagtttcagttgtaatagaagatggtataaatgaaataattaataaaacagaaagatttgtttcattaaaactagaaagcgatattagtttggctagttcaattgtggatagtatttctttacgcataagcgatgaacagtatatcaatgacattattaatggtaatgcaataaaaaaagcgttcctttctacagggtttggttttgatagtaatggtaaagttatagaaaatgatcctaattgggaacctgaggatgattatgatccaaggagtaggggatggtatcaagaagcaaagaaaaataaacgtatttttataactgagccatatctggatacagaaggaaaaaactttttagtatcaattagctccccagttgctgatacaatgaataattttattggggctatgtattttgatgtggatctgtctaggatacaaaaaaacgtagacgatataaatctgtttgaagctggctatgtgtttattacatctaatacaggtaaggtaattatacattcaaatacagatgaattaggtaaaaatgtaaaggatatatataatgggttcagactagataaaggaaaggtagtgctttccgtaaatggggttaataaatggttgtatactagtcctattttgggtggggactggtttattatcgctgttatagatgaaagcattgcaatgcaaagtataaataaaatgaagtatgagcttatattttattctgcaattggtttggttttcggtgggttaattttagttttcatactacgaagactaatgtcgccgcttaaaactttagactcagcaattaaggatattgcctctggtggtggagatttaactaaaaaacttgatacaaatcttgataaagaattctctgagttagcattggggtttaattcatttactgagatgttggggagtcagattagacaattaaagactatagctagtggtgtacttgatggagcggagaaaacggccaatgaagcagaggtttctcgcttggttgtggagcaacagcttcaggagttagaacaactggctactgcgatgaatgaaatggcaatgactgcctcagaggttgcaaatagtgctcaagttgcagcggacgctgcaaaagaaggcgaaagtgcatctttagaagggagctctgtcgtccatgaaacgacagatgcaattcagcgactttctattaggattggtagctcagtagaagatgttaaggaattagtgaaagctacagaccgcatagaaacagttcttgatgttataaatgatattgccgaccaaactaatttgttggcattaaacgcagcaatagaagcggctagagctggagagtcaggtagaggtttcgcggtggtagctgatgaggttcgtaccttagctcagcgtactcagcagtccactatgcaaattagtgagattattgaacaacttcaagaaggtgccaaaaacgtttctcgttctatggatgagagcaaactggaaacagatattgttgtagaaaaaacaaatcaagttaatgagaaaatatcgctagttcaacaggctattcatcgtatttctgatatgaatttacaaatagcttcagcggctgaagagcaaagcttagttgccgaagaaataaataataatacagttaatataaaagatctttcaataaaattatctgaagcagcatcaaatgcaggaactgaaatgaacgctcaggttagcaaagtaaaagaacaaaatgaattattaaatgagtttaaaatatga

SEQ ID NO: 40883 - DNA, 1878 bp, Vibrio cholerae
atggatcaaaatccgcagtcacagcttaaacaacttgtccttcgcggcaaggaacagggctatctgacctacgccgaagtaaatgaccacttgcctgctgaaatcgttgattcagagcaggtggaagatattattcagatgattaatgacatgggcattaaggtggtggaaaccgcacctgatgccgatgatcttgccctcagcgatgatactaccatcactgacgaagatgctgctgaagcagccgccgcggcactttctagcgtagagagtgagattggccgcaccaccgatccagtacgtatgtatatgcgtgaaatgggtacggttgagcttttgacacgtgaaggtgaaatcgatattgccaagcgcattgaagatggtattaaccaagttcaaagtgcgattgctgagtatcctggaaccatcccttatattcttgagcagtttgatcgtgttcaggccgaagagctacgtctcactgacctgatttcaggtttcgttgaccctaacgacatggaaaccgaagcgccaaccgcgactcacatcggttctgagctttctgaagcggatctcgcggatgaagatgatgctgtcgtcgaagatgaagacgaagatgaagacgaagatggcgacggtgaaagcagcgacagcgaagaagaagtcggtatcgaccctgaactggctcgtgagaaattcaatgaactgcgcggtaagttccaaaacctgcaattagcggttaatgaatttggtcgtgacagtcatcaagcttctgaagcgtcagacttagtgctggatatcttccgtgaattccgcctaacaccaaagcaattcgaccacttggttgaaactctgcgcacttcaatggatcgtgttcgcacccaagaacgtttggtaatgaaagcggtagttgaagtcgcgaagatgccgaagaaatcgttcatcgccctatttacaggcaatgaatcgaatgaagagtggctggataaagtccttgcttctgacaagccttacgtagcgaaagtccgtgagcaagaagaagagatccgccgttcaattcagaaactacaaatgatcgagcaagagacatcactgtctgttgaacgcatcaaagacatcagccgtcgtatgtcaatcggtgaggcgaaagctcgccgtgcgaagaaagagatggttgaagcaaacttacgtctggtaatttcgattgctaagaaatacaccaaccgtggtctgcaattcttggatctgatccaagaaggtaacatcggtttgatgaaagccgtcgataagtttgaataccgtcgtggttataaattctcaacttatgcgacttggtggatccgtcaggcaatcactcgttctattgctgaccaagcacgtacgattcgtattccagtacacatgatcgagacgatcaataaactgaatcgaatttcgcgccaaatgctgcaagagatgggtcgtgagccactgcctgaagaattggcagaacgcatgcaaatgccagaagacaaaatccgcaaagtgctgaaaattgccaaagaacccatctccatggaaacaccgattggtgatgatgaagattcgcatctgggtgattttatcgaggataccaccctcgagctgccactggattctgcgaccgcaaccagccttaaagctgccactcgcgatgtattagcaggcctaacacctcgtgaagcgaaagtgctacgtatgcgtttcggtatcgatatgaataccgaccatactctggaagaagtgggcaagcagtttgatgtaactcgtgaacgtattcgtcagattgaagcaaaagcactgcgtaaactgcgtcatccaagccgctcagaagttctgcgcagcttcttggatgaataa

SEQ ID NO: 40884 - DNA, 444 bp, Vibrio cholerae
atggctctgattgagaatctcaaagaagagcaaaaactagcgatgaaagccaaggataaaccacgccttggcgctatccgtttagtgttggccgctattaaacaacgtgaagtcgatgagcagatcactctgagcgatgacgacattgttgcagtgctgaccaagatggtgaaacagcgtcgcgactctgtaagccaatacgaagcagcaggtcgtcaagacttggctgatgcggaaaaagcagagatcaccgtacttgaggagtttatgcctcaacctctgagcgatgatgaagtgaaagccctgattgacagcgcaatcactgaatcagccgccgcaggcatgcaagacatgggtaaggtgatggctgtacttaaaccgcatattcaagggcgtgcagacatgggtaaagtgagcggtttggtccgcgctaaactggcttaa

SEQ ID NO: 40885 - DNA, 216 bp, Vibrio cholerae
atgccagtagttaaagtacgtgaaaacgaaccgttcgacgtagctctgcgtcgtttcaaacgctcttgcgaaaaagcaggtatcctttctgaagtgcgccgtcgtgagcactacgaaaagccaactaccgttcgcaaacgcgctaaagcagctgctcaaaagcgtcacgctaagaagctagctcgcgaaaacgcacgtcgcgttcgtctgtactaa

SEQ ID NO: 40886 - DNA, 627 bp, Vibrio cholerae
atgactccattggcgctcagcatgatcatttttgcctatctactggggtcaatttccagtgcggtgttgatttgtcgtgttctgcgtctccccgatccgcgtaacgtgggctcacaaaaccccggagccaccaatgtactgcgcatcggcggcaaaaaagccgcagtggccgttttattgtgtgacatgctcaaaggcaccatcccagtttggggcggctacttcctcaatattgaaccttttatgttgggattggtggcaatcgccgcctgccttggtcacatgtacccgatttttttccatttcaaaggtggaaaaggcgtggcaaccgcgttaggtgcaatcgcaccgattgggctcgatttaaccgctatggtgatggccacatggcttgtcgttgtcgtactgtttcgctactcgtcgcttgcagccttagtcactgtgttgctcgcgcccctctacacttggctgattaagccacagtacacgcttccagttgccatgttgtgctgtttgattgtgctgcgccatcatcaaaacgtgaagcgcctgtttgcgggtaccgagcccaaggtcggtgaaaagaataagaagccgagcgatgatgaagagagccgcgtcgtgtaa

SEQ ID NO: 40887 - DNA, 699 bp, Vibrio cholerae
atgaacaacatgacagcgattgtccccgccgcgggtgtgggtagccgcatgcaagcggatcgccctaagcagtatttaaccttgctcgataaaacggtgctcgaacacaccgttgaacatcttttagaacatcctctcatcgaacacgtggtagtggcggtgagtgctgatgacccctattttgcgaatttgcctctggcgcatcatccgcgtgtgattcgtgtcgatggcggcaaagagcgggcggattcggtattgtcggcactggagtatgtctgccagcatcgcctcagtgaatgggtattggtgcatgatgcggcgcgtccgtgtgtgactcacgccgatatcactcagctcatcaccacggctttagctcatccgattggtgcgattttggcctcgcccgtgcgggataccatgaaacgtggcgatcacttacagcagattgtgcatacggtcgatcgcactgcgctctggcatgcgctgacaccgcaaatgtttcgtgcccaatcactgcgtgagaggttattcgccgctttacagcagcaagtcacgattaccgatgaagcctcagcctttgaatggcgtggtgaaaagcctgctttagtggcaggacgtgccgataatctcaaaattactcaacctgaagatctcgcgttggccgagttctatttaagtcgtaataaggaaaaatcatga

SEQ ID NO: 40888 - DNA, 477 bp, Vibrio cholerae
atgatcagaattggccacggctttgatgtacaccgttttggcggcgaaggtcccatcattattggtggagtgaagatcccttatgaacaaggattgatcgcccattctgacggtgatgtggcactgcacgcattaagtgatgccttgctcggcgcgattgctgccggagacattggccgccacttcccggataccgatgataaatggaaaggggcagacagccgcgagctcctcaaagatgtgtatcgccgtgtcaaggcgcaaggttatgtgcttggtaatgcggacgtcactatcattgcccaagcgccgaaaatggccccttatattcaggcgatgtgcgcggcgattgccgaagatctggaaaccgatctgggcaacatcaatgtcaaagcgaccacgacagaaaaactcggctttaccggacgtaaagaaggtattgcctgtgaagcggttgtacttttgcgcaaagcttaa

SEQ ID NO: 40889 - DNA, 2589 bp, Vibrio cholerae
atgatgaaatcgaacgcctcaccgagcgagtctctttcgcaccacaccccgatgatgcaacagtatttaagactcaaggcggaaaacccagacattctgctgttctatcgcatgggtgatttttacgaactgttttatgacgatgccaaacgcgcctctgaactgctagatatttccttaaccaaacgcggcgcatcggcgggtgaacccattcctatggcgggtgtgcctttccatgccgtggaaggttatttggcgaaactcgtccagatgggggaatcggtcgcgatctgcgaacagattggcgatccagccaccagcaaaggccccgttgagcgcaaagtagtgcggattgtgacaccgggaacggtgaccgatgaagccctgctctcagagcgagtcgataacctgatcgcggcgatttatcaccataacggccgctttggttatgcaaccatggatatcacctccggtcgttttcagctcagtgagccgcaaaccgaagaagagatggccgccgagctgcaacgcacttcgcctcgtgaactcttgtttcctgaagatttttcgccagtgcatctaatggcaagccgccaaggcaaccgccgtcgcccgatttgggaatttgaactcgataccgcgaaacagcagctcaaccagcaatttggcacgcgcgatctggttggctttggggttgagcaagcaaaacttggcttgtgcgcagcaggctgcttgatccaatacgtcaaagatactcagcgtaccgctttgccacacattcgttcactgacttgggatcgccaagatcaatcggtgattttggatgccgcgacgcggcgcaaccttgaactcactcataacttggcgggtggaacagataacacgcttgcagaagtactcgaccattgtgctacccccatgggcagccgcatgctcaaacgttggatccaccaaccgatgcgcgataacgccactctcaatcagcgtttagatgcgatcactgagctcaaagaaaccgctttgtatggggaactgcatcccgtgctcaaacagattggcgatattgaacggatcctcgcccgtctagcgctgcgttcagcgcggccgcgcgatttagctcgcctacgccatgccatgcagcagttacctgaattgcactcggtcatgagcgagcttaagcagcctcaccttaccgagctacgcacccatgccgagccaatggatgaattgtgcgatttactcgaacgtgcgatcaaagaaaacccacccgtggtgatccgcgatggtggcgtgatcgccgatggttacagtgccgaactcgatgaatggcgcgatttagccaatggcgcaaccgaatttctggaacgcttggaagccgaagagcgcgatcgtcacggcattgataccctgaaagtgggttataacaatgtgcacggtttctacattcaagtgagccggggtcagagccatttagtgcctccccactatgtacgccgtcaaaccttaaaaaatgctgagcgttacatcatcgaagaacttaaacagcatgaagataaagtgctcaattctaagtctcgtgctttagcgttagaaaaacagctgtgggaagagttgttcgatttgctgatgccgcatcttgagcagctgcaacaactggcggcttccgttgctcaattggatgtgctgcaaaacctcgcagagcgcgcagaaaacttggaatattgtcgcccaacgctggttcaagaagcgggcattcacatccaaggtggtcgccaccctgtggtagagcgagtaatgaatgagccgtttatcgccaacccgatcgaacttaatccacagcgacgcatgctgatcattactggtccgaatatgggcggtaaatcgacttacatgcgtcaaaccgccttgattgcactgatggcgcatatcggtagttatgtgccggctgaaagtgcgtcaatcggcccactagatcgtatttttacccgtatcggcgcgtccgatgatcttgcgtccggccgctcaacctttatggtggagatgacggaaaccgccaatattttgcacaatgcgacccgtaacagtttggtgttgatggatgagattggccgcggtaccagtacttatgacggactctcgctcgcttgggcgagtgccgagtggcttgccaaagagattggtgccatgacgctgtttgctactcactattttgagttaaccgaactgccgaatgtgttacctcatctagcgaatgttcatttagatgcggttgaacatggtgatggcatcgcctttatgcacgcagtgcaagagggtgccgcgagtaaatcgtatggtttagccgtagcaggactggctggcgtacccaagcccgtgattaaaaatgcgcgcgccaaattacaacaacttgagctattaagctcacaacctgccgagactcgtaagccaagccgcgtcgatattgccaaccagctgagcttaattcctgagccgagtgctgttgagcaagccttggcaggcgtagatcctgaccagctcactcctcgccaagctctagatatgctctatcaattgaaaaagctgctctag

SEQ ID NO: 40890 - DNA, 1002 bp, Vibrio cholerae
atgaaccgaattaaatcgacattaacggcgttactgctagcaggctcgttccaagcctctgcggccgatcaaaccattctcaactcatcttatgatattgctcgtgagctgtttgtggcttacaaccctgtgtttgctgagcattggcaacaaaaaacagggaagacggtcgaaattaaacagtcgcacgctggatcatcggctcaagcgcgttctattctgcaaggcctagcggcagatgtggtgacgtttaaccaagtgactgatgtgcaaattctgcacgacaaaggcaagctgatcccagcaaactggcaaaccctgctaccaaacgcgagctcgccttattactccaccaccgcatttttggtgcgcaaaggcaacccaaagaacatccaagattggagtgatttggtacgtgatgatgtgaaaagtgtgttcccgaacccgaaaacctcaggtaatgcgcgttacacctacttggcagcgctaggctttgcacaaaaacaatttggtcaggataaccaagtgcagcaagatgagtttttgaagaagtttctggctaacgtcgcggtatttgatactggcggccgtggtgcaaccacatcattcgttgagcgtgggattggcgatgtgctgatcacctttgaatcggaagtgaataacattcgtcagcaatacggtgcggatgattaccaagtggtggtgccgaaaacctcgattttggctgaattcccagtcgcggtagtggagaaagtggcaaaacgtaatgggacttatgatgtggcgaccgaatacgtttcatacctgtacagtgagccagcacagcgtttgcttgcagaatttaactaccgtgtgcacgatgccaaggtacaagctgagtttgctgagcgttttcccgccgttgaattgctgactgtggaagggatcgccggtggctgggagcaagcgatgcaaacccagttcgccaatggggctaaattggatcaactgctgcgccgctaa

SEQ ID NO: 40891 - DNA, 1239 bp, Vibrio cholerae
ttgagcatctcgcagcagatcaggttcaaaacgttaactgagccaaacttttttctatacaggggtggacactgtacaaatcaacagtataataaaccccaacatgacaaatcagcgtcgacccgatttcgacacaattacctatcacctgagagtgactatccggagagagtaatggacgagaataaacagaaggcacttgcggccgccctcggtcaaattgaaaagcaatttggtaaaggctccatcatgcgcttaggcgacaaccgcgcgatggatgtagaaaccatttcgaccggttctctgtctctggatatcgcgttgggtgctggtggtctaccaatgggacgtatcgttgagatcttcggccctgaatcttcgggtaaaacgacactgactctggaactgattgctgctgcacaacgtgaaggtaaaacctgtgcgtttatcgatgccgagcacgcactggatccggtttatgccaaaaaattgggcgtgaatatcgatgagctactggtttctcagccagataccggcgagcaagcactggaaatttgtgatgcactggctcgctctggtgctgtggatgtcatcgttgttgactcagtagcggctttgacaccaaaagcggaaattgaaggcgaaatgggcgatagccacatgggtctgcaagcgcgtatgttgtcgcaagcaatgcgtaaactgacgggtaacctcaagcaatccaactgtatgtgtatcttcatcaaccaaattcgtatgaagattggtgtgatgtttggtaacccagaaactaccactggcggtaacgcactgaaattctacgcttctgttcgtttggatattcgccgtactggcgcaatcaaagaaggcgaagaagtggtgggtaacgaaacccgtatcaaggttgtgaagaacaagattgctgcgccgtttaaagaagcgaacactcagatcatgtatggccaaggtttcaatcgtgaaggtgaattgatcgatcttggtgtgaaacacaaaatggttgagaagtcaggcgcttggtacagctataacggcgataaaatcggccaaggtaaagcgaatgcctacaagtatctgaaagaaaacccagaaattgcgaaaactctagataaaaaactgcgtgaaatgctgttaaacccagaaaacatgcagctgatcgctgaaacatcttctgcggcggatgacgtcgaatttggcgcggtgccagaagagttttaa

SEQ ID NO: 40892 - DNA, 459 bp, Vibrio cholerae
atgagtttcgacttagccacttgccgacaaagtgccttacaacttctgagccgtcgcgatcatagcgaatatgagctataccaaaaattagccctcaaaggtcatcctgctgaagtgattgatgaggttgtgaagtacgttttagagctagggtatttgagtgatgcccgttacgcagcgagtcaggctcgacaaatcgttcataaaggttacggtgagcagcgtttgcgccagcaactcaaagaaaagcgggttgcggaagaggtgattgagcaagccctcgccgagcaaacgatagattggtttgaactagcgaaagaggtcgcacacaagaaattcaaaagcggcatcagccacgagcgctcgcaatacgccaaacaagttcggtacttacagtaccgtggtttcaactttgagcaaattcgttatgcgcttcaagccagtgagagtgatgagtaa

SEQ ID NO: 40893 - DNA, 2583 bp, Vibrio cholerae
atgtttatgagcacggatgaggtgcgccgcgcgttcctctcattctttgaaagcaaaggtcaccaaattgtagaaagttcttctctggtgcctgctaacgatccgaccctgttgtttaccaacgcagggatgaaccaatttaaagactgtttcttgggcttggaaaagcgcgcctacactcgcgccacgaccgctcaacgttgtgtccgcgcgggcggtaagcacaacgacctagaaaacgtcggtttcaccgcacgtcaccacactttcttcgaaatgctgggtaacttcagtttcggtgactatttcaaagaagatgcgatccagtatgcatgggagtttctgactgacgttctgcaactgccgaaagagcgcttgttagtcacggtttatgaaaccgatgacgaagcctttgatatttggaataaaaaagtcggcattcctgctgaccgcattattcgtatcggcgataaaaaaggtggcaagaagttcgattcggataacttctggcagatgggtgacaccggtccttgcggtccatgtactgaaatcttctacgaccacggtgaccacatttggggtggacctccaggctcacctgaggaagatggcgatcgtttcatcgaaatctggaacaacgttttcatgcagttcaaccgtcatgcggatggcacgatggagccgctacctaagccgtctgtggacacgggcatgggtattgagcgtatttccgcgatcatgcaaggcgtgcactccaactacgaaatcgacgtattccaaacgctgatcaaagcagccgcagacgcaattggttaccaagatctgactaatcagtctctgcgcgttgtcgcggatcacatccgttcatgtgcctttttgattgtggatggcgtgatgccgtctaacgaaggtcgtggttatgtactgcgtcgtatcattcgtcgtgccgttcgtcatggcaataagctcggtgcgcaaggtgcattcttccacaagttggtgggaccattggcggaagtgatgggtactgcaggcgttgagctgaaaaagcagcaagctctggttgaaaaagtgctacgtatcgaagaagaaaactttggacgtacgctggatcgcggcatgagcattctgaatgacgcgctggatcaactatcaggccaagtgctggatggtgaaaccgtcttcaaactctacgacacctacggcttccctgcggatttaaccaatgatgtggcgcgtgagcgtggctttagcattgatgaagcgggttttgaacaagcgatggaagagcagcgtcaacgcgctcgtgaggctggccaatttggtacggattataattcgctgatcaaatccgccaccaataccgaattctgcggttacacggcgagtcgtggccaaagtgtggttcgcgaaatgttcgtggagggcgcggaagtttctacgctgtcagctggtgataaagccatcatcgtactagacaacacgccattctacgcagaatcaggtggtcaatgcggcgatactggcgttttgaaaaccgacgcaggtattttccatgttgaagatactcaaaaattaggtaacgcgattgcgcatcacggtgtgatcgcccaaggcgtattggcgacaggcgatcaggtggatgccatcgtcgatgaaaagcgccgtgcggcaatttcgctgaaccactcggcgactcacttgttgcatgctgcactacgtaaagtgctgggtgaacacgtggcgcagaaaggctctctagtgcgtgctgaaacactgcgttttgacttctcacatctggaagcgatgaccgctgcagagattaaagaagtagaacgtttagtgaaccaagaagttcgtcgtaaccacagtatcgaaaccaacatcatgaatattgatgaagcgaaagcgaaaggtgcgatggcgctgtttggtgagaaatatgacgaccaagttcgtgtgctctcaatgggagatttctcaactgagctgtgtggtggtatccacgcgagcaacacgggtgatattggtctgtttaagatcatctctgaaggtggtattgctgcgggtattcgccgtattgaagcggtgactggtgaaggcgcattagattacctcgatgcacagcaagcacagcatgatgccaaagtgtctgaaatggcggcaaaagccaaactgctggagaaagagatccaacagttgaaagataagctggcggcgaaagagagcgcgggtcttatcaaccaagttaagcagatcgcgggtgttaacgtactggttgcgcagctcaacggtgcagacaacaaagcgctacgtggcatggtagatgatctcaaaaaccaattaagcagcggcatcatcatgctgggtaatgtggctgaaggcaaagttggcctaattgcgggcgtaaccaacgatttgaccaataaagtcaaagcgggtgagctggtcaacatggtcgcactacaagtcggtggtaagggtggtggccgccctgacatggctcaagctggagggacagatgctcacgctctgccatcggccttagagtctgtcgacgcttggattgccgagcgtctataa

SEQ ID NO: 40894 - DNA, 198 bp, Vibrio cholerae
atgcttattttgactcgccgtgttggcgaaaccctgatgatcggtgacgaagtgaccgtgacagtattaggtgtaaaaggtaaccaagtccgtatcggtgtaaacgcaccgaaagaagtgtctgtgcaccgtgaagaaatctacatgcgcattcaagctgagaaaggtaatggtggcgttgcgtctggcaactactaa

SEQ ID NO: 40895 - DNA, 1794 bp, Vibrio cholerae
atgagcatgtctaaaccattagccatcaccgatgtcgtcctacgtgacgcccaccaatcgctctttgctacgcgtatgcgtattgaagatatgctgccgatcgcggctgagctggataaaatcggttactggtcgttggaaacttggggtggagcgacgtttgatgcttgcatccgtttccttggcgaagatccatgggaacgtctacgcgctttgaaaaaagcgatgccgaataccccaatgcagatgttactgcgcggccaaaacttactcggttatcgtcattacgcggatgatgtcgtcgagaaatttgtcgagcgcgcccatgtcaatggcatggatgtattccgtatttttgatgcgatgaacgatgtgcgcaattttgaaaaagcggtaaaagcgacgattggtgtgggcgctcatgcgcaaggaacactctcttacacgacgagccctgtgcacaacacgcaaacttgggtggatttagcaaaacgtcttgaagatctcggctgccactctttatgtatcaaagacatgtcgggtctgctcaaaccttatgaggccgaagagttaatcacgcgtattaagcagtcttgcgcggtgcctttggcgctgcattgtcacgcgacaacaggtttatctacggctacggcagtcaaagcggtggaagcggggattgatattcttgataccgcgatttcctcaatgagccagacttatggccatacgcccacggaaaccgtggtcgctatgctgcaggatacaccacgtgatacacaactcaaattggagcaacttgaaccgatcgcggcttacttccgtgaggttcgtaaaaaatacgccaagtttgaaggtcagttaaaaggtgttgattcgcgcattctgattgctcaggtgcccggcggcatgctgaccaatatggaaagccagttgaaagagcaaggtgccgcgcaccgtatcgatgaggtattggaagagatccctcgcgttcgtcaggatcttgggtttattccgttagtgactcctacctcgcagattgtcggcactcaagcggtgatcaacgtgttaaccggtgagcgctataagagcattaccaaagaaaccgcaggcgttcttaaaggtgaatacggtgcaacgcctgctagcgtgaatgctgagctgcaagcacgcgtattagaaggtggacaagcgattacttgtcgtcctgctgatcttctgcaagatgaacttgaccatctcactaaagagctgcttgaaaaagcgcaagtagaaaaaatcaccttagcggatgcgaaggtcgatgatgttctgacttatgcgctgtttccacaagttggcctgaaattcctgaaaaatcgccataatccagaggcgtttgaacctgcgccgggcaaagagcccgctccggtggctaccgcccctgcgagcaccaaacctgcagcaggtatcgagagctacagtgtgaaagtggacggcgtggtgtatgacgttgaagtgggttcacaaggtcaattgacctcagtggtacccgctggccaaaaagcagcaccaaaactggctgttgcaacacccactcaaggcgcagaagcggttgctgcccctttggcggggaccatctttaaaatccaagttgaacaaggcgatgaagtggcagaaggtgatgtgcttatcgtgttagaagcgatgaagatggaaactgaaatccgtgcagcgcgcagtggtgtgattcaggaactgcatgtcaaagaaggcgacagcgttcgcgttggcgcctcactgctgagcttggcataa

SEQ ID NO: 40896 - DNA, 1014 bp, Vibrio cholerae
ttggtatatattcaaagggatgcttcggcatccctttttattcgcgcgatagggatagtggaaatggaaaacaaacgaatcgtcattacccaatttggtacaccggatgtgttggccatgcaaagtgcgccaattcctacccccaaagcgggtgaagtattagtgaaagttgctttcgcgagtgttaaccctatcgatgtgaaaacccgggcggggttaggatgggcggcagcacaaaataaagacaaactgccgtggacacccggttacgatatctccggacgagttgtggcgttaggcgagggagttagccgccttaaagagcgggataatgtggcgggatttattggtttcccattgcgcggtggtggttacagtcagtatgtttgtgtgcctgagcaggaattgagtttggttcctgatgcagtaacgctcgaagcggctgccgcactgccccttgcggggcaaaccgccgcgcaagccttgagcaaagcgcaagtccaagaaggtgaacgtgtgttaatccttgcaggggcgggtggcgttgggcatatcgcggtgcaaattgcactcgccgctaagactgaagtatttaccacttgcagtgaagcgaatttagactatctggccacgcttggcgctcatgcgatcaattaccaatttgcgcccgtctctcagcgtttagaagaggtggatgtgttgatcgatctggtggggggagaggcggcgttggatgcgcttaaatgcctaaaagataacgctcgcgtcattactgtaccgacgttaaccgccgagcttatctgcgaaaaagccaagctactcggttttgaagctacgggcatgttggtagatccgaatccagagcagctcgataccatgctgtatatggtcagtgtcgggctactgaaaatcgaaattcagcacatctattcactgttagacgccgcgcaagcccatgagcagattgaatccggacacacgcgaggcaagttgcttcttgatatgaaatgctag

SEQ ID NO: 40897 - DNA, 2859 bp, Vibrio cholerae
gtgatgagaaaagtcgcgttgtttggattttctcttttgttattagcgggatgcagtagttctgactcatcgttgccgctgttttcttctttgccgaaaggcgtcaccttggtcgaagaggtgaaagccgaaccgggtaaagtcatgatcccgtactcgaagtatcgtttggataatggactgaccgtgatcctttcaccggatgactccgatcccttggtgcatgttgatgtaacctatcacgtgggttccgctcgtgaggagattggtaaatcgggctttgctcatttctttgagcacatgatgttccaaggctctaaacatgtcggcgatcagcagcattttcgtttgatcactgaagcgggcggctcgctcaatggcaccaccaaccgcgaccgtaccaactattttgaaacggttccggccaatcaattagaaaaaatgttgtggcttgaggcggatcgaatgggctttttgctcgatgcggtttcgcagcgcaagtttgagatccagcgtgataccgtgaaaaatgagcgcgctcagaattatgacaaccgcccttatggcttgatgtgggaaaaaatgggtgaagcgctttatcccgaagggcacccttattcttggcaaacgattggttatgtcagtgatttagaccgagttgatgtcaatgatttaaaagcctttttcctacgttggtatggcccaaataatgcggtgttaaccataggtggcgatctggatgttaaacaaaccttagcttgggttcaaaaatactttggctcgattccgaaaggcccagatgtggtagatgcaccgaagcagccagcacggttgagtgaagatcgttttattacgttggaagatcgtgtgcagcagccgatgctgctcatagggtggccaacgcaatattggggcgcagaggatcaagtcgcactggatgctctagccagtgccctaggcagtggcaacaacagcctgctctatcaagagctggtgaaaactcaaaaggcggttgatgcgggcgcattccaagactgtgctgaactcgcctgtaccttttatgtgtatgccatggctccctcgggagccaaaggtaagctcgccccactgtatcaagaaaccctgcaagtgctggaaaagtttaagcagcagggtgtctctgcttcgcgtctagaacagatcatcggctcagaagaggccagtgctgtatttgcgctagagagtgtcaaaggtaaagtcagccaattggcggccaaccaaaccttttttgatcagccagatcgcattgaaagtcagctagagaaaatccgcgcagtgacaccagagtcggtgaagcaggtgttcactcgctatctggatggccagccgaaagtgacacttagtgtagtggcaaaaggcaaaacggactttgcggtacgtccggcaacctttatcactccggaacgtcaactgccggaatatcaaaaaattggtgatgagcagcttgcctatcgcgaagtcaaagacagctttgatcgctcgcagatgccgcaagtggcacaagcggttcagccacgtttacctaaactgtacgatgtctattttgacaacggcgtacaactgcttggcacgcaaactcgtgaaactccgacagtactgattgaaattcaattacctgcgggcgagcgtcaagtcgcgatggggaaagaaggcttggctaacttaaccgccagcctgctgcaagaaggcagccaaaaccgtagcgccgaagccattcaagcgcaactggataagctcggctcaagcattcaagtcgtggcgggagcctattcaaccagcattgtggtatcgagtttgaagaaaaacttgccggagacgttgcaaatcagccaagagatgctgctcaaacctgctttcaaacagagtgattttgcacgtttacagcagcaaatgttgcaaggcgtggtttaccaacaccagcaaccgagctggttagcatcgcaagccacccgccaagtattatggggggagagtttgtttgcccgctccggtgatggtacgcaagcttctatctctgccttgaccttgaaggacgtgaagcaattctaccgtcaacattacaccccgcatggtgcacaaattgcggtagtgggggatatcagtgcgcgagaaattcgtcagcagttacagtttattgccgattggaaaggcgaagcggccccgctgattaacccacaagtagtgccaacgttaactaagcagaaaatctatttagtggataagccgggagcgccgcaaagtatcatccgtatggtgcgtaaagggcttccttttgatgccacaggtgagctgtacttaactcaattggcgaattttaacttagcaggtaacttcaatagccggataaaccaaaatctgcgtgaagacaaaggatatacctacggcgcaggaagctattttgccagtaaccgtgagattggagccattgtatttaacgctccagtacgtgcggatgtgaccgttgaagcgattcaagaaatgatcaaagagatgcatcatttcagccaagcggggatgagcgaggaagagatgaaatttttacgtctcgctgtcggtcaacaagatgcgctgatgtatgaaacacccgcgcagaaagctcaacttgtctccagtattctgacgtacagtttagatcgtgattatctgcagcaacgtaatgagatagtgaaaagcgttgatcgctcaacactcaatgagctggcggccaaatggttcaatcctgaggattaccaaattattgtggtgggcgatgccaagcgactcaagccgcagttggaaaagttaggcattccgctagaagagcttgaaatcatccgttag

SEQ ID NO: 40898 - DNA, 804 bp, Vibrio cholerae
gtggcaggtatggacaacttaatcgcgattgccgcggcgatgttatatctcttgtcgattgcgaccatcgtacccgggctggtcaatcaaaccgggatccgagcaaaaaccgtgtttatcagtgcagcgattgcactgctgtttcatggctggttactgagtgatttgatcctacacagcagtgggcaaaacctgagtatccttaatgtggcttctttgattagcttcatcatctctttagcgatgagcttagccatgttcaaaactcgcctctggtttttgctgcctgttgcctacagtttttctgccattaacctttctgcagccacattcttaccgggaacttttattacccatttggaaagtgatcccaaactgctgctgcacatctctttagcgctattctcttactcaacgttgagcatcggagccttgtatgcactgcagcttgcttggctcgaccataagctgaaaagtaaaaaagtcttctctatcaatcctaatttaccgcctctgctgctggttgagcgtcagttatttaagatcattttgattggtaacttgctgctcacaggtaccttgttgactggttttatctttgtgcaagatatgtttgcccaaggcaaagcccataaaggcatcctctcgtttgtcgcatggattgtgtattctattttgctttggggtcattaccgtaaaggctggcgcggtaaaaaagtgacttggtttgcggtcgcaggcgctacgttactcaccttggcttacttcggtagccgttttgtacgtgaaatcattctgcgctga

SEQ ID NO: 40899 - DNA, 1386 bp, Vibrio cholerae
atgtttgagaatttaaccgatcgattgtccaaaacgctgaaaaatatcagcggcaaaggtcgtcttactgaagacaacattaaagataccctgcgcgaagtgcgcatggcgctgttagaggcggacgttgcgctgcctgtcgttcgtgatttcgtcaatcgcgttaaagaaggcgcggtgggggtcgaggtttccaaatctctgactccgggtcaagagttcatcaaaatcgtccgccagcaacttgaagctgtgatgggcgaatccaacgaagcgttgaatcttgccgctcagcctccagcggttattttgatggctggtttgcaaggtgcgggtaaaaccacatccgtaggcaaactctctaagctcctaaaagagcgtgataagaagaaagtgttggtggtttccgccgacgtgtatcgcccagcggcgatcaagcagctcgaaacattagccaatgatttaggcgttgatttcttcccgtccacaccggatcaaaaaccgattgatatcgctaacgctgcaattgatcacgctaagaagaaattctacgacgtactgattgtcgataccgcaggtcgtttggcgattgatgagcagatgatggcggagatccaagcgctgcataaagcgatcaatccggttgaaaccctgttcgtggtcgatgccatgacgggtcaagatgccgccgataccgcgaaagcgtttggtgatgcattgccactgaccggggtgattctaaccaaggtcgatggtgatgcccgtggcggtgcggcgttgtcggtacgccatattaccggtaaaccgattaaatttatcggtgtcggcgagaaaaccgatgccttagagcctttccatccggatcgtattgcttcacgcattcttggtatgggcgatgtactgtcgctgatcgaagatctgcagcgcaatgttgaccaagagaaagccgaaaaactcgcgaaaaaattcaaagagaagaaaggctttgatttagaagactttcgtgagcagttaggtcagatgaaaaacatgggcggcatgatggggatgctcgataaactgcccggaatgtctcaactgcctgcggatatgaaagacaaagtggatgatcgcgttttcaaacagatggaagccatcatcaactcaatgaccatgaaagagcgtcaaaacccagacctcatcaaaggctcacgcaaaaagcggattgctgcgggttccggtacccaagtgcaagacgtaaaccgcctgctcaagcaatttacccagatgcagaagatgatgaagaaaatgcaacaaggtggcatgaaaggcatgatgcgtaacatgcaaggcctgatgggcggcggtggccgtggtggtttcggcggcggtttcttcggtcgttaa

SEQ ID NO: 40900 - DNA, 249 bp, Vibrio cholerae
atggtaaccattcgtttggcacgtcacggcgcgaaaaagcgtccattctatcaaatcgttgtagctgacagccgcaactcagcaactggccgtttcatcgagaaagtaggtttctttaaccctactgctactggtcaagaagaaggcctgcgtctagacctagatcgcgtgaaccactgggtttcacaaggcgcatctctgtctgatcgcgtagcacagctagttaaaaccgctcaaaaagcggcttaa

SEQ ID NO: 40901 - DNA, 555 bp, Vibrio cholerae
atgtcgatgaaaggtaaagagacgatgagcaagcaaaacgaaaaattggttgtgggaaaattaggttcttcttacggcattcgtggctggcttaaagttttttcctacacagacaatccagaaagtatttttgattacagcccttggtatattgaccaaaagggcgagtgggtggaatacaaagtagaaggctggaaacgccacaacaaaggttgggtggtaaaacttcaagggcttgatgtccgcgaagatgcacatctgctgactaactttgaaattgccattgaccccgcatcactaccagaattgtcagaagatgagttctactggcgtgaattgtttggaatgcaagtagtgaccactaacggctacgaccttggcgtggtaaccgatatgatggaaacaggctccaacgatgttctcgtggtgaaagcgaatctgaaagatgctttcggccaaaaggaacggttaattccgtttcttgaagagcaagtgatcaaagttgttgatcgccaagctcaacggatcgaagttgactgggatcctgcgttttaa

SEQ ID NO: 40902 - DNA, 744 bp, Vibrio cholerae
atgtgggttggcatcgttagcctatttcctgaaatgttccgcagcgttaccgattttggagtaacaggtcaggcggttaaaaaagggttgttgtcagttgaagcgtggaatcctcgtgatttcgctcatgacaaacgtcgcactgtcgatgataaaccctacggtggcggtcccggcatgttgatgatggtgcaacctttgcgcgatgccatccatgctgcgaaacaagcgtcaccgggtaagacgaaagtcatttacctctctccgcaaggtcgaaaactcgaccaacaaggtgtggaagagctggcgcaaaaccagaatctgattctgatttgcggtcgctatgaaggggtagatgaacgcattattgaatctgaagttgacgaagaatggtcaattggtgattttgtaatgacgggtggggaactcccagccatgacgttgattgattctgtctcgcggttcattccgggagtattaggggatttcgcgtcagcagaagaagactcttttgccaatggtttgctggattgccctcactacacgcgtcccgaggtattggacggaaaagaagtgccagcggtactgaaatccggcaatcatgaggacattcgtcgttggcgactcaagcagtcgcttggccgtacctggcttagaagaccggagctcctggaaaacctagctctgactgacgaacaggaacaattactgaccgagtacattaaagagactcgtcatcagtaa

SEQ ID NO: 40903 - DNA, 354 bp, Vibrio cholerae
atgagtaacatcatcaaggctctagaacaagagcaaatgaaacaagacctgcctcaatttgcaccaggcgacactgttgtggttcaagttaaggtaaaagaaggtgaccgtgagcgtctacaggcttttgaaggcatcgtaatcgcaatccgtaaccgtggtctgcactcagcattcaccgttcgtaaaatctctaacggcgaaggtgttgagcgtacgttccaaactcactctccagtagttgatagcattgaagttaaacgtcgcggtgcagtacgtcgtgccaaactgtactacctgcgtgacctatctggtaaagctgctcgtatcaaagagaagctggctaagaagtaa

SEQ ID NO: 40904 - DNA, 1371 bp, Vibrio cholerae
atgatgaaaaaacctttacttgttttaactgctctgtctcttagtttgagcgcgattctctcgcctttgcctgcaactgcagcgcttcctctctcagtcaatggagagcagattcctagcctagcccccatgcttgaaaaagtcacacccgccgtggtgagcattgctgtggaagggactcaagtttcaagacagcgtctgccggatcagtttcgttttttcttcggaccggattttccgaccgaacaactccaagagcgacctttccgtggcttaggttctggggtcatcattaacgctgataaagggtatgtcgtcactaactaccatgtcattaatggtgctgaaaaaattcgcgtcaaactgtatgacggtcgcgagtttgatgcagaacttgtcggtggtgatgagatgtctgatgtcgccttgctcaagctaaacaaagcgaaaaacctcactgagatccgtatcgcggactccgataaactgcgagtcggtgattttgcagtggccatcggtaacccatttggcttagggcaaactgtgacctctggcattgtctcagccttagggcgtagtggtttgaatatcgaaaactttgaaaacttcatccagaccgatgccgccatcaacagcggcaactcaggaggagctctggttaaccttaatggtgaactcatcggtatcaacaccgcgatccttggtccaaacggtggcaacgtcggtataggttttgccatcccatcgaatatgatgaaaaatctgaccgatcaaattcttgagtttggtgaagtgaaacgcggcatgctgggtgtacaaggcggtgaaatcacttccgaactggctgatgcgctcggctatgaatcctcaaaaggtgcttttgtcagccaagtggttcctgacagtgctgcggacaaagcgggcatcaaagcgggtgacatcattacgtcgctgaatggtaaaaaaatcgataccttctctgagctacgcgcgaaagtcgcgaccctaggcgcaggaaaaaccattacccttggagtgctgcgtgatggtaagaatcaaaatattgatgtaacgcttggggagcagcaaaatgccaagaccaaagcagaatcactgcatcaaggtttgagcggcgcggagttaagcaacaccactgacagcgatcctattcagggcgttaaggttactgaggttcaaaaaggctctgccgctgaatcttaccagctacaaaaagacgacattatcattggcgttaaccgtaagcgggtgaaaaatatcgccgagttgcgtgcgattatggaaaaatcaccgaatattttggcattaaatatccaacgtggagagagaacgctttacttggttgttcgttaa

SEQ ID NO: 40905 - DNA, 438 bp, Vibrio cholerae
atgccttggatctatgccattgctggattgctagtggggattgctgtcgggatgctgattgctcgtttgactacccctcaatataagacgcagaagaacctgcaaaaagaactcgagagcgcaaaattcaccttagagcagcagcgccaagaactgtctgatcactttgcgcagacagcagaaatgctcgataccctaggaaaagattacactaagctgtatcaacacatggcgaaaaccgctaccgatttgatccccaatttacctgagcaagataacccattcagtaaattggctcagcaaaaagaagagagcaaacagccagaagagctcgaacaaccacctaaagattacgcattgggtgccacaggacttttgcgcggtgaagaaaaagcaatcattcgctcagcggatttgcttaacgccaaagccagctaa

SEQ ID NO: 40906 - DNA, 429 bp, Vibrio cholerae
atgaaaactttcgttgctaaaccagaaactgtaaaacgcgactggtacgttgtagacgctgaaggtaaaactcttggccgtctagcaagtgaaattgcatctcgcctacgtggcaaacacaaagctgaatacactccacacgttgacactggtgattacatcatcgttgttaatgcggagaaagttactgttacaggtaacaaggctaagaacaagatgtaccaccgtcactctgagttcccaggtggcctgaagtcattcagcttcgagaagctgattgagcgtaagccagaaatggtacttgagttagcggttaaaggtatgttgccaaaaggtcctctaggccgtgctatgtaccgtaagctgaaagtttacgctggcgctgagcacaaccatgctgctcaacaaccaaaagtactggacatctaa

SEQ ID NO: 40907 - DNA, 393 bp, Vibrio cholerae
atggcagagaatcaatactacggcactggccgtcgcaaaagctcagctgctcgtgtttttattaaaccaggcagcggcaacatcgtaatcaacaagcgtagccttgaagagtacttcggtcgtccaacttcttgcatggttgttaagcaacctcttgaactggttgacatggtagagaaactggatctgtacatcactgttaaaggtggtggtatttctggtcaagcaggtgctatccgtcacggtatcactcgcgctctgatggaatacgatgagtctctacgtcctgttctacgtgctgctggctacgttactcgtgacgctcgtcgcgttgaacgtaagaaagtgggtctacgtaaagcacgtcgtcgtccacagttctctaagcgttaa

SEQ ID NO: 40908 - DNA, 636 bp, Vibrio cholerae
atggctgtagctgccaacaaacgttctgtgatgactctattttcaagtgcatctgacatgtatagccatcaggttcgcattgtgctagctgaaaaaggcgtcagttttgaagttgagttggttgatgagaacaaccttccagcggaactgattgagctaaatccttataaaacagttccaacactggttgatcgcgagcttgctctgtatgactcaaagatcatcatggaatacttagatgagcgtttccctcatccgccacttatgcctgtttacccagttgcacgtggtaacagccgtctgatgatttatcgtatcgaaagaaactggtattcattggcagaaaaagtagtgaatggttctcctgaagttgctgaaaatgcacgtaataagctacgcaatgatctgttaactttagggcctgtgtttgctgagtttgaatacttcatgagtgaagagttcagtctgatcgattgctatcttgctccactgttatggcgtttgcctgtgctgggcattgatttaattggccctggctcaaaagagctgaaagtgtatatgaaccgtgtatttgaacgtgattcattcttggcttcactgactgaagctgaacgcgagatgcgtctggctcgctaa

SEQ ID NO: 40909 - DNA, 867 bp, Vibrio cholerae
atgacagataataaaaccgtgccaaatggtgctccaattctttatattgtcccaaccccgattggtaatctgggtgacatcacacaacgcgctctggatgtattagccagtgtcgatatgattgccgttgaagatacgcgtcataccggaaaattattagctcacttcaacatctcgaccaaaacgtttgctttgcacgatcataatgagcagcagaaagcccaagtcttagtggataaactgctctctggtctatcgattgccttagtgtccgatgctggcacgcctctgatcagtgatccaggttatcatttagtcactcaatgtcgtcaagcaggcgttaaagttgtgccacttccagggccatgtgcggtgatcacagcgctgagtgcatcaggcctgccatctgatagttttagctttgaaggttttttgccggcaaaaagcaaagcacgtaaggataaactattagagatcgcgaaagtgagccgtacctgtattttttatgaatcgccacaccggatctgcgagtcactgcaagatatgttagatgtacttggtggcgagcgtgaagtggtacttgcccgtgaactcaccaaaaccttcgaaacaattcaaggtatgcctttggctgagttgattacgtggattgctgaagatgataaccgtaagaaaggcgaaatggtgctgttggtgcatggatatcgggatgcgggtgagcagcaactgccagatgaggctctacgcaccttaacgattttgactaaagagctgccattgaaaaaagctgctgccttagtggctgaaattcaccagttgaaaaagaatgcattgtataaatggggcttggagaatttaggcgaataa

SEQ ID NO: 40910 - DNA, 795 bp, Vibrio cholerae
atgaaaaaaattaccataaacgacctgatgaaatggaagcaggaaggtcgcaaatttgctacatcaaccgcttatgatgcgagttttgctcagttatttgagagccaagaaatgcccgtcttattggtcggtgattcacttggcatggtgttacaaggagaaaccgacaccttacccgtgacggtggatgacattgcgtatcacacccgctgtgtgcgtaaaggcagccccaattgtctgctgatggctgacatgcctttcatgagctacgccacaccagaacaagcgtgtgaaaacgcggccaaactggttcgcgccggtgcaaacatggtgaaaattgaaggtggcgattggttagtcgacaccgtaaaaatgttgactgaacgtgcagtgcctgtgtgtgctcacctcggtttaacgccgcagtcggtcaatatttttggtggctacaaagtacaaggccgcgagcaagataaagcggatcgcatggtacgtgatgcgttggctctgcaagaagcgggcgcacaaattgtcctgctagagtgcgttccagccgaactcgccaaccgaattactcaaattttggatgttcccgtaataggtattggcgcgggtaatggtactgacggccaaattttggtgatgcacgatatgtttggaatttcggcgaactacatgccaaaattctcgaaaaatttcttggctgagactggcgatattcgccaagccgttgccaaatatatcgaagatgttgccagtggcgcgtttcccgatctcgcccacaccattgcctaa

SEQ ID NO: 40911 - DNA, 504 bp, Vibrio cholerae
atgatgcttgcctacattgcgattggcagtaatttgggcgaccctgtcgcccaagcacagctggccatacaacagcttactctcttaccgaagtcgcgccttatcgcggcttcatcgctctatagcagcactccgatggggccgcaaaatcagcctgattacatcaacgctgtcgccgccatcgaaaccgaattaacgccactggaattgctcgattgcacacaacgcattgagctagaacaggggcgtgtccgtaaaagcgaacgatggggaccgagaaccctcgatctcgatattgtgctttacggcaatgaggtgatagagaccgagcgcctcaccattcctcactatggaatgaaagtacgtgaattcgtgctttacccgctcgcggaaatcgcaccaaatttaaccctcccagacgggactgaaatccaagcgttattgcaacaagtaccgctcaatgggctcagcatttggcactcgccaacgtcgagtaaggactaa

SEQ ID NO: 40912 - DNA, 1374 bp, Vibrio cholerae
atgaataataacgattttgaaccgagcaacactcgcacatatccagacttagctttgaccatcattccgcgtcaggaacaccctatctcgcgtcagcagatcagcgaaaatgcgctgaaagtgctctatcgtctgcatggtgcggggtttgaggcctttctggtcggcggcggtgtgcgtgatttacttctgggtggcaagccgaaagactttgatgtggccaccaacgcaacccccgagcagttacgccaactgtttcgcaactgccgtctgattggtcgccgtttccgtctcgcgcacattatgtttggacgcgacatcgtcgaagtcgccactttccgtggccatcatcaagagtcgagtcagagccaaaatatcgctgcacaatccgaagcgggtatgctgctacgtgataacgtgtacggcacgattgatgaagatgccgagcgccgcgatttcaccatcaatgccatgtattacaacattgcagactacagcatccacgactatgccggcggcatggaagatctggaagatcgtttggtgcgcctgattggcgatccggaaacgcgttatcgtgaagatccggtacgcatgctgcgcgcggtacgttttgcggtcaaactcgattttgatatcgaagaagataccgcggcgccgattgagcaacttgcgccattgctgcgtgacatccctgcggctcgtctctacgaagaatcgctcaaaatgctgcaagcgggtcatggtttagaaacctaccacttaatgcgtcaatacaatctgttccagcaacttttcccaactatagccgagcattttactgccgatcacagctcaaaaactgagcagatgttggatttggtgctggatgcgaccgacattcgggttgaagaagatctgcgcatcaatccggcctttatgtttgccgccatgctgtggtatccgatgattgatctcgcggatcgcttaatggaatcgctcgatctcaatgagtttgatgccattaccgaagccagcaaccgcatcttagatgaagtggtcaagcgtatcgctattccgcgccgccacaccactacagttcgtgatatttggcagttgcaacagcgcttaccccgtcgcagtggtaaaagggccttccgtctacttgaactgaacaagttccgtgcaggctttgatttcctcgaaatgcgtggcgaaattgaaggcggtgaaaccaaacaattagcggaatggtgggccaccttccaaagcgcgggacgcaatatgcgccaagccatggtgggtgatatcggtaatgcaacgggcagcagcaaatctggcgctcgccgccgtaaaccatcccgcaacaaatccaagagtaaatccagcgaatga

SEQ ID NO: 40913 - DNA, 915 bp, Vibrio cholerae
ttgcatttgaaaggtaaatcgcctatgaactatattggtcgcttcgccccctctccttctggtccattacattttggttctttgattgcggcgttgggaagctatttccaagccaaagcacaacaaggaacttggctggtccgtattgaagatctcgatccgccccgggaaatgccgggagcagccgcgcacattttgcgtacattagaagcctaccgcctgcactgggatggcactgtggtttaccaaagccagcgtcacgccttataccaagatcaaatcgatgcttggctaagcacaggtcaagcttactactgccagtgcacccgaaaagccatcaaagccatgggcggcttttataacggccactgcaaaatccatccgccagcgcggcagcaagactgctcgattcggctacgaatggataatcaggtgcaacaattcattgatttgaaacacggcaccatcaccatacccaaggcattagcagaagaagatttcattattaaacgccgagatggtctgtttgcttacaatcttgctgtggtgctggatgatattgatcaaggcgtgactcaggtggtacgcggcgccgatttgatagaaccgacagggcggcaaatcagcttgtatcacactttaaaacaaaagccggtcagctacttacatttgcctttggcgatggatgggaacgggaataaactctcgaaacagaatcacgctccggccattgacccaaccgcgcctcggcagaccatttcccatgcgatgcagtttttaggctttacgctgcccacggatttttccgatgccagcgcagagcaaatgctggcttggggctgccaacattggcaggtgagccagctaccggaagcgatcgagatcacaccaagattctcaaatggtcctgcttaa

SEQ ID NO: 40914 - DNA, 447 bp, Vibrio cholerae
atgacagagtctaaaaagaaaacgctaggcatcctagccattgctggtgttgagccatatcaggagaagccgggtgaagagtatatgtcacctgggcaaatcacacattttacaaagattttggaagcgtggcgcaaccaactgagagaagaagtggaccgtactgttcaccacatgcaggatgaagcagccaacttcccagaccctgttgaccgagcttctcaagaagaagagttcagcttagaactgcgtaaccgtgaccgcgagcgccgtttgatcaagaaaatcgaaaagaccctcgacaagatcaaagaggaggatttcggttactgtgaatcgtgcggtgtggaaatcggtattcgccgtttagaagcgcgcccaacagccgatctctgtatcgattgcaaaacactggctgaaatcaaagaaaagcaaatgcttggctaa

SEQ ID NO: 40915 - DNA, 2463 bp, Vibrio cholerae
ttgtcaccactgcccattattgaggtgatgccgaagctgttgtccggtatcaccaactctccacaactcatcctcaaagccgcgcccggtgccggtaagtccacctactttccgttgcagttactgcaagcgggagggttccacggcaaaatcattatgctggagccacggcgtttggctgcgcgtaacattgcccgctatttggcgcagcaactgggggaagaggttgggcagcgtgtagggtatcgggtgcgcggtgaaaaccgagtcagccgtgccactcagttggagattgtgacggaaggcattatgacgcgcatgctacaaaacgatccggaactggatggcgtagatgtgctgattttcgatgagtttcatgagcgcagcattcacgctgatactgccttggcgttggcgctcgaagtgcagtctgcgctgcgggaagatttaaaaatcgtggtgatgtcggccacactcgatcagcaagctttgcaaaacttactgccgcaagcgagttatgtcgaatcacaagggcgcggtttcccgatagagattcgctatcaacctctgcgctctgatgagcctttggtgacggcgatgcagcgacaaattcgtcatcttctgcagcacgaaacgggctcattgctggcctttttgcccggtgccgccagcatcaaccagttaaccgaacagttaagcgatttggctagcgaggttgaaatctgccctttgtatggacagatggagttcgccgcgcagcagcgcgcaattgctcccacggcggcggggcggcgcaaagtggtcttggcgaccaatattgctgaaacttcgctgaccatcgaaggcattcgcatagtgcttgatagtgggcttgagcgcagtgcgcgttttgatctcaaaaccggcattactcgccttgaacaagtgcggattgctcaatcctctgccgagcagcgcgcagggcgtgccggacgtttagagccggggatttgcgtgcgcttatacagcgaagcgcagcttaagcagcagccttgggtgccggagcccgaaatgctacatactgacttagcgccactggcattagaactcgcgcaatggggcgcgcagccgagcgatttggcttggttgaatttgccaccgagcagtgcgtttgcgcaggcgcagcaattgttgcagcgtcttgggcttttggatgcacgcacgcaaatcactgcggccggtaaagaggcacatttgctgggcgttgagccgcggattgctgcgatgctgctgagcgccgatcgcttaggtgagtcggccttgcaaagcgctttagcgttgacggtgttacttgaagagccggaacggcaagtgattgatgtacaacatagcttgcaccgctggcagcaaggtcgtcatcccaaacaaaaactgctgatccaacgcgcccaatctttggcgcacaaactcgatacggcattttcactttcctcggttgattcagcatggctgcctttagtggcgtgtttggcctttccagatcggatcgcccagcagcgcggccaacaaacagggcaatttttactcgccaatggccatggcgcttggctggcggtggaagatcgtttgtccgccgccgattatctggtcgccttggatttgatgcgcggccaaactcaagccagtcaaatattcagtgcccttgagctggatatccacgcgcttgaacgcgtattaccagcgctgatttctcgggttgaacaagtggattgggatgaaaaagccggccgcttgagcgcggaagcgcagtggcgaatcgatcaattggtgcttcgtcgtgaaaagctgccagaacccgataaacaaaaaatgacacaagctttgctgagctatgtacggcgcaaaggcttaacagtgttacagtggagcgaagacgcgagcgagtggcttgcccgtgcacgctgcgctgccgaatggctgccagaagaagcgtggccagccttggacgatgaaacgctactggcgcgcctcgaactgtggttagagccttatttggctggggtgacctcagtgaaaggtttgcagagtgtctccgtgttgcaagcgctgaagcactatcttggctgggagctcagtcagcagcttgacgagtggctgccaacccatcatctgctgccaacggggaatcataaaaaaatccgttatcagttagggatggagcctacgctctcggtgcgcatgcaggaagtgtttggcgagcaaagttcgccacgcgttgccaaagggacgcgcgccgtggtgatggaactgctttcccccgcgcagcgaccgttgcaagttacccgcgatctcgccagtttttgggcgggcgcgtacaaagaagtgcaaaaagagatgaaaggccgctacccgaaacacgtgtggccggatgatcctgccaatcatgtggcaaccagtaaaaccaaacgacaattgaacgcatga

SEQ ID NO: 40916 - DNA, 2334 bp, Vibrio cholerae
atgacgagaaaaagtagtaacagatcgcgtggccgtaaagcgcgcagtggtaaaagtgcctcttcctccaagctgcaaatctggctgggaaggatttggagtatcggctggaaattagcgctgacgctggccgcagtgctggtttttattggtatctatctcgattcgatgatcaaacagcgctttgaaggtcagctgtttgatctgccgaccgtggtctatgcccgtattttaacgcttgagcccggcaacggcctcagtttgcaagaactgcgcaatgagctggatgtcctcaattaccgcaaagtggcacagccccgtttccccggtgaatacgcgtcttcttccagtcgaattgagctgatccgccgtccgtttgaattcgcggatggtccagagccggatcgccgagtgatgcttacctttgatggcagtggtttgaacaaaatcgaatcattagagcaaaaacgcgagctaggctacctgcgtttagagccaaaactgatgggcatgctggaaaaagattcgccggagcagcgactctttttacgtcgcgatcaattccccgaagtgttggttgatgcactcttagtcaccgaagatcgtgatttttatcagcacgatggcgtatcaccacttgcgattggtcgcgctatggtggtcaaccttaaagcggggcgcacggtgcaagggggcagtaccttgacccagcagctggctaaaaacatcttcctttctagcgatcgcaccttgtggcgtaagctgcgcgaagcctatatggcgctgatcatcgattatcgttacagcaaagatcgtattcttgaagcctatcttaacgaagtttatttagggcaaagtggcgcagatgcgatccacggttttggtctggcttcacggctctattttggtcagccgctgcaagagctacggattgatcaattggcattgttggttggcatggttaaagggccttcttattacaacccgatgcgttatgccgagcgcgctcgcgagcggcgcgatctggtgctgaaactgatgatggagcacgatattctgacggcgccagagtaccagcaagcggtaactcgtccgttggatgtgcagaaaaccgcgcaaatcgctagccgtcagccagcgtatttccagcaagtttctattgagctgaaagaaaaactgggcgacaaatttaaagcggattcaggattgcgggtgtttacctcgctcgatccggtttcgcagtccaaactcgagcaagcgatccacgatcagatcccgcaattagcgaaaaccgcaggcaaagatctcgaagccgctgcgatcgctgtggatcgtcatagtggcgaaattcgtgccatggtcggcggtaagcgaaccggttacgatggttttaaccgcgtgctcaatgccagtcgacaaattggttcactggtgaaaccagcggtgtatctcacggcgttagcgcatcccgatcagtacaacctagccactacactggaagataaaccactcaccttaaaaggcagtgaaggcagcgcgtggactccgcgaaactacgatcgtcaatatcgtggagaggtgcccctttatttggcgctcgctcaatcgcttaatgtgccgaccgtggctttggggatgaagcttgggattgatcaagtctcagcaaccttgggtaagctcggcgtgaatcgcgacgaaattcgccctgtcccttcgatgttgctcggttcattctcactcacgccatatcaagtggcgcagatgtatcaaacgttgaccaattccggcaaaaaagccccgctgtcagcgctacgttctgtgctcgatttggaaggcaatgtgctgtatgaatctctgccgagagtgtcacaagcggtggatcagcaagccgcttggctgacgacttacgcgatgaaacaaggggtgcaagaggggactggacgttacttgaatgcgcagttcagcagtgcagcactggcggggaaaaccgggaccactaacgataaccgtgacagttggtttgtgggggtcgatggccgtgaagtgaccaccatttggcttggccgcgatgataaccagccaacgaagctcactggcgcgagtggggcattacgtgtttatgcgcagtatttgaaatatcgcattccagagaaattacagttaccttggccagaaggcataacgaccttcggctttgccaagcagacgcaaggtggattgaaactcgactgtgataatgcgtttaaactgcctatttgggacaatcaacagcagttaaaacagcagtgtgaaaaccgtccgaccgagtggatcaaaaagctgtttgagtggtaa

SEQ ID NO: 40917 - DNA, 2598 bp, Vibrio cholerae
gtgcttgaagcctaccgtaaacacgtcgcagagcgtgccgctgaaggagttgtacctaaacccctagacgcagagcaagtcgcaggacttgtcgaacttctgaaaaatcccccacaaggtgaagaagctttcattcttgacctacttgaaaatcgcattcctccgggtgtcgatgaagcggcttacgtgaaagcaggtttcttgacggccgttgcgagaggcgaggtcgcatctccgttggtgagtcgtgaaaaagcggctgagctactcggtaccatgcaaggcggctacaacatcgaaccgctgattgaattactggacgatagcgcgctggctccgattgccgcgaaagcgctgtctcataccctcttgatgtttgataacttctacgatgtggaagaaaaagccaaagcgggcaacccatttgcgaaacaagtgctgcaatcttgggctgatgcagagtggttcctatctaagccggcactgcctgaaaaagtgaccttaaccgtatttaaagtgacgggggagaccaacacggacgatctctctccagcgcctgatgcatggtcacgtcctgatattcctgtacacgcattagccatgctgaaaaacgcgcgcgatggcattgagccggatgtaccgggtaaagttggcccgatcaaacagatcgaagcacttaaagccaaaggtcaccaactggtttacgtgggggatgtggtcggtaccggttcatcacgtaaatcggcaaccaactcagtgttgtggtttatgggagacgatattcctaatgtgcctaataagcgcacgggcggatatgtgcttggcggtaaaatcgctccaatcttctttaacaccatggaagatgctggcgcgctgccgatcgaagtggatgtctctaagctcaatatgggcgatgtgatcgacgtttacccatttgaaggcaaagtgtgtaatcacgcgacgggcgaagtgcttgcgactttcaaactgaaaaccgatgtcctgtacgatgaagtgcgtgcgggtggtcgtattccgctgatcgttggacgtggcctgacggataaagcgcgtcacgcattaggtctggaagcgtcaaaagagtttcgtcgccctgtggcggttgcagatagcggtaaaggttatacgctggctcagaaaatggtgggtaaagcgtgtggtgtacaaggcattcgcccaggcacttactgtgaacctaagatgacgactgtcggttcgcaagataccactggcccaatgacgcgtgatgaattgaaagatttggcctgtcttggtttctctgccgatttagtgatgcagtctttctgtcatacctcggcttatccaaagcctgtcgatgtgcagactcaccacacattacctgatttcatcatgaaccgtggcggtgtttcactgcgtccgggcgatggtgttatccactcatggttaaaccgcatgctactgccagatacagtcggtactggtggtgactcgcatactcgtttcccattgggtatttctttcccagcaggttctggtctggtggcgtttgctgccgcgactggggtaatgccactggatatgcctgaatcggttctggtgcgctttaagggtaagatgcaaccggggatcacgttgcgtgatctggtgcatgccatcccttattacggcatcaagcaaggtctgctcacagtagaaaaagcaggtaagatcaacgaattctccggtcgtatcctagagatcgaaggggttgaacacctgacggttgagcaggcgtttgagctttctgatgcatccgcagaacgttctgcggcgggttgtacggtgaaactgtcacaagcatcgattgaagagtacctcaactcgaatatcgtgatgttgaagtggatgattgctgaaggttatggcgatcgccgtactattgagcgccgtattcaagcgatggaagcttggttagctaacccaacactgatggaagcggacaaagatgcccagtacgcgcatgtgattgagattgatcttgctgagatcaaagagccaatcctatgtgcgccaaacgatccagacgatgctcgtctgctttctgagtgtgcgggtgaaaccatcaatgaagtgttcatcggctcttgtatgaccaacatcgggcacttccgcgcggcgggtaaattgcttgaaaaattcaatggccaattgaatacccgtttgtgggtcgcaccgccaaccaagatggatcgtgaccagctgattgaagagggttactacggtattttcggtcgtgctggcgtgcgtatcgaaacgccgggatgttcgttgtgtatgggtaaccaagcacgcgtagcggacaaagcaaccgtgatgtcgacttcaacgcgtaacttcccgaaccgtttgggcacaggggctaacgtttacctctcttctgctgaattagcggcagtgggagcgattttgggtcgaatcccaagcgtagcggagtacatggattacgcgaagcagattgatgcggcggccgcggatacctaccgttacctcaacttccaccgtatgggtcagtacaccagtaaagcagattcggtcattttccaagaacctgcataa

SEQ ID NO: 40918 - DNA, 1023 bp, Vibrio cholerae
atgcaaccttatactgccccgagtgaaatcgcccttcgtcaactcgactattttgctgataagcatgtgttggtcgcgggcgaagttgaagatcgttttcctatcgaacttcgtcaatattgcgcttccgtttcggtgtttaccacgcactacggctactactctcagctcaaagcttaccctgagattactcgctactttggtgagcaattaacagcagatctcaatgctgatctgattttgctttactggcctaaagccaagcaagaagcggaatacttactcgcgatgctgctggcaaagctcggtacaggcactgaaattgtggtggtcggtgaaaaccgctctggggtgaagagcattgaaaaaatgttcgccgcttatggcccaatccacaaatacgactctgcacgccgctgctcattttattggggacactgtgttcatactccagccgcttttgatattgagcaatggtttaaatcttacgcggtagactatcaaggtcatgagctgacgatccgcagcttaccgggagtttttagccatggcgaatttgatctgggaagtcgcttactgctcgataccttaccccccctgagtggtaaggtaatcgatattggcagtggtgccggtgttttgggctgtgtgatggcaaaactcaaccctcatattgagttagagatgacagacatcagcgctctggcgattcgctctagccaagaaaccctagtggctaaccaactgcacggccacgtttatccatccgatatgttttccgacaccgggcatcactacaactatattgtgaccaatccaccattccattcgggattggagaccagctatagcgccacagagcgtcttcttgccgaatctgtagatcatcttgcttcgggaggctccatctgggtggtggcaaacagctttttgaaatatccgccaattcttgagcaagcgtttggtcactgcgatatcgccgctaaaaccaataaatttgccatctatcacgcaaaaaaataa

SEQ ID NO: 40919 - DNA, 1086 bp, Vibrio cholerae
gtgtcagaaaaaatcaaattagcatccagtcatcgcgtattagttgtggcgctgctcgcttctgcactcgcgtgttactggttggtcgagccttacatcaactcgataataatggccttcatcatttcgctcttaatgtttccaatccatgattggtttgaaaagaaactgccttcacacaacaatttagcggcctttttatcttgtgttgtgctaaccgttatcatcgttattcccctactgttaatttttggggccatcgttcaacaaggctctaagttctcacaaaacctctacgcatgggttacacaaggcggaattcaggctctctttaaccatccttgggtggtcaaagggctcagcttagccaatcactatctgccttttgaagagatcagcccccaacaaatcgcacaacgcattggtcagtttgcaaccacattcggcagtaatttagtcagtattagcgcaaaaattctcggggatgccaccagcttcgtgatgcattttttcctgatgctgtttgtgctgttcttcctactgcgcgatcacgacaaaatcatcagtgcgattcgccatattctgcccctctctcgcagccaagaagatcgcctgctcagcgagatagaaaatgtctccaaatcagcggtgatgggctcttttttaaccgccatcgcgcaaggtgtggcaggcggaattggcatgtggctggcgggtttcccgggactgttttggggaaccatgatgggctttgcgtcctttatccccgtcgtcggtactgcgttaatttggatccctgcgacactctatctatttttaaccggtgatacgacttgggcgattttcctcgccatttggagtgttgcggttgtgggctcgattgataacttactccgccccttcttaatgcaaggcagtgcagggatgaataccttgatgattttcttctccctgctcggcggtattcagttgtttggtttaattggcttaatttatggcccgctgatttttgccatcaccatggtgctgtttaatatctacgaagaagagtttcgcagctttttagatcagcaagaccgaagctaa

SEQ ID NO: 40920 - DNA, 1464 bp, Vibrio cholerae
ttggtggatgttattgctatgctttttcgcttcatacctgtttggttactctctattagcggttttctaatagcctctccgatttacgcacaaacaccattgactgccgcaacgactaaacttcctcaaggggcacgttatagcctattgattgaagatgtcgcattacagcagaacactctcgaactcaatactcatctgtactatccccccgctagcacccagaagattttgacggcactcgccgcaaaattagaactgggtgataagtttcgctttcacactgatttaatgcgttcagggcaagattggatcattcgcttttcaggcgaccccaccctgaccaccgcagatttaacgacattgctcaaagcgatgaaagcgcaaagtggcggtaggattgagggcgatttgtggctggataatagtgtatttagtggatatgagcgtgcggtaggctggccatgggatattttaggcgtctgctatagcgccccagccagtgccatcaacctcgatgctaactgtatccaggcgtctatttataccgaaccacaaggtaaaacgcgcgtttatgtaccagagcactaccctgtgcatgttcagtcgcaagccatcagcgtgacacagagcgaacaagagagtttactgtgtgacttagaactgacggcaacgcctgagaatcactatacgctggatggctgtttagccctacgagacaaacccttaccactaaaatttgcggtgcaagatactgggatctacacccagcgagtggtctatcgtctcctcagccagctaaacatcgagctcaaagggaagataaaagtcggtaaagcaaataccaaacaagcgcagaaaatcgcttctcatcactcccagccgctgcctgtgttactgaaaaccatgttgcaagagtccgacaacctgatcgccgataccttgaccaaagccttgggacaccgtttttactctcaacccggtagctttaccaacggaacacaagccattaaacagattttttactcgcgcacgggcatttcattagaagatactcagctcgccgatggctctggcctttcacgtaataaccggatgcgtccacaagtgatgctggaaactcttcgctacctttatcagcacgaagctgagcttggtttaattgctatgctgccttcagcgggagaatcgggcactttgcaatatcgacgcagtatgcgtgcgccgcaaatcagtggccaaattaaagcgaaaagtggttcactttatggcacttacaatatggcgggctttgtgatggacgaaaatcagcgccctaagactctgtttgttcaattcgtcaccgactatttccctccgagatccaatcctgaggtagcggttgagccgccgattatccagtttgaaactcagctctatcaagagcttattcagtttaatcgtttggcatctaagccaaactag

SEQ ID NO: 40921 - DNA, 1053 bp, Vibrio cholerae
atggacaataaattaggacttaataagatgaacaagactctgattgctcttgctgtatcagctgctgcagtggctactggcgcttacgctgacggaatcaaccaaagcggtgacaaagcaggttcaaccgtttacagcgcgaaaggtacttctctagaagttggtggccgtgctgaagctcgcctatctctgaaagatggtaaggcacaagacaactctcgcgtacgtctaaacttcttgggtaaagcagaaatcaatgacagcctatacggtgttggtttctacgaaggcgagtttactactaatgatcaaggtaaaaacgcgtctaacaacagcctagacaaccgttatacctacgctggtatcggtggcacttacggtgaagtgacttacggtaaaaacgatggcgcattgggcgtaatcactgacttcaccgatatcatgtcttaccacggtaacacagccgcagaaaaaattgctgtagcagaccgtgttgacaacatgctggcttacaaaggccaatttggtgacctaggcgtaaaagcaagctaccgttttgctgaccgtaacgctgttgacgcaatgggtaatgttgtaactgaaacaaacgctgccaagtactctgacaacggtgaagatggttactctctgtctgctatctacactttcggtgacactggctttaacgtaggtgctggctacgcagatcaagacgatcaaaacgaatacatgctagccgcttcttaccgcatggaaaacctgtacttcgcaggactgttcactgacggtgagctagcgaaagacgttgactacactggctacgagctagctgctggttacaaactaggtcaagctgcgtttactgcgacatacaacaatgcagaaacagcgaaagaaacttcagcagataattttgctatcgacgcaacttactacttcaagccaaacttccgctcttacatctcttaccagttcaatctgctagattcagacaaagttggtaaagtagcatcagaagacgaactggctatcggtctacgttacgacttctaa

SEQ ID NO: 40922 - DNA, 1956 bp, Vibrio cholerae
ttgagtgacatggcaaaaaatttaatcctgtggcttgtgattgctgtcgttttgatgtctgtattccagagcttcggccccggtgagaataacggcagagcagtcgactacaccacatttgtaaaggaagttggtcaaggccagattcaggaagctcaattcaacaacggtgaaattactttcatgcgtcgtggaggcggcagccgttatgtaacttacatgccggtttatgatcaaaagctcctcgatgacttgatcaatcaagacgtgaaagtacaaggtacgcctcctgaagagcaaagcttgctgggtaccattttcatctcttggttcccaatgattctattgattggggtttggatcttcttcatgcgtcaaatgcaaggtggcggtggcaaaggtgccatgtcatttggtaagagcaaagcgcgtatgatgagtgaagaccagataaaaaccactttcagcgacgttgcgggctgtgatgaagcaaaagaagatgtgaaagaactggtcgattacctgcgcgatccgagccgcttccaaaagctgggtggtaagatcccaacgggtgtactcatggttggtcctcctggtacaggtaaaaccttgcttgccaaagcgattgctggtgaagctaaagtgccattctttactatctctggttcggatttcgttgaaatgtttgtcggtgtcggtgcatctcgtgtgcgtgacatgttcgaacaagcgaagaaagcctctccatgtattattttcattgatgaaattgatgcagtgggtcgtcagcgtggcgcgggtgttggtggtggtcacgatgaacgtgagcagacactaaaccaaatgctggttgagatggatggttttgaaggcaatgaaggcattattgtcatcgcggcaaccaaccgtcctgacgtgttggacccagcattgctgcgtccgggacgttttgaccgtcaagtcgtggtaggcctgccagatgtgcgtggtcgtgagcaaattcttaaagtgcatatgcgcaaagtgcctctggcgaatgatgtagagccatcattgattgcgcgtggtactcctggattctctggtgcggatttagcgaacttagttaacgaagcggcgctgtttgctgctcgtggcaacaagcgcaacgtctctatggttgagtttgaacttgcaaaagacaaaatcatgatgggtgcagagcgccgttcaatggtgatgtctgaagagataaaagagtctaccgcttatcatgaggctggtcatgcggtagtaggtcgccttgtacctgagcatgatccggtttacaaagtgtcgatcattcctcgcggtcgtgcattgggtgtcaccatgtacttgcctgagcaagatcgcgtgagtatgtctaaacagcatctggaatcaatgatctctagcttgtacggcggtcgtcttgctgaagagttgatttacggcaaagagaaagtttcaacaggcgcatcaaacgatatcgagcgtgcaacagaaattgctcgtaagatggtgacccaatggggcttctctgaaaagctaggccctatgttgtatgcggaagatgaaggtgaagtgttccttgggcgcagtgtgacacagacgaaacacatgtctgatgacaccgcgaagctgattgatgacgaagtgcgtcaaatcattgatcgtaactacgaacgagctcgccaaatcattatggataatatggatatcatgcatgcgatgaaagatgcattgatgaagtatgaaactatcgatgcaggtcagattgatgacttgatggcgcgtaagcctgtgattcgtgaaccagcaggttggggtgaacaatcgaaaactccgtctgcacctgaagtaaaagctgagcctgaagctaaggcggaagaatctacagcagagactgcttcatcggatgtcgcgacagcaagcgagaaaaaagacgctgaataa

SEQ ID NO: 40923 - DNA, 837 bp, Vibrio cholerae
atgctgaaaatcagtcatgccgataagcagcttgagctgcattcacccgttgtgatgggtatcttaaatactacgccagattccttttccgatggcggccgttacgttgaccttgatgtcgcgttggcaagagcacagcaaatgatcgaccttggcgtcgcgattattgatattggcggtgagtcaactcgaccaggcgctcctgatgttgctttagaagaggaattacagcgcgtcatcccacttatcaaagcgattcgaaaacagaatgctgaggtatggatttcgattgataccagcaaagcggaagtgatgcgccaagcattagctgcgggagccgatctgattaatgatgtgcgtgctttgcaagagccgggagctcttgaagtagcagcgcaggctcaagtcccggtttgtattatgcatatgcaaggtcagccgcggacgatgcaagctaacccacactactacaatattattgaagaggtttgccagtttttagctgagcgaattgcacaatgcgaagctgcgggtattaagcgtgagaatattatcttagatcccggttttggttttggaaaatcggtgcaacacaattatcatttgctcgcccatttagaacagtttcatcgttttggattgccagttttagctggaatgtcacgtaaatcaatgatttttaaaacactgaataagcaaccagctgaatgtgtggcaggaagcgttgcgtgtgccacattggctgcgcaaaaaggcgcacaaattatccgtgttcatgatgtagagcagaccattgatgcactcaaaatggtgcagatgatgcataacaatttgtaa

SEQ ID NO: 40924 - DNA, 1341 bp, Vibrio cholerae
atgtctgataagagacgttattttggcactgatggggttcgtggcaaagttggccagtacccaattactcctgattttgtacttaagcttggctgggcggctggacgtgtactggcaaaacaaggcacgagaaaagtcattattggtaaagatacccgtatttctggctatatgttggagtctgcactggaagctgggcttgcagcggcaggattaaaagcgaccttcaccggaccaatgccaacgccagctgtggcctatcttacccaaacgtttcgtgcagaagcggggattgttatttctgcatcgcacaacccttactacgataacggcattaagttcttctcttatgaaggaaccaaactgccggatgacattgagttagcgattgaagctgagttagataaagacattgaatgtgttgaatcggctgagcttggtaaagcttcacgcatggtggatgcggcggggcgttacatcgaattttgtaaaagcactttcccttcaaaactcagtctatctggtttgaagcttgttgtggattgtgccaatggtgccacataccacattgcgcccaatgttttccgtgagttgggagcggaagtcattgcgatgggcgttgagcctaatggtttgaatatcaatgaccaagtcggtgcaaccgacgttcgcgcactgcaaaaacgcgttgttgaagagcatgctcatcttggccttgctttcgatggtgacggcgaccgcatcatcatggttgatcacctaggtaataaagtcgatggtgaccaaatcgcttacattattgcccgtgatgcactgcgccgtggcgagctcaaaggtggcgttgttgggacattgatgacgaaccttggcatggagaatggacttaaacagttgggcattccatttgtacgcgctgcggtcggtgatcgctatgttatggaaaaacttctagagaaaggctggaagattggtgcggaaaattcaggtcacgtcatcttactcgataaagtgactacgggggatgcgattgtcgctggcctacaagtgctggcttcagtagtgggtagtgaaatgaccctgcatgaattagcgaaaggtatgacgctttacccacaagtgttggagaatgtccgttttgcaggagataacaatccacttgaagcggatgcggtgaaagcggcggtatctgaggttgaagctgagctaggttcgaaaggccgtgtattactgcgcaaatcgggtacagaacctctgatccgtgtgatggtggaaggggaagatgaaaccttagtgaagcaatctgcattaaaaattgctcaagctgtaaaagataactgctaa

SEQ ID NO: 40925 - DNA, 1488 bp, Vibrio cholerae
atgagtaaagaaattttagcggtagttgaggcggtttctaacgagaaagcggtacctcgtgagcgtatttttgaagcgctggaaactgcgttagcgacttcaaccaaaaagaagtatgaaatcgagatcgatgtgcgcgtagccatcgatcgcaaaacaggtgcgtttgaaacgttccgccgttggttagtggttgagaatgttgagcacccaaccaaagagatctcatttgaagcggcgagctttgatgatgactcggttcaactgggtgactatatcgaagatcagatcgaatcagtaacctttgaccgtattaccacgcaaactgcgaaacaagtgatcgtacaaaaagtgcgtgaagcagaacgtgcacagattgttgaacaattcatcgataacgaaggtgaattggtgactggtgtagtgaagaaagtgaaccgtgaaaccgtgatcctcgatctgggtaacaacgctgaagcggttatcctacgtgaagatcaactgccacgcgaaaacttccgtcctggcgatcgtgttcgtggtttgctgtacaaagtggctccagaagcacgtggtttccaactcttcatcactcgttctaagccagaaatgttggcagaactgttccgtgtagaagttccagaaattggtgaagagctgattgagctgaaagcggctgcgcgtgatcctggttcacgtgccaagatcgcggtaaaaaccaatgataagcgtatcgaccctgttggtgcgtgtgtgggtatgcgtggtgcacgtgtacaagcggtttctggcgaactgggtggcgagcgtattgatatcgttttgtgggatgataacccagcgcaattcgtcattaatgccatggcaccagccgatgtggcatcgatcattatggatgaagatgcacactcaatggatatcgctgttgaggctgataaccttgcgcaagcgatcggtcgtaacggtcaaaacgtacgtttggcttctcaactgaccggttgggaactgaatgtgatgacggttgcggatctacagaagaaacaccaagaagagtcaatggcatccatcgagaacttcatgaagtatctcgatattgagcaagattttgctgagctgctggttgaagaaggcttctctacgctagaagagatcgcttacgtaccaatgaatgagctgcttgatgttgatggcatggatgaagatctggcagatgagctacgtagtcgtgcgaaagaagcgctgacgacgattgctttggcaaaagaagagtcgttcgaaggccttgagcctgcagaagatctgcttgcattagcaggactggaacgcgacatggcattcaaactggcagcgaaaggtgttgcgacactggaagatctggctgaccaaggtgtggatgatttagaaggtattgaaggtctgaccgaacagcgtgcgggtgagcttattatggcggctcgtaacatttgttggtttggtgaagacgcataa

SEQ ID NO: 40926 - DNA, 2697 bp, Vibrio cholerae
atgacacaaattaccgttaaagcactgagtgaagaaattggaacaccagtagaccgcttattagagcaacttgctgatgcaggaatgaacaaggctgttgcggatcacgtatctgaggatgagaagcagaagctgctggctcatttacgtaaagagcacggcgatgcgacaggctctgagccaacgcgtttgacactccagcgtaaaacccgtagcacactgagcgtgaatgccggtggcggtaaaagtaagaatgttcaagttgaagtgcgcaaaaaacgtacgtatgttaagcgcagttctgttgaagatgaagcgactcgtgaagcggaagaagccgcaatgcgcgccgcagaagagcaagcaaaacgtgaagctgaagaagctgcacaacgtgcggcagaagaaaaagccaaacgtgaagcagaagaagccgccaagcgtgaagcagaggcaaaacgtatggctgaagagaaagcgaagcgtgaaacgcaagcggctacacaaccacgttctgacgaagaaaaattgaagcaagaagcagcgcgcaaagaagccgaggcgctaaaacgtcgccaggaagaagaagcaagacgtaaggccgaagaggaaagtcgccgtcaacttgaaaaagtacgcgaattggctgaaaaaaatggtgagcgttggtctgctgataaagagactgtaggtgatatgcaagaaaacacagattaccatgtaacgacttcgcgttatgcacgcgaagcggaagatgaggctgacctccacgaagaaggtgctcgtcgtcgctcgacaaaagcgaataagagaaagatgtcctctcgtgacgataaccaagagcgcgattctcgtcctcgtggtggtaaagcgggtcgtaaaggtcgcatcaacaagccaatgtctatgcaacacggttttgataaaaccgctgtcgtcgcgaaagcggatgttgtggttggtgaaactatcgttgtttctgaactggcacaaaaaatgtcagtgaaagcgacagaagtcatcaaagtgatgatgaaaatgggcgcgatggcgaccattaaccaagtgattgaccaagaaactgctcaactggtagcggaagaaatgggtcacaaagtggttctgcgtaaggaaaatgagctggaagaagcgattctgtcggatcgtgatgacaagttcgaagaagtttcccgtgcgccagtcgtgaccatcatgggtcacgttgaccacggtaaaacctcaacgctggactatatccgtcgtacccacgttgcttctggtgaagcgggtggtattactcagcacatcggtgcttaccacgttgaaacgccaaacggcatgatcaccttcctggatactcctggacacgcggcgtttaccgctatgcgtgctcgtggtgcacaagcaacggatatcgtagtactggttgttgcagcggacgatggcgtaatgccacaaaccgtcgaggctatccaacacgcgaaagcggcgggagttcctctgattgttgcagtaaacaagatcgataaagacacggctaacccagataacgttaaaactgaactgtcacagtacaatgtgatgcctgaagagtggggcggtgacaacatgtttgttcacatctctgcgaaacaaggtactaacattgacggtctactggaagctattctgctgcaagctgaagttcttgagctgaaagcggtgaaacaaggtatggcgtctggcgtggtcatcgaatctcgtctggataaaggccgtggtccggtagcaactgttctggttcaatcgggcactctgcgtaagggtgacattgttctgtgtggccaagaatatggccgcgttcgtgcaatgcgtgatgaagtcggtaacgaagttgaagaagcgggcccatcgatcccagttgaaatcctgggtctgtctggtgttccagcggccggtgatgaagcaaccgtagtacgtgatgagcgtaaagcgcgtgaagtggctaactaccgtgcaggtaagttccgcgaagtgaaactggcgcgtcaacagaagtctaaactggagaacatgttctctaacatgactgcaggtgatgtcgctgagctgaacattgtactgaaagctgacgtacaaggttcagtggaagcgattgcggactcgttgaccaaactttcaacagacgaagtgaaagtcaatatcgtcggctctggtgtcggtggtattactgaaacggatgcggttctggcggcggcttctaacgctatcgtggttggctttaacgtacgtgctgatgcgtcagctcgccgtatgattgaagctgaaaacatcgatctgcgttactactccatcatttaccaattgatcgatgaagtgaaacaggcgatgagcggtatgctgtctcctgagttcaaacaagagatcatcggtctggcggaagttcgtgacgtatttaagtcaccgaaactgggtgcgattgcaggctgtatggtcactgaaggtgtgatcaaacgtaatgctccaatccgcgttctgcgtgataacgtagttatctatgaaggcgaactggaatcgctacgtcgctttaaagatgacgttgcagaagtgaagaatggttacgagtgtggtatcggcgttaagaactacaatgatgttcgcgtcggtgaccagatcgaagtattcgaaacgatcgaaatccaacgtaccatcgactaa

SEQ ID NO: 40927 - DNA, 939 bp, Vibrio cholerae
atggctcgtcgacgtaaaggtcgggttatccacggtgtgattctgttggataagccgacaggtatctcttccaacgacgctttgcaaaaggttaaacgcctctatggcgctgaaaaagcgggacatactggcgcgcttgatcctctggcgacgggcatgttgccaatctgcctcggtgaagccactaagttttcccaatttctgctcgattctgataaacgttatcgtgtgatcgccaaattgggtgaacgtaccgacacctcagattctgatggtcaagtggtacaaacgcgtcctgttcacgtggattacgatacgctgctggcctgtatcgccaagtttcgcggtgaaacggatcaagttccatccatgttttcagcgttgaaataccaaggtcgtccactctacgaatacgcccgtcagggtattgaagtgccgcgtgaagcgcgcaagatcactgtgtatgagattgagctgcatcgctttgaaggtgatgaagtggagatggaagtacactgctcgaaaggcacttatattcgtaccatagtcgatgatctgggtgaaatgctgggctgtggagcgcatgtgaccatgctgcgccgtgtgggtgtcgctaactatccgtatgagcgaatggtgacgctagagcaactcaacgctttggttgaacaagcccatcgtgacgaaaaagcggtggcggacgttctcgatccgctattactgccgatggatactgccgtggaagctttacccgaagtcaacgtgatcccagaactgatgacacttattcagcatgggcaagcagtacaggtttcgggggcaccatccgacggtatggtgcgcattactggcggcgagcagaagctattccttggcgttggcgagattgacgataacggtaaggtcgcgccgaaacgcttggtggtgtacggcgaataa

SEQ ID NO: 40928 - DNA, 270 bp, Vibrio cholerae
atgtctctgaatgcagaaactaaagcagcaatcgttgctgaatacgcacgttgcgaaaatgacacaggttcaccagaagtacagatcgctctactgactgcttctatcaaccacctgcaaggtcacttccaagcacacaaaggcgatcaccacagccgtcgtggtctgctacgtatggtttcaagccgtcgtaaactgctggactacctgaaaggtaaagatctgtctcgttaccaagatctgatcaaacgtctaggcctgcgtcgttaa

SEQ ID NO: 40929 - DNA, 2130 bp, Vibrio cholerae
atgttcgaaaaaccagtagtaaaaacgtttcagtacggtaaccacaccgttactctcgaaacgggtgtaatggctcgccaagcaacggcagcagtaatggctaccatggatgacactgcggtgtttgtctctgtggtcggtaagaaagaagcggtagtgggtcaagatttcttccctctgactgtaaactaccaagagcgtacttacgcggcaggtaaaatccctggcggtttctttaagcgcgaaggtcgtccttctgaaggcgaaacgctgattgctcgtctgattgaccgtccaattcgtccgctgttccctgatggtttcactaacgaagtgcaagtgatcgcgactgtggtttcagtaaacccagacgtgcaacctgacatcatctcgatgatcggtacttctgcagcactggcgatttctggactcccattcaatggtccaatcggtgcggctcgcgtaggtcacattgatggtcaattggttctgaacccaagtgaaaaagagctgaaacagtctcgtttggatctggtggttgcgggtactgacaacgcagtactgatggtggaatcagaagcacaaattctgactgaagaagagatgctggctgccgttgtgtttggtcacgatcaacaacaagccgtgatcaaagcaatcaatgaattcgcagcggaagttgcaacaccagcatgggaatgggttgcaccagccgagaacactgagctgaaagcgaaagtggctgctctggcagaaactcgtttggtggaagcgtaccaaatcactgagaaaatggcgcgttatgatcgtatccatgaaatcagtgcagaagtcacggcggctctgctggctgaaaacgaagctttagacaccaaagaaattcacaccattttccacgatctggaaaaaaccgttgttcgtcgcagcatcatcgcgggtaacccacgtatcgatggccgtgaaaaagacatggttcgtgctctggacgttcgtactggcgttctgccacgtactcacggctctgctctgttcacacgtggtgaaactcaggctctggttaccgcaactctaggcactcagcgtgatgcgcaaatcatcgatgagctgactggcgagaagaaagatcacttcctactgcactacaacttccctccatactgtgtgggtgaaacgggttttgtgggttctcctaagcgtcgcgaaatcggtcacggccgtttggcgaagcgtggtattgctgcggttatgccatcaccagaagagttcccgtacacagtacgtgtcgtttctgaaatcacggaatctaacggttcatcttcaatggcttctgtgtgtggttcatcgcttgctctgatggatgccggtgttccaatcaaggcttctgttgcgggtatcgcaatgggtctggtgaaagaagaaaatgatttcgtggttctgtctgacatcctaggtgatgaagatcaccttggcgacatggactttaaagtcgcgggtaccgcgacaggtgttactgcactgcagatggacatcaagatcgaaggtatcaccaaagagatcatgcaaatcgctctgaaccaagcgaaaggtgctcgtctacacattctgtctgtgatggatcaagcgatctctgcagcgcgtagcgatatctctgaatttgcgccacgtatccacacgatgaagatcagcgttgagaagatcaaagacgtgatcggtaaaggcggtgcggtaattcgtcagttgacggaagaaacgggtaccaccatcgagatcgaagatgacggcacgatcaagattgctgcgactgacggcgatcaagcgaaagaagcgatccgccgtattcaagagatcaccgccgaagttgaagtgggcgtgatctacactggtaaagtagctcgtttggcagactttggtgcgtttgtaacgattcttcctggtaaagatggtctagtacacatctctcaaatcgctgacaagcgcgtagagaaagtgtctgactacctgactgaaggccaagaagttcaagttaaagtgctggaaatcgaccgccaaggccgtgtacgtctaagcatgaaagaagcggttgaaacttctgatgctgcagcagcagaagtggcaccacaagcggaataa

SEQ ID NO: 40930 - DNA, 2058 bp, Vibrio cholerae
atgaccaaatttcgcaagattcattctttggcctttaagcaagccaaaagcgtgtttttagtctctgtactgttgggactctgttttagtttttaccacaccttgtccgacctgcaccaagagcagagcaaggtgcaggagcactataactttaaattggtgcagagttatgaaaacgccagtcaagcggcttaccatcttaataatctactcgccgagcaagtcgccaccaccttgatgctcgaccccggcatattcaaagtggagattgtggatgactttggcgatgtgatgacccgtaaagaaaaagcaatcagtgaacagagtcaattagtcagtgtactcgccagctatcttactcctgcggtttccgtgtttagtgccgagctgcatcagcctaactccaacgtggtggtcggcaaactgagcttctatatcgatggctcgtcaatagccaaagtgttcatcgccaaaaccactcgcgtactgctcttcgacctattacgtaatacgctattgacgaccattttactgctgtttttctaccaaaagctctctcgcccaatcaccatgctgatcacttgggttaactcactcaatgacacacagcgctcacctctgcctcttcgtcttactcatgacgatgaactcagtgagctcgcgtcgacgtttcaatcgatgtggaaaggcaaagagctggcagaatcgaaactcaatcaattggcttattatgacagcctcacaggcctcgccaatcgcagtttgttgctgcaaaaattgagtgatgcgattgaaactgcgcaaaactcgcatagcacaggcgtactgttctatctcgacttggatcgctttaaaactattaatgactcactcggtcataccatcggtgaccagttgattaaagccgtggcgctgcgtatggaggcatggactaaaaacgactacctgtcagcacgaattggtggcgatgagttcgcagtgctgatcccttatctctcgcctgcgaaagctgaggaagtggccaagcagctactcactctgatttccaacccttatgcggtggacgatcaccagttctactgtaccgtgagtatcgggatttcggttttcccttccgtaggaagctgtaatattgatgtattacgtcaagcggataccgcactgtatcgcgccaaagccagtgggcgtaacaagttcatgttctatgagccggaaatgcaggcgcaggtggagtctttccttgaaattgaaaaaggcttgcatgaagcgctcaatcagcgccaactcgagcttttctaccaacctcaggtcgacgagcagcacaacattattggtgtcgaagcgctgatccgctggaaccatcctaaacgagggttgttgcctcccggtgtttttatgccgatcgcagaagaaacaggacaaattttaccgataggcaactggatcattgagcaagcgtgttatcaatatgcccagtggaaaaaacaaggcattttaccgccccattttcgccgtttggcgatcaatatcagcccactacagtttgctcaggagtcttttattgagcaggtgaaccacgctttacgccaagcagggatcacgggggagccgatagaattagagataactgaaagcttactgctggaaaacgttgagagcgccatagaaaaaatggccaagttgaaagagagccaaatcagtatttcgattgatgactttggaacaggctactcttcgctgcgttacctcaagcatcttgcggtcgatgtgctgaaaattgaccgctcgtttgtcaatcaactgcaccttgatgataacgatcaagcgatcgtcgacacaatcttagcgattgccagaaaactgaatttagaagtgattgccgaaggggtggaagacacctctgagttggccgcactcaaaaaactggggtgtaaccaattccaaggctacctgtttgataaaccgctgcgagccgaagagattgcacagcgttttgtcagcaacagttatcgcaaaattcaaaccttacccgttgcgacaaacagtttacaaaaatag

SEQ ID NO: 40931 - DNA, 1596 bp, Vibrio cholerae
ttgttgatgtcaactacaccctatttcggcgaagtatcaaagcgccgtactttcgcgatcatctcgcaccctgacgcgggtaaaaccacgattactgaaaaagtcctgcttttcggacgtgcgatccaagtagccggcacggtaaaaggccgtggctcaaaccagcatgcaaaatctgactggatggaaatggaaaaagagcgtggtatttcggtgaccacctctgttatgcaattcccgtacggcgattgtctggttaatcttttggatactccgggacacgaagacttctcggaagatacttatcgcactctgaccgcagttgactcttgtttgatggtaattgatgcggcgaaaggggttgaagatcgtacccgtaagttgatggaagtgacccgtctgcgtgatacgccgatcgtgaccttcatgaacaaacttgaccgtgaaatccgtgacccgatggagttgatggatgaagtggaaaatgagctgaaaattgcttgttcgccgatcacatggccaatcggttgtggtaaagagtttaaaggtgtttaccacattcatcgtgatgaaaccattttgtacacttcaggccaaggccacaccatccaagaagaacgcattatcaaaggcttggataaccctgagctggatcaagcagtcggtgctgacttggccgcgcagctgcgtgaagagttagaattggtactcggcgcgtcacatgagtttgatcgtgagttgttcctgcaaggcgaactgactccggtattctttggtacagcactgggtaactttggggttgaccatatgctggacggcctgacccaatgggcaccatcacctatgcctcgtcaggcggctgagcgtgtagttgaggcgagcgaagagaaattcactggcttcgtgtttaaaattcaagccaacatggatcctaaacaccgcgaccggattgctttcgtgcgtattgtatcgggcacctacaagcaaggcatgaagatgaaccatgtgcgccttggtaagcaggttaatatttctgatgcggtaacctttatggcgggcgaccgtgcacgcgcagaagaggcatttgctggcgatattatcggcctacataaccacggcacgatccagattggcgatacttttacccaaggtgaaacgctgaaatttactggtattccgaacttcgcgcctgaactgttccgccgtattcgtctgcgtgacccactcaagcaaaagcaactgttgaaaggcttagtacagctttcggaagagggcgcggtgcaggttttccgtccgctccaaaacaacgacctcatcgtgggtgcggtgggggtgctgcagtttgatgtggtggtatcgcgtctgaaatcggaatacaacgttgaagccatctatgaaggcgttaacgttgcgaccgcgcgttgggttgagtgtgacgatgtgaagaagtttgaagagttcaaacgcaaaaaccagagcaaccttgcgctggatgggggcgataatcttgcgtatatcgcacccaccatggtgaatttgaacttggcgcaggagcgttcacctgaggtgaaattccgcgcgactcgtgaacattaa

SEQ ID NO: 40932 - DNA, 1314 bp, Vibrio cholerae
gtgaagcagacgttaaaactagcagatattttagctttgggctttatgctgttcgccttcttcttaggcgcaggcaatatcatttttccacctctcgctggccagttggcgggtgagaacattactcctgccatgttcggctttttgctgaccgctgtgggtttgccgctgatcactatcatcgcgattgccgttgcgggtggtagctgggagcatctcaccaaagatctgcctgtaaaagcttctgtgctgatggctgcactgatcctgatcgtcattggtcctgcatttgcagctcctcgtacgggtctggtggcttacgaaatggcagtaaaaccattttttgcagagagcactcaatcttatctcacgcttttctctgtgctgttttttgcagttgcgatgttcttctcatggtcgcaaggcaaactggttgatttgattggtaaactgctgacaccagcgctctttatctgtctgattatccttgctctgggcgtgttcatgaacccacaaggtgagatgattgctgcgcaaggtgagtacctaagccaacctctgaccaaaggcttcttggaaggctataacaccatggatactttcgcatcgttgatgtttggtatcttgattgtcgatgcactgcgtagcaaagggattaccgatcgtgcggcgactacccgttatctgatcacttcagcggtgattgcggcaattggtttggcgttggtttacggctcgctcttctatcttggtgcaaccagctcaagtgtggcggcgggggctaacaacggcggcgcgattttaagccaatacgtacaagctctctttggtagctatggtcagttggttctctcggttatcgttatgctggcttgtttgaccacggcggttggcttgatttcagcgtgttctgatttcttcagcaaacacacgtcgctatcttacaaacagtgggtagtgattaatggtgtagcgtgtggtgtggtggcgaacgttggtttggcgcagctcatcacactctcgattcctgtactgtttgctctgtaccctgtggcgattgctctggtcgcattgactttcgtgcgtcacaaactgccaaacccacgggtagcataccgtgctgtgctgtccgtttctctgctggtggcgttactggatgcggcaaaagttgcgggctttgatgtttctgcgttcagcttcctacctttctttgagtacggtatgggctggttgctaccgacgtgcgctgcgatgatctgcatgttctttattccttcagcatcatcccctgttttagaagaagagctagcataa

SEQ ID NO: 40933 - DNA, 1539 bp, Vibrio cholerae
atgcaaatgactgatgctgttcaaaacgagattaatcaagagcaaatcgcgcaagaagaaaacaaactgattgcagagcgtcgcagcaagttggatcacatccgcaagaactgtaaagcaaacgggcacccaaactcgttccgtcgcgacagcctagcgggtgatctgcagaagaagttcggtgaaaagagtaaggaagaactggaagcgctcaatcacgtggtgtctatcgctggtcgtgtgatggcaaaacgtggcccattcttggtgattcaagaaacctctggccgcattcaggcttatgcatcgaaagaagtgcaacaagagctgaaagataaataccaaggtttggatatcggtgacatcatcggtgtgcaaggtgccctgcacaaatccggtaaaggcgatttgtacgtcaacatggagcaattccaactgctgaccaaagcactgcgcccgctgccagagaaattccacggtctgactgaccaagaaatgcgttaccgccagcgttacgttgacctgatcgtcaacgaaaactctcgcaacgctttcattgtacgttctaaggtgatgtcagccattcgtaacttcatgatctcaaaacagttcatggaagtggaaacgccgatgatgcacgtgatccctggtggtgctagtgcgcgcccattcatcacgcaccacaacgcgctcgacatgccgatgtacctgcgtatcgcgcctgagctgtacctgaagcgtctggttgtcggtggttttgatcgtgtattcgaaatcaaccgtaacttccgtaacgaaggtctttctccacgtcacaacccagaattcaccatgatggaattctatatggcgtacgcggactacaaagatctgatggatctgacggaagagctgctcagctctgtggcgttagaagttctcggttcaacctccatgccttacggtgagcataccgttgaatttggtggtaaatacgcgcgtatgagcatgtttgatgcgatcaagcactacaacccaaatcacgcgcagatccaagctctgaccgaagaagacatccaaaaccgtgacctcatggtttctatcgcgaaatccgttcacgttgatgtggagcctttctggacctgtggtcagcttctcgaagagatctttggtgaaacggctgagccgaaactgatgcagccaactttcatcactggctacccagcagatatctctccactggcacgtcgtagcgatgacaacccgttcttcactgaccgctttgagttcttcatcggtggccgtgaagtggcaaacggcttctcagagctgaacgatgctgaagaccaagatgcgcgtttcaaagcccaagtggaagcgaaagagtctggtgatgatgaagccatgttctatgatgccgactacattaccgctttagagcacggcttaccgccaacagcgggtcaaggtattggtattgatcgtctggttatgctcctgaccaatactcacactatccgtgatgtgattttgttcccagcgatgcgccctcagcaataa

SEQ ID NO: 40934 - DNA, 1059 bp, Vibrio cholerae
ttggctctaagacaaggaagtgctatgcaatataccaagctgcctcattccagcctcgaaatcagcaagatctgtttaggtaccatgacttttggtgaacagaattcgcaagctgatgcctttcaacagctcgattatgctctcgagcgtggagtgaattttatcgatacggcggagatgtatccggttccgccaacggcacaaacccaaggtaaaaccgaagagtttattggcaattggctggctaaatccggtaagcgagagaaaatcgtgctcgccaccaaagtcgctggtccacgcaatgtgccttacattcgcgacaaaatggcgctcgatcatcgcaatatccatcaagcggtcgatgatagcctacgtcgtctgcaaacggattatatcgacctgtatcaacttcactggccgcagcgccaaaccaatactttcggtcagctcaactacccttatccagacaagcaagaagaagtaacgctgattgaaacactggaagcgctcaatgatttggtgcgcatgggtaaagtgcgttatatcggagtctctaatgaaacgccgtggggagtgatgagctacctgcgtcttgcagaaaagcatgaactgccaagaattgtctcgatccagaatccttataatctgctcaaccgcagttttgaggtgggacttgccgaaataagtcatctggagggcgttaagctactcgcttactcgccactcgcctttggtgctttaagtggtaaatatctcaatggtgctcgtcctgcgggtgcgcgttgtacactgcatcaacgcttctcacgctactttacagaacaaggcattcttgcaacagaagcctatgtcgcattagcccagcaatttgggctcgatcctgcgcaaatggcactggcgtttgttaatcagcgcccatttgtggcctcgaatattatcggagccacaacgatggagcagttaaaatcgaatttggatagtttggatatttcattaaatgcagaacttctgcaaaaaattcaggagattggaaccacttattccaatccctgtccttag

SEQ ID NO: 40935 - DNA, 666 bp, Vibrio cholerae
atgaaaccagcaccgacgactcaacaagaattactcacgcgagcccaacaaattgcagggctaagttttgctgaactcgccgatgaagcaggcatgaccgtaccgccagatctgcgtaaagacaaaggctgggtaggccagttactggaatggcacttaggggcgacagcaggcagtcgtccacaacaagattttgaacatctcgggattgagttaaagagcattcccatcagttacaccggaaaaccgttggagaccactttcgtttgcgtcgccccactcaccggagttcatggcttaacatgggagcaaagtcatgtgcgcaataagctctctaaggtgctctggatcccggtacaaggtgagcgcgagatcccgctcgctgagcgctgtgtgggctctcctttgctgtggagcccttctcccgaagaagaagcgcagctcaaagcggactgggaagagctaatggaatggattgtgctgggtaaagtggcacaaattaccgctaaacacggtgaagtgctgcaactgcgccctaaagccgccaacggtcgagcgctcactgaagcctatggggccaacggacgcccaatcaaagccctgccacgtggtttttatctgcgtacccaatttactgcgcaaattctgcagcgctattacgcctag

SEQ ID NO: 40936 - DNA, 852 bp, Vibrio cholerae
gtgagacagtatttagatctttgtcagcgcatcgtcgatcaaggtgtttgggttgaaaatgaacgaacgggcaagcgttgtttgactgtgattaatgccgatttgacctacgatgtgggcaacaatcagtttcctctagtcactacacgcaagagtttttggaaagccgccgtggccgagttgctcggctatattcgtggttacgataatgcggcggattttcgccaattaggtaccaaaacctgggatgctaatgccaatttaaaccaagcatggctcaacaatccttaccgtaaaggtgaggatgacatgggacgcgtgtatggagttcagggtagagcttgggctaagcctgatggtggtcatattgaccagttgaaaaagattgttgatgatttgagccgtggcgttgatgaccgaggtgaaattcttaacttctacaatccgggtgaatttcacatggggtgtttgcgcccttgcatgtacagccatcatttttcattgctgggtgataccttgtatctcaacagtactcagcgttcatgtgatgtgcccttggggttgaatttcaacatggtgcaggtttatgtgttccttgcgctgatggcacagatcacagggaaaaagccgggcttggcgtatcacaagatcgtcaatgcgcacatttaccaagatcaactcgaattgatgcgcgatgtgcagctaaaacgtgagccattcccagcgcctcagttccatatcaatccaaagattaaaacactgcaggatttggaaacttgggtcactttggatgattttgacgtcaccggatatcagttccacgatcctattcaatacccgttttcagtctaa

SEQ ID NO: 40937 - DNA, 1149 bp, Vibrio cholerae
atgataaaccaagcaacttcccctgcagcgccgatttcgctgaccacgaaaggcctacgttgggcaaacttggctttcatgctgtatttactacttcttgcagtcgcgatggtcggcagcggttttaaatgggcaaccggcgatcaagccaaagttctatttgaatttgcttcccacccaattgcaggattgatgattggtttagtggcaacggcactgattcaatcctcaagcacggtgacttctattattgttggtctcgttgccggtgggttaccggttgaaaccgcgattcctatggtgatgggtgccaatattggtactactgtgaccaatactctcgtcagccttggccatatgcgctgtaaagaagagtttcgccgtgctttcgccagtgccaccatccacgattttttcaatcttctcgcggtgctgatcttcctacctctagaaatgatgtttggaattttagagaaagtctcacactggctcgtttcgcctctgcttgcgactggcgatatgagcatgaaaggttttgactttatcaaaccgattaccaaacctgtcataacaggtcttgaaacccagctttcggtattgggtaatactttcggtggtgtcgcacttatcgtattgggtatcgcgaccattttcgtcgccattacggtgatgggcaaactgatgaagagtttgatggttggccgtgcacgtgaaattctacaaaatgcgattggccgaggtccactacacggtattgcttcaggtacagtggttacggtattagttcaatcatcctcgaccacaaccagcctaatggttcctctcgtgggctctggcgtgctgaaagtgcgtgaaatctacccatttaccttaggtgcgaacattggcacttgtattactgctctgctcgccgcaaccgctgtctctggtgagtttgccgtgtttgctctgcaaattgcgctggtgcacttaagctttaacttgatggctacggtcttgatttacggtattcctttcttacgcgaactgcctattaaaggtgctgagctcatctcaacttgggcttgtaagagcaaaatggtggtggtgagttacttattgggtgtgtttgtcgtcatccccggcagcattcttgccctaaccgcttaa

SEQ ID NO: 40938 - DNA, 327 bp, Vibrio cholerae
atgccgtatttaaagggggcaccaatgaatctccaagagatggaaaaaaattctgccaaagcggtagttttgctcaaagcgatggccaatgagcggcgactgcaaattttatgtatgttactggacaatgaactgtcggtaggggaattgagtagccgtttggaactcagccaatctgctctttctcaacatctagcgtggctacgtcgtgatggtttagtgaatacacgtaaagaagcgcaaactgtgttttatacgttgagcagtacagaagtgaaggcgatgattgaactgttgcaccgtctttattgtcaggcgaatcagtag

SEQ ID NO: 40939 - DNA, 261 bp, Vibrio cholerae
ttggcaaataacaaatctgctaagaagcgcgctatccaagctgagaaacgtcgccagcacaatgctagccgtcgttctatgatgcgcacttacatgaagaaaactgttgctgcaatcgctgctggcgacaaagaagctgcaactgctgcattcgctgtagttacaccaatcctagaccgcatggcgactaaaggccttattcacaagaataaagcagctcgtcacaagtctcgcttctttgctgctatcaacgctctgtaa

SEQ ID NO: 40940 - DNA, 1578 bp, Vibrio cholerae
ttgttcgaggttaccgtgagtaaacgcttactcaagtctggcatcattgtaagtgctatgactttgatttctcgtgttttaggtttagtgcgcgatgtggttgtggccaatttgatgggcgcaggtgccagtgctgacgtattcttttttgccaaccgaattcccaattttttacgccgattatttgcagaaggggccttctctcaagcatttgtcccggtcttaaccgaatatcacgcctcgggtgatatcaataaaactcgagatttaattgcgcgagcgtcgggaactctcggtgttttagtgaccatagtgacgctaattggcgtgctcggctctggcgcagtcaccgcattatttggcgcaggttggttcttagactggctgaatggggggcctgcagcaggaaagtttgagttagcgagcttactgctcaagattacttttccctatttgtggtttatcacctttgttgccttgtctggggcaattttaaacaccttaggtaagtttgccgtctcctctttcacgccagttttcttgaacgtgatgatgattctgtgtgcttggtacctctcgccaaatctagaacagccggaagtgggcttagcaataggcgtatttttaggtggtttagtccagtttttatttcaactgccatttttgatcaaggctggagtgctggttaggcctaaatggggctggaaagatcctggggtggtgaaaattcgcacactgatgattcctgcactgtttggagtatcggtcagtcaaatcaacttgttatttgactccttcgtggccagttttctgcaaaccggttcgatcagctggctctattattcggatcgcctgctggagtttcccctcggtttatttgggattgcgattgccacagtaattttgcctgccttatcgcgtaaacatgttgatgcgcacagtgatggctttgcccacaccatggactgggggattcgcatggtcacgtttctcggcattcctgccatgctgggtttgatggtactggcaaaacctatgttgatggtgctgtttatgcgcggggaatttactccaagcgatgtagagcaagcgtcctattcgttactcgcttactcatctggcctgctcagctttatgttgatcaaagtgttagcgccgggatattactcacgtcaagacacgaaaacccccgtacgttacggaattatcgctatggtcagcaatattgtgcttaacgcgatctttgcgtggttttacggctatgttggcttggcggtcgcgacttcgatgtccgctttcctcaatatggcactgctttatcgtggtttgcacttacaaggtgtttatcatctgactcgcaaaaccgtctggtttgttgcgcgactggcgatggcgggagcggtaatgactggtgcgcttttgtggcagttagacactatggctacatggctgagctggggaatcagtcagcgcgcattgacgctgacaggcttgattggccttggcgtggcatcttatctggctattttgctgttactgggtgttcgtctcaaagatctaaaagcggcgacagagtag

SEQ ID NO: 40941 - DNA, 969 bp, Vibrio cholerae
atggaattaatacgcggtattcataacattcaatctcgccatcacggctgtgtattgacgattggcaactttgacggtgttcatcttggtcatcaacaagtgctcagtcaggtggtgcagcgtgcccagcagatgggtttgccttcggtagtgatgacgtttgaacctcagcccctagagctgtttgccaaacaacaagcgcccgcgcgtttaacacgtctgcgcgataagtttgtgcaactcagcaaactcggggttgatcgcctgctgtgcgttaatttcaaccatcattttgcccaattggatgcccacacgtttattcgtgacttgttggtgacccgtttgggtgttaagtttctggtggttggtgatgatttctgcttcggtaaagagcgtcaaggtaactttgcgctgctacaacaggcagggcaagccctagattttgaggtggtgagcacccaaagcttctgtttgcaacaactgcgcgtgagtagcaccgcgattcgtgaagcgttagcggctgaccaattgagcagtgcctcggctatgttggggcgccattacagcatcagcggtcgtgtctcgcatggtcaaaaactcgggcgaacgatcggctttcccaccgccaacattccactgaaacgttgtgtttctccggtttctggagtgtatgtggttgaagcctatggtttgggcccaacgccagtcggtggggttgccaatatcggtaatcgtccgacggtcgatggtgttcgccagcagctagaagtgcacttttttgactttcaaggcaacctgtacggaaagcagttggaagtcgcgctgttacataaactacgtgatgagcgcaaattcgcctcttttgaggcactaaagcaacaaattgaattggatgctgaagcagcaagggtgtggctgcgtcagcttaagggttgctcggttgattccacccagcaacaacatgtctaa

SEQ ID NO: 40942 - DNA, 2850 bp, Vibrio cholerae
atgagtgagtataaagataccctgaaccttcctgaaacagggtttccaatgcgcggcgatctggccaaacgcgagccagaaatgctgcaacgttggtatcaagaagacctgtacggtgcgatccgtcaggctaaaaaaggcaaaaaatctttcgtattacacgatggccctccttacgccaacggtgatattcatattggccacgctctgaacaagattcttaaagacgtcattattaaatcgaaaaccctgtcaggttttgatgcgccttatattccgggttgggattgccacggtctaccgatcgaattgatggtagagaagaaagtgggcaagccggggcaaaaagtcaccgcggccgaatttcgtgaaaagtgtcgcgaatacgcggcaggccaagtggaaggccaaaaagagagctttaagcgtcttggtattctgggcgagtgggataagccttatcgcacgatggacttcgtaaccgaagccaacatcatccgtgcactaggcaaaattgctgataacggccacttgctgaaaggttttaaaccggttcactggtgtaccgactgtggttcagcactggctgaagcggaagtcgagtacaaaaacaaagtttctccttcgattgacgttcgttttaaagccgctgatgaagccgctgtgctggctaagtttggtctggctgctggccatgaaggcaaaggcgatgtgtcgattgtgatttggacaaccacaccttggacactgccagctaaccgcgcggtatgtctgcgtgcagatttagaatatgtactgatccaagttgaaggtgagcaaccagagcgcattatcgtggcttctgagctggcaaaatcggtgatggatcgcgcgggcattgaacacttccataaccttggtttcgcaactggtgccgatcttgaattagtacagttccaacatccattctactccttcactgtgcctgccattttaggcgatcacgtgacgaccgattctggtaccggtgtggtacatactgcgccgggtcatggtcaagaagactttgccgttggtcaacagtacggtttggaagtggcaaaccctgtaggttcaaatggcgtatatctgccagacactgagctgtttgcgggtcaacacgtatttaaagccaacgattcagtgttggaagtgctgaaagaaaaaggcgcgttgttgcatcatcacgcgtatgagcacagctacccacactgctggcgtcataaaacgccgatcatcttccgtgcgacaccacaatggtttgtctctatggaacaagcgggtctacgtgaacaagctctgacggcaatcaaaggcgtacattggatgccggattggggtcaaagccgtatcgaaggtatggtggcaggtcgccctgagtggtgtatctctcgtcaacgtacttggggcgtgccgattgcactgttcgtgcacaaagaaaccgccgaactgcatccaaacagcgctgatctgattgagaaagtggcgcaactggttgagcaaaaaggtattcaagcatggtgggatctcgatactgcggaactgcttggcgctgaagatgcggccaactatgaaaaagtgctggatacgctagatgtatggtttgactcaggggtgactcactctgcggttgtggatgcacgtcaagaattcaacggcgcagaagcggatatgtacctagaaggttctgaccaacaccgcggctggttccaatcatccctcatctcttcggtggcgatgaaaggcaaagcgccttacaaagaagtattgacgcacggtttcgtggttgatggccaaggccgcaagatgtcgaaatcgatcggtaacgtggttgctccacaagatgtgaccaacaagctgggtgctgacattctgcgtctgtgggttgcttcaaccgattacactggtgaagttgcggtatcagatgagatcctcaagcgttctgcggatgcgtaccgtcgtattcgtaacaccgcacgtttcttcttggcgaacctgaacggcttcaacccaaccacagacatcattcctgttgaagacatggtggcgttggatcgttgggctgtcggtcgtgcactggccgcgcaacaagagatcattcaagcgtatcaggattacaacctgcacgcagtggtacagcgtttgatgaacttctgctcaatcgagatgggatctttctatctagatgtgatcaaagaccgtcaatacacagccaaacgtggtggtcatgcacagcgtagctgtcaaaccgctctgttcttcattgtggaagctctggttcgttggatggcgcctatcatgtcattcaccgctgatgaaatttggaacgcaatgccagcgcagcaagctgacggcagcgcacgtgacaagttcgtgtttaccacggaatggtttgatggcctgtttggtttggcagaaggcgaagagctaaataacgcattctggaatgatattcagaaagtgcgtggctcagtcaacaaactgctggaaaacgctcgtaacgaaaaactgatcggtggttcactgcaagcagaattagtgctgtttgctgatgattcattggcgagtaagctagcgaaactgggcgatgagctgcgtttcgtgctgctgacttcaaaagccgtggtgaagccactggctgagaagagcgaggctgcacaggcgaccgatatcgatggcttgtttgttcaagtgaacaaaaccgaagcagagaagtgtgatcgctgttggcaccacacccctgatgtaggcacgattgcaggtcacaccaccatttgtggtcgctgcgtgtctaacgttgagggtgaaggcgaagtacgcaagtttgcgtaa

SEQ ID NO: 40943 - DNA, 924 bp, Vibrio cholerae
atgaccaacgatgcacttatcgccgcgctttctcatctggtttccgaaggtcgtaaccccgatacgatggatattgatttgctctcatcgcaagaaattgtcgagcggcttaatcaacaagacaaacaagtgccactggcggtggaagcggtattgccgcagattgcccaagcggttgataaaatcactgccgccttcaaacaaggtggccgcttgatctacttaggggcaggtaccagcggtcgtctgggtgtgctggatgcctcagaatgcccacccactttcggagtgagcgatcaaatggtgattggcctgattgccggaggcaaagaggcgatgtttaccgcacaagaaggggcggaagataacgccacgctgggcgcacatgatttacagcaaatcgactttagcagcaaagatgttctagtcgggattgcggcgagtggccgcacaccttatgtgattggcgcgttagagtacgccaatgatttaggcgcgaccaccatcgcactctcgtgcaaccctgattctccgattgccgaaatcgcccagattgccatttctccggtcgtcgggccggaagcgttaacgggttcaacccgacttaaatccggtacagcgcagaagttggtgctcaatatgctcacgactgccagcatgatccgccttggtaaaagctatcaaaatctgatggtcgatgtccgagccaccaaccgcaagctgattgcccgagcggtgcgaattgtcatgcaagcgaccgattgccaacgcgaagaagccgaagcactactcaaagagagccacaacaacgcaaaactggcgattttgatgcatctgaccggcatgaactacgagcaagcgacggcgaaactctcgcaatcggacggcttcttacgccgcgccatggaagagcacgaagagtaa

SEQ ID NO: 40944 - DNA, 993 bp, Vibrio cholerae
atgggaccgctttggttggatgtggccggttacgaactgagtgccgaagatcgcgaaattctgcagcaccctacagtgggtggtgtgattctgtttggtcgcaactatcacgataaccagcaattgctggcactcaataaagcgatccgtcaagcggcgaaaagaccgattttgattggtgtcgatcaagaaggtggccgcgtgcagcgtttccgtgaaggcttttctcgcattccccctgcgcagtattacgcgcgtgctgagaatggcgttgagcttgctgagcagggcggttggttgatggcggcagagctgattgcacacgatgttgatttaagttttgcgcctgtgctcgatatgggctttgcgtgtaaagcgattggcaaccgtgcttttggtgaagatgttcaaactgtacttaagcacagcagtgcttttctgcgcggcatgaaagccgtcggcatggcgaccacaggcaaacatttccccggccatggcgcggtgattgccgattcgcatttagagaccccttacgatgagcgggagacgattgcgcaagatatggcgattttccgtgcgcaaattgaggctggagtgctagatgccatgatgccagcgcatgtggtgtatccgcattacgatgctcaacctgcgagcggttcgagctactggctaaaacaagtgttacgtgaagaactcggctttaaaggcatcgtattttcggatgatttgagcatggaaggcgcagccgtaatgggggggccagttgagcgctcccatcaagctttggtcgccggttgtgacatgattttgatctgtaacaagcgtgaggcggcggtcgaagtgctggataaccttccgatcatggaagtaccacaagctgaagcactgctgaaaaagcagcaatttagctacagtgagctgaagcgtttagagcgttggcagcaagcgtcagccaatatgcagcgcttaatcgagcagttctccgaatag

SEQ ID NO: 40945 - DNA, 714 bp, Vibrio cholerae
atgttatctgcactactcattgacgatgaacgctttgcccgtgaagagctcgcggaactcttagcggaaagtggccagattgaggtcatcggccaagccagcaatgcaattgaagggttgaaaaaaatcaatcagctcaagccagatgtggtgtttttggatattcagatgccgcaaatttcgggcattgagctgctaagtatgcttgacccagagaccatgcctgaggtggtgtttgttaccgcctacgatcaatatgcgctgcaagcgtttgaagataacgcgtttgactatctgctcaagccggtcgacaccgaacgtttagccaaaaccgtgcagcgtttgctgcgccaacataagaaaagtgactactcaccactgacgcaacccagcttagaccagatcccttgcacgggtttaaaccgaattgtgctactgccgattaatgaagtggaatttgcctacagcgatatcagtggcgtcaatgtgcagactgcgcagcaaaaagcgaccagtcaattgaccttgaaggtgttggaagagaaaaccgcgttagtgcgctgccatcgccagtacttggtgaatttgaaagcgattcgcgaaataaaactgttagaaaacgggctggcggagatgatcactcatgctggccataaggttccggtcagccgccgttatcttaaagagctgaaagagatgctgggattttactga

SEQ ID NO: 40946 - DNA, 1677 bp, Vibrio cholerae
atggatctcatcctctcattactgcaacagatgtgtgtttaccttgttctcgcctatatgttgagtaaaacgccgatcttcattcctttgctgaacatttctggtcggtttgaccacaaaatcagtgtttatgttctgttttcgctgttttgcattatgggcacctactttggcctgcagatcaatgatgcgattgccaatacgcgtgccatcggcgctgtgatggggggtctgtttggtggacctgtgattggttttgcggtgggcctcaccggaggcttacaccgctataccttagggggatttaccgatctcgcctgcgcgatttccaccaccgctgaaggtttaattggcggcttgctacacacctatttgctgcgcaaaggcaaagggaagttactgtttagcccaagtattgtctttgcggtcaccttatttgccgaaattgtgcagatgctgatcatcttggtcgtggcgaaaccgtttgaacagtcttacgcgctggtttccaccatcgccgcgccgatgatcattgctaactcagtcggtgccgcactgtttatgagcatcttgctcgatcgcaaaaccatttttgaagagtattccgcgacgttttcacgccgcgctctgaatattgccgagcgttctgttggtatccttgctgccggttttaacccagaaaacgccaacaaaattgcccgaatcgtgtatgaacagaccaatgtcggcgcggtctcgatcaccgatcgcgaaaaaatcctcgcctttgtcgggattggcgatgatcaccataaaccgaatacaccgatcagctcgcaaagcacgctcgatgcgattaatcgcaacgccatcatctatctcgatggcaaagaacatccttatcaatgttctttgtctccgacctgcaaactggggtctgcgttaatcattccgttgcgagctggcgatcgagtgatcggcaccatcaagctctacgagccaaaacgtaagctgttttccaccatcaatatgtcaatggcacagggcatcgcccaactgctatccagccaaattttgtatggcgaatatcagcaaaaacaaatcctgctctcgcgagcggaaatcaaactcctgcaagcgcaggtcaatccgcattttttgtttaacgcactcaataccatcagtgcggtgatccgccgtgagccagataaagctcgcgagctgattttgcatctgtcgcaatttttccgcagcaacctcaaacagaacgtcgaaaccgtcactttgcgtgaagagcttgcccacgtgaacgcttacctcactattgaaaaagcgcgctttagtgacaggctcgatgtggaaattgcgattgatgatgccctgctagaacgcaatgtcccgagcttcactttgcagcctttggtggaaaatgccatcaaacacggcacctctaacctactcgaagctggcaaagtgcgcatttacagtgaagtggttgaagggggaatgcgcgtcgtggtggaagacaacgccgggctctatcagcctccgagtgaagattatgatggtttagggatgcaaattgttgaaaagcgcctcaccaacaaatttggtcttaagtcagggctacagattgaggtcgcgccacaagagtacacgcgaatgagctttgtcattccacagcaaggcacttactaa

SEQ ID NO: 40947 - DNA, 1668 bp, Vibrio cholerae
atggctgaatacgtatataccatgtctcgggtgagcaagattgtgccacccaagcgtcaaattctgaaagatatctccttgagtttcttcccgggtgccaaaattggtgttctgggccttaacggtgcgggtaaatcgaccctgctgcgtatcatggcaggcattgacaaagacatcgacggtgaagctcgtccacaacccggtttgaaagtgggttatctgccccaagagcctaagttggatgagagtaaaaccgtacgtgaagttgtcgaagaagccgttgcggatgtggcttacgcgcttaagcgtcttgatgaagtttatgccgcgtacgctgagcctgatgcagactttgatgctctggctaaagaacagggtgaactggaagcgctgatccaagcgaaaaatggccacaacctagataatgctctagagcgtgccgccgatgcactgcgcctaccggagtgggatgcgcaggtgaaatacctctctggtggtgagcgtcgtcgtgtggcgatctgtcgtcttctgctggaaaatccagacatgctgctgctcgacgaacccaccaaccacttggatgccgaatcagtggcttggctggagcgtttcttggtcgattacgcagggactgtggtcgcgattacccacgaccgttacttcctcgataacgcggcaggctggattctggaacttgaccgtggtgaaggtattccatggcaaggtaactacacttcatggctagagcaaaaagatgctcgtctgaaacaagaagcctctcaagaaaaagcgcgccaaaaaaccattgagaaagagctggaatgggttcgtcagaatccaaaaggtcgtcaggctaaatcgaaagcgcgtatggcacgttttgaagagctgcaaaatactgagcaccaaaaacgtaacgaaaccaacgagctgttcatcccgcctggtgagcgcctaggtgacaaagtgattgaagtgaaaaacctcaccaaatcattcgatggtcgtgttctgattgatgatctttctttcagcatgccaaaaggtgcgattgtcggcatcatcggcccgaacggtgccggtaaatcaaccctattcaagatgctgagtggtgtagaaaagccggattcaggcacgatcgagctgggtgataccgtgaaactggcctcggtagatcagttccgtgacagcatgaacgacaagcacaccgtattccaagagatttctgaaggtgcggatatcattcgcatcaacaacttcgaaatccctgctcgtgcttactgttcacgctttaacttcaaaggcgttgatcagcaaaaagtgattggcgagctgtctggtggtgagcgtaaccgtgtccacttggccaaactgcttaaagcgggcggcaacgtgctgttactcgacgaacctaccaacgatctggacgtcgaaaccctgcgtgctctggaagaagcgctactagaattcccgggctgtgctatggtgatctcgcatgaccgttggttcctagaccgtattgccacccacatcctagattaccgtgatgaaggtaaagtgaacttctacgaaggtaactacaccgagtacatggagtggctgaagcagactctgggcgcacaagcagcagagcctcaccgtattaagtacaagcgcattaccaagtaa

SEQ ID NO: 40948 - DNA, 2574 bp, Vibrio cholerae
atgcgtcttgacagatttacgagcaaatttcagatcgcgatttccgatgcccagtcattagcgctcggccgtgatcatcaatatatcgaacctgtgcacctgatggtggctctgctggatcaaaacggcagcccgatccgcccattactcaccatgcttaatgtggatgtgatgcaactgcgctccaaacttggcgaaatgctcgatcgtttacccaaagtcagtggtattggtggtgatgtacagctctcttcggcgcttggctcgctgtttaatctgtgtgataaggttgcgcaaaagcgtcaagatgcctacatctcctctgaaatctatctacttgctgcgattgaggacaaagggccactgggtcacttactcaaagagtttggactgaccgagaaaaaagtctctgaagcaatagagaagattcgtggtggacaaaaggttaatgacccgaatgcggaagagctgcgtcaagcgttggaaaaattcaccatcgatctgactgaacgcgctgagcagggcaaactcgatcctgtgatcggtcgtgatgatgaaattcgccgcaccattcaagtgctgcaacgccgtaccaagaacaatccggtgatcatcggtgaacccggtgtgggtaaaactgcgattgtggaaggcttggcgcagcgcatcattaataatgaagtaccagaaggcctgcgtggacggcgagtgttgtctttagatatgggcgcgctagtggcaggggcgaaataccgcggcgaatttgaagagcgcttgaaatcagtactcaatgagctagcgaaagaagaaggcaatatcatcctcttcattgatgagctgcacaccatggttggtgcggggaaaggcgaaggctcgatggatgccggcaacatgctcaaacccgctttggcgcgtggagaattgcactgtgtcggcgcaaccactttagatgagtaccgccaatacatcgaaaaagatccagcgttagagcgccgcttccaaaaagtgttggtggatgagcccacggtggaagataccatcgccatcttgcgtggattgaaagagcgttatgaactgcatcaccatgtcgaaatcacagatccagcgattgtggcggcagcgagcctatcgcatcgctatatttccgatcgccagttgcctgataaagcgatcgatttgatcgatgaagcggcttcaagcatccggatgcagattgactccaaaccagaagctctggataagcttgagcgcaaaatcatccaactgaaaatcgagcagcaagcgctctctaatgagcacgatgaagccagtgaaaaacgcttggcgatcttaaatgaagagctgcaagagaaagagcgtgattacgcggagttggaagaagtgtggaaagctgaaaaggcggcactctccggcacgcaacatattaaagcggcacttgaacaagcgcggatggatctggaagtcgctcgccgtgcgggggatttgaaccgcatgtcagagctgcaatatggtcgcattccagagctagaaaagcagcttgatctggctgcgcaagccgaaatgcaggaaatgactctgctacgtaataaagtgacggatgcagaaattgccgaagtgctttcaaaacagactggcattccagtatcaaaaatgctcgaagctgagaaagaaaagttgctgcgcatggaagacgtgctgcataaacgcgtgattggtcaaaaagaagcggtggaagtggtcgcgaatgcgatccgccgcagtcgcgcagggctttctgatccaaatcgtccgattggctccttcttattcttggggccaacaggggtcggtaaaaccgagctgtgtaaaaccttggctaacttcctgtttgacagtgaagatgccatggtacgtgtggatatgtcggaatttatggagaaacactcggttgctcgtttagtcggtgcgcctccaggttatgtcggctatgaagaaggtggctacttaacggaagctgtacgccgtaaaccttactcggtgattttgctcgatgaagtggaaaaggcgcacccagatgtcttcaatattctgctgcaagtcttggatgatggccgcttgacggacggacaagggcgcacggtcgattttcgaaataccgttgtgatcatgacctccaacttgggttcaagccgtatccaagaaaattttgcaaggttggattatcaaggtatcaaagaacaagtgatggacgtagtcagcaaacacttccgtcctgagttcttgaaccgagtggatgaaagtgtggtattccacccattaggacaagagcatatcaagtcgatcgcttctattcagttggcccgcctacgtcaacgtttggcagagcgagattaccaactagaggttgatgatgaggcgctggatctgattgctcatgtcggcttcgatccggtttatggtgctcgtccactgaaacgcgcgattcaacaaaatgtggaaaacccactggccaaatcgattctggctggtaagttcctgcctggttcacctattttactatcggtaaaagacgggaatattttcgcaagccagtag

SEQ ID NO: 40949 - DNA, 255 bp, Vibrio cholerae
atggcgctactgattaccgccaaatgcaccaactgtgatatgtgtgagccagagtgcccaaacagtgcgatttcaatgggcgataagatctatgagatcaatcccgatttatgcactgaatgtaaggggcattatgacaaaccgacgtgtcagtcggtttgtcccatcagcaactgcatcatcaccgatcctgcccatcgcgaaaccgaagagcaactactcgaaaagttcgtggtaattcaagggctcgcgtaa

SEQ ID NO: 40950 - DNA, 1401 bp, Vibrio cholerae
atgacaacgccaaaaacctttgttccagaactcctttcacctgcgggtagcctgaagaatatgcgctacgcttttgcctacggggcagatgcggtatatgccggccaacctcgttacagcctgcgcgtacgtaacaatgagttcaaccacgaaaacctacaaatcggcattaatgaagcccacgcactgggtaaaaaattctatgtggtgtgtaacattcagccgcacaactctaagctgaaaaccttcatccgtgaccttaagccggtgattgatatggggccggatgcgctcatcatgtctgaccctggccttatcatgatggttcgtgaagaattcccgcacatgccgatccacctgtcggtacaagcgaatgcggtgaactgggcaaccgtgaaattctgggcttcacaaggcgttgagcgtgtgattgtttctcgtgagctctctttagaagaaatcgaagagatccgcgaaaaatgcccgaataccgaaattgaagtgttcgtgcatggcgctctatgtatggcttattccggtcgttgcttgctgtctggttacatcaacaagcgcgatccaaaccaaggtacttgcactaacgcatgccgttgggaatacaaagttgaagcagcaaaagaagatgaagcaggtcagatcgttgaacagtttgaccctaatgcagcacaagccatcgaagttcaaaatgaacgtccagacaccaccatcggggccggcaaaccgattgatgatgtcgtactgctttctgagagccatcgtcctgatgagaaaatggccgcctttgaagatgagcacggcacctacatcatgaactccaaagatctgcgtgcagtacagcatgttgagcgcctaactcaaatgggtgtgcactcactgaaaatcgaaggccgtaccaaatctttctactactgcgcacgtaccgcgcaagtgtaccgtaaagcgattgatgatgcggtagcgggcaagccattcgatgatagcctgatgactaccctagaaagcttggcgcaccgtggctataccgaaggtttcttacgtcgccatacgcacgatgcttaccaaaactacgactacggctactcggtttccgacactcaacagtttgtcggtgaatttaccggtaaacgccgcggcgcaatggccgaagtggaagtaaagaacaaatttgtgctcggcgatagccttgagctgatgacgccaaaaggcaatgtcatcttcactttagaagcgatggaaaaccgcaaaggtgaagcaacagatgatgccaaaggcaacggtcactttgtttacattccagttccggaagagttggatctcagctacgcactgctgatgcgtaacctagtgcaagggcaggatacccgtaacccaacaggcaagtaa

SEQ ID NO: 40951 - DNA, 1302 bp, Vibrio cholerae
atggttgaacgtttaacatggaaaaagctggcttgggagctggcttttttttacttgccatgggttgtggtgggatggattttcggaagtatgccgtggctgctgttggcagcgacggctttgcagcttttctggcatttgaaccatcaaattcgcctttccgcttggttgtgggatgaaaaacgtctcaccccaccttctggaacggggaattgggagtcgctgttcaatggcatttatcgcttgcagcagcgccatcgtaaaaaacgcaaagaactgactaatcttattcgccgtttccgtaatggtgcggaatcgctccccgatgcggtggtggtgtttcgcagcgaaggcaatatcgtgtggtgtaaccgccttgcgcagcatttgctgggttttcgttggcctgacgatgctgggcagcctatctcgaacctgctgcgtacgccggactttatcaaatacctcaaaaaagatgattttactgatccgctcgaaatgcgttcgccgctcaatagtgatcgcatgctggaactgcggatagtgccgtacaccgaaggtgaacacctgatggtggtgcgtgatgtcactcagcttaaacagctcgaaggcatgcgccgtaatttctttgctaacgtttcccatgaactgcgtacaccgatgacggtgctgcaaggttatctggaaatgacagaagatccggatgtgctcgcgggcccgatgtggagtaaagcccatggtgtgatgaccgagcagctcaaccggatgaatggcttggtgaaccaactgctgacgctctcgaaaatagaagcatcaccgatggtcgaactcgatcaagtggtcgatgtaccagccatgttggaagtgttagaaaaagaagcagtgagccttagtggtgaggcgcagcataagctgcattttgaggtggataagagccttaaggtgctggcggatgaagatcagctgcgcagcgcgatttcgaatctggtgtataacgcggttaaatataccccgccgggcgcgcaaattgatgtgcgttggtatcgcactggcaaaggcgcttgcctcgaagtggaagataaaggcgaggggatcgagccgcaacatttacaccgtttaacggagcgtttctatcgcgtcgataaagcccgctctcgtgatacgggcggtagtggtttgggactcgcgatcgtgaaacacgcgcttgcacaccatgacacgcatttggatatctacagtaaagtcggtgtcggcagtaagttttcgtttgttttacctaagcggttggtggcgaaaggatga

SEQ ID NO: 40952 - DNA, 822 bp, Vibrio cholerae
atgtactccgccaatcctactttgggctactatgtaccgccgctggacgtgaataatcttaccgatcagcagacggcgatttcgattgagcacttaagcctgtattaccagcaaagtcgcgccttgagtgatatttccatgcgtatccccaaaggtcaggttacggcgtttattggcccctctggctgtggtaaatcgacgcttttacgctgcattaaccggatgaacgatctggttgaaggaacgcgtgttgaaggtgaggtgaaattgcatggcaaaaacatctatcatccggatgtggatgtgccaacgctgcgtcgccgagtcgggatggtgtttcagcgcccgaatccctttcctaaatcgatttatgaaaacgtggtgtatggactgcgtttgcaggggattaaaaatagtcgtgcgttagatgatgcggcggagcaatctctgcgtgcagcagcgttatgggatgaagttaaacatcgtttgcatgaaaatgcatttggtttatcgggtgggcagcaacaacgtttggtgattgcccgagcgattgcgattgaacctgaagtgttgcttcttgatgagccaacttcagcgcttgatccgatctcgaccttgaccatagaagagctgatccacgatcttaaaaccaaatataccgtggttatcgtcacacataacatgcagcaagcggcgcgcgtgagcgatcacaccgcctttatccatatgggaaagttgatcgagtacgcagatacggactctattttcacgtcaccattgaaaaagcaaaccgaagactacattacggggcgatacggttaa

SEQ ID NO: 40953 - DNA, 624 bp, Vibrio cholerae
ttgcttaggagcaaaaaaatggtactagttggtcgcaaagcccctgattttactgcagctgctgttcttggtaacggtgaaatcgttgataacttcaacttcgcagaatttacaaaaggtaagaaagcggttgttttcttctacccactagacttcactttcgtttgcccatctgaactgattgcattcgacaaccgttacgaagacttccttgctaaaggtgtagaagtgatcggtgtttctatcgactctcagttctctcacaacgcatggcgtaacactgctgttgaaaacggcggtatcggtcaagtgaaatacccactggttgcagacgttaaacacgaaatctgtaaagcttacgatgttgagcacccagaagctggcgtggctttccgtggttcattcctgatcgacgaagaaggcatggttcgtcaccaagtagtgaacgatctgccactgggtcgtaacatcgacgaaatgctacgtatggttgatgcactgaacttccaccaaactcacggtgaagtgtgcccagcacaatgggaagcaggcaaagcaggtatggaagcatctccaaaaggcgttgcagcattcctgtctcaatactctgctgacctaaaataa

SEQ ID NO: 40954 - DNA, 1314 bp, Vibrio cholerae
atgacactgactcgtcgccaacaaattgaagcactagaaaaagattgggcaaccaacccacgctggaaaaatgtgaaacgcacttacaccgctgaagaagtggtgagtttgcgcggctcggttgtaccagccaataccatcgcccaacgtggtgcagacaaactgtgggaactggtgaatggttcagcgaaaaaagggtatgtgaactgtttgggcgcactcactggcggccaagcggtgcaacaagccaaggcgggcattgaagcgatttatctctctggctggcaagtggcggcggataacaacaccgcaggcaccatgtacccagaccaatctctctatccagtggattctgtaccgtcagtcgtacgccgcatcaataatgcgtttcgtcgcgctgaccagattcagtggtcaaacggcaaatcaccacaagatgaaggcggtattgattacttcctgccgattgtggcggatgcggaagccggttttggcggcgtactcaacgcttatgagttgatgaaatccatgattgaagcgggcgctgctggcgttcactttgaagaccaattggcttcggtgaaaaaatgtggccacatgggcggcaaagtattggtaccgactcaagaggcggtgcaaaaactgattgcagcacgcttggctgccgatgtcgcaggcacgactacgttagtgattgctcgcaccgatgctaacgccgccgatttgctcacttcagacagcgatccgtacgatgccgatttcgtgaccggtgagcgtacttccgaaggtttctaccgtgtacgcgcgggcattgaccaagcgatttctcgcggcttggcttacgcaccttacgcagatttggtgtggtgtgaaaccgcgaagccagatctggaagaagcgcgtaaatttgctgaagcaattcatgcacaatacccagatcaactgttggcttataactgctcaccttcgttcaactgggaaaagaatctcgatgcgaaaaccatcgcccatttccagcaagcgctgtcggacatgggttacaagtaccagttcatcacattagcgggtattcacaacatgtggttcaacatgtttgagttagcgcacgcttacgcgcaaggcgaaggtatgcgtcactatgtcgaaatggtacagcgtcgcgaatttgaagcagcatccaaaggttacaccttcgtggcgcaccaacaagaagtggggacgggttacttcgataagatgaccaacaccattcaaggcggcaacagttcggtgacggcactgaccggttcaaccgaagaagatcaatttcactaa

SEQ ID NO: 40955 - DNA, 1059 bp, Vibrio cholerae
atgcaagtttcagattttcattttgaactcccagacgagctgattgctcgctacccaaaagcagaacgtaccgcgagccgcttgctgcagcttgacggcaacagtggtcaactggtggatggcacctttaaagatgtcctcgaactggttgaaccgggagatctgctggtgtttaacaacacgcgagtgatcccagcacgcatgtttgggcgcaaagccagcggtggcaaattagaagtgttggtagagcgtatgctcgatgagcacacgattttagcgcacgttcgttcatcaaaaccgcccaaaccgggtactgaactttatttaggcgagaacgatgagtttcatgccgtgatgcaggcgcgtcacgatgcattgtttgaaatccgttttactgcggaaaccgtggtattggatattctcaatcaaattggtcacatgccgttgccaccttacatcgaccgtcctgatgaagaagcggataaagagcgttatcaaacggtgtacaaccaaaagccgggtgcggtagctgccccaacggcgggtttgcattttgaccaagcgctgcttgagcagatccaagccaaaggcgttgagttggcgtatgtaacactgcatgttggcgcggggaccttccagcctgtgcgggtggaaaatattcacgatcaccatatgcatgcggaatacgttgaagtgccacaagaagtggtggatgcgattacggcgaccaaagcacgtggtggtcgagtggttgctgtgggtaccacctcagtacgttcactcgaaagtgcggcgcaagatgcgctgcaaaaaggcaccgagttaaagccattttttggtgataccgaaatcttcatcttcccggggtatcaataccagttggtggattgcttgatcaccaatttccacttgcctgaatcgaccttgatcatgctggtgagtgcgtttgcaggttatgagcacaccatggccgcttatgaacatgcggtcaaagagcaatatcgcttctttagttacggcgatgcgatgtttattcgtaagcagatgactaaagcgtaa

SEQ ID NO: 40956 - DNA, 1140 bp, Vibrio cholerae
gtgaaattaaaatttgaactgaaaaagaaaaacggtaatgcccgtcgtggtcaattgatttttgaacgcggtacagtgcaaacccctgcgtttatgcccgtgggtacttacggcacggtaaaagggatgacccctgaagaagtgaaagagaccggcgcacaaattctgctcggtaacactttccacctctggctgcgccctggccaagaagtgatgaaaatgcacggtgacttgcacgatttcatgaactggcaaggtcctatcctgactgactctggtggttttcaggtattcagcttaggcgatatccgtaagatcaccgaagaaggcgtgcatttccgcaacccagtaaacggcgacaaaatttttatggacgccgagaaatcgatggaaatccaaaaagatttgggttcagacatcgtgatgatttttgacgagtgtacgccatacccagcgacccacgatgaagcgaaaaaatcgatggaaatgtctctgcgttgggcaaaacgttcgcgtgaccacttcgataagctcgaaaacccgaacaacttgtttggtatcgtgcaaggtggtgtgtatgaagatttgcgtgatgtatcggtaaaaggcctgacggaaatcggttttgatggttatgctgtgggtggtcttgcggtgggtgagccaaaagaagacatgcatcgtgtactggaacatacctgtccacaactacctgaagacaagccacgttatctgatgggcgtcggtaaaccggaagacttggtggaaggtgtgcgtcgtggtatcgacatgtttgactgtgtgatgccaacgcgtaacgcacgtaacggtcacctatttgtgacgggtggtgtgatcaagatccgtaatgcagcacataaaaccgatacaacaccactggatcctcattgcgactgttacacttgcaaaaattattcgaagtcatacctgcatcatctggatcgctgtaacgaaatcctcggtgcacgcttgaatactatccataacctgcgttactaccaacgcttgatggaaagcattcgtaaagcgattgatgaagaccgttttgaccaatttgtagccgagttctacgcgcgtcgtaaccgcgaagtgccaccactacaaaaagacaaagcctga

SEQ ID NO: 40957 - DNA, 567 bp, Vibrio cholerae
atggaaaacttccagccacataaacagtgtggatacggtgtgattatgagactgacatctaaaggaagatatgcggtaacagccatgttagatgtggctctgcattcgcaacaaaacccagtaccgttggcggacatttctgagcgccaaggcatttctctctcgtacttagagcagcttttttctaagttacgtaaggcgggcttagtcgccagtgtgcgcggtccgggcggcggttatcgcttaggaatggactcatacgccatttctattggtactgtgattgccgcggttgatgaatcggtcgatgcgaccaaatgcaacgggaaaggggattgtcagggcgggactcgctgtctgactcacacactgtggcgtgatctcagctcacgcattacggattttcttaacaacatcacgctcggtgagctgatgatggataacgaagttctcgaagtttcagatcgtcaagatcttcatcttgcggtcagccaaagggtttcgcaaaacaactcaaacacagtcaccattggtgctgcgccttttggtattaatgttcgctcatag

SEQ ID NO: 40958 - DNA, 384 bp, Vibrio cholerae
atggcatacagcgaaaaggtcattgaccattacgagaacccacgtaacgttggttcatttgataaagaagatccttctgtaggtagcggcatggttggcgcacctgcgtgtggtgatgtaatgcgtttgcagatcaaagtatcaccagaaggcatcatcgaagatgcaaaattcaaaacttacggctgtggtagcgcaattgcttctagctcgctagtgactgagtgggtgaaaggcaagagcattgatgaagcggcagcgatcaagaacagtgaaatcgccgaagagctcgaattgccaccggtgaaaattcactgctcaatcctagccgaagatgccatcaaagccgctgttgcggactacaagaaaaagcatcaacactaa

SEQ ID NO: 40959 - DNA, 1182 bp, Vibrio cholerae
ttgcaccgattaagccaagttgttccattactacctataatcaaaaataaaagtgaatggcccagcggcttagtcctgactaagagattgaaattacggatgaatactgaacagcaagattacaaccaaactgagacgaccgagcaagtaaatcaacctgccatcgagaaagttgctcccggcactttactcaagcaaaaacgtgaagatttggggctgactcagcgccaaatcgctgaccgcctcagattacgcctttctattatccaaagcattgaagagaaccgttttgaagatggtcaagtcgccacttttactcgcggttatttgcgttcgtatgccaaagcggtgggtattcgtgaatctgagatcttgtgtgcttttgatgacagctattgccaaaagccagaagttcagccggatatgaaaagcttctcgaaaaagaccaagcgtcagttgcacgacagccgaatcatgctgatcacttgggtgatcttagcggttatcgtcggcatgtcgaccttgtggtggtggcaaaatagccagaagaacagcttaatcccggataaaacaaccattgcgccgagtgctatttcggatattcagtctagcaatgacgccagtcttgccaatgaagacttcgcaaccgttcctccactcaatgagctacaagatgcggcgccagccagtgaagaggcaccgatgagccaagagtctctttctggtgaggccagtgaattgactccgccagcaccgaatgaagctgatgtggtgacagataaacctgtggttgaagaaacggcggcggcaccagtagcacctgctcagcctcaaggacaaactccagttcagtctcaagctccagtggcggctgcgcctgtgactcaacctgaagcggcgcctagtgcacctagtcaacctgtaagctcttccactgagagtgcttccgcactgctggtgatgaatttttctgccgattgctggattcaagtcaaagatgccacgggcaaaacactgtcaacgggtgtgaaaaaagcagggcagagtgtgagtttgagtggccagcgcccttataaattggtgttgggtgcaccagaaggggtttcaatcacattagcgagtgaacccgtcgacctttctgggtatacttccggcaaagtagcaagattgaccttaccttag

SEQ ID NO: 40960 - DNA, 1131 bp, Vibrio cholerae
atgtctatgcaacatgagtctcctatcaaacgtcgcccctcgacacgtatctatgtgggcgacgttcctattggtgatggtgcgcccatcgccgtacagtcaatgaccaacacccgaaccactgacgtggctgccacggttgcgcagatcaagtctttggaaaaagtgggggcggacattgtgcgtgtttcggttccgactatggaagctgccgaagcgttcaaactgatcaaacaacaagtctctgtgcctttagtggccgatatccacttcgattatcgtattgcgctaaaagtggcggaatacggtgtggattgtctacgcatcaacccgggcaatatcggtaacgaagcgcggattcgttcggttgtggattgtgcgcgcgacaaaggcattccgattcgaatcggggtcaatggcggctcgctagaaaaagatctgcaactgaaatacggtgaaccgacgccagaagccttagtggaatcggcgatgcgtcatgtggatattttagatcgcctcaactttgatcagttcaaagtcagcgtaaaagcctccgatgttttccttgcggtagactcctatcgactgctggcgaaaaagattgatcagcctttgcatcttggcattactgaagcggggggcgcgcgtgctggttcagtgaagtcagccgtaggcctaggtatgctgcttgcggaaggtattggcgatacgctgcgtatttcgctggcggccgatccggtagaagaaatcaaagttggttttgatattttaaaatcgctgcgcattcgttcgcgtggcattaactttattgcatgcccaagctgttcacgtcaggagtttgatgtgattggcaccgtgaatgcccttgagcagcgtctagaagacgtgctgacaccaatggatgtatcaatcattggctgtgtggtaaacggtcccggtgaagctgaggtgtctcacttaggcttagcgggcagtaataagaaaagtgcgttctatgaagatggcgtgcgccagaaagagcgatttgataacgatgatctcgtcgctcaactggaagcgaaaattcgcgctaaagccgcgcgattggatgaaaaaaatcgcatcgatatcaagcacgtagaacaagattaa

SEQ ID NO: 40961 - DNA, 1269 bp, Vibrio cholerae
gtggcaaaaactattcaagcaatccgaggcatgaacgattgtctcccaacccagtctccactttggcaaaaagtggaaggcgtggtgaaaaatgtaatcagcgcttacggttacagcgaagttcgtatgccaatcgttgagatgactcatctatttagccgcgccatcggtgaagtgaccgatgtggtggaaaaagagatgtacacctttgaagatcgcaatggtgatagcttaacgctgcgacctgaaggtacggcgggctgtgtgcgctctggtatcgaaaatggtttgctgtacaaccaagagcaacgtttgtggtacatgggaccgatgttccgtcacgaacgtccgcaaaaaggtcgttaccgtcaattccatcagtgtggtgttgaagtgtttggtttagatggccccgatgtggacgctgaactgatcatgatgacggcacgtctgtggcgcgaattgggtattgcacaacatgtgcgtttagagctcaactcgattggctctctagaggctcgcgctaattatcgcaccgccttgattgactatcttgagcagtaccaaaacgtactggatgaagattgcaagcgccgcatgtacaccaacccgctgcgtgtgcttgattcgaagaatcctgatgtacaagcgattttaggtgatgcccctcagctctctgattatctcgatgctgaatcaaaacaacattttgcgggcttgtgtgaacttctggatgcggcgggtatcgaatacacggtaaatcaacgtttagttcgcggccttgattattacaaccgcacggtttttgagtggatcaccgaaagtctgggatcgcaaggtaccgtttgtggcggcggccgctatgatggcttggttgaacaactgggcggtaaaccaacccctgcggtaggtttcgctatgggcctagagcgtttagtgctgatgatggaaacactcggtaatacggatgtccgtcgcagcgtagatgtgtatatggttactgcaggtgaaggcaccatgatggcgggaatgaagcttgcggaacagttacgtgagcaagtgcccggcctacgtgtgatgactcacttcggtggcggcaattttaaaaagcaatttaaacgcgcggataaagtgggcgcagcgattgccttggttttgggtgaagatgaagttgcagcccaaaccgttgtggtaaaagatttggcgggaggcgagcaaaatactgttgcccaagctgaagtagctaaactactggcacatttagcctaa

SEQ ID NO: 40962 - DNA, 1161 bp, Vibrio cholerae
atgaagaagctgttcaatcaagtgctggtcgctgcgggtgtgttagctctgctcgcgggttgtgctagtgaagaagaaaacgtcattatggcgccgttgcctatcgtcaaaagcgaatttacgccgaaaacgctgtggagcgcttcggtgggcgatggtgttgggcactatttctcaaaactggctcctgattatgcttacgacaaagtcttcgtggcgagtcgagatggggtagtaaaagcacttgatccgcaaaacggtaaagtgatttggaccacggatcttgagattgaaggctcggcacgcttgtccggtggtattaccgcagcgtttggtaaattattcattggtagcgaaaatggcgtagtcaatgctttagacgcagagaccggcgaaccgctatgggcttcagcgattgaaggtgaagtgttagccgcccccgcggcagataacaacatcgttatcgtgaacaccagccgtggtgctctgattgcgcttaaccaagaagatggggcgcagaaatggacgatcagtacggaagtgcctaacctgacgctgcgcggtgatagccgtccaacagcggttgcgggtggtgtattctggggaaccccaagtggtcgtctggctgcggcaattgctgaacgtggtcaactgatttggcagcaacctgtcggtcagccaaaaggtgcaaccgagattgatcgccttgtcgatgtggatgcctccccattggtcatcggtggcacgttgtttacggttggatttaacgggcaattgatcgcgatcgatttacgttcaggccagccaatctggaaacgcaattactcgtcagccaccgacatggcgacggatggtagccgtctttatctggttaccgataaagatcatctggtagcggtcgatacccgcagcggtaccgagctttggagtaatactcagttagagcatcgtttgctcactgcgccaaaaatgattgatgattatttggtggtcggtgacgcggaaggttatctgcactggattgatcgcaatagcggggaatttattgcccagcaactggttaatgacagcggctttgcagtgggtccgctcgcgctgaatgacggttacgtcatcgtgactcgtaatggccagataaagaagctgacgattcaacagtaa

SEQ ID NO: 40963 - DNA, 1485 bp, Vibrio cholerae
atggtacctgttgttgctcttgttgggcgtccaaacgtcggtaaatcgacgctgtttaatcgactcactcgcacacgggacgcattagtcgcggattttcccggcttaacgcgtgatcgcaaatacggtcaagctaagttgggtgagcacgaatttatcgtgatcgataccggcggtatcgatggctctgaagaaggcgttgagaccaaaatggcacagcaatcgctcgctgcgattgacgaagctgatgtggtgctgtttatggtggatggccgcgcgggtctgacggttgcagatgaagcgattgctcagcatctgcgccgtattgaaaagccagcaattttggttgtgaacaaagtggatggtatcgatgcggatgccgcttcggcggagttctggcaactcggtatggatcagatgtaccagatcgccgccgcgcatggccgtggtgtgggcgcattgattgaccgtgtgctgaatccgtttgctgagcaaatggaatctgagcaagctcaacttgaagatctgaccaacgaagaagatccagaagaagagcagttagagtacagcgaagaagaagcggaagccgaatacaagcgcctgcaagacttgccgattaaactcgcgatcatcggtcgtccaaacgtgggtaaatcaacactgactaaccgcattctgggtgaagagcgagtcgtggtttacgatatgccgggaaccacgcgtgactctatctacatcccaatgaaacgtgatgagcgtgaatatgtgttgattgatactgcgggcgtgcgtcgccgtaagcgtatcaatgaaaccgttgagaagttctcggtagtcaaaaccttacaagcgattgaagatgctaacgtggtattgttggtggtcgacgcgcgtgagaacatctcagatcaagatcttagcctacttggttttgccctaaattctggccgctccattgtaattgcggtgaataagtgggatggtctgagttttgacgtcaaagaacacgtgaagaaagagctagaccgtcgactgggtttcgttgattttgcacgcatccactttatttctgcactgcatggcacaggtgtcggtcacttgtttgaatcggtgcaagaagcgtatcgctctgcaaccacgcgtgtgggaacgtctgtactgactcgtattatgaaaatggccaccgatgatcaccagccgcctatggtgcgtgggcgtcgtgtgaaactgaaatatgcacacgcgggtggttacaacccaccgatcatcgttatccacggtaaccaagtcaacgagctgccagattcatacaaacgttatttgatgaactattaccgtaaatcgctagaaatcatgggtacaccaattcgtatccagttccaaaatagcgaaaacccatttgaaggtaagacgaataaaatgaccctctcacaagagcgacaacgtaagcgattgatgagcatggtgaaaaaccgcagaaaataa

SEQ ID NO: 40964 - DNA, 1341 bp, Vibrio cholerae
ttgtcttcttctctcgccaatcgaaatatctacaccgtttcccgtttaaattctgaagttcgtttattactggaaaatgaaatggggatcgtctggttggtgggtgaaatttccaacttctccgctcccgtctctggtcactggtatctcactttaaaagacagccaagcgcaggttaaatgcgctatgttcaaaggcaataaccgtctggtgaatttcaaaccgcaaaatggtcagcaagtattagttaaagctcgactttctctttacgaaccgcgcggtgactaccaaattattcttgaaagcatgcaaccggaaggggatggccgtctgcagcagcagtttgaacaactgaagatgcagctcgccgccgaaggtttgtttgctcagacacgtaaaaaaccattgccggaaaatccacgctgcgtggggattatcacctcacggactggcgcggctttgcacgatattttgcacgtgcttaagcgccgtgacccgaatctgcctgtagtgatctaccccactctcgtacaaggtgaagaggcagctattcaaatcgcccaagcgattggtcgtgcgaatacacgcgccgagtgcgatgtgttgatagtaggtcgtggtggtggctctttggaagatttgtggtgttttaaccatgaaatcgtggcacgtactatcgctgcgagtgaaatcccaattatcagtgctgtaggccatgaaatcgatgtgacgatcgctgactttgtcgccgatgtgcgtgcccctaccccatcagcagcggcggaattggtcagccgtgatcatcgccataaacagcaagcactccatcaatggcaagccaaactggctagcaccatgcgccattatttggcgcagcaagagacgcaatttgcccgtttacagcacaagcttgataaacagcatcctcaagctcgtttagagcgccagcagcagcaacttgatgagctcagcctgcgtcttgagcaaaagatgcagcaacgtctggcaactcagcagcaacgctgggatcgcttaagccataagatcgagctccattcgcccattcacttgatccgccagcagcgttttaatctgatccagcaagagcagcgaataaatcagtcgatccaacgctatttgatccaatcacgccatcaactcgctttgttgagtgaaaagttggatgcggtcagccctcttgcaaccttagcccgtggctattcggtgacacgtaccacacaaggtgagttagtgcgccaaagcgcgcaagtgaaaccgggtgacactttagtcacccagttaatggatggtgagattctctctactgtgaattcccgttaa

SEQ ID NO: 40965 - DNA, 1554 bp, Vibrio cholerae
atgactaaaaatattcatgaccaacgaattctgatcctcgatttcggatctcaatatacccagctagtagcccgtcgcgtgcgcgagatcggtgtgtactgtgagctgtggagctgggatgtagaagaggcggacattcgcgaattcaatcctgacggcattattctttcggggggacctgaaagcgtgaccgaagctaattcaccacgtgccccgcaatatgtgtttgacagtggtgtgcctgtctttggtgtttgctacggcatgcagaccatggctgagcagttaggaggccgtgttgcgacttctgatgagcgtgaatttggttatgctcaggtaaaaatttctggcgaatcggcgctatttaaagatctcgatctcacgcaagacgtttggatgagccacggtgacaaagtggtcgaaatcccagcggatttcgtgaaaatcggtgagaccgatacctgcccatacgctgcgatggccaatgaagagaagaaatactacggcgtgcagttccaccccgaagtgacacacaccaaaaacggtttacagatgctggagaactttgttctgggcgtgtgtggctgtgagcgtctgtggacgtctgaatccatcatcgaagatgcggttgctcgcatcaaagaacaagtgggtaacgatgaagtgatccttggcctgtcgggcggtgtcgattcttctgtggttgccatgctggttcaccgtgcgattggaagtaagctcacttgtgtgttcgtggacaacggactacttcgtttaaacgaaggcgagcaagtgatggagatgtttggtgataaatttggcctcaacatcattaaagtcgatgcagaagagcgcttcctaaaagcgctagaaggcattgatgagcctgaagcaaaacgcaaaaccatcggccgtgtgtttgttgaagtatttgatgaagaatcgaaaaaactcagcaacgcaaaatggttggcgcaaggcaccatctatccagatgtgattgaatctgccgcttcaaaaaccggtaaagcgcatgtgatcaaatcgcaccacaacgtgggcggtttacctgatgacatgaaaatgggcttggttgagccactgcgtgaactgtttaaagatgaagtgcgcaagattggccttgagcttggtttaccttacaacatgctttaccgccacccattcccaggcccaggccttggtgtgcgtgtactgggtgaagtgaagaaagagtactgtgatttattgcgtcgtgcagatgcaatctttattgaagagctgcacgcagcggatctgtacaacaaagtttctcaagcctttactgtgttcttgccagtgcgttcagttggtgtcatgggcgatggccgtaagtacgattgggttgtgtcattgcgcgcagtcgaaaccatcgactttatgaccgcacattgggcacatctaccttatgagttcttgggtaaggtttccaaccgcattatcaacgaagtgaatggcatttctcgcgtagtgtatgacatctcaggtaagccaccagcgaccattgagtgggaataa

SEQ ID NO: 40966 - DNA, 1725 bp, Vibrio cholerae
ttgagagagggacttttatccatgtttaaactcaaacataccgcatggtgggtggccatggcgtgtgcattgcctgcgcaagcggcgatgaatattcagcctgatccacaaaatcctggtggatatttggtggctaaagcggatattgccgcagcagaacaagccaaaaccgccaatcctatgtatgccatttggtcaaatgccttagcgacccgcgccaatgcgattgttgatgcgatcgagccgggactggcgacaaaccctgataacgtgaaacgggttgaacgcgtatttcctgagtctgagtggaatttcctcactcacatggcggcacctgaatacacttatacccgtttcttgcgtgcgattggcaaattcccggcattttgtgccgagtataccgatggccgcaattctgacgcgatttgtaaaaaatcgatcgtgaccgcttttgctcactttgctcaggaaactggtggacacatcgcgaaggacaacatttctgataacccattagcgctggaagagtggcaacaagcgctggtgcatgtgcgtgaaatgggctggtctgaaggtcaagaaggttataccacggggtgtggtcaaaatgactggcagaacaagaagtggccttgtgctactgggcaaggttactttggccgtggagcaaaacagctttcttaccactttaactacggcgctttctccgaggctatgtttgatggtgatgcaacagtattgttgaacaaccccggtttagtggctgattcgtggttgaaccttgcgtctgcaatctggttcttcctcacgccacaagcaccaaaacctgccatgttgcatgtgattgatcgtacttgggtgccttcacagcgtgaaattgatgcagggattggttacggtttcggcaccacgatcaatatcatcaatggtggtattgagtgcggggagcaaaacaaagataaagggcagccggttaaccgtattcgttattgggaaggcttagcggcgcattatcaaatccctattgaagctgatgagaagaatacctgctggcagcaactgccttacggcagccttaacctcaatggtgcgaccgatgtgctttacacaaactgggatggtaactggaaatattatccagatcgtccgggtggctactcatttgaatgtgagttggtggggttccaaaccgcgtattctgctttggtggaaggggattatgagaagtgtgtgactaatctgtatggttcacatgcgagctggccaaaagttcgtgtagtggaaaaacttgatccattacctaccgatccgacagatccacctgtaggtggtgcccctgcgtgggaagtgggtaaggtttataactcaggtgacaaggtcagttataaaggtgcggtttaccaagctaaatggtggacacaaggtgatgaaccttctaaaggcgggccttgggcgttagtttctggtgagccaacaccaccaactgagccaacgccaagcgagccagtacctcccactgaacctgtaccaccatcggagccaacaccagtgccgccgacagagccagcccctacggatgccattgtgtggcaacctggagtcactaaggtctcgaacggcgataaagtgacctataacggccaatgctttattgctaagaacagtccaggcgtttgggagtcacctactcaatctaactggttctgggataaggtgtcctgctaa

SEQ ID NO: 40967 - DNA, 1632 bp, Vibrio cholerae
atgacaaccgattttaccccttggccagaggcacttgccgctcaataccgtcagttaggctactggcaagataaaaccttgctcgattacttacagcaaagtgctgagcgtacccccaatgcgcttgcgctggtcggtgataatcagcagtggcgttaccaagccatgctcgaacgtattgagcagcttgctgccggatttaccgaacttgggctaggctgtggcgataacgtagtgctgcaattaggcaatgttgcggaattctatttatgctttttcgctttgctgcgccaaggcatacgaccgattctggcgctccccgctcaccgtttagcggaaattcgctatttttgtcagcacagccaagccaaagcttacctcattgatggcgctcagcgaccatttgactatcaagctttggcgcaagagctgcttgcttgctgcccaacactgcagactgtgattgtacgcggccaaactcgagtgacagatccaaaatttattgaactggcgagttgctactcggcatcatcttgtcaagcgaatgccgacccgaatcaaatcgcctttttccaactttccggtggcacaacgggcacgcccaagctcatcccgcgtacccacaatgattacgcctacagcgtaaccgccagtgtcgaaatttgccgttttgatcagcatactcgctatctgtgcgtactgcccgcggcacataacttccctctcagctcccccggcgcactcggtgttttctgggcgggtggctgcgttgtcctcagtcaagatgcgtcaccccaacacgcgtttaaattgatagaacagcataaaattactgttaccgcgttggtgccgcctttagcactactctggatggatcacgcagaaaaaagcacctacgatctctcctcattgcactttgtgcaagtaggcggggcaaaatttagtgaagcggccgcaaggcgtctgccgaaagcgctaggctgccaattgcaacaagtgtttggaatggcagaaggcttggtcaattacactcgtttggatgacagtgcggaactgattgctacaactcaaggtcggcctatctccgctcacgatcaattactggtggttgatgagcagggtcaacctgtcgccagcggagaagaagggtatctgttaacccaaggtccctatacgattcgcggttactatcgagctgatcagcacaatcaacgagcgttcaatgcacaaggtttttacatcaccggcgataaagtcaaactcagtagcgaaggttacgtgattgtcaccggaagggccaaagatcagatcaatcgtggaggggaaaagattgccgccgaagaggtggaaaatcagcttttacatcatccagcagtgcatgatgccgctttaattgccatcagtgacgaatacctaggagagcgcagttgcgcggtgatcgtactcaaacccgagcagtcggtgaataccatccagctcaaacgttttttacaccaagcggggctcgccgattacaaaatcccagatcaaatccaatttatcgatcaactgcccaaaacatcggttggaaaaatcgataagaacgcgcttcgtcgtcgatttgacacgctcggcttagcgttaatgtcgtga

SEQ ID NO: 40968 - DNA, 978 bp, Vibrio cholerae
atgagaatcaatattacaatgaaaaacatttttattttattgtctgtgatattgggttgcctgttcagtggttttgtcagcgcgcagcagaatgtttggccaagaacctttcagaatgcggacggttcaatcacgacgattccctctcagccaaagcgaattttgtcgacggccgtcacggtgaccggaacactgctggcgatagatgcgccagttattgctagtgctgcgaccacgcaaagcaccttttttgagcagtggcgaaagctggcagagctgcgccaagtgaaaaaactttggcctgcgggaagtgtcgatctcgaatcggtgtatgtcgaacaacctgatttgatcgtggtttccatgataggcgcggattccgctcgcgatcaaattccccttttacaagcgattgctcccaccatcttggtcgattacagcgatcaaacttggcaatctttggcgcagcagttggggcttgctaccggacttgaagagcaagcggagcgcacaatacacaattttgagcagtggacaaagcaagtgcgagatgtgctggatctgcccaaagggcgcgccaatattgtgagctaccacggccccggtgtggtcaatgcggtggcgaaagcgcaaagtgctcatgctcaactgttgcaatcggtcggggttgtgttggaggagccagatccagcatggcaagcgggttccatcgtccatcgagattttctgcgcatccattatgagcatttaactcagttgcaggctgaaaccacgtttcttatcacgatgaccgatcagcaagctcaagcttttctccacgatccgattttgaaaaacttgccttcgatccagcgcaaacaagtttatggattgggtgaaaactcatttcgcattgacctgttcagtgcccgagaaatcattaactcactgctgcgacgctttgctggcgagcaagcacaatctttagtcatgccatga

SEQ ID NO: 40969 - DNA, 840 bp, Vibrio cholerae
atggacacaatttgggatgctgacttacagagcgctgcattaaaggctgaacatcacaggcttaagactgagcgactgagtttaggttatgaaggaaaatcggtgtgtgatgcgctggatttggcgattccgcacgggaaattttcggtgatagttgggcctaatggctgtggtaaatcgaccttgctaaaaagcttgtgccgtttactcaagccgctggctgggcaagtattactggatggtcagaatattcaccaattgccgaccaaggtggtagccaagcagctaggattactgcctcaaagcgcgttgacacccgaagggataaaggtggtcgatttggtctctcgtggccgttatcctcaccaagggctatttcgccaatggagcagggtggatgaacgagcggtagaagaggcgatgcgagccactcacgtccatgagcttgcgcagcatagtgtggatcagctttccggcggtcagcgtcagcgggtttgggtcgccatggcgctggcgcagcaaacgccgtatttactgcttgatgaaccaaccacttatcttgatattgctcaccaaatcgaactgctcgatctcttttggcggcttaatcgtcagcaagggcatactctagtcgccgtgctgcacgatctgaatcaggcgtgtcgttacgccgaccatctgattgtgttgcaagaaggcaaaatcgtcgcgcagggcgatccacactctttggtgactccagcattggttaagcaagtctttgggattgattgtgtcgttatgcccgatcctatctcctgcacgcctttgattataccttattcgttaaagcgcggttaa

SEQ ID NO: 40970 - DNA, 1551 bp, Vibrio cholerae
atgcagtcatttgttgattttctgaatggaatcatctggagtccggcgctgatttatctctgcctcggtgctggcttgttttattccgttctgactcgttttgtacaggttcgtcacttcttcgaaatgtggcgcctacttctgaataataaagagtcctcaaaagggatctcctctttccaagcgctcgccgtatcactctcaggccgtgtgggtaccggtaacattgctggggttgctgccgctatcggtttcggtggcccgggtgcggtattctggatgtggatggttgcgttttttggtgccgccaccgcgtatgcagaatccacactggcgcaaatttataaagaagaagacaacggtgaattccgtggcggccccgcttactacatcgaaaaagccatgggtcaaaaatggtacgcttgggtcttcgcgattgcgaccatctttgcttgtggggtgttgctgcctggcgtgcaatctaacagtatcggcaacgccgttgagtcagcatttggctcaggcccaatgattgaaaccgcactcggcacctttagctttgccaaaattttcaccggtacggtgatttcaatcctacttggcttcattatctttggtggcgtaaaacgtattgcaagcttcactcagatcgtggtgccttttatggcgctggcgtacatcatcactgcgttcgtgatcattctgctcaacatcggtgaagttccacgcattattgcgatgatcgtcggcgacgcattctcaccgatggccggcgtaggtgcggcgattggttggggggtaaaacgtggggtttactctaacgaagcaggtcaaggtactggtccacacgccgcagcggcagccagtgtagaacaccctgcgcagcaaggtttggtacagtctttctctatctacattgataccttgatggtctgttctgccaccgcgttcatgattttgatcaccggcgcttacaacgttcacggtgccgctgaaggcatgttccttgtgcaaaacctgccagcggacatcattgccagcagcccagcctttacccaaattgcggtagatagtgccctccccggcattggtaaaccgttcgtggcgtttgcgttgttcttcttcgcctttactacaattttggcttactactacatcgctgagactaacgtggcctatatccgccgtaccttcaaagtcgatggtttgatgtttgtgctcaaacttgtactgatggcatcggtattctacggcacagtgaaaaccgcgaacttggcatgggcgctgggtgatgtcggggtaggcttaatggcttggctcaacattgtcggcatcatcatcatcttctttatgtctaagccaaccatggcggctttgaaagattatgaagatcagcaaaaacaaggtgtgaccgaatttaccttcaacccagtgaagcttggtatcaaaggggcgacgtactgggaagggaaataccttcgcaaaacgggcaaagccccaaccgcggaagtgaaagagacccaaagggtagagcaaactagctcactataa

SEQ ID NO: 40971 - DNA, 891 bp, Vibrio cholerae
gtggagccagctatcatgaccaaacttcgtcgcagtatgttatttgtgccgggcgcgaatgccgccatgctcagcaacacctttatctatcaaccggattcgatcatgttcgatctggaagactcggtcgcgttgcgtgaaaaagacaccgcgcggatgttagtgttccatgcgctgcagcaccctatgtaccaagagatggaaaccgtggtacgggtcaatccgctcgattctgaattcggcatcaaagaccttaatgccgtggtgcgcgkcggagccaaagtggtgcgtctgccgaaaaccgataacgccaacgatgtgattgagatggaaaaagtcatcgagcagatcgagcgtgcatgcggacgtgaagtgggtagcacgcgtatgttggcggcgattgaaagcgcgcaaggcatcaacaacgcggttgagattgcctttagctcacgccgcctgattgggattgcgctcggcgcggaagactatgtgcgcgatctgcgcacgcagcgttcagcggaagggattgagctgctgtttgcacgctgctccattctgcaagcggcgcgtgctgccgggatcatggcgtttgataccgtctattccgatgccaataacgaagagggatttttgcgtgaagcggagcacatcaagcagcttggctttgatggcaagtcactgattaacccgcgccagattgacctgctgcacaacgtgtttgctccaacccaaaaagaggtcgatcacgccatcgcagtcatcgaagccgccgaagaagccgcagcgaaagggctaggcgtggtttcccttaacggcaaaatggtcgatggccccatcatcgaacgcgcacgttggacactgcaacgtgctgaatccggcatcaaacactaa

SEQ ID NO: 40972 - DNA, 1605 bp, Vibrio cholerae
atggccccatcatcgaacgcgcacgttggacactgcaacgtgctgaatccggcatcaaacactaaaggtcatctcatgagtatcaatacattaaataaccctctgtctgtgctggaagtggaacgctacgcgttgacgccttacacccaagcgcgcgcgatcacgccgcatctgcacgatgagcaagcgaaaaaaagccgcaaagtgaaaagctcgatccgcgaagcgattgtcgatcttggcttaaaagatggcatgaccatctctttccaccatgcgtttcgtggcggcgataaaaccgtcaatctggtgatggaggtgattgctgaattgggaattaaaaatctcacgctcgcctcaagctcgctgacctcttgtcattcgcctttgattgaacacatcaaaaacggcgtagtgagcaagatttacacctcagggatccgcggagcgctggccgacagcatttctaacggcctgcttgatgagcccgtgcatattcactcgcacggtggtcgtgtgcatttgatccaaagcggtgagctgtacatcgacatggcgtttattggcgtaccttgttgcgatgaatttggtaacgctaacggttttaaaggcaagtccaattgtggctcactcggctatgccaaagttgatgccgagcacgctgaaaaagtggtgatgctgaccgaagcgatcgtcggtttcccgaatttccctgcatcgattactcaagatcgtgttgatgcggtggtgcaagtagccgaagtgggcgacccaagcaaaatcggtggggatgccacgcgcatgaccaccaacccacgcgagctgttgatcgccaaacgcgctgcggaagtcattgagcattctggctatttctatgatggtttttcaatgcagactggttcgggcggtgcatcgctcgcggttgcgcgctttttgaaagagaagatgctgcgccaagacatccgtgcttctttcgctctcggtggtatcaccgcaaccatggtcgatatgcatgagcaggggctgattgattacttgctcgatgtgcagtgtttcgattcggtggcggcgggctcgttagcgcgcaatccgcatcatctcgaaatctctgctaacgaatacgccaacccaagctcgaaaggggcggcggtggataggctggatgtggttatcttgagtgcgctggagattgatacccagtttaacgttaacgtgatcaccggctctgatggggtaattcgcggtgcatccggcggccactgcgacacggcggctgcggcaaacttatcgattattgtggcgcctttggtgcgtggccgcattccgaccgtggtcgagaaggtcactaacgtcatcaccccaggatccaccattgatgtgttggtgacggatcaaggtatcgcggtaaacccgaatcgtcccgaactgaaagcacgtttcatcgaggcgcaactgcccgttgtcgagattgaagcgttgcaacagcgtgccgagttgctgacgggcaaaccccagccgttgcaatttgaagacaaaaccgttgcctttgttcactaccgtgacggttcgatcattgatgttatcaaacaggtaaaaagcctatga

SEQ ID NO: 40973 - DNA, 774 bp, Vibrio cholerae
ttgcactataattcgccggcatttatctcggacagcaccatgatttcgaaaacccaactcaaattgattcgcgctttagggcagaagaaacagcgcaaagcgcacggcttatttctggttcagggcgagaaaaacgtcctagagctgaccaacagcacgctgaaagtacaacacatttttgcgaccgccgagtttctcgccgagcacgcacaagccttagccggtttcgagtgtattgaagcaaccttggatgatttaaccaaagtcagcaccttggtgagcaacaacgccgcgattgcggtggtggcgatcccacacatcgaggtgcctaaagcacaagggttgatgattgcgttggatggcgtttccgaccccggtaacttgggcaccattattcgtgtcgcggattggtatggcatttcgcacatcatcgccagccaagattgcgccgacccgtataacccgaaaaccatcagcgccacgatgggcagctttggccgcgtgcaagttagccaagtggatttacccgactacttagccaaggcgaatttgccagtgtacggtgcatttttggaaggggtgagcgtgcatcaaaccgcttttcaagccgaaggcattttgctgatgggcagtgaatctcacggtattcgcgagcaagcggcgcagtacgtgacggataagatcaccattccggcctttggcggcgcagagtcactcaatgtcgcgatggcaacggggatcattctcgacaatattcgccgtcagcatagttaa

SEQ ID NO: 40974 - DNA, 1626 bp, Vibrio cholerae
ttgaaatttcaatacgattttgtttttttaaatcaattctcatgtaagaagttaatttcattctatagaataatttttccatcaaaaaaggtagctgttttttatatgatttatccaattcctaatagcgaaacttcgactgttcatttcaaagatgtatatgataattacattggaggtcaatggatgaagccacacagtggcgaatattttagcaatacgtcaccagtaaatggactggtgttttgtcgtgttgctcgctcgtcttcgcaagatgtcgaacttgctctagatgccgcccataatgcacttgaatcatggtctacaacaagtgcagtagaaagatcaaatattcttctgaggattgctgatcgaatcgaatcaaatttagaaactctcgcaatagttgaatcatgggataatggaaaacctatccgtgaaactttagcagctgacctaccgttgactattgatcactttcgatattttgcggcttgtattcgatcacaagaaggtgctgcttccgaacttgactctagaacgttaacttatcatttaccggaaccaataggtgttgtaggccaaataataccatggaattttccgttactcatggctgcttggaaattagctcccgctcttgcagcaggttgtactgttgttctcaaacctgcagaacaaacccccgtttcaattttgtttttaatggaaattattggtgatttaattccagctggtgttattaatgttgttaatggtttcggctctgaagcaggtaatgcattagcaacaagccaacgtatcgataaactagcatttacaggttctactgaaattggtaaccatattcttaaatgtgcggcggataacttgattccatccacaatcgaattaggtggaaaatctccaaacatttatttccccgatatcttttctcatgaagaccaatatcttgataaatgtattgagggtgcacttttagcatttttcaaccaaggtgaggtttgtacctgtccatctagaattttagttcatgaatctatttatgaaaaattcattgccaaaattattgaacgagtagcattaattaaacaaggaaatcctttagataccgaaacacaaattggtgctcaagtatctaaagaacagtacgataagattcttggttatatacaaataggtaaagatgaaggggcagagctaatttttggtgggcatcctaacaatcaagaaaattatttatctggtggttattatattaaaccaaccctattctttggtcataatcagatgcatatctttcaagaggaaatatttggacctgtaattgcaatcactaagtttaaagatgaaattgaagcactgcaccttgctaatgatactgtttatggtttaggtgccggtgtgtggacacgtgatataaatattgctcatcgtatggcaaaaaacattaaagctggaagagtatgggtaaattgttatcatgcatatcctgctcatgcggcttttggtggatataaaaaatctggcattggacgagaaacacacaaattaacattgagtcattaccaaaatataaaaaacgttcttattagtcatgagattcatcctctaggtctattttaa

SEQ ID NO: 40975 - DNA, 831 bp, Vibrio cholerae
atgattgggaaaaaatcttttcaaactaatgtatatagaatgagtaaatttgatacttacatattcaataacttatatataaacgactacaaaatgttctggatagatagtggaattgcaaagcttatagataaaaattgcttggttagttatgagataaattcaagttcaattatcttactcaagaaaaactctattcagcgattttctttgacttcattatcagatgaaaatataaatgtttctgtaattacaataagtgattcatttatacgttcactaaaatcttacattcttggtgatctcatgataaggaatttatatagtgaaaataaagatctattactttggaattgtgaacataatgatatagctgtcctttctgaagtggtaaatggtttcagagaaattaattattcagatgagttcctaaaagtttttttttcagggttcttctcgaaagtagaaaaaaaatataactctatatttattactgatgatcttgatgctatggagaaaatttcatgtttagtaaaaagtgatattacgcgtaattggcgttgggcagatatttgtggtgaattaagaacgaatcggatgattttgaaaaaagaactagagtctcgaggagtaaagtttagagaattaattaatagcattcgaatatcatattcaatttcactaatgaaaaccggtgaattcaaaataaaacagattgcatatcagtctgggtttgctagcgtttcatatttttctacagtatttaagtcaaccatgaatgtagcaccaagtgaatatttatttatgttgacaggagttgcagaaaaataa

SEQ ID NO: 40976 - DNA, 909 bp, Vibrio cholerae
atgaataagacacttaggattacattattatctatatctggttcaaaaacatttaacataaaattcagacatagagtgtttttacatttgactttttgttttattatgttgttttttttggcaatagctatgttgatttttaattttgacatgaaattgagttcctctcttctaagtcagataaaaaatgaatataagacctttttcttagagaacaaaatatcatcaattaacagttcttcatctgaactaatggaagatttgttttcaaagcaagagcgttacgagttagctatcaatcgtttagaaagattagaatcttttgtacatagcgctgaatcgatcgatatggtgactgttacagagcaacttggtagctatatgaaagaaactgtgttgaatgagattcctaatggctttcctattcctgatgcaaagatatcatctcgctatggtgaacgtgtgcatccagttaccaaagttaagcagattcaccatggaattgatttccctgctgctattggcacaccaatctattcaccagcagatggtgttgttgaagcgataagagtcagtacccagggttcaggtaattttatgcgtcttcagcatacttatggatttagtagtagttactctcatttgcataagttctcggttaaagagggggattttgtcaaaaaaggtgaattaattgcgtactcaggaaatactgggttatcctctgggccacacctacactatgaaatccgtttcctcggtaaatccctagaccctcacccatttataaaatggaattacgataatttttctgaaattactaataaagtaccattaatcaaatgggatgaattgctgactaacattgagatccggattgcaatgaatccgaatctcaatgcacaataa

SEQ ID NO: 40977 - DNA, 486 bp, Vibrio cholerae
atgacaaaaaagaaaaccaataccaaagcgggtagcaacactatcgcgctgaacaaaaaagctcgccacgaatacttcatcgaagatgaatttgaagccggcatggagctacaaggctgggaagtcaaatcacttcgccaaggtaaagccaacattgcagaaagctacgtctacatcaaagatggcgaagcgttcatttccggtatgaccatcattccgttgcagcaagcctccactcacgtggtagccaaccctacccgtatccgcaagctgctactttcacgccgcgagctggacaacctgtttggccgcatcaaccgtgaagggatgacactaaccgcattgtcactctactggtctcgttcgtgggtcaaaatcaaaattggcgttgcgaaaggtaagaaactgcacgacaaacgtgaagatctgaaagaaaaagagtggcaacgccaaaaagatcgagtgatgaagagcgcgttgcgctaa

SEQ ID NO: 40978 - DNA, 885 bp, Vibrio cholerae
atgaaaaagccgttcaacgttcttgccatcattggaaaaccgcgcgatcaacaagccattcaaactcataaagagatttaccactggctaagatcgctcggatataccgtgtttatcgatgatcgtttacgggaaattctgaccgatttacccaccgaacattttgcaagcctgattgaactgggcaaaaaagccgatttggcgattgtggtcggtggcgatggcaacatgcttggtgctgcgcgcgtgttgtcccgctttgatatcagtgtgatcggggttaatcgtggcaatttaggctttttgaccgatttaaacccagaagatttccaacagcgcttacaagaagtgttggatggtcactatttgcaagaaactcgctttttgcttgaagcggaaatccatcgccacggtcaagtgaaaagccataatgccgccttgaatgaagccgtgcttcatccaggaaaaatagcgcatatgattgaatttgaagtctatattgatgataacttcgctttctctcagcgctccgatgggttaattgtctcaaccccaaccggctcgactgcttattcactttccggcggaggcccgatcctctcgccaagcctgaatgccattactttagtgcctatgtttccgcataccctctcctgccgcccattagtggtgggcggaaatcaacgcattaaactggtggtttctcctgaaaatcgcggcactcaagaagtgagctgtgatggacaagtctcattacctgtgtcgcctggtgatgaaatccacatctatcaaagccctaatgtgctgaaactgatccatcctcaagactacagttactaccacgtattgcgtactaagcttggctggtcgagcaaactgttttga

SEQ ID NO: 40979 - DNA, 1908 bp, Vibrio cholerae
atgggtaaaatcattggtattgacttaggtactacaaactcatgtgttgctgtgctggacggcgacaagcctcgcgtaattgaaaacgcagagggtgagcgtactactccttctgtaattgcatacacagacggtgaaactctggtgggtcaacctgcgaaacgtcaagcagtcactaacccacaaaacacgctatttgcaatcaagcgtctgatcggtcgtcgttttgaagacgaagaagttcagcgcgatatcaaaatcatgccttacaaaattgttaaggctgacaacggtgatgcttgggttgaagcgaaaggccaaaaaatggccgctcctcaagtgtctgctgaagtgctgaagaaaatgaagaaaaccgcggaagatttcctcggcgaacccgttactgcagcagttatcactgtacctgcttactttaacgatgctcagcgtcaagcaaccaaagatgctggccgtatcgcaggtctagaagtgaaacgtatcatcaacgagccaaccgcagcagctctggcttatggcctagacaagcaaggcggtgatcgcactatcgcggtgtatgaccttggtggtggtacattcgatatctctatcattgagatcgatgaagttgaaggcgagaaaaccttcgaagttctgtctaccaacggtgacactcacctaggtggtgaagattttgacaaccgcatgatcaactacctagttgacgagttcaagaaagaccaaggcatcgacctgcgtaacgacccgctggcaatgcaacgtctgaaagaagcggctgagaaagcgaaaatcgaactttcttctgcgcagcaaactgacgttaacctgccatacatcaccgcagatgcgaccggtcctaagcacatgaacatcaaagtgactcgtgcgaaactggaagcgctggttgaagatctggttcaacgttctctggaaccactgaaagttgctctggcggatgctgatctgtctgtgaacgacattactgacgttatcctagtcggtggtcaaactcgtatgccaatggttcagaagaaagtagctgaattctttggtaaagagccacgtaaagacgtgaacccagacgaagcggtagcggtaggtgctgcggttcaaggcggtgttctagcgggtgaagtaaaagacgttctgctgctagacgtaacgcctctgtctctgggtattgaaaccatgggcggtgtgatgactaaactcatcgagaaaaacaccactatcccaaccaaagcgaaccaagtgttctctacggcggaagataaccaaagcgcagtaaccatccacgtactgcaaggtgagcgtaagcaagcgatgtacaacaaatctctgggtcaatttaacctagagggcatcaaccctgcgccacgtggtatgccacaaatcgaagttatctttgacttggatgcagacggtatcctgcacgtttcagccaaagacaaacagactggtaaagagcagaagatcactatccaagcttctggcggtctgagcgatgctgaaatcgaaaaaatggttcaagaagctgaagcgaacaaagaagcggacaaaaagttcgaagagttagcgactgcgcgtaaccaagcagaccagatgatccacgcaactcgcaaacaaatcacagaagcaggcgaagcactgccagcggatgagaaagcgaagatcgaaacggcgatcaacgagctagaaacagcgaaaaaaggcgaagacaaagcggaaatcgatgccaaagtgcaagcactgatggcggcggcacagaagctgatggaaatcgcacagcaacaagctcaagcacaaggtgcaaacgcgggtcaatcttcagctaaagaagatgacgtagtggacgctgagtttgaagaagttaacgacgataagaagtaa

SEQ ID NO: 40980 - DNA, 555 bp, Vibrio cholerae
ttgattcatcatcctctcacggtttgcaaaggattttgggaaatgcatcgcggctttactttgctggagcttttgatcaccgttgcggtattaaccacaatgttgctttttgctgcccccaatttctcaaaggtgagccagcaaacgaagatgaccaatttagccaatgaattacagggattccttattcaagctaaatctgaagctgtttttcgaaatcaggacttatgggtgcatattcaaggattgccttctataacgggtcaatggcaactggtgctatccagcgtatcggatgtggcagcgatcgatgcaagtaatacggttgctctgttgcaaggtcagcgatatcaaaatgtatttgtatcgaagaccaatacactaacagaggtcaaatttgatcatgtaatgggcaatcctcaggaagcaggtagcctttttattaaaccgtcggaatctgctgcagattcaatcaaagtgactgtgcacaatcgggctggacgaatcaaagtttgcaccgaaaatgaggcaaaatatggctttgaaaagtgctaa

SEQ ID NO: 40981 - DNA, 1593 bp, Vibrio cholerae
atgactccttttgcctataaactccccattcgcgcactctggctaggcttattaagcctgctcttagtcggttgccaaatcgattccgagcccaaaagcgagctagaaaaaattcgtgaacgtggtgttttacgcgttggtacgctcaacaatcccctctcctactacatcggccctgatggcccaacgggattggattacgagttagcccgcgaatttgccaaagagcttggcgtaaagctggaaatgaagccagcataccgcctatctagcctgtttcctgccttaaaaaacggtgaagtggacatcattgccgcaggcttaagccaatccgaagagcgactcaaagattttcgcgcaggtcctgcttattattacgtttcgcagcaagtggtctataaaaaaggtgactggcgaccacgcagcttcaaacagttggtcgaacgccagcaaaccttattaaaggacaatcctgagctcgcctttttcagcgtggtggatgactcccattttgagcacaccttgctagccaaacagcagaaataccccgattttcaatttcatgtcgacagcaattccgatgtgaatgacttactgaaaaaagtctcacaaggagagttactgtttacgatggccgactctgttgaggtgtcgctttctcaacgcatctatcctgaactggcggcggcatttgaattaaccgaagatcagccgatctcatggtttatccgccgttccgacgatgaaagtctgtatgccttaatgattgaattctttggcaatctcaagcaatcgggctatttggcgtctttggaagaaaaatacatcggccatattggtgcctttgattatgtcgatacccgcgcctttattcgcgcgctggatacacgattacctcgatggacgcctctctttcaaaagtactcggcagagtttgattggcgtttagtcgccgcacttgcgtatcaggagtcgcactggaatccgtatgccaaatcgcccacgggtgtccgtggtttgatgatgttgacactaccaaccgcgcgcagtgtaggggtaagcgatcgcctcgatccagaacagtcgattcgtggtggggtggaatacttgcgacgtatgatggagcgtgtccctgactcgatttccgaacatgaaaaaatttggtttgccttagcctcttacaacattggctacgggcatatgatggatgcgcgacgcttaaccaaaagccaaggcgcagatcctgactcatgggcggatgtcaaagatcgcctaccacagctacagcagaaaaaatatttcacccagacccgctatggctatgcgcgtggcgacgaagcacgtaattatgtggaaaatattcgccgttactatcaaagcatcatcggccatcttgagcagcgtcaattggcgacaggcgatgaaagtattgaagatctcaccgtgattgcgcttgatgaagaatttttcaatgaagaagcaaaccgtgaaatcttggatgaagaagcggaagcactcgaatcagagtcactcgaaaacagtgaatcgagcgccgagccatctgccaaaccatccactgagagcaaaaattag

SEQ ID NO: 40982 - DNA, 3894 bp, Vibrio cholerae
atgagaattttgcgtggctccccagctctttcagagtttcgtgttaacaagctcctgaccgcgtgtcgtgaacagcaactgcctgtaaccggtatttacgccgagtttatgcactttgccgatctcaaggcagagctcaatccgcaagagttggaaaagctcgaaaaactgctcacttatggtccaaccattcaagagcatgaaccgcaaggtttactgctgttggtgacgccgcgccccggaaccatctcaccttggtcctcaaaagccaccgatattgcacacaactgtggcctgcatggcatcaagcgccttgagcgcggtacggcttattatgttgaagcagaaacggcgctgaccgcagcacaaatcgcaacacttgaggcgctgctgcatgatcgaatgatggaagtcgtgttcgcagaactcaccgatgcccagcaactgttcagcgtagcagagcctgcgcctatgagtcaggtcgatgtattagcgggcggtcgtcgtgcgcttgaagaggcaaacgtttcccttggtctggcattggctgaagatgaaattgattatctggttgagagcttcactaaactgggtcgtaatcctaacgacattgaactgatgatgtttgcacaggcgaactcagagcactgccgccacaagattttcaacgccgattggaccattgatggggttaagcaagacaagtcactgttcaaaatgatcaaaaacacctttgaacagacgccggattatgtgctttcggcttataaagataatgccgcagtaatgacgggctcgaccgttggccgtttcttccccgaccccgagagccgtcagtacacttatcaccatgaagatgcccacattctgatgaaagtggaaacgcataaccacccaacggcgatttcgccttggccgggggcttcgactggttctggcggtgaaattcgtgatgagggcgcaaccggtattggcggcaagcctaaagcgggattggtgggctttaccacctcgaacttgcgtattcccggttttgaacagccatgggaaagcgattttggtaagccaagccgcattgtgaatgcgctggatatcatgctggaagggccactcggcggcgcggcgttcaacaacgaatttggtcgcccgaacctacttgggtatttccgcacttatgaagaaaaagtgacgtcacatgctggtgaagaggtgcgtggttatcacaagccgatcatgattgccggcggtatgggtaacattcgcgccgagcatattcagaagaaagagatcccagtgggggcaaaactgatcgtactcggaggccctgcgatgaacatcggtctcggtggtggcgcagcctcttcgatggcttctggccagtctgctgaagatctggattttgcttctgtgcagcgtgaaaacccagagatggagcgccgctgtcaggaagtgattgaccgttgttggcagctcggtgacaaaaacccgatcgcctttatccacgatgtgggcgcgggtggtatctctaacgctctgcctgagctggtgaatgacggcgatcgcggtggtaaattccagttgcgcaacgtgccgaatgatgagccgggcatgagcccattggaaatctggtgtaatgaatcacaagagcgttatgtgctggcggttgctgcggaagatatgccgctgtttgatgcgatttgccagcgtgaacgcgccccttatgccgtggtaggtgaagcgaccgaagagcgccatttgacgctggaagacagccactttgctaacacgccgattgatatgccaatggatattctgttgggtaagccgccgaaaatgcatcgtgaagcgagcacgctgaaagtttcaagcccagcgctagagcgttcaggcattgagcttaatgaagcggtggatcgcgtactgcgtttaccggcagtcgcagaaaaaacgttcctgatcaccattggtgaccgctcagtgactggcttagtcgcgcgggatcaaatggtcggcccatggcaagttcccgtcgcaaactgcgcagtaacggccgcgagttttgattcttaccacggcgaagcgatgtctatgggtgagcgtacccctgttgcgctgttggatttcggtgcctctgcacgtttagcggtcggtgaagctattaccaacatagccgcaaccgatattggcgagctgaaacgcatcaaactttcggcgaactggatgtctccagcgggccatccgggtgaagatgccggtctgtatgaagcggtgaaagcggtcggtgaagagctttgtcctgcactgggtatcactatcccagtcggtaaagactcgatgtcgatgaaaaccaagtggcaggaaaatggcgagcagaaagaagtgacttcgccgctgtcactcatcatcaccgcctttgcacgtgtggaagacattcgcaagaccgtgaccccacaactgcgtactgaccttggtgagacaagcttaatcttgattgacttggggaatggtcaaaatcgtcttggcgcaaccgcattggcgcaagtgtacaaacagttgggtgataagccggctgatgtggataacgcggcgcagctcaaaggcttttttgatgcagtacaaacgctggtgcgtaacgacaagctggtggcttaccacgacaaaggtgacggcggtttattggtgacgttggcagaaatggctttcgcgggtcactgtggtattaaagccaatattgaaaccttgggtgatgatgcactggcggcactgttcaatgaagagcttggcgccgtggttcaagtgaaaaatgatgagctgaatgctgttctggcaacacttgccgcccatggtttagaagcgtgtgctcacgtgattggtgaagtagaagcatccgatcgtctgctgatcacttgtggtgaggaagtcttgattgagcgctctcgtactgagcttcgcaccatctgggcggaaatgacccataagatgcaagcgctgcgtgataactcggcgtgtgctgatcaagagtttgcggccaaacaagataaccgtgacccgggcttgaatgcgaagttaacttacgatgtgcaagccgacgttgctgcgccgtacatcgccaaaggtgtgcgtccgaaaatggcgattttgcgtgagcaaggcgtcaactcacacgttgagatggcggcagcgtttgaccgcgctggttttgatgcggttgatgtgcatatgagcgacattctgactgggcaaaccgtgctcgatgcttaccaaggtctggtggcttgtggtggcttctcttacggcgacgtactgggtgcgggcgaaggttgggcgaaatcgattctgtttaacgcccaagcgcgtgagcagtttgagcagttcttccaacgtaaagatactttctcacttggggtgtgtaacggctgtcaaatgctgtctaacctgcgtgatttgatcccgggtgctgagctatggccacgttttgtgcgtaacgaatcggatcgttttgaagcgcgctttagcttagtcgaagtgcaaaaatcgccatcgctgttctttagcgagatggcgggctcaagaatgccgattgcggtttctcatggtgaaggtcgtgtggaagtgcgtgatgctcagcatctggcggcaattgagcaatctggcaccgtagcgattcgtttcgtggataactttggtcagccaacccaagcttacccaagcaacccgaacggttcaccgaatgcgattaccggtttaaccactcaagatggccgtgtgacgattatgatgccgcaccctgagcgtgtattccgtaccgtcgccaactcgtggcaccctgataactggggtgagaatggcgcttggatgcgtatgttccagaatgctcgtaaatattttggctaa

SEQ ID NO: 40983 - DNA, 1716 bp, Vibrio cholerae
atgcgtaccagtaactatcttctttccactctgaaggagactccaaacgacgcagaagttgtgagccataagctcatgctccgtgcaggtatgatccgtaagctggcttcaggtctctatacttggctgcctactggtctgcgtgtactgcgtaaagtcgaaaacatcgttcgccaagagatcgataatgccggtgcaatcgaaaccttgatgccggtggtgcagccgtttgaattgtgggaagagactggtcgctctgaaaaaatgggcccagagctactgcgctttactgaccgccatgagcgtccgtttgttttaagcccaactgcggaagaagtgatcacggcgctggtgcgtaatgaggtgagctcttacaagcagttgccactgaacttgtatcaaattcaaaccaaattccgtgatgaacgccgtccacgttttggtgtgatgcgtgcccgtgaattctgcatgatggatgcgtacagctttgatatcgacaaagcgggcctagaaaaatcctacgaagccatgcacgttgcgtattgcaaagcgtttgaccgtatgggcctcgattaccgcccagtgctagcggatactggtgctatcggtggtaacggctcacacgaattccacgtactggcagaaagtggcgaagatctgatcgccttctcaaccgaatcggattacgcagccaacatcgaaaaagccgaagcggttgcaccggcgattgagcgcccagcgcctacgcaagcgatgaccttggttgatacccctaacgcaaaaaccatcgcagaattggttgagcagcacggtctgcctatcgaaaaaacggtgaaaaccttatttgtcaaagcctcagatgaaatcgatgcgcctatcgttgcgctgatcatccgtggtgaccatgaactgaacgaaatcaaagccgagaaactggccgaagtggcctcgccgctggaaatggccagcgaagaagagattcgcgcgctgatcggtgcaggccctggctcattaggccctgtcggcctgaaactgccatttattgttgaccgcaccgttgctgtgatgaacgatttcggcgctggcgcaaacatcgatggtaaacactacttcggtatcaactggggtcgtgatgttgaactgggtaaagtcgaagatctgcgtaatgtggttgaaggcgatccaagcccatgtggcaaaggcacactgatgctcaagcgcggtatcgaagtgggtcacatcttccaattgggtaccaactactctgaaaagatgaactgtggcgtactcgattcgaacggtaaaaacgtcattcttgagatgggttgctacggtatcggcgtctctcgcgtcgtcgcggcagccatcgaacaaaaccatgacgattacggcatcatttggcctgatgcgattgcacctttccaagtggctattgtgccgatgaacatgcacaaatctgagcgtgttcagcaagccgctgaaaaattgtatgcagaattgacagctgcaggcatcgaagtgctgtttgatgatcgtaaagagcgtccgggcgtcatgttctcagatatggagctgatcggcgtgccacacaccatcatcattggtgatcgcagcatggatgaaggccacttcgaatacaaaaatcgccgtcaaggtgagaaagaagccgtggcaatggagtcaatcatcgactttatccaagccaaactggcctaa

SEQ ID NO: 40984 - DNA, 696 bp, Vibrio cholerae
atgtatcccattgaacctattgcaattattgaaagcccataccaagaaaaatttgccgtacctcgtcaaccacgtttggtgccaagcgcgaccgcaagagtcaaattgctcggtgagtgcaactgcgcggaatccattcgtggcatagagcaatttagccatgtctggctgctatttttgttcgaccaaaacctcgccgcaggttggaaaccgaccgtacgtccacctcgtcttggtggtaatgaacgagtgggtgttttcgcttcacgagcaacttttcgccctaatggaattggcatgtcagcggtcgagttaaaaggggtaagcaaagaaggcgatcaatattatttagagctcggaagcgtcgacttggtcaatggcacaccgatcattgatatcaagccttatatcccctactccgattccattaccgacgcgcaaggtggctatgccgagcaagagccacaacgcatggcggttaccttcagtgatgcagcgcggcaaatgctccaggcacatcctgaaggtaagattcgccaagcagtgatccgtgaagtgttagcgcaagatccgcgcccagcttacaaaaaacatcgcgctgacgataagttatatgcggtgaatttgtacgattggaacgtgaaatttacggttaacgctgaagcaatcgttgtcaacgcaattgaacccttttga

SEQ ID NO: 40985 - DNA, 258 bp, Vibrio cholerae
atgaaagcaggcattcatcccgattaccgtaaagtggtgttccacgataccacggttgatcactattttgtggttggttctactttgcaaaccgatcgcactattgagtgggaaggcaaaacttacccctacattaccatcgaggtttcgtcagaatctcacccgttctataccggtaaacaacgtgtggtacaaaaagaaggtcgcgttgcgaacttcactcgtcgtttcggtcagtttgctaaggagtcaaaatga

SEQ ID NO: 40986 - DNA, 1605 bp, Vibrio cholerae
atgacaaggagggaacagatgagttcatctgcttcaataaatcaaaacgcacctaagaaacctttaattacccgttttcttgatggtgtggaatatttggggaacctattaccccatcccatcacattatttgccattttctgtgttgtactactggttgcttcgggtatcgctgggtacttcgagctgtcagttgtggaccctcgtcctgaaggcgcgaaaggtcgtgctgcagatggcatgatccatgttgtcagcttactcaatgccgatggattagagcttatcgtaaccaacttagtgaaaaactttgtcggctttgctcctttaggcaccgtgttggtggccatgctgggtgtcgccattgcggagcactctgggttgctctctgcggcaatgcgtggtctggtgatgggcgcttcaaagcgcatggtcactttcactgtcgtgtttgccggtattatttctaacacggcatctgaattaggctacgtggttcttattccactggcagccatgctgttccattcgctaggtcgtcacccgctcgcgggactcgctgcggcgtttgcaggtgtttctggtggttattcggcaaacctgttaattggcaccgtcgatcctttgctttcagggattaccgaaaccgccgctcgtatgattgatcctacttacagcgttggtcctgaagtcaactggtactttatggcggcttctacctttgtgattgcgattttaggtgcattcgtgaccgagaaaatcgttgagcccaaactgggcaaatatgatgtatcagaagccagcgatgacttaagccaagacaaaatgggttctctgacggcgctagagaaaaaagcgctggcctatgctggattagcggttgttgtggtgagcgcattattggcttggacaattgtaccggcggatggcgtgctgcgtggagaggatggcctcgtttctggttcgccatttttaaagagcatcgtcgcctttatctttatcttttttgctattcccggctatgtctatggccgtgtggttggcacgatgaaaaccgatcgtgatgtgattaatgcgatggcgaaatcgatgtcttctatgggcatgtacattgtgctggtattttttgcggcgcagttcgttgccttctttagttggacaaagtttggtcaagtattggcggtactcggcgcggatttcctgaaagacatcggactgacgggacccatgctgttcttcgccttcattttgatgtgtggttacatcaacctgatgattggctctgcctctgcgcaatgggcagtcaccgcgccgattttcgtgcctatgctgatgttggtgggctatgctccagaagtgattcaagcggcctatcgtatcggtgactcggtcactaacatcatcaccccgatgatgagctactttggcttgattctggcggtggcgacgcgttatatgaaaaacctcggtatcggtactttgatcgcaaccatgttgccgtattcggtggtgtttatggtgggttggagcttactgttctacgtgtgggtatttgtgttaggtctgccggttggccctggcgccgccacttactacacgccatag

SEQ ID NO: 40987 - DNA, 1881 bp, Vibrio cholerae
atgactcttgatatctcaaaatacccaacactggctctggcgaatacgccagacgaactgcgcagccttccaaaagaagtactgcctaagctgtgtgacgagttacgtacctatttgctcaactcggtgagccaatccagcggtcatttggcctcaggattaggcaccgttgagctgacggttgcgctgcattacgtctaccacaccccatttgatcatctgatctgggatgtgggtcatcaggcttacccacataaaattttgactggtcgtcgtgatcagatgcccaccattcgccagaaagatggattacaccctttcccatggcgtgaagagagtgaatacgacaccctctcggtgggtcactcctccacctcgatcagtgccgcactcggcatggcaatctgtgctggtaaagaaggtaaagaccgtaaagtggtcagtgtgattggcgatggcgcgatcaccgccggtatggcgtttgaagcgatgaaccacgcgggggatgtgcaccctgatatgctggtcgtactcaatgacaatgaaatgtcgatttcagagaatgtcggcgcactgaacaaccatttggcgcaagtgctgtctggcagtctctacacctctattcgcgaaggtggcaagaaagtgctgtctggcattccgccaatcaaagagctggttcgtcgcaccgaagagcatctcaaaggcatggtggttcccggaacgctatttgaagagctcggctttaactacattggccctgtggatggccatgacgtactggaactgatcaaaaccctgaaaaacatgcgtgagctaaaagggccacagttcctccacgtgatgaccaaaaaaggcaaaggctatgcgcctgcggaaaaagatccgattggctatcacggcgtgcctaagtttgatccaagccaccacagcttgcccaaaagcagcaatactaagcccaccttttcgaaaatctttggcgattttctgtgtgatatggcggcgcaagatcccaagttgatggcgattaccccagccatgcgtgaaggctctggcatggtacgtttctccaaagagtacccaagccaatactttgatgtggcgattgccgaacagcacgcagtcacgctggcgaccggtatggctattgcggggtatcacccgattgtggcgatttactccaccttcttacagcgtggttacgatcaactgatccacgatgtggcgatcatgaacttgccggtgatgtttgccatcgaccgcgcggggattgtcggagccgatggtcaaactcaccaaggtgcgtttgatttaagctacatgcgctgcattcccaacatgctgatcatggctccggcggatgaaaatgaatgtcgccaaatgctctacacgggtcatcaacatcaagggccaagtgccgtgcgttacccacgcggtaatggcatgggcgttgagctagagagcagctttaccgcgttggaaatcggcaaaggccgcttaatgcgtgaaagcacggcatgcgaaggtgagaaagtcgcgattttgagtttcggtactctgctgcctaacgctttacaagccgctgaaaaactcaacgcgacagtggctgacatgcgctttgttaaaccactggatgaagccctcatcaagcaactcgcccaaactcatgatgtcctcgtgacattggaagaaaatgcgattgccggtggcgcaggggctggcgtgattgagtttctgatgaaagagaagcagctcaagccggttctcaatctcggcctaccagatcagttcatcgtgcaaggcacgcaagaagagatgcatgcagaacttggacttgatggtgcaggcattgagcgagcaattcgcgactatctggccaaatag

SEQ ID NO: 40988 - DNA, 885 bp, Vibrio cholerae
atgattgaggcgttatcctcataccaacagcgaaataaccagcaactggatcagtggctgaaccgtattccctttcaaaccttgcctttaatcgaggcgatgcgttacgggctactgctcggcggcaaacgggcacggccatatttggtgtacatcacggggcaaatgctcggctgtgagcttagcgacttagacactcctgcctcagccgtggagtgtattcacgcctattcgctgatccatgatgatttgcccgccatggatgatgatgagctgcgccgcggcaagcccacttgccatatccagtttgatgaggccaccgccattttgaccggcgacgccctgcaaaccttggcgtttactattttggcggaaggcgatctttctgctgcaggcgaaacacagcgcgtcgccatgctccaagctcttgccgaagcttctggcgcacaaggcatgtgccttggtcaagcgttagatctggcggcggaaaatcgcttaatttcgctagaggaattggaaaccattcatcgcaataaaaccggcgctttaatgcgctgcgcgatccgtttaggtgctttagccgcaggtgaaaaaggccgcgccatgctaccgcatcttgatcgctatgcagaagcggttggcctcgcgtttcaggttcaagatgacattctcgatatcattagcgataccgaaacccttggtaaaccacagggttctgaccaagaattaaataaaagtacctaccctgctcttttaggcttagaaggagcacaacaaaaagcacacactctgttacaagaagcgcttctggctttagaagcaattccctacaatacggagcatctggaagagttcgcccgatatgtcgtcgagcgcaagaactaa

SEQ ID NO: 40989 - DNA, 957 bp, Vibrio cholerae
atggatgacgaacaacaatgtaaatgtccccctcccggtttgcccgcatggctggggacgtttgcggacttgatgtcactgctgatgtgcttcttcgtactcttgctctcgttttcggagatggacgtactgaaatttaagcagatcgctggctcaatgaagtttgcctttggtgtgcaaaaccgtttggaagtgaaagatattcccaaagggaccagtattattgcccaagaatttcgtcccggtcgcccagagccgacgccgattgatgtgatcatgcagcaaaccatcgatatcacccaacaaaccttggaattccaagagggtgaatcagaccgagcaggcggtaatcaacgtgattccggtcagcttactggcggtcaatcggcagaaacttcggtgcaagataaccaaaacactcaatctgaaatgcaacagcagcaagcacaagcgatgtcagagcagatggaaaccgtggcggaaagcatcaaaaaagcgctgtctagagagattgagcaaggagccattgaagtagaaaacttggggcagcagattgacattcggatccgcgaaaaaggcgcgttccctgaaggttcggcattcttacaacctaagttccgccctctggtacgccaaattgctgagttggtcaaagacattcccggtaaagtgcgggtgacagggcacactgataaccagaaattggactctgaactgtatcgctcgaactgggatctctctgcacagcgcgcagtttcggtggcgcaagagatggaaaaggtcaaagattttgaccatctacgactgcaagtgcgtggattggctgatacccaaccgttagggcccaatgataccgaagcgcaacgggcaaccaaccgccgcgttgagatcagtatcttgcaaggcgatccagtctacagtgacgaggttccttcactaggcggtggacaacaataa

SEQ ID NO: 40990 - DNA, 828 bp, Vibrio cholerae
ttgaacaaggagttcatcatgaagtttagcctgaaaagtttactgactatcgctgctgcagcctcaaccctaattttggccggctgcggtgaaaaagccgtagataacaacaaagtgaaaattggtgttatggcgggtgcggaagcacaagtggcggaagtggcggccaaagtggctaaagaaaaatacaatctggatgtcgaactggtgacttttaccgattacgtaacaccaaacgcagcattggatgacggttctatcgatgcgaacgcattccaacacaaaccttatctggataagcaaatcgccgatcgtggttacaagctagcgatcgtcggtaacacctttgtttacccgatcgcgggctactcaaaacagatcaaatcggttgatgaactacaagatggcgcgcgcattgcggttccaaacgatccaactaacctaggtcgctcactgctgctgttgcaacaacaaggtctgctcaaactgcgtgaagacgtcggtctattggcaaccgtacgtgacatcgttgaaaatccaaagaaacttgagatcctcgagttagatgcagcccagctaccacgctcactggatgatgtggctctgtctatcatcaataccacttacgcgagctcaatcaacctgaccccagaaaaagatggcatcttcgttgaaaacaaagagtcaccttacgtcaatattttggttgcccgtgaagcaaacgtgaacgccgaaaacgtacaaaacttcaagaaagcctaccaaaccgatgaagtcgctaaagccgcgtctgaaatcttccaaggtggcgcagtaaaaggttggtaa

SEQ ID NO: 40991 - DNA, 678 bp, Vibrio cholerae
atgtcctttaatacgattgcacaatggtttgcactcaatagcgacctactgttaaccgccacatggcaaacactgtatatggtcgcgattgccggtgcggtgggttttgcgctcgggattccgctaggtgtgattctccataccaccaaaaaagagggcttactggaaaacctaccgctgaaccgtgcgctcggcgccgtggttaacatcggtcgctcggtgccctttttggtgttgatggtcgccatcattcctgtcaccaaactgattgtcggcacttttatcggtaccactgcggccattgtgccactcacgattggggcgattccgtttgtagcgcgcctgattgagagtgcgctgcttgaagtgccaaccggcttagtggaagcggcgcaatctatgggtgcgacgccactgcaaatcattcgtaaggtactgctccctgaagcgctgccgacgattttaaactcagtcacgattactctcgtgacactggtcagctactcagccatggcaggtaccgttggcggtggtggtctgggcgatgtggcgatccgctatggattccaccgttacgacatcaccatcatggcggtcactgtggtcatgctgattgtgctggtacaaattattcaatccatcggcgatgcgttggtacgccgcgtcgatcatcgataa

SEQ ID NO: 40992 - DNA, 951 bp, Vibrio cholerae
atgaatcgaaaactgactattttagacattgctagactctcaggcgtcggtaaatctaccgtttcgcgcgtgttaaccaatgatcctaaagtgaagcctgaaacccgcgctaaagtagagcaggtgattgcagagtcggggtatgtgccctctaaatcggcacaaaccatgcgtggtggtagtcagaaagtcgtgggcatcattatttcacgtctggattccccttctgaaaacaaagcagtcagtactatgctgcaagctttctatgctcacggctacgatgtggtgatcatggaaagccaatttagccgcgaaaaaaccaatgctcacttaaaagtgctcgccaagcggcaagtggatggcgtcattgtgtttggctttaccgatatcgatcatgatgccttgctcagttggcagcaccgctgtgtactcttggccatgcacagtgatgagatttcctctatcaattatgacaatgctggggtgattgagcgtgcgctgcagcatttggcacaaaaacagttacgcgatattgccttcattggggtcgacccacgtgacaaaaccacgggtgagcagcggctcaacgcctatctcaattggtgtgttgagcatgagattgtggcgaattaccaaaccggacaactgcatcatgaaagtgcttatctgctggtagataaagtgctgactgagcaaacccaagcgattgtgtgcgcgagtgatactttggcgctcggtgtgattaagcgtttgcaagagctgcagcgagatgacgtagtggtgacgggggtgggtggtaatgagttgctctctttcctgtttccgaacatattcagtgtcgatcctggttatcgtgaggccggaaaactggcggcagatctgctgattgagcagctatgcggctctgaccatggctgtgtgcatttgacccaaatgccagtgtcacgctaa

SEQ ID NO: 40993 - DNA, 1059 bp, Vibrio cholerae
atgaacaaaaacactgtactttcattgaccttactgaccctgctaatgaacagcgctgtgctatcggccaaagagccgaaccagccgcccgcgatttctgttgtgacagagtcggttcaatctcagcaaatttctcaatctctttctgttgtgggtaagcttaaagccgagcaatcggtcgacattgccgctgaagtggcgggtaaagtggacatgattgcggtgcaagccaatcagcaagttaaaaaaggtcagattctgatcaaattggatgatgacaaagctcaagcggccttggtggaagctaaagcttatttacaagatgagcagcgtaaactgacggaatacgagcgcttgctaaaacgtaatgcgattacgcccacggaaattgatgcacagcgcgcccgagtggagattggtcaagcgagattgaatgccgctcaggccaatttggccgatttacacattactgctccttttgatggcacggttgggtttatcgattttagccgcggtaagtgggtgagtgcgggctctgaattactgacgctggataatctttccttgatgcggctcgacctgcaaattccagaacgttatctgccacagttaagcaagggcatgaaggtgcaaggcagtagcgaagcgtggccaaacgtgcagtttgaaggttcggtggtggctgtggattcgcgtatcaatcaagaaaccttaaatttacgagtgcgcgtgcatttccccaatccagatcagcgcctcaagccgggcatgttgatgtcggcacgcatccatttccccgctattagtgcgccgattattcctgtgcaggcccttgagtactccggcaccaaacgttttgtttacgtgattggtgaagacaatgtagccaaacgacgtgaagtgagcctgggcgctcgggttgaaaatcaggtcgtgattgagaaaggcttacagattggcgagaaaattgtcgttcaaggcatagtcaatatgcgtgacaacgcgcgtgttagcgaagtcaccgtagaagggcgtccgctgaagaaggatgacaaataa

SEQ ID NO: 40994 - DNA, 3111 bp, Vibrio cholerae
atgtggttgtcagatgtatcggtaaagcgccctgtcgcagcgttagtactgagtatgttgctgtgcgtgtttggtgtggtctctttcactaaacttgcagtacgtgaaatgccggatattgaaagccctgtggtatcggtttccacccgttatcaaggcgcttcggccaccattattgaaagtcagatcaccagcgtgctagaggatcaattagcgggcatcagtgggattgatgagattacctcagttagccgcaacggaatgtctcgtatcacggtgaccttcgagcttggttatgatctcaataccggtgtgagtgacattcgtgatgcggtggctcgggcgcagcgttcactgcctgaagaagcggacgatccgcaggtgttcaagaataatggctctggtcaggcgtcggtctatatcaatctcagctcctcagaaatggatcgcactcagttgaccgattacatcgagcgggtgttgctcgatcggtttagcttgatctccggtgtgagttcggtggatgtctctggcggcctctataaagtgatgtatgtacgcatcaagccagaactgatggcggggcgcggcgttgcgaccagcgatatttctgatgcactcaacaaagagaacctcgaaagtcccggaggtcaggttcgcaacgattcgaccgtgatgtcggtgcgtaccgcgcgcggttatcaatctgctgaagattttgagtatctggtggtgaaacgtgccagtgatggtacccccatctacctcaaagatgtcgcggatgtgtttattggggcggaaaacgaaaactcgacctttaaaagtgatggcatcgtcaacgtgagcatggggattgtgccgcaatccgacgcgaacccgctggaagtggcgaagcgcgtgcatgaagaagtggataaggttcagcagtttttacccaagggtacccgtttagccattgactatgactcaacggtgtttattgagcgctcaataagcgaggtgtatagcacactctttatcacgggtggcttagtgattttggtgttgtacatttttatcggccagttgcgagccaccttaattcctgcggtaacggttccggtttcgctgatctcggcctttatggctgcgtactacttcggattttctattaacctcatcaccttaatggcgctgatcttatcgattggtctggtggtcgatgatgccatcgtggtcgttgaaaatatttttcaccacattgaacggggcgaaaaacctcttttagccgcctacaaaggtacacgagaagttggctttgccgtgatagccacgactttggtactggtgatggtgtttctgccgatctcgtttatggacgggatggtcggactcctgtttactgaattctccgtactactggcgatggcagtgattttctcttctctgatcgcgttaacgctgacgccagtgcttggcagtaagcttttaaaagccaatgtaaaaccgggacgctttaatcagttgattgataggctgttcgcacgactggaatcgggctatcgccaagtggtaagccgagccattcgttggcgttgggcggcgccggttgtgattgcggcttgtattggtggtagttatggtttgatgcaactggtgccagctcagctaaccccttccgaagatcgcggtgtgattttctcttttgtgcgtggtgctgatgccaccagttataaccgcatggcggctaatatggatttggttgagcagcggttgatgcccttattgggtcaaggctttttgaaatcgtttagtattcaatcacctgcttttggtggtaacgccggtgaccaaaccggtttcgtgatcatgatccttgaggattggaatgatcgcaccgttactgctcaggaagcattaagccaagtacgtaaagccttagcgggcattcctgatgtgcgggtattcccattcatgcccggttttcgtgggggctctaatgagcctgtacagtttgtgcttggtggctcggattatagcgagctcaaaacgtgggctgagaagttagaagaggaagcggagaagtcaccgtttatgacgggggctgatatcgattactcagaaaaaacgccagagttggtggtgacgattgataagcagcgcgcggcggaattaggaatcagcgtaaaatcgatctccgatacactagaggtgatgctgggtggcaaaaaagtgacgaccttcgttgagcgtggtgaagagtatgatgtgtatctgcgtggggatgaaaacagcttcaacaatgcggcggatttaagccaaatctatatgcgaaccgcaaccggtgaactggtgacactggatacggtgacgcgtattgatgaagtggcgtcagcgattcgtttggcgcactacaataaacagaaatccgttaccattaccgcaaacctagaagctgggtacacgttagggcaagcgctcgattttcttgaccaaaaagcgcaagagatactgccaaatgatatctccgttagctactcgggggagtcgaaagatttcaaagagaaccaatcaagcgtagccattgtgtttgctctggcgctgctggttgcttatttggtgctggctgctcagtttgaaagctttatcaacccgctggtggtaatgctgacggtacctatgggagtatttggcggtttccttgggctgtttgttatgggacaagggatgaacatttacagccagattggcatgatcatgctgattggtatggtcaccaaaaatggcattttgattgtcgaatttgctaaccaactgcgtgatcgcggtgttgagtttgaaaaggcgatcattgatgcatcggcgcgccgtttgcgtccaatcctgatgacggcttttacgacactggctggctctattcctttgatcgtctcaacaggtgcaggctatgagagccgaattgcggtcggtacggtgattttctttgggatggggtttgcaaccttagtgaccttgttggtgattcctgccatgtatcgcttgatttccggttcaacccaagcccccggtcatgttgaagcagagctcaaccatgagctgcaacaagatgtgaaaggccgcgctcaacactaa

SEQ ID NO: 40995 - DNA, 501 bp, Vibrio cholerae
atgaaggttaaaggtttatcagtattagtcgtgtgtacaggtaatttgtgtcgttcgccaatggcagagattattttacgcgataagattcggcaaaaacgcttgaatatccaagtgcgtagtgctggcacgctaaagacaggaaaaacaatgcctgatgataaagcgttacaagcgttacaggattatgggtatcaccctatggtcaacccagtccagcaagtgactcaacaagactttatcgagcatgattttatctatgcaatggataggaccaatcttgctgatttactcgatatttgtcctgctgagcataaaaacaagctggctctttttcttagcaaggcgaatcgacaagaaaaagaagtacccgatccttatcggcgtagtagtgaatttttccaacgtacagctttgttgattgaatctggagcggtggctttggttgattcttggcaagagcaggggataaatgcgtgcaacgaaaatttatctcaataa

SEQ ID NO: 40996 - DNA, 1119 bp, Vibrio cholerae
gtgaaaaaagttctcatcgtatttggtacgcgcccagaggcaatcaaaatggcacctctggtgcagcaactctgtcaagacaatcgttttgtcgccaaggtatgtgtaacgggccaacaccgtgagatgttagatcaggtattagagctgttttcgattacgcctgattttgatctcaacatcatggagcctgggcaaacactcaatggcgtgaccagcaaaattttgctcggtatgcagcaagtgttgagtagtgaacagccagatgtggttttagtgcatggtgataccgctaccacgtttgctgcctctttagccgcgtattatcaacaaattccggtaggtcatgttgaagcgggtttgagaacgggcaatatctattccccttggcctgaagagggcaaccgcaaactcacggccgcactcacgcagtaccactttgcacctacagatacttcgcgtgccaatctgctgcaagaaaactacaacgcagagaatattttcgtcactggtaatacggtgattgatgcgttgttggctgtgcgtgaaaagatccataccgatatggatctgcaagccactctagagagtcagtttccaatgcttgatgcgagcaaaaagctgattctggtaacaggacaccgccgtgaaagttttggtggtggctttgagcgtatttgccaagcgctgatcactaccgcagagcagcatcccgaatgccaaattttgtatcccgtgcatctcaatccgaatgtgcgtgaaccggtcaataagctcctaaaaggtgtcagcaatattgtcttgattgaaccgcagcagtatttgcctttcgtttacttgatggatcgcgcacacattattttgactgactctggcggcattcaagaagaggcgccctcgctgggtaagccagtgctggtgatgcgtgaaacgactgagcgccctgaagcggtggctgcgggcacggtgaaattagtcggtaccaaccaacaacaaatttgtgatgcgttaagcttactactgactgacccacaggcttatcaagccatgagtcaggcacacaacccttatggggatggtaaagcctgtcaacgtattgcggacattttagcgaaatag

SEQ ID NO: 40997 - DNA, 432 bp, Vibrio cholerae
atgtggttgtaccgtgttggccatttcttccataagcgccgcatacctctattacctcaggtctgtaatggtttgattcgtttggttcataattgtgccgtctatagtcagtctgaaattggtaaagggactgtctttggctatggagggattgcagttgtaattcataagcgctgtgtaatcggtaaagagtgtgtgattgggagtaatgtgactattggtggccgttctcgttcacacaatgttccagtgatcggtaattatgtctatatcgccactggggcaaaagtactgggtgatattcgagtcggtgatggagccgtgattggtgcgaatgctgtggtacttgaagatgtcccgccttacagcgttgtagtcggaatgcccgccaaagtgatcaaaacaaatattaatcccaaggacttttactga

SEQ ID NO: 40998 - DNA, 1341 bp, Vibrio cholerae
atgtttaccagttcactttatgttaaagcaccaatctggctgcaaaatgtcatgctttctgtgcgggcgctgtcacgccaaatggtcagagaaaatggtgagatgcgtgcggtgttgcaagagatccaagctaacgagttttcacgtactcatttagcggattatcaacacaagcagctaaaaaaaaccttggagaatgctcgtaaccatgtgccgttttatcaggatttagaggtgcctaatcttgagcttgaggccttcccttatctggataaatccgtattacgccgtgatcacaaacagtttatctcacaaaataaaccgtcagtggtggtgaaaggggcgaccagtggcacaacgggtacacctctgactattttgcaagataggcattcggttattcgtgaacaagcctttgtcgcaagacagttggcttgggcgggatatcgtaaaggggataaacgagcgtggatccgtggcgatatggtggtgccattaagtcaaaagcaaggaccattctggcgctactcttggtttgagcagatgatagtgttgtcctctttccatctgacaccgaaaacgatgtcgagttacctgcaagccatggtcgattttggggttgaagtgattcaggcatacccttcttcgattgctacgttagcccgctatttagaagccaaccaaagttattatccggcgaagctcaaatcgattatgacttcatcagaatcgttgtcagcagaagatagacaggtgattgagacacgctttggctgcaaagtttttgactggtatggcctatttgagcgagtggctgcgatagggcagtgtgagcatggtcgctaccatttgctctccgactattcacatgtggaattgttagccgcaggcgacgggcgttacgagttggtcggcactaactttaataatcaatatttccctttgatccgctataagaccggtgatcatgtgcatttatctgaaaacgaggcttgtccttgtggtcgagtctttcctgtgatcgagcgtattgagggaaggattggtgattatctcgtcggtgaagatggtcaaaaagtgcatattcttaaccatatacccaaaggtatcgctgggattatggcatgccaatttgtgcagagtgaacgagggcagattgtggtgaaagtggtggctgatgcagagcaatttaatcaagagcagcaaaaacagttaatcagcaatactcaagctcgcttaggaagctcgctcaatgtcacgatagacatagtgtcagcacttgagcgcactgcaaacggtaagattcgccaagcgatttgtaccatcaaggatgtacagtga

SEQ ID NO: 40999 - DNA, 753 bp, Vibrio cholerae
atgaggaataaccgattgaaacgcattaattttctgggtagcccgatggatgtggcttcgatgagtgaaacggttgcgctgatccgcgatcgcattttgcgccaagagtttacccagcacgtggtggtcaatgtcgctaagttggtcaatatgcgtaaggatcctgaattggctcagtccgtgaccgagtgtgacattatcaatatcgatggtatgggggtggtttggggggcacgctttttaggtcaccaggttcccgaacgagtggcgggcgttgacttatttcttgagctcaatgcaatggccgcacaagaacaaatgcccgtattctacctcggtgcaaagcaggagattgttgaaaaaacggcagcagtgatgcaggcaaagcacccacaattagtgatcgctggttatcaccacggttatttttgggatgatgagcaagcgatagttgaaaaaatccgtcagtcaggtgcaaaacttctgtttgtggcgatcacatccccgaaaaaagagaactttatcaaccgctggcaagagcagttaggggtgttatttgtgatgggggttggcgggacatttgatgttgtcgctggtcatgtttctcgggctcccttatggatgcaaaaagccggattggaatggctatatcgtgtgttacaagaacccggaagaatgtggaagcgttatttaattactaatagccgctatgcttggttattgctcaatgaaaaaataaaaccaaagaattaa

SEQ ID NO: 41000 - DNA, 816 bp, Vibrio cholerae
ttgtctaactttaaaggatctatcatgaacaaacgtcattattatctggcctcatgcttggcattgttattttcaacggcttcttatgcggaagtggattgtgagttacagccagtgattgaagcaaatctttcattaaatcaaaaccagttggcaagtaacggtggatacatctctagtcagctagggatccgtaatgaaagctgtgaaacagtgaagttcaaatactggctatcgattaaaggtccagaaggtatctacttcccagccaaagcggtagttggagttgatacagcgcagcaagagtctgatgctcttactgatggtcgtatgttgaacgttacacgtggtttctgggttccagagtatatggctgatggtaaatatactgtttctcttcaagtcgttgcagaaaatggaaaagtatttaaagccaaccaagaatttgtgaaaggagtcgatttaaatagcctacctgaactcaatggtttgactattgatatcaaaaatcaatttggcattaatagtgtggaaagtaccggcggttttgttccattcaccgttgatttaaataatggccgcgagggagaagctaacgtcgagttctggatgactgcggtaggtcctgatggtttgattattcctgtcaatgcgagagagaaatgggttattgcttcaggtgatacttattcaaaagtgcgtggtattaattttgataaaagctatccagcgggcgaatacacaattaatgctcaagtggtagacattgtttctggtgagcgagtggaacagtcaatgacagtggtaaaaaaataa

SEQ ID NO: 41001 - DNA, 2214 bp, Vibrio cholerae
atgacaggcaaacaattcactcaagaagaagtgatcgatattcgtcagtattttaatgtgctacttaactataagtggcgcatcttacttttctccgtgatggtgacggcgatcaccttactgttcgtactctcaatgcgctcagaatacacagcgcgtgcgactattttgattgaatcgacgcaagcgaaagcggtatccattgaagaagtgtatgggctcgataccaaaagtcaggagtattacctgacccaaattgagatcctcaaatccgacacgatcgctcaagaagtcattgaacgacttgatttagcctccgatccagaattcgacttaagcccagagagcgacgcttctccaagcttaaaagaacgcttggtagagtggatgccattcctacagggatttaagcaggaagagaccgtcgccgatcctgatttggaagcgtatcgccaaaatcgactgatcttgtataagttcaaacgcggaatggagattagcccgatccgcaaaacccagttggtgaatatctactacaccgcaggtgatcctaagttggcggcgaaaatcgcgaatgagattgcgcgggtgtatatggacagccatttggaagccaagttagaggtagagctaaaggcgaatacttggctaaatacccgtatggaagagctgcgtactcaattacgagaatcggaagctaagttacaagcgtttttgcaagcggaaggcttggttgatgtgcaaggtgttgaagggctagcaacgcaagagttggaagagctgacttcgcagatgaacaaagcgcgtgatcgccgcgtggccgcggaaaccctgtatcaagtggcgaacagctacagtaaaaatgacagtgacttgacggctttgtcgtcgattcctgaaatttccaatcacccaaccatccgtgatttgaaagtcgctgaagtggatgctgagcggaaagtctctgagttttctaagcgttacggccctaaacacccgaaattgaaatcggcatcagcacagttagaagcggtgcgtaaaaatctgcgtgcagagctgagacagctgttaaatggtatcaataacgagctgcaagcggccaaacagtctgagcggtcattacaaacggaatttaatcagcgtaaatctgagttccagaccctgacggtaaaaaatgctaagtattctgagctgaagcgcgaagtacaaactaaccgtgaattgtttgacctgtttttagcgcgtcaaaaagagaccagtgcttcgggggattttaataccacgatcgctcgctttactgaccaagccagtgcaccattaacgccgagtaaacccaataaaaaattgattgtattgcttgcctttgtggtgtcgtttggttttgcttgtgtagtggcgtttatcgctgatgcgatgactgatacctttgccgacatcaaacaggtcgagaaacagctggcactgagtttattgggcgttgttcctgtggtgcgtaaacagcgtggcaaactggatgcgaaagcctattttgatgagaaactgcgtgagctaaccgaagcggtgcgtacgatacggaccagctatttgcttgcgcatgtcaatcaagatcagcatgtcgtgatgctcacatcttgtctgcccggagagggaaagacgacatctagcctgaacttggccttgtcgttggcgcaaatggaaaaaaccttgctgattgactgtgatttacgcaaaccggcgattgcgcaccgttttggcatttctggctcacaaccgggcgtcaccaatttactcaatggcacgcaaagcttagaagattgcgtctaccatgatgagcaatccgggctcgatattctcactgcgggtgtttatgcctccaacccgttagagctgctctcttcaagcaaatttagtgaactgttggccgatttacgtactcgctatcaacgcattgtgattgatacaccaccctgtctcgcagtgagcgatagctttatgttggcgcaatacgtggactcggtgattttggtgattgatgccaaccatactcgaacgccagtcgtgcgggaagtggtgggtaaattgactcagcagggcagtcgtattgatggtgtgatactcaatcgtcttaatgcgaaaaaggcttcacgctacagcggctattatcactaccaagcttactatggcgaagagacgaaatcgggcgcggcaaagtga

SEQ ID NO: 41002 - DNA, 966 bp, Vibrio cholerae
atgagtaaaccaattcagatggaacgcggcgttaaatatcgtgacgccgacaaaatggctttgattcctatcaagaacatgccgacagagcagaaagaagttctgcgcaaaccagaatggatgaagataaagctacctgcggatagccagcgcattcaagacatcaaggccgccatgcgtaaaaataatcttcactcagtctgtgaagaagcctcctgccctaacttggctgagtgttttaaccatggtacggcgacctttatgattttaggtgctatctgtacccgtcgctgcccattctgtgacgttgcccatggccgccccaatgcaccagaagcggaagagccgaaaaagctcgcacaaaccattcatgatatgaagctcaagtacgtggtaattacttcggtggaccgcgatgacttgcgtgatggtggtgcacaacatttcgccgattgtaaccgtgaaattcgcgctttgaatccgcacatcaagattgaaaccttggtgcctgatttccgtggtcgcatggaagtggctcttgaggccttaaaagacaatccccccgatgtgtttaaccacaatttggaaaccgcgccacgcttgtatcgtaaagtgcgcccaggcgctaactataagtggtcgttagagctgctgcgtcaatttaaagagcagcatcctcatgtaccgactaaatccggtttgatgatgggcttgggtgaaactaaagaagagatcgtcgaagtattgaaagatctccgtgctcatggcgtcaccatgctgactcttggccaatatctcgcacccagtcgccaccatctgccggttgaacgctacgtgccccccgcagagtttgatgagctgaaagaggttgctctagaactcggctttactcatgcagcctgtggaccctttgtacgttcctcttaccatgctgacttacaagccaagggtttagaagtcaaataa

SEQ ID NO: 41003 - DNA, 471 bp, Vibrio cholerae
gtgaagattcaactgatcgccgtcggtactaagatgcctaaatgggtcgaagaaggcttccaagagtatcgtcgtcgcttccctcatgatatgcctttggaattggtagaaattaccgccggtaaacgcggtaaaaatgctgatattgcgcgtatcttacaaaaagagggcgaagcgatgctggccgcagtgcccaaaggcaatcgaatcgtcaccttagatattcccggcaaacgttgggatacggaagagctcgcagtacagttggaaagctggaaactggatgggcgtgacgtctcgatcctgattggtggaccagaaggccttgcgcccgcctgtaaagccgcggcagaccaaagttggtctctttctccactgaccttgcctcatccactagtgcgcgtggtgatggcagaaagtttataccgtgcgtggagcattactactaaccacccttaccaccgagaatag

SEQ ID NO: 41004 - DNA, 2685 bp, Vibrio cholerae
atggctgccggattagctattgttgtaaccccctgctttctgtattctatgccgaaccgaaagacttcgttcctactgaactcacaaattccaagatggatgtcatcgatgcaagagcaatacaacccgcaagatattgaacacaaagttcaacagcactgggacaacaacaaaaccttcgttgtaagtgaagacccaaataaagaaaaattctactgtctttccatgttcccttatccaagtggccgactgcacatgggtcacgtgcgtaactacaccatcggtgatgtagtctctcgtttccaacgtctgcaaggcaaaaacgtactgcaacctattggttgggatgcttttggtctgcctgctgaaaacgcagcggtaaaaaacaatactgcgccagcaccttggacatacgaaaatatcgaatacatgaaaaaccagctcaagctactgggttttggttatgactggaatcgtgaattcgcgacttgtcgccctgagtactaccgctgggaacaagagtttttcactaagctgtttgcaaaaggcttagtgtacaaaaaaacctcatcagttaactggtgtccaaacgaccaaacggttctggctaacgaacaagtggaagatggttgctgctggcgttgtgacactccggttgagcaaaaagagatcccacagtggtttattaagatcaccgcctatgctcaagagctgcttgacgatctggataacctagacggttggcctgaaatggtcaaaaccatgcagcgcaactggattggccgctctgaaggtgtggaactgaaatttgccgttaaaggtgaaaacaccgatcttgaagtgtacaccacgcgtccagatactctgatgggggttacttatgtcggtatcgctgcaggccaccctctagcgacaaaagcggcagcgaataacccagcgctcgccgccttcatcgatgaatgtaaaaacaccaaggttgcagaagctgaaatcgcgaccatggaaaagaaaggcatggcgacaggcctgacggcgatccatcctctcaacggccgtgaagtacctatctatatcgcgaacttcgtgttgatggattacggtactggtgcggtaatggctgtgcctgcgcacgaccaacgtgactttgaattcgcgaccaaatatggcctagacatcatccctgtgattaagcctgccgatggcagcgagctggatgtgtctgaagcggcttacactgaaaaaggtgttcttttcgcttctggcgaatttgatggtttggatttccaagctgcctttaatgcgattgctgccaaattggaagcagaaggcaaaggtaagaaaaccgttaacttccgtctgcgtgactggggcgtgtctcgtcaacgttactggggtgctccaatcccaatggtgaccactgaagatggccaagtacacccagtaccagcagaccaactgcccgttatcctacctgaagatgtggtgatggatggcgtgactagcccaatcaaagccgataaagagtgggcaaaaaccacctttaacggtgagccagcactgcgtgaaaccgataccttcgacacctttatggagtcttcatggtactacgcgcgttactgctcaccacaagcggatgatattttagatccagaaaaagccaactactggctaccggttgatcagtacatcggtggtattgaacacgcgtgtatgcacttgctctattcacgcttcttccacaaactgctgcgtgacgcgggttatgtgaagagtgatgaaccgttcaaaaaactcttgtgtcaaggcatggtactggcagatgcgttctactacaccaatgacaaaggtggtaaagagtgggtgtcgccaactgaggttaaagtagaacgtgatggtaaaggccgcatcgtttctgcggtggatgccacaggccgtcaagttgaacactcaggcatgatcaaaatgtctaagtcgaaaaacaacggtatcgacccacaagagatggtcgataaatacggcgctgacacagtacgtctgttcatgatgtttgcttcaccagcggacatgacgttggaatggcaagagtctggtgtggaaggtgcaaaccgcttcctgcgccgcgtatggaaactggtgcgtgagcacactgagctcggccaagctcccgctttagatgcttcagcactgaatgcagaccaaaaagcgctgcgccgcgatgtgcacaaaaccatcgctaaagtgacggatgacgtagcacgtcgccaaacgttcaacacagcgattgcggcaatcatggagttgatgaacaagctgacgaaagcgccgatgaccgaagcgcaagatcgcgcgattctggatgaagcactcaaagccatcacgctcatgctttacccaatcacaccgcatatctgtttcgaaatgtgggtggcactgggtcaaagcaatatcgatacggcaagctggccgacgtacgatgaagccgcactggtcgaagatgaaaagctgatcgtgctgcaagtcaacggcaaactgcgcggtaaactcactgtcgctgccgatgctactcaacaacaggttgaagcgctcggtatgcaagatgaaaacgtacagaagttcattgatggcctcaccgtacgtaaagtgatttacgtaccgggcaaactgctgaacatcgttgccaactaa

SEQ ID NO: 41005 - DNA, 1518 bp, Vibrio cholerae
atgaacagcgtattatctcatcgcctaatgcggccgcttgcggccgcttttgttggcgtcataactcctctggcttttgccccgtatcaattttggcctttggctctactcagcccatttatcctactgcttctgctccaccaacaaagcgccaagcgagcggctttgattgcttatctctgggggattggtcaatttgcggtgggtatcagttgggtacacgtcagtattgatacgtttggcggcatgcccaaaatcgctagcctgtttttaatgactctattggtcggctatctggcgctttatccaagccttttcggctggctacttaatcgcttgtttccgaacaactcacgcagtaaatggttatgtgctgccccagctttgtggctgattaccgattggctacgtggttgggtgatgacgggttttccttggctgtggctcggttatagccaaattgatagccctctcgccaactttgcccctatcggtggcgtagagctcatcacgctgttattgctgttttgtgctggtagcttagcttatgccgtacttaatcgccgttggctgatggcttgcatccctcttgtggtttacgcaaccggttatggcctccaagccatgcagtgggtcaccccacaaactgagcgcacagcctcactggccttgattcaaggcaatatcgaacagggattgaaatggctgcctagccagcgctggccaaccatcatgaaatacaccgatcttactcgcgaaaactgggatgccgatgtgatcatttggccagaagcggcgatccccgcttttgaatatgaaatctcctcatttctgcataatcttgatgctgcggcacgtatgaaccaaagcgcggtgattactggcatcatcaatcaaagtgatgataagcagtacttcaatagcgtgctgaccgtcggtgatacgcctcatggcgaataccgttatgatctgactcagcgctaccataagtaccacttgttgccttttggcgaattcgtgccgtttgaagagatcctgcgtccattagctccattctttaatttgccgatgtcctcctttagccaaggggcttacgtgcaaccgaatttgattgcaaagggtttcgcatttgtcaccgcactctgctacgaaatcatcttcaatgagcaggtacgcgataatgtgacgccagacaccgacttcctactgacgctttcgaatgatgcttggtttggtcgttcgataggcccattgcaacacatggaaatcgctcgcatgcgcgccttagaattgggcaagccgctgatccgcgccaccaacaatggagtgacggccgtcaccgatgagcgtggacgcattatggctcagctgccacaattcgaaactggcgtgctaaaagcaacggtcaccccgactcgcggtagtacaccttacttcctatggggcacaacgccactctacctttgggtaggcttagcggctgggttcgctttctggcgccagcgccgggctagataa

SEQ ID NO: 41006 - DNA, 876 bp, Vibrio cholerae
atgaacgaagacaattctcagaattcggaaggtccgagtagaaagtccttctttgaacgcctaagtcaactttttcagggagagccgaaagatcgccaagagctggtcgatgtaattcgcgactctgaagtcaatgacttgattgaccatgacacccgcgacatgctcgaaggtgtgatggaaatcgccgaaatgcgcgtgcgcgatatcatgatcccacgctcacaaatggtcactatcgatcgtactcataacctagatgctttggttgccatcatgactgatgcgcagcactcacgttatccagtgatcagcgaagataaagaccatgtggaaggcattctgcttgcgaaggacttactcaaatatctaggctctaactgtgccccattcaacatccaagaagtgatccgtcctgcggtcgtggttccggaaagcaagcgggttgaccgtctgctcaaagaattccgtgaagaacgttaccacatggcaattgtggtggatgagtttggcggcgtatcaggcctagtcaccattgaagatattctggaagagatcgtcggcgacatcgaagatgaattcgacgacgaagagcaaaaagacattcgccaactgagcaaacacaccttttcggtgaaagcgctcaccacaattgaagactttaaccacactttcggcaccaaattcagtgatgaagaagtggatacggtcggtggtttggtgatgacggcattcggccacttacccgcgcgcggtgaagtcgtagacattgcaggctacaacttcaaagtgacagcggcggatagtcgccgagtggtggctcttcaagtgaccgttcccgatctggaagccctttcgcacgttgcggaagagtag

SEQ ID NO: 41007 - DNA, 1194 bp, Vibrio cholerae
gtgaagagaaaatactgggtgggaaaaggtatgagtggcaacaaatttgacatcctcgtggtggggggcggcatggtgggcgcggctgctgcactgggctttgcacgccaaggacgcaaggttgcggtaattgattctggcgcgccgcacgcttttgagccgagtcagcctatggatgtgcgtgtctctgcgatttcgcaaacttcagtaggactgctagaagaactgggtgcttggtcaagtgttgttggtatgcgtgcttgtccttatcgtcacttagaaacgtgggaacacccagaatgtcgaacgcgtttttcttgtgagtcgctcgggttgccacaattaggttacatggtagaaaaccgagtcattcaattagcactatggcagcaatttgcagcttatccgcagttgactttaatgtgtcccgaacaattggcgcagttgaatgtgagtgcagagggatgccgtgttaccttgcaatcgggcgctgaaattgagtgtgattgggtaatcggtgcggatggcgcaaattcccaggtgcgcaatctggtgcgtatcggcgtaacggcgtgggattatcgtcaacactgtatgttgattaatgtgcagacggagcagatccaacaagaaaccacgtggcagcaattttttccaacagggccgcgctcctacttacctttgggcggcaatcaggcgtctttggtgtggtatgacacaccgcagcgtattcgcaagctcagcggtcttaatccggagcaattgcgtagcgaaattctgcagtatttcccggccgagttggggaatattaaagtgttgcaacacggtgctttcccattaacgcgccgtcatgctcagcagtatgtgaaaaatcgctgtattttgattggggatgcagcacacaccataaacccattagcagggcagggcgtcaatttgggctttaaagatgtggccgtgttgctggcgcaaactcaagagcaggcgttaaatcaggcatcttttgaacgctatgaacgctgccgtcgtcccgataatttactgatgcaaacggggatggatctgttttacaaaacctttagcaactcgtttacgccagttaggtttgtgcgtaatgttgcactcgctttagccgaacgctctgggccgttgaaaacgcaagtgctgcgttacgctctcggcttttcaaactaa

SEQ ID NO: 41008 - DNA, 1722 bp, Vibrio cholerae
atgatttcaggcattctagcatctccaggtattgctattggtaaagcattacttcttcaagaagatgaaattgtcctaaacacaaacaccatttctgacgatcaagtagaagccgaagttgagcgcttttacactgcgcgtgacaaatcttctgcgcagttagaagtgatcaaacaaaaagcacttgaaacttttggtgaagaaaaagaagccatctttgaaggccatatcatgttgcttgaagatgaagagctagaagaagagattttagccctcatcaaaaaagaaaaaatgtctgccgataacgcgattcataccgttatcgaagagcaagccactgcgcttgaatctttagacgatgaatatctcaaagaacgtgcaacagatatccgtgatatcggtacacgttttgtaaaaaatgctctgggcatgcacatcgtatcgctgagcgaaatcgatcaagaagttgtccttgttgcctacgatttaacgccttctgaaactgcgcagattaacctgaactacgttctcggttttgcatgtgatattggcggccgtacctctcacacttctatcatggctcgctctctagagctgccagcgattgtcggtactaacgacatcactaagaaagtgaaaaatggcgacacattaattctggacgcaatgaacaacaagatcattgtgaatccaactcaagcacaaattgaagaagccaaagcggttaaagcggctttcttagcggaaaaagaagagctcgctaagctgaaagatcttccagcagaaacgctagacggccatcgcgttgaagtgtgtggcaacatcggtaccgtgaaagactgtgacggtatcatccgtaacggtggtgaaggtgtcggcctataccgtactgaattcctgttcatggatcgtgatgccctgccaacagaagaagaacagtaccaagcctacaaagaagtcgcggaagcgatgaatggccaagcggttatcatccgcaccatggacatcggcggcgacaaagatctaccgtacatggatctcccaaaagagatgaacccattcttgggttggcgtgccgtgcgtatcagcttagatcgccgtgaaattctacgtgaccagctacgcggtattctgcgagcctctgcacacggcaaacttcgcgttatgttcccaatgatcatttcagtagaagaaattcgtgagctgaaaaatgcgattgaagagtacaaagctgaactgcgcaccgaaggtcatgctttcgatgaaaacatcgaaatcggtgtgatggtagaaacaccagctgcagcagcgattgctcatcacttggcaaaagaagtctctttcttctctatcggtactaacgatttaactcagtacaccttagcggtagaccgtggtaacgagatgatctctcacctctacaacccactctctccagcggttctgaccgtgatcaagcaggtgattgatgcttctcacgcagaaggcaaatggactggtatgtgtggtgaattagcgggtgacgagcgtgcaacgctactcctactcggtatgggtctggatgagttctcaatgagcggcatctcgattccaaaagtgaagaaagtgatccgtaacgccaattatgcggaaatcaaagcgatggctgaagaggcgcttgccctgccaacggctgcagaaattgaagcttgcgtagataaattcatcgcagcgaaagcgtaa

SEQ ID NO: 41009 - DNA, 258 bp, Vibrio cholerae
atgtacgagaagcaagtagaaatcactgcagaaaacggccttcacactcgtcctgctgcacagtttgttaaagaagcaaaagccttcgatgcagacatcactgtgacttctaacggtaaaagtgcaagcgcgaaaagtctgttcaagctgcaaacgctaggtctggtaaaaggtactgtcgtgactatctctgccgaaggccctcaagcaaaagaagctgttgagcacctagttgctctgatggaccaacttcactaa

SEQ ID NO: 41010 - DNA, 969 bp, Vibrio cholerae
atgagcaaaatctacgaagacaattcactgactattggtaacactccactagtgcgcttaaacaaagtctctaacggcaaagtgctggctaagattgaagcacgcaacccaagcttcagcgtaaaatgccgaatcggagccaatatgatttgggaagctgaaaagcaaggcaaactcaagcctggcgttgaattagtagagccaacaagtggtaatactggtgttgccctagcgtttgttgctgcagctcgtggatacaagttaactctgaccatgcctgaatcgatgagtttagagcgtcgtaagctactcaaagcacttggcgccaatttagaactgactgaagcagcaaaaggcatgaaaggcgcgattgcgaaagcagaagagattgttgccagcaacccagaaaaatatttgctcctccagcaattcaataacccagctaacccgcagatccatgaaaagaccacaggcccagagatttgggatgcaacagatggtcaaattgatgtgtttgttgctggtgtgggtactggcggtacattaacgggtaccagtcgctacatcaaaggcactcaaggtaaagctattctttctgttgcggttgaaccggctgaatcaccggtcattacacaagcgctggcgggagaagaaatcaaacctgctccacataaaattcaaggtatcggtgccggttttatccctggtaacttagatttaagcttgattgatcgtgttgagcgtgtcacctcagatgaagcgattgaaatggcgcgtcgcctaatggaagaagaaggcattctcgcggggatctcttctggtgctgcggttgttgccgctaaccgaatcgcacaattgcctgaatttgaaggaaaaactatagttactgtgttaccaagttcaggtgaacgttacttgagcacagctctattcgcaggcattttcactgataaagaaaaccagcagtaa

SEQ ID NO: 41011 - DNA, 876 bp, Vibrio cholerae
atgcaggaactgcgattcgtattgataattgttggcgcgttggcgatagcggcgttgctgtttcatggtctgtggaccagcaaaaaagagggaaagtccaagtttggtgataaacctctgcgcaagatgaaagtcgaaagtgatgatccgccttcgcgtgcctttgcggcggaagacgatttcgaaatcatccgcaaggaacgcaaagagcctgattttggcattccgaatcaacagcacgatcctctgatctctgatttcgcggcccatgatgagctggatgaagaagaggatgaggaagcgcgcattccggttcagcctcaatcccaacctcaacctagaaaggttcagccccaggttgagatgcctcgagttgcgccaaacgtgccaatggctaaggtgcaacctgaagtggtgaccgagattgaggtacaagagccgcaggaagaaaagctggatgtgattgtgctcaatgtacactgtgctggtaaccagccttttatcgggaccaaactgttcgatagcatgcagcaaaatggtttgttatttggtgagatggatattttccatcgccacgcggatctctctggaacggggaaagtgttgtttagtgtcgcgaatatgatgcaacctggtacccttatgcatgatgatcctgcggacttttcaaccaaaggcatctccttttttatgacactgccgtgttttggcgatcctgagcaaaacttcaagttgatgctaaaaaccgctcaacaaattgccgatgatcttggtgggcatgtgttggacgatgctcgtaacttaatgactccgaaccgacttgatgcttatcgtaagcaaattcaagagtttaaagttcgagccgctcaagcctaa

SEQ ID NO: 41012 - DNA, 2010 bp, Vibrio cholerae
atgtcagatgtcgcgcaacgattaacagaattaagaaaaaccttgcatgagcatggtgtccgctattacgtagaagatgcccccagcattccggatgcagaatacgatcgcttaatgcgcgagctgctggaattggaagcggctcacccggaattgatgagctcggactcgcccagtttacgagtcggaggacgtccgcttgatgcttttgaatctgtcgtgcatgaaattccgatgttatcgctcgataacgcctttgatgatggtgaattagaaagcttttatcgtcgtatgacggatcggatcccggcggtacagcatagtgccttttgttgtgagccgaaactggatggcttggcggtcagtttactatacgaaaatggtgttctgacccgcgcggcgactcgtggtgatggtacgaccggcgaaaacatcacagaaaatgtacgtaccattaaatcaatccctttacgcctgcaaggcgcagattttccaactcgccttgaagtgcgcggtgaagtgtttatgcctaaagcggggtttgaagcacttaacgcacgagcgcttaaaaaaggtgaaaagcagtttgtgaaccctcgtaatgcagcggcggggagcctacgtcaactcgactccaaaattaccgcccaacgtccactggctttttatgcttacagtgttggtgttattgaaggcggagagttagcgaccagccactatcaacgatttttacaactaaagggctgggggctgccgatttgtccagaaaccaaactggtaacttctctcgccgaagtcaaagctttttatcaagacattttgcaacgtcgccagtctttggcttatgagattgatggcgtcgtcattaaagttgacgatatccagttgcaagagcgattggggttcgtggctagagcgccgcgctgggcgattgcctataaatttcctgcgcaggaagagcttactttgctcaatgatgttgaatttcaggtaggtcgtactggtgcgattaccccggttgctaagttggagcctgtgtttgtcggtggtgttacggtaagtaatgccacattacataatgccgatgagattgagcgtttgggagtgatggtcggagatacggtggtgatccgccgtgctggggatgtcatcccacaaatcgtctctgtggtattagagcgacgccctgagaatgcaaaatctattgtatttcctactcgttgcccagtttgtcaatcggatgttgaacgggttgaaggagaagcggttgctcgatgttccggtggactgatttgccaagctcagcgcaaagaggcattgaagcattttgtttctcgcaaggccatggatgtagaaggcttgggcgataaagtgattgagcaactggttgacagagaaatggtgagtacacctgctgatttattccggttaagagcgggagagctcacgattttggagcgaatgggccccaaatcggcgcagaatgtgattgatgctctcaataaagcgaagcaaaccacattacctaagtttttatatgcactgggtattcgtgaagtcggcgaggctaccgcactcaacttggctcagcactttttaagtttggaagcgattcaacaagcgagtttagaacaatttatcgaagttcccgatgtcggagtggttgttgcaagccatttacaggccttctttgcgcaagaccgtaaccaacaagtgatcaatgaattgctagaacaaggcatcacatggccagcgctaacggctgcgcccgtggcggtagactctgctctagcgggcaaaattgttgtgttaaccggcagttttactcaattgtctcgtaatgatgcgaaagccgcactacaagctttaggtgctaaggtgactgggagcgtatcaaaaaatactgatatggtttttgcaggagaagcagcgggctctaagctagccaaagcgaccgagttgggtatccaagttttcgatgagcaagcattaatcgaatttttgaaataa

SEQ ID NO: 41013 - DNA, 816 bp, Vibrio cholerae
atgatgaatttatttaaaacgaccatattattctcaaccatcaccatggccgttggatgcagtaatttagacagttcgagtgtgttcaatgatgtggcgaagaatgtcaaagaaaggcacaactatgttcaagttgtcgcgaaagatattactcctgacgcaaaagcaattgtaggacctgatattgtaaaagcagagttaagctatgtcggtaatttccctaaagctgaaggcgttaatattgaaaattcatacgttgatatgaacgtcacttattttaaaaattatgaccaatatgacactgttgcttattcatcacagaagttaaaagtagaaacatatcgtccattagctgagacctgtaccgaacattgcacgacctcgcaatggtttaagttcccattatctcaagaatatattcagcaactgaactcggattcagttgtgtttacgctgtcctcgtcaacagacaaaaaccaagtagaattcacggttcctaaagcgtattttttagcggttattaatgaggcgaaatttgtcttacaagggacagatgtggcacctgttgctcctattgttgctgttcaagcgcaaccaaccgcatccaaacctaacgaaatgatccaatatttgtttggtgaagccagttcagcagagcgccaagaatttgctaactgggcttttgctaaccgtgcagaggtagcccagcctatggttacacaaaataagttggtcgaaatgatggctgattggtacaaaaaagccgataaagccgaaaaagcatcgattctctcttggttgattagccaagaataa

SEQ ID NO: 41014 - DNA, 420 bp, Vibrio cholerae
atgaatattagccagattgccaaactcacctcgctgactgccaagtcgattcgtctatacgaagagaaaggtctcatcatcccaccactgcgctctgaaagtggttatcgcacttacactcagcagcatgtggatgatttactgctcatcgctcgctgccggcgagtcggttttagtttggatgagtgtaaagccatgctcactcttgccaatgatccaaaccgaacgagcgcagcggtgcgcgcgcgagcgcaagaaaagtggcaagaaatctcgagaaaactctccgagctcaccatgattaagcagcagctagaagagtggattgcatcttgtcccggagatcaaggcagcgattgcccaatcatagaacagttgaagggacattgttgttcaaacaataaaactaagaccccgtag

SEQ ID NO: 41015 - DNA, 1908 bp, Vibrio cholerae
atgagcgagactgcaaccactaataaagaaacgcgtggttttcaatcggaagttaaacaactgctgcacctgatgattcactctttgtactccaacaaagaaattttcctgcgtgagttgatttctaacgcctccgatgccgttgataagttgcgttttcaagcgctttctcatcctgatctctatcagggcgacgctgaattaggcgtaaaactctcttttgataaagacaaaaatacgttgaccatttcggataacgggatcggtatgacccgtgatgaagtgatcgaaaacttaggtacgattgctaaatcgggtacggctgaattcttctcaaaactttctcaagagcagtctaaaaactcgcagctcattggtcagtttggggtgggtttttactcggctttcatcgtggcggatgcggtgacggtgcggactcgcgctgcaggtagtgcaccagcagatgcagtacagtggtactcaaaaggtgagggcgagtacacggttgaaactatcaataaagagtctcgtggtacagacatcattttgcatctgcgtgaagaaggtaaagagtttttgtccgaatggcgtttgcgcgatgtgatttccaaatactctgatcacatcggtattcctgtctatatccaaacctcagtgatggatgaagaagggaaagcgacagaagaaaccaaatgggagcagatcaacaaggctcaagctctgtggacgcgtgctaaatcggaagttaccgatgaggaatataaagagttctacaagcatgtatcacacgattttgctgatccactcgtgtggagtcataacaaagtcgaaggtaaaaatgactacaccagcttactttacattcctgctaaagcgccttgggatctgttcaatcgtgaacataagcatggtttaaaactgtatgtgcaacgcgtctttattatggatgatgcggcgcaattcatgccttcttatctgagattcgtacgtggtttgattgactcaaacgatctgccgctcaacgtatcgcgtgaaattctgcaagataacaagatcactcagtcactgcgccaagcttgtactaagcgcgtattgactatgcttgagcgcatggcgagcaatgatgctgacaattaccagaaattctggaaagagtttggcttggtgatgaaagaaggtccggcagaagattttgctaaccgcgagaaaatcgctagcttgctgcgttttgcctctactcatatcgattcggcagagcaaaccatcagccttgcttcttatgtcgagcgcatgaaagaaggtcaagacaagatctactatctgacggcagacagctataccgctgcgaaaaacagcccacacttggagcagtttaagtcaaaagggattgaagtcattctgatgtttgatcgcattgacgaatggttgatgaattatttgccagagtttgagggtaaagcgttccagtccatcaccaaagcaggcttggatctcagccagttcgaagatgaagccgaaaaagagaaacataaagagacggaagagcaatttaagtctgtggttgaacgcctcaaaggctatttaggtagccgagtgaaagaggttcgtaccacattcaaactggctaacacaccagcagtcgtggtgaccgatgattatgaaatgggtacccaaatggcgaaactattggccgcagccggccagcctgtgcctgaagtgaagtacatccttgaagttaaccctgaacatgctttggtaaaacgcatggcggatgaagcggatgagcaaacttttggccgttgggcggaagtgctactgggtcaagctatgcttgccgaacgtggctcgatggaagatccatcacaattcttaggtgcagtaaaccaactgcttgcacctagccactaa

SEQ ID NO: 41016 - DNA, 645 bp, Vibrio cholerae
atgcgcatcattcttctcggtgctccgggtgcaggtaaaggcacacaagctcaattcatcatggaaaaatttggtattccacaaatttctactggtgacatgctgcgtgcagccattaaggcgggcactgagctcggtaagcaagcgaaagcggtaatcgatgcaggacaattggtatcggatgacatcattttaggccttatcaaagagcgtattgctcaggctgactgtgagaaaggtttcctgctagatggtttccctcgcacgattccacaagccgatggcctaaaagagatgggtatcaatgttgactatgtgattgaatttgacgtagcggatgatgtgattgttgagcgtatggcgggtcgtcgtgctcatctaccttcaggccgtacgtaccacgtagtgtacaatccacctaaagttgaaggtaaagatgacgtaacgggtgaagaccttgtgatccgtgaagatgacaaagaagaaaccgtacgtgcgcgtctgaatgtttaccacacccaaactgcgccacttattgaatactacggtaaagaagcagctgcaggtaaaactcaatacctgaagtttgacggcactaagcaagtgagcgaagtgagtgctgacattgctaaagcgttggcttaa

SEQ ID NO: 41017 - DNA, 1665 bp, Vibrio cholerae
atgtgctctatctttggcatcttagacattaaaactgatgcagcaacgctaagacctatcgccctcgaaatgtcgaaaaaactgcgccatcgcggtccagactggtcaggtatctatgcttctgataaagcgattctggcccatgagcgtctggccatcgtgggtttaaatagtggcgcacagcctctttatagcccagatcgtaagctcatccttgccgtgaatggtgaaatctataaccacaaagaaattcgtgaacgttacaagggtcaatatgaattccaaaccgattctgattgtgaagttatcttggcactataccgcgataaaggagctgatctcctcgaagaactcaatggtatttttgcttttgttctctacgatgaagagaaagatgaatacctgattggacgtgaccatatcggcatcattcctctttatcagggtcatgatgaacacggtaacttctatgtagcgtcagagatgaaagcactggttcctgtgtgtaaaacattgagtgagtttcctcctggcagctacttgagttcaaaagatcaagcggtgacacgctactatgtgcgtgattggaatagttttgatgaagtcaaagataacgtcagcagcaaagaagagttaactcaagccttagaagctgccgtgaaacgccaactgatgaccgatgttccttatggcgtactgctatctggtggcctggattcatcgattacctctgcgattgcgaagcgttttgccgcaatgcgtattgaagatgatgagaaaagtgcggcatggtggccacaacttcactcttttgcgatcggcttagagggggctccagatcttaaagccgcacgtgaggttgcagagaaaattggtaccgtacaccacgaaatgacttacaccattcaagagggacttgatgcgattcgtgatgtgatttaccacatcgaaacttatgatgtcactacgattcgtgcttctactcccatgttcttgatggggcgtaaaatcaaagccatgggcatcaaaatggtgctttccggtgagggagcagacgaaattttcggtggctatctctacttccataaagcgccaaacgctaaagagtttcacgaggaaaccgtacgcaaactgctggcgttgaacttatttgactgtgcgcgtgccaacaaatcgctggcagcatggggggtagaaggtcgtgtgcctttcctagataaagaatttattgatgttgcgatgcgcctcaacccagccgataaaatgtgtggtaatggcaaaatggaaaaacacatcctgcgtgagtgctttgagcactatctgcccgagtcgattgcatggcgtcaaaaggagcagttttctgatggcgtaggttatggctggatcgatacgctaaaagctaccgcagaagcgaagatcagtgatcaacaaatggaaactgcgaaattccgtttcccatacaatactccaaccaccaaagaaggttatgtgtaccgggaaatttttgaggaactattcccacttgaatctgcggcacgctgcgtaccgggaggcccttccgtcgcttgctcttcagctaaagcgattgagtgggatgagtcattcaaaaactgtattgacccatcaggccgcgcggtgaaagccgtccacaaacaagcctactaa

SEQ ID NO: 41018 - DNA, 1215 bp, Vibrio cholerae
atgaatggcggacagattggtaacgtagatttagttaaacagctaaacagtgcggcggtttaccgcttgattgaccaacaaggcccaatcagtcggattcaagtcgctgatgtaagccaactggctccggccagtgttaccaagattacccgccaattgcttgaacgtggattaatcaaagaagtcgcgcaacaagcttctacaggtggtcggcgagccatttcgctgaccacagaagtcaagccgttccactctattgccgtgcgtatcggacgtgactatattcaactcagcctctatgacctaggtggaaactcactggttgatgagcatcatgaatttcactacaacacgcaagacgtgttgatgtcgagcctgattaaacagatcaaacaatttattcaacaacacaccgcattaattgatcagttgattgcgattggtgtggccttacccggtttggtgaacccagaaacaggtgttgttgagtacatgcctaatgtcgcgatcaatgaattacctctcggcgcaaccattcgtgatgagttccatgttgaatgttttgtgggtaacgacgttcgtggtattgccttagcggagcactatttcggagcaagccaagattgccaagactccatactagtcagtgtacaccgtggcacaggtgcagggattatcgttaacggtcaagtcttcttaggctataaccgcaacgtcggtgaaattggccacatccaaatcgaccctcttggtgagcaatgtcaatgtggcaactttggttgtctagaaaccgttgcgaccaaccctgctatcacttctcgtgtgcaaaaactgatcgctcaggggtatgaatcttcgctctctactctcgatacgattacgattgatgatgtctgtgagcacgcaaatgctggggatgaactggcgaaacaagcgttggttcgtgtaggtaatcagttgggtaaggcgattgcgattaccgtaaacctattcaacccacaaaagatcgtgattgctgggcaaatcaccgccgccaaagagatcgtgttccccgcgattcaacgcaacgtagaaaatcagtcactgaaaacgttccaccaacatctgccgattgtgtcttcacaagtctacaaacaacccactatgggcgcttttgctatgatcaaacgtgcgatgttaaatggggttctgttacaaaaattgcttgaagactga

SEQ ID NO: 41019 - DNA, 1137 bp, Vibrio cholerae
atgtatgcgctaacgaactgcaaaatctacacaggcaatgatgtgcttgtgaaacatgcggtaatcatcaacggtgacaaaattgaagccgtttgccctatcgaatctcttccatctgagatgaatgtggtcgacctaaacggtgcaaacctcagccctggttttatcgatttacagctgaatggctgtggtggtgtgatgttcaatgatgaaatcacagcggaaaccatcgataccatgcacaaagctaaccttaaatcgggctgtaccagcttccttccaacgctgatcacttcttccgatgagaacatgcgccaagcaattgccgccgctcgcgaatatcaggctaaatacccaaatcaatcgcttggtcttcatttagaagggccttatctgaatgtcatgaaaaaagggatccacagcgttgacttcatccgcccctctgacgatacgatgattgatacgatttgtgccaatagtgatgtgatcgccaaagtcactctcgcgccagaaaataataagcctgaacatattgagaagctggttaaagcgggaattgttgtttccattggacacacaaacgcgacctatagcgaagcacgtaaaagctttgaatccggcattacctttgcgacccacctctttaacgcaatgaccccgatggtaggtcgtgaaccaggagtggtcggggcgatttatgatacacctgaggtgtatgcgggcatcatcgccgatggcttccatgttgattacgcaaacatccgaattgcccacaaaattaagggtgaaaagctcgtattagtgaccgatgccacagctcctgcaggcgctgaaatggattactttatttttgtcggtaagaaagtatattaccgagatggcaaatgtgttgatgaaaatggcacgcttggcggttcagccctaacaatgattgaagcagttcaaaatacggttgagcatgtcggtatcgctttagatgaagctctgcgaatggctactctgtatccagcgaaagcaatcggtgttgatgagaaactcggtcgtatcaagaaaggtatgatcgccaacctgactgtttttgatcgtgacttcaacgtaaaagcgacggtagttaacggacaatacgagcagaattga

SEQ ID NO: 41020 - DNA, 1572 bp, Vibrio cholerae
gtgaatattcttggatatgcgcaaaagttaggtaaagcattgatgctacctatcgctacgctacctgtagcggcgctcttacttcgtttaggtcaaccagacctgttaggcattccattcatggctgcagcgggcgatgcaatttttagccagctgccactactgtttggtttgggtattgccattggtttatcgaaagatggatctggcgccgcaggtctagcgggtgcagtagcttactttgttctgagtgcaacggcaaaaacgattgatgcttcaatcaacatgtctttctttggcggtatcttcgcaggtatcatcgcagggcactcttacaacgcgttccacactacacgtctgccagagtggctagcattctttgctggtaagcgtttagtgccaattatggcgggtctgttcgctctggttgctggtgcgctttctggcgttatctggccatcaattcaaggtggattagatgcgctggcgcatgccgtctctacatcaggtgctttaggccaatttgtttacggtactctgaaccgtgctctgatccctgtaggtttacaccacgttctgaactcttacttctggttcggcatgggtacctgtcaagagatcctagtttcaggtgctcaagccgctggtcaagcactgcctgcactcgaaaaactgtgtgtggatccagctctagcgaaaaccctagttgtgggtcaagagcatacttttgcgttcaaaaatgcggtaacgcctgaaatcacagctgtggtaaaagaagtgactgaagtggttaaatctggcgacctacaccgtttcttcggtggcgataagagcgctggggtattcatgaacggcttcttccctgtcatgatgttcggtctaccaggtgctgcacttgctatgtacctagccgctccagctgagcgtcgtcaccaagtgggtggtgcactgttctctgttgcgttctgttcattcctaacaggtatcactgagcctctagagttcatgtttgtgttcctagcacctgcgctgtatgcaatgcatgcggtatttacaggtctgtcactggttgtggctaacatgtttggcacactgcatggtttcggtttctcagcaggtcttatcgacttcctgttgaactggggtctagcaacgaaacctgcaactctgtttgtgattggtctggcgttctttgctctgtacttctttacgttcacattcgccattcgtgcgttcaacctgaaatctccaggtcgtgaagacgaagaagtggaaacagaaacagactccgctgatgcatctaaaggtgatttggctcgccaatacctgaaagcactgggtggtcatgaaaacctgacatctatcgatgcgtgcatcacacgtctacgtctgactctgaaagaccgctctgttgcagatgaagcggtactgaagaaactgggcgcgaaaggtgttgtgaaactgggtgaaaataacctgcaagttatccttggccctctagcagaaatcgtcgcgggtgagatgaaagccatcagcccgaaagaagatctttctgacgttaaactgccttaa

SEQ ID NO: 41021 - DNA, 1671 bp, Vibrio cholerae
atgagtgaagctgaggctcgtccatcgaacttcatccgccaaattatcgataaagatcttgcggatggtaaacacacgaccgtgcatactcgtttcccgccggagccgaatggctacctgcacatcggtcacgccaagtcaatctgtctgaatttcggtattgctcaggattatcaagggcagtgcaacctgcgctttgatgatacaaacccagaaaaagagaaccttgaatatgttgagtcgatcaaaaaagatgtgacttggctaggttttgattggtcaggtgaggtgtgttactcctctgactattttgacaagttgtatgaatacgcgattgagctgattcaaaaaggcttggcgtatgtggatgaactgacgcctgagcaaattcgtgaataccgtggcactctaactgagcctggtaagcacagcccataccgcgatcgtagcgtagaagaaaacctagcgctgtttgaaaaaatgcgtgcgggtgaatttgcagaaggtcaagcttgtctacgtgcaaaaatcgatatggcatcgtcttttatcgtaatgcgtgatcctgttttgtaccgtgtgcgttttgctgaacaccaccaaacgggtgacaagtggtgcatctatccgatgtacgatttcacacactgtatttctgatgcgctcgaaggcattacgcactctatttgtactttggaattccaagacaaccgccgtctgtatgattgggttcttgataacatcacgattccatgccatccacgccagtatgaattcagccgcttaaatctcgaatataccgtgatgtctaagcgtaaactgaaccagctagtgaccgaaaaattggtcacaggttgggatgatccacgtatgccgaccatttcaggcctgcgtcgccgtggcttcacgccaagcgctattcgtgaattctgtaagcgcattggtgtgactaagcaagaaaacatgattgaatacagtgcattagagtcttgtattcgtgatgatcttaacgaaaatgcgccacgtgcgatggccgttctggatccggttaaactggtgattgagaacttcgccgcaggcacagtggaaactttgacgctggctaaccatccgaacaaacctgagatgggcgatcgcgaagtgccatttacccgtgagttgtggattgaacgcgaagatttccgcgaagaagccaacaagaaatacaagcgtttggtgttaggcaaagaagtgcgtctgcgtggtgcttacgtcatcaaagctgagcgcatcgaaaaagatgaacaaggtaatatcaccacaatcttctgttcttacgatcctgaaaccttgggtaaaaacccagccgatggtcgtaaagtgaaaggtgttattcactgggtatctgcagaaaaaggcgttcctgctgagtttcgtctctacgagcgtctgttcactgtacccaatccaggtgcggcggataactttgccgaaaccattaacccagaatctctggtaaaagttcaaggttatgttgagccaagcttagtggaagcaaaacctgaatttggttatcagtttgagcgtatgggctatttctgtgccgataacaaagactctagcccgcaggctttggtctttaaccgcactgttggtttgcgcgatagtttcgccaaaattgacgaagagtaa

SEQ ID NO: 41022 - DNA, 927 bp, Vibrio cholerae
atgagttggctcgaaaagattttagagaaaagcaacatcgtcagttcacgcaaagcctctatcccagaaggcgtttggactaaatgtacatcgtgtgaacaagtgctttattacgcggagttggagcgtaacctagaagtttgtcctaagtgtgatcatcacatgcgcatgaaagcacgtcgccgtttggaaacgtttctggatcaaggtgagcgtgttgagctgggtgaagagctcgagccacaagacaaactgaaatttaaagattctaaacgctacaaagagcgtcttgctgcggcgcaaaaagccagtggtgagaaggatgctctggtcgtcatgaaaggtgctgtgcttggtgttcctgtcgtggcgtgtgcctttgagttctcttttatgggcggctcaatgggttctgtggttggtgctcgttttgtgcgtgcggttgaagcggcgattgaacacaactgcggattaatctgtttctctgccagcggcggtgcgcgtatgcaagaggcattaatgtctctgatgcaaatggccaaaaccagtgccgcgctagagcgtttatcggataaaggcttgcctttcatttccgtgatgaccgacccaactatgggcggggtgtcagcgagtttggcgatgctgggcgatattaatatcggtgagcccaaagcattgatcggttttgcaggtcgtcgcgttattgagcaaaccgtacgtgaagagcttccggaaggtttccaacgcagtgagttcctgctagagcatggtgcgattgatatgatcgttgatcgccgagacatgcgtcagcgtgtcgctagcttactggcgaaaatgactggccaagcgtctcctctcgtagtttctgtgaacgacgcgccaaatgaagtgccttatgcggtaccagaagccaataaaaaagggtaa

SEQ ID NO: 41023 - DNA, 891 bp, Vibrio cholerae
atgtctctatacgaaaacaaaaaagtggttgcgattggcggcggccacggtcttgggcgaatgctggcagcgctcaaagtgtttggttccaatgccacaggcatagtcaccaccacagacaacggcggctcaacaggacgcattcgtcactgccaaggtgggattgcttggggagatacccgtaactgcatcaaccagttgattaccgagccgtcgatcagttcaatgatgtttgaataccgctttaaaggcgcaggggagctcaacggccacaacttgggcaacctaatgctcaccgcattagataacctttcggtgcgcccattggatgcgatcaatcttattcgcaacatgctcaaagtcgatgtcaatatcctaccgatgtctgaacatccatccgatctggcagccctcgctatggatggcaaatgggtcaccggtgaaaccagcgtcgatgagatgactcaagatttgcgaagacttgaccttgcgcctgaagtcccggccaccaaagaagcggtaaccgccattcaagacgcagactgcgtgattctgggccccggaagctttttaaccagcgtcatgcctcctcttctgctgccagaattgggcaaggcgattgctcgtaatcaaactgcgaaagtgatttttgtcgagaacctatcgccagaatatggacctgcaggacgaatgagcttagagcaaaaattggaatggtgtgaacgcgcctgccaagggcgcaaaattgatgtggtattgggccatcaccctcatccagagttagaacagcgttggaattttgttacccgagatttggcttccgccaaccgcgactggcgtcatgatcggcagaagctgagacaagctatcgaagagcagttaatgaactaa

SEQ ID NO: 41024 - DNA, 1005 bp, Vibrio cholerae
ttggaaaggtgttctgtggcgcaacaattcgaagacagatttcagcgtaaattttactatttacgtctatccataaccgacgtttgtaatttcaaatgtacgtattgcttacctgatggttacaagccatcagcgggtcgccctgcctcttttctgacggtgaatgagattcgccgagtggtgagtgcgtttgcccattgtggtacttccaaggtcagaattaccggcggtgaaccttcactgcgcaaagattttggcgaaatcattcataccatagcgcaaactcccggcattcaaaaagttgcgacgaccaccaatggctaccgtttagccaaacatattggtgagtggcgcgaagcggggttgactcaactgaatgtcagcgtagatagcttagatccacgtatgtttgcgcaaatcaccggtgaaaaccgctttcagcaagtgatgtccggcattgatcgcgcctttgaagttggattcgagcaagtcaaagtcaacgtggtactgatgaaaaatcttaaccaccttgaactgccccaatttatggcgtggattaaaactcgccccatccaactgcgttttattgagttgatgcaaaccggagaaatggacgcgctgtttgctcgccatcatgtttctggcatttcgatccgcgactatctcttcggtaacggctggttactcaaagccagagccgataacgatggccctgcacaggtgtttatccatccggatttccaaggcgagattggccttatcatgccttatgagaaagatttttgtcgcagctgtaaccgccttcgggtgtcagcacttggcaaactgcatctgtgcttatttggcgaacaaggcatcgagctacgcgatcttttgcaagacgatcaccaagaaaacgcattgattgaacgaattcaaactcagttgcaaaacaaggcggaaacccacttcctgcatgatggaaattcgggtgtgacgccgcatttagcctcgattggcggctga

SEQ ID NO: 41025 - DNA, 513 bp, Vibrio cholerae
atgggtcacgcagaaagcaaatttcaagcagcaaacatcgccgttttaaccgtgtcagatacgcgcacggaagaaaacgatacctcaggccgttacttggcagagcagcttcaagaagctggccatacactggcagataaacagatcgtgattgacgatatgtacaaaatccgtgcggtggtttcacagtggattgcggatgaaaccatccaagcgattctgatcaccggtggcactgggtttacgtcacgtgacagcacacctgaagcacttaagcctctgtttgataaagaagtggaaggttttggcgagctgtttcgcatggtctcttttgaagagattggcacctcgaccattcaatcgcgcgcggttgcggggtttgctaaccacacggtgatttttgctatgccgggttcgactggcgcatgccgcaccggttggacaaaaatcattaaacagcaattggatgcttcccatcgcccatgtaactttatgccgcacctaacggtatag

SEQ ID NO: 41026 - DNA, 2196 bp, Vibrio cholerae
ttgcccatgctaccaccgctcaaagagcaactgaaccccgaaaaagataggggaatcaactgttgcgcgccttggcgtgactgcgtgcttagggtagtattatcgcttcaatttggtctctatcaagaaaagcgaatattaagtatggcaaacgatccaagaaaacttctggtaacttgtgccctgccttacgcgaacggttcaatccaccttggtcatatgcttgagcatatccaagctgacatttgggttcgttatcagcgtctgcgtggcaatacagtaaacttcatctgtgcggatgatgcgcacggcacacctatcatgctgaaagcacagcaaatgggtatgacaccagaagcgatgatcgagatggtgagcgaagagcaccaacgtgactttgctggcttcgatattagctttgataactaccacagcacgcacagcgatgaaaaccgcgagctggcttcgcacatctatctgcaactgaaaaagaacggctttatttcaagccgcaccatttctcagctgttcgatcctgaaaaagagatgttcttgccggatcgtttcgtaaaaggcacttgcccgaaatgtaaatcggaagaccagtacggcgacaactgtgacgcgtgtggtgagacttacagcccgactgagctgatcaatccaaaatccgccgtctctggtgcgacgccagtgatgaaagattctgagcactttttctttgacctgcctcagtttgaaagcatgctcaaagagtggacacgttcaggctctctgcaatcagaaaccgccaacaaaatgcaagagtggtttgaaggcggcttgcagcagtgggatatttcccgcgatgcaccgtactttggttttgaaatcccgggcgagaaagacaaattcttctacgtatggcttgatgccccgattggttacatgggttcattcaaaaacctgtgcgacaagcgtggcgatttggactttaacgaatactggaataaagacagcaaaaccgagctttaccatttcatcggtaaagacatcgtttatttccacagcttgttctggcctgccatgctcgatggctctggtttccgtaaaccgaccaacgtgtttgtgcatggttatgtgaccgtcaatggcgcgaaaatgtctaagtcgaaaggtacgtttgtgaaagccagcacttacctgaatcacttggatccagagtgtctgcgttactactacgcggcaaaactgaataaccgcattgatgatctcgatttgaacctcgaagacttcacccaacgtgtgaatgcggatgtggtgaacaagatcgtaaaccttgcgtcacgtaatgcaggtttcatcactaaacgttttgatggcaagctgtctgcacactttgcggagcctgagctgtacgctgaatttgctggcgcagccgatcgtattgctgagctgtttgaagcacgtgagtttggtcgtgccatccgtgaaattactgcattggcagataaagccaaccagtatgtggatgaaaaagccccttgggttgtcgcgaaacaagaaggccaagaccaagcactgcaagacatctgtacggtaggcattaacctattccgcgtactgatgacttacctcaagccagtgatgcctgcgttggcagagcgtactgaagctttccttaaccaagaattgacttgggaaggcgtggcaactccgctaacggatcatgcggtaacgccattcaaagcactgttcaaccgtatcgatccgaaacaggttgaagctatgattgaggcgtcgaaagccgaggcggcagccgaaaaagccgcagcagatgccgcaaaaccaaagagcgcagaaaccgagctgagcaaagaccccctagcggcggagattgagtttgatgattttgcgaaagtggatctgcggattgcgaagattctttcttgtgaagcggtcgagaaatcggacaagctgctcaagtttgaactcgatatcggcggtgaaacccgtcaagtcttctctggcattaagtctgcctaccaaccagaagatctgattggtaaatacactgtcgtcgtagcaaacctcaaaccgcgtaagatgaagtttggtatgtctgaaggcatgatcctcgccgcaggccctggcggtagcgacctgtggttacttgaaccccatcaaggcgctcaagcgggtatgcgtgtgatgtaa

SEQ ID NO: 41027 - DNA, 2112 bp, Vibrio cholerae
atgaaaaaactgtttatttctcttctcggtttagttgtgctgattgttggcgcactgctggccttagtgttgttggttaaccccaaccaatttaaacctttaatcgtagagcaagccaaaaaacaaactggcttagatttggtgattgaaggcgatattggctggcaatttttcccatctatcggctttgaattaggcaaaaccgagctgaaaaacccgcaaggttttgctagcccaaacctgtttaaagttgagagtgtgggtattgatgtctcagtgatgccactgctcgataaacagctcaaaatcggcaacatccgtttggatggcgcagaattccatctggaaacgcttaaagatggtcgctccaatttggatgccttgacgcaagcgcaatctaaacccgcgtccgcgccagcgacaactgactctgcacctgcttctcagccaagctcaagcgagccagccgcggcgtggagtattgaattagggggcgtttctgtctccaatgcggtgttggaaataacggataaaaaagcgggttcgcataccaagctgtatgacgttcaattgagtgttgccgagtttgtgccagacaactggacgaaagcgacctttgccgcgaaaggcgataaagatcagcagaagtttgccgcgcaaggtgaagctgaagtgcgcctatcggcggatttcaagcagtatgcgctgcgcaacattaatctcgatgcgagctttagtgatccgagtaaccaaatcgattcagccaaactgaaactcgatacttttgagtttgataaagccaatgctttgaccttctccgtggcgggtaaagcggcagatatgaagcttaatgcgcaaggttctgcatcactgatggtcaatcaagcgatcagcaaagttggtttggatgcgctgaaactgcaagccgaactggaaggggctgcgttaccgcaatcaccgatgaagttaagtttagactcgcaaattgctttcgatttgacacaaaaccatcttagtgtgctgctcaacaaactgacggccaatgctctgagtttcgatggcaaagcggatgtcaccctcgcagatattccgaaagtgcgtttcaacttgcacagccctgagattgacttggatgccttcttaggcacgaaagctcaagagtcgcaacctgcgccagccaaggaagcggctgcatcctcatcgtcagcacccgcgacaaatgccccagcagaagtggaaccggacttgtcggcactcaaagccttggatgtggccggtgagatcagcattgataaattcaaagccagcaacgcccatctacaaaatgtaaaagcgaattttgcggtcaatcgtggcgtggtggatttgaaatccttcaccgcgaatctgtatcaaggatccgtgcaagctagcgcgcaagtggatgcgcgtaaaacgcccgcgacttacagtgtgaagaagcagatcaaaggggttcaggttaagcctttactaaaagatgtgctgaacaacgaaatgctagaaggcacaggcaatattgatgtgaatgtgcaaggccagagcctaacaccaagcggcatccagaaaaatctggtcggtactgtggcgattaactttgccgatggtgcggtgaagggcattaacgtggcgcacttgattcgtacccactacgccaaaatcaaaggccaaaatgtcgaagaagcggatgcggtaaagaaaaccgactttagtgcgatgacgacgacgctgaaactcaataaaggtgaagtaacgaccaacgatcttaatatgcaatcgccattgttgcgcattcatggtgaaggtaaagccaattacctacagcaaaatgttgattttctggtgcgtacttcgattgttggaaccttggaaggtcagggcggtaagagtttagatgagctgcgcgatgtgactatcccgatcaatatttcaggtgcgtggagtgatccgaagttccgtttggtatttgatgatgtactcaaacaaaaagccaagaaagaagtggatcgcggcgtggaaaaactgaccgataaaatcaaagatgaagacaccaaaaaagcggtggatgggttgttgaaaggtctatttaactga

SEQ ID NO: 41028 - DNA, 468 bp, Vibrio cholerae
atgcagaaggtactcgtggtgtgcatgggcaatatttgccgttctccgaccgcagaagcggtattgcgtgctaaggcggcacaactcaaggttgatgtggaaatcgattcagcaggcacgattgggtatcaccaagggaatccaccggatgcacgctcaaaagcggcaggagagaagcggggatactcattttctggcatcaaagcgcgaaagatccgcgatgaagattttgtgaaatttgattggattttagcggccgacaaagagaatttagctgagctgaaagctcgctgccctcaatcccatcaacataagctgtcattgatgctcagccacagtgactcggaataccaagaaattccggacccttactatggtggtgaacgcggttttgagctggtgctcgatttggttgaagacgcagcagagcagtttttactgaaactaaaacagcaaggccagcgttaa

SEQ ID NO: 41029 - DNA, 1455 bp, Vibrio cholerae
ttgcaaaaaatcctaccaacaccggtttgtcagtgtttttcatctcgaaaggattgtttaaatcacgattatttaaacggctgtttgatttgtttaacattctcgttacaatgcgccaggtcagacctcttattcgaaggagaaatcatgggcaaacaggaagtcaggactcgttctggagaacgagtggcgattgtggccgggctacgtacgccgtttgcgcgtcaaagcaccgagtttggtcaagtacccgcagtcgatctcggcaaaatggtagtacaagagatgatggcgcgcaccgctatcgatcctaaattaattgagcaagtggtgtttggccaagtggtacagatgccagaagcgccgaatattgctcgagaaattgtactcggtaccggaatgtcgattaacacggatgcctacagcgttactcgcgcttgcgccaccagttttcaagccgccgtcaatgtggccgaaagtatcatggctggcagcatagatattggtattgcaggtggtgcggattcttcttctgttctgccgattggtgtttctaaaaaactggcggcttctttattagccttgagtaaaactaagacggtcgggcagaaacttaaactgcttagtaacctctcttttaaagacttgatgcccgtacctcctgcggtcgcggaatattcaacgggtctgtcgatggggcaaactgctgagcaaatggccaaaagctatgcgatctctcgcgctgagcaagatgcgttagcacatcgttcacatactttagcggctcaagcatgggcagagggcaaaattcgcgatgaagtgatgacggcttttcctgagccatacaaaaaatggctggatatggataacaacattcgcatggactccaagctagagagctatgcaaagttgcgtcctgcctttgaccgtcaatacggttcggtgaccgcagcaaactcaaccccactgacggatggcgccgccgcgattatgttgatgcgtgaaggtaaagcgaaagagcttggtcttgagatcatggggtatatccgctcttatgcgtttgccgcgattggcgtagaaaaagatatgctgatggggccttcttacgccactccgatagccttggatcgcgcaggcatcaccttaaatgatctcaccttgattgatatgcacgaagcctttgccgcgcaaaccttagcgaacttgaagatgttcgccagtgacaagtttgctcaagagcagctaggtcgcgcacaagcgattggtgaagtggacatgagtaaatttaacgtgctgggtggctcactggcttatggtcacccattcgcggcgacaggtgcgcgtatgatcactcaaactttgcgtgaattaaaacgccgtggcggtggtttagccttaaatacggcttgtgctgcgggtggcttaggcgctgctatgattctggaggtggaataa

SEQ ID NO: 41030 - DNA, 2175 bp, Vibrio cholerae
ttgtgctgcgggtggcttaggcgctgctatgattctggaggtggaataatggataacaacaatgcatttcagctctcgtttgatgagcagcattacgcttggctggcgattgatgtcccgggcgaaaaaatgaataccctgcaagcggcatttgcagaagagatgcaagccgtttttgcaacgctcaatgaaaagcgaggacagatcaaagggctgattatccactctcttaagccggataactttattgcgggcgcggatgtccgcatgctggaagcttgccaatcggtacatgaagcacaagcgttagcctcgcaggggcaacagatgttccagcagcttgccgatttgcctttccctgtggtcgcggcgattcacggcccttgcttaggcggtggtttagaattggctctggcgtgtgattatcgtgtctgtactgaagatgaggtaacacgtctaggcttaccagaagtgatgttaggtttgcttccgggctctggtggtacgcagcgtttaccacgtttgattggtttactgcctgcgctggacctcatcttaacgggcaaacaattgcgtgccaaaaaggccaaaaaattgggtgtggttgatgcatgtgttccgcactcagtactgttggatgtggccaaacgtcttctagaagaaaaagggcacaaaaagcgcgctcaagttacgctaccgatcaaagaaaaactgctcgccaataccgacttggggcgtaagttgatttttgaccaagcggccaagaaaacgcagcagaaaacccgtggcaactaccccgcagcgcaagccattttagaggtcattcaatatggcctagaaaaagggatgcatgccggcttggaatatgaagccaagcgtttcgctgaactggtgatgacccgagaatcgaaagcactgcgctccattttctttgcgaccacagagatgaaaaaagatctcggtgcggatgccaaacccgcacctgtggcggctgtgggcgtgctcggtggtggtttgatgggggctggcatcagtcacgttactgtggcgaaagccaaaacatcggtgcgcatcaaagatgtggcgaatgatggtgtgctcaatgccctcaattacaactacaagctgtttgataagcagagacagcgcaagattttgactaaagcacagttgcaagcgcagatgtcgcagctctcgggtgggactggctttgtgggttttgatcgctgtgatgtagtgatagaggctgtgtttgaagacctgaaacttaagcaacaaatggtggcggatattgaagcgaatgccaaaccgacaacgatttttgcgaccaacacatcctcgctgccgatccatcagatcgcgagccaagcgcagcgtccgcaaaatattgtgggtttacattatttcagcccagttgaaaaaatgccgttggtggaagtgattcctcacgcgaccacctcggatgaaaccattgcgaccgtggtgacattggcacgtaagcagggcaaaacaccgattgttgttaaagactgtgccggtttttatgtcaaccgcattttagcgccttatatgaatgaagccgcgcaagtgctgatggcgggtgaacctatcgaaaaactcgatgctgcgttactggattttggtttcccagtggggcctatcaccttgcttgatgaagtaggggtcgatatcggagccaagatcatgccgattttggttaaagagcttgggccgcgtttccaaggaccggacgtgtttgatgtgctgttgaaagataaccgtaaaggccggaaaagcggtaaaggtttctacacctacaaaggcagcaagaagaaagaagtcgataaatccgtttataaactgctgaagttaaccccggaatctaagctaaacgacaaagaaatcgcgatgcgttgcttgttgcctatgctcaatgaggcggttcgttgtctcgatgaaggcattattcgcagtgcacgtgatggcgatatgggcgcgatttttggcatcggtttcccgccgttcttaggtgggcctttccgttacatggacacgcttggtttaaccaaagtggtggaaatgatgaaccaacacaccgagaaatatggagagcggtttgctccatgtgacggtttgttgacgagagcgggattgggcgagaagttctacccctag

SEQ ID NO: 41031 - DNA, 549 bp, Vibrio cholerae
atggaagcgctcgatttattgctcaaccgtcgttcaattgccaaattggatgcgccagcaccacaaaatgaggcattggataatattctgcgcgcgggtttgcgcgctccagatcatggtgctttgactccatggcgttttgtggttgcacaaggtgaagggttagccaaacttgccgccattttagagcaagcggagattgccaacggcagtgatgaagcggtgatcagtaaagcgaaaaatgcgccttttcgcgcccccatggtgatcacagtgatcgctaaagtcactcacagtgaaaagatccctgcgtttgagcagcatctatccgccggttgtgcagtacaagccatgcaaatggcggccatagcacaagggtttcagggaatttggcgctctggaagctggatgttccatccggttgtccgtcgtgctttcaatgtacaaggcgaagatcacattgtcggttttctctatcttgggactcccgggactacggcagctaaagtgcccgaacgtgagcttagcaagtatgtggagtatctctaa

SEQ ID NO: 41032 - DNA, 2079 bp, Vibrio cholerae
atgagttatcttgctttagcacgcaaatggcgtccgacacgatttagcgaagtggtcggacaatcccatgttttaaccgctttagagaacgctttggcgcaaaaccgtttgcaccatgcgtacttgtttagtggcactcgaggcgtgggtaagaccaccataggtcgtttgtttgcgaaggggctcaactgcgagacgggcataacggctacgccttgcggccagtgtgcaacctgtcaagaaattgatcagggacgctttgtggatctgctcgagattgacgctgcatcacgcaccaaagtggaagatacgcgcgagctactcgacaacgtgcagtacaaacctgcgcgtggacgcttcaaagtttacctgatcgatgaagttcatatgctctcgcgtcacagcttcaatgcgctactgaaaacgcttgaagagccgcctgagtatgtgaagtttttgctggcaaccactgatccacaaaagctgcctgtgaccatcttgtctcgctgtttgcagttccatctcaaaccgatcagtgtagaaaatatccagcagcagctcgataaagtgctgcacgccgaacagatttcgagcgacagcaaagcactcaatctgctcgcccacgctgcggatggcagtatgcgcgatgctcttagcttgaccgatcaagcgattgctttgggcaatggcgtagtgaaaagtgacatcgtcgcgcacatgctcggcacattagatacggatcattctctacatctcttgcaagccatcagcctgcaaacgccacaagcagtcatggattgcatcgaaacacttgcccaaaatggcgtagagtgggatggattactgcaacagctttcgactcaactgcatcgaattgctatgtaccaagcgttgcctgccaccttggataaatcgctgccagaggcatcgcgtattgagtcgttggccaaaaccttagcgccgcaagatgtgcagctttactaccaaattgcgctcaaaggtcgacaagatttaccactgtcacccacggcgcgaattggcattgaaatgttgatgctgcgtatgatggcgtttcgtccttctcacgtctccttggcgagtgtgattgtgccacccaatacggcagtgacagctccaacaatcgcggcaccgacttctcaaatggcggctgcagcgccgcaaccacaacccgttgctcagtcaaacgtatcgcaatctgcctcgcaagcgatgcctcaccctgtcgcaccgccaatgatggcagcacagccagtggtagaaagcgcggtgccagtcactcagcgagaagcatcacactcaataaacgctccagaagcctctgttgtcaccaataccgacacgcagagtcaagccagcatgccagccctagcagggctgcgtcatcaactgcgctctaagcgacaagaagtacaaaacaaaggcgcggatggaaaaaagtctgacgcgacatctgctactccagcatcggcgctagagcgtattgcgcagagagcacagcaagtgcaggtgtcgccagaacgcaatgatgaagatgagttggagcctgaagaggaaatctatcaatggcgtccgatgcaacctatcgaagtcgcggtaaaaagtgaagtcacgccaacgcaactgaaaaaagcgttagagcatgaaaaaacgccggaaatgggagcgaagttgattgaagaagcggtcgcgcaagacgcgtggtcggcattggttcaacggctagagactgccaaaatggttgagcaattggcgctgaattccgcttttgttcgtcaaggcgatcagatttctctgacgctgcgtccaagtcatgcccatctgcacaacgaaaaagcgcagcaagagttagaacaggcattgaatcatgtgcttggtgaagcttgttcattgaacattaccgtgggacaagagggagaaaccccccttgagctgcgtgaacggctctaccagcagaaactcacttctgcgctgcacagtttacaaactgatcccaacgtgcagtttattgagcgtcgatttaatgcacagctcgatagcgacagcgtacgacccatttaa

SEQ ID NO: 41033 - DNA, 363 bp, Vibrio cholerae
gtgaaacattcaacgataaccagagagataaagatgtttggtaaaggcggaatgggcaacctgatgaagcaagcccaacaaatgcaagagcgtatgcaaaagctgcaagaagagatcgcaaacatggaagtgaccggtgagtccggtgctggccttgtgaaagtgaccgtcacgggcagccacagcgtgcgccgtgtcaacatcgatgaaagtctgatggaagacgacaaagagatgctggaagatttgattgctgccgcattcaatgatgccgctcgtcgtatcgaagagacgcaaaaagaaaaaatggcttcaatcaccggtggaatgcaactgcctccgggcatgaaaatgccattctaa

SEQ ID NO: 41034 - DNA, 603 bp, Vibrio cholerae
atgcgtaccagtcacatgctggaacatttgatggaagcattacgctgcctgccgggcgttggcccaaaatcagcgcagcgtatggcattccatctgttacagcgcgatcgtaaaggtggtttacaactggctgaggcactgagtcaggcgatggtcgaaatcggccattgccaggaatgccgaacttttactgagcaggatgtttgccacatctgtagcaacccaaaacgtaaagaaaatggtcagttgtgtgtggttgaaagcccagcagatattgcggcgctagaagctaccggtcaattttctggtcgctattttgtgttgatggggcacttatcaccgctggatggtattggcccgagcgatattggcctcgatacgctggattatcgcttgcaacgcggtgatatcagtgaggtgatcctcgccactaacccgacggtggaaggtgaggcgaccgcgcaatacattgccgagttgtgtcgtgagcatcaagtcaccgcaagccgcattgcacatggtgttcccgtgggcggcgaacttgagttggtggatggcacgaccttatcccattcgctgttgggccgtcacaaactgttttaa

SEQ ID NO: 41035 - DNA, 744 bp, Vibrio cholerae
gtgaattattcagtctcaacagacgctttgaaagagaaagtgattttagtcaccggagcgggtgatggtattggtaagcaagcggcgatcagtttcgcggcgcacggcgcgaccgtgattttacttggccgtaccgtgaaaaagctcgaacaaacctatgatgctattgaagcagcgggttatccgacaccggcgattgttcctttagatatgaaaggcgcaaccaaacaaaattatctggatatggtcgatacaatagaagatcaatttggccgtttggatggcgtattacacaatgccagcttgcttggcgtactcagccccttcgatcaaattggcgaagacagcttcgatgaagtgatgcaagtgaacgtgaaagcacagttccttatgactcaagcgctgctaccgctgctgcacaaatcagccgatgctcgaattgtgtttaccacgtctaccgtaggtcatattggccgtgctttctgggcaacttacgcgatttctaagtttgcgactgaaggtatgatgcaaattctggccgatgaattgagtgaaagcaccattcgagtcaatgcgattaacccgggcggcactcgcaccgcgatgcgcgcgaaagcctacccagcagaggatgcagacaagttaaaaacaccgctcgatattatgccactctatctgtacttgatggctccagaaggccgtgaagtgcacggtcaatgtattgatgcccagccaaagaaataa

SEQ ID NO: 41036 - DNA, 432 bp, Vibrio cholerae
atgaaaaaggttctacttattgttatctctatcctgtttggttctgtactcgtaggctgccaaatgaatgaatccaacaagacacaagataaaatccaatcgattacggggagtgtggcataccgtgaacgcattgcgttgccggataatgcggtggtgacagtttacctacaagacgtttccttggctgatgcgccagcgacggttatcgcaaaacagaacttcatcactaatggtatgcaagtaccacttgaattcaacctagcgtatgacagccgcaagatcaaagcgagtcaccgttacagtgtgagtgcgcgtatcgaagtcgacggtaagctacgtttcatcacggatactcattacggtgtgatcaccgatcctgaagcgactaaacacgtacctatgatgctgattggtgtgcatggcgaataa

SEQ ID NO: 41037 - DNA, 342 bp, Vibrio cholerae
atgttaccccaccagtttttcaaattactcgccgatgaaacgcgggtgcgctgcttactgatgattgctcgggaagagaaggtttgtgtggctgaacttaccgaagctttgaatgagagtcagccgaaaatttcccgccatttggcgttgctgcgtgccagcggcgtggtggtcgatatccgtcaggggcagtgggtgttttatcgtatttccgatcaactgccgggatggatgcgcaagcagatccaagggttggtggagtccaactgtcttaaacaagaataccagcaagatattcagcgcctcgccgagatgacctctcgtcctcagtgctgtgtgtaa

SEQ ID NO: 41038 - DNA, 975 bp, Vibrio cholerae
atgatgagtttattagatgtcaaagatctgcgcgtagaattctctacccaagacggtattgtcaccgcagtgaacgatctcaatttctctcttaagcagggagaaactttaggtattgtgggcgaatccggctcaggaaaatcacaaaccgtatttgccatcatggggctactcgccaaaaacggcaaaatcaccggtagcgcgaaatttgagggtaaagaaatcctcaacttgccagagcgtgaactgaataaagtgcgcgccgagcaaatcgcgatgatttttcaagacccaatgacttcacttaatccctacatgaaagtgagcgatcagctgatggaagtgctgatgctgcataaaggtatgggtaaagcggaggcgtttgaagagtcagtacgcatgctggaagcggtaaagatcccagaagcgcgtaagcgtatcaccatgtatccgcacgagttttctggcggtatgcgtcaacgtgtgatgattgcgatggctttgctgtgtcgcccgaaactgctgattgccgatgaaccgaccaccgcactcgacgttactgttcaagcgcaaatcatggagctgcttaacgaactgaaacgtgagttcaataccgcaatcatcatgatcacccacgatctgggggtggtggctggctcttgcgataaagtgctggtgatgtatgccggccgtactatggagtacggttcagtaaacgatattttctacaacccaagccacccttacgcagaaggtttgctgagcgcgatcccgcgcttggataccgaaggggaagtgttgccgacgattccgggcaacccacctaacttgctgcgtttgcctgtcggctgtccttatcaagaacgctgccatcgcgtgacggatcgctgtaagcgagaagctccgatcttgctgccgtttggtaacagtcgtcaacgtgcgtgtttttctgattgggaggcttggacaaaatga

SEQ ID NO: 41039 - DNA, 1011 bp, Vibrio cholerae
ttgggaggcttggacaaaatgagcgtagagaaaaaattattactggacgttaaagatcttaaagtccatttcaacattaccccgaaatcggcatggccatggaccaaacccgttaccttgaaagcggttgatggggttaacgtgcgtctgtatgaaggcgaaactttaggggtagtgggtgagtcaggttgtggtaaatcgacgtttgcacgcgccattattggtttggtgcaagcgactcacggtgaagtggtgtggttaggtcaggatttaacacgtatgcaggaagtcaaacgccgtgcaacgcgtaagcaaatccaaatgatcttccaagaccctctggcatcgttaaacccgagaatgacggtcggtgatatcattgctgagccactacaaaccttctatcccgagctttccaagcaagaagtgaaagatcgggtaaaagagatgatggccaaggttgggttactgcctaacgtgatcaaccgttatccgcatgagttttcaggcggtcagtgtcagcgtatcggtattgctcgcgcgctgatcctcaaacctaagatgatcatctgtgatgaaccggtttccgctctggatgtgtcgattcaggctcaggtcgttaaccttctcaaagagctgcaaaaagagctcggtttaagtctggtgttcatcgcgcacgatctctcggtggtaaagcacatctcagatcgcgtgttggtcatgtatttgggtaatgcggtagagttaggcgtctctaaagaactgtttgccaaccctaaacacccttataccaaggcattaatgtctgcagtgcctattcctgaccccaacatcgagcgcaataagaccattcagatgttggaaggggatctgccttcaccgatgaacccgccttcaggttgtgtgttccgtactcgttgcccgcaagccacggcagagtgtgcgaagacgaaaccagtgattaaaggttcggatattcactcagtctcttgtttatacgctgaggcataa

SEQ ID NO: 41040 - DNA, 948 bp, Vibrio cholerae
atgggcaagctaattaaaggcaaatggcacgatgtttggtacgacaccaaacaacatgatggcgaatttatacgcgaagatgcagggtttcgtgactgggtgaaagcgacgcctgatgcgcaatttgctgcagaatctggccgttatcatctctatgtctctttggcgtgtccgtgggcacatcgcaccttgatttttcgtgctctcaaagggctgcaaacgcatattgatgtgacgattgtctgtccggatatgctctcacatggttggcagtttggcataccagagccgctgtatggctacactcaactacatcaactttatacccatgctaaagccgattacaccggacgagtcacggtgcctgtgttgtgggataaaaaacttcacacgattgtgagcaatgaatcttccgaaatcatccgcatgttcaacagtgcatttaatgagttaacgggcaatcaaaccgattattaccctcaagcgctgcgcacagtgattgatgagtggaatgagttcatctatcccaacatcaacaatggggtatatcgttgtggttttgcgaccacgcaaaaagcctatgaagaagcgtttgaagcgctgtttgcggcgttggataaagttgatcagcatctgacaacgcatcgctatttagcgggaaaccaaatcaccgaagcggactggcgtttgtttaccaccttagtgcgttttgatgcggtgtatgtcgggcatttcaaatgtaaccgccagcgtattacggattacccacatctgagcggttatttaagggagttataccaagtccccggcatccaagagacggtcgatttttaccacattaaacgccattactatttcagtcataccacgatcaaccccactcaagttgtgccagtcgggccgcaagtggatctactcagtccacaccagcgtgaacgaattggttga

SEQ ID NO: 41041 - DNA, 2145 bp, Vibrio cholerae
atgtcccgtactattatgcttatcccaatcagcgctggcgtcggtctgaccagcgtgagcatgggtctcctgcgcgccatggagcgtaaaggggttagcgtttctttctataagcctatcgcgcagccacgtactggcgatgatcaacctgacctgacgtctactgtcatgagccgcaacagcgacatcaagatcggccagccgatgagtatgtctgccgccgagactctgatcggtagcgagaagatggacgttctgctggaaaccgtggttgagcgttacaaccagatcaacaaagatgcagaagtgactctgatcgaaggtctggttccaacgcgtaagcacccttttgctaaccaagtgaacgcggagatcgccaacactctcggtgcagaaattgtgttcgttgccactccgggtactgataacccaacgcaactgaaagagcgcattgaagtcgcgtgctctaactttggtggcaccaagaacaagagcatctctggcgttatcatcaacaagctgaatgcccctgttgatgaagctggccgtactcgtcctgacctgtcagagatctttgatgatgctgaccatgcgaaacaagctaaccttgaagtgatgcagatcttcaacaccagcccaattcgtgtgctgggctgtgtaccatggagcatcgacctgattgcgactcgtgctatcgatatggcgaagcacctgaaagctgagatcatcaaccaaggtgatatcaatactcgtcgtatcaagagcatcactttctgtgctcgctctatcccgaacatgattgagcacttcaaaccaggctcactcctagtaacctccgctgatcgtcctgacgtgattgtggctgcggcactcgcagcaatgaacggtgtggaaatcggtgccgtactgctgactggcggctacgacatcccacgtgaactggttagcctatgtaagcctgcttttgacacgggtctgcccattttcaaagcgcaaggtaacacttggcaaacgtcgctgaacctacaaagcttcagccttgaagttccagccgatgacaaagagcgtatcgaattcatcagcgaacacgtggcaagccacattgacggcccatgggtagactctctgactgaaggtgcgcaagcgtctcgtcgcttgagcccaccagccttccgttaccagctgactgaattggctcgtagcgcgaacaagcgtatcgtactgccagaaggtgatgagccacgtactgtgaaagcagctgctatctgtgctgaacgcggtattgcacagtgtgtacttctgggtaacccagaagagatcaagcgtgttgctgctcagcaaggtgttgaactcggctctggtatcgaaatcatcgatccaaaagtggcacaagagaaatacgtagcacgtctggttgaactgcgtaagagcaaaggcatgactgaagtggtggcgcgcgagcaactggaagataccgttgttctcggcactatgatgcttgagcgtaacgaagttgacggtctggtttctggtgcggttcacaccacagcaaacaccattcgtccaccactacaaatcatcaagactgcgccgaatgcgtctctggtttcatcgatcttctttatgctgctgcctgatcaggtactggtatacggtgactgtgcgatcaacccagatccaaacgcagagcaactggctgagattgctatccagtctgccgactctgcagcggccttcggtattgagcctcgcgtagcgatgatctcttactcgaccggtacttctggtcaaggtgcagacgttgataaagtgcgcgaagcaactcgcatcgccaaagaaaaacgtccagatctcgtgattgatggccctttgcaatacgacgcggcaatcatggaaaacgtagcggcttctaaagcgcctaactcgccagtggcaggtaaagcgaccgtattcgtattcccagatctgaacacaggtaacacgacttacaaagcggtacaacgttcagcggatctagtgtctatcggtcctatgctgcaaggtatgcgtaagccagttaacgacctgtctcgtggcgcattggttgacgatatcgtctacaccatcgccctgacggctatccaagcaggtcaagagcagaaataa

SEQ ID NO: 41042 - DNA, 459 bp, Vibrio cholerae
gtggatatgaataataaagtcggcatagtgcatagcctaaaagatggccagaagtacatggatatttggccgatgcgcaaagagttaaatccactgttccctgagcaacgcgtgattaaagccacacgctttgcgattaaagtgatgcctgcggttgcggcgatcagcgtgctgacacaaatggtgtttgccaacacgcaggccatgcctcaggcgattgtggtcgctttatttgctatgagcttgccactgcaaggcatttggtggctcggtcaccgtgccaatacccaactacctccggcgcttgcgagctggtatcgcgaactctatatgaagatcgtcgaaactggttttgcactggagccgatcaaaagcaaaccgcgctataaagagctcgcgcaagtgttgaatcgtgcgtttcgacaactggatgatactgcgctagaacgctggttttaa

SEQ ID NO: 41043 - DNA, 972 bp, Vibrio cholerae
atgcgagttattttaggcccgatggagggcgtgttagatcatttgatgcgtgacatgctgacacaaatcaatgactacgatttctgcgtcaccgaatttgtacgcgtagtgaatctgctgctgcctgatcatgtgttttatcgcctctgtcctgaattgcaacagggttctaaaactccgtccggtgttccggtaaaagtacaactgcttggccaagacccacactggatggccgaaaacgcgatccgcgctgctgagcttggggcttatggcatcgatctaaatttcggctgccctgccaaaatggtcaatcagagcaaaggtggcgcggctcttttgcagcatcccgagttgatttatcaggtggtcaaagcgtgtcgtgacgcagtaccggcgcacattcctgtttcggcgaaaatccgcttaggttgggaagatccggaagattgttttgagattgtcgatgccgttgcgcaagctaaagccgatgagctcactgtgcacgcgcgcaccaaagccggaggctacaaggccagcgaaatcaaatggcattacattgaccagatccgccaaaaatgcagtattccattgattgctaacggtgaagtgtggaattacgccgatggtcaagcttgcatccaaaccacaggtgtcgattcactcatggtgtgccgcggcgcgctcaacgtgccgaatttaggcaatgtggtcaaacacaatcacgccgccatgccttggcatgaagtggtggatttgttgctgcgctacacgcaatttgaagtccgtggtgacaaaggcaaatactacccaaaccgtattaagcagtggtttgcttatctgcgccacgcctaccctcaggctaatgagctgtttggtgagttacgtacgttgactcaagtcgagccgatcgttgatcagttacatcgctatcgcgatcaactccatcatgctgcggccgagctacctgtctaa

SEQ ID NO: 41044 - DNA, 1350 bp, Vibrio cholerae
gtgagtaattacagcttagatttttccggcgacgaagattttcgtccgttagctgctcgtatgcgtccacaaacggtggagcagtatataggtcagcaacacatcttagggccgggaaaaccgctgcgccgtgcattagaagcggggcatattcactcgatgattctttggggacctccgggcaccggaaaaaccactttagccgaagtggcagccaactacgccaatgcggaagtggaacgcgtatcggcggtgacgtccggagtcaaagagatccgtgccgcgatcgaaaaagcgcgtgagaacaaactcagtggtcgacgcactattctgtttgtcgacgaagtccatcgctttaataaatcgcagcaagatgcgtttttgccgcatattgaagatggtacggtcacttttattggcgcaaccacggagaacccttcttttgagcttaataacgcgctgctttcccgcgcgcgggtttataagctcacctcactcaatcaacaagaaattctgcaagctctgcatcaagcgattgccgatactgaacgcgggcttggcaaagtggcggcggtatttgctgataatgttttagatcgcctagccgaactggtcaatggcgatgcgcgcatgtcgctcaattatcttgaactgctgtacgacatggctcgcgaagatgatcagggacgcaagcagattgatctgcctttattggctgaagtcgctggtgaaaaagtgtcgcgctttgataacaagggcgatatttggtatgacctgatttccgctgtacacaaatcgattcgaggttccgatcccgatgcagcgctgtactgggcggcgcggatgatttccgcaggctgtgaccctttgtatatcgcgcgccgtctgctcgcgattgcctctgaagatgttggtaatgccgacccacggggcatgcaagtggcactcgcagcgtgggattgctttacccgtgtggggcctgcagaaggcgagcgcgcgattgctcaagcgattgtctacctcgcctgcgcaccgaaaagcaacgcggtgtacaccgcgtggaaacaagcgctgtcggatgcgcataatctgcctgagtttgaagtaccgccgcatctgcgtaatgccccaacgcgattgatgaaagatctcggttatggtgaggaataccgttacgcccatgatgaaccgggcgcttatgctgcaggggagtgctatttcccaccagaaatgagtggaactcgctactatcagcctactccacgcgggctagaaactaagattgccgaaaagttagcgtatctggcggatttgaacgcaaaaagcccacaaaagcgctatgaaaagtag

SEQ ID NO: 41045 - DNA, 1308 bp, Vibrio cholerae
atgctggattctaaattacttcgtactgagctggacgaaacagctgcaaaattggcacgtcgcggttttaaactcgacgtggagactatccgtactcttgaagaacaacgtaagtccattcaagtagaagttgagaatttacaatccacgcgtaactccatctccaagcaaatcggtcaactgatggcgtctggcgacaaagcgggcgctgaagcggttaaacaacaaatcggcactttgggtgacgatctggatgcgaaaaaagtggaattggatgcggttatggcgcaattggatgcgatcacccaaaccgtgcctaacattccagacgatgcagtgccaaacggtaaagacgacagcgaaaacgtagaagtttctcgttggggaacaccaaaaacttatgattttgaagtaaaagatcacgtggatttgggcgaaatgggcgacggtctggatttcgctagcgcaaccaagatcacgggtgcgcgttttgtggtgatgaaaggtcaatttgctcgtttgcaccgtgctatcgcacagttcatgttggatctgcacaccgatcaacacggttacactgagctgtatgtaccttacctagtgaacgcggaaacgctgttcggtacaggtcaattaccaaaattcggtcaagatctattccacactgagcctctgactgagaaagccagtgatgaagagccacgccgtctgtcactgatcccaaccgcagaagtgccagtgaccaacttagtgcgtgacaccattttggatgaagctgaactgcctctgaaaatgaccgcacacacgccttgtttccgctctgaggcgggttcttatggtcgtgatactcgcggtctgatccgtatgcatcagtttgataaagtggaactggtacaaatcactcgccctgaagattccatggcggcattggaagagttgactggccatgcagaaaaagttctgcaactgctggagctgccttaccgcaaagtgattctgtgtacgggcgacatgggctttggctcgtgcaaaacttacgacttggaagtttgggttccagcgcagaagacgtaccgtgaaatctcttcttgttcaaacatgtgggatttccaagcgcgtcgtatgcaagcgcgtttccgccgcaaaggtgagaagaaacctgagttggtgcacacgctgaacggctctggtctggcggtgggtcgtaccatggtcgcgattttggaaaactaccaagaagccgatggtcgcattgcgatccctgcggtactgcaaaagtacatgggcggtttaacccatatcggttaa

SEQ ID NO: 41046 - DNA, 1287 bp, Vibrio cholerae
atgatgatggatttagccttcgaccgttgccacatctggcatccctacacttcgaccttgacacctctgacctgttatccggtaagccgagccgatggcgtaatgatcacacttgaagatgggcgcagcttagttgacggcatgtcctcttggtgggcagcgatccacggttacaatcaccccaaactcaatcaagcggcgcaccagcaaatcgagcagatgtcacacatcatgtttggtgggttaactcatcaaccggcgattgagctttgccaaaagctactcaagctcgcgcccaacaatttacagcaagtgtttctcgccgattcaggttcggttgcggtggaagtgagccttaaaatggcgttgcagtattggcacagcaaaggtcaaccgagagcaaagtttctcaccctacgccacggctaccacggcgataccttcgccgcgatgtcagtgaccgatccagataactccatgcatagcctgtacaaaggttttctgcccgagcatattttcgctaattcgccagaaggcggattttttgatgcgtgggatgagcgtgatattgccgattttcgtcacaaattgactgaacatcaccaccagattgccgccgtaatccttgaacctatcgtgcaaggggctggtggtatgcgtatctatcaccccgagtttttacgccaagttagagctttgtgtgacgaatttggtgtactgctgattttggatgagattgcgaccggctttggccgcacaggcaaactctttgcttgtgaacatgcgggaattcaaccggatattctctgtgtgggcaaggcgctgactggcggatacatgacgctatccgctaccctcactacccaacaagtggccgataccgtttgtgcgggggaagcaggctgctttatgcatggcccaacttttatgggcaatccgctggcttgcgcggtggcaagcgccagtttatcgctaattgagcaaggtgattggcaacagcaagtcgcaaacattgaagcgttttttgccgagcaactgcctaaactcaacgattcgccacgggtgaaacagactcgttggctaggcgctattggtgtggtggagacgcatctcccggtcaatatggaagtgattcaggctctctttgtggagcatggagtttggatccgcccctttggtcggttgatttacttgatgccaccctatattagtcaacctgaacatctgcaaaagctggtggatgcaatggcagccgcgttaaaccaaccagactgctttaaacaatag

SEQ ID NO: 41047 - DNA, 1053 bp, Vibrio cholerae
gtggaagttcgtcataactggacggtcgctgaggtcaaagcgttactggataaaccttttatggatctgctgtttgaagcgcagcaggtgcatcgtcttcatcatccgcacaaccatgtgcaggtcagcacgctgctgtcgatcaaaactggcgcttgtccagaagattgcaaatattgcccgcaaagtgctcactaccgtactgatgtagataaagagcgtttgatggaagtcgagcgcgtattggatgcggcgcaaaaagccaaaaattcaggctcgacccgtttttgtatgggcgcggcgtggaagaatccgaaagagcgtgatatgccgctgctcaaagagatgatccgcggcgtgaaggatatggggctagaaacctgcatgacgctgggtatgttgacgccagatcaagcgcagcaattggcgcaagcggggctggattattacaaccacaaccttgatacctctccggaattttatggcaacatcatcaccacacgcacataccaagatcgcctagataccttatcgcacgtgcgtgatgccgggatgaagatctgctcggggggcattatcggcatgggcgaaagcaccaatgaccgcgctgggttattggttgagctcgcgaatttgccgactcatccggaaagtgtgccgatcaacatgctggtcaaagtgaaaggtacaccactggaacaagtcgatgatgtggaaccctttgattttgtgcgtttgattgcggtagcgcgcattatgatgccgaaatctgcggttcgcctttcagctggacgcgagaagatgaatgagcagatgcaggcgctgtgctttatggcaggagccaattcgattttctacggttgcaaactgctgaccacccccaacccagcggaagacagcgatatgctgctgtttaaaaagctaggaattaaccgcgaacaagtggcgcaaaagcccgatgaaatcacggaaaatgagttgttggatagagtcgttgaacgagtagccgcgcgcccaaccgccagcgatttattttatgacgctgcgctttaa

SEQ ID NO: 41048 - DNA, 1371 bp, Vibrio cholerae
atggaactgtcagcattgactgctgtttcaccggtagatggccgctacggaagtaaaacgattgcgttacgcagtatcttcagtgagtttggtctcctaaagtaccgcactatcgttgaaattcgctggctacaaaagctagccgccactgctgagatcgcagaagtgcctgcattcagtgccgaagcgaatcaattccttgatgcgattgccgccaacttcaatgaggcggatgcactccgtatcaaagagattgaacgcaccaccaaccacgatgtaaaagccgtggaatacttcctgaaagagaaagtagcggccatgcctgagctgcatgccgtcaacgagttcattcactttgcttgtacttccgaagacatcaacaacacttcacatgcgttgatgctcaaagaagcgcgtgacacggtgatcctgcctgaaattcgcaacgtgattgacgcaattcgcaaactggccgaagagtaccgcgatattccgctgctttctcgtactcacggtcagccagcctctccatcgaccatgggtaaagagatggcgaacgtggcctaccgcatggagcgccaatacaagcagatcgctaacgtagaaatcctagccaaaatcaacggtgcggtgggtaactacaacgcgcacctttctgcttacccaacggtagattggcataaattcagcgaagagttcatcactgaatctttgggcgtagattggaacccgtacaccacgcaaatcgagccgcatgattacattgctgagctgtttgaagcggtggcacgttttaacaccatcttgatcgattttgatcgtgatgtttggggttacattgccctgggccacttcaaacaaagaaccatcgcgggtgaaattggttcttctaccatgccacacaaagtcaacccaatcgactttgaaaactcagaaggtaacttgggtctggcgaatgcggtatttacccatttagcgcaaaagctgcctatctctcgttggcaacgtgacctaacggattctaccgtgctgcgtaacctcggtgtgggtgtcggctatgccatcatcgcttatacctcaactttgaaaggcatcagcaagctggaagtgaaccgtgacgcactacttgcagaactggatcacaactgggaagttctggcagagccaatccaaactgtgatgcgccgctacggcattgaaaagccatatgagaagctcaaagaactgactcgtggtaagcgagtagatggcgaagcgatgcgtcaattcattgatggtttagcactgccagcggaagagaaaactcgcttgaaagccatgacaccagccagctatattggctacgcgattgagctgacggacaagctgtaa

SEQ ID NO: 41049 - DNA, 1119 bp, Vibrio cholerae
gtgatgtctgtagagcacagcgcaaacagccaaaagaaagtgattgtcggtatgtctggaggggttgattcctctgtttcagcctatcttctcaagcaacagggttaccaagtggaaggcctgtttatgaaaaactgggaagaagacgataacgaagagtattgtactgcggcagaagatttagcagatgctcaggcggtgtgtgacaaactcggcatcccacttcataccattaacttcgcagcagaatactgggataacgtatttgaatacttcctcgcggaatataaggcgggacgtactcctaacccagatattttgtgtaataaagagatcaaatttaaagccttcttagaatttgctgatgaagtgctggatgcggactacattgctatggggcactatgtgcgtcgcaccttcccgcagaatggcgaaaaaccgcaaatgctgcgcggtttagacggtaataaagaccaaagctacttcctttatactctgagtcatgagcaagtggcgcgtaccctattcccagtaggtgaactagaaaaacctgaagtacgccgcattgccgaagaacaaggcttaattaccgcgaagaagaaagattcaaccggtatttgttttatcggtgaacgcaaatttaccgacttcttatctcgctatttgccagcccaaccgggtaaaattgaaaccccggaaggcaaagtgattggtgagcaccaaggcttgatgtaccacactctcggacagcgtaaaggtctgcacattggtggtatgaaagagagcagcgaacagccatggtatgtggcggataaagatctcaaacgcaacgtactcatcgcggtacaaggcgcggatcatcccctactcaaatcgcatggtttggtggcggctcagttacattgggttgatcgcacccccatcacagaacctgtacgttgcagcgtgaagacgcgttatcgtcaaagtgacatcgcttgtaccatcattcccctgagtgatgaccgcatcaaggtgatgtttgacgagccacaagtggccgtgactccgggacaatccgccgtcttttatcaaggtgaaatctgccttggtggcggcattattgaagagcgcatttaa

SEQ ID NO: 41050 - DNA, 1305 bp, Vibrio cholerae
atgaaatttcctggccaacgcaaatctaagcattattttccggttcacgcgcgtgatcctctggtcattcaagcgcaagaaaataagaagatgtcgcgcacccacattatcggtattgatcaaaccctagtggatattgaggccaaagtcgattcagatttgattgaacgttatggtttaagtaaaggacactcattggtcattgatgatcatgctgcagaagcgttatacaacgaattaaaagagcagcgtttgattaccaatgaatatgcaggtggaaccatagggaatacgctgcataattactccgtgcttgcggatgatcgctccacgctactgggtgtgatgagccaagatattaaaattggcagttacggttatcgctatctgtgtaacacttctagccgcatggatctcaactatctgcaaggtgtagatggcgcgattggccgctgctttgccttaattaccgaagatggtgaacgtactttcgcgatcagcgaaggtcaaatgaaccaattacgcccagacagtattcctgaaaaaatatttgctagtgcctctgcattagtgatcacggcttatttagttcgttgtaaagaaggcgatccaatgccggaagcaacaatgcgtgccattgaatatgccaaaaaatatgatgtgcctgtggtattaaccctaggtactaaatttgttattcaagatgatccgaaattctggcaagaatttttacgtgatcatgtcactgtggtggcaatgaatgaagatgaagcattagctttaacaggagaaagcgatccgctcgcagcctcagataaagcgttagattgggttgatttagtactgtgtactgcaggcccagtcggtttatttatggcgggttacaccgaagattccgctaaacgtgaaacgtcattaccgttattaccgggatcggtcccagaatttaaccgctatgaatttagccgccctgcccgtaaagagagttgtataaatcctattcgtgtttattcacatatttcaccgtatatgggcggtccagagaagataaaaaataccaatggtgctggagacgcagcattatccgctctactgcatgatatggcggctaataaataccataaagaaaacgtccctaactcaagtaagcatcaacatgagtttttaacctattcttctttctctcaagtttgcaaatactctaaccgtgcaagttatgaagtattggcgcagcactcaccacgtctttcacgtggtcttcctgagcgagaagatagccttgaagaggcttattgggaaagataa

SEQ ID NO: 41051 - DNA, 1602 bp, Vibrio cholerae
atgaatttaatcgattttgcttcttcgccactctctgttttaccaccgctggtggcattgagtttggctattgtgactcgccgtgtactcctttctcttggcgtggggatttttttaggtgctttactgctggctgattattctattggtcagtcgttgcaatatatcgccacacaagtgggtagcgtgtttgtcaaagagggcgcgatcaatgcttggaatatgagtattgtcggctttttactgttactgggtatgatgactgcgctactgacgttgtcgggcggcactcgcgcttttgctcagtgggcacaagtccgggtgaaaagtaaacgtggctctaaattactggcggcatttttaggcgtattcatttttgttgacgactattttaatagcctcgctgtcggttctatttctcgcccagtgaccgatcgtttttacgtttcgcgtgccaaactcgcttacattctggattccactgctgcgcctatgtgtgtggtcatgcccgcctcaagttggggtgcgtatatcatgaccattatcggtggcattttagtttcgcacggtatcgaggagtattccgcattaggtgcttatctgcgtttagtgccgatgaacttctatgcgatctttgcgttgctgatggtatttgcggtggtgtggttccaaatggatatcggccagatgcgcaagcatgaaattgccgcttctcaagggcgtggttttgatgaagacccgagtacagatacacaagaggcccacgaactcaatgaagagcttgatattcgtgaaagtgaacgcggtacagtactcgatctcgtgttgccgattgtgtttttagtcgttgcgaccattggtgcgatgatttggactggcgcaagtgcattagcggaaagtggtcagtcgtttgatatttttggggcgtttgaaaataccaatgttggtacttcattggtatatggtggattagttggtctggcgatggcttttgtgaccgtgttgcgccaaaaactaccgacggctgaaatcgcaaaaaccttatggattggtgcgaaatcgatgtttggtgcaattttgatcctgatttttgcgtggaccataggttctgtcatcggtgacatgaagaccggtgcttatctctcttctctcgtacaaggcaatattgacccacattggcttccggtcattctgtttgtgctgtctggtgcgatggcgttttctaccggtacatcatggggcacttttggcatcatgctgccgattgcgggtgacatggctggcgctacagatattgcacttatgctgccgatgctcggtgcggtacttgccggttccgtatttggcgatcactgttcgccgatttcagataccacgattctctcttcgacgggagcacgttgtcatcatattgaccatgttgcgactcaactgccttacgcattggcggttgcgttagtgtcagcgattggttacgtggtgctgggaatttttgcttcactcgggctggctttagctgccgcatccgtgagttttgtggtggtttgcttaatttttgcagcactatcaaaagccaaagtgagcaaacaggtgtctgcctaa

SEQ ID NO: 41052 - DNA, 915 bp, Vibrio cholerae
ttgcaaaggaagaatgacatgcaaacacaacgactaagaatcgcgatacagaaaaaaggccgcctgagccaagagtgccaagaactgctgaaaaaatgcggtgtgaaattcaacatcatgggcgagcgcttggtggttcattcactgaatatgccgattgacctgttgttggtgcgtgacgatgacattccaggactgatcatggatggggtggtggatttgggttttgttggtgaaaacgtgcttgaagaaacacgtttagatcgcctagcactcaaccaacgtaacgaatttaccactcttcgtcgtatggactttggtggttgccgtctgtcgatcgcgattgaaaaagatgctgagtatcgtggcccgcaagatctgaatggtaagcgtattgccaccacctacccacaactgctcaaagcttatatggatcgccaaggcgtggatttcagcacctgtatgttgacggggtcggttgaagttgcaccgcgcgcgggattagccgatgcgattgcggatctggtctccactggcgcgaccttagaagccaacggtcttaaagaagtggaagtgatttttgaatccaaagcgacgcttattcagcgcccaggtgcttttgctgccgataaagctgcactgatcgataaactcctcactcgcatgcacggcgtgcaacaagccaaagaatcgaaatacatcatgctgcacgctccggttgagaagttggcgcaaatcaaaaccttgttgcccggagcggaagacccaacagtgcttcccttgtctgccgacaaatccaaagtcgcggtacacatggtgagttcggaaaatctattctgggaaaccatggagcagctgaaagccctcggtgctagctcaattttggtgttaccgattgaaaaaatgatggagtaa

SEQ ID NO: 41053 - DNA, 906 bp, Vibrio cholerae
atgctgtcagggatgatctttgtttttgcaccactcgtggtgggttacctattcattattcgtaacccatctcatctccatcgtttgagtcgagcaacctcgcatctcgtttacgtcatcttatttttgatgggtctcagtctcgcgggcttagataacctacaaagtaacttacaaaccattgtcaaatacacggccgtttttttcgtggtgctagggacatgcaacctcttagtcttacctttagttgatcgctatctgccacttagtaccgatatcactcataaaaaagtcccgctctcaagcatgatgttggagtctgcgaagcttattttggtggtcggtgcaggcctggtggcgggtgtgttactgaatcaagacttacattgggtcgaatccgcgagcggctggatcctcttccttttgctgttttttattggtattcaactgcgcaacagtggtttatcgctcaaacagatcttgctaaataagcacggaatggttattgcggcagtgatcatcctaaccagttggctaggtggcgtgattgctgcgtggctactcgacatgccaatttaccaagcactggcgatggcctcaggttttggctggtactcattagccggtatcttagtcggcgatgcttttgggccggtactcggcggagcctcttttatgattgagctactgcgcgagctagtcgcgctggtgttaattcccatgctgatccggcgcaaaccctgtaccgcgattggttatgcaggagcgacagccatggattttaccctgcccgtcattcaaaccactggcggtgtaaaatgtgttccggtggcgattgttagcggctttattctgagtctattggtgccggttttgatcctgttctttgtttctcttgcaagctag

SEQ ID NO: 41054 - DNA, 1776 bp, Vibrio cholerae
atgcgtagccattattgtggtcacctgaacaagtccttggtaggacaaactgtagagctgtgcggctgggttaatcgccgtcgtgatttaggcggtctgatcttcattgatatgcgagatcgtgaaggtattgttcaggtagtagtggatccggatatggcggatgtattcgccgtggctaaccaactgcgtagcgaattctgtatcaaattgaccggtgaagtgcgtgcgcgtccagaaagccaagtcaataaagagatggcaaccggtgaagtagaactgttggcacgtagccttgagatcattaaccgttcagatgttctgccgctcgatttcaaccaaaagaactcagaagagcaacgcctcaagtaccgttatttggatctgcgtcgcccagagatgagtgaccgcattaaactgcgtgcgaaagcctcaagctttgtacgccgtttcttggatacacacggtttccttgatatcgaaaccccagtgttgaccaaagcgacaccagaaggtgcgcgtgactacctagtaccaagccgtgtacacaaaggcagtttctacgcgctgccacaatcaccacagctgtttaaacagctactgatgatgtctggctttgatcgttattaccaaatcgtaaaatgtttccgtgacgaagatttgcgcgctgaccgtcaaccagaattcacccagatcgatattgaaacctctttcatgaccgcagaacaagtacgcgcagtgactgagaagatgattcgtgaaatgtggcttgaactgctgaatgtggatctgggcgattttccaatcatgccttacagcgaagcgatgcgtcgtttcggctcagacaagccagatctgcgtaacccaatggagttggtggatgtggcggatctgctgaaagacgtcgatttcaaagtgttctctggtccagcgaacgatccaaaaggccgcgttgctgcactgtgcatcccaggtggcgcagcactgactcgtaaacaaattgatgagtacaccgcatttgtggctatttacggcgcaaaaggcttggcatggctgaaagtcaacgatttggctgcgggcatggaaggtattcaatcgcctgtagcgaaattcctcactgaagagatcattcaagcgattatcgagcgtactcaagcgcaaactggcgatatcattctgttcggtgccgattctgccaaagtggttgctgaagcgctgggcgcactgcgtctgaaagcgggtaaagagttgggtattactaatgaatcggcgtgggctccattgtgggtcgtggatttcccaatgttcgaaagcgatgatgaaggtaacgtggcagcgatgcaccacccattcacatcccctctgaacctctctcctgagcagttgaaagccaacccagaagaggcgctgtcaaacgcttacgatatggtattgaacggctacgaagtcggtggtggttcagtccgtattcacaacgcagaaatgcaatcagccgtatttgacattctgggtatcacgccagaagagcaacgtctcaagtttggtttcctgctcgatgcgctgaagtttggtacgccaccacacgcaggtctggcatttggtctggatcgtctggtgatgctgctgtgcggtacggaaaacatccgtgatgtcattgccttcccgaaaacgacagccgccgcgtgtctaatgaccgatgcaccaagtttggcaaaccctgccgccctcgaagagttggcgattgcggtcaagcttgcaacgaaagataaagcgtaa

SEQ ID NO: 41055 - DNA, 579 bp, Vibrio cholerae
ttggctcagatgtacttttattactcggcaatgaatgcgggtaagtcgaccaccttattgcaatcggcgtttaactaccaagaacgcggcatgaacccactgatttttaccgccgcgatcgacgatcggtttggtgttggcaaagtgagttctcggattgggcttgaggccgaagcgcaccttttccatgccgataccgatctgttgcacgtgatcgcaacattgcatgaggctgaacctcgtcactgtattttgatggatgagtgtcagtttctctctaaagagcaggtttaccaactgaccgaagtagtggataaactggatatccctgtgctgtgttacggcttgcgtaccgattttctcggtgagctgtttgaaggcagtaaatatctactctcatgggcggataaactgattgagctgaaaaccatttgccactgtggacgcaaagccaacatggtgatccgtaccgatgagcatggcaacgccatcagcgaaggggatcaggtggcgattggcggtaatgataagtatgtttcagtctgtcgccagcactataaagaggcgttgggacgctaa

SEQ ID NO: 41056 - DNA, 1191 bp, Vibrio cholerae
atggctaaattaaacgcctattttggcgaattcggtgggcagtttgtgccacaaattttggttccggcactcgatcaactggaacaagcttttattgatgcccagcaggatgatgcttttcgcgctgaatttatgagcctactgcaagagtacgcgggtcgccccactgcgctgacactcacgcaaaacatcaccaaaggcaccaaaaccaaactctatttgaagcgtgaagatctactgcacggcggcgcgcacaaaaccaaccaagttttgggccaagccctgctcgccaaacgtatgggcaaacatgaaattatcgccgagacaggcgcaggtcaacacggtgtcgcaaccgcattagcctgtgcactgcttggcctaaaatgccgcgtgtacatgggtgcaaaagacgttgagcgccaaagcccaaacgtgttccgtatgcgcttaatgggtgccaccgtgatccctgttcattcaggttcagcaacgctaaaagatgcctgtaacgaagcgctgcgtgactggtcagccagctatgaaactgcgcattatctgctcggtactgcggcaggccctcacccattcccaaccatagtgcgtgaattccaacgcattattggtgaagaaaccaaaaaccaaatccttgctcgtgaaggtcgtttgcccgatgcggtgatcgcttgtgtcggtggcggctcaaacgcgattggtatgtttgccgatttcatcgaagaagaatccgtacgtttgatcggtattgagccagcaggtaaaggcattcatacccatcaacatggtgcaccactcaaacacggtaaaactggtatcttcttcggcatgaaagcaccgttgatgcaagatgaacatggtcaagtggaagagtcttactctgtctctgcggggctggatttcccatcggtgggtccacaacatgcttacctcaacgccattggtcgtgcggaatatgaaagcattaccgatgatgaagcactcgatgcgttccaagcgttggcacgtaacgaaggcatcattccagcgctggagtcttcacacgctctcgcgcatgcaatcaaaatggcgtatgccgaaccagacaaagagcagttgctcgtggttaacctttcgggccgaggtgataaggatattttcaccgtacacaaattacttgaagacaaaggagcgttgtaa

SEQ ID NO: 41057 - DNA, 1410 bp, Vibrio cholerae
atgtccgagcagttgtctgagcatatttccgtacaaaccgcgcaaatggcgcaagtgctggtcaaaatcgtcaacgataaataccaatggattgaagagcgcaaagccaagcaacctcttgctagctttcatccattactgactcgctcagagcgcgatttctatcaagccttgagcggcgataacaccgtattcattctcgaatgcaaaaaagcctcaccttcaaaaggattgatccgcgaagagtttgatctcgattacatcgcctctgtgtatggcgagtacgccagtgccatttcggtactgactgacgagaaatatttccaaggtcgttttgagtttttgccgcaagtgcgcgctcaagtggctcagcctgtcttgtgcaaagattttatggtcgacccgtatcaggtttatctggcgcgtcattatcaagcggatgcgattttgctgatgctgtctgtgctcaatgatgatcaatatcgtgaactggctgctgtggcgcacgaccttggtatgggcgtactcaccgaagtcagcaacgaacaagaattgaaacgtgcagttgatctgcaagcgaaagtcatcggcatcaataaccgcaatctgcgtgatttgaccaccgacctaaatcgcaccaagcagttggcgccgctcattccacaaggcaccatcattatttccgaatccggtatttatacccatcagcaggtgcgtgatttggctgaatttgccaatggtttcttgattggtagctcgctgatggcgcaaagcaatcttgaactggcggtgcgaaaaattgtgctaggtgaacataaggtgtgcggtttgactcatcctgatgatgcggtgaaagcctaccaagccggttccgtttttggtggattgatttttgttgagaagtccaaacgctttgtcgatgtagaacaagctcgcctgaccatgagcggcgcgccgctacagtatgtcggcgtgtttcaaaatcacccagcagcacaagtcgccgatattgcaaccaaacttggcttatttgcggtgcaactgcacggtgaggaagactctgcgtatgtaagcgaactgcgcgcttcccttccagaatccattgaaatttggaaagcgtatggcgtgagtgatgctttacctgagctactaccagagcacatcgataggcatctgctcgatgccaaagtcggcgaacagagtggcggcacaggacgcagttttgattggcgcttgctgccaaaacatagcgacctgatgctcgccggcggcttgagcgccgagaatgtcgcccaagcggcgcaacttggctgccgcggactcgatttcaactctggcgtggaaagcgctccgggtaaaaaagacgccaaccagttacaacaggttttccaacagttacggaattattag

SEQ ID NO: 41058 - DNA, 1062 bp, Vibrio cholerae
ttgggcattgtcttcaacgccagcgcagactcaattcgcgtaaccgcacagggagagaatgttatgcaaaccattattaataaactctatgaacagcaagggctcacgcaagccgagagccaacagcttttcgaccaaattattcgcggtgaaatggatcctgtattgatggcggcggtactgactgcactgaaaatcaaaggcgaaacgccagatgaaatcgcgggtgcggctaaagccctgctcgccaacgccaatccatttccgcgtcctgattacgactttgccgatatcgtcggtaccggtggcgatggctcaaacaccatcaacatctcaaccaccgccgcatttgtcgccgcagcgtgtggcgtgaaagtcgccaaacacggcaaccgtggggtatcgagcaaatccggctcttccgatctgctcagctcatttgggatcaaccttgccatgagcgcgcaagattcgcgccaagccttggatgatctcggtgtcgctttcttgtttgcccctcagtatcacggcggtgtgcgccatgcgatgccggtgcgtcaaaccatgaaaactcgcaccattttcaacatcttaggccccctgattaaccctgctcgtcccaatattgaattgatgggggtttacagcaaggatttggttcgtcctattgcgcaaaccatgttacaaatgggtctgaaacgcgcagcggtggtgcatggttcaggtcttgatgaagtcgcgattcatggcgaaacgcaagtagcagaaattcgccaaggcgaattgattgaatacacgctcactccggaagattttggtgttagccgttacccactggatgcgatccgtggtggagagccagaagagaatcgcgccatcatcacccagatcctaacgggcaatggcacagcagcacaaatggcggcagtggcagtcaacgttgcacttctgctgcgtctatttggtcaagaagatctgaaagccaacacccaacaagcgatcgccgtgatgaaatcgggccaagcctatggattggttcagcagttagcacaacgaggttaa

SEQ ID NO: 41059 - DNA, 873 bp, Vibrio cholerae
atgagaattgacctgcatagtcataccaccgcttctgatggacggtttacttatcaacaattgatcgatcgcgccgtcagctttgagattgatgttttggcgatcacagaccacgataccgtggctgcattggcggatgcccgtgcttacattgcacagcagcaatatccgctacaattagtgaacggcattgagatttcaacggtttggcaaaataaagacattcatattgtcggtttaaacatcgacccaaacagtgaggcattggggcagctgattgcgcggcagcagcaacgtcgagttgagcgtgctgaactgatcgcccatcgtttacaaaaagcgacgcgtgagggagtgttagaagaggttcaacatattgccgatggtgcgccgatcacgcgtgcccattttgccaaatggttggtggataatggttacgcaaccaacatgcagcaagtatttaagaaatacctcactcgtgataatccgggttatgtaccgcctaactggtgttcaatgagtgaagcagtgagcgcgattcacgccgcaggtggacaagccgtattagcgcatccgggacgatatgacttgacggcgaaatggcttaagcgcttaatgaccgcgtttgttgaagcgggtggcgatgctatggaagtggcccagccgcagcaatcaccacaggaaaaacgaaccttgggtgattacgcaatggaataccaactactcgcctcccaaggcagtgactttcactatccttctccttggatggagttgggccgaaacctttggttacctgccggagtagaacctgtatggaaagattggggcttatccccaagcaatagagtcgagagactcgatgaagaggaataa

SEQ ID NO: 41060 - DNA, 966 bp, Vibrio cholerae
atgagcgaaaagttacaaaaagttttagcacgtgctggtcatggttctcgtcgtgagcttgaagctctgatccgagctgggcgtgtaagtgttaatggcaaggtagctgtactgggcgaacgcctagaagatgataacgctgtcgtgcgcatcgatggacatgttgtgtctgtgaaagcgcaagaagaggtgatctgccgagttctggcttattacaaaccagaaggcgagctgtgtacccgtcatgatccagaaggtcgccgtacggtatttgaccgtctgccgaaaattcgtggttcacgctggatttctgttggccgtttggacgccaacacgtcaggtttgctgctgtttaccaccgatggtgaactggctaaccgtttaatgcacccaagccgtcaggtagaacgtgaatatctggttcgcgtctttggtgacgtgacggaagaaaaagttcgcaatctcgtacgtggtgtgcagctagaagatggtatggcgcgttttgaagatgtgatgtacgccggtggcgaaggcatcaaccatactttctacgtggtaatcaatgaaggtcgtaaccgtgaagtgcgtcgtctgtgggaatcacaaggtacgacagtaagccgtctgaagcgcgtacgttacggtgatattttcctcgacaaaaaactgcctcgcggcggttggatggagcttgatctcaagcaagtgaactacctgcgtgagttagtagaactgcgtccagagaaagaaacggtgctgaacatggcgcctgatgccgcaacgcgtaagcgtgagcgtacccgtagccagaaaattcgtcgtgcagtacgtcgtcacgaagagcgaatttcagctactccgggtcgtagtggaaaagcccctgcgcgccgtaagccgggtggtgaatcgagcacgcgcaataaagtggctaaccagcaacaaagctcgcgtaagccgcgcggataa

SEQ ID NO: 41061 - DNA, 1536 bp, Vibrio cholerae
atgttgcacctgatgatcaaacccggccaactcagcttaaaacagttgcgtcaagtgagccgctcacccgtggtgttatccctcgatccagaagcgattccggcgattgccgaaagcgcccaagtcgtcgaacaagtgatcagcgaaggacgtaccgtgtacggcatcaatactggttttggtttgctcgccaacaccaaaattgccccgcaagatctggaaacgctgcaaaagagcatcgtgctttctcatgctgcgggcatcggtgagctgatgtcggatgaaaccgttcgtttgatgatgctacttaaaatcaacagcttggcgcgtggctattctggtatccgtcttgaagtcatccaagctttgatcgagctcgtcaataaccagatttatccttgcgtaccgaaaaaaggctcggttggcgcatcgggtgatcttgcgccgctggcgcacatgagcacagtgttgctcggcgaaggccaagcccgttacaacggcaaaatcatttccggtctggaagcgatgaaaattgcgggactagagccaattaccctcgcccctaaagaagggctcgcgctactcaatggcactcaagcctcgaccgcatttgcgctcgaaggattgtttgtggctgaagatctgtttgcatccgccactgtgtgcggtgcgatgtcggtcgaagccgctctgggaagccgtcgccccttcgatccgcgtatccaccgcgtgcgtgggcaccgaacccaaatggatgctgcaacggcgtatcgtcacctgctcgatgtcagcagcgaaattggccaatcccacagcaattgtgaaaaagtgcaagatccttactctctgcgctgccaaccacaagtgatgggcgcttgcttgcagcaaattcgaagtgcagctgaggtgttggaagtcgaagccaactctgtttctgataacccactcgtgtttgccgaggatggcgacatcatctcaggcggcaacttccatgctgaacctgtcgccatggctgcggataatttggcgctggcgattgctgaaatcggcagcctctccgagcgccgcatggcactgctgattgacagtgcgctgagcaaactaccgccctttttggtcgacaatggtggggtgaactccggctttatgattgcgcaagtcacggcagctgccttagccagtgagaacaaaaccctcgcgcatcctgcatcagtcgacagtttacccacttcagccaaccaagaagatcacgtttccatggcgacgtttgccgcacgcagactgcgtgacatgggcgaaaatactcgtggtattttggcggtggaataccttgcagcagcacaaggattggattttcgtgcaccattgaagtcctcaccacgcattgaggaagcaaggcagatactgcgtgaaaaagtaccgttttacgataaagaccgctattttgcgccggatatcgaaaaagccaatgctctgctgcaacttgccgtacacaaccgtttaatgcccgatcagctgctaccaagccagcactaa

SEQ ID NO: 41062 - DNA, 1698 bp, Vibrio cholerae
atgacacagtcatctgcacaaggaacaagactggacactcagcgcaccattcgcgcccctcgtggcacacagctgcgcgccaaatcttggctcactgaagccccacttcgcatgctgatgaataacctcgaccccgatgtggccgaacaccctcatgcactggtggtgtatggtggcattggccgcgcggcgcgtaactgggagtgctttgacaaaatcgtcgaagtgctggagcgcctcgaagatgaccagactttactggtgcaatcgggtaaaccggtgggggttttccccacccacaaaaatgcgccacgcgtgttgattgccaactccaacttagtaccacactgggcaaactgggagcatttcaacgagctcgataaacaaggcttgatgatgtacggccagatgacggcgggatcttggatttacattggctcacaaggcatagtgcaaggcacttacgaaacctttgtcgcggttgcgaaaaagcatttcaatggcgatgccaaaggccgttgggttttgactggcggattgggcggcatgggcggcgcgcaacctttagcggcgacgatggcaggattctcgatgattgcggtggaatgtgatgaatcgcgcatcgactatcgtctgcgcaccggttatgtcgacaaaaaagccaacacgcttgatgaagcgctggcgatgatcgccgataccgatcgcccaatttctgtcggcttactgggtaatgccgctgacatcttccccgaattagtcaaacgcaacatcacccctgatgtggtgacagatcaaacgtcggcacacgatccactcaatggctatttgccactcggctggagcatggaaaaagctgcacagatgcgtcaacaaaatgaagctgaagtcgtcaaagctgccaaagcttcgatggcgatccaagtgcgcgccatgcttgatttgcaaactcgcggcgctgcgacgctggactatggcaataacattcgccaaatggcgctggaagaaggtgttgccaatgcgttcgacttccccggttttgtgccggcctatattcgtccactcttctgtgaagggataggtcccttccgttgggcggcactctctggcgatccggaagacatttacaaaaccgatcaaaaagtcaaagagctgatccctgacaacccacatctgcataactggctggatatggcgcgtgagcgaatccacttccaaggtttacctgcccgtatttgctgggtcggtttaaaagatcgcgctcgcttaggcttagcttttaacgaaatggtgaaaaatggcgagctcaaagcgccaatcgtgattggtcgtgatcacctcgattcaggctcagtcgccagcccgaaccgcgaaaccgaaggcatgttggatggttcagatgcagtctctgattggccactgctcaatgccctactcaacaccgcaggcggagccacttgggtttctctgcaccacggtggtggcgttggtatggggttctcacagcattccggtatggtgatttgctgcgatggcagtgatgatgccgccgaacgtatcgctcgtgtactgcacaatgacccagccacaggcgtaatgcgccacgctgatgcgggctatgagattgccaaacgctgcgcgcagcaacaaaaactcgacttacctatgctcaacgctgagctggccaaactcaagtga

SEQ ID NO: 41063 - DNA, 711 bp, Vibrio cholerae
ttgtctccacgctatctgcaaatcaaacaatttatgctcgataacatcgagtcgggtcgttggccagtcggttatcgtacccccactgaattggagttaaccgagcaatttggtgtcagccgcatgacggtcaacaaagcgctgcgcgatctggtcagtgaagggaaattacagcgccgcccacgtttaggcacctttgtttgtgcggcagaagagaaagccgaatcgcctttgctggatattcgcaacatcgccgatgaaatcctcagtcgcggtaagcagtatcacaataaagtggttgaacagcgtgcgctaagcgccgatgaagctgtcgccatcaagctcggtgtaatggtgggaagcccagtgttttacagtgaaatcattcactacgctaacgacatcccgatgcaactggaagtgcgttgggtgaatagccgttcggtgccacactatttggatcaagattttacccaaattacgcccaaccaatatttgtcgcaaaactgtccactgagcgcgattgaacatactgtagaagccattgtggccgatgcgcatgtcaaacaagcccttgcacttgcggctaatgaaccttgcttgctactcaatcgccgtacttggagtggtgacaagctggtgagctcagccctgctctatcatccgggttcgcgctataaactcagctcgaaaattctgttcagccaatag

SEQ ID NO: 41064 - DNA, 558 bp, Vibrio cholerae
atgcgtttcaacattcctaaccttctctccttgctcagattatttctgatccccgtgtttgtggtgaccttttatctcccttttgaatgggctccctttgtcgccgctatggtgttttgggtggctggattcactgattggttagatggaatgttggcgcgaaaattaggccaaacctcgcgttttggtgcatttattgacccagtagcggataaagtactggttgccacggcgctgattttgatcaccgaacattaccacagtatctggatcaccattcctgcggtgaccatgatcgctcgcgaaatcatcatttcagcactgcgtgagtggatggcagaaattggcaaacgagccagtgtcgcagtgtcatgggttggcaaagtaaaaactctgactcaaatgtttgcgctgtgggtactgatctggcgttatgacgactggatgatttggcttggctacatttctatctatgtggcgactgtgctgacctattggtcaatggtgcaatatttggcggcggccaaagacgacttactgaatgaagaacatcactag

SEQ ID NO: 41065 - DNA, 984 bp, Vibrio cholerae
atgcaacatctacaagagattattgctaatgcgacctcagcgattaacgctgcagagtcgctcgtcgcactggatgaagtgcgtgttcagtatctgggcaaaaaaggcgaactgacggttcaactgcaaagcctaggtaaactaccgccggaagagcgccgtactgctggccaagaaattaacgttgcgaaagaagcggtgcaaaaagcgctggctgagcgtaaagatgcgctgcaaagcgcagagctggaagccaagttagcggctgaaaccatcgatgtgacactgcccggtcgccgtatcgaaaatggtggtttgcacccagtgactcgtactatcgaacgtattgaaagcttctttggtgagcttggctttactgtagagtctggccctgaaatcgaagatgatttccataacttcgatgctctgaacattgccgcggatcacccagcgcgtactgatcacgatactttcttcttcaatccgaagttgatgttgcgtactcacacctctggcgtgcaaatccgtactctggaagagcgtcagccgccactgcgtttcatcgcgccgggccgtgtttaccgtaacgactacgaccaaacgcataccccaatgttccaccaagtggaaggtatgttggttgatgaaaacgttaactttgcacagctgaaaggcatcctgcatgacttcttgtgcaacttctttgaagaagatttggaagtgcgtttccgtccgtcttacttcccgttcactgagccttcagcggaagtggatgtcaaaggcaaaaacggcaaatggctagaagtgctaggctgcggcatggtgcacccaaatgtactgcgcagcgtaggcatcgaccctgagaaatactcaggcttcgcgtttggtatgggcgttgagcgtttaaccatgctccgctatggcgtgaatgacctgcgtgcattcttcgaaaacgatctgcgtttcctaaaacagttcaaataa

SEQ ID NO: 41066 - DNA, 2388 bp, Vibrio cholerae
atgaaattcagcgaatcatggcttcgtgagtgggttaacccggcaattaccactgacgaattaactcaccaaattacaatggcgggtctggaagtggatgacgtactggccgtagctggtgtgttcgacggcgtaaaagtgggtcacgtggttgagtgtgctcaacatccagatgctgacaaactgcgcgtcaccaaagtcgatgtaggcgaagaagagcttctggacatcgtgtgtggtgcagccaactgtcgtcaaggtctgaaagttgcggttgcaaccgtaggcgcgacgctgccaggcgatttcaagattaaaaaagctaaactgcgtggccaaccgtcacacggcatgctgtgttctttctctgagctgggtatcgatgttgaatcgaacggcatcatggaactggctgaaaacgcaccgattggtatggatttccgcgattttctgtcactgaacgatgtgactatcgatgtggatttgacgtctaaccgcgcggactgtttcagcatccgtggtctggctcgtgaagtgggcgtattgaaccgtgcggacgtgactgctcctgcggtgaatgcgattgtagcaaccatcaatgatacgatttcaattgacgtgaaagcgccagcggcgtgtccgcgttaccttggtcgtatcgtgaagaacgtgaatgttcaagcgcaaacgccactctggatgcaagaaaaactgcgtcgttgtggtatccgctctatcgatccggtggttgatatcactaacttcgtgatgctggagcaaggccaaccaatgcacgcgtttgatctggcgaagattgaaggcggaatcgtggttcgtctggctgagcaagatgaaaaactgacgctgcttgatggctcagaagccaaattaaacgcagatacgctagtgattgctgaccaacaaaaagcgctggcgattgctggtgtattcggtggcgagcattctggcgtcagcactgacaccaaagatgtattacttgagtgtgcgttcttcgcaccagaccacattcgtggtcgtgcacgtagctacggcctacacaccgattcttcaatgcgttttgaacgtggtgtggattatgctttgcaacacgccgcgatggagcgtgcaacgcaactgctggttgagatctgtggtggtgacgttgcgccagtggtagctgcagaatctgcggccgatttaccaaaaccaaaccaagttgcgctgcgtcgtagcaagctcgacaaactgctgggtcatgcgattccggatgcggacgtcgtggagattctagagcgtctaggcatgcaggtcgagaccaccgcagaaggctggcaagcgaccgcgccaacatggcgttttgatattgctatcgagcaagatctggtggaagaagttggccgtatctatggttacaacaacattcctaatcaagcgccagtggccgcgttgaacatgaacctgcacaacgaagcgaaattaccgctgaagcgtgtacgcgatctgctggttgaccgtggttaccaagaagcgatcacctatagcttcgttgagcctgagcaacagaaactggttgtaccgggtgttgatgcgctgatcctgccaaacccaatttctgctgaaatgtcagcgatgcgtttgagcttgatccaaggtctgctgaacactgtggttcacaaccagaaacgtcagcaacctcgtgttcgtttgtttgaatacggtttgcgcttcattcctgatgcggcggcagaaaatggcatgcgccaagagcctatgctggcgggtgtgatctctggcgctcgtggtgaagagcactggaatatggaaacggcaaccgttgatttcttcgatatgaagggcgatctggaagcagttcttgaactgaccgcgaaaggcaaagcctatagcttcgccgcgactaagcacccagcgctgcatccaggtcaagctgcagcgattatggtggatggcaaagcgatcggtgttattggtacggttcacccagaacttgagcgtaagtttggcctcaatggtcgcactattgtgttcgagatcgagtggaatgcgatcaacacacgcgtgatcccagaagccgctgcgatttctaagttcccagccaaccgtcgtgatatcgcgttggtggtcgatggcaacatcgcttctggcgacatcgttgaagcttgccgtgtggcgggtggtgagctactgaaagacgcaaaactgtttgacgtttatgtcggtaaaggcgtggaagaaggcaagaagagcttggcgattgcgctgacgttgcaatcggttgaacgcacacttgaagaagcggatatcgcagcagcggtagaggcgattgtgcaagccgtatctgcccaattcggcgcggctctgcgcgactaa

SEQ ID NO: 41067 - DNA, 1425 bp, Vibrio cholerae
atgcagcaagaacaccagcccacattcttctttttcgactacgagacttggggagtcaatcccgcaaaagatcgtcctagtcagtttgcgggtgtgcgtaccgatatggacttcaacatcatcggcgagcctttggtaatttactgtcagctgcccaacgactatttgcccgcccctgaggccgcattgatcacagggatcacccctcaaaaagccaatagccaaggtctcgcggagcccgaatttatcgcgcgtattcatgctgagctctccacacccaataccatcaacctaggttataacagcatacgttttgatgatgaagtgacgcgctacacctgctatcgcaactttatcgacccctatgcttggagctggcaacacggcaattcccgttgggatctgctggatgtgcttcgcgcgtgtcatgctttgcgtcctgaaggtatcgagtggccggaaaatgatgacggcttcaccagctttaaactggaacatctttctgttgccaacggcattgagcacagcaacgcgcacgatgcgatggccgatgtgattgccaccattgaactggcgaaaaaagtcaaagccgcgcagccgaaattgttcgactacttcttcactatgcgccacaaacgaaagctgacagaactgattgatattgtgaaccaaactccgctgatgcatgtttctggcatgcttgggcgtgagcgtcactacactagctggattgtgcctattgcttggcatccaaccaatcaaaatgcggtgattgtggtggatttgggtaaagaccctcagccgctgctggagctcgatgccgaaacgctgcaagcgcgtctctatacgcggtatgaagacctagcgccggatgagctaccagtacccgtgaaattggtgcatctcaataaatgccctattctcgctccggccaaaaccttgaccgcagaaaatgcacaaaagattggtattgaccgcgaacagtgtctcgcgcacttgaatgtgattcgtcaacaccccgagattcgtgaaaagctggtgacggtatttagccaagagcgcgaatttaaccaagagagtgatgtggatagccaactctatgccggctttttctccccagccgatcgcgcggcgatggagatcatccgcaccactgcaccggagaatctgggcagcttagcgatccgggtggccgataagcgcattgaaccgctgctgtttcgttatcgtgcgcgccattatccccacaccttaaccgataccgagcaacgccgctgggcagcgcattgtcgtgactatttcgagcgcaatctagaaggttatatgttgaatttggaaaatctggtgcatgaacatcaagctgatccaaagaaaatggcgattttaaaatccgtctaccattacgtggaaaaactcgcttgctaa

SEQ ID NO: 41068 - DNA, 1029 bp, Vibrio cholerae
atgacgaagtctctcttccgccaatcttttcttttcgacagcttagatcttgaccatcccatggtcgcgcaaaccgtacgtacagagcagggtgtgaccttaaagctgcatcaacgtggcgtgttggaagtgatcccagctcaaacggatgcggcgacaaaaaatatggtgatctcctgtgggatacatggtgatgaaaccgcacctatggaactgctggataaatggattgacgatatcgtcagcggatttcaacccgttgctgagcgctgcttatttattatggcgcacccgcaagccacggtgcgccatgtccgttttattgagcagaatctcaaccgcttatttgatgataagccccacactccgagcactgagctggcgattgccgataacctcaaagttctgcttagacagttttttgccaacacggatgaacactcgcgttggcatctagatttgcactgtgccattcgtggctcgaaacactattcgtttgcagtaagcccgaaagcgcgtcatccggtgcgcagccgtagcctgatgcaatttatcgagcaagcccatattgaagccgtgatgctatcgaatgcgccttccagtacgtttagttggtattcagccgagcattatgctgcgcaagccttaaccttagagcttggtcaagtggcacgcttaggtgaaaatctattagaccgtctgctggcctttgatctggcgatgcgagatctcatctctcgccataaacccgagcacttaccgagaaaatcggtgatgtaccgagtcagtcgcaccatagtgcgtctgcatgatgattttgattttcgcttcagtgacgacgtggaaaacttcaccgcctttatgcatggggaagtgtttggtcacgatggtgataagcctttaatggcgaaaaatgaaggggaagcgattgttttcccgaaccgtaaagtggccattggccagcgtgctgccttgatggtgtgtaaggtgaacacgcgctatgaagatgaccaattggtgtacgactga

SEQ ID NO: 41069 - DNA, 1008 bp, Vibrio cholerae
atgaacgacaagatggattttcatcgactgcttcaacataaacagcaacgctggcagcgcagcagttatctgctgatcgggctgtttttgagtgtgtgtgtcctttatttgttggtgggagagctgtggctatctcctttttccgcttggtcttccctcgaacaacagttggtgtgggaactgcgtttgccaagattactggctgcggcggtcattggggcttctctggccgtagcgggagccaccttacaagtgttgctaggcaatgtgcttgctgagccgggcgtggtgggggtatcgggtggtgcaagcgtggcgatggtgattctgctgctgtttttcccgagtttaaattcccccgtggcttttatggcggccgcggtattgggcgcgctgctgtttacgttgctcttggtggtgatggctcgtaagttacgcttgaccactgcaaggctattactggtcggggtcgcattggggattttgtctggcgcggtagtcacttgggctttctatttcagtgatgaccttggtttgcgtcaactgatgtactggttaatgggcagtgtcgcaggcgtcagttggtatcaacatctcctctctttggtggcagtacctgtcgtgatttggcttgtcttgcaaggtggcgttttggataagctgatgcttggtgaagggcatgccaaacagttagggatcgatattcatcgtgttcgctggcggctcattctcgctatcgcattactggtcggggcttccgtcgcactagggggagtgatcggttttgttgggttagtggttcctcatttgctgcgtttaacgctaggctcggaaaatcgtctattgctaccactttctgctctgtgcggcgctttattactggtgagtgcggacctgattgcgcgtttggcgctgggcagcggcgaattgccattgggggtagtcaccaccactctgggcgcgcccatttttatctggatgttggtgagaaaccatgattcgtgttaa

SEQ ID NO: 41070 - DNA, 1170 bp, Vibrio cholerae
ttgcttaggcaagaggccaaacggatgaaggcaacaatggcttacagtacttttacccaaaagaagaatgaccaacttaaagaacctatgttccttggtcagcctgtcaacgtcgcacgttacgaccaacaaaaatatgagatttttgagaagctgattgaaaagcaactctccttcttctggcgtccagaagaagtggatgtatccagcgatcgaattgactacggcaaattgccggatcatgaaaagcatattttcatttctaacctgaaataccaaactctgctcgactccattcaaggccgtagcccgaacgtcgcactgctgccactggtttcactgccagagctggaaacgtggattgaaacttggtctttctctgaaaccattcactcacgctcttacactcacatcattcgtaatatcgtgaatgatcctgcagtggtgtttgacgacatcgttgaaaacgagcacatcatcaagcgtgcgaaagacatcgcccactactacgatgatttgattgagctgactaatgactatcaccgctatggtgaaggccaacatcagatcaacggtgaaaccatcacggtatcgctgaaagagctgaagaagaagctgtatctctgcttgatgtcagtcaatgcactggaggcgattcgcttctatgtaagctttgcctgctctttcgcgtttgcagaacgtgaactgatggaaggtaacgcgaaaatcatcaaactgattgcacgtgacgaagccttgcacctgacgggtactcaacacatgttgaatctactgcgcaacggcatggatgattttaccttcctgcaagtggcagaagagtgtaagcaagaaagcttcgatttgttcaaagaagccgctgaacaagagaaagagtgggcagaatacctgttcaaagacggttcgatgatcggccttaataaagatattctgtgtcagtacgtcgagtacattaccaatatccgtatgcaagccgtcggtttagagccggcatacccagccgcgacgaataacccgatcccatggatcaacgcatggctgtcttctgataacgtgcaagtggcacctcaagaggctgagatcagttcttacttagtgggtcaaatcgacaacgaggtaagcgccgatgatttcgagggctttgaactgtaa

SEQ ID NO: 41071 - DNA, 2286 bp, Vibrio cholerae
atgaaccaacaacttactgtcaccaagcgtgatggccgcaaagaaaacattgatctggataagatccaccgagtgatcacttgggctgccgaaggtctgcaaaacgtatctgtctcacaagtagaactgcgcgctcacattcagttctatgacggcattacgacttcagacattcatgaaaccatcattaagtcagcagcggatttgatctcagaagagacccccgactaccaataccttgctgcgcgtcttgcggttttccacctgcgcaaaaaggcctacggtcaatacgagccacctacactgctcgctcatgtcaccaagatggttgagaaaggcaaatacgacaagcatttgctcgaagactatacccgtgaagagctggagctgatggatcagttcattgatcaccgtcgtgaccttgatttctcttacgctgcagtgaaacagcttgaaggcaaatatttcgtacaaaaccgtgttaccggccaaatctacgaaagtgcacagttcctctatattctggttgcggcttgcctgtttgcgaagtatcccaaagagacgcgccttgattacatcaagcgtttctacgatgcgacgtcgacctttaagatctcgctacctacaccgattatgtcgggtgtacgtactcctactcgtcagttcagctcttgtgtactgattgaatgtggtgacagccttgattctatcaatgcaacggcaagctcgattgttcgctacgtttctcaacgtgccggtattggtatcaacgcaggccgcattcgtgcgctgggttcggaaatccgtggtggtgaagcgttccacactggctgtatccccttctacaaatacttccaaaccgcagtgaaatgctgctcgcaaggtggtgttcgtggtggtgcagcaaccgtattctaccctctgtggcatggtgaagcggaatctctgctggttctgaagaacaaccgtggtgtagaagagaaccgtgttcgtcatatggattacggtgttcagctcaacaaactgatgtacaagcgtctggttgaaggtggcaacattaccctgttctctccttctgatgtgccgggactgtacgacgctttcttccaagatcaggatgagttcgaacgcctgtacgtgaagtacgaaaacgatccttcaattaagaagaaaaccgttaaagcgctggaaatctttactctgctgatgcaagagcgtgcttcaacaggccgtatctacatccaaaacgttgaccactgtaacacgcacagcccatttgatgcggcggttgcacctgtgcgtcaatcaaacctgtgtctggaaatcgcgctaccgacttcgccactggcgaatgtggaagatgaaagcggtgaaattgctctgtgtaccctctctgcgtttaacttaggcgcgattgagtcactggatgattttgaagagctgtctgaccttgtggttcgtgctctagatgcattattggattaccaagactacccactgcctgcggcacgtcgttcttcaatgaaccgccgtactctgggtgtgggtgtgatcaactacgcttactacctagcgaaaaacggtgtgaaatactctgacggcagcgcaaatggcctgacgcaccgcacgtttgaagccatgcagtatcacttgctgcgcgcttctatgaagctggcgaaagaacaaggtcgttgcccactgttccatgagaccaactacgcgaaaggcttgatgccaatcgatacttataagaaagatatcgatctggtgtgtgcagagcctctgcattacgactgggataagctgcgtcacgagatcatggaacacggtctgcgtaactctacgctgacggcactgatgccttctgagacttcatcgcaaatctctaacgcgaccaacggtattgagccaccacgtggttacgtctcggtcaaagcctcaaaagacggtatcttgaaacaagtggttccagaattcactcgcttaaaagagaactatgaactgctgtggaacatcggctcaaacgatggctatctgcacttagtgggtatcatgcaaaagttcgttgaccaagcgatctctgccaatactaactacgatccaagcaatttcgattctggcaaagtaccgatgaaaaaactgctccaagatctgctgacagcgtataagtttggtgtgaaaaccttgtactaccataacactcgtgatggcgcgaaagacgagcagaccgatgctacggtgaaagtgcaggaagacgattgtgccagcggcgcttgtaagatctaa

SEQ ID NO: 41072 - DNA, 2685 bp, Vibrio cholerae
atgagcgatctagctaaagagatcacgcccgtaaacatcgaagacgagctacgcagttcgtatttggactacgcgatgtcggttatcgtgggtcgtgctcttcctgatgtgcgtgatggccttaaaccagtacaccgacgcgtactgttcgcgatgaatgtgctgggcaacgactggaacaaagcctataaaaaatctgcccgtgtggtaggtgacgtaatcggtaaatatcaccctcatggtgacagtgcggtttacgacaccatcgtgcgtatggcgcagcctttctcacttcgttacatgttggtcgatggccaaggtaactttggctcgatcgacggcgactccgcggcggcaatgcgttataccgaagttcgtatgtcgaaaatcgcgcacgaactcttggcagacctagacaaagaaaccgttgactacgttccgaactatgacggcaccgagcagatccctgcggtattgccgacaaagatcccgaacctgctgatcaacggcgcatctggtattgcggtgggtatggcaaccaacattcctccgcacaatttaggtgaagtgatcgatggctgtttagcctacatcgataatgaagcgatcaccattgatgagttgatggactacattcctggtccagatttcccaaccgccgcgctgatcagtggccgtaaaggcatcattgacgcgtacaaaaccggccgcggcaaggtttacatgcgctcgaaagcggaaatcgaaaccgataagaacggcaaagaaaccattatcgtcagcgaaatcccttatcaagtgaacaaagcgcgcttgatcgaaaaaatcgctgagttggtgaaagagaaaaaagtcgaagggatcagtgcactgcgtgacgagtctgacaaagacggtatgcgcattgtgattgagtgtaagcgtgatgcggttggcgaagtggttttgaacaacctgtatgccaacactcagctgcaaaccaccttcggtatcaacatggtggcactcgataacggtcagcctaagctgtttaacctgaaagagatgctgaagtgtttcgtcgaccaccgccgcgaagtggtgactcgtcgtactatttttgaactgcgtaaagcgcgtgagcgtgcccacatccttgaaggtttggcactggctctggctaacattgatgaaatcattgaactgatccgccgtgccgccacgcctgcagaagcaaaagaaggcttaattgcccgtggttgggatcttggcaacgttgcggcaatgcttgagcgtgcaggtacggatgcggcgcgtcctgagtggcttgagccacaatacggcatccgcgatggcaagtacttcctgactgagcaacaagcgcaagcgattctggatctgcgtctgcacaagctgactggtctagagcacgagaagatcctcgatgagtacaagcagcttctcgaagaaatcgcggcattgatgcacattctggcgagcacagagcgcttgatggaagtgatccgtgaagagctagaagcgattcgcgctggctttagcgatgcgcgccgcactgaaatcacggcagcaacgcacgacatcgacatggaagagctgatcgctcgtgaagatgtggttgtgactctgtcacacgaaggttatgtgaagtatcaattactgagcgactacgaagcacagcgtcgtggtggtaaaggtaagagcgcaaccaagatgaaagaagaggactacattgagcgtcttctggttgccaatactcacgataacattctgctgttctcgactcgcggcaaaacttaccgtatgaaggtataccaactgccgctcgccagccgtactgcgcgtggtaagccaatcgtgaacctgcttcctctggaagaaaacgagcgcatcaccgcgattctgccagtgactgagtttagtgaagataaattcatcttcatggcaaccggtgacggtactgtgaagaaaacatcgctggatcagtttgccaacgttcgtgcgaatggtttgattgcgctcaacctgcgtgacgaagactcgctgattggtgtggatatcaccgatggcgaaagcgaaattatgctgttctctaaattcggtaaagtggttcgctttaaagagtccgaagaaaccgcggttgtggatgaaaatggtcaacctgtgctggatgaaaatggccagccagagatcaagttcaaaggcgtaagaccaatgggtcgtaccgctgcgggtgttcgcggcatgaaactggctgatggcgaccaagtggtatcgctcatcgtgccgaagaccgaaggtgacgtactcaccgtaactgaaaatggttacggcaaacgtaccagcctatctgaatacccaaccaaaggtcgtggaactcagggtgtggtttcgatcaaagtctctgagcgtaacggcagcgttgtgggtgcagtacaagtggccgagggtgatgagttcatgatgatcaccaatgccggtacactggtacgtactcgcgtggcggaagtgagccaagtgggccgtaatactcaaggcgtgaccctgatccgtacttcggaaggtgaaagtgtggtaggtctgcagcgtatcgatgaaatcgaagagtcggaattgccagaaggtgaggaagcacttgtcgagaacgatgcacctgttgcacaagatgatgatggtgaacaagagtaa

SEQ ID NO: 41073 - DNA, 999 bp, Vibrio cholerae
ttgaaaggtcataccatgagtcaatatgttgtctgtgcgctctacaaatttgttgagctcaatcattaccaagagctaagagcgccgctgctggcactgatggaagagaaccacattcgcggcacattattgctggcgcaagaaggcattaacggtacggtcgcttcttctcgccaagggattgatgcgctgctggcgtggctagaaaacgaaccgagtttaaaaggcactgtgtataaagagtcttctgcctctgagccaccgtttaaccgcactaaggtcaaactcaaaaaagagatcgtgaccatgggcgtagaaggcatagatccccgtcatgtagtgggcacttatgtgaagccgcaagattggaacgcgctgatttccgatcctgaagtcttggtggtggatacccgaaacgactacgaagtacagcttggcacctttaaaaacgcgctcaacccaaaaacggagacgttccgcgagtttccacactatgtacaggaaaaccttgatccgcaaaagcacaagaaagtcgccatgttctgtactggcgggatccgctgtgaaaaatccaccgcatatttgaaagagcaaggctttgaagaggtgtatcaccttgaaggcggcatcttgaaatatcttgaagaagtgcctcaagagcaaagcttgtgggaaggggattgctatgtgtttgatgggcgcgttgcggtagggcatggccttgccgaaagtgattatcaaatctgtaatgcttgccgtttgcctatcacagaagaagataagcagagcgaacagtatgaacaaggcgtcagctgtccgcgctgttttggtactcattccgaagagcagctagagcgtttccgtgagcgtgaaaagcaagttcagttagcaaagctgcgtggtgaaagtcatatcggtgaagagagtgcggcactgattgaaaaacgccgcgcagaaaagctggcgcgcaaagcggcgcagcgcggccagaaaggctaa

SEQ ID NO: 41074 - DNA, 1341 bp, Vibrio cholerae
gtgaatcctatgaagctttatgatgcgataattggaatcgtagaaaagcatatagcccccattgcagcaaaagtggggaatcagcctcatgtacgtgccatgcgtgatggttttattgtggcaatgccatttattattgtgggtagttttattttaatttttgcattccctccttttgctgaagataccaccaatgtttttggtcgcgtgtggttaaacttcgctacgacgcatttcgatatcatcatgatgccgtttaatatgtcgatgggcattatgaccatatttgtctcgttgggtgtagcatacagcttagcgaaagcttacaaaatggacggtatcacgagtgcagtactgtcactgatgagctttttgttggtcgcggcacccgccaaagaagacagtctatcgatggcgcatatgggcggcacagggattttcacggctgttatgtgtgctttttttgccgtcgaactgtatcgctttatgaaaaagcataacattaccattcgtatgccagagcaagttccacctgcgattgctcgctcattcgaagttttgttgcctgtcttggcgattttcttgacgctttatccactgagcctttttgtacaagccgaatatggcatgttgatccctgatgccgtgatggcgatgttcaaaccgttgatcagtgcgtcaaacacattgccagcgattatcggtgcgctgctggtgtgtcaattgttatggtttgcgggcattcatggggctgcgattgtggtcggtctgctatctcccatcttcttaaccaatatcagtgctaacattgatgcgtttgttactgggcagcccgtcccgaatatcttcacacagccattctgggatttttacatctttatcggtggttcaggtgcaaccttagcgttagtgattttgatgtccttcagccgctcagctcatttaaaaagcatcggtcgtatgagtgcggtaccaggattcttccaaattaacgaacctgtgatttttggtagtccagtggtgatgaacccgattttattcctgcctttcgttttcgctcccgtaatcaatgccaccattgcttattttgcgattcagttgggctttgtcggtatgggagtagcaaccacgccatggacaacaccggccattatcggtgcgtcatggggtagtggttggacgtttacgcctgtgttgctggtcgtgggtttactcatccttgatctgctcatttacttacctttcttcaaaatgtttgagaagcaagtgcttgaacaagagcaacctgtggaaagtaaagtcaaagcagcgcaaccaggtagacaaggcgtcacggcataa

SEQ ID NO: 41075 - DNA, 336 bp, Vibrio cholerae
atggaacaagaacttatcgtgatggaaattatttgcaacgccggtgaagcgcgaagcttgtgttatgaagcattacgtttagcgcgtactcgatcttttgagcaggcagaagagaaattgtgtcaggctaaagagtgcttaaaccgagctcatttaattcaaacacaattgattgaagccgatcagggtgaaggcaaagtaccaatgaccttggtgatggtgcatgctcaagatcatttaatgacgacaattctggcacaggaaatggcgactgaaatggtggctttacataaacacttggcgggtgaggaagcaaaatgtctcgaaatgcattaa

SEQ ID NO: 41076 - DNA, 2166 bp, Vibrio cholerae
atgacaaacccaatggttgaacaaggagcctcccagttaatgggaggctctgccatgccaccagaacaacacggcgaaatgccggaacaaaatcttaaacgactgagtgaaggttttccgcgtgatgctattcaaacgggtggggtcaaatcctgctcgtggcgacgtgtgtttgtggttggttttgctttactcatatctgcttttgccatctttgaaatgcgcggcgtatttttggtcggtggactaacgcctatcgaatacgcggtactggttctctttgctatcaacttctgttggattgccttagccttctcaagctcgattgccggattttttgttctcgcgagtcgcaaacctgcccccaatacagagcaacccctaacgacacgtaccgcaattttgatgccgacttacaacgaggcacccgatcgtgtctttgccgcagtagaaaccatggctttggctctagcgaaaactgaacacggacatgccttcgattggtttattctcagtgacaccaccgatcctgaagtggcgttatctgaagagcaagccttctggttgctgcgtcaacaaaccgcaggcaaagctaacgtctattaccgccgccgtcgtaaaaatattgcgcgcaaagcgggtaatattgccgatttctgccgtcgttggggctcggggtacgaccacttattagtattggatgccgatagtgtgatgcagccaagtactatgatttcattggctcaacggatgcaaagtgacccagatgctggattgattcaaaccattccggcgctgatcaatggcacgactctcatggctcgtgtgcagcagtttgccgctcgcatctatggtccagtggtcggtactggtctggcttggtgggtacaaaaggaaggtaacttctggggtcacaacgcgattattcgtacggaagcctttatgagtgccgctggcctaccgcatttatctggtagaccgccttttggtggacatatcctcagtcacgatttcgtggaagcagctttaattcgtcgcgcaggttggagtgttaccatcgccgcggatctgagtggctcttttgaagagtgccctccttcgattatcgatttagccgtgcgcgatcgccgttggtgtcaaggcaacctgcaacacagccgcatcataggcacaaaaggtctgcactggatcagtcgtttgcacctgactacgggcattatgtcctatctctcttcgccattttggctgctgttgattttgtcgggtttgttactggcactgcaagcgcactttattcgtcctgagtattttaccgagcagttttcactgttcccgacttggccggtcatggactccgcacgcgcattgcaactgttttacatcaccatgggtattctatttagcccgaaaattttcggattactgctgctgatgtttgatggtgaaatgtgtcgtaccttagggggacgactgagagtcatactcagcgcggtgacagagatcctactgtctgcactggtcgctcccatcatgatgctcatccactgtggcgcggttgtgtcgattttgtttggacgtgatagtggttgggctcctcaacgacgtgatgacggtagcttgccaatcaaagacttgctgtaccgccaccgttggcatatgacagcgggagtactccttggttatgccgctatgctcgactcatggaccctactggcgtggatgtctccagccttaatcggtttgtggttctctgtaccactctctgggatcacggcgtcatacaccatcggagcttggtttaaacaaaaacgcattcttgcgactccagaagaaattgaaacaccggcgattgtgcttgctgcgcaagctcgtcgtgacgagtatgtggtggatcttcaggaagtatggaacgcacgcatggtacttgctgatcacaacctgatcgctctacatattgcgatgatggataaactgccgtcgcgccaacccggcaccgcgattgagcctttggatgcagtagcacgcattaaagtacaggaagcggagagtcaggaaagcctactggcgctactgaccaaagtcgaactgagttatgttctgggcaatcccctgctgatccagcaggtagccaaactgccgcccagtttagcgaaccagactgtctaa

SEQ ID NO: 41077 - DNA, 1446 bp, Vibrio cholerae
atggcattgggatgtctttatatctcaacggagactgtaataaacatgacttacgcgcctgtaaatgacgtactcagcggcaagctcgcagtagacagtgaagtcactgttcgcggctggattcgcacacgtcgtgattccaaagctggaatttcgtttcttgccatctatgacggctcttgtttcaacccgattcaggccgtggttcctaataatctcaataattacgacaacgaagttctgaagctcactacaggctgttccgttgaagtaaccggtaagattgttgaatctccagcttcaggccaagcattcgaactggctgcgtctgacgtaaaagtcgtcggttgggttgaagatgccgatacttacccaatggcgaaaacgcgtcattcgattgaatatctgcgtgaagtggctcacctgcgtccacgtactaacgtgatcggtgcggttgcgcgtgttcgtaactgcttggcacaagcgattcaccgtttctaccatgaacaaggttacttctgggtttcagcgcctcttatcaccgcttctgatgcagaaggcgcaggtgaaatgttccgcgtttcaacgctggatatggaaaacctaccgcgtactgacgcaggtaaagtggattacaaccaagacttctttggtaaagaaaccttcctgaccgtatcaggccagctcaacgcggaagcttacgcttgtgcgatcagcaaagtgtacactttcggcccaacattccgtgcggaaaactcaaacaccagccgtcacttggcggaattctggatggttgaacctgaagttgcattcgctgacctgaacactgtagcaaagctggcggaagacatgctgaagtacgtgttcaaagccgtactggcagagcgtcgtgacgatcttgagttctttaacgatcgtattaataacgaagtgattgcgcgtcttgagcaatttgttgaatctgatttcgcacaagtggattacactgatgcgattgaaattctgaaaaactgcggcaaaacgtttgagttccctgttgaatggggcattgatttagcttctgagcacgagcgtttccttgcagaagagcacttcaaagcaccggttatcgtgaagaactatccaaaagacatcaaagcgttttacatgcgtatgaacgaagatggcaaaaccgttgcagcgatggacgtcttggcaccgggcattggtgaaatcatcggcggttcacagcgtgaagagcgtttggatattcttgatgcgcgtatgcgtgaatttggcatcgatcctgagcacatggactggtatcgcgacctgcgccgttacggcacagtgccgcacgcgggctttggtctgggcttcgagcgtctagtctcttacgtcactggtatgggcaacgtgcgtgacgtgatcccattcccacgtaccccacgcagcgcgagtttctaa

SEQ ID NO: 41078 - DNA, 369 bp, Vibrio cholerae
atgatgatgaaaacagaattatacaaagagtttatgtttgaggctgctcaccacttaccgcatgtgcccgctggtcataagtgtggtcgtttgcatggacactcttttttagttcgtctgtatgttgaaggtgaggttgatccccataccggttgggtagtggattttgcggaaatcaaagcggcattcaaaccgatttatgatcgtctcgatcactattatctgaatgatatcgaagggttagaaaacccaaccagtgaagtgttggcgaaatggatttggcagcaactcaagcctagcttaccgctgctgagcaaagtcgagatcaaagaaacctgcaccgcgggttgtatttatcgtggtgaatag

SEQ ID NO: 41079 - DNA, 1362 bp, Vibrio cholerae
atgattagtgtatttgatatctataaaatcggtgttggtccttcaagttcacacacggttggaccgatgaaagcgggtaaagagtttattgacgaactacgctcaatgggaaaattgcgcgacgtcactaaaatcaccgtggacgtttatggatcgctatcactgacagggaaaggtcaccacacggatatcgctatcatcatgggtctggcaggcaatacgccagagaaagtggatatcgactcgattccgagctttatcgctcgtgtagaagaaacagaacgtcttcctgttggtatgcactgtcataccgtctctttccctcgtgaaggtgggatgaatttccaccgcactaatctgcctttgcacgaaaacggcatgcagattcacgcatggatcaacgacgagaaaatcttcagcaaaacttactactctatcggtggtggtttcattgttgatgaagagcactttggtaaagagaacgaatctcttattcaagtgccttacgctttccgttcagcggaagagctgctgaaccaatgtaaagagagtggcctctcgatcagcacgctcgttatggcgaacgaaaaagccatgcattctgacgaagaagtgcgcacctatttcgcgaacatttggcgtaccatgcgtgagtgtatggaacgcgggatgaacaccgaaggcatcctacctgggcctttgcgtgtaccacgccgtgcggcagcgctgcgtcaacaactgctgacgtccgaaaaaaccaccaacgatccaatggcggtggttgactgggtaaacatgtatgcgtttgcggttaacgaagaaaacgcagccggtggccgtgtagtcactgcaccgactaacggtgcgtgtggcattatccctgcggtactcgcctactacgacaaattcatccaaaccgtgactgagaaagactacatccgttacttcgctgcttctggcgcgattggtggtttgtacaaacgtaatgcgtctatctcaggtgcagaagtgggctgtcaaggtgaagtcggtgtcgcttgttctatggcagcagcgggtcttgctgagcttttaggcggtagcccagagcaagtctgtatggcggctgaaatcgcgatggagcataaccttggtttgacttgtgaccctgttgcaggacaagtacaggtgccatgtatcgaacgtaacggcattgcagcggtgaaagcgatcaactcaacccgtatggcgctgcgtcgttcttctgccccacgtgtttcactggataaagtgattgaaaccatgctggaaaccggcaaggacatgaatgctaagtaccgtgaaacctcacaaggtggcttggcgatcaaagtgatctgttaa

SEQ ID NO: 41080 - DNA, 615 bp, Vibrio cholerae
ttgcaaaacattagccgtcacgagtttatccagcagtttcagctccatttacccgccgcctatcctcaggaaagcttgcggcgcgtcgcacatttagcgccagagaagctacgtaaagcgtcggtattgattggcgtagtagaacgcccgcaaggcctacaagtgatcatgaccaagcgcgcagcacatttgaggcatcatcccgggcaaatcagttttcccggcggaaagtacgaagagagcgaccactcgttacagcagacggcaaagcgagaagcacgagaagagattggcatcccagaagagaaaattcgtattgttggtcagttgcctgagttagtgaccgtaagccaatttgccgtgacgccttttttagcttttgtcgaatccgactacccgattcagctcgatcacaacgaagtcgatgaagtgtttgaagtgccgatcagttttttgcttgatcgaaaaaagatctacagcgggacttttcagttaaaaaaacaccgtcataaactgttcgccctctcctataaacaacattttatatggggtatgaccgcacaaatcatccaatcccttcaaaaacaatttattaattacaatgagttagtttga

SEQ ID NO: 41081 - DNA, 1377 bp, Vibrio cholerae
atgaataacaaccaaactttgtcaattgaacacaaaaaattaacttatcaccctgatattgctaaacaatttttcacatccattgagcagcaaccttgggcaatgctgctgcgctctgcgtctaccacccatatggatagccgctttgatattctggtcgccaatcctttcgccactttagtgacttttggtgatgaaactgaaattcacgcccagaacggcgtgacattgtcacgagaagatccttttgcgcttcttgctgacatccaagagcagtatcttcctcaagtgactgatgagtcggagttaccttttgttggcggtgctctggggtatttttcctatgatttaggacgccgagtcgaagtcctccctagcttagcagaacaagatattgctatgcccgatatggccgtgggcatctattcttgggcgctcgtggtcgatcaccaacagcacaccgcgcaattggtcggacaaaatgttgaagacgcttggggttggttaaaccaacaagaggcgataaagccaagcgaagtaactgactttgctctcacatcgccttggcgatccaatatgagctataccgcctatcaagataaatttgctcgtgtacaggactatttacgctcgggagactgttaccagatcaacctcgcgcagcgttttcaggctcactacactggtagtgaatggcaagcgtatttgaagctggaaaaaggtaatcaagcgcccttctccgcctttttgcgtttgccacaaggcgcaattttgagtgtttctccagaacgttttctgcaagtttgtgatcgagtgattgaaaccaaaccgatcaaaggcacacgtccacgccatgccgacaagcaacaagatgccctactcaagcaagatttagtcagcgcagaaaaagatcaggccgagaatttaatgattgtcgatctgctgcgtaatgatattggtcgtgtggcaaagccgggtagcgtgcatgtacctaagttgtttgatgtcgaaagctttcccgccgtgcaccatctggtgagcacgattcgcgcaacactggatgagcaataccaagccgccgatctgttacgcgcctgttttcccggcggttcgattacgggagcgcccaaagtgcgggcaatggaaatcattgaggagctcgagccgcatcgccgtagcgcttattgtggctcaattggctatctcagccgtcatggaaaaatggataccagcatcacgatccgcactttagtggcctatcagcagcagctttacgcttgggcgggtggcggcttggtggctgacagcgaaggcgctgcggagtatcaagaaacgctagataagttaagccgaattcttccaaccctagaatcctaa

SEQ ID NO: 41082 - DNA, 1518 bp, Vibrio cholerae
atgacggtaatacgcaagcaagatgtgatcagcagtgtcgctgatgcgctgcagtacatctcctactaccacccattagactttgtaaaagccctagaaaaagcctaccaacgtgaagaaagccaagcggcgaaagattcgatagcgcagattttgattaactcgcgcatgtctgcagaaggccaccgccccatttgtcaggatacgggtattgtcacttgtttcgtcaatattggtatgggcgtgcaatgggattcgaccgacatgacggtgcagcagatggtggatgagggcgtgcgccaagcgtacaccaacccagataacccactgcgtgcctcagtattgatggatcctgcgggcaagcgcatcaataccaaagacaataccccagctgtggtgcacatcaatatggtgcctggcgataaagtggatattcaaattgcggccaaaggcggcggcagtgaaaacaaaaccaagatggtgatgctcaatccgtccgatgatattgcggaatgggtagaaaaaaccgtacccttgatgggcgcgggctggtgtccaccgggcatgctcggcattggtattggcggtacggcggaaaaagcggccgtcctcgccaaagaagctttgatggaacacattgatattcatgagcttatcgagcgtggtccgcaaaatgcggaagaagagctgcgtttagacattttcaaccgtgtgaataagctcggtattggcgcgcaaggccttggtggtttgaccacagtggttgatgtgaaaatcaaatcggcaccgacacatgccgcttctaagcctgtctgcatgatccccaactgtgcggcgacacgccacgtgcatttcacactcgatggcagcggccctgcgcagttaacaccgcctaagttagaagattggccacaaatcacttgggaagcgggcgcgaatacgcgtcgtgtcaatcttgataacatcacccgtgaagagatccaaacgtggaaaaccggtgaaacggttctgctgtctggcaagatactcactggtcgtgacgccgcccataaacgcattcaaaccatgctgcaaaaaggcgaaaaattgcctgacagtgtcgatttgaaagacaagttcatttactacgtaggtcctgtggacgcagtaggcgatgaagtggttggccctgcaggccctacaacttcaactcgtatggataagtttaccgacatgatgctggaagaggtcggcgtcatgggcatgattggtaaagctgagcgcggcccagctaccgttgaatcgatcaaaaaacacaaagctgtttatttgatggcagtcggtggtgcggcttacttagtggcgaaagcgatcaagaaagctcgcgtagtcgcgtttgaagacttaggcatggaggcaatctacgaatttgaagtcgaagatatgccagtcactgttgctgtggattcaacgggcgcgaatgcgcaccaaatcggtccagatacttggcgggtcaaaatcgctgaagcggccaagtaa

SEQ ID NO: 41083 - DNA, 879 bp, Vibrio cholerae
atgccaacaataaaatctcctttactcattgctattcttagcttgctcgccgctatgatcaccatccaatccggagcatcgattgcgaaacagttgtttccactggtcggcccgggcggtaccgtagcgctacgcatcagcctctctgcgctgattttaatgctgattttccgcccttggcgtgcacgcctcagctggccacaatggcgctctatgtgcatttatggtgcaagtttgggtgggatgcagctgagtttttacttcgctatcgaacgtattccactgggtattggggtagcgttagaattttcaggcccactgctgctcgccttactctcctctaagcgtaagaaagatctgatatgggttgcgttggctattcttggtattgtgttcttattaccggatatgaacggcgttgatgcgttagatccaattggcgttgcgctcgcattaattgctggcggtttttgggctggctacatctggttcggacaacgtgctggcagcgtaggctcaggcggtatgacggtttcgattgggatgctggttgccgcagtcatctatttcccaatcgccactcaattggccgaagcctcgatttttagctggtcgattctgccgatggcactgctggtcgccgtaatgtcgagtgccctaccttatagccttgagatggtggcactcagccgactctctacacagcatttcagtgtattaatgagcttagagcctgcgattgccgcgatggcggggttagccattttgggtgaaactctacaatggagccagtggctggcgatttttatgatcattactgcgtccatgggctctaccctgtccgcggcgaaatcaccgactaaagtgactcaagagtaa

SEQ ID NO: 41084 - DNA, 3072 bp, Vibrio cholerae
gtggcttctgactcaattcctcgccgcgtgttaaaaaagcgtcgacgcgcacaaaaaaacaaacctcgatactggctaattgcggtactgcttattggtacagcaggtggtgccgctctgttccatgaaatggaaacctcaacactgcaatcgcgtgaaatcagtcgttatgcggctgggttgacctatcaagttgagccgggagctagtgacaaaatcgcgttcccgagttacgggcctttcgaccagcgtttaggttatgtggcgctaccgaatattcaagagcgtctattgcagcgtggttttacaattcgccagcaagtgcgtttttccgatgagcttcagcgttatgcgcaatatggactgtatgtgccttacacggaaaaagtgcaagctggacttaccttatttgattgccgtactgaacccgtttatcaattccgttatcccggcaaccactatgcagactttaacgcgatccctgatctgattgtgcagtcgctattgttcatcgaaaaccgcgatttgttgagcgataaaaatccgctggtgaaccctgctgtagattggccacgcttttttaaagcggctttgactcaggtcggtaaagcgctcgatttggatgggcaatcggcgggcggaagtacgctggcgactcaagttgagaaataccgtcactcagaagatgggttgacttacagcccacaagagaaaatccgccaaatggtttcggcgagtgtacgtgcttatcgacttggggccaataccctagaggcgcgtaagttggtggtgtgggcttatttgaactcagtgccgctgtcggctgcgcccggttatggtgaagtgcatggtttaggtgatggtttgtgggtatggtttgcagcggatccagagcgtgtcaatcaactgctggatactcgactcaatcagtctgttaatctcgccgaacaaggtttggcattgcgtcaggttgttgcgctgatgattgctcatcgtcgcccgtcatactacctagccgtatcgggtcgtcctgatttaaatgccttaaccgacagtcacatacgacttttctaccgtgaaaagatgatttcaaaatcattaatggatgcggcactgaacgcaacattgcagttccgtgattttgtgcgtcaacctgcggtgactcgaattaataccaataaaggtttactggcggcacgtacccatttaagccgtcagcttggggtgagtttgtatgatcttgaccgaatggatcttagcgcctcaaccacgctgaactttgaattacaaagtgaagttactcgttatttgcagaaattggcgaatcctgagtacgcagcgcaagtgggcattcttggtttccgtttactggcggcagaaaaaacggcggatgtgcgttacagcttcacactgtttgaacgaacggatgaaggtttcaaagtgcgtgtgcaaaccgacaacaccaatcaaccgttcgacctcaatgaaggaagtaagttggagttgggctctaccgctaagctgcgtgtattaacgacttatcttgagattatcgccaaactgcacagtaaatatcatgacttgtcggtaatggaacttcgccgccatctggtagaggcacaagatactttgagcgtctggtcattggaatggttactgacgagtccaaaacgcgatttggcgactatgttagaagcggcattggaacgagaatattccgcagatccgaaagagcgcttttttaccggtggaggtatccataccttcaataacttccgtaaagaagatgatgaacgtatcgtgacgatgcgtgatgcattgcgtgagtcgatcaacctgcctttcgtgcgactaatgaaagatattgagcgctacaccctatacagtgaagggtatcgagctcaattgatgaaggatgataaagatccgcgccgcatggaatacttgcgtcagtttgcggataaagagggtagagcatatctacttcgcttctggcgtaaatacaaagataaaacgacagacgagcgtatggcgacgctgctcgaaggtttaaaaccgagtgccgaccgcttagcagcggtacatcgttacctattgccagaggcatccgttagcgagtttgtgcgctttatggatgataaattaccgcctattacgcgcgataagcttactgataaacagcttgagaaactgtataacaagtatggacgtggtaaatattcactgccggatcaaggttatatcgctcgggtacatccgcttgaactgtggctattggggtatctcaatgaacaccatcaggcatcttttagcgatgttgttgcggccagcagtgataaacgccaagaagtgtacagctggttgtttaaaactcgtcaccgtaatgcccgtgacagccgagtgcgcaccatgttggaagtggaagcctttacggatattcaccaaagctggcaacgcttaggttacccgtttgatcaccttgtgccttctcttgctactgcactgggtagctcgggtgataggcctgccgccttgtctgaattaatgggtattattttaaacgatggtgtacgtgtgccgacgaaacggattaaccatctgcattttgcgcaagatactccgtttgaaaccgagttcacgcctgttgaaactcaaggcgtgcgtgtcttgcctgtcgaagtcgcaagagcgttgcgcggggcgttatctcaggtggtggacagtggtacagccagacggatctctggtgtgtttaaactgccggatggtacgccgatagtattgggtggtaaaaccggaacgggcgataaccgcttacaaacggtcaaccgcgctggtactgttgtgcaatctctagcgcgtaaccgaactgccacctttgttttctatttgggcgatcgtcactttggaacactaaccgcgtacgtcgcgggaagtgattcagagaaatttacctttacctcggcactgccggtgcaggtattgaaaggtatggcaccgattttatcgccttatctggctccgaatgagcaagagtgccgacctacgatgaacccctcaagcacacaataa

SEQ ID NO: 41085 - DNA, 1545 bp, Vibrio cholerae
gtgttgtctgaatttttgcataataaaagtgatgccatggtcaatcaaacacatgaattcctgttggaaatgacaggggtgagtaaagagttccccggagtgaaagctctggataaggtgaatttaaaagtgcgtccgcattcggttcatgccttgatgggtgaaaatggcgcaggcaaatccaccttgttgaaatgcttatttggtatttatgagaaagatgaaggcgatatcatttttcttggccagcatgtgaacttttcctcatcaaaagaggcgctggaatccggtgtctctatggttcaccaagagttgaaccaagtaaaacagtgctcggtgatggataatatttggcttggccgttatcccaccaaaggattttttgtcgatcacgacaaaatgtatcgggataccaaagcgatttttgccgaactcgatattgatatcgatccgaaggtcaaagtcgcgaccttgtcggtttcacagatgcagatgctcgagatcgccaaagcgttttcctacgatgccaaagtggtgatcatggatgaacctacctcatccctgaccgaaaaagaggtaaaccatctttttaccatcatcaaaaagctcaaagaaaaaggctgtggggtggtgtacatctcgcacaaaatggaagagatcttttctatttgcgatgagatcaccattttgcgtgatggccagtgggtcgatacgcgtccgttgaaagggttggacatggacaagatcatttcgatgatggttggccgtgaactgacccagcgtttccctgaaaaaagcaacgaaccgaagaatgtcattcttgaggtgaagaatctcaccgcactcaatcaaccctcgattcaagatatttcgtttgaactacgagctggggaaattttgggcgtggcgggtctcgtcggttcgcgccgtaccgacattgtggagaccatttttggtgtgcgtgaacgcagtgccggacatattctgctccatggtcgtgaaatgaaaaatcacgatgcgcatgaagcgatcagaaacggttttgcactcgtgaccgaagagcgccgctcgacggggatttactccaatctcgacatcacttttaactcgttagttgccaacgtggacgagtacaaaacgccttacggtctactcagtgacaagaagatgaaaagtgatacgcaatgggtgattgattctatgcgggtgaaaaccccgtcgcatcaaactcatatcggttcgctttccggtggtaaccagcaaaaagtcatcatcgggcgctggctgctgactcaacccgagattttgatgttggatgaaccgacacgcggtattgatgtgggcgcaaagtacgaaatttatcagctgattttagagctggccaagaaagacaaaggcatcatcattatttcctctgagatgccggaactgctcggaattaccgaccggatcatggtgatgagcaacggccgcaatgcaggcattgtgaataccaaacaaacttctcagaacgaaattctagaactggcctctcgatacctctaa

SEQ ID NO: 41086 - DNA, 708 bp, Vibrio cholerae
ttgatgaaaagtagtccgttagtccgccaagcgagcactgaaaaagagagcaccaaatcagagaatctaaccgaatatctgattgaagccattgttgaaggtcagctcgcgccgggcagtaaaatctctgaacctgagctcgccaaacagtttcaagtcagccgtggcccactgcgtgaagcgttaatgcgagtcgaagggcttggcttgatagagcgtattccgcacatcggtgcgcgagtgattcaattgtcacccaccaaattggttgagctgtatgcagtgcgcgaagctctggaaggcatggctgcaaggcttgcagcgcgcaatattaccgaaatcgaactggcgggcttagaaagcttattgtcgacacattcgacccatatcgatcaggtcgaaggtgcttcttactttcaccagcagggtgatttcgatttccactaccgaattattcaggcctgccgcaatcaacaactgattggtttgctgtgtgatgagctttaccacttgctgcgcatgtatcgttaccaatcgccgcgttcgcattcgcgtccggtagaagctttggaagaacacaaatttattctgcgtgcgattcgccaacgagatgaagagttggccgaaatgctgatgcgtcgccacatctcgcgcagtcgccaattgatcgaacaacaaataatgctggatgcccaacaacaaggttaa

SEQ ID NO: 41087 - DNA, 1134 bp, Vibrio cholerae
atgtctgctgcaaaagagttaggcggagcagggctgcgcggccaaagcgcgggaagcaccgctttgtgtactgtgggaaaaacggggaccgggttaacctaccgtggttacgacattaccgatttggcccatcatgctcagtttgaagaggttgcgcacctgctattggtggggtatttgccaacacaagcggagctggatcagtacaaaactcgtttgattggcctgcgcggtttacccgaaaaacttaaacaagcactggaattgatccctgctgaagcgcatccgatggatgtgatgcgcacgggctgctccattcttggcaaccttgagcctgaacataccttcgctgagcaacaagcggcgaccgagcgtatgttggcgctgtttcctgcgattatttgttactggtatcgcttcagtcatgaaggggtgcggattgataccgccgatcaaagtgaagattcgattggcggctatttcctcaaaatgctcactggccaagcgccgagcgagctgttcaaaaaagtgatgcactgctcgttaactctgtacgctgagcacgaattcaatgcttctacctttgcggcaagagtctgtgcgtcaaccttgtcggatattcactcttgtgtgacaggcgcgattggtacgctacgcgggcctttgcatggcggagcgaatgaagccgcgatggcgatgattgagcagtggcacagtgccgatgaagcggaagcgggcattatgcgcatgctggcgagcaaagagaaaatcatgggctttggccacgcgatttatcgcgagagtgacccacgcaacgccttaatcaaagagtggtcgaaggcgctttctgaagcggtgggggattctcatctctacgctgtttctgagcgtgtggaagcggtgatgaagcgcgagaaagatctgttctgtaatgcggacttcttccacgcttcggcctatcactttatgggcattccaaccaaattgttcacgccaatctttgtgatgagccgtttaactggctgggcggcgcatgtttatgagcagcgtgccaacaaccgaattattcgcccaagtgccgattatgtagggcctgagcatcaaacttggctgccgattgaacagcgtggctaa

SEQ ID NO: 41088 - DNA, 477 bp, Vibrio cholerae
atggccaatatctcactctcttcggcaagcagtgcagatttacaacaactcaaccagttgatgtttgagctgcatgatgaacaccatcagcaatgccctgaacatttcaagaccgcggaagagattgaacaagagaagagtattgcccgttatttggatgacccgcagtgtttggtgtatgtcgccaaacaaggtgagcaggtggtgggctttattacgggccatttttgtgagctggtttcaaccgtgagtcaggcggttgcaatgggaagtgtcgatgagctttatgtgcttccggcctttcgtggacaagggattgccagtcagctatgtcataaattagagcgggttttcaaagattacggggtaaaacagatgtttgttgaagtctgggactttaaccagtctgcccaagatttttatcagtgtgctggtttcgttcagcatattcactggttgcgtaaaccgctggtttag

SEQ ID NO: 41089 - DNA, 3996 bp, Vibrio cholerae
atgcgctcgataaaagcgatgttcgtactactgttttgcttgatggcgatattggcggttgccatgtttaaagtgactcggcaagtcgcagatcttaggctagagagccatcaatacagcgagcagctttttcacttttatcgtctatctcaagagttaaaacaaagctcagaccacttgactaagtttgcccgagcgtatgctagcactggcaatgagcgatggttgcgtatgtttaaccaagttttgaatgtccgtaatggcaaactgccagcaccaagcaataatgattacgagttttgggatgtagttgtacttaacgattcgagtgaacttacaccaaacgctaatcagcgctatcccacattgattgaacgcattcgtcaatctggtattgggtcggtcgagttccttgaattacaaaatgcgttagcgttatcggatcagctagtcgcattggagcgtgaagccttcatggcagtgaaggggtggaagagagagtttgcgggggaataccgctataccggggagccagatcttaactttgctcgttctttgctttatagcgaaaagtattttctcgagaaagccaaaatcatggctgcaattggatcggcgcactccaatatcgtagatcgtattgaatctgaagtgcgagcggctgatgaaaaagcgcaattttatgaacgagttaatttagttttagtcagtttatcactgttggtcatcatcgcttctttcatactactttgggttatttatattgcgccattgagtattttactgaaaacggtggtgagacaagttcgcagtgaagattataaatttaccctgactcaaaaagcgtatggcgaattgcaacgctttatcgatagtttgaatgtggtgtttcaccatatttccgaacagctcagttttaataccttggtgaaagacttcaacatcatcattcgcaaccatccgaccacggaagccttgtgcaatcaggtgacacagtttttactgcaccatttccccgttgaactgataggtctttatctctatcaaaatggtgtactgacacgcattgccggtgttggtcagtcggagtctgcacaacgtgactacagtgatccaacgacaacgcattgtagtgtgcttcgttcgggcaagccttatgcaatgaagtcactcaatggcaacttccaagtggtttctacctcaggagtgattgcactcaatgaggtgtattacctacctctacaggtcaataatcagccgatagcgttactggagttaggaactgtaggcatgctgacaatgcagcaataccattggttatcgcagatgcttgacgatctctctgtcgcgattcaacttagccaaaatgcggagcagcaacgtttggcagaaagaaaagtgcttgaacaatcacagctcaatcaagagatcctcgatgctacacccaacccgatgtactgcttgagtgcagatggtaaattcctcactgtcaatgccaagttcttggatctcatgggtttatacaataacgaagtgattgataaagagccgcaagagattttccccgctgaagttgcagagcgctttgctgcggcgcaccaagtgttgactcagcaacaaagtagccaaaattacgaagtttctttggtcgattacacgggtgttcagcgtgaaatgctggtttacgaggcgtcttttagcgatcgtgcggacaaggtcaatggtatcgtcggtattttgttggatatgaccgaacgcaaagagatggaagatgaactccgcaaagccaaagaggcggcggacgcgatgagtcaggccaaaggtgacttcttagcgaatatgagccatgaaatccgaaccccaatgaatgcaattttgggtatggcacatctggcattgaataccccactcgatacgacacaacgcaaatacgtgactcgtattaatgaatccgccaaaaacttactgggcattatcaatgacattctcgacttttccaaaatggaggcgggtaaactcaatgtagaacggatcgatttcaatcttgatgatgtgctggataatgtgacggcagtcgtctcattgaaagcccaagagaaaggcattgagtttttgatggatatcgacccgcacatcccactagggttgattggcgatccgcttaggcttggtcaagtgatggtcaatctgtgtggtaatgcggtgaagtttacctcacaaggcgaaattgtactgtctgcacgagtgagccaattgaatgaacagcaagtcacgctgcggtttgccgtcaaagatacagggattggcattgcccaagacaagctggacgatttgttcgatgctttctcgcaggcagataacagcattacgcgtcaatatgggggcactgggcttggattgagcatcagtaagcaattggtcgagcttatgggagggcaaattaccgttcatagtgaagaaggtaaaggttccacctttgagttttctgtggtgtgtggtctgcaagatgccaaaatgcgtgatatttcccaacctgtgcatggtctagcggataagcgagtgttagtggtggatgataatgattctgctcgccacattctcgactctttactgaccgctatgcgttttaacgtcgtgacggtgagtaatgggtttgaggcgctatcggaaattcaacagaaaccctttgatatgttgtttgttgactggaacatgcctggtatgaatggcattgagctactgacgcgagtgaaaaccctcggccttcgtgggcacatgaagagctttttagtgacggcttatggacgtgagattaaccttgatggcgaaaacagcaagttggttgacgctttaattgtcaaaccggttaatccctcgaatctgctggatgcgattgtgaccagttatggaattgagcatgtacgccataaaacgaacgaagcgcatcacaacagcaggccgaattttgccggccagagtctgttgctcgtcgaagataatgaggtgaaccaagaagttgcgcttggcctactccaagacactggccttaatgtcgtggtcgccaatcatggtcaagaagcgctagagaggttagagcatgccgattttgatctggtgctaatggatatgcagatgccggtcatggatgggatcaccgcgactgagcatattcgagccaatccgcggtggcatagcttacccatcgttgctatgaccgctaatgcgatggcgatagatattgaacgctgcttgcaagcaggcatgaatgatcatctttccaaaccgattgaagtggataagttttatcaggtactcaggcattttcttcaggtgagtgatgagcagagcttttcatcgcattccccaaataaacccagcgcatcaaaacctgcgatgaacgctttgttggatctgcctcagctgacgggcgttgatttggaacaagctatcttccggattgggggcaatcaacaacgctattttgaaattctgcgtcactttatcgatagccaagttgatgagctgaacagtgtaacagggctaatcgaagcgcaagactggagctctgcgacccgagtggctcatactctgaaaggttctgccgcgaatttaggattagaagctttagctcagttggcggcagagatggagcagagtctagagcagcaagtcctaccttcgtttgagctgcttcaacaagctcaaagcttgctaacccaagtcgatgatgaactctctgcgtgggaacatcagcataaagagccgctattggcggagaacctagattggggtttgtggtatcagcagttgcaacaggcgatcaatgattatgatgtcaccgcattaagcctgagtaagtccattcgccaagtttcccagtgggattcggcgcagcaagccgccttaatttctgcaattgaagattttgattttgagcaggcaaaggcgctattagccagttatccgcagttaagcggtgagcgtttaaaccagtag

SEQ ID NO: 41090 - DNA, 1257 bp, Vibrio cholerae
ttgcttttcttcatcagttccacgacaatagccgcccatttctatttccatctgagtagcgtaatgactcctgcaatttatttggtcaaaggtcgagacaaatctttgcgtcgtaaacatccgtgggttttttctcgtgggatcagcaaagtcgaagggactcctaaactgggagaaactgtcgatgtttactcctttgaaggcaaatggttagccaaagcggcctactcaccgcattcacaaattactgcgcgtgtctggagctttgaacaagagccgattgatcgcgatttcttcattaaacgcatcgaacaagcacaattattgcgcaacgatattatcgaacgtgatggcttaaccggttaccgtttaattgccgcagaatcagacggcttacctggcattactatcgacaaatatcaagattatttggtctgccaactactgagtgccggtgccgagtatcaaaaacagactctggtcgaggcattattacattgcttccctgagtgccatatttatgagcgttccgatgttgcggtgcgtaaaaaagaagggctggacgagcgcgttggggtactgcacggtgaattaccacctaaatcggtcgtgattgaagaaaatggcgttaagatcagcgtcgatattgtgggtggacacaaaacgggtttctatctagatcaacgcgacagccgcttccaatccatgaaatacgttaaagagaaagaagtgctgaactgcttctcttacacgggtggttttggtttatacgcactcaaaggcggagctaagcgtgtgatcaacgcagatgtctctcaaccagccttggatacggctaagttcaatgctgaattgaacggtttcgatatcagtaaaaagcgtgcggtgttcttgaatgccgatgtatttaaactgctgcgcgaataccgcgaccaaggcacacgttttgatgtggtggtgatggatccccccaagtttgccgaatctaaagcccagctggatggtgcatgccgcggctataaagacatcaacatgctggccatgcagatcttaaacccaggtggcaccctgctcacctactcgtgttcagggttaatggatcaagtgctatttcagaaaattattgccgatgcggctctcgatgctggacgtgatgtaaagtttgttgagcgttttgaacaagcggccgatcacccaaccgataccgcttatcctgaaggtttttatctcaaaggctttgcttgtaaggttttataa

SEQ ID NO: 41091 - DNA, 822 bp, Vibrio cholerae
atgtacaaactgattgcgctcgatatggatggcacactgctcaatagccaaaaacagatctctcctcgcaccaagcaggctattgctcaagctcgtcagcaaggcattcaagtggttttggcttctggccgccctcttgatggcatgcgcagtaaattggaagagttacatctgaccacggaaaatgactatgtactctattacaacggctctatggtcgcgaatgtcggtactggggagattattcatcaacaaatcattgatggcaaagcggctaagcgtgtggcaacactcgcgcaagagtttgggctcaatacccatgcctttagccaaattcacggtttgatcacccctaaaaccagccaatataccgaagtggaagccagcataaatggcctcaatattaccgaaatggattttgcacaattggcagatgaccacccgatcattaaggcgatgatcgtcggagagccagaaaaactcactcaagccatcgctcaattaccagcgcaatggcgtgaagaatttactgtggtacaaagtgcgcccttctttttagaatttcttaacacgggcagtaataaaggcatcggcgtacaagcgattgcagcgcatttaggcattcaagccagtgaagtgatttgtatgggagatgcggaaaacgatcaccacatgctgcaatacgcaggcctcggtatcgcaatggcgaatgctatggaagagaccaaacacattgcggatcacattacgctaagcaacgatcacgatggcgtggccgtggcgatagaacgctttgcgctaggctgtttcagcgaagcttaa

SEQ ID NO: 41092 - DNA, 1179 bp, Vibrio cholerae
gtgcattcaggacgaccaagcatgatggatctttcttttttagaaattgccacagtgataaataacatcgcatgcagtgcaatagccgcgctctttctttatatgttaagaagcaagctgattgaacataaattggatacggccacttggtttgtgctgctgtttttggcttacggcttggcttataccacctcttcgctgcgttttattttaccgatgggatttgccatctttgtcaataacttgctctatcaacttggcggttattgcatgctatttgccgtattgcgctggtatcaaaagccgatcaaaagtggcttatacctactgatgatggcgcactccttgttgtttgctttgttgttatatctcttgttccgtttgaatcctgaagacataggactgcgcatcttgattgcttcgttaagcttgtcttcggtgtatctgatttctgcaatcgttgcggcaaaaaatggtcagcgtgggcggccagagcaaactcttttcgctgttgtattggcaatgatgatggtcatgctctacgttcctttcgtcgcttatcaaactttacctttgttggcggtatttcgcgcctcgaccatagtggtgcagaacctgttcttttttatcattcttggcaccatgctaatgctgtttttgttcgaggaaatagaatggcatcgcttacgctctattcaagatgaactgacaggcgcgtttaaccgtcgtcattttaaagagcaagtacagcaaaaattgaagcagtctaagcagaaatctatggtggctttagtcgatattgaccatttcaagcagatcaatgattcctatggacatgatattggtgattcagtgatcacttatgtggttcgccatttagagtcactggcattaacggaatgcttggtcgctcgatatggcggtgaagagttcgcgatctttgcccgtgaaaatgattttgagcgagtatcgcaagctcttgattcggtacgtgatgcgatttcggtaggttttcatgttgaacagcaaccactcaaagtatcggtcagtatcggcgcggtgattttcgaaagttcacatgaatatggcgaagtattacgccaagcggataaggcgttataccaagcgaagcaacaaggacgaaaccgaatcatgctgcaagacgtgagcgcgagttaa

SEQ ID NO: 41093 - DNA, 1353 bp, Vibrio cholerae
atgtttattggatttgactatggtacggccaactgctcggtagcgagcatgcaggatggcaggcctgtgctgatcccacttgaaggtgacagcctctatattccttcgacactcgccgcgcccacgcgtgagtcggtgtctgaacatctatttcgccatcgtcacattgccccagcggatgcactcggtgagcaacttctgcgtcgttcggtggcgtctaatcgtgaagaaggcattgatttacagtttgctgatgtggtgtttggtcaggcggcgcttgatctctatctctccgatccccatgaagtgtattacgtgaaatcgcccaaatcctttttgggggcgatggggttacacgacattcaactgagcttttttgaagatctggtgtgcgccatgatggccaacatcaaagcacaagcagaagctcactccgatgcagtgattcaggatgcggtgattggtcgtccggtcaattttcatggtcggggcggggaggactctaaccagcaagcggaaaatattttgcgccgtgcggccactcgcgctggttttcgtcatcttgagtttcagtttgagcctgtcgctgctgggctagaatacgaagccacactgaccgaagacaaaaccgtgttagtagtggacattggcggcggtaccaccgactgctcacttattcaaatggggccatcatggcgcggcaaagcggatcgcacgcaaagtctgattgcgcatacaggtcagcgcgtaggcggtaacgatctcgatattcatctcgctttcaaagccctgatgacgccctttggttttggcactcaaacgcaaagcgggctagacatgccgatcacccaattttggaatccgattgcgattaacgatgtgagtgcgcaagccaaattcttttcccgtgaaaatttggccgatttaaaacgcctgcacaaagaggcgcgtgagccggaaaaactggcgcgacttctggcggtctatcacgatactttgggttacagccttgtcaaaaaagccgaagaggcgaagattgcgctctctgacacggcgcgagcgattgcgcaaatcaaagtgctatccgaactgctagaagttgaaattcaacgcgaagcgatgatcgaagcgattgacgtgcccaagaccaaaatgattgagttggtgacagaagcggtgacgctcggcggcgtgacgccggatgtgatctttatgaccggcggtagcgcgcgttcaccgattttacgggctggtgttgagcaagctctgcctaacgtgcctatcgtcagtggtaactactttggttcggttacggcgggtctggcgcgctgggcacaggtctgttttcgctga

SEQ ID NO: 41094 - DNA, 1926 bp, Vibrio cholerae
atggcgctcaagaaacatatcactaccagtgctagctcatcatttagtccgagcaaccatagcacttcggctaatgcccccaaaaaagaagctgatgatttgcgtcgccaagcaagaacattagccagaaaacaacaagctgccgaacgagtggcttctgctacagcagaattattggctggattagaagaaagttcttctgccatgactcaactacgtagctctatggaacagattgcggtgggtgcggaagaatcttcatcggctacaaaacaaagtgaaacggcggtatcacagatgaataacttcatcaatgaacaagccacctatgccactcaatctaagcaaattttgactaaactcgaacaagatattgttgatgtggctaataaaatcaatgagatggtatcgaacgtccaaacctcttcagaacgacaaaacgattcggtcaaacgaatgatcgaactttccgaacaagcagccaaaattaatgatgcagtgaaacaagtcatacatatcgcggatcaaactaacttattggcgttgaatgcggcgattgaagcgggtcgtgcaggtaaacatgggaaagggtttgcggtggtggccgatacagttagaaccttagcggagaaggccgaaaaaaatgcggctaacattgaaagtctcatcaaggacatttctaacggtgcggaaatggtttcaaacggagtgaaatcaagctctcaaaaagcagaaagtgaagttcagaaaggccatgtcgtcaataaacaacttacgctcattcgcaatgaaatggttgatttagtgaaagattcagaagtgttattgaaagctgcggatgagatgtcttctgcagcagttattgccttaaaaggttccgaatctgtctcacaagccgctcaagaacagtcggccgcctgtgaagagagcttaaaaagtctagatcaacaacaaatcgcgcttgatggtgctgtcacagcagctcagtcacttgatgaattaaccgatgagctacgcacatccaccgatatcgttaaatcatctgaagaagtcgctgccgctgccgaagagctctctgctggcattgaagagatcaaccgctcatcgaatgaaattatgggtgcactcaaccagatcagctctggtgcacaacatatggccaagtcggttgaaaccgggatcactagcttaacgcagatagaacaaggagctcgccttggtaaagaacgagcagaaagcagcctgaaagcttgcgagaaaatgttgacaggtatagaagaaaataaaactactgttgacgagatgatcttagccattacggaatctaccaaagctgcaacggaaaacctgaatgaaatggcgaatattgaacgtatttcgcgacagatcgataaaatcgtcgatggtatttccaatgtctccattcaaaccgccatgttggctgtgaatggtgctgtcgaggcagcacgcgcaggtgaatatggaaaaggttttgctgttgtttctaccgatattcaaaacctcgccaacgatgctgctgaaaacgctgaacaaatcaaagatcaagttaagaatatccaagagcaaatcaacattgttcgtaaagatttagctgacatcctttcgacagtgatggaagaggctcaaaaagcagctctgaccatcaaacaactggataatgttcgctctaggatgagtgatgtggtgttaggaagtaaacgtatttctgaaagtgccgggggcatcgagcgttcgattgctgatgcacgcgcgggaatgcaacaaattgccactgcagctgaagaatcctctcatgcaacgggtgaagccgctactgcggctcgtcagcaaagctcaagtacttcggagctggcatccgcaattgaaaatattgccgccgttgccgatgaacttcaatcaatctga

SEQ ID NO: 41095 - DNA, 1221 bp, Vibrio cholerae
ttgaaacaacagaatcttaataggttatcttcaatgaattcaaataatagcaacaccgaatttgatggtgtacgcgcagctcaatcgcgtaaaaaagggtttctcggattagcggccgcaattgtggttgccggggggagttatgcactctattggcactttatcggttcacgctacatttccaccgacaacgcttatgctgcggcggaaatcgccgaagtcacgccggccgtgggcgggattatcgcgcaagtgaatgtagtggataccgagtacgtcaaacaaggcgacgtacttgtacagctggatgataccgatgcgagattagctttgcttcaagctgaggcggatttggcactcgcaaaacgccgtgtacgtagctatctcgctaatgacgaaggtttaagtgctatggtggaagcacaagaagccaatgagcagcgtgtgaaagcgcagttaaaagcggcgcaagcggactttgaacgagcaaaaatcgatttatctcgtcgggaagacttagtgcgttccggctccgtttctggtgaagagctgacgaatgccaaaaccggttttgcgcaggcacaagcaaaccttaatgcggcaaaagcggctatggcgcaagcacaggcaactaagctctcgactattggctcacaaaaagctaatgcagcgttgaccgataacacgaccgtcgatagcaaccctgaagtcttactggcaaaagcgcgttatgaacaagcgaaaatcgatctcgagcgtacggtgattcgtgcgccgatcagtggaatcgtcgctaaacgccaagtacaagttgggcgtcgtgtacaggtggggatgcctttaatgaccgtggtgcctactgatcatatttatgtcgatgccaattttaaagaagtggaattgcgcgatgtgaaagttggacaacccgttaccttaacggcagatctgtatggtgatgatgtgacctaccatggtgtggtcgctggtttttccggcggtacgggctccgcattttcgatgatccctgcacaaaacgccacaggcaactggattaaagtggtgcagcgtttgccgatccgtatcgagttggaccccaaagatttgcaagcttatccactgcaggtgggattatctatggttgccacgatagatactgcaggaactaccgatccacaaaccttagtgcagtaccgcgccgccaaagtttcagagcaaggctaa

SEQ ID NO: 41096 - DNA, 1575 bp, Vibrio cholerae
ttgatgaaaaaacgcgcttctcatcacttggttatctgcaccttgattgatacacttcgctttcgtttatcgtcacggaaggctatttccatgaatgcgttcaataaattagtaaaacattctaaaaaaatttctaactttaatcatttgtcgtccatcgttggttgggaccaagccgccgtcatgcccagtggcggcgctgaagcgcgctcgcaagccatggcagagctttctgtgcatatccatggcctgatgacccagccacaattggctgattggtttgccgaggcagaaagtgaaacgctcaatatcgagcagcaagccaccctgcgcgaaatgaaacgccaatggcaacaagcgacggttctgcctgaagccttagtcgaagcgcaatccctagctggctccaaatgtgaacacgcttggcgtagccaacgcaaaaataacgattggacaggttttgagaaaaactgggcggaagtggtcaagctttctcaagaagaagcgcaaattcgtgccgaagcaactgggaaaaccccttacgatgcgatgcttgagctttatgagccgggcacgacaaccgaacagctcaatcgtgtatttagtgatgtgaaaacttggctaccaagcttaattgatgtggtgattgaaaagcagagtagcgaaagctttatcgcacctaaaggccattatcctgctgaaagccaaaaagcgctggggctggatgtgatgaagctacttcagtttgattttaaccacggccgacttgatgaaagtgtgcaccccttctgtggcggcgtaccgagtgatgtgcgcattactacacgctacaacgaaagcgagtttgtacaatcgctgatgggcattgtgcatgaaactggccatgcgcgttatgagcaaggtttacctaagcatttggccggcactccggctggcgaagcgcgttcgatgggcattcatgaatcacaatctctgttctttgagatgcaagtgggtcgtagccctgcgtttattgcccatctcgctgaactggcaggcaaacatttttcggcgatgaatgatccggtcttccgagtggaaaacattcaaaaactttacacgcgcgtgcagaaagattttatccgcgtcgatgcggatgaactcacctacccagcccatgtgatcctgcgttttgaaatcgaacgagatttgatgaacggcaagatcaaacacactgatgtgccagaactttgggatcaaaagatgcaggcttatttaggcctaagcaccaaaggcaacgatcaaaatgggtgtatgcaggatattcactggaccgatggcagctttggttacttcccaagctacaccttaggtgccatgtatgcggcgcaatttatggcggccatgaagaaaaccgtggatgtggatggcgcgattcgccgcggcgatctctcaccgatttttacttggttgtctgagaatatttggagtaagggcagcttattcagtaccgatgaattggttaaacaagcgacgggggaaaccctcaatccagagcattttaaagctcatttgagtcagcgctatctgaagtaa

SEQ ID NO: 41097 - DNA, 3492 bp, Vibrio cholerae
atggcgacattagcgtacagcattgaggtggaagggctggaagatgagactctggtggtcagaggcttccacgggcaggagtcactctctaatagtgtttttttagggcaagcctgttacgggtttcgctacgaagtgcaactggcgagtcgggtatcaaacctcaccgccgagcagatggtggataagcgtgccgagctcaagctttaccgcaactcacagttggtgcagcgcgtgcacggcattgtgcgtgctttcagccaaggcgatatcggccatcaccacaccttctaccaactcactttagtccctgccttagagcgcttatccctgcgtcataacagccgcattttccaaaagcagactgtccctgagattctctctatcttgctgcaagagatgggcatcaacgattacgcttttgcgctcaaacgtgatggcgtgcagcgtgagttttgtgtgcagtaccgcgaaagcgatatcgactttctgcaccgcctcgccgctgaagaaggtttggtgtacagctttgtccatgaagcgggcaaacataccctctatttcagtgatgccagtgatagcctaagcaaactgccggagcctatcccatacaacgctttagtcggtggcgcgatagataccccgtatatccacggcttaacctatcgcacccaagcagaagtgagcgaagttcagctcaaagactacagcttcaaaaagccagcctactcctttttgcaaaccgtgcagggtactgagctggattatcagcaaacgcgctaccaacattttgatgcgccggggcgctacaaagacgatgtgaacggcgccgcctttagccaaatccgtttagactacctgcgccgccatgcccataccgcaacagggcagagcaacgagccgctgctgcgtgccggctataagtttgacctgcaagagcaccttgaccccgcgatgaaccgcgattgggtggtagtgtcgattaaccaccaaggtgagcagccgcaagcgctacaagaagacggtggcagcggcgctactacttacagcaatcagttcagcttaattccggggcatcttcactggcgcgccgagccacaacccaaaccgcaagtcgatggtccaatgattgccacggtcgtcggtcctgaaggcgaagaaatcttctgtgatgaacatgggcgggtgaaaatccatttcccgtgggaccgttactcgaacggtaacgagcaaagctcctgttgggtacgggtgtcgcaaggttgggcgggcagtcagtatggctttatcgctattccgcgcatcggccatgaagtgattgtagagtttttaaacggtgacccagaccaaccgattatcactggccgcacttatcatgcgaccaacacgccgccatacaccttgcctgagcacaaaaccaaaaccgtgctgcgcaccgagacgcaccaaggggagggctttaacgagctcagttttgaagaccaagcgggcaaagagcaaatctacctgcatgcgcagaaagattttgatggtttgattgaaaacgaccacaccacggtcattcgtcacgaccatcacctgaccgttgaaaacgaccaatttacccagattaagcacaaccaacacctgacggtggagtgggaaagtcgagaagcggtaacgggcgagcaagtgctgagtattgaaggctcgctgcatgtgaaaacaggcaaagtttgggtcaatgaagcgggtacagagatccatgtaaaagcgggacagaaagtggtgattgaagcgggctccgagattaccgttaaagcgggcggcagctttgtgaaagtcgatccggctggggtgcatctgtccggtgctttggtcaatctcaactctggcggcagcgctggtagtggtagcggctttggcggtgcaatgcccgccttaccgggcggcttagaacccgccgtggcactggctccaccgcaaaccatctcttaccaagcgttgctacaggccgagcaagcgaatgttcctgcggtgaaggtgtgtcctttagccgctcaagaagcaacgcctgcggtgaatagtatcacgccgcctccaccaccaccgattgctccgccaatggccccaccacaaccaataatgaatccacagccaaccgctaacgcgcagcctaatcttggaagatccactaaggcaacgccggattttccaacacatttcccgaagtcatccattggcattgagaatgagttagctggtctagtggtggctatgccagccaactcggcacagaaatttggctacgtgaaaagtgcacaaggtgatgcgctgtttatgttaacgaaagacatgaaccaaggttcgtatcagcggccaccttcattacaagatggaaaaaattatcagaattggcagacgcatacagtagagttggtgagctacccttgtgaaatggacgataaagctgccgttgaaacacgcaaacaagccatgttgtggttagcaacccactttactacgcatatcgaccagtccaatcatcaaccattagctcctattcaaagtgaagacggacgctttgttatcgaaatcactaatgcgaagcatgtgattgctgcgggcaatgggatttctgcagaatctcaaggtcaaacaatcacgatgacaccaagtggacaacaagccacagtgggtgttgctgctaaaggtttcgggacgagtgcaacgccagaattaaggttacttgaatcggcaccttggtatcagaaatcactcaagagccaatttgcatctctaacgagcgcagaaaacttggatgataaagagttagctgcaaacgtatttgcttatctgacgtctatttatttaaaaacagcagagctagcgaagaagtttggtatttacatcaatgaatgggaccccatgtcggagcaaattactccaaatgcgaatggattaacggatccaaaagtaaaaaatgcatgggaaatattgccacgtacaaaaccaagcaaaatagtagaaatactcagtaagagtgatgccaaagcggttatgaaacatatcaagcctcaattgcagtctcgctattctgagagtttgtcgaaaaatgtatttcaatatttccaagatggtggtgaagtagccggacacggtattaataatgcgacggtcggtgataaacatagtccggaattggcgattttgtttgagttcagaactgttccgaatgaactgcaaagttatttgcctaaaacagaatcgacaactaagtcagaagtgaagttactcgatcagtttgatcctatgaagcgtaaaacagtaattcaacaagtagaatcgcttgtgcaaaatagtggcgatgcatttgataaatggtaccaaagctaccgagactccatgaatcaacctcccgttaaaaatgcgaagaaaattgcttccgcgaatcaaaaagcacaatgggttaaagagcataatcctcaagaatggcaacgcattattgcttag

SEQ ID NO: 41098 - DNA, 1038 bp, Vibrio cholerae
atgaaaaataaactgtttgcgagtgctctgtgcgcagcagcattgttcaccaccaatgcaatggctaaagaccaagaactttatttctacaactggtctgaatatatcccgagcgaagtcctagaagactttaccaaagaaaccggaatcaaggttatctactctacctacgaatccaatgaaagcatgtatgccaagctcaaaacgcaaggcgctggttatgatcttgtggttccttccacttattttgtctctaagatgcgcaaagaaggcatgctgcaagagattgaccattcaaaactctcacatttcaaagacttggatccaaactatctcaacaagccttttgatccaggcaataaattctctatcccttatatctggggagcgacgggtatcggcattaacaccgatatgctggataaaaaatcactcaaaaactggggcgatctgtgggatgccaaatgggcaggtcaattaatgctgatggatgacgctcgtgaagtcttccatatcgccctgagtaagctgggatactcgcctaacacgaccaatcccaaagagattaaagccgcttaccgtgagttgaaaaagctgatgccaaatgtcttagtgtttaactctgacttcccggccaatccttacctcgctggtgaagtgtcactaggtatgttatggaatggctcagcgtatatggcccgccaagaaggcgcaccaatccagattatctggcctgaaaaaggcaccattttttggatggacagcatctcgattcctgccggagccaaaaatatcgaggccgcccacaagatgattgacttcttactgcgcccagaaaatgctgcaaaaatcgccttagaaatcggctatccaacaccagttaaaaccgcgcatgacctactgcccaaagagtttgcgaatgacccaagtatctacccaccacaatcagtgatagacaatggcgagtggcaagatgaagttggagaagctagcgtgctttacgatgagtatttccaaaagctaaaagtgaacgattaa

SEQ ID NO: 41099 - DNA, 1101 bp, Vibrio cholerae
atgacggaagtcattctgtttttctttgcaacgcccaaaagggcaacgtttagtttggagctaacgtcgatgaaaaaactggctactcttttagcaggtagcgcatgtgcgctttctctgttgtctggcacagcggcagcggaagataaggaactggtgtttatgaactggggaccgtatatcaatagcggtatcctagaacagttcaccaaggaaacgggaatcaaagtgatttactcaacttatgagtcaaatgaaactttgtatgcaaaactcaaaacgcacaatcaaggttatgatctggtagttccttctacctacttcgtggcaaaaatgcgtgatgaagggatgctgcaaaaaattgacaaatctaagctgagcaacttcaaaaacctagattccaactacctagataaaccttacgacccaaacaacgactactcaattccacacgttgtagcaattaccggtctcgcggttaataccgacatgtatgatcctaatgacttccaaagttggggcgatctatggaagcctgagctaaaaggtcaactgatgttgatggatgatacgcgtgaagtattccatatcgctctgcgtaaactgggttactcaggtaactcaacggacgacaagcagattgatgaagcgtatgccgagctacaaaagctgatgccaaacgtactggttttcaactctgataaccctgcagctccttacctttcaggtgaagtaggtcttggtatgctgtggaacggctcagcagcggcggcacagaaagaaggtttaccaatcaagctagtcttcccgaaagaaggcggtatcggttgggttgataacttcgccatctcttctggtgccaaaaacgtcgatgcagcacacaagatgatcgatttcttgttacgtcctgaaattgcagagcaaatttcacgcgacacaggttatctgactggcgttaaagcctcaaacgacaaattccaagatgtcgcgccactgttcccatctcaagaagatctggaccgtgttgagtggcaatctgccgttggcgataagacagtgaagtatgaagagtacttcatgaagttgaaagctggccaataa

SEQ ID NO: 41100 - DNA, 675 bp, Vibrio cholerae
gtgagtcctgattatttgggggcttgggtggtaggcctgctgggagcgggtcactgtttgggcatgtgcggcggcattagcgctttgcttacccttgatccgtctaaaagctcaccagcactgctactttattacaatctaggtcgcctgctgagctacgccttaattggcggcattgtcggtggcatcaccgcttcactgacagagctcattgatgttcaatccgccttagtgtggcttcgaattttcgcagctgtgttgatgattgtattaggcctttacatcggacgctggtggtttggactactgtggcttgaaaaagtcggccagaaaatctggcgatggatttcaccgctaggcaaaactcttttgccgctaaaaaaacagtggcatgcactacccttcggccttgtgtggggctggcttccttgtggtttagtctactctatgttgacttggtctgccgtggcaggcagtttctcacaaggggcacttattatgttgtcatttgggtttggcaccctacccgccatgctagccagtggctggggagccaataaattaatgcattggcaaaattcgcatttatttcgtcaatgcgcggcaatactggtgattgggtatgggctattcactgcctacgatgccgtaaagctgatgattaatctgggttaa

SEQ ID NO: 41101 - DNA, 1434 bp, Vibrio cholerae
atgcaaatgagccaagaaaagcagcttgaacaaaactacaactataccgtggtccgccaatttaccctggtaacaattctctggggtatcgtcggtatggctgtaggggttttgattgccgctcaattagtttggccacagctaaactttgatacgccgtggttgacgtacagtcgcttacgtcctctgcatactaatgcggtaatttttgcgtttggtacaagtgccctgtttgcaacatcatattatgttgtgcagcgtacttgccaaactcgtctgttcggtggaccgttagttccctttaccttttggggatggcaagcgattatcgtttccgctgcaatcaccttacctttgggttacacctcaggtaaagagtacgcagaactggaatggccaatcgacatcgccatcgcagcggtttgggtcgcttatgcggttgtgttctttggaaccctagtaaaacgtaaaacatctcatatttacgtggctaactggttcttcggtgcctttattattaccgttgcggtattgcacattgtaaacagtatggcgctccccgtttcgatgggtaagtcttactctatctacgctggtgccgtcgatgccatggtgcaatggtggtatggtcacaacgctgtaggtttcctgctcacggccggcttcctaggcatgatgtactactttgttcctaaacaagctgaacgcccagtctactcttaccgtctgtctatcgttcacttttgggctctgatttctctctatatttgggcaggtccgcaccatttgcattacaccgcactacctgactggactcagtctttgggcatggtaatgtctctcgtgctgttcgcaccctcttggggtgggatgatcaacggtatcatgactctttctggtgcatggcataagctgcgctatgatccgattcttcgtttcttgatcgtttctctgtctttctacggcatgtctacgtttgaaggcccgatgatgtcaatcaagaccgtcaatgctttatcccactacaccgactggacgattggtcacgttcactctggtgcgcttggttgggtagcaatggtgtcgattggttctgtttaccatcttatcccacgtctttttggacaagagcgcatgtactctgtcagtctgatcaacgctcacttctggttagccacgattggtacagttctgtacatcgttgcaatgtggatctctggcgtaatgcaaggtttgatgtggcgtgcagtgaactctgacggcacactgacatacagctttgtcgagtcagtgcaagcgtcatatccgttctataccgtgcgtttcatcggtggtttcatcttcttgtctgggatgttcctgatggcttacaacgcctataagaccatttctgcacctaaaaatagcctaaaagctattgtgcaaccggcataa

SEQ ID NO: 41102 - DNA, 13677 bp, Vibrio cholerae
gtggttttctatttaatccctaaaagaagagtttggcttatgggaaaaccattttggagaagtgttgaatacttcttcacaggaaactattccgccgacgatggaaacaacaacattgtagccattggttttgggggacaaattcatgcctacggcggtgacgaccacgtcactgttggatcgattggtgcaacggtgtacaccggtagcggcaacgatacggtcgtgggcggctctgcctatctcaaagtggaagattccactggccacctaattgtaaaaggcgcggctgggtatgcagacattaataaaagtggcgatggcaatgtgtcattcgctggtgccgccggtggtgtgtcgattgaccacttaggcaatcatggtgatgtcagttacggcggtgccgcggcttataatggcattacccgtaaagggttgagcggcaatgtcacctttgcaggcgcggggggatacaatgccctctggcatgaaaccaaccaagggaacctgtcttttacaggagcaggcgcaggtaataaattagaccgtacttggtctaaccgttatcaaggctcgcatggcgatgtgacctttgatggtgctggtgccgcgaacagcatcagttcacgcgttgagacaggtaacatcaccttccgtggcgcaggtgcggataaccatttagtccgtaaaggcaaagtgggcgatattactctgcaaggtgctggggcttcaaaccgcattgagcggacacatcaggccgaagatgtctacacgcaaacccgcggcaatattcgttttgaaggtgtgggtggttacaacagtctttactctgatgtggctcatggtgacattcatttctcgggtggcggtgcgtacaacaccattattcgtaaaggttctggaaatgactttgcgaaagaaggcatgaccaatgctaaggctgatgagattgtattaactaaggccgtgatgagtggctcatggatagggcaagatcatcatgtcacagcggtgaaatcggctagcgagcctaatacatatctttttgctttcgcagactctacgtataccaaaattaacaaagtacagttacgcaatgatcctcaaactggagaactgaaatattactctacggcttggtataaagaggttaaccatctaagcaacttagcgaatcaagacatttccgacaacggtggtttcacagccgttaatatcaatggcgcctacacgctatctgacctcaaagttgaacatcagcaatccgtcaccgttcatgcggttgaaaaaagcctgactgaatatgagtgggtgacttacgccaatggtgcggtgattgatgcgaaagaggtgtcattgtcggatgccaaaatgggcggtcatgcgatttatgctgatggcactaaggtggatgtcaaagcggtaaaatccaaccgccaacccaacacttacatttatgccaaagtgcttgggccttacacaaaaattgtggtggtggaactggcaaacgatcccgaaaccggggcactgaaatatcaagctcgctcttggtataaagaaggtgatcacacggccaatatagccaaccaagatatttcatctgcaactgggtataacccaatgggcaaaggtggctactcgctcagtgacttgcactacagcgtaaacgccgttagaagtaccagcgaaaccgtagcggatatcgaagaatacacagatcaaaccttgtttaaacccgcaaacgatagcggtgaaagctcaggtgatgttcgtttcaacggtgccggtggcggtaacgtcatcaaatcaaacgtgacgcgtggtaatgtgcatttcaacggtggcggtattgccaacgtgattttgcatagctcccaatttggtaataccgaatttaacggtggtggtgcggcgaacgtcattgtcaaaagtggcgaagaaggggatctcaccttccgcggcgcaggtttggcgaacgtcttggtacaccaaagcgaacaaggcaagatggatgtgtacgcgggcggtgcggtaaacgtgttggttcgccttggcgatgggcaatatctcgcgcatttactggcttacggtaacatttcagtccaaaaaggcagtggtgatagtcgcgtcgtgatgctcggtggctacaacacccatacccaaatcggctctggcaacggattatggttggccgcgggcggtttcaacgtgatgacgcaagtcggcaaaggtgatgttgctgcggtactcgctggcggtgcaaacgtactgaccaaaatgggtgagggtgaactcacgtcgggtatgctgggtggcgcgaacgtaataacccacatcagcaatgatgatcaattatcgaataccacggctgtggcacttggcggtgcaaatattctcaccaaaaaaggcaaagggaatacccttgcggtgatgggtggtggcgcaaacgtgcttacccatgttggtgatggcaccacaacgggtgtcatggtcggcggtgcgaacattctcaccaaagtaggtaacggcgacacgaccggcattctgcttggcgttggcaacgtgctgacgcatgtgggtgatggccaaacccttggcgtaatgggcgcggcgggtaacatcttcaccaaagtgggtgatggaacctctattgcggtcatgattggtgctggcaacatttttacccatgtgggggaagggaatgcttgggcgctgatgggcggcttgggtaacgtctttaccaaagtaggcaacggtgatgctctcgcgttaatggtagcagaagccaacgtcttcactcacattggtgatggcatgtcggtggcactgatgttagccaaaggcaacgttgcgacaaaagtgggtaatggaaccacactcgcggcgatggtggggaacgtcaacatctttacccatattggtcatggcagcacgtttgcggcgatgatcggccaagccaatatcatgaccaaagtgggcaatgatctcacggcggcgctgatggtcggcaaagcgaacatcatgacccatgttggcgatggtaccagcctagggctgtttgctggcgaagtgaacgtgatgactaaggttggtaacggcaccacgttagcggcgatgttcggtaaagcgaacatcatgacccatgtcggtgatggcttaaccggtgtactcgcactgggtgaagccaatatcgtgaccaaattgggtgatgatttcatgggggtggtggccgcggctaaagccaacgtcgtgactcatgttggtgatgctaccaccgcagccgtattggcgggtaaaggcaatatcctcaccaaggtgggtgaaggcaccacggtagggttgttgatttccgatgtcggcaacgtgatgacccacgttggtgacggcaccaccattggtattgccaaaggtaaggccaacctcattaccaaagtcggtgatggtttaggtgttaatgtcacttgggggcaagccaacgtgtttacccaagtgggcgacggtgatcgctataactttgccaaaggtgaagccaacctcatcaccaaagtgggtgatggccaagaagtctccgtggtgcaaggtgaagccaacatcattactcatgtgggcaatggcgacgactacactggcgcttggggtaaagcgaacgtcattactaaagtcggtcatggccaaaacgtggtactggcaaaaggtgaagccaacattgttactcaagtgggtgatggcgacagctttaacgcactttggagcaaaggcaacatagttaccaaagtgggcgatggtatgcaggtgacggcggcaaaaggccaagccaatatcaccaccaccgtgggtaacggtttaaatgtcactgctgcctacggcgatgccaatatcaacaccaaggtcggtgatggggtatccgtcaacgtcgcttggggcaaatataacatcaacacgaaagtgggtgatgggctcaatgtcgctgtgatgaagggcaaagctaacgccaatattcacgttggggacggcctcaacatcaatgcctcctacgcacaaaacaacgtcgccatcaaagtcggtaacggcgatttctatagtttagcggtggcatcgagcaataccagcagcaacaagctctctgccttgtttgataacatcaaacaaaccgtactcggtgtcggtggcagccaagccatcaactacttagtgcaaggcgatgaagcctcctcatccggcacgcataaaggtcgtggtgcgattgctacacctgaaatcaccaaactggatggtttccaaatggatgccattaaggaagtcagttctgacctcggtgatagtctcacgggcagcgtgactaaggttgatactcctgatctcaacaagatgcagcatgcgctcaatgttgatgattcttccgttcaagctccgaatctgattgtgaatggggattttgagctgggcgaacatggctggcaatctactcatggggttgaagcctcttatgcaggcagtgtgtatggcgtagagggtgaaggtcacggcgcacgtgtgaccgagctcgatacttataccaacaccagtctctatcaagatctggctaatctagcgcaaggtgaagttattgcggtgagctttgattttgcaaaacgcgcgggcctttctaataacgaaggcatcgaagttctttggaacggtgaagtggtattctcatcgtcgggtgacgagtctgcttggcagcaaaaaaacttaaagctgaccgcgcaggctggcagtaaccgtatcgaattcaaaggcacaggccacaatgatggactgggctacatcctagataatgtggtggcgacctcagagtcatcgcaacaagccaatgcaatccgtgagcacgcaacgcaaaacccagcagcgcagaatgctctatccgataaagagcgtgcagaagcggatcgccaacgtcttgaacaagaaaagcagaaacagcttgatgctgtcgcagggtcacaaagtcagttggagtcgaccgaccaacaagcgctagaaaataatggtcaagctcaacgtgatgcggtgaaagaagagtcggaagccgtgaccgccgagttggcaaaactggcgcaaggtctcgatgtgcttgatggccaagcaacgcatactggcgagtccggcgaccaatggcgcaatgattttgccggtggtctgctcgatggcgttcaaagccagctcgacgatgccaagcaactcgcgaatgacaagattgctgcagcgaagcagaccctgtctgacaataacagcaaagtcaaagaatccgttgcgaaatctgaagcgggtgtggcacaaggcgagcaaaatcgagcgggagtagagcaagacattgctgatgctcaagccgatgctgaaaaacgtaaagccgatgctttagcaaaaggtaaggatgcacaacaagcggaatctgatgcacatcatgcggtaaataatgctcaatcacgcggcgatcgtgatgtgcaattggcggaaaacaaagccaaccaagcacaagccgatgctcaaggtgctaaacaaaacgaaggtgatcgtcctgatcgtcaaggcgtgactggtagtggcctttcgggtaatgctcatagtgtggaaggcgctggcgaaacagacagtcatgtcaacaccgacagccaaaccaacgccgatggccgattcagtgaaggtttaaccgaacaagagcaagaagcgctagaaggtgcgaccaacgcagtgaaccgtttgcaaattaacgcaggtattcgagcgaaaaacagcgttagcagtatgacttctatgttctctgaaacaaatagcaagagcattgttgttcctaccaaagtctcgcctgaaccagagcgccaagaagtgactcgtagagacgtccgtatctcaggggtgaacctcgaaagtctaagtgcggtacagggaagtcaaccaacgggtcaactggcttcgaaaagtgtccccggatttaaaagccatttcgcatcgacatccattggtatagaaaatgagttatccggtctggtggtggttttaccgaaaaactcagcgcagacttttggctatgtgcatgattcacaaggtaacccattgttcatgctaaccaaggatatgaatcaaggtggttatagcaacccagtgggtatcaatgatattcaaggggtgaacaactggcagacgcatacgattgaactggttacatatcctagtgaaatcagtgatacagcagcggttgaaagtcgtaaagaggcaatgctatggcttgcgaaagagtttaccgatcatatcaatcagtctaaccaccaaagcttacctcatttagtgagtgatgacggtcgtttcactctggttatatcgaactctaagcatcttattgcggcgggtaacggaacctctattgatgcacaaggcaagaccataggaatgacccctagtggccaacaagcaacaatggcgatcagtgcgaaagaatttggtacaagctcgtcgccggaagtcagactgcttgaatctgcgccttggtatcaagcagggttgagagatgagtttttagcaaacgcgaaaaacaccacgttggatgatcccgctacagcacaaaatgtgtatgcctatctcacgtctgtctattcaaaaacagcagatttggccaaagagtatgggatctacatcaatgattgggatcctgcctctgaaggtttttcaccgaatgctcaagggttaacggatccgaaagtcaaaaatgcttggagcatattgccaagaactaaacccgttagaatgctggaacttctgagtgcggaagactcacgctacgtaaggcaacaaattgcggaaaagctgaaaggcacctattcagaaagccttgctaagaacgtgtttgaatacttccaatatggtggagaagtcgctggacatggaatcaataatgcgacgacaggaagtgtgcaacagcctgaaccagcgatcttatttgagtttcgcagtgtaccgagtgcattaagtgactttgtacccaaaacagcgtcaacggtgaaagtggatgttaaggcactcgatcattttgactcggcaagccgtaaagccatcattactgaagtaaatgctttggttagcggtagtgaggatttcgatgcttggtatcaggagtatcgagcaagcaaaggacagccgccagtcaaaaatcctaagtccagtgcatccgccaatcacaaagctgaatggttgatgacgcagcatgctgaacaatgggcgaaaattaccgctccttatactgataaccatgagacgctcacatctaccaagcttgcttctaacgataaagaagaattacacgctttaggtgaaacgtcgaatctagagaataacaagcagcaagaaaacgtcgcttccataattaacaccatgttaaatgacatgctgccattctatgcacttcgtaccgaacgaaatctactggtacaagaaggagatgaaggcttcgaagtgcgtgcttggccaggaaccgaagacaagagtaaaaccattattcttgaggatcctgaagacgcggctcagcacaaagccatcgaacgcttcattctggccaacttcgataatttcgaacaaatgccagacgagctcttcttggtggataacaaagtgatttcacaccatgaaggtcgtacacatgtgttggcgcaaaaagtcgatggtgcatggcaatacaacgccacagtcgagctgatgtcagtcactgaactactggatgcggcgaatgtaacgggtaagatccgcggtgaaagctatcagcaagtgatcgacgcattgactgattaccacgccagcatcactgagcacgcagattatgaaccggagtccgtggaaaaactgctcaacttgcgtaaaaaaattgaaggttatgtactcggacacccagactcaggccgtgttgaagcgatgaattcactgttaaatcaggtgaatacgcgtttagatgaagtttcactgctgtcagttgctgagcaaactatccaagcgcaaaacagtttcagccgactatatgaccagctagaagccgctaacttgaaagagagtaagcacctttatctggatcaaaatggtgactttgttaccaaaggcaaaggtaatcttgccaatatcgatctgctaggtagccgcgaagctgtgcttgaaaaagtgaagttaacagtaagtaacgagtacggtcaaaccgttgcggatacaatttttgctggattatcagccaaagatcttgccaaagacggtaaaggggttgatatcgcgggtttgaataaagtacatcaagcgattgaacagcatctgtcacctgtcagcgccacgttgtacatttggaaaccgagtgatcatagcgcgctaggtcatgccgcattgcaaataggccaaggtcgcacgcaacttgaaggtcaagctgcagctgattttaaccagcaaaattacgtaagctggtggccactaggcagcaagtcatccaatatcagcaatatcttgaatgtggccacaaaagaccaacctgatcttaagctgcgctggagcgacttcagtcaacctgcacatcaaaatgacacgcttgagcatgatgttgcttcggaagaaaacgatggctttggtttgcatgatggcgacattaagctgaaacgctttatcgagaagctcaatgccgcgaaaggaattgacgcttcatttaaagaggcttctgaaggttacgcgagcgtactactgggtaacccagatatgctcgaaacgacaagtattcctgcacatgttttccaaccatttgtcgaacaatggaatgacaccagttatgacatgatggacgtggcacaccgttttgcgcaagagctcagactacaggctcaaagaagtgacgatcccgaactgcttgaaaagcgcatcggcaatgtgattcgccaatttgcagaaagagcactggaagagatcgaaaccttcaaagcaagccaagccgatcaaggtcgagtattccgaattaaccttgaaggcctcgatgtggcggcaatgcaagcagaatggcatcgtctaagcaacgatccggatgctcgttatcaattactgaccaaaaactgctccagcacagtggctaaagtgttgaaagccggcggggcggataaactgattggccatacatggctgcctaagtttggtgtttggacgccgaccgagcttttcaactttggtcaggcactgcaggaagctcagctggaaattgccgcgaagaagcaaagtcatcaagtcactgatgtccttgatgccttgtcaggcaatgagaagcctaaagaaaacgtggcgattgaaaatgatggtacgccaccgcgcgataaagaatctctgagcccattgactcgattcctcaataacgagttgtatggtgataaagaggctcgccgtaagattggcgaaatcacgcaaaccctacttgatcacgcggtggaaaaaggtgaatcgcagaaaatcactctgcaaggagaagcgggccgtctaacggggtattaccatcagggaacagccccaagcgaaggtgaaacgagctcgccaagcggcaaagtcgtattgttcctgcacggttctggttcttctgctgaagagcaagcgagcgcgattcgaaatcactaccagaagcaaggtatcgatatgctcgcagtcaacctgcgtggctatggtgaaagcgacggtggaccaagcgaaaaaggcttgtaccaagatgctcgcaccatgttcaactacctagtgaatgataagggtattgacccaagcaacatcatcattcacggctactcaatgggcggtccaattgccgcagatttagcacgttatgccgcgcaaaacggccaagcggtgtctggcttattgcttgaccgtcctatgccaagcatgaccaaagcaatcaccgctcacgaagtggcgaatccagcgggcattgtgggggctatcgcgaaagcggttaacggccagttctctgtagagaaaaatctcgaaggtttgccaaaagagacatccattctgctgttgaccgataacgaaggtttgggtaacgaaggtgagaaacttcgtaccaaactcactgcctctggttacaacgtcactggcgagcagacattctatggtcacgaagcaagcaaccgtttgatgagtcaatatgcggatcaaattgtctccggtttgtccagcagtgcaagtgtagatgaagacctagatcaacaagggttggataccacatcaaccaaggatcaaggtatctcaaataagaatgatcatctgcaagtggtggatagtaaagaagcattagcggatggaaaaatactccataatcaaaatgttaatagctggggcccgattacggttacaccaacgacagatggtggtgaaacccgcttcgacggtcaaatcatcgttcaaatggaaaacgacccggtagtagcaaaagcggcagccaatttagcaggtaaacatgctgaaagcagtgtggtggtgcagctcgattcagacggcaactatcgcgtggtgtatggcgatccgtcaaaactggatggaaagctacgttggcagttggtggggcatggtcgcgaccactcagaaactaacaatactcgcttaagtggttacagtgccgatgagttggccgtgaaattggccaagttccaacagtcgtttaatcaagccgaaaacatcaacaacaaaccggatcacatcagtattgttggttgttctttggtgagtgacgacaagcaaaaaggctttggtcatcagtttattaacgcgatggatgcgaatggtcttcgtgtcgatgtctctgttcgtagttctgaactggccgtagacgaggcgggacgtaagcataccaaggacgcgaatggcgattgggttcaaaaggcagaaaacaacaaagtttcgctaagctgggacgcgcaaggtgaagttgttgccaaggatgaacgtattcgcaatggtattgcggaaggcgacatcgatctctctcgtattggtgtcaacaatgtcgatgaacctgctcgtggcgcgatcggtgacaataatgacgtgtttgatgcgccagaaaaacgcaaaccagaaacggaagtgattgccaattctagcagcagtaatcaattcagctactcaggtaacattcaagttaacgtgggcgaaggggagtttacggcggtgaactgggggacatcgaatgtgggcattaaagtcggtactggtggctttaaatcgctggcctttggtgacaataacgttatggttcatatcggtgacggtgaaagcaaacacagtgttkatatcggtggctatcaagcactggaaggtgcgcaaatgttcctcggtaaccgtaatgtgagctttaatttcggacacagtaatgatctgatcctaatgatggataagtcgatcccaactccaccactcgtcaatccattcgacggtgccgcacgtatttctggtgtgttgcaaggtattgctacgtctggagagggagaagattggcttgccgctcaagagcagcaatggacactgtctggcgcgaagaagttcgtcaaagatatgtctggtttggatcaaagtagcagtgtggattacaccacattagttgaattggattcacaaaatgaacgtgatagccgtggcctgaagcacgatgcagaagcgacactgaataagcaatacaatcagtggctaagcggtaacggtaatagtggcacgagtcagctcagccgcgctgataagcttcgtcaagccaatgaaaagctagcatttaactttgccgtaggtggacaaggggsggatattcaagtcacsacgggtwactggaactttatgttcggcgataacattcagtcgattttggataccaacttaggttcactgtttggtctcatgacgcagcagttcaccgcaacgggacaagcaaaaaccaccttcacttatacgccacaagatttgccgcgccagctcaagaataagctactcggccagttagctggagtaggggctgaaacgacattggcggatatttttggtgtggattacaccgcgtcaggtcaaattgtttcgcgtaatggtcaagccgtcgatggagtggcgattctcaaagagatgctggaagtcatcggtgagttcagcggagatcaactgcaggcttttgtcgacccagctaagttactggatagcttgaaagcgggtatcgacatgggagcggatggcatcaagtcttttgctgaaactcatgggctgaaagagaaagcgcctgaagaggaaaaggacaattcttcggtttctgttaatggtgcgaacgtgaacagtgcgcaaggtgcgactgtggctgatggcaatactgaaacagcagaaacacaagatcgtgcctttggctttaactcgcttaacctgcctaacttgtttgcgactattttcagccaagataagcagaaggaaatgaagtcactggtggagaatcttaaacagaatctcaccgccgatctgctgaatatgaaggagaaaacgtttgatttccttcgtaatagtggccatctccaaggagatggtgatatcaacatctccctaggaaactacaacttcaactggggtggtgatggtaaagatctcggtgcgtatctcggagataacaacaacttctggggtggacgaggcgatgatgtgttctacgcaacaggcaagtcaaacatcttcacgggtggagaaggcaacgacatgggcgttctgatggggcgtgaaaacatgatgtttggtggtgatggcaacgacacggcagtggttgctggacgcattaaccatgtcttccttggtgctggtgacgaccagtcgtttgtctttggcgaaggtggtgaaattgataccggttcaggccgtgactatgtggtgacttctggcaacttcaaccgtgtggatacgggagatgatcaagactactccgttacgattggcaacaataaccaagtggaactcggagcaggtaatgactttgccaatatctttggtaactataaccgtatcaatgccggtgcgggtaacgatgtggtgaaactgatgggttaccatgccgtgctaaacggtggtgatggagatgatcacctgattgcaacggccatctctaagttcagccagttcaacggtggtgaaggccgtgatctgatggtacttggtggttatcaaaatactttcaaaggtggcacggatgtggacagctttgtggtgagcggtgatgttatcgacaaccttgtggaagacattcgcagcgaagataacattgtcttcaatggtatcgattggcagaaactgtggttcgagcgcagcgggtatgacctgaaactgtcgattttgcgtgatccgtctaacgacagtgaccaatcgaagtttgagcatattggttcggtgacattcagtgattactttaatggtaaccgcgctcaagtggttatcggaatgagtgagaaagacctgtcgggtgaacgtgaatacaccatgttatcggatagtgcgattgacgctctggttcaagcgatgagtggttttgaaccgcaagcgggtgacaatggctttatcgacagcctagagagtaaatctcaagctgcgatcagcatggcgtggtcagacgtggttcacaaaaaaggattgatggtgtaa

SEQ ID NO: 41103 - DNA, 1920 bp, Vibrio cholerae
atggcattaattaccatccataacggtttgctggcctttggcgatcacccattactggatcacgctgatttcgccttacaagaaaatgaaagagtgtgtctggttgggcgtaatggcgccggaaaatccacgctgatgaaagtactcgcaggcgagattctgctggatgatggcaagatgcaagtcatgcaagatgtcgtcgtatcccgtttagagcaagatccgcctcgcaatcaagcgggtactgtatttgattatgtttcaggtggtctgcaaggcattggcgaacaactcaagatctatcaagatcaattagatctcgtagcaacagatccaagcgaatccaacattaataagcttgcacatatccaagagcagcttgaagtttctggtgcttggcgctttgaagatcgaatcaaaaatgtgctgggttccttaaaactagatggccacaccaaattaaccgacctgtctggtggttggcagcgtaaagctgcattagcgcgagcgctggcgtgtgatcccgatgtcctgcttcttgatgaaccaaccaaccacctcgatgtaacaacgattgaatggttagaaggttttctgaaagatttccgaggttctatcattttcatttcccatgaccgtgcttttattaagtctatggcaacccgcattgtggatctcgatcgcggtcaactcagctctttcccaggagattatgaaaattatcttactgaaaaagaagagatgctgcgggttgaagagctgcaaaatgccgagtttgataaaaagctcgctcaagaagaggtttggatccgtcaaggtattaaagcacgaagaactcgtaatgaaggacgagttcgggcactgaaacgtcttcgtcaagaacgtagtgagcgtcgtgaagtgcagggtaaagttaacctgcaaatcgatgattccaatcgctcagggaaaatcgtttttgaagccgaaaatcttcattactcgatcggtggcaaaaccattgttgatggtttcagcttcaacatcatgcgcggtgaccgaattgcgttaattggtcctaatggttgtggcaaaagtaccttactcaaaattttgctgggtgacttacagcccgatagcggcaaagtacactgtggtactaagcttgaggtcgcctactttgatcaatatcgggagttactcgatcctgaaaaaaccgttatcgataacttagcggatggtaaacaagaagtgatggtaggcgggcgtcttcgccacgcgttaagctatctacaggactttttgttctcacccaagcgggcaagaaccccagtaaaagcgttatctggtggagaaaaaaaccgtttgctgcttgcgcgcattttgcttaaagccaacaacctattagtgcttgatgaaccaaccaacgatttagatatcgaaactttggaacttttggaagaattgcttgccaattaccaaggcactttattgctggtcagccacgatcgtgaatttgtcgataacaccgtcacctcaagttggatttttgaaggcgacggcaagattgaagaatttgtcggtggctaccatgacgctcagcaacagcgtgcccaagttttacaaagcagagctgctgaaaatatcgtcaaaaaagaaaaagtggttgaggagtctcccaaatccgcaccatcgaaaactaagcagaagaagttatcttataaactgcaacgcgaacttgaagctcttccgcaaagattagaagagctggaagttgagatcgcagcgttacaagacatcgtcaatagtccagactttttcagtcagcctgtcgataaaacgcaacccattttagacaagttaactgcaacagagcaggaactcgaaattgcttttgagcgttgggaagagcttgaagcgatgcaacaggaaagtgaatag

SEQ ID NO: 41104 - DNA, 4842 bp, Vibrio cholerae
atgactgcgcgtgaaactttgatgccagttttgcttgaaaaagtttatcaactgattcaagacaaactagagcttgctcaacaacccttagtgactcaacttggacaacacctgttcagtaacatttcacaagacgacctagtggagcgtaacgaatcggatctttatggtgcagtgctcagtttatggcaccacatcaatgagaaaaaagccgatgaacgctcagtacgagtatttaacccaacggtaagtcgccaaggttggcaatcgacccacaccattgttgagattgttctcccagatagtccctttctggttgattcaatcaaaatggcattaagccgcctaggattggcatcgcacttaatgctcaacggacctgctcatattgcacgtcacgacgatggctcgatcaaaagcattaatcaaggagaagggcaactgacctcaatgttccacattgaagtcgatcgcctaagcagcaaggaagagatgacagagctgaaaaacgaattgctggatatcctgcatgacactgctctggttgtgaaagattggaaaccgatggcgaccaagcttgaacaagtgatcaatcagctggaagcggataaaaaacagatccctgtagaagccgaacgcctacaagaaaccattcagtttttacgctggctaggtaaccataacttcacctttatgggttacaaagagttcgatttggtagagaaaaatggcgataccgaactgacgccaaccaaagacaccggacttggcttattctctgacaatgagcgagtacgtagcgtaaaactttctcaattcccagattcagccaggctcgaagccaaaaagcctttcctgttgatcttaacgaaaggcaacaagcaatcgcgaatccatcgtcctgcttataccgactatatcgggatcaaaaagtttgacgcgaaaggcaaggtgatcggtgagcatcgctttactggcttatacacttccgctgtgtacaaccaaagtgttgaaggcatcccgctgatccgcgaaaaagtagggcgcattcttgcggccagcggctaccgccaaggctcttacgcctacaaagccctgcacaatattcttgaaaactacccacgcgatgagttgttacaagcccgtgaagaagagctgcttgaagtaggcatgggcgttgtacagatgcaagatcgtgatttactgcgcctgtttgtacgtaaagacccattcggacgtttcttcagttgcatggtgtatgtgaccaaagagcgttacaacactgagctgcgccgtaagacacaacaagtgttcaaacagtattttggctgtgagcaagatgttgaatttacaacctatttctcagaaagcccactggcgagaactcactacattgtgcgtgtcgacaataacaacatcaacgtagatgtgaaaaagatagagcagaatttaatggaagcctcaacctcgtgggatgatcgtctcgcagaagccattgtcgccaatttcggtgaaagtcgtggattaccgctgtcaaaagagtatcaacgtgccttcccacgttcttacaaagaagatgtgatgccgggctctgcactggcagatatcgagcacctcgaagcgttagatgagcacaataaactgggcatgctgttctaccgtttacaagagacagccaaagactccaaagcggtgcgcttaaagctgtatcacaaagacgaacccatccatctatcagacgttatgccgatgctagaaaacctcggcttacgcgtgattggtgaatcgccttatgaagtagtgaaagccaatggccaagtgtactggatccttgatttctctatgctacataagagtgataagcaggtggatctgcgtgaagcacgcgaccgattccaacaagcgtttgccgctatctgggcaggagagctggagagtgatggctttaaccgtttgattttaggtgcatcactgtcaggtcgtgaagtttcgatcctgcgtgcttatgcgcgttatatgcgtcaagtcggcttcccatttagccagcactatattgaagatacactcagccaccatcccgatcttgcacaaggattggtggatcttttcgtgcgtcgtttcgatccgaaatacaaaggcggagaaaagggccaagctgaaatcatcaaatctctgacagagcaattagatcaagtacagagtctcgacgatgatcgaattatccgtcgctatatggagatgatcaacgcgacgctgcgcaccaactactatcagttggatgagcacaagcagaacaaaccttggctatctctcaaaatgaagccaagtgagatccctgaaattcctgcaccagtgcctgcgttcgaaatcttcgtctatgccccagacattgaaggggtgcatttgcgcggtggtaaagtcgctcgtggtgggctgcgttggtctgatcgccaagaagatttccgtactgaaattttaggcttggtcaaagcacaacaagtgaaaaatacggtcatcgtgcctgttggtgcaaaaggtggctttgtttgtaagaaacagtatctctacaccacacgcgatgagatttttgcagagggccaacgctgctacaaacgctttattcgcgctttactcgacgtaacggataacattattgaagggcaagtggttccgccgaagaacgtggttcgtcatgatgaagatgacccttatttggtggtggctgcggataaaggcaccgcaaccttctctgatttagcaaactcagtgtcagcggaataccaattctggctcggtgatgcttttgcttcaggggggtcaaatggttatgaccacaaagcgatgggcattaccgccaaagggggttgggaatcggtaaaacgtcatttccgtgaaatgggcattgattgtcaaaccaccgattttaccgcgattggcatcggtgacatggccggcgacgtgtttggtaacggtatgttgttatcaaaacatattcgcctactggcggcctttaaccatattcatatcttcattgatccaaccccggattctgcgagcagttgggaagagcgtaaccgcttgtttaatctgcctcgttcaagttgggaagattacaatccgaagctgatttctaaaggtggtggtgtcttctcgcgtaaagcaaaagcgattacgctgacgcctgaaatgcagaagatgctcaacactaaaaaaaccacgttggcacccaatgagttgatcaaaatgatcctgaaaatggaagtcgatctcctctggaatggtggcattggtacctatgtgaaatcatccattgaaacacataccgatgtcggtgaccgagccaatgacggattacgtgtcgatggacgtgaagtaaacgctaaaatcatcggcgaaggcggtaaccttggtatgactcagcgcggtcgtatcgagtttgcactcaaaggtggacgcgttaacacggacttcgtggataacgtcggtggcgtagactgttccgataacgaagttaacatcaagatcttcctcaatggcttggtggctaatggtgatttaacactcaaacagcgcaaccagatccttgagtcgatgaaagatgaagtaggaagcatcgtgattgaagatgcttatggacaatctgaatcaatttccgtgaccgaagcgcagggcgtatcactcatgaaagaacagatccgctttatccatcacatggaaaaagcggggtatttggatcgtgctttagagcacattccggatgatgaaactctacttgagcgtgaaagacagggcatgggattaacacgtcctgaactttcggtgctgatggcctacggcaaaatggcgttgaaagaagaattggccagtgaagagattgcgcaagatgaattccatgccaaacaattggttaattacttcccaactgagttacgcggtcactatgcgcagcagatggtgaaccatccgctacgagtagaaatcatcgcgacagccttagcaaaccaaatggttaatgaaatgggctgcaacttcgttacgcgtttacaagaagagaccggctctagcgtggtcgatattgcgaatgcgtatgcggccgcgcgtgagatttacggtttaggtatcgtgctcgaaaaagtacgcaaactggacaacatagcgcaaagtagcgcccaatatgatgtcatgttcctcgtgcgtcgcactttgcgtcgcctgactcgctggttactgcgcaaccgtacaggtaagccatccgtgatagcaatggtcgaacgctatcaagaggatgtcaaagctatcaccgaacaattggataaagttttggtgaaagaggagattgttgagcataattctatggctgaaaactggatagagaagggcatcgagaaagaacttgcgcattatgtggcgcgtctttctagcctttactctgtactggatatctcagccgtggcgaaagagaaaggcatcgcagtcactcaaacagcgaagctttattttcatctcggcgatcgtttatctctgcactggttcttgaagcaaatcaaccaccaagccgttgataaccattggcaagcattagcaagagcctctttccgtgaggatctcgattggcagcaacgccagttaactgctcaagtgctcagtagcaatttgagtgatgctcaacaggaaattgaactggcacttgataaatggctagagcgtaaccaagtctcaataagccgttgggagaacatcctcagcgagtttaaagtcggtaccgttcatgaatttgccaaattctcagtggcattgcgagagttgaccttgctcaacttaaattgtctcactgtagaataa
